United States Patent Application Publication US 2025/0084491 A1 - sequence listing, part 8

SEQ ID NO: 136547 - DNA, 75 bp, synthetic construct
  source 1..75: mol_type = other DNA
gtctgcaccgcctgcggtcagaccagcggcggcaactgccctgattgtggctcagtaatgggtgacgcaacatac

SEQ ID NO: 136548 - DNA, 75 bp, synthetic construct
  source 1..75: mol_type = other DNA
gaaaatggaaggcgctgaacatccacacaaggagaatgctggcagcgctcaggaccacgccagcgatagtgaaac

SEQ ID NO: 136549 - DNA, 75 bp, synthetic construct
  source 1..75: mol_type = other DNA
aaatgggtgaaggggattgaaacccgcgattctgtgcaccagaaccagtcagaaacggaacagtacgaccaaaaa

SEQ ID NO: 136550 - DNA, 75 bp, synthetic construct
  source 1..75: mol_type = other DNA
ggatactgctggcggagtcattgatcgtgacgtcattaaatggtggctgaagcaatcacgtgaagcgcagtctgc

SEQ ID NO: 136551 - DNA, 75 bp, synthetic construct
  source 1..75: mol_type = other DNA
tcacatccaccagcagagtatggaatcacctgtcagtcgaccttgaaacaatgggagccaacaccaatgcaccca

SEQ ID NO: 136552 - DNA, 75 bp, synthetic construct
  source 1..75: mol_type = other DNA
ctattcctgatgaacaggccataaaggaagatggtgctgttgctgtggccactgccattgaagctggtgatgagt

SEQ ID NO: 136553 - DNA, 75 bp, synthetic construct
  source 1..75: mol_type = other DNA
atcacaaaagaagaatattttgcccgaaaaaatggcacatacacgggcttaccgcaaaatgtagataccgctgaa

SEQ ID NO: 136554 - DNA, 75 bp, synthetic construct
  source 1..75: mol_type = other DNA
ctgcccgtggcgctacagcaacgatcgcgatgtacgcacaatcgttgagctggggaaagccatagacttcgatgc

SEQ ID NO: 136555 - DNA, 75 bp, synthetic construct
  source 1..75: mol_type = other DNA
agttcaggaagatgatccggaggaaatggaaggcgctgaacatccgaacaatgagaatgctggtaacgatcagca

SEQ ID NO: 136556 - DNA, 75 bp, synthetic construct
  source 1..75: mol_type = other DNA
tggatactgctggcggagtcattgatcgtggcaccattaaatggtggcttaagcaatcacgggaggcgcaatctg

SEQ ID NO: 136557 - DNA, 75 bp, synthetic construct
  source 1..75: mol_type = other DNA
cagagcggtggcggcaactgccccgattgtggcgctgtcatgggcaacgcaacataccaggaaacattcgatgaa

SEQ ID NO: 136558 - DNA, 75 bp, synthetic construct
  source 1..75: mol_type = other DNA
cgcggtgatgggcgacgcaacataccaggaaacattcgatgaagagtatcaggttgaagttcaggaagatgatcc

SEQ ID NO: 136559 - DNA, 75 bp, synthetic construct
  source 1..75: mol_type = other DNA
gcctggatgatctgctgggaatgtacgtgactggccgtgacagggaaacccgcgaatggctggggctggggccat

SEQ ID NO: 136560 - DNA, 75 bp, synthetic construct
  source 1..75: mol_type = other DNA
tgtcaccaaaagcccttatgttggagataaaggaggggccatttgacccactgaaagctaaggctttttctaagt

SEQ ID NO: 136561 - DNA, 75 bp, synthetic construct
  source 1..75: mol_type = other DNA
gcaatcggaacgtttacgttcccaccttatgatgcacggctcgcatcaagaaaaggtacagcgtttacttattgc

SEQ ID NO: 136562 - DNA, 75 bp, synthetic construct
  source 1..75: mol_type = other DNA
tgggaagagcagggccgttgtatcagcctggacgatatcctgcgtcgtgctgatgtggtgacggtggggattgac

SEQ ID NO: 136563 - DNA, 75 bp, synthetic construct
  source 1..75: mol_type = other DNA
tgaactgtggctgtttggcaagcagtacaaagcggaggacatgttacgtgaagccatcggcgggcttgcctcccg

SEQ ID NO: 136564 - DNA, 75 bp, synthetic construct
  source 1..75: mol_type = other DNA
accggtgttcgccatatcaaggaagtgtttatccttatccccaagaaaaacagtaagtccacgctggccgcgggg

SEQ ID NO: 136565 - DNA, 75 bp, synthetic construct
  source 1..75: mol_type = other DNA
ggttattcactgacgcaatccgccggaattccgcagtggcagtctgaattcgacatgccgtggatcccgcgtttt

SEQ ID NO: 136566 - DNA, 75 bp, synthetic construct
  source 1..75: mol_type = other DNA
gatttactttgaccagaacggtgcgctctgccggcgtcttggcattgatcaggttccggcacgggtgacagccgc

SEQ ID NO: 136567 - DNA, 75 bp, synthetic construct
  source 1..75: mol_type = other DNA
acccatatccggaccatcacccacagggtgacggacaccacccttaaggtggtggctgccgatccgaatacggtg

SEQ ID NO: 136568 - DNA, 75 bp, synthetic construct
  source 1..75: mol_type = other DNA
cagagtttgcgccaatcgccatgtggctgggtgttatcggcatcttctacggtgcgtggatggccttcgcccaga

SEQ ID NO: 136569 - DNA, 75 bp, synthetic construct
  source 1..75: mol_type = other DNA
tacccgcgacatgcgcatgatgggcggtctgtggagcaagatgaaatggctgccagcactgtcactgttctttgc

SEQ ID NO: 136570 - DNA, 75 bp, synthetic construct
  source 1..75: mol_type = other DNA
tggtgtggaatatctgttgatgctgggcttcttcatcgcgtttgcggtgaaaatgccggtggtaccgctgcatgg

SEQ ID NO: 136571 - DNA, 75 bp, synthetic construct
  source 1..75: mol_type = other DNA
atgaaaatcaagcatgagcatatccgcatggcgatgaatgcctgggcgcgtccggatggtgaaaaagttccggca

SEQ ID NO: 136572 - DNA, 75 bp, synthetic construct
  source 1..75: mol_type = other DNA
tccccgcgtagatggcattcgcaagcctgccacacctttattaccaggcactacgctggcgagttttttaccctt

SEQ ID NO: 136573 - DNA, 75 bp, synthetic construct
  source 1..75: mol_type = other DNA
gcccgtaatacccagaaaattttccgttggctggataaagacacccctgatgctgttgaaaaaatgcaggctctg

SEQ ID NO: 136574 - DNA, 75 bp, synthetic construct
  source 1..75: mol_type = other DNA
tctgaacggtgaaaaagttccggctgcgaaaattaccaaagcgtatttcgaactgggtatgacgttcccggaact

SEQ ID NO: 136575 - DNA, 75 bp, synthetic construct
  source 1..75: mol_type = other DNA
ggctgggcctcacccttgcagtgaaagaaagcgcatttctgctgtggatcttagcggcagtattgagcgaaaaac

SEQ ID NO: 136576 - DNA, 75 bp, synthetic construct
  source 1..75: mol_type = other DNA
tctgctgctgatgctgttactcgccgcctacgttttgctgagctatctgctatggcgcagctggcggcgcactat

SEQ ID NO: 136577 - DNA, 75 bp, synthetic construct
  source 1..75: mol_type = other DNA
gtctaatagcgagggtaatcctgtgatgatcatcgctggtgtttctcgtcctaccgatacttttgccattgtagg

SEQ ID NO: 136578 - DNA, 75 bp, synthetic construct
  source 1..75: mol_type = other DNA
gagctggtgaggagcatttcgtggcttcatgtcaaaacatgccaatgtggaaattggtcttgccctgcgttctga

SEQ ID NO: 136579 - DNA, 75 bp, synthetic construct
  source 1..75: mol_type = other DNA
gcccggactgggcagagcgcctgaaaaaggggctgtcgattattccggctccgatttacccggagcaggccgcac

SEQ ID NO: 136580 - DNA, 75 bp, synthetic construct
  source 1..75: mol_type = other DNA
aaccgcaggtgctgctgtttgatgaaccaaccgccgcgctggacccggaaattaccgcgcaaatcgtcagcatta

SEQ ID NO: 136581 - DNA, 75 bp, synthetic construct
  source 1..75: mol_type = other DNA
gctgttcgatatcacgctggattgcccgcagggcgaaacgctggtgttacttggccccagcggcgcggggaaaag

SEQ ID NO: 136582 - DNA, 75 bp, synthetic construct
  source 1..75: mol_type = other DNA
cttgagatgccgcgctccggtacgctcaacattgcaggcaaccatttcgatttcaccaaaacaccctctgacaaa

SEQ ID NO: 136583 - DNA, 75 bp, synthetic construct
  source 1..75: mol_type = other DNA
ttaaggagcgggtgatccggaacagtctgcggccccctgccgtgcccggtatcggacgcaccgagaaatacggta

SEQ ID NO: 136584 - DNA, 75 bp, synthetic construct
  source 1..75: mol_type = other DNA
ttaaggagcgggtgatccggaacagtctgcggccccctgccgtgcccggtatcggacgcactgagaaatacggca

SEQ ID NO: 136585 - DNA, 75 bp, synthetic construct
  source 1..75: mol_type = other DNA
tgtcaaaacacgccaatgtggaaattggtcttgccctgcgctctgaccgctgggcgggggctgatttctgggaag

SEQ ID NO: 136586 - DNA, 75 bp, synthetic construct
  source 1..75: mol_type = other DNA
acgccgcccacactggagagcaaaattatcctcgtgcagggcagtatcccggagatgcagaagtctctggacagc

SEQ ID NO: 136587 - DNA, 75 bp, synthetic construct
  source 1..75: mol_type = other DNA
atttatcgtctttgccagagcaggtgagggttgccgccagggagcttgttgacctgaagtttcgtatcgatatgg

SEQ ID NO: 136588 - DNA, 75 bp, synthetic construct
  source 1..75: mol_type = other DNA
gaagggcgggtgtttgcccgtcagggtgaagtgatgaatccgctgcagtatgtgccttttaaccagacgctgtat

SEQ ID NO: 136589 - DNA, 75 bp, synthetic construct
  source 1..75: mol_type = other DNA
tctggacataacgttgttggcgtgtttacccaacccgaccgaccagcagggcgcggcaaaaagctgatgccaagt

SEQ ID NO: 136590 - DNA, 75 bp, synthetic construct
  source 1..75: mol_type = other DNA
gagatgccgcgtttaggttgcatcaatgttcatggttcgttgctgccacgctggcgcggtgccgccccgattcaa

SEQ ID NO: 136591 - DNA, 75 bp, synthetic construct
  source 1..75: mol_type = other DNA
ctttcggcagcacagcttgaacgctgcattcgcgctttcaatccatggccaatgagctggctggaaattgaagga

SEQ ID NO: 136592 - DNA, 75 bp, synthetic construct
  source 1..75: mol_type = other DNA
ctgctgatggaaaacctcgccatggttaacccgaatctcggttattcggtggatgaggcctttctgtaccgggag

SEQ ID NO: 136593 - DNA, 75 bp, synthetic construct
  source 1..75: mol_type = other DNA
aaaaggatgaagaatacgcacaggaaacgcgccgtcagctggatgatatccggagccgcctgaacggaataatga

SEQ ID NO: 136594 - DNA, 75 bp, synthetic construct
  source 1..75: mol_type = other DNA
acacaagaatcatcaccttccgttcagtccactgagactatgactgtccggacaggagaagatatgagccagctt

SEQ ID NO: 136595 - DNA, 75 bp, synthetic construct
  source 1..75: mol_type = other DNA
tgtgccttttaaccagacgctgtatttcatcaatggcgatgatccggcgcaggtggcctggatgaaacgccagac

SEQ ID NO: 136596 - DNA, 75 bp, synthetic construct
  source 1..75: mol_type = other DNA
atcctcgtgcagggcagtatcccggagatgcagaaagcgctggacagccgtatttactttgaccagaacggtgtg

SEQ ID NO: 136597 - DNA, 75 bp, synthetic construct
  source 1..75: mol_type = other DNA
ggctggcggcagataacgccagcgtgaagcagagcgggcagttaatcgaacaactgtcgctgggcgtttacgacg

SEQ ID NO: 136598 - DNA, 75 bp, synthetic construct
  source 1..75: mol_type = other DNA
catgtcaaaacacgccaatgtggaaattggtcttgccctgcgctctgaccgctgggcgggggctgatttctggga

SEQ ID NO: 136599 - DNA, 75 bp, synthetic construct
  source 1..75: mol_type = other DNA
caagcagtacaaggcggaggacatgttacgtgaagccatcggcggccttgcctcccgcccggaagggtttgtggt

SEQ ID NO: 136600 - DNA, 75 bp, synthetic construct
  source 1..75: mol_type = other DNA
atcctggtgcagggcagtatcccggagatgcagaaagctctggacagtcgtgtttactttgaccatgtcagcgcc

SEQ ID NO: 136601 - DNA, 75 bp, synthetic construct
  source 1..75: mol_type = other DNA
aaactcggcgataagatctgggaatctgacgatattaaaataagatctgggaatctgacgatattaaaattcccg

SEQ ID NO: 136602 - DNA, 75 bp, synthetic construct
  source 1..75: mol_type = other DNA
atggcagaacgacatgttttaggtatctctggtggcaaagatagtgcagccttagcgatatacatgcgtcaacac

SEQ ID NO: 136603 - DNA, 75 bp, synthetic construct
  source 1..75: mol_type = other DNA
tgctttttccagcaaaaaatagaatgggccagattgaaagaaaggcaccctgaagcatttgaagcagccaaagct

SEQ ID NO: 136604 - DNA, 75 bp, synthetic construct
  source 1..75: mol_type = other DNA
gaagagagcgtgcgccgtgatgtggcgcgtgagctgcatgatgatatcggtcagaccatcactgctattcgtact

SEQ ID NO: 136605 - DNA, 75 bp, synthetic construct
  source 1..75: mol_type = other DNA
ttaccgttattgcctgcttttttatcttctctgccgcatggttttgcctgtggagtatcagcctgcatctggttg

SEQ ID NO: 136606 - DNA, 75 bp, synthetic construct
  source 1..75: mol_type = other DNA
cgccgccgatcttggtacctggggcgatctgtggccggtaaaggagccggacatgctgacggtgatcatgcagcg

SEQ ID NO: 136607 - DNA, 75 bp, synthetic construct
  source 1..75: mol_type = other DNA
acgatggaactaaataagacgaaaaaaatatttggtgtgaaagggcttaaatatccgtcaaaagaaaaaatgctc

SEQ ID NO: 136608 - DNA, 75 bp, synthetic construct
  source 1..75: mol_type = other DNA
ttacgttaccgcttttcagggctgcaactgacagaaatgattttgatatacgcgatatgcggcgtaaaaaaatgt

SEQ ID NO: 136609 - DNA, 75 bp, synthetic construct
  source 1..75: mol_type = other DNA
taagggggtggctatgggtaaacctggactcaggtatccaccgaaggaaattatgttgtcttatggcgaacttga

SEQ ID NO: 136610 - DNA, 75 bp, synthetic construct
  source 1..75: mol_type = other DNA
caccccggagctgaccatcgccaaagtgatggggccgggggacagcagcgccaccaccacccacggcaacgttga

SEQ ID NO: 136611 - DNA, 75 bp, synthetic construct
  source 1..75: mol_type = other DNA
gaaagaaaacgatactgatattctcgtcggggcatataaaggtaaatacctgtggtataccgcaccagattttgt

SEQ ID NO: 136612 - DNA, 75 bp, synthetic construct
  source 1..75: mol_type = other DNA
cgaagcagttcgcgtcctacgggctggttggtaaatacgtgaacgataaattcgttccgctggaatctggcgaca

SEQ ID NO: 136613 - DNA, 75 bp, synthetic construct
  source 1..75: mol_type = other DNA
ataatcttcttaacctgttttttaactttgcgataaaagtcagtatgcgggaaaaccctgattttgttcgtgacc

SEQ ID NO: 136614 - DNA, 75 bp, synthetic construct
  source 1..75: mol_type = other DNA
ctggtagaaagtggtgccaatctgcgcgcaatccaggtgaagggcgttaacccgcaacaggaacagcgtctgagc

SEQ ID NO: 136615 - DNA, 75 bp, synthetic construct
  source 1..75: mol_type = other DNA
cagtgtgtcaggtattgcccttaaaatgacggatgtatttaacgccaacaaactggtgcgtgacgcgggcgaagt

SEQ ID NO: 136616 - DNA, 75 bp, synthetic construct
  source 1..75: mol_type = other DNA
aacagatgatcctcatgtccttttcattatcaaagatgcacttgataagttcagacattacgttgagcttggcga

SEQ ID NO: 136617 - DNA, 75 bp, synthetic construct
  source 1..75: mol_type = other DNA
tatcgtgcagccgacttgagaagctttggcattaaacattgtttttcgattggtactattcttgagctattcaac

SEQ ID NO: 136618 - DNA, 75 bp, synthetic construct
  source 1..75: mol_type = other DNA
catcgaggggggaatcagagagcgatacgcagcgtgcgcttgttttgcctcaggagctttcaacactgaaatttg

SEQ ID NO: 136619 - DNA, 75 bp, synthetic construct
  source 1..75: mol_type = other DNA
ggtgcgtggactgacgtcctgccagaattcggtggtgatacctggacccaaacagatgtgttcatgactggtcgc

SEQ ID NO: 136620 - DNA, 75 bp, synthetic construct
  source 1..75: mol_type = other DNA
tacctgtattacagacaaatgatttattacttaatgctctatgcgaagcggattccgaacagcgaaaaaaatatt

SEQ ID NO: 136621 - DNA, 75 bp, synthetic construct
  source 1..75: mol_type = other DNA
attgataaatattcaaacaatgaaaaagtaacacttaagtccgattattcacaaaacgagtgtgctatttattat

SEQ ID NO: 136622 - DNA, 75 bp, synthetic construct
  source 1..75: mol_type = other DNA
ggcaatgtctgcacaagcggcagaaatctataacaaagacggtaacaaactggatctgtacggcaaagttaatgc

SEQ ID NO: 136623 - DNA, 75 bp, synthetic construct
  source 1..75: mol_type = other DNA
atgctaaatctgatcgcactaataatcaggttatctacggtaacaacggtctgaatgcttctggtcaaaatgctg

SEQ ID NO: 136624 - DNA, 75 bp, synthetic construct
  source 1..75: mol_type = other DNA
aaataaaaaaagtagcacctgtacaggccggagctttgttgcgtatatcaaaacaggcgcttaaattttgtaggg

SEQ ID NO: 136625 - DNA, 75 bp, synthetic construct
  source 1..75: mol_type = other DNA
tcctttccggtgatccgacaggttacggggcggcgacctcgcgatttttcactatttatgaaaatttttcaggga

SEQ ID NO: 136626 - DNA, 75 bp, synthetic construct
  source 1..75: mol_type = other DNA
actaaaacagggatagagcgctacgtacagttatctgatcaggcaatcgactttctcaaagtactacggcttacc

SEQ ID NO: 136627 - DNA, 75 bp, synthetic construct
  source 1..75: mol_type = other DNA
ctttgtcatccaaagcggttgaaatgatgaagcctggggacaaaaacaaggctgatacgggtgagaaccgaggct

SEQ ID NO: 136628 - DNA, 75 bp, synthetic construct
  source 1..75: mol_type = other DNA
tggctacaacttattctgaaactcagaatatgacagtcttcggtgatgaccatatcgcgaacaaggcgaaaaact

SEQ ID NO: 136629 - DNA, 75 bp, synthetic construct
  source 1..75: mol_type = other DNA
cagggtaaaaatgatagcgcagctaaagtgaacaacgggaaaggccgtaacgtagttgaatctaatggtgatggc

SEQ ID NO: 136630 - DNA, 75 bp, synthetic construct
  source 1..75: mol_type = other DNA
ggtgcctcatctgtgtcggcattttgcaggagttaagcatctgttgttgttacctttgtgtggcgtctggggtgc

SEQ ID NO: 136631 - DNA, 75 bp, synthetic construct
  source 1..75: mol_type = other DNA
gatatgaatatcagccctacagatctggatatcggcattggcgaagaaaaccgtaagcgctggctgcgtaccggt

SEQ ID NO: 136632 - DNA, 75 bp, synthetic construct
  source 1..75: mol_type = other DNA
tgttgcatagcccgttctccggcgcaggtctggtgtttgaagaaggggaaaatcaggatcaggtgaaatatcagg

SEQ ID NO: 136633 - DNA, 75 bp, synthetic construct
  source 1..75: mol_type = other DNA
cacgctcggtgatagcggcactgggcggtgttgataacatctcggcggtcacgcactgtatgacgcgtttgcgct

SEQ ID NO: 136634 - DNA, 75 bp, synthetic construct
  source 1..75: mol_type = other DNA
ggcatcgactatgaaatccgcagcatggaaaaaccgtccgatcacgcccccgtctgggcgaccttccgccgctaa

SEQ ID NO: 136635 - DNA, 75 bp, synthetic construct
  source 1..75: mol_type = other DNA
gatatgaatatcagtcctggcgacctggatattggcattggcgaagagaaccgtaagcgctggctgcgtaccgga

SEQ ID NO: 136636 - DNA, 75 bp, synthetic construct
  source 1..75: mol_type = other DNA
ttgggggttggtagataccttccgccacgctaatccagaaactgcggaccgtttctcgtggtttgattaccgctc

SEQ ID NO: 136637 - DNA, 75 bp, synthetic construct
  source 1..75: mol_type = other DNA
agttcagcttattttcgggagctggtggagacgcgggagcgactggtgagagacgctgatgattttgtcgcagtg

SEQ ID NO: 136638 - DNA, 75 bp, synthetic construct
  source 1..75: mol_type = other DNA
agatgacaagtacaaagagtattactggaaaggctctaacttccgattgacgatgctgcgggacgccatcttgcg

SEQ ID NO: 136639 - DNA, 75 bp, synthetic construct
  source 1..75: mol_type = other DNA
gcatggcgatgaatgcctgggcgcatccggacggcgaaaaagtaccggctgcagagattaccaaagcatattttg

SEQ ID NO: 136640 - DNA, 75 bp, synthetic construct
  source 1..75: mol_type = other DNA
ttcagctattacgcctcgcgctgcgcctcggcggagatgaacgccaacaacagcagtgcggcgaacgtggtgaaa

SEQ ID NO: 136641 - DNA, 75 bp, synthetic construct
  source 1..75: mol_type = other DNA
cgcgcaatgggcgaagcgattgcagacggtattccgctgatgggctacaccacttggggctgtattgatttagtt

SEQ ID NO: 136642 - DNA, 75 bp, synthetic construct
  source 1..75: mol_type = other DNA
tgcctggagccgtctctttccgcagggcgatgaaatcacgcccaatcagcagggcattgctttttatcgttctgt

SEQ ID NO: 136643 - DNA, 75 bp, synthetic construct
  source 1..75: mol_type = other DNA
tgtcgcagtggcaatcgccggtttcaatcagatgaatcgtggcggcccagcgggaaatgccgtggtcgcgcattg

SEQ ID NO: 136644 - DNA, 75 bp, synthetic construct
  source 1..75: mol_type = other DNA
gcgtagtcacagttcagcttattttcgggagttgctggagacacgagaacgactggtgagagacgctgatgattt

SEQ ID NO: 136645 - DNA, 75 bp, synthetic construct
  source 1..75: mol_type = other DNA
cgttgcatcagcgatcgttctgttcgaccagatgaatcgcggtggtccggcaggaaatgccgtggcggtgcattg

SEQ ID NO: 136646 - DNA, 75 bp, synthetic construct
  source 1..75: mol_type = other DNA
cgtgagatcgtcgaacggagggatcggctggtgaaggatgtcgatgattttgttgcgtcagcggttgttttgtat

SEQ ID NO: 136647 - DNA, 75 bp, synthetic construct
  source 1..75: mol_type = other DNA
tgccgcctttgctggtggccagaatgcgtagtcacagctcagcctatttcagggagctgctggagacacgagaac

SEQ ID NO: 136648 - DNA, 75 bp, synthetic construct
  source 1..75: mol_type = other DNA
tgtcgcagtggcgatcgctggtttcaaccagatgaatcgcggtggcccggcaggaaatattgtagcagtgcattg

SEQ ID NO: 136649 - DNA, 75 bp, synthetic construct
  source 1..75: mol_type = other DNA
cagttcagcttattttcgggagctggtggagacgcgggagcgactggtgagagacgctgatgattttgtagcagt

SEQ ID NO: 136650 - DNA, 75 bp, synthetic construct
  source 1..75: mol_type = other DNA
gctgttcgacggggacggcagcgcagacggcgcgcatctgtgcgggctgatcgacgtaccggaaaacgccggaga

SEQ ID NO: 136651 - DNA, 75 bp, synthetic construct
  source 1..75: mol_type = other DNA
agaaaggccattatggcgtggcgctgctgaccaaagagacaccgattgccgtgcgtcgcggttttccgggtgatg

SEQ ID NO: 136652 - DNA, 75 bp, synthetic construct
  source 1..75: mol_type = other DNA
atgaaaatcaagcatgagcacatccgtatggcgatgaatgcctgggcatatcctgatggtgagaaagttcccgca

SEQ ID NO: 136653 - DNA, 75 bp, synthetic construct
  source 1..75: mol_type = other DNA
tgggcgcatccggacggcgaaaaagtaccggctgcgaaaattaccaaagcgtatttcgagctgggaatgacgttc

SEQ ID NO: 136654 - DNA, 75 bp, synthetic construct
  source 1..75: mol_type = other DNA
atgaaaatcaagcatgaacacatctgtatggcgatgaatgcctgggcgcgtcctgatggcgaaaaagttccagta

SEQ ID NO: 136655 - DNA, 75 bp, synthetic construct
  source 1..75: mol_type = other DNA
ccgatgaacgtcaattttgacaagctgtcccctgaagtgcagaacgcagtcctggttaagttcggtacatgcgaa

SEQ ID NO: 136656 - DNA, 75 bp, synthetic construct
  source 1..75: mol_type = other DNA
tatgacgatttacacgccgggcgtaatttggggcaattacatatagttattaacccgaactttttctcctccagc

SEQ ID NO: 136657 - DNA, 75 bp, synthetic construct
  source 1..75: mol_type = other DNA
caacttccccatacctgaaaattgaagttgtcaacggcaaggccgttattttctccctgcatgttgcctgccact

SEQ ID NO: 136658 - DNA, 75 bp, synthetic construct
  source 1..75: mol_type = other DNA
ggaagatcaaaactcgtaagctaaaaaataccgctgatgcggctaaaactgtggcagagtggcttaaaaagcaat

SEQ ID NO: 136659 - DNA, 75 bp, synthetic construct
  source 1..75: mol_type = other DNA
gcgagcttggacaggggacggctgactgggtgccaaacttcgacggcaccttacaggagccgaaaatgctgcctg

SEQ ID NO: 136660 - DNA, 75 bp, synthetic construct
  source 1..75: mol_type = other DNA
tgccattacccccgcgcccggttttaatcaggtttattatcccggacaggatcaggatattaaacaacgcaaagc

SEQ ID NO: 136661 - DNA, 75 bp, synthetic construct
  source 1..75: mol_type = other DNA
atgggtatggaacatgccatcaaaaccgcccagcaaaatggcgttgcggtggtcggtatcagccggatgggtcac

SEQ ID NO: 136662 - DNA, 75 bp, synthetic construct
  source 1..75: mol_type = other DNA
ctacgaccgccagactatttttggccttgtccgtgaacgtccgatcgacattcacaaagaccctgtggcactgaa

SEQ ID NO: 136663 - DNA, 75 bp, synthetic construct
  source 1..75: mol_type = other DNA
cctcttcaccgacaaggatggcgaaaaatacggtcgcgcaaacaaactttctggtctggataatgctcttgcttt

SEQ ID NO: 136664 - DNA, 75 bp, synthetic construct
  source 1..75: mol_type = other DNA
gaattcagtaaagctatcgatctggaaacctccggcggaatcatcgaccgtaaaacaataaagtggtgggcgaaa

SEQ ID NO: 136665 - DNA, 75 bp, synthetic construct
  source 1..75: mol_type = other DNA
cagtccacccacgttagtgtggccagttccacttctgcacggtttttccagctcttacggtgtattacctccgct

SEQ ID NO: 136666 - DNA, 75 bp, synthetic construct
  source 1..75: mol_type = other DNA
ttgttaacttcatcaccaaaaagggaggtgtgaaccgccccgggtttcctggagagtgttttatctgtgaactca

SEQ ID NO: 136667 - DNA, 75 bp, synthetic construct
  source 1..75: mol_type = other DNA
cagacctgggcactgttgatgttctccagtcatcagaaacacaaactgatgcagtggaaactgaggtatctgata

SEQ ID NO: 136668 - DNA, 75 bp, synthetic construct
  source 1..75: mol_type = other DNA
tatcgccccttctctgccctatatcgatctgtttcttgccgatttaaaacacgttgccgacgcgccgtttaaaca

SEQ ID NO: 136669 - DNA, 75 bp, synthetic construct
  source 1..75: mol_type = other DNA
cctgtctgcatgtgccgtggaaatatatcgccccttctctgccctatatcgatctgtttcttgccgatttaaaac

SEQ ID NO: 136670 - DNA, 75 bp, synthetic construct
  source 1..75: mol_type = other DNA
agcgcaaaatcagcagcggaggactttgcgaaggcagtatttgatcgcattgagttcattcgtactaacggaggt

SEQ ID NO: 136671 - DNA, 75 bp, synthetic construct
  source 1..75: mol_type = other DNA
ctgggtgccaaacttcgacggcaccttacaggagccgaaaatgctgcctgcccgcctgccgaacattttgcttaa

SEQ ID NO: 136672 - DNA, 75 bp, synthetic construct
  source 1..75: mol_type = other DNA
gtgctggataacctgaaaaaactcgcagcggcggggaaaaaaatcatcatccgcgtgccgttgattcagggcttt

SEQ ID NO: 136673 - DNA, 75 bp, synthetic construct
  source 1..75: mol_type = other DNA
gctgcacgttagcgaaattcatttcctgccctaccacacgctgggcatcaacaaatatcacttacttaatctgcc

SEQ ID NO: 136674 - DNA, 75 bp, synthetic construct
  source 1..75: mol_type = other DNA
aaaatgactcttgtgtcaaaacaacaagaaaattggacagagtatttcaagagtcaggtcagtatattgcgaata

SEQ ID NO: 136675 - DNA, 75 bp, synthetic construct
  source 1..75: mol_type = other DNA
ctggctttacgacagtgcggttatcatttcccttccagggagtctgccaactttctgtctttattacagggagat

SEQ ID NO: 136676 - DNA, 75 bp, synthetic construct
  source 1..75: mol_type = other DNA
ggcatccctttgctgaactggccacagactgtattgagtctcttcgtgaaaacagtggcgaaaactctctggaat

SEQ ID NO: 136677 - DNA, 75 bp, synthetic construct
  source 1..75: mol_type = other DNA
gatgttattcccgcttccatcgacgatgcattcctttctgaaggctggaagggattgtgtgaggaacatctgcca

SEQ ID NO: 136678 - DNA, 75 bp, synthetic construct
  source 1..75: mol_type = other DNA
tcagtcataaactgattaatatcgttgtttttgtcgcaattgtagaatacgcctatttatttctccatttctatt

SEQ ID NO: 136679 - DNA, 75 bp, synthetic construct
  source 1..75: mol_type = other DNA
attcttgaaaggataattcgcactttcgattcaagtattataggagttaccgagatgctggagtctgaaagtgac

SEQ ID NO: 136680 - DNA, 75 bp, synthetic construct
  source 1..75: mol_type = other DNA
tgcaagcactgcaatgaatgaagctggtttcaatgcagatgttattgaagcggctttagctcacagtgataaaaa

SEQ ID NO: 136681 - DNA, 75 bp, synthetic construct
  source 1..75: mol_type = other DNA
tgcaccgcctgcggtcagaccggcggcggcaactgccctgattgtggtgcggtgatgggcgacgcaacataccag

SEQ ID NO: 136682 - DNA, 75 bp, synthetic construct
  source 1..75: mol_type = other DNA
agcctgaaccagtggcgcaacaggaagtggaaaaagtctgcaccgcctgcggtcagaccggcggcggcaactgcc

SEQ ID NO: 136683 - DNA, 75 bp, synthetic construct
  source 1..75: mol_type = other DNA
cggatacggaaatcaaagcagccaaatctaaagatgccgattatcagttgtatgatggtgacggactgacgctgc

SEQ ID NO: 136684 - DNA, 75 bp, synthetic construct
  source 1..75: mol_type = other DNA
tagataaggacgttttccctgctataggcgttatacccgttcaggagataaaggccagaacgattattgaagcat

SEQ ID NO: 136685 - DNA, 75 bp, synthetic construct
  source 1..75: mol_type = other DNA
cagcgcattaacgaaataatgatttacgcagtcaacaccggcctgatcgatactaacccggcatcaggtgttgga

SEQ ID NO: 136686 - DNA, 75 bp, synthetic construct
  source 1..75: mol_type = other DNA
ctactcgatgtctcattgaatggcaactcctaactcttgtccgcccttctgaagcttcaggcactcaatgggctg

SEQ ID NO: 136687 - DNA, 75 bp, synthetic construct
  source 1..75: mol_type = other DNA
tgaagttagaaaggcatataaccgttccacttacttagaacaacgaaaatcactgatggaatggtggggtataaa

SEQ ID NO: 136688 - DNA, 75 bp, synthetic construct
  source 1..75: mol_type = other DNA
acaacaaagcagcggacaatgatggggctcggtgccttccctgccctttcgcttgctgatgcccgagggttgaga

SEQ ID NO: 136689 - DNA, 75 bp, synthetic construct
  source 1..75: mol_type = other DNA
atacaagcagacatggaaaacactggatgacgaactggcctacgctctctggcctggtgacattgatgccggaaa

SEQ ID NO: 136690 - DNA, 75 bp, synthetic construct
  source 1..75: mol_type = other DNA
agaattaccaaaactcatgcgctctttggtgatgtcgaacctctctgtttcgactcgctgtctaattgagtggca

SEQ ID NO: 136691 - DNA, 75 bp, synthetic construct
  source 1..75: mol_type = other DNA
gaagcatctggtactcggtgggcagagatcgatctcgaagcaaagctctggaccattccagccgaacgtatgaag

SEQ ID NO: 136692 - DNA, 75 bp, synthetic construct
  source 1..75: mol_type = other DNA
aatgcgttacaaaacgagccagaaacgaaactgcctgaaccagaagtgcaacaagaaccggaaaaagtctgcacc

SEQ ID NO: 136693 - DNA, 75 bp, synthetic construct
  source 1..75: mol_type = other DNA
gaatttagcaagaccatcgatctggatactgctggcggagtcattgatcgtgacgtcattaaatggtggctgaag

SEQ ID NO: 136694 - DNA, 75 bp, synthetic construct
  source 1..75: mol_type = other DNA
gggattgaaacccgcgattcagtgaatcagaaccagcaagaaacggaacagaacggccagaaagcggaacaaaac

SEQ ID NO: 136695 - DNA, 75 bp, synthetic construct
  source 1..75: mol_type = other DNA
atacaggcagacatggaaaacactggatgaagagctggcttacgctctctggcctggtgatattgatgccggaaa

SEQ ID NO: 136696 - DNA, 75 bp, synthetic construct
  source 1..75: mol_type = other DNA
aggagtaccacacaatgcactggatgacgcccgccaccaggcgaaatacgtttcagcaatctggcaaaaactgat

SEQ ID NO: 136697 - DNA, 75 bp, synthetic construct
  source 1..75: mol_type = other DNA
tcccctgcccgtggcgttaccacaacgatcgcgacgtgcgcacaatcgttgagctgggaaaaaccatcggttttg

SEQ ID NO: 136698 - DNA, 75 bp, synthetic construct
  source 1..75: mol_type = other DNA
cggtgatatcagtgtcactgagattaaggctcatactctggttaaagcagtgcagccggttcaggccagaggtgc

SEQ ID NO: 136699 - DNA, 75 bp, synthetic construct
  source 1..75: mol_type = other DNA
cgccagtaccgcccttaatgaacaaggcttcccacctgatgttattgaagcggcgctggctcatgtggacaaaaa

SEQ ID NO: 136700 - DNA, 75 bp, synthetic construct
  source 1..75: mol_type = other DNA
tcagttgcctcagttgatgcaaactatgcgtacggccagtatcagcctgtctacgcggtgtctgttcatgtggca

SEQ ID NO: 136701 - DNA, 75 bp, synthetic construct
  source 1..75: mol_type = other DNA
atcaaaattatggggttacttacatgaagtttttattggcattttcgcttttaataccatccgtggtttttgcaa

SEQ ID NO: 136702 - DNA, 75 bp, synthetic construct
  source 1..75: mol_type = other DNA
aaagcgttcgagaaaccgcaaaagaaaaacatgccgagtatccgtccggatcagcttccacagttaatgcaaaca

SEQ ID NO: 136703 - DNA, 75 bp, synthetic construct
  source 1..75: mol_type = other DNA
aaaacatgccaagtattcgaccggatcaacttccacagctaatgcaaactatgcgtacggcaagtatcggcctgt

SEQ ID NO: 136704 - DNA, 75 bp, synthetic construct
  source 1..75: mol_type = other DNA
ggcacatttgcgcaccgtttcagtaactgggtattccgcgaggtgattccttcaatccgcaaaacggggggttat

SEQ ID NO: 136705 - DNA, 75 bp, synthetic construct
  source 1..75: mol_type = other DNA
atccgtatgcagcgcaatggctgcgtaacttaattgacgctggagaaattgcccccggttatgtagatgaaagga

SEQ ID NO: 136706 - DNA, 75 bp, synthetic construct
  source 1..75: mol_type = other DNA
tcgatagttttggcgtaggcgcaatgaaagatgttgcgcgggtacgcccacaggatgccggggcgaatacctgtg

SEQ ID NO: 136707 - DNA, 75 bp, synthetic construct
  source 1..75: mol_type = other DNA
tggcactgatgatgtgcggcgcggcatggggtgcggccataccacaggcaagccgctatgactcccgcgtgcagc

SEQ ID NO: 136708 - DNA, 75 bp, synthetic construct
  source 1..75: mol_type = other DNA
agacgcgcaagcctacggtgacgaacgtcgttcgccgttgcaggaacgcgaagaagcgaaagcgatgagcgagca

SEQ ID NO: 136709 - DNA, 75 bp, synthetic construct
  source 1..75: mol_type = other DNA
gcgtgagctggaggaagaagaaaaaacgctgatacgtgaatatcagcctgagttttactttggtaaccgcattca

SEQ ID NO: 136710 - DNA, 75 bp, synthetic construct
  source 1..75: mol_type = other DNA
tcaatcaggcggttgccattggcgataacctcgaggcggatttaggccaggtctataacatcaccgccaatctct

SEQ ID NO: 136711 - DNA, 75 bp, synthetic construct
  source 1..75: mol_type = other DNA
acccgcgaagtggtgccagtgctggtttatcagcaagggatggtcgctacgcagctcggtgtgcgcaccacgctt

SEQ ID NO: 136712 - DNA, 75 bp, synthetic construct
  source 1..75: mol_type = other DNA
gaaagatgtcacgttggtgcgtccgcaggatgccggggcgaatacctgtggtcacatcctgagccagctgccgca

SEQ ID NO: 136713 - DNA, 75 bp, synthetic construct
  source 1..75: mol_type = other DNA
ggtcacgcagaagacgtcgcacgttatgccgaacgtttgcaggtcgttgaccgtaatcttgctctcctggttgag

SEQ ID NO: 136714 - DNA, 75 bp, synthetic construct
  source 1..75: mol_type = other DNA
acccgcgaagtggtgccggtactggtttatcagcaagggctggttgcaactcgtctgggggtttgttccacgctc

SEQ ID NO: 136715 - DNA, 75 bp, synthetic construct
  source 1..75: mol_type = other DNA
gcgatgcagccagatgattacctggtcgtgatggcggatcacggtaacgacccgactattggtcatagccaccat

SEQ ID NO: 136716 - DNA, 75 bp, synthetic construct
  source 1..75: mol_type = other DNA
ggcgagcaatgcctttggatgaagcaatcatcactaagttagtaatctttgagcgatgtgttggagtagatggta

SEQ ID NO: 136717 - DNA, 75 bp, synthetic construct
  source 1..75: mol_type = other DNA
cttgcaggaattgcagcagggaacgaagccacctgtatggatggctgcagcattgaaagatgagcaatggaataa

SEQ ID NO: 136718 - DNA, 75 bp, synthetic construct
  source 1..75: mol_type = other DNA
gcggtttgctttctagggggattggtgcattaagaaatatcaccgatggcatccagagccaggaagagtatgagg

SEQ ID NO: 136719 - DNA, 75 bp, synthetic construct
  source 1..75: mol_type = other DNA
ggactacggcgggctggagatgtttaaagtggtatgcaattccgtccagtccctctgccaaagtactcctgcgaa

SEQ ID NO: 136720 - DNA, 75 bp, synthetic construct
  source 1..75: mol_type = other DNA
aatgataactcaggaaaaaattgctcaacttcctaaggacagagaaactctgttctattttaacgtgcgagaaat

SEQ ID NO: 136721 - DNA, 75 bp, synthetic construct
  source 1..75: mol_type = other DNA
cagagatagcatcagcctacacaattctcatacaccggctcatagctaataatgcccgtaatgcactaaatacag

SEQ ID NO: 136722 - DNA, 75 bp, synthetic construct
  source 1..75: mol_type = other DNA
taatatgcaggatcttcagaaatggcggaagtcaggtaaccgattgttccgttgctttgttaacgccaccaaagc

SEQ ID NO: 136723 - DNA, 75 bp, synthetic construct
  source 1..75: mol_type = other DNA
caatggctctgaccacaatgtttgtagcagtgagtgcttcagcagtagagaaaaatattactgtaacagctagtg

SEQ ID NO: 136724 - DNA, 75 bp, synthetic construct
  source 1..75: mol_type = other DNA
acccggctttgatgaggcgtgggaagcaacgccggatgcaaaccgggtaaacgttcgcccggttgcgctcacgca

SEQ ID NO: 136725 - DNA, 75 bp, synthetic construct
  source 1..75: mol_type = other DNA
cttaaacagcttgaggaagctgacggtcaaatacctactgaagcgccaaagacatggactgataatccaacaact

SEQ ID NO: 136726 - DNA, 75 bp, synthetic construct
  source 1..75: mol_type = other DNA
gatctgctgaaagctgatggcaccaaagcaaccgccgccgctgatatcgcttacgtcgctgtagaaccttcgttt

SEQ ID NO: 136727 - DNA, 75 bp, synthetic construct
  source 1..75: mol_type = other DNA
tcgcccctgtaaacgcgagcaatgaccttgtgcgttgcaaaattatcgcctattccggcgatcccctgctgcaag

SEQ ID NO: 136728 - DNA, 75 bp, synthetic construct
  source 1..75: mol_type = other DNA
ttcccctttttggccgcagccgtggactgattttgtcggcccgattagtgcacagcttggttttgcgttgggata

SEQ ID NO: 136729 - DNA, 75 bp, synthetic construct
  source 1..75: mol_type = other DNA
cagatacggaagtggagtgagtggggaacgtgcttaagttttgttacgttgggtatgatggcgtgggctttacgg

SEQ ID NO: 136730 - DNA, 75 bp, synthetic construct
  source 1..75: mol_type = other DNA
aatgctgttctcaatcccgctcatgatcaggcgtatttcacttctgcaattacaactttggttatcggctgaata

SEQ ID NO: 136731 - DNA, 75 bp, synthetic construct
  source 1..75: mol_type = other DNA
atgtccatgttattcgttgggagccagaaacacagcgcgttatctatcttcgcaaagactacccgcatgagtgct

SEQ ID NO: 136732 - DNA, 75 bp, synthetic construct
  source 1..75: mol_type = other DNA
ttccggcaccagtgaagatcggagttcgtgccgtagcttttgtcgagagtgaagttgacgagtggattcaatcag

SEQ ID NO: 136733 - DNA, 75 bp, synthetic construct
  source 1..75: mol_type = other DNA
aacccttcttaacttgcaggctgaacgtattcgtctggcggataaggctaattttcatattcaccgtctcctgaa

SEQ ID NO: 136734 - DNA, 75 bp, synthetic construct
  source 1..75: mol_type = other DNA
gtttatttctggttgctcctgtggaatatcattttctatgtcgcgccagcgaaaattgcattgctggaaaatatg

SEQ ID NO: 136735 - DNA, 75 bp, synthetic construct
  source 1..75: mol_type = other DNA
caaaaatagatgccagatacggaagtggagtgagtggggaacgtgcttaagttttgttacgttgggtatgatggc

SEQ ID NO: 136736 - DNA, 75 bp, synthetic construct
  source 1..75: mol_type = other DNA
aaccaccgatctggaaaagagctatcgtattaacctcaatatgatcggtctggatgggcgtccggcggtgaaaaa

SEQ ID NO: 136737 - DNA, 75 bp, synthetic construct
  source 1..75: mol_type = other DNA
ttggcgcagcaaaaatagaagccagaggctgaagtggggggagtggggaacgtgcctgagttttgttacgttggg

SEQ ID NO: 136738 - DNA, 75 bp, synthetic construct
  source 1..75: mol_type = other DNA
cccttctgtactggtgagccgctttttaaccggcgcaccgactgtactgatcgcctggtttgtctccggttttat

SEQ ID NO: 136739 - DNA, 75 bp, synthetic construct
  source 1..75: mol_type = other DNA
ggcacagcttactggctggcaggctatcgacggctttaaagaaggtgaacctgcggaagcggaaatcggcgttgc

SEQ ID NO: 136740 - DNA, 75 bp, synthetic construct
  source 1..75: mol_type = other DNA
ggaaatacccctgtgacacatctgagtgacggttctttatgggatcgccaggcttttccggacaccacaatcctt

SEQ ID NO: 136741 - DNA, 75 bp, synthetic construct
  source 1..75: mol_type = other DNA
cgaattattacctgtaaagagggaatttattacctggcgaaaatcggtcattacctcctgcatgacactatgact

SEQ ID NO: 136742 - DNA, 75 bp, synthetic construct
  source 1..75: mol_type = other DNA
cattgacgccccaggtttgaactacaaagcgggtgacagctttaaagctgcggtgaaaggcaagagcaaccagcc

SEQ ID NO: 136743 - DNA, 75 bp, synthetic construct
  source 1..75: mol_type = other DNA
tcaatgcgccgcgttcaggcgcttatgacaacggcttccaggtcgtgcatatgggctacggtgttgatgaaaaag

SEQ ID NO: 136744 - DNA, 75 bp, synthetic construct
  source 1..75: mol_type = other DNA
accgtgttgagcaggcattagtatccgccggttggcaggtggagcgccgtggcgatgaactgcaatttctgtggg

SEQ ID NO: 136745 - DNA, 75 bp, synthetic construct
  source 1..75: mol_type = other DNA
tctccaacagaagcccactttaaaactcttagacgtagaaaatctggtcaggatggcatcattaggcttcttgaa

SEQ ID NO: 136746 - DNA, 75 bp, synthetic construct
  source 1..75: mol_type = other DNA
tatcatctaatcagcaaaggatgtttcccatcaccagtcaaaattggatctcgtgcagttgctttcattgaaagt

SEQ ID NO: 136747 - DNA, 75 bp, synthetic construct
  source 1..75: mol_type = other DNA
atgattagattccggctttatattccccctgtaattctcggttttgttatcgtgccattattggtatggccgacg

SEQ ID NO: 136748 - DNA, 75 bp, synthetic construct
  source 1..75: mol_type = other DNA
attcgtttggcggataaggctaattttcatattcaccgtctcctgaatatcagcggagggcatcgtcatgcttaa

SEQ ID NO: 136749 - DNA, 75 bp, synthetic construct
  source 1..75: mol_type = other DNA
ctacttaaactactccatgtacgtcatcatggatcgtgcgttgccgtttattggtgatggtctgaaacctgttca

SEQ ID NO: 136750 - DNA, 75 bp, synthetic construct
  source 1..75: mol_type = other DNA
cgtgacaaaaacatccatgacgtaggtataaccgcgtatatgggcggtggtgatgatactatttatgtcggtcag

SEQ ID NO: 136751 - DNA, 75 bp, synthetic construct
  source 1..75: mol_type = other DNA
taatgctctgcgtttgggggtttttgatcctcaatctttttcaacccttcccacgcccgctaaatattttcgtta

SEQ ID NO: 136752 - DNA, 75 bp, synthetic construct
  source 1..75: mol_type = other DNA
atacaagcagacatggaaaacactggatgacgaactggcctactggtgtttaatggcttctacgaagcgttgctg

SEQ ID NO: 136753 - DNA, 75 bp, synthetic construct
  source 1..75: mol_type = other DNA
tgatcgggacaccattaaatggtggcttaagcaatcacgcgaagcgcaatctgccattatgaccgatgaaatccc

SEQ ID NO: 136754 - DNA, 75 bp, synthetic construct
  source 1..75: mol_type = other DNA
gattcccggggcggttcagatgccccgattatctcaataggtgcaatatttttcgatccgcaaaccggagatatg

SEQ ID NO: 136755 - DNA, 75 bp, synthetic construct
  source 1..75: mol_type = other DNA
gtgacgcatctgagtgacggttctttatgggatcgccgggcttttccggacaccacaatccttgaaatccgtccc

SEQ ID NO: 136756 - DNA, 75 bp, synthetic construct
  source 1..75: mol_type = other DNA
tcgatctggaaactgctggcggagtcattgatcgggacaccattaaatggtggcttaagcaatcacgcgaagcgc

SEQ ID NO: 136757 - DNA, 75 bp, synthetic construct
  source 1..75: mol_type = other DNA
acattcgacggacatatcgttgaagcgttgatgaaaatgccagaagttaacaccatgtatccggagcttaagctg

SEQ ID NO: 136758 - DNA, 75 bp, synthetic construct
  source 1..75: mol_type = other DNA
aacgacagggtatcccctgcccgtggcgctacagcaacgatcgcgatgtacgcacaatcgttgagctggggaaag

SEQ ID NO: 136759 - DNA, 75 bp, synthetic construct
  source 1..75: mol_type = other DNA
cgggtgggttaagcataaatgtaagcctggtgccaaatggcccgaaattcaggcagagatgcgcatctggaaaaa

SEQ ID NO: 136760 - DNA, 75 bp, synthetic construct
  source 1..75: mol_type = other DNA
gttacaccaatgatcgtgatgtaagaacgattgttgccctggggctggtgatggatttcgatgctcgaagtgtca

SEQ ID NO: 136761 - DNA, 75 bp, synthetic construct
  source 1..75: mol_type = other DNA
ctgaaccagtagtgcaacaggaaccggaaaagatctgcaccgcctgcggtcagagcggtggcggcaactgccctg

SEQ ID NO: 136762 - DNA, 75 bp, synthetic construct
  source 1..75: mol_type = other DNA
aatgcacttgatgacgcccgttaccaggcaaaatacgtttcagttatctggcaaaaactgatcccgagtcaggct

SEQ ID NO: 136763 - DNA, 75 bp, synthetic construct
  source 1..75: mol_type = other DNA
ggcccggggatgtggatgcaggaaacattgacggcagcatccatcgctgggcaaaaaatgaagttatcgacaacg

SEQ ID NO: 136764 - DNA, 75 bp, synthetic construct
  source 1..75: mol_type = other DNA
ggattagcgacccgaacgatccgaaatgggtgaaggggatccagactcgcgattctgtgtaccagaaccagccag

SEQ ID NO: 136765 - DNA, 75 bp, synthetic construct
  source 1..75: mol_type = other DNA
gattccggacaacgaaaaaaccgaatgcaaagtggaagtcgaagcatctgtagagcgtgaggggccgttctactt

SEQ ID NO: 136766 - DNA, 75 bp, synthetic construct
  source 1..75: mol_type = other DNA
gcctggcgtcagcagggctatgaagacacgatgctggcgatggagcatacacaaaacacatgctgcgtctgcggc

SEQ ID NO: 136767 - DNA, 75 bp, synthetic construct
  source 1..75: mol_type = other DNA
cggcagatcactcaattaaggtgaacggtcatcaagaaatcacatccaccagcaggacgtgtgaccatctaatga

SEQ ID NO: 136768 - DNA, 75 bp, synthetic construct
  source 1..75: mol_type = other DNA
atttttggccttgtccgtgaacgtccgatcgacattcacaaagaccctgtggcactgaacaaatacattactgaa

SEQ ID NO: 136769 - DNA, 75 bp, synthetic construct
  source 1..75: mol_type = other DNA
cccgtggcgctactgcaacgatcgcgatgtacgcacaattgttgaactgggaaattccattggctttgatgtcag

SEQ ID NO: 136770 - DNA, 75 bp, synthetic construct
  source 1..75: mol_type = other DNA
tgctgttccgtccccgtgaggtacagggaacaatgtacggtgatggtgggatgggaggatggcgaaatatgcagg

SEQ ID NO: 136771 - DNA, 75 bp, synthetic construct
  source 1..75: mol_type = other DNA
gtgctgtcggtaaacagattggtttacttttcattgctgaaaaaattgttccaggcaatgaacctctgccagatc

SEQ ID NO: 136772 - DNA, 75 bp, synthetic construct
  source 1..75: mol_type = other DNA
gcactgtcccggtcagaaacggtgttgcagaaaagtctggagaaaacggaagaggcagatttggcactgagaaac

SEQ ID NO: 136773 - DNA, 75 bp, synthetic construct
  source 1..75: mol_type = other DNA
gatggatcattatcttgatactgatgctctggcagacgggctaccgctgtatgtgtcgctgtaccccacagaagg

SEQ ID NO: 136774 - DNA, 75 bp, synthetic construct
  source 1..75: mol_type = other DNA
tgaacctctgccagatccccggacgtgcaggagcactgcttacgacgcttcttcgccatatatcgacaatcaacg

SEQ ID NO: 136775 - DNA, 75 bp, synthetic construct
  source 1..75: mol_type = other DNA
gtgacgcatctgagtgacggttctttatgggatcgccaggcttttccggacaccacaatccttgagatccgtccc

SEQ ID NO: 136776 - DNA, 75 bp, synthetic construct
  source 1..75: mol_type = other DNA
aacaggaaccggaaaaagtctgcaccgcctgcggtcagagcggtggcgtcaactgccctgattgtggcgcggtga

SEQ ID NO: 136777 - DNA, 75 bp, synthetic construct
  source 1..75: mol_type = other DNA
cgccacaatgcgctggatgatgcccgttaccaggcaaaatacgtttcaactatctggcaaaaactgatcccgaat

SEQ ID NO: 136778 - DNA, 75 bp, synthetic construct
  source 1..75: mol_type = other DNA
gatgacgcccgtcaccaggcaaaatacgtttcagctatctggcaaaaactgatcccgaatcaggctgatttttaa

SEQ ID NO: 136779 - DNA, 75 bp, synthetic construct
  source 1..75: mol_type = other DNA
cagaactgctatcccattcgaaggtgagcgccataatgcacttgatgacgcccgttatcaggcaaaatacgtttc

SEQ ID NO: 136780 - DNA, 75 bp, synthetic construct
  source 1..75: mol_type = other DNA
tccggtgaattttttgttcaggtctggggtaacggtgcaactttcgacaacgtgattttacgccgttcatatgaa

SEQ ID NO: 136781 - DNA, 75 bp, synthetic construct
  source 1..75: mol_type = other DNA
taatgcacttgatgacgcccgttaccaggcaaaatacgtttcagttatctggcaaaaactgatcccgagtcaggc

SEQ ID NO: 136782 - DNA, 75 bp, synthetic construct
  source 1..75: mol_type = other DNA
aaacctccggcggaatcatcgaccgtaaaacaataaagtggtgggcgaaacgatcacgcgaagcacaatccgcta

SEQ ID NO: 136783 - DNA, 75 bp, synthetic construct
  source 1..75: mol_type = other DNA
gatgacgcccgtcaccaggcaaaatacgttacagctacaatacaaaaactgatcccgagtcaggctgatttttaa

SEQ ID NO: 136784 - DNA, 75 bp, synthetic construct
  source 1..75: mol_type = other DNA
aaatacggcagggcaaacaaactttctggcctggacaaggcgctggctgccggtggtaccgaaatctcaaaagaa

SEQ ID NO: 136785 - DNA, 75 bp, synthetic construct
  source 1..75: mol_type = other DNA
agccaatatcagccagcctgacgctaatgaactgcttgctgcctctcgcggagaatttgttgcagggattagcga

SEQ ID NO: 136786 - DNA, 75 bp, synthetic construct
  source 1..75: mol_type = other DNA
acggtgaacggtcatcgcgttatcacatccaccagcaggacgtgtgaccatctaatgatcgaccttgaaaccatg

SEQ ID NO: 136787 - DNA, 75 bp, synthetic construct
  source 1..75: mol_type = other DNA
aggtgagcgccataatgcacttgatgacgcccattatcaggcaaaatacgtttcagctatctggaaaaaactgat

SEQ ID NO: 136788 - DNA, 75 bp, synthetic construct
  source 1..75: mol_type = other DNA
cataatctcacatccaccagcagagcggggattcatctgatgatcgatcttgaaaccatgggaaaaaatcccgat

SEQ ID NO: 136789 - DNA, 75 bp, synthetic construct
  source 1..75: mol_type = other DNA
ttatgcaggcagccaatatcagccagcctgacgccgaggaactgcttgcagtatcacgtggtgaatttgttgaag

SEQ ID NO: 136790 - DNA, 75 bp, synthetic construct
  source 1..75: mol_type = other DNA
cgaaggtgaacgccataacgctctgaacgatgcacgttaccaggcgaaatacgtttcagccatctggcaaaaact

SEQ ID NO: 136791 - DNA, 75 bp, synthetic construct
  source 1..75: mol_type = other DNA
catgaaatctcatccaccagcaggttgtggcaccatctgatgattgaccttgaaacaatgggaaaaaatcctgat

SEQ ID NO: 136792 - DNA, 75 bp, synthetic construct
  source 1..75: mol_type = other DNA
gtcatcacatttgagggtgaacgccataatgccctgcacgatgcgcgttaccaggcaaaatacgtttcagctatc

SEQ ID NO: 136793 - DNA, 75 bp, synthetic construct
  source 1..75: mol_type = other DNA
ttaacgccatgtatcctgaacttaaactgcatgccatcgggtgggttaagcataaatgtgagcctggcgctaaat

SEQ ID NO: 136794 - DNA, 75 bp, synthetic construct
  source 1..75: mol_type = other DNA
ttttattggcattctgggtggcatcgggatgctctattttcaggatctgatgcccggtcaggcgggttcagcaac

SEQ ID NO: 136795 - DNA, 75 bp, synthetic construct
  source 1..75: mol_type = other DNA
tatctgagcgcagcggtagcgtttattgtttgcggcgtgatggtgtggctgtttttaccgtcgatgcaaaaagag

SEQ ID NO: 136796 - DNA, 75 bp, synthetic construct
  source 1..75: mol_type = other DNA
ctgtcactgcagtcattcgtcgcgaatataagcagacatggaaaacactggatgatgaactggcctacgctctgt

SEQ ID NO: 136797 - DNA, 75 bp, synthetic construct
  source 1..75: mol_type = other DNA
aattttttgttcaggtctggggtaacggtgcaactttcgacaacgtgattttacgccgttcatatgaacggcagg

SEQ ID NO: 136798 - DNA, 75 bp, synthetic construct
  source 1..75: mol_type = other DNA
tgccaatggcaataatgaaacaggcgagacagcaaatcccttaattacggtgaacggtcatcacgttatcacatc

SEQ ID NO: 136799 - DNA, 75 bp, synthetic construct
  source 1..75: mol_type = other DNA
gcagcgctgtcattgggattctggtgagtcagtttctcgccgggcgctctgataagcgcggcgatcgcaaatcgc

SEQ ID NO: 136800 - DNA, 75 bp, synthetic construct
  source 1..75: mol_type = other DNA
aagcataaatgtaatcctggtgctaaatggcccgaaattcaggcagagatgcgcatctggaaaaaacgtcgcgaa

SEQ ID NO: 136801 - DNA, 75 bp, synthetic construct
  source 1..75: mol_type = other DNA
agccaaccgacagcacactgaaaacccagcagaaaaaatccctcctgtaactgccgccattcatcgcgaatacaa

SEQ ID NO: 136802 - DNA, 75 bp, synthetic construct
  source 1..75: mol_type = other DNA
aagaatatttcgcccgcaaaaacggtacatactcaggttcacaacaaaatactggtgcatctgacacgaccgcac

SEQ ID NO: 136803 - DNA, 75 bp, synthetic construct
  source 1..75: mol_type = other DNA
ccaacactgaagttctgcgcgctaaagcgttagaaaaggatctaacgttgcatgatggcgatggcctttttctgc

SEQ ID NO: 136804 - DNA, 75 bp, synthetic construct
  source 1..75: mol_type = other DNA
ggttaagttcgacacatgtgaaaacatcaccgttgatatggttattagcgcacaggaattgttgcaggaagacat

SEQ ID NO: 136805 - DNA, 75 bp, synthetic construct
  source 1..75: mol_type = other DNA
tcattgatcgtgacgtcattaaaaggtggctgaagcaatcacgtgaagcgcagtctgccattatgaccgatgaaa

SEQ ID NO: 136806 - DNA, 75 bp, synthetic construct
  source 1..75: mol_type = other DNA
cggaagggaatgagcacggtcaggcgttccgcgatgtggaactggaaaaagaattgctgatcgaagcgcaaaatc

SEQ ID NO: 136807 - DNA, 75 bp, synthetic construct
  source 1..75: mol_type = other DNA
gactcggcgcccagtttggcggtaaatattttgctcatgacattcgcgttattcgtctgccgcgtcatggtgcat

SEQ ID NO: 136808 - DNA, 75 bp, synthetic construct
  source 1..75: mol_type = other DNA
ctgcaagcgcagggcggcagtatgatcatgctggcgaagggtaatcgcagtcagcaggtgaccgatgcttgtaaa

SEQ ID NO: 136809 - DNA, 75 bp, synthetic construct
  source 1..75: mol_type = other DNA
tacagggaggattgctcgatttcaatagtggttattattccaatattattggcgttgaaggcggggcgtattatg

SEQ ID NO: 136810 - DNA, 75 bp, synthetic construct
  source 1..75: mol_type = other DNA
atgatgatgaatatgaacttgcgagagtaaatgcagcttcatatggagttgatagtgtaaatgtattcgcaaaaa

SEQ ID NO: 136811 - DNA, 75 bp, synthetic construct
  source 1..75: mol_type = other DNA
gcacgattatcgttggtcgtgatattgctcacgccaaactgaaagagcggatggataacggtgaagggctgccgc

SEQ ID NO: 136812 - DNA, 75 bp, synthetic construct
  source 1..75: mol_type = other DNA
aagatatcgaccctcaagaacatcacaaggagctgtcaagaagcactcaggaggccaaaaccaatacgttcatgt

SEQ ID NO: 136813 - DNA, 75 bp, synthetic construct
  source 1..75: mol_type = other DNA
atggcaagaaaaaccaagccgttaaccgatacggaaatcaaagccgccaaacctaaagatgccgattaccagctg

SEQ ID NO: 136814 - DNA, 75 bp, synthetic construct
  source 1..75: mol_type = other DNA
tcaacttccacagttaatgcaaacaatgcgtacggcaagtatcagtatgtcaacgcggtgcttgttcatgtggca

SEQ ID NO: 136815 - DNA, 75 bp, synthetic construct
  source 1..75: mol_type = other DNA
tgaagtgcgcagagcatataatcgttcaacttaccttgagcaacgaataggacttatgaattggtggggccaaaa

SEQ ID NO: 136816 - DNA, 75 bp, synthetic construct
  source 1..75: mol_type = other DNA
tgaagtacgaagagcttataatcgctcaacatacctagcacaaaggaaagacctaatcaattggtggggttcatt

SEQ ID NO: 136817 - DNA, 75 bp, synthetic construct
  source 1..75: mol_type = other DNA
aaagctaggacgctagtcgaaactcttgagccaatcaaagctcgtggggcacttgagacagtgcgtaggttggtg

SEQ ID NO: 136818 - DNA, 75 bp, synthetic construct
  source 1..75: mol_type = other DNA
gaagattcctgcagcacgtatgaaaatgaaccgcgaccatactgttccattgtcagatgaagcaattgtgtcaac

SEQ ID NO: 136819 - DNA, 75 bp, synthetic construct
  source 1..75: mol_type = other DNA
aaacgcgcaggttttggtggggtgctcgtttcacacggcctgcgatctatcgccagtacagcccttaatgagcag

SEQ ID NO: 136820 - DNA, 75 bp, synthetic construct
  source 1..75: mol_type = other DNA
tgaggtgagaagagcatataaccgctccacttatcttgataaacgtaaagagatgatggcttggtggggaaattt

SEQ ID NO: 136821 - DNA, 75 bp, synthetic construct
  source 1..75: mol_type = other DNA
aaacgcgcaggttttggtggggtcctcgtttcacacggtttgcgatctattgccagtacagctctcaacgagcaa

SEQ ID NO: 136822 - DNA, 75 bp, synthetic construct
  source 1..75: mol_type = other DNA
atgcgtaccgccaacattatcctaccaacacgatgcctattcatgtggcaactacttactatcacccgccctgcc

SEQ ID NO: 136823 - DNA, 75 bp, synthetic construct
  source 1..75: mol_type = other DNA
gaagattcccgcagcacgcatgaaaatgaaccgcgaccatactgttccattgtcagatgaagcaatagctgtgct

SEQ ID NO: 136824 - DNA, 75 bp, synthetic construct
  source 1..75: mol_type = other DNA
agccatagacttcgatgccagaacggctattccattcgaaggtgagcgccataatgcacttgatgacgctcgtta

SEQ ID NO: 136825 - DNA, 75 bp, synthetic construct
  source 1..75: mol_type = other DNA
aaccgctgggatgaggagtctgcttcttttgtcccggttgagactgaatccgatccgatgaacgtcacttttgac

SEQ ID NO: 136826 - DNA, 75 bp, synthetic construct
  source 1..75: mol_type = other DNA
gctgggatgaggagtctgcttcctttgtcccggttgagactgaatcagatcctatgaacgtcacttttgacaagc

SEQ ID NO: 136827 - DNA, 75 bp, synthetic construct
  source 1..75: mol_type = other DNA
ctgcggccacgtgccggttttgtttcttgatgtctccgacaaatcccccattaacagcattattttttcccatga

SEQ ID NO: 136828 - DNA, 75 bp, synthetic construct
  source 1..75: mol_type = other DNA
cgaaaaaccaccctgccacccaatacgcaaaccgcttctccccaggcgttggctgattccttaatgcagctggcg

SEQ ID NO: 136829 - DNA, 75 bp, synthetic construct
  source 1..75: mol_type = other DNA
tagcactgaacaaatatacctgcgaatacctgacgacaaagggcgcgtttgagaatgaagaaacagacctgggca

SEQ ID NO: 136830 - DNA, 75 bp, synthetic construct
  source 1..75: mol_type = other DNA
taccagaaactgatgcagtggaaacggcaattccgggcaacgaaaaaaccgaatgcaaagtggaagtcgaagcat

SEQ ID NO: 136831 - DNA, 75 bp, synthetic construct
  source 1..75: mol_type = other DNA
acaggaactggaaaaagtctgcaccgcctgcggtcagaccggcggcggcaactgccctgattgtggcgcagtgat

SEQ ID NO: 136832 - DNA, 75 bp, synthetic construct
  source 1..75: mol_type = other DNA
gccataatgcacttgatgacgctcgttaccaggcaaaatacatttcagctatctggcaaaaactgatcccgagtc

SEQ ID NO: 136833 - DNA, 75 bp, synthetic construct
  source 1..75: mol_type = other DNA
cctggttaagttcggtacatgtgaaaacatcaccgttgatatggcgattgacgcgcaggaattactgcaagaaga

SEQ ID NO: 136834 - DNA, 75 bp, synthetic construct
  source 1..75: mol_type = other DNA
tgtcccggttgagactgaatcagatccgataaacgtcacttttgacaagctggcccctgaagtacagaacgctgt

SEQ ID NO: 136835 - DNA, 75 bp, synthetic construct
  source 1..75: mol_type = other DNA
ggaaggtgttgaatatccgcacaaagagaacgctggcggtaatcagcatcacaccagcgataatgaagctggcgg

SEQ ID NO: 136836 - DNA, 75 bp, synthetic construct
  source 1..75: mol_type = other DNA
ggaaatggagccaacttcgacaacacgattttgcgccgttcatacgaacggcaggggatcccctgcccgtggcgt

SEQ ID NO: 136837 - DNA, 75 bp, synthetic construct
  source 1..75: mol_type = other DNA
cagcctgacgccgataaattgcttgctgcatcacgtggtgaatttgttgaagggattagcgatccgaatgatccg

SEQ ID NO: 136838 - DNA, 75 bp, synthetic construct
  source 1..75: mol_type = other DNA
aaggcactggctgctggcgccactgaaatcacaaaagaagaatattttgcccgaaaaaatggcacatacacgggc

SEQ ID NO: 136839 - DNA, 75 bp, synthetic construct
  source 1..75: mol_type = other DNA
tacctctaacccgttctcacgcacgctgccgaatttcccgattgaagggcgcgatcttaacccactgttgcagga

SEQ ID NO: 136840 - DNA, 75 bp, synthetic construct
  source 1..75: mol_type = other DNA
gctgctgctgtccgtgtatccgctatggggcgtggcgcgcggagatgcgcgcatgatggcgtcttcccgcttgtt

SEQ ID NO: 136841 - DNA, 75 bp, synthetic construct
  source 1..75: mol_type = other DNA
cggcaataaaatcccgcgccgatcaactgggagctagcgtcgtagtctcgatggtggaacgaagcggcgtcgaag

SEQ ID NO: 136842 - DNA, 75 bp, synthetic construct
  source 1..75: mol_type = other DNA
gggcaatcagctgttgcccgtctcactggtgaaaagaaaaccacccttccgcccaatacgcaaaccgcttctccc

SEQ ID NO: 136843 - DNA, 75 bp, synthetic construct
  source 1..75: mol_type = other DNA
catctggtcgcattgggtcaccagcaaatcgcgttgttagcgggtccattaagttctgtctcggcgcgtctgcgt

SEQ ID NO: 136844 - DNA, 75 bp, synthetic construct
  source 1..75: mol_type = other DNA
gcaattcctggagcaatatccggctgctcaggactgcgcttataaatttcttgtttgcgaggataaacccggtat

SEQ ID NO: 136845 - DNA, 75 bp, synthetic construct
  source 1..75: mol_type = other DNA
tagatgatgcactgttacaattgcgggaatttatcgacgaaaactccggtgaattttttgttcaggtctggggaa

SEQ ID NO: 136846 - DNA, 75 bp, synthetic construct
  source 1..75: mol_type = other DNA
cgacggtacgcggctgggcgtggagcatctggtcgagttgggtcaccagcaaatcgcgctgttagccggtccatt

SEQ ID NO: 136847 - DNA, 75 bp, synthetic construct
  source 1..75: mol_type = other DNA
acggttgggtagggtgcgaatataaacccctgaccaccacggaagcgggattatcatggattaatccataccgct

SEQ ID NO: 136848 - DNA, 75 bp, synthetic construct
  source 1..75: mol_type = other DNA
cgataaattattagagtctgatgagttagcaagaaatgaatggaatgaaacttttaaattaaagaatgatccacg

SEQ ID NO: 136849 - DNA, 75 bp, synthetic construct
  source 1..75: mol_type = other DNA
attattagcctccagccccgaagcaaaggctgaatgggatgccacatttaaattaaaagaggacccacgtataac

SEQ ID NO: 136850 - DNA, 75 bp, synthetic construct
  source 1..75: mol_type = other DNA
ctcgcatcaggcaatccatctgttgcaaattgcccgtgaggcattaagtaacgccctcaaacattcgcaagcgag

SEQ ID NO: 136851 - DNA, 75 bp, synthetic construct
  source 1..75: mol_type = other DNA
tgtttgagcgccgcaccctgccttatcagtcgatgcagcgctcaaaagattatcgctgggcgtctaatgaccggg

SEQ ID NO: 136852 - DNA, 75 bp, synthetic construct
  source 1..75: mol_type = other DNA
agggaaccggcaatatcttcggaatgtatatcgtcgataaggtgtcgaccacgcataccgagtttttcagcgacg

SEQ ID NO: 136853 - DNA, 75 bp, synthetic construct
  source 1..75: mol_type = other DNA
gggtggattttattacattggttgcttgcagtttgttgcgtaggttggtattcgattcggcttcgtcattatttt

SEQ ID NO: 136854 - DNA, 75 bp, synthetic construct
  source 1..75: mol_type = other DNA
ggcgcagttgcgtgaattgctcaccacattccgcttgcagctcaccgagcctggattacgtccggcgctggaggc

SEQ ID NO: 136855 - DNA, 75 bp, synthetic construct
  source 1..75: mol_type = other DNA
atgccttatccggcatacgttcagcacattacccccaggtcggataagacgcggcaaacgtcgcatccggcaatg

SEQ ID NO: 136856 - DNA, 75 bp, synthetic construct
  source 1..75: mol_type = other DNA
tcaggcttttatttctgcatcgtcatggagtgtgcgggggatctctacgccagcggaagataaagtcacggtgaa

SEQ ID NO: 136857 - DNA, 75 bp, synthetic construct
  source 1..75: mol_type = other DNA
ttcggcttcccggtaaaactggattatcagcttccaccgcgcctggtaccttcgcatcaggcaattcatctgttg

SEQ ID NO: 136858 - DNA, 75 bp, synthetic construct
  source 1..75: mol_type = other DNA
tggcgatgcttggaactgcattgaacaatatgtctgcagaactggccgaaagttatgccgtacttgagcagcggg

SEQ ID NO: 136859 - DNA, 75 bp, synthetic construct
  source 1..75: mol_type = other DNA
tacaggagaaaaccgccgggctggagcataaaaatcaaatactctcgtttttgtggcaggctaaccgtcgtttgc

SEQ ID NO: 136860 - DNA, 75 bp, synthetic construct
  source 1..75: mol_type = other DNA
agtttgaaagatttggacactgctttagatctgggcttaatctctcagcaagacgcagccgcgaaacgccaatcc

SEQ ID NO: 136861 - DNA, 75 bp, synthetic construct
  source 1..75: mol_type = other DNA
ttatgatggaatcgttagccagtgattcaagtcatatggctgatgaattgcagaaatacggatcttatcaggaag

SEQ ID NO: 136862 - DNA, 75 bp, synthetic construct
  source 1..75: mol_type = other DNA
ggacaccacacattttacatggcctgcatgattggtgtgattctgacagtggctggttttgaaggtatatcactg

SEQ ID NO: 136863 - DNA, 75 bp, synthetic construct
  source 1..75: mol_type = other DNA
ataccgaacaaagttattcacagattgaagattctttgcatggaatggatggttttaaaaccaatcaattgacca

SEQ ID NO: 136864 - DNA, 75 bp, synthetic construct
  source 1..75: mol_type = other DNA
tccggttgatgctctgaatgctttaacacaattgcaacaaatcagggacaacgagttagaaagccataaacggtt

SEQ ID NO: 136865 - DNA, 75 bp, synthetic construct
  source 1..75: mol_type = other DNA
aaatcaatggctgaaatcaaattcatgatggaatctttagccagtgattcaagtcatatgaccagccagcttgag

SEQ ID NO: 136866 - DNA, 75 bp, synthetic construct
  source 1..75: mol_type = other DNA
aaaatgtctccctggggacagtaaataaaagcaaagtacctctgggtttaagcgcaacctatggacaaacaggaa

SEQ ID NO: 136867 - DNA, 75 bp, synthetic construct
  source 1..75: mol_type = other DNA
cggtaagggggaaaacgcgatccagcttgccggtacgctttaccctgctattaccggcggtcgtatatccctgct

SEQ ID NO: 136868 - DNA, 75 bp, synthetic construct
  source 1..75: mol_type = other DNA
tgaataaacaggccggggagcttctcggctctgtcggtaatctgaccgataaaatgcagggtatgctcggagggc

SEQ ID NO: 136869 - DNA, 75 bp, synthetic construct
  source 1..75: mol_type = other DNA
ttgttgttgatatacttaaagtgcccgcgatactggtcggcttgattgccttaattggtctggttgcccagaaaa

SEQ ID NO: 136870 - DNA, 75 bp, synthetic construct
  source 1..75: mol_type = other DNA
agcatcgggcgtgggtgtctctctgatacgtaatggaaaaatactggcaacaggagaaaatgtctccctggggac

SEQ ID NO: 136871 - DNA, 75 bp, synthetic construct
  source 1..75: mol_type = other DNA
gctcagctttcgcaggctccctacagtcatataaaggatcactgtactggaataatgtgacctaccccttcccgt

SEQ ID NO: 136872 - DNA, 75 bp, synthetic construct
  source 1..75: mol_type = other DNA
cactgacaataaaatcagtgacacgaagacggagctgaatgccagtattgacaaggcgaagaacgacgcgatcag

SEQ ID NO: 136873 - DNA, 75 bp, synthetic construct
  source 1..75: mol_type = other DNA
gccaatattgataaggcgaagaatgacgcgatcagttcatccaacagttatactgacaataaaatcagtgacacg

SEQ ID NO: 136874 - DNA, 75 bp, synthetic construct
  source 1..75: mol_type = other DNA
ctgttttagtaggactgtttgctggtagtgcatatgcagattgtgagtattaccttacaggtaataaggaaactc

SEQ ID NO: 136875 - DNA, 75 bp, synthetic construct
  source 1..75: mol_type = other DNA
gacttgattgatggcacgaatatactgccattccaggctccgttatattgctctcgggcagtccgtagctggtac

SEQ ID NO: 136876 - DNA, 75 bp, synthetic construct
  source 1..75: mol_type = other DNA
gggtggttcacgctgcatgctattgttgttcttggctgtgtcggctggtattcagtccgcctgcggcattatttt

SEQ ID NO: 136877 - DNA, 75 bp, synthetic construct
  source 1..75: mol_type = other DNA
ataaggcaaagaacgacgcgatcagttcgtccaacagttacactgacagtaaaatcagtgatacgaagacagaac

SEQ ID NO: 136878 - DNA, 75 bp, synthetic construct
  source 1..75: mol_type = other DNA
cgcaactgggggctgtcagtggttggtttaaacagcgctgggctgacattcaggaagcctttaacggcggcattg

SEQ ID NO: 136879 - DNA, 75 bp, synthetic construct
  source 1..75: mol_type = other DNA
tcaggaagcctttaacggcggcattgtgggaattggtaagttgctgattaactggtcgccggcaggcctgctcta

SEQ ID NO: 136880 - DNA, 75 bp, synthetic construct
  source 1..75: mol_type = other DNA
aatatgacaataaaacgcgggatgcacttgccggacagataaaaggctgggcgcttaaatacaatcagtatcagg

SEQ ID NO: 136881 - DNA, 75 bp, synthetic construct
  source 1..75: mol_type = other DNA
tgtgttttttacacacgctaccgcccctggctttacagctaccagagcactgcatgcatacctacgatgtgacga

SEQ ID NO: 136882 - DNA, 75 bp, synthetic construct
  source 1..75: mol_type = other DNA
cgtcttaagccatttaatctgccctgtattgtggtggatgacggcagcgatgccgccacgcaacagcaactggat

SEQ ID NO: 136883 - DNA, 75 bp, synthetic construct
  source 1..75: mol_type = other DNA
gggaattggtaagttgctgattaactggtcgccggcaggcctgctctataaagcctttgcggctgcgctgaaata

SEQ ID NO: 136884 - DNA, 75 bp, synthetic construct
  source 1..75: mol_type = other DNA
atcaaacagaccaccccggatggtgcgggacgtgtggcagctcatgcagtagtgaatgcagccctgtctctggca

SEQ ID NO: 136885 - DNA, 75 bp, synthetic construct
  source 1..75: mol_type = other DNA
cactaacgatgaaattatcaaagcggtagacaaatcacatatcggcccgtcagtaggtgatacggcaaaaataca

SEQ ID NO: 136886 - DNA, 75 bp, synthetic construct
  source 1..75: mol_type = other DNA
gaccacactcggccatattaatcgttcagcgattaatgtgctgctactgcgtcatgaacgcagctctctgccgct

SEQ ID NO: 136887 - DNA, 75 bp, synthetic construct
  source 1..75: mol_type = other DNA
atcgcaaactacttgctcgacaacagtaattgcacaattattcacactggtggtgcagtttgtcgggaaaaccgt

SEQ ID NO: 136888 - DNA, 75 bp, synthetic construct
  source 1..75: mol_type = other DNA
tcggttgcacgtcgaagtggctgacagcggccccggactaactgaagatatgcgaactcatcttttccggcgggc

SEQ ID NO: 136889 - DNA, 75 bp, synthetic construct
  source 1..75: mol_type = other DNA
aacaacacccagccattcgcccgctgattagcggcggcaaactgcttgaatattccgcgcatatggtgccggagg

SEQ ID NO: 136890 - DNA, 75 bp, synthetic construct
  source 1..75: mol_type = other DNA
atgcagaatgccgcagtggggcagtcaacaacttccgcggtgatgcagaatgccgcagtggggcagtcaacaact

SEQ ID NO: 136891 - DNA, 75 bp, synthetic construct
  source 1..75: mol_type = other DNA
agcaaactgaccaatcagctggtgcagacggtaagggggtatatccgcgaatgcctgcaatggatgattgatgat

SEQ ID NO: 136892 - DNA, 75 bp, synthetic construct
  source 1..75: mol_type = other DNA
ttatcggtaatgccagcataatgctggggtatgtttctgatgcgatgaaagtggtggattctgccgtatcggatg

SEQ ID NO: 136893 - DNA, 75 bp, synthetic construct
  source 1..75: mol_type = other DNA
aagtttttggtcaccgaaggcgttatcagccaggaaacgttggatcgcgtcctgacaattcaacgcgaattacaa

SEQ ID NO: 136894 - DNA, 75 bp, synthetic construct
  source 1..75: mol_type = other DNA
tggcagatcccgtcctcgctgattgccgaaatgccagcctccgtagcgctgcattatgcagtactgccgctgcgt

SEQ ID NO: 136895 - DNA, 75 bp, synthetic construct
  source 1..75: mol_type = other DNA
gagaaaggtatgacggaaatttttgtccgttttccggtggtggacgaagccaaagaacgcgagcagcgtaaattt

SEQ ID NO: 136896 - DNA, 75 bp, synthetic construct
  source 1..75: mol_type = other DNA
cgggagatgctccagtggtacgccgactatatggactcactggaacagggcggaaacgtggtgcacggcaagttt

SEQ ID NO: 136897 - DNA, 75 bp, synthetic construct
  source 1..75: mol_type = other DNA
aaacctatgggtggaataaaccaatggacagaatcaccgattctcaacttagtgaaccgccccgggaatcctgga

SEQ ID NO: 136898 - DNA, 75 bp, synthetic construct
  source 1..75: mol_type = other DNA
aaacctatgggtggaataaaccaatggacagaatcaccgattctcaacttagtgaaccgccccgggtttcctgga

SEQ ID NO: 136899 - DNA, 75 bp, synthetic construct
  source 1..75: mol_type = other DNA
ccatgcgcagtatctggatgggaggagggagatgatgcagtggtatggcgagttgttatcttttatgtgtgatgt

SEQ ID NO: 136900 - DNA, 75 bp, synthetic construct
  source 1..75: mol_type = other DNA
aaactgcaaaacccaaagagaagccctacaaactggctgatggtggtggtctttacctgctggttaatcccaacg

SEQ ID NO: 136901 - DNA, 75 bp, synthetic construct
  source 1..75: mol_type = other DNA
gtgattgttaagattgcgatgcaattacttattttgactggagtaaggcctggggaattgaggcaagcggagtgg

SEQ ID NO: 136902 - DNA, 75 bp, synthetic construct
  source 1..75: mol_type = other DNA
ccagcgttttccggtcaaaatcatggttgataaacctgacccggaaatgttccgcatcggcgcttcggcagtcgc

SEQ ID NO: 136903 - DNA, 75 bp, synthetic construct
  source 1..75: mol_type = other DNA
tcaaagtaaaataagaaatgcgtggcttagaaactttatgattaaaggctatcgatatgtctcagttattccaac

SEQ ID NO: 136904 - DNA, 75 bp, synthetic construct
  source 1..75: mol_type = other DNA
gaaggagtttgtaaaaaaaatataactaaccctgaacacataaaaaaaatccaaaatgaaataaaacggaattat

SEQ ID NO: 136905 - DNA, 75 bp, synthetic construct
  source 1..75: mol_type = other DNA
cactgcccttatcgatcgccggatggcgttttgaccttgctgaatgcagcacatccggtaatgacgggctgttac

SEQ ID NO: 136906 - DNA, 75 bp, synthetic construct
  source 1..75: mol_type = other DNA
gccacaggcaacagatattcaggaacgcctgacaacatttgcacaaaaaatgaggttaaaactcacctggcagga

SEQ ID NO: 136907 - DNA, 75 bp, synthetic construct
  source 1..75: mol_type = other DNA
ttgtctgagaataatcagaataaccggaatttcacttcggttattaaaaacaagcgtgcttttttctccggtctg

SEQ ID NO: 136908 - DNA, 75 bp, synthetic construct
  source 1..75: mol_type = other DNA
caggaaaaaatcgcaattattcaacagaccatggagccgggtatgacggtgtcccacgtggcgcgtttgccatct

SEQ ID NO: 136909 - DNA, 75 bp, synthetic construct
  source 1..75: mol_type = other DNA
ttacaatgaaaaccatccgcatagtgcgttaggttatctctcaccaagggaatatcgacgtcagcgggtaacgtc

SEQ ID NO: 136910 - DNA, 75 bp, synthetic construct
  source 1..75: mol_type = other DNA
cagaaaggttcgtgaaaatgatgaaagaagactacatcgcgttcatgccgaaaccgaatgtaagaacggcattgc

SEQ ID NO: 136911 - DNA, 75 bp, synthetic construct
  source 1..75: mol_type = other DNA
ggaaaatgaactcctcaaagaagccgttgaatatggacgggcaaaaaagtggatagcgcacgcgcccttattgtc

SEQ ID NO: 136912 - DNA, 75 bp, synthetic construct
  source 1..75: mol_type = other DNA
attttcacaattattaggaacaagtgaaaaccctcgtttagttgctaaaacaataatcggctattgtgattcgat

SEQ ID NO: 136913 - DNA, 75 bp, synthetic construct
  source 1..75: mol_type = other DNA
ctggactgctgcgaccgtgaggccatagactgggcagcaagcacgggaggctatgacagttcaaccgtgcaggat

SEQ ID NO: 136914 - DNA, 75 bp, synthetic construct
  source 1..75: mol_type = other DNA
cgtgtatttgatcgccagcggtcgcatgtgtgtcgccggacttaatgcgcaaaatgtacatcgtgttgcgaaggc

SEQ ID NO: 136915 - DNA, 75 bp, synthetic construct
  source 1..75: mol_type = other DNA
ggaaggtttcaatacagcgtggattgaaacccagctggctcacgttgataaaaatgcgattcgtgggacgtataa

SEQ ID NO: 136916 - DNA, 75 bp, synthetic construct
  source 1..75: mol_type = other DNA
ttaaagccgaggttgaattgctaaggcttgaaaggctaaaagaaactataaggttagggaaagatcatccaatgc

SEQ ID NO: 136917 - DNA, 75 bp, synthetic construct
  source 1..75: mol_type = other DNA
ttgatatcatcagcgatatgccgacatatggctatcgtcgtgtctgggccattctcagacgacagtcccgtaacg

SEQ ID NO: 136918 - DNA, 75 bp, synthetic construct
  source 1..75: mol_type = other DNA
gaccagtacgctggcggcgccaaaagctgcacatttcccccacctgagagcagatgagctccctgtttttctccg

SEQ ID NO: 136919 - DNA, 75 bp, synthetic construct
  source 1..75: mol_type = other DNA
tctggagcattcctgaagagcgaatgaaaatgcgacgaccacacctcgttccgctatcccgacaggcgctggcta

SEQ ID NO: 136920 - DNA, 75 bp, synthetic construct
  source 1..75: mol_type = other DNA
cttggggcggttggtggctacagtgataatcagggcgacagccgctcgaatatgaccggaactcgcgccgataac

SEQ ID NO: 136921 - DNA, 75 bp, synthetic construct
  source 1..75: mol_type = other DNA
gggtttacacagcgaatggcgtaccgctgttcatgtcacaccaacattagatctgaattattatcacgatcccca

SEQ ID NO: 136922 - DNA, 75 bp, synthetic construct
  source 1..75: mol_type = other DNA
attggtgttgaacggtaatactgctggcaacacaactgtggtggttaactccattacagggattggtgagccgac

SEQ ID NO: 136923 - DNA, 75 bp, synthetic construct
  source 1..75: mol_type = other DNA
agtggctacgtcaatatgggagcgtatgactacacgctggtggaagataacaacgactggtatctgcgatcgcaa

SEQ ID NO: 136924 - DNA, 75 bp, synthetic construct
  source 1..75: mol_type = other DNA
tagggagtattgataagtaccagaatcaggcagagctaaatgttggctccacccaacaaacctttgtgcactcat

SEQ ID NO: 136925 - DNA, 75 bp, synthetic construct
  source 1..75: mol_type = other DNA
ctgctcgatagcgaattaaacggcgatgactcggtaagcgatcaattggtgatgaacggtaatactgctggcaat

SEQ ID NO: 136926 - DNA, 75 bp, synthetic construct
  source 1..75: mol_type = other DNA
cacacattttcttcgacgatcaggatgtgcatttaaatacagctgcaaaggttgtaccttccgggaaagtacctt

SEQ ID NO: 136927 - DNA, 75 bp, synthetic construct
  source 1..75: mol_type = other DNA
taggggattgggtggatctgctagtcttgccgttggtggtgttctaggtgtcacgggggcaatggttggactggt

SEQ ID NO: 136928 - DNA, 75 bp, synthetic construct
  source 1..75: mol_type = other DNA
tgcttgataagggtgaacgagtagttgatcagcgtactaacggtgatttgaaagacttccttgctgctcaaaaat

SEQ ID NO: 136929 - DNA, 75 bp, synthetic construct
  source 1..75: mol_type = other DNA
gtttaaccagcaggtagacgaatatctggatacgtatggagatactattcctcaagggctaaaaaaaagcttagg

SEQ ID NO: 136930 - DNA, 75 bp, synthetic construct
  source 1..75: mol_type = other DNA
aacgtcagccagaatgtctcaggctaagagatggcttgatggcaacaataattacaacaatgcgttgattactgg

SEQ ID NO: 136931 - DNA, 75 bp, synthetic construct
  source 1..75: mol_type = other DNA
ggcatatgggggcagataaaaggatatgtagaccagcttaatgcagggaatggcttgtcacaggaagcgagggat

SEQ ID NO: 136932 - DNA, 75 bp, synthetic construct
  source 1..75: mol_type = other DNA
cgacgccgggtgctgttgacacccggacattatctcggaaactggtcataccgtctgcgtcaatctcaggaacag

SEQ ID NO: 136933 - DNA, 75 bp, synthetic construct
  source 1..75: mol_type = other DNA
gcagtgtgattgccctggagaaccggcttcagttcagtgaggctcgggagcagaagtacctgcgaatcgtcagtg

SEQ ID NO: 136934 - DNA, 75 bp, synthetic construct
  source 1..75: mol_type = other DNA
tggacaccctggcgttaaactctcaaatcgcctctacgggagttgaccctttaaccggcaagccagcaaccggcg

SEQ ID NO: 136935 - DNA, 75 bp, synthetic construct
  source 1..75: mol_type = other DNA
gtatattagacatattagggttttggagaagagatacgtggattatcggtagtggggataatgcattagaagcat

SEQ ID NO: 136936 - DNA, 75 bp, synthetic construct
  source 1..75: mol_type = other DNA
ctatcaatgatgctctgcgccgcatgaagaaatcaggtatcaccaagcctgaacttgaagcgtacctgcgtgaaa

SEQ ID NO: 136937 - DNA, 75 bp, synthetic construct
  source 1..75: mol_type = other DNA
atggccaccatgactgaccatcagaaggagttcatttcgttgtttaaccggacagcctgttatcacaaacgtcat

SEQ ID NO: 136938 - DNA, 75 bp, synthetic construct
  source 1..75: mol_type = other DNA
cgcaaaacggcagctacgtgctggcaggggcgcagtcgatggcgctaaccggcgatatagtcgttgatgatggtg

SEQ ID NO: 136939 - DNA, 75 bp, synthetic construct
  source 1..75: mol_type = other DNA
cgacgcgatcacgctggtggcgatggtcagacgctgaatttacgtgttatcggcggacgttatcattacacggcg

SEQ ID NO: 136940 - DNA, 75 bp, synthetic construct
  source 1..75: mol_type = other DNA
ataataacggcggggcaatatttgctaaagaaaactcaacgctgaatcttactgatgttattttttctggtaacg

SEQ ID NO: 136941 - DNA, 75 bp, synthetic construct
  source 1..75: mol_type = other DNA
cgcccgcctcgatgttacacaaccagctgacgtggtgaaaaagcagcttggagaaattcgcagccaatattctgt

SEQ ID NO: 136942 - DNA, 75 bp, synthetic construct
  source 1..75: mol_type = other DNA
gatattgaaatgcgcgccgacggtgaagtggcagttgatgcgggggtagacaccataagcgctaacttaagggtt

SEQ ID NO: 136943 - DNA, 75 bp, synthetic construct
  source 1..75: mol_type = other DNA
gctggtggaagataacaacgactggtatctgcgatcgcaagaagtaacgccgccatcgccacctgatccagaccc

SEQ ID NO: 136944 - DNA, 75 bp, synthetic construct
  source 1..75: mol_type = other DNA
cagcgtctgaatgactggcgcaaagcccagaccgacgaagtgctggaaaacccggacccgcgaggtgcggcatga

SEQ ID NO: 136945 - DNA, 75 bp, synthetic construct
  source 1..75: mol_type = other DNA
tgtagatcttgttgttgacttctcaaattttgataacacagcgataaccagattgcaaacactacatttacttag

SEQ ID NO: 136946 - DNA, 75 bp, synthetic construct
  source 1..75: mol_type = other DNA
ttttgacaacaaaatatatgaaccagcaaatattgttgcaaatgaattcaggaagaaaaacaaaaaattagttat

SEQ ID NO: 136947 - DNA, 75 bp, synthetic construct
  source 1..75: mol_type = other DNA
aacccgggctttgcattctacttcaccgctgttgtaagtctggtcacaggaacgatgttcctgatgtggttgggt

SEQ ID NO: 136948 - DNA, 75 bp, synthetic construct
  source 1..75: mol_type = other DNA
gcctggtatgcaaggcctggtgattaacccgggctttgcattctacttcaccgctgttgtaagtctggtcacagg

SEQ ID NO: 136949 - DNA, 75 bp, synthetic construct
  source 1..75: mol_type = other DNA
gtgctggcaatattccagtcgatcggtattgctactggtctgccgaatatgcttggtatgcaaggcctggtgatt

SEQ ID NO: 136950 - DNA, 75 bp, synthetic construct
  source 1..75: mol_type = other DNA
gtgaaagccacagctgcaccggtaactggcccactggctgacgacccgattcaggaaaccatcacctttgacgac

SEQ ID NO: 136951 - DNA, 75 bp, synthetic construct
  source 1..75: mol_type = other DNA
aacgtaatgtcttctccggcattcgttctgcctacccggacccgcaggcgctgattggtcgtcacaccattatgg

SEQ ID NO: 136952 - DNA, 75 bp, synthetic construct
  source 1..75: mol_type = other DNA
tgttccgcgtgctgatgacttacctgaagccggtactgccgaaactgaccgagcgtgcagaagcattccttaata

SEQ ID NO: 136953 - DNA, 75 bp, synthetic construct
  source 1..75: mol_type = other DNA
acaagtttcgatgcaatcactattactcaaagcaggtttaaacactgaacagtgttgcacaactggagtccgaaa

SEQ ID NO: 136954 - DNA, 75 bp, synthetic construct
  source 1..75: mol_type = other DNA
ggaaaggtaagacaataccttttatttttagttattttatcactgtactactccatagcggaaccatttaagtct

SEQ ID NO: 136955 - DNA, 75 bp, synthetic construct
  source 1..75: mol_type = other DNA
cgccgctgccacccttgaaacctacctgaatatttctgaacgcactattctggctgcgctggcgcgcagccggta

SEQ ID NO: 136956 - DNA, 75 bp, synthetic construct
  source 1..75: mol_type = other DNA
cgcctatgaagctccatcggttaaacgctcatggtatcagtgccagaatctggaatgttcctgcacatttaccgc

SEQ ID NO: 136957 - DNA, 75 bp, synthetic construct
  source 1..75: mol_type = other DNA
gtgcggtgtggcccacagactccgcatcggttgtcaggcaaaaacagcagacaaatctggtggctgcagtcatcc

SEQ ID NO: 136958 - DNA, 75 bp, synthetic construct
  source 1..75: mol_type = other DNA
ggcgtgataatctttacgatgcttcatttcgtggcgttccgttttcggtggaaagcgacgagggttcgttcggac

SEQ ID NO: 136959 - DNA, 75 bp, synthetic construct
  source 1..75: mol_type = other DNA
cgtttgcgtcgatggcgaaattaacgtgagtgcatcgagcagtgaagggcgcatggtgcgctttgatcttcgttt

SEQ ID NO: 136960 - DNA, 75 bp, synthetic construct
  source 1..75: mol_type = other DNA
atggatttatcctcatttcccacccgaccttcattactttcgtcgtcttcaggctggcgtgacagacttcaggac

SEQ ID NO: 136961 - DNA, 75 bp, synthetic construct
  source 1..75: mol_type = other DNA
acgcgtcatttcgcggcgtgccgtttaaggttgaagaagaaagtgcgggaaccggtcgccgtgtggaaacacacg

SEQ ID NO: 136962 - DNA, 75 bp, synthetic construct
  source 1..75: mol_type = other DNA
atgatgacggtaggtaaaaaagtggaagagctgatagcacgtctggcgcaaaaagcccgtgccgcgggtatccac

SEQ ID NO: 136963 - DNA, 75 bp, synthetic construct
  source 1..75: mol_type = other DNA
taaaatatgtcatcgcacatgcagattatccggggaaggagtatcagtttggcaaagaaatagcggagagcgaat

SEQ ID NO: 136964 - DNA, 75 bp, synthetic construct
  source 1..75: mol_type = other DNA
ttagtatttgcagtgacgttctttgttgtttttgttgagcgtggtcaacgccgcattgtggtaaactacgcgaaa

SEQ ID NO: 136965 - DNA, 75 bp, synthetic construct
  source 1..75: mol_type = other DNA
gaacgtcagcgaattgaagcagagcagcgtgcacgacgcgaaaaagaagaagccgttgccgaggaacgccgacgc

SEQ ID NO: 136966 - DNA, 75 bp, synthetic construct
  source 1..75: mol_type = other DNA
tcacaccagatatggcaccaagaatttacgttgaaaaaggactggaaaagtttctcgagcagatccgtgaaggtg

SEQ ID NO: 136967 - DNA, 75 bp, synthetic construct
  source 1..75: mol_type = other DNA
aggccaggcgtgaagctgaagagaaaatagagcgtgaacgcgctgaatctgcccgtcgtgaggctgaattaaagc

SEQ ID NO: 136968 - DNA, 75 bp, synthetic construct
  source 1..75: mol_type = other DNA
catgtactccacctatgaagatgagtgcgaagcgaatccgtccacgcgtgacaaaatcatggtgctcggcggcgg

SEQ ID NO: 136969 - DNA, 75 bp, synthetic construct
  source 1..75: mol_type = other DNA
ggcgttgaaactggcggttccaacgttcagtttgcggttaacccgaaaaacggtcgcctgattgttatcgaaatg

SEQ ID NO: 136970 - DNA, 75 bp, synthetic construct
  source 1..75: mol_type = other DNA
tgaacgctgaattcctgcgccagctgaaacgcaaaggctttgccgatgcgcgtctggcaaaactggcgggcgtgc

SEQ ID NO: 136971 - DNA, 75 bp, synthetic construct
  source 1..75: mol_type = other DNA
acgcggtgctgccaacgatgggcggtcagacggcgctgaactgcgcgctggagctggaacgtcagggcgtgttgg

SEQ ID NO: 136972 - DNA, 75 bp, synthetic construct
  source 1..75: mol_type = other DNA
tccatcgattatgtggttactaaaattcctcgcttcaacttcgaaaaattcgccggtgctaacgaccgtctgacc

SEQ ID NO: 136973 - DNA, 75 bp, synthetic construct
  source 1..75: mol_type = other DNA
cttcgagctggatgcgacccacggcacggcgattgtgctgggcgaagcgggcattaatccgcgtctggtgaacaa

SEQ ID NO: 136974 - DNA, 75 bp, synthetic construct
  source 1..75: mol_type = other DNA
gaccgattcggcagagaaagcacagagtgtgacgtctgttgaatgcaccgtgacagtgagcgcagccgccggata

SEQ ID NO: 136975 - DNA, 75 bp, synthetic construct
  source 1..75: mol_type = other DNA
ttcgcctgaagggtaaaccggtgtcctatgtggtaccgctggcgtttgtgaaaaatccggagaagacacttaccg

SEQ ID NO: 136976 - DNA, 75 bp, synthetic construct
  source 1..75: mol_type = other DNA
gaaaagggaaaccgcggatgcgttgaagcgccttcgtgatgccgggtttatttccctggatttacgcacggtgga

SEQ ID NO: 136977 - DNA, 75 bp, synthetic construct
  source 1..75: mol_type = other DNA
ctggaaaatgacgagttaattgtcggcagtgaagatggtattgacccggtttcgctggcggccctgacgcgtaaa

SEQ ID NO: 136978 - DNA, 75 bp, synthetic construct
  source 1..75: mol_type = other DNA
gggctgattagcgccgagcagctggcacaggcgctggcagagcaaaacggcgtggcgtgggaatccatcgatgcc

SEQ ID NO: 136979 - DNA, 75 bp, synthetic construct
  source 1..75: mol_type = other DNA
tgacgaagtgtgcgctcgcttcccgaatgtgcataaggtagtctgcgcgcgtcctggccccaccagcaaagccga

SEQ ID NO: 136980 - DNA, 75 bp, synthetic construct
  source 1..75: mol_type = other DNA
gacgtctttattggcggtgagcaggtcacatatctggatatccagctggagttcccgccattgcagagaatgatc

SEQ ID NO: 136981 - DNA, 75 bp, synthetic construct
  source 1..75: mol_type = other DNA
ccaccacaaccggccggaaacactcaccgacgtgatgggccgtgaacaccacaccgaatacagtggtcacgacct

SEQ ID NO: 136982 - DNA, 75 bp, synthetic construct
  source 1..75: mol_type = other DNA
gaacgcggcctgccggtgagtctggtatcgccacagggcgaagagacccggctggcgtacaccgctcaggggctg

SEQ ID NO: 136983 - DNA, 75 bp, synthetic construct
  source 1..75: mol_type = other DNA
cgtcacaccattatggtggccaacctggcaccgcgtaaaatgcgctttggtatctccgaaggcatggtaatggct

SEQ ID NO: 136984 - DNA, 75 bp, synthetic construct
  source 1..75: mol_type = other DNA
aacgcaatgtcttctccggcattcgttctgcttacccggatccgcaggcactgattggtcgtcataccattatgg

SEQ ID NO: 136985 - DNA, 75 bp, synthetic construct
  source 1..75: mol_type = other DNA
gttaccagcgaatgcgcggccacgaggttaatttcatctgtgccgacgatgcccacggtacgccgatcatgctga

SEQ ID NO: 136986 - DNA, 75 bp, synthetic construct
  source 1..75: mol_type = other DNA
gatgggcgtcggtcgcaccttcgctgaagcgtttgctaaagcgcaactgggcagtaactccaccatgaagaaaca

SEQ ID NO: 136987 - DNA, 75 bp, synthetic construct
  source 1..75: mol_type = other DNA
ttaagtcaggaaattcaggatgtaatgcgccagcaggtgcagaaactggccttcgaattgcaggtgcgcggcctg

SEQ ID NO: 136988 - DNA, 75 bp, synthetic construct
  source 1..75: mol_type = other DNA
aaatgcgctctaccggggaagtgatgggtgttggtcgcaccttcgctgaagcgtttgctaaagcacagttgggca

SEQ ID NO: 136989 - DNA, 75 bp, synthetic construct
  source 1..75: mol_type = other DNA
tgctgatggcgcacccttatggggcggtcatactggtcgtccttttccttgtggtgatggcttttctgaacctac

SEQ ID NO: 136990 - DNA, 75 bp, synthetic construct
  source 1..75: mol_type = other DNA
gccgattcactgggaagtggtacgcaagattattgaaaaagagcgcccggacgcggtgctgccaaccatgggcgg

SEQ ID NO: 136991 - DNA, 75 bp, synthetic construct
  source 1..75: mol_type = other DNA
tgcgaagcgaatccgtctactgaccgtgaaaaaattatggtgctgggcggcggtccgaaccgtatcggtcagggt

SEQ ID NO: 136992 - DNA, 75 bp, synthetic construct
  source 1..75: mol_type = other DNA
gccagaacactgggtggtgtgctctccggagggctggttcgcggcattatgatcgccgggcgtgccgttctctgg

SEQ ID NO: 136993 - DNA, 75 bp, synthetic construct
  source 1..75: mol_type = other DNA
gggcttgtcgatcaggatgtagcactgtttagtagtgatattgcagaaaacattcgttattcacggccatccgcc

SEQ ID NO: 136994 - DNA, 75 bp, synthetic construct
  source 1..75: mol_type = other DNA
gtaattgcacaattattcacactggcggtgcagtgtgtcgggaaaaccgttcctgtgtcggggaagccgctgcga

SEQ ID NO: 136995 - DNA, 75 bp, synthetic construct
  source 1..75: mol_type = other DNA
aagttattaccgcgctcattgcttttaaaattgcggttattggtctcaagctggggataaaccttcttatttccc

SEQ ID NO: 136996 - DNA, 75 bp, synthetic construct
  source 1..75: mol_type = other DNA
cgttggcggctggtttaaagaaaagctgggtatccattcgccaagccgggtattcatgggctttggtgacaacat

SEQ ID NO: 136997 - DNA, 75 bp, synthetic construct
  source 1..75: mol_type = other DNA
cagcagtccatgtcttttcaggacaaaatgattgatatgtcgatcaccgcaaaatatgacaataaaacgcgggat

SEQ ID NO: 136998 - DNA, 75 bp, synthetic construct
  source 1..75: mol_type = other DNA
ttgatactcatcactatcgccatatatgggctgttggtgatattcatggtgactatcaattattacaatcccgtt

SEQ ID NO: 136999 - DNA, 75 bp, synthetic construct
  source 1..75: mol_type = other DNA
aaaataaacggtgccgaccgctttatctttgatcatatgatgtttgataacattcagacgttcgctaaccagatt

SEQ ID NO: 137000 - DNA, 75 bp, synthetic construct
  source 1..75: mol_type = other DNA
cggaaagagaggtactctggcctgttgatcgcgtgcagaaatcactcaaaggcgagttaaaagaaataaacggtg

SEQ ID NO: 137001 - DNA, 75 bp, synthetic construct
  source 1..75: mol_type = other DNA
gggaagttgtatctatctggatgcgggaacgaccacgttagcgatagcacagcatctgattcacatggagtcact

SEQ ID NO: 137002 - DNA, 75 bp, synthetic construct
  source 1..75: mol_type = other DNA
atatttggtatccaaagaatgaaaatgttgggcattgctcattacagataggtaataacaattctcctgaatact

SEQ ID NO: 137003 - DNA, 75 bp, synthetic construct
  source 1..75: mol_type = other DNA
gactgtcgcggtcactgttgttgatgcgacaaatcagtcccgtcgccaggaaacctggacgattgaacgtaaaaa

SEQ ID NO: 137004 - DNA, 75 bp, synthetic construct
  source 1..75: mol_type = other DNA
ttgttatcggcgggatgattggtagcacattccgttctgcaatgagcggtacccgccgtgcgcttgattccctga

SEQ ID NO: 137005 - DNA, 75 bp, synthetic construct
  source 1..75: mol_type = other DNA
gcgcctggcaaaatgttttccactggcgaaaactggtcacgttttttccgctttaatactgcatggcagtgggga

SEQ ID NO: 137006 - DNA, 75 bp, synthetic construct
  source 1..75: mol_type = other DNA
ttttcgtattggttgggtcgccgctggaaaacacgcacgcaaaattcaacgattgcaattgatgagtacgctttc

SEQ ID NO: 137007 - DNA, 75 bp, synthetic construct
  source 1..75: mol_type = other DNA
cacattccgttctgcaatgagcggtacccgccgtgcgcttgattccctgagcgatacctcacgccgcctgcagga

SEQ ID NO: 137008 - DNA, 75 bp, synthetic construct
  source 1..75: mol_type = other DNA
acaaattgaagttatggcgataataccaaaagaaacttcttatgttaagaggtgcttaattgatactggaggaat

SEQ ID NO: 137009 - DNA, 75 bp, synthetic construct
  source 1..75: mol_type = other DNA
atattcaggccgtggtgcagctgcaaccggcggtggaacgtctggtggtatccaggtcagctttaatcctcagtt

SEQ ID NO: 137010 - DNA, 75 bp, synthetic construct
  source 1..75: mol_type = other DNA
ttcccaggagaatgaacttatgccactgattaacggtgtccgtcatattctcagtgccgttaaaaataccgtggt

SEQ ID NO: 137011 - DNA, 75 bp, synthetic construct
  source 1..75: mol_type = other DNA
gcgtttcaggctggttttccggtatctggactgaaattaagacggcttttgacggcgggattgccggtgtcggcc

SEQ ID NO: 137012 - DNA, 75 bp, synthetic construct
  source 1..75: mol_type = other DNA
gacaaaaaactggatcacacttcatcctgagctggtcagcggtgcaatacagattgtggctgccctgctggcctt

SEQ ID NO: 137013 - DNA, 75 bp, synthetic construct
  source 1..75: mol_type = other DNA
ttgccgatttaggtatcgacctgatggggtctcttgcgaattataaagcagccggagtttcccccattgaaggta

SEQ ID NO: 137014 - DNA, 75 bp, synthetic construct
  source 1..75: mol_type = other DNA
tgatgattggcggcattgtcgggagcagttttcgttccgcgatgagcagtacccggcgtactctggattctctcg

SEQ ID NO: 137015 - DNA, 75 bp, synthetic construct
  source 1..75: mol_type = other DNA
cttcccggatgcagcgcctcaacagcgacctgctgcgggtaagccgcacaatggagcaaattgagcgccagcagc

SEQ ID NO: 137016 - DNA, 75 bp, synthetic construct
  source 1..75: mol_type = other DNA
gaagaagggcaggtggaaaaattgatgcagtggttaaaaagtggcggtccgcgttcagcgcgtgtagagcgcgta

SEQ ID NO: 137017 - DNA, 75 bp, synthetic construct
  source 1..75: mol_type = other DNA
gaagaagggcaggtggaaaaattaatgcagtggttaaagagtggcggcccgcgttctgcgcgtgtggaacgggtg

SEQ ID NO: 137018 - DNA, 75 bp, synthetic construct
  source 1..75: mol_type = other DNA
gccaccaaaacaacagatcatatgcagcaggagctttgggcagcgtataacaacgtatgaatccatgcggcaggc

SEQ ID NO: 137019 - DNA, 75 bp, synthetic construct
  source 1..75: mol_type = other DNA
atggtaatacacatgaataaaaaagtgacaactaatgttcctaaggtttccgggattaagcgtattcgcgttttt

SEQ ID NO: 137020 - DNA, 75 bp, synthetic construct
  source 1..75: mol_type = other DNA
caagagtagaggtttactccattgacgaagcgtttttggacttaaccggtattgagtctgccatatcccttgtcg

SEQ ID NO: 137021 - DNA, 75 bp, synthetic construct
  source 1..75: mol_type = other DNA
ggtacgccaaaaatcttgacgatggcagcgtggaagtggttgcctgcggtgacgaagggcaggtggaaaaattaa

SEQ ID NO: 137022 - DNA, 75 bp, synthetic construct
  source 1..75: mol_type = other DNA
cccccgcgtcgaaatttacagtatcgatgaagctttttgcgacctgactggcgttcgcaactgccgggacctgac

SEQ ID NO: 137023 - DNA, 75 bp, synthetic construct
  source 1..75: mol_type = other DNA
atgggagagcctttctttaagcaaaaggatctattccggcgcgctggtgttgtttgcttcagcagtaactacgag

SEQ ID NO: 137024 - DNA, 75 bp, synthetic construct
  source 1..75: mol_type = other DNA
tttcccattgtcattccatgccaacttgattgttgttgaaccatcatcgcagtatacgttcatctatagcccctt

SEQ ID NO: 137025 - DNA, 75 bp, synthetic construct
  source 1..75: mol_type = other DNA
aaaaacccttgcgaaagcctgccagtattccagtaagacctggccccagttcggaggggtactcgcactgactgc

SEQ ID NO: 137026 - DNA, 75 bp, synthetic construct
  source 1..75: mol_type = other DNA
gattgaaaacgacgatggcgtgactcaccgtttccgtattgtcggctacgatgaaatttttggccgtaaagatta

SEQ ID NO: 137027 - DNA, 75 bp, synthetic construct
  source 1..75: mol_type = other DNA
cttgccgtggtaccagtagaggatgtgtggggcgtcggcagacgtatcagcaagaagctgaacgccatgggcatc

SEQ ID NO: 137028 - DNA, 75 bp, synthetic construct
  source 1..75: mol_type = other DNA
tacatcaactctctttttgccctgaaaccgacttacttatttcggtaggcgataacatcgatcgtgggccggaga

SEQ ID NO: 137029 - DNA, 75 bp, synthetic construct
  source 1..75: mol_type = other DNA
gggtgttaaacaaagctggatactggaagcgtgatacatggataattggaagtggagataacgcttacgaagcct

SEQ ID NO: 137030 - DNA, 75 bp, synthetic construct
  source 1..75: mol_type = other DNA
catatttatggtgttgggctaagaacctggcagaaaaaagaggaagttaatactcaaaacagtcaaagtctgtca

SEQ ID NO: 137031 - DNA, 75 bp, synthetic construct
  source 1..75: mol_type = other DNA
ttgatgctcataactatcgccatatatgggccgttggtgatattcatggtgactatcaattattacaatcccgct

SEQ ID NO: 137032 - DNA, 75 bp, synthetic construct
  source 1..75: mol_type = other DNA
gctatcacaaaatagaatcatttaattatcgccatatatgggccgttggtgatattcatggcgattatcaattat

SEQ ID NO: 137033 - DNA, 75 bp, synthetic construct
  source 1..75: mol_type = other DNA
ccagccctggtttacgccggttaaaggcaaccacgaagcaatggcgctggatgcgttcgcgaccggcgatggaaa

SEQ ID NO: 137034 - DNA, 75 bp, synthetic construct
  source 1..75: mol_type = other DNA
gtgccggacactataaaaaaagagcgctgaagacgatggcgcagtcttactaccaggtcaaaaaagcgtttctga

SEQ ID NO: 137035 - DNA, 75 bp, synthetic construct
  source 1..75: mol_type = other DNA
gtcccggactgcacaaaggtggggctctggaggagtggattaacctcatccgggaaaatgtccatggctgggcgc

SEQ ID NO: 137036 - DNA, 75 bp, synthetic construct
  source 1..75: mol_type = other DNA
tgacaattaatgttcctaaggtttccgggattaagcgtattcgcgcttttgctgaccgcgataaaaatttcaaca

SEQ ID NO: 137037 - DNA, 75 bp, synthetic construct
  source 1..75: mol_type = other DNA
aaaaatctggagaagacacttaccgtgaataccggtgcactgctgacaatgtccgtcagtgtcaacgggggaaca

SEQ ID NO: 137038 - DNA, 75 bp, synthetic construct
  source 1..75: mol_type = other DNA
tgcgtatgaaaggcaaaccggtgtacctttgtaggtaccgctggcgtttgtggaaaatctggataaaacacttac

SEQ ID NO: 137039 - DNA, 75 bp, synthetic construct
  source 1..75: mol_type = other DNA
caccgccggtcagaaacaggatattgatgtgaccacgctctgctccaccgagcaggagaacatcaacggtctggg

SEQ ID NO: 137040 - DNA, 75 bp, synthetic construct
  source 1..75: mol_type = other DNA
aaagaagccgttgaatatgggcgcgcaaaaaagtggatagcgcacgcgcccttattgcccggggatggggagtaa

SEQ ID NO: 137041 - DNA, 75 bp, synthetic construct
  source 1..75: mol_type = other DNA
aatcgttctaacccgctgggtgaggactttgactaccgcaaagaattcagcaaattagattactacggcctgaaa

SEQ ID NO: 137042 - DNA, 75 bp, synthetic construct
  source 1..75: mol_type = other DNA
tttttctaccgctgtagccgctgataaaaaagagactcaaaatttctactatccagaaacactggatttaactcc

SEQ ID NO: 137043 - DNA, 75 bp, synthetic construct
  source 1..75: mol_type = other DNA
cgctaaagtcggtcgattgatggcggaagggaaaatcactgccgacatgatgttaacccaccgctatccgttcgc

SEQ ID NO: 137044 - DNA, 75 bp, synthetic construct
  source 1..75: mol_type = other DNA
cagcggtttgccgccgggttccgggcaacaaggttttggccttaccggaatgcgcgagcgcgtaacggcgctggg

SEQ ID NO: 137045 - DNA, 75 bp, synthetic construct
  source 1..75: mol_type = other DNA
taaatctggataaagcccgcaggttgctgtggcccgtcaagaagaaatatggttccagtatatcctggggggatc

SEQ ID NO: 137046 - DNA, 75 bp, synthetic construct
  source 1..75: mol_type = other DNA
gaaacgtaaaccgacaatgctggtgaccgacctgacgctgcgttttgatcctgagttcgagaagatctctcgtcg

SEQ ID NO: 137047 - DNA, 75 bp, synthetic construct
  source 1..75: mol_type = other DNA
ttcattgaaaaaaataaggatgtcatcgctggagttgtggttattcaggacagaaaaagcgatgccttcgcttct

SEQ ID NO: 137048 - DNA, 75 bp, synthetic construct
  source 1..75: mol_type = other DNA
ttggcgttttaattattgccttcaatttcgaatggttgaagatttggcttgcacctaagttattcctaattgaat

SEQ ID NO: 137049 - DNA, 75 bp, synthetic construct
  source 1..75: mol_type = other DNA
atgtcaaacgctcaaaaaataccgtttctccgaacgctgtcagagatgatgaccagttctggtaaccagcaagcc

SEQ ID NO: 137050 - DNA, 75 bp, synthetic construct
  source 1..75: mol_type = other DNA
tctgttgcaggaagaggaagaagggttgccgctggtaggtcgtgtggctgccggtgagccgcttctggcgcagca

SEQ ID NO: 137051 - DNA, 75 bp, synthetic construct
  source 1..75: mol_type = other DNA
tctgttgcaggaagaggaagaagggttgccgctggtaggtcgtgtggctgccggtgaaccgcttctggcgcaaca

SEQ ID NO: 137052 - DNA, 75 bp, synthetic construct
  source 1..75: mol_type = other DNA
tgacggacagggtgatgacgcgtttccggaagcgctgccggcgcctcctgacgtgatgcagacctttttccccaa

SEQ ID NO: 137053 - DNA, 75 bp, synthetic construct
  source 1..75: mol_type = other DNA
aaaacgacgaataataaagaaaagtccgttcctccgttgattgaattattcaaaaaacatccacgaaatatttta

SEQ ID NO: 137054 - DNA, 75 bp, synthetic construct
  source 1..75: mol_type = other DNA
atttaacaggagcaaatgccaccgcagcattattaagtacccagggatttacgacattaacctgcctcgataatc

SEQ ID NO: 137055 - DNA, 75 bp, synthetic construct
  source 1..75: mol_type = other DNA
cacgaattatggccgaggccctgtatctggttatgcaactggtggatggcccggctacagcgggccaggtgatca

SEQ ID NO: 137056 - DNA, 75 bp, synthetic construct
  source 1..75: mol_type = other DNA
gtatacgcgccatatcagactcagtcgcccagtatctgacagcaaataccccttgccacccggatctcagctcat

SEQ ID NO: 137057 - DNA, 75 bp, synthetic construct
  source 1..75: mol_type = other DNA
atgacgcaactaccagaaatcccactgacattatctcgacaagaaatccgcaaaatgattcgccagcgtcgccgt

SEQ ID NO: 137058 - DNA, 75 bp, synthetic construct
  source 1..75: mol_type = other DNA
aaagcctggctagagcgaaagcaacgagagaacgaagaaagaaaactccttagtgagttgaaatggcttaaggat

SEQ ID NO: 137059 - DNA, 75 bp, synthetic construct
  source 1..75: mol_type = other DNA
cgacgttgatgaacgccatcgcgctgatcgccagtcaaacctggcgtgaccatccggtcgatttattgctctccc

SEQ ID NO: 137060 - DNA, 75 bp, synthetic construct
  source 1..75: mol_type = other DNA
ggcgcaccttgctgttacagggggcggcgctgacggcggcggcgttgttgcagtcgctgccctggctttggcacg

SEQ ID NO: 137061 - DNA, 75 bp, synthetic construct
  source 1..75: mol_type = other DNA
caccggaatgcgcgagcgagtaacggcgctgggtggcaccttgaccatctcctgtttgcacggcacgcgtgtcag

SEQ ID NO: 137062 - DNA, 75 bp, synthetic construct
  source 1..75: mol_type = other DNA
aaccccttaggacgtgattttgattatgccagcaaatttaataaacttgatatagaaaatgttaaaaatgatata

SEQ ID NO: 137063 - DNA, 75 bp, synthetic construct
  source 1..75: mol_type = other DNA
tctgacggaaagaaagtgtcgttggctgatttaattgttctttcgggtaatgctgcaatcgaagatgcggccaga

SEQ ID NO: 137064 - DNA, 75 bp, synthetic construct
  source 1..75: mol_type = other DNA
ctgccaggaagggctgaacaacattgtgaaacatgccgatgccagcgcggtcaccctgcaaggctggcagcagga

SEQ ID NO: 137065 - DNA, 75 bp, synthetic construct
  source 1..75: mol_type = other DNA
ccgctgataaaccaagccgctatttgttaaccgtctccgccagtgacggtgcggcgtatcgtgtcaccaccacca

SEQ ID NO: 137066 - DNA, 75 bp, synthetic construct
  source 1..75: mol_type = other DNA
gtctttaattttgggcttccctataccatatatatttacagctgatgtcttttcagaagatcccgatttagatgg

SEQ ID NO: 137067 - DNA, 75 bp, synthetic construct
  source 1..75: mol_type = other DNA
ccatatatatttacagcagatgttctctccgaagatcccgatttagatgggcgaattgagattgttgatggctca

SEQ ID NO: 137068 - DNA, 75 bp, synthetic construct
  source 1..75: mol_type = other DNA
ttttgaaaaaatcgtatgaagtgatgcatggtgagctggggagtgcggattcgatccagagctggtcgaatgcgt

SEQ ID NO: 137069 - DNA, 75 bp, synthetic construct
  source 1..75: mol_type = other DNA
gtgctcagaatgttaaagcgtactttgagccttcaagtaacattgacttagctacacataatttaaaaaatactg

SEQ ID NO: 137070 - DNA, 75 bp, synthetic construct
  source 1..75: mol_type = other DNA
gatccgttgcattcatcccccatcgtcagcgccccggcgaagctttcggtgctggacgctaacggcagtctgttg

SEQ ID NO: 137071 - DNA, 75 bp, synthetic construct
  source 1..75: mol_type = other DNA
cccgccgatttactattgctggctgtcgcgccagaaaaaatggtcggtttttcctcttttgattttgcccgtcag

SEQ ID NO: 137072 - DNA, 75 bp, synthetic construct
  source 1..75: mol_type = other DNA
taagtttacatccggagcctctgaatgcttctccggatggactggcaatccccatttgctgcagtgttttatcag

SEQ ID NO: 137073 - DNA, 75 bp, synthetic construct
  source 1..75: mol_type = other DNA
ggcaatggcatttaatgaggggcaacgcaatctggcgctggaactgtttcagcgcgttatggcgcattgccctga

SEQ ID NO: 137074 - DNA, 75 bp, synthetic construct
  source 1..75: mol_type = other DNA
tcgtttctctggctgatgaaaatgccaatatcccatcattgcggggacgtattgaacagcaaatacgtggcgagt

SEQ ID NO: 137075 - DNA, 75 bp, synthetic construct
  source 1..75: mol_type = other DNA
accgactcgttaaccgggctaccgaatcggcgggggttttttgaaaaccgacgacgctgttttctctcgcccgac

SEQ ID NO: 137076 - DNA, 75 bp, synthetic construct
  source 1..75: mol_type = other DNA
tgcagacagtgccctgcatgctgccgatattgcgatgtatcaggagaaaaaacacaaacagaaaacaccttttgt

SEQ ID NO: 137077 - DNA, 75 bp, synthetic construct
  source 1..75: mol_type = other DNA
cagaatgatatgacgcgcttaagtttgtctgaagcaatggttcagcaagaaatgtataaggttgcgacagatgat

SEQ ID NO: 137078 - DNA, 75 bp, synthetic construct
  source 1..75: mol_type = other DNA
aatacccgcagatgaagtggcgcgagaattctcattgatggcgaaagccgtcgtcatggtacttgaaaccctccc

SEQ ID NO: 137079 - DNA, 75 bp, synthetic construct
  source 1..75: mol_type = other DNA
aactgaatatcaaccagcttgccgggataaccggcgtacaccgtcagacggttgccgcgaggttgaaaaatgtcg

SEQ ID NO: 137080 - DNA, 75 bp, synthetic construct
  source 1..75: mol_type = other DNA
acggtcgccagcatctcgacgaaacccaggtgcggttgtttggtcagcatctgatgcaggggagctacacaaccc

SEQ ID NO: 137081 - DNA, 75 bp, synthetic construct
  source 1..75: mol_type = other DNA
tgagcttgactttgccagtggagaattacgccgcaatgttgtctggcgtaccagcaacggcgcaggttacaccat

SEQ ID NO: 137082 - DNA, 75 bp, synthetic construct
  source 1..75: mol_type = other DNA
cttgaattagccatcgaccgcgccacgctcagtggtcagcctgtcggtatccatttctctgattcagcatggcgc

SEQ ID NO: 137083 - DNA, 75 bp, synthetic construct
  source 1..75: mol_type = other DNA
gcgacacataccatcgcggaagtaaaagaacgctttgctgaactgaatatcgcctgcgccaaagtgctgaccgta

SEQ ID NO: 137084 - DNA, 75 bp, synthetic construct
  source 1..75: mol_type = other DNA
aagaacgctttgccgaactgaatatcgcctgtgccaaagtgctgaccgtaccggaactggaaagcaatccacagt

SEQ ID NO: 137085 - DNA, 75 bp, synthetic construct
  source 1..75: mol_type = other DNA
gtggcgctaacgctgaagaacaattacgacaatatgtgtaatgaaatgaatcactttgcgaagcatgtgatcatt

SEQ ID NO: 137086 - DNA, 75 bp, synthetic construct
  source 1..75: mol_type = other DNA
atctgaatatttcccaactggccgcattatccggtgctcatcgacagactgtcgcggctcgggtaaaaaacataa

SEQ ID NO: 137087 - DNA, 75 bp, synthetic construct
  source 1..75: mol_type = other DNA
acaggaggagaatgggggccgcattgcgggctggaatttttctgcagcatcattccttttttcccgcgagatttt

SEQ ID NO: 137088 - DNA, 75 bp, synthetic construct
  source 1..75: mol_type = other DNA
ctggcggcggttcgaacagcgatctgtttatgcagatttttgccgacatgttcaaccttccggcacgacgtaacg

SEQ ID NO: 137089 - DNA, 75 bp, synthetic construct
  source 1..75: mol_type = other DNA
cacgctatttatgacgttggatcagttggatcgtgcgtcgattaccgcgcaacgtaagttgaccattccgtttgt

SEQ ID NO: 137090 - DNA, 75 bp, synthetic construct
  source 1..75: mol_type = other DNA
ggaagtcatggctattgccttcgaagccgaggccattattcgcggcaagctccacgaagcttttaccgtcctgaa

SEQ ID NO: 137091 - DNA, 75 bp, synthetic construct
  source 1..75: mol_type = other DNA
cagaagatgacgacgaactcactgccctgaccgaaggcggcaccgttgccgggctaaccctcgacgatatcgacc

SEQ ID NO: 137092 - DNA, 75 bp, synthetic construct
  source 1..75: mol_type = other DNA
ttagcgacgatttcaatggcgaatacctacatcagaagtgcgcgaagaaaaaaacggcgattaaaccctggctga

SEQ ID NO: 137093 - DNA, 75 bp, synthetic construct
  source 1..75: mol_type = other DNA
atgggacgcacaaaatcaccaatgaccactgatctgaatgctgaggtgccactgtctgatgatctcaacgtcagc

SEQ ID NO: 137094 - DNA, 75 bp, synthetic construct
  source 1..75: mol_type = other DNA
cgacgcattagctgatggtggaaccgtcgccggtgcaacgcttgatgatattgatcgcatgaccagccgcgaact

SEQ ID NO: 137095 - DNA, 75 bp, synthetic construct
  source 1..75: mol_type = other DNA
tatcgtcactcatggtaatgggccgcaggtaggcatgattaaccaggcattcgaagctgccgcaaaaacggaagc

SEQ ID NO: 137096 - DNA, 75 bp, synthetic construct
  source 1..75: mol_type = other DNA
gaagaactgactaaggcgatgaacgcgcaaatgaaagcggaacgtactaagcgtgcacagattctggaagcggaa

SEQ ID NO: 137097 - DNA, 75 bp, synthetic construct
  source 1..75: mol_type = other DNA
tcaacgcctgggaatgggcggcggtttttatgatcggacattgcaaaactggcagcactacaaaatgcagccggt

SEQ ID NO: 137098 - DNA, 75 bp, synthetic construct
  source 1..75: mol_type = other DNA
atattggttacgatctgcaaaacgccttacgggaagaattgctttctcgtggcattaataaacccgttgcgactc

SEQ ID NO: 137099 - DNA, 75 bp, synthetic construct
  source 1..75: mol_type = other DNA
ggcattaataaacctgtagcaacgctggttacccaggtcgaagtcgatgctaacgatccggcattcctcaacccg

SEQ ID NO: 137100 - DNA, 75 bp, synthetic construct
  source 1..75: mol_type = other DNA
tcgtcgcttcgccaaaaccagttgatattattgaaaaagagacggtaaaagctctggtagattccggccaggtcg

SEQ ID NO: 137101 - DNA, 75 bp, synthetic construct
  source 1..75: mol_type = other DNA
agaatcgggcggaagtcacggctcgcctcggtaaagttaaagcgcaagcggctgaacgtgagcagacccggcaat

SEQ ID NO: 137102 - DNA, 75 bp, synthetic construct
  source 1..75: mol_type = other DNA
aatgtcggcagaaggattaatggggccgtttgccctgaccgacccggcggcaggtactacaggtccgtggtacac

SEQ ID NO: 137103 - DNA, 75 bp, synthetic construct
  source 1..75: mol_type = other DNA
gatttcccggcgtttatccttgtggatgataaaggaaatgacttcttccagcagatacaactcacacaatgcacc

SEQ ID NO: 137104 - DNA, 75 bp, synthetic construct
  source 1..75: mol_type = other DNA
cagtacgatatttaccacatgcaacgcatggaaggggaattagcccaaaccatgactacatgggcaaataaaatc

SEQ ID NO: 137105 - DNA, 75 bp, synthetic construct
  source 1..75: mol_type = other DNA
aattatatagaccagattggttatcagggatggattggttgcgaatatattccatctacgacaacgactgaaagt

SEQ ID NO: 137106 - DNA, 75 bp, synthetic construct
  source 1..75: mol_type = other DNA
gccagcttcctgatgaactgggttattccttgctggcacgccgtgccgatttgcaggcggcgcactggtacgttg

SEQ ID NO: 137107 - DNA, 75 bp, synthetic construct
  source 1..75: mol_type = other DNA
ccaggaatgccctgcatgtaaaagtggtcgcaccaattgttgtgaaaaaatttcagtcattggtgtgcatcagga

SEQ ID NO: 137108 - DNA, 75 bp, synthetic construct
  source 1..75: mol_type = other DNA
gcacctcaaaaacaccatcatacactaaatcagtaagttggcagcatcaccagaatttagtatgggaagtctggg

SEQ ID NO: 137109 - DNA, 75 bp, synthetic construct
  source 1..75: mol_type = other DNA
tctccgatccggaattccataaaaaagaaacgacgatgatgggcagccgcaacgccacgccggaagatttcgcta

SEQ ID NO: 137110 - DNA, 75 bp, synthetic construct
  source 1..75: mol_type = other DNA
gtatcggcggtccggcggcggtactggcgcagcagagcatcaagcatctggaatgcgtcgcttatccggagctgg

SEQ ID NO: 137111 - DNA, 75 bp, synthetic construct
  source 1..75: mol_type = other DNA
ccgtttctacacgcttatcgcttaacggcacgattatcgtcggtcgtgatattgctcacgccaaactgaaagagc

SEQ ID NO: 137112 - DNA, 75 bp, synthetic construct
  source 1..75: mol_type = other DNA
aggtcagcgcgtgtggaccggtggcggtgatgaagaagcgctgtcgaaaggcgtctataacacctatatcgaaga

SEQ ID NO: 137113 - DNA, 75 bp, synthetic construct
  source 1..75: mol_type = other DNA
aatcagttcaatgcaacgactttcattcctgttgtggggctgtttactggcggttcccaaactcagtctaaaact

SEQ ID NO: 137114 - DNA, 75 bp, synthetic construct
  source 1..75: mol_type = other DNA
atataaaaaacaaaaattcaagttatggctattacgacatgttaaagaaaaaagccaccttgggatgctccactg

SEQ ID NO: 137115 - DNA, 75 bp, synthetic construct
  source 1..75: mol_type = other DNA
aaatagatgcaagaaatgaatcagtagcaattaattataaagaacttcttgctaaaaaggttacattaggttgct

SEQ ID NO: 137116 - DNA, 75 bp, synthetic construct
  source 1..75: mol_type = other DNA
aaagcaaaagcaggatgcccggtttctcaggtactgaaagcggaaattacgctggattaccagttgaaatcgtaa

SEQ ID NO: 137117 - DNA, 75 bp, synthetic construct
  source 1..75: mol_type = other DNA
aaagcaaaagcaggatgcccggtttctcaggtactgaaagctgaaattacgcttgattaccagttgaaatcataa

SEQ ID NO: 137118 - DNA, 75 bp, synthetic construct
  source 1..75: mol_type = other DNA
tctttattcccgccttccttatttctggctgttctacctcaggcaaccagaatcttaaaaatgaaacatcgaaaa

SEQ ID NO: 137119 - DNA, 75 bp, synthetic construct
  source 1..75: mol_type = other DNA
cttcgcaaaatacgcttaacgctgatatgactttccgtgtcaaaccggaatctctaattttgacgattttctttt

SEQ ID NO: 137120 - DNA, 75 bp, synthetic construct
  source 1..75: mol_type = other DNA
tccgcaactggcagaagagtttacccgacggatgagcggtggtttaccgaaggactgggagaaaacgactcagaa

SEQ ID NO: 137121 - DNA, 75 bp, synthetic construct
  source 1..75: mol_type = other DNA
acgccggtcattcgctaacagcttcaccgttccttcccccatccaggttccgcatgagcgtgttgtaatgttcat

SEQ ID NO: 137122 - DNA, 75 bp, synthetic construct
  source 1..75: mol_type = other DNA
tttccttgatagcgatgatttgtgggaggcatctaaacttgaaaaacaaatattatggatgctgaaaaatccaaa

SEQ ID NO: 137123 - DNA, 75 bp, synthetic construct
  source 1..75: mol_type = other DNA
caggattatgcattatggttaaaattattaaaaactggaattagagcagttccttataataaatctttgatgaaa

SEQ ID NO: 137124 - DNA, 75 bp, synthetic construct
  source 1..75: mol_type = other DNA
ttccgatacggacagtataacgaaacgggtatttacatctcgatcgagaagaccattatcattacaatcaccgtt

SEQ ID NO: 137125 - DNA, 75 bp, synthetic construct
  source 1..75: mol_type = other DNA
atgtctctcactaaattactgccggtcattctgttgatgatggccacaggtgtgcaggcctccacccgggatgaa

SEQ ID NO: 137126 - DNA, 75 bp, synthetic construct
  source 1..75: mol_type = other DNA
tgcaccaccggatgtgctgaaaacattcttcccgaatatccctgtggccacaccgaccaccttcctggttaacgt

SEQ ID NO: 137127 - DNA, 75 bp, synthetic construct
  source 1..75: mol_type = other DNA
acccggtactgaaacagctggcacagcagtacggcttttccgtttttccctacaccctggatggtcagggggata

SEQ ID NO: 137128 - DNA, 75 bp, synthetic construct
  source 1..75: mol_type = other DNA
gtgcgtgacgtgctccccctttcccgattagacgtcctgatcacccccctggtcgcctttgatgagtacggtcag

SEQ ID NO: 137129 - DNA, 75 bp, synthetic construct
  source 1..75: mol_type = other DNA
atgacgcaactaccagaactcccactgacattatcccgacaagaaatccgcaaaatgattcggcaacgtcgtcgt

SEQ ID NO: 137130 - DNA, 75 bp, synthetic construct
  source 1..75: mol_type = other DNA
attgaacgactctggaatccgcagggtatggccgtgcagcctgcacaaccggcagcagacacatcagccagaaca

SEQ ID NO: 137131 - DNA, 75 bp, synthetic construct
  source 1..75: mol_type = other DNA
gttttacgcatccaatctctaccttcacctgagtaactggtgttctgaacagagtctgaacggcaccgccacttt

SEQ ID NO: 137132 - DNA, 75 bp, synthetic construct
  source 1..75: mol_type = other DNA
ccggtggccacaccgaccaccttcctggttaacgtcaatacgcttgaagcgctgccgcttttacagggcgcatcg

SEQ ID NO: 137133 - DNA, 75 bp, synthetic construct
  source 1..75: mol_type = other DNA
ggcattgcccttactgtcaccagtttgacccggtactgaaacagctggcacagcagtacggcttttccgtttttc

SEQ ID NO: 137134 - DNA, 75 bp, synthetic construct
  source 1..75: mol_type = other DNA
cattgcccttactgtcaccagtttgacccggtactgaaacagctggcacagcagtacggcttttccgtttttccc

SEQ ID NO: 137135 - DNA, 75 bp, synthetic construct
  source 1..75: mol_type = other DNA
gtaactcagatgatgcgcatgtttaattttataaaaagtgttggagcaacccccatcgtgaaggccattgacgtt

SEQ ID NO: 137136 - DNA, 75 bp, synthetic construct
  source 1..75: mol_type = other DNA
actttatgaagagtgtcggcgctacccccatcgttaaagccattgatgttcccggtgaaaaactgaactctctgg

SEQ ID NO: 137137 - DNA, 75 bp, synthetic construct
  source 1..75: mol_type = other DNA
ccacacttggcctgggcgatgggccaaacgatgcgcccttactggaggtaatggattacgcggtgattgtgaaag

SEQ ID NO: 137138 - DNA, 75 bp, synthetic construct
  source 1..75: mol_type = other DNA
caacaattgtcaggcaaacgcccaaccacacttggcctgggcgatgggccaaacgatgcgcccttactggaggta

SEQ ID NO: 137139 - DNA, 75 bp, synthetic construct
  source 1..75: mol_type = other DNA
aaacgttggggctacaaggtttaccgctgattgccgaaaatggcgcagtgatccagcttgctgagcaatggcagg

SEQ ID NO: 137140 - DNA, 75 bp, synthetic construct
  source 1..75: mol_type = other DNA
gtagccaggcggcgctgacgcaattgcatgaagcctcggtcacgctcatctggcgcgacagtgacgagcaaatga

SEQ ID NO: 137141 - DNA, 75 bp, synthetic construct
  source 1..75: mol_type = other DNA
tgatgaggatccggcccgcgtctggcgaacgcagcgtgaaggaccggaaggatggcgtgaagggctggaccattt

SEQ ID NO: 137142 - DNA, 75 bp, synthetic construct
  source 1..75: mol_type = other DNA
agaaagaacattttaaattcacgacttttgatgatgtcgacgatgcaaccatcgccgaatggacgggattaagcc

SEQ ID NO: 137143 - DNA, 75 bp, synthetic construct
  source 1..75: mol_type = other DNA
gttacagcgctttctgggtaaaaaaactatggaagttgagatcctcaaagaagcggtggagtacgcgcaatcgcg

SEQ ID NO: 137144 - DNA, 75 bp, synthetic construct
  source 1..75: mol_type = other DNA
ctgctgtggccgcaggagaacaggtcgttcctgcttctgaacttgctgctgccatgaagcagattaaagaactcc

SEQ ID NO: 137145 - DNA, 75 bp, synthetic construct
  source 1..75: mol_type = other DNA
aagcaataccaggagggaagtcttactgctgtggccgcaggagaacaggtcgttcctgcttctgaacttgctgct

SEQ ID NO: 137146 - DNA, 75 bp, synthetic construct
  source 1..75: mol_type = other DNA
atgattgatgtcttagggccggagaaacgcagacggcgtaccacacaggaaaagatcgcaattgttcagcagagt

SEQ ID NO: 137147 - DNA, 75 bp, synthetic construct
  source 1..75: mol_type = other DNA
ataccaggaaggaagtcttactgctgtggccgccggagaacaggttgttcctgcctctgaacttgctgccgccat

SEQ ID NO: 137148 - DNA, 75 bp, synthetic construct
  source 1..75: mol_type = other DNA
caggtcgttcctgcctctgaacttgctgctgccatgaagcagattaaagaactccagcgcctgctcggcaaaaaa

SEQ ID NO: 137149 - DNA, 75 bp, synthetic construct
  source 1..75: mol_type = other DNA
cagagtcagacctcaccattataacggtgggctgacgccggaagagtcagagaacagataccatttttactgtaa

SEQ ID NO: 137150 - DNA, 75 bp, synthetic construct
  source 1..75: mol_type = other DNA
acatccggttctacgccggccagccggtgagcctgcccgacggcacggtggccggcacgctgtgcctgatccaca

SEQ ID NO: 137151 - DNA, 75 bp, synthetic construct
  source 1..75: mol_type = other DNA
caaattgaaatccgtgagctcaggaaaaagctacaacgcattgaaatggagaatgaaatattaaaaaggctccgc

SEQ ID NO: 137152 - DNA, 75 bp, synthetic construct
  source 1..75: mol_type = other DNA
ttcgcggttaccgcgccggatcaggtctggtgcggcgatgtgacctatatctggacgggaaaatgcagggcttat

SEQ ID NO: 137153 - DNA, 75 bp, synthetic construct
  source 1..75: mol_type = other DNA
ccgcacgaatataacggtggattacccccaaatgaatcggaaaatcgatactggaaaaactctaactcggtggcc

SEQ ID NO: 137154 - DNA, 75 bp, synthetic construct
  source 1..75: mol_type = other DNA
ggaagcgcgaggaaagcccgctaatttgctgtatcactcggatcaagggagccactataccagcagaaatttcag

SEQ ID NO: 137155 - DNA, 75 bp, synthetic construct
  source 1..75: mol_type = other DNA
gcctacgccattcgcgccattgccagcgccggattatctgctctggtaagcaattcattctcgaaaattttctcc

SEQ ID NO: 137156 - DNA, 75 bp, synthetic construct
  source 1..75: mol_type = other DNA
ggagcgttttaaagaagaccctcgcagcgacaaagtgaatttaagtatcggtctgtactacaacgaagacggaat

SEQ ID NO: 137157 - DNA, 75 bp, synthetic construct
  source 1..75: mol_type = other DNA
tggcctgggcgatgggccaaacgatgcgcccttactggaggtaatggattacgcggtgattgtgaaagggctaaa

SEQ ID NO: 137158 - DNA, 75 bp, synthetic construct
  source 1..75: mol_type = other DNA
cgcggaaactgctgggataacagcccaatggaacgcttcttcaggagtctgaagaacgaatgggtgccggtggtg

SEQ ID NO: 137159 - DNA, 75 bp, synthetic construct
  source 1..75: mol_type = other DNA
gatgtcggtactggctgatggtgtgatgaagcgtgggattgtgacattacggtggtcggtgatgaaaagaaacag

SEQ ID NO: 137160 - DNA, 75 bp, synthetic construct
  source 1..75: mol_type = other DNA
cattccttgatatcgcctatcaaggatttggtgctggtatggacgaggatgcctatgccattcgcgccattgcca

SEQ ID NO: 137161 - DNA, 75 bp, synthetic construct
  source 1..75: mol_type = other DNA
gccgacgatgcccacggtacaccgatcatgctgaaagctcagcagctcggtatcaccccggagcagatgattggc

SEQ ID NO: 137162 - DNA, 75 bp, synthetic construct
  source 1..75: mol_type = other DNA
gcaaccgctgttgggccataaagtgaatccattcaaggcgctgtataaccgcatcgatatgaaacaggttgaagc

SEQ ID NO: 137163 - DNA, 75 bp, synthetic construct
  source 1..75: mol_type = other DNA
atttcgcaggctttaacattagctacgacaattaccactctacgcacagcgaagagaaccgtcagctgtcagagc

SEQ ID NO: 137164 - DNA, 75 bp, synthetic construct
  source 1..75: mol_type = other DNA
aatccattcaaggcgctgtataaccgcatcgatatgaaacaggttgaagcactggtggaagcatccaaagaggaa

SEQ ID NO: 137165 - DNA, 75 bp, synthetic construct
  source 1..75: mol_type = other DNA
actggtggaagcgtctaaagaagaagtaaaagccgctgccgcgccggtaactggcccgctggctgacgatccaat

SEQ ID NO: 137166 - DNA, 75 bp, synthetic construct
  source 1..75: mol_type = other DNA
gccgacgatgcccacggcacaccgattatgctgaaagcacagcagcttggtatcacaccggaacagatgattggc

SEQ ID NO: 137167 - DNA, 75 bp, synthetic construct
  source 1..75: mol_type = other DNA
agtggctggttactggctttaatcgccagccgaagcaacctgatgcgtccgctattgccgagggatctgctgacg

SEQ ID NO: 137168 - DNA, 75 bp, synthetic construct
  source 1..75: mol_type = other DNA
gcggcgtgccgtgcggcgctggatgcgggttatgccgccgcgatgcgtaccggacgcgtcatcagccgtaaggaa

SEQ ID NO: 137169 - DNA, 75 bp, synthetic construct
  source 1..75: mol_type = other DNA
cgatgatctggcagcctgagttcacagataaaacactctccaggaaacccggggcggttcaagtcattggagagc

SEQ ID NO: 137170 - DNA, 75 bp, synthetic construct
  source 1..75: mol_type = other DNA
ttcgctaaagttgacctgcgcgtggcgctgattgaaaacgcagagtttgttgaaggttctgacaaacctgctgcc

SEQ ID NO: 137171 - DNA, 75 bp, synthetic construct
  source 1..75: mol_type = other DNA
tgttccgcgtgctgatgacttacctgaagccggtactgccgaaactgaccgagcgcgcagaagcattcctcaata

SEQ ID NO: 137172 - DNA, 75 bp, synthetic construct
  source 1..75: mol_type = other DNA
aagcaataccaggaaggaattcttactgctgtggccgccggagaacaggttgttcctgcctctgaacttgctgcc

SEQ ID NO: 137173 - DNA, 75 bp, synthetic construct
  source 1..75: mol_type = other DNA
ggatagcgcacgcgccctattgcccgggatggggagtaagcttagtcagccgttgtctccggtgtcgcgtgcgca

SEQ ID NO: 137174 - DNA, 75 bp, synthetic construct
  source 1..75: mol_type = other DNA
tttactgtggcctgacattcttcattccattcctgaaaaacatctatctattgcccgttgccgctggtgggggct

SEQ ID NO: 137175 - DNA, 75 bp, synthetic construct
  source 1..75: mol_type = other DNA
agatgactggaactttgctggggctggagcttcgtaaacgtaaaacttctcaggaaaaaattgccattattcagc

SEQ ID NO: 137176 - DNA, 75 bp, synthetic construct
  source 1..75: mol_type = other DNA
tcgttgcacggcaacacggtgtggcagccagccagttatttctctggcgtaagcaataccaggaaggaagtctca

SEQ ID NO: 137177 - DNA, 75 bp, synthetic construct
  source 1..75: mol_type = other DNA
ggaaaatgaactccttaaagaagccgttgaatatgggcgggcaaaaaagtggatagcgcacgcgcccttattgcc

SEQ ID NO: 137178 - DNA, 75 bp, synthetic construct
  source 1..75: mol_type = other DNA
agactatggagcttggcatgacggtgtcccatgtggctcgtttgcatggtattcagcccagcctgttgtttaagt

SEQ ID NO: 137179 - DNA, 75 bp, synthetic construct
  source 1..75: mol_type = other DNA
atgattgatgtcttaggaccggagaacgcagacggcgtactacacaggaaaagatacgctattgttcagcagagt

SEQ ID NO: 137180 - DNA, 75 bp, synthetic construct
  source 1..75: mol_type = other DNA
cagcaagccgctgctctgcctgctgccgccatgaagcagattaaagaacttcagcgcctgctcggcaagaaaacg

SEQ ID NO: 137181 - DNA, 75 bp, synthetic construct
  source 1..75: mol_type = other DNA
tgcaggaatatttccatttgaccaatggtcaaattggtaatgctatgtcggtaaactcatttgtcaccacagtgg

SEQ ID NO: 137182 - DNA, 75 bp, synthetic construct
  source 1..75: mol_type = other DNA
ggcaatagcgaacaacaaggtcggttgtttggcttcttcgaaacagggcgtggcattgtcgataccgtggtggca

SEQ ID NO: 137183 - DNA, 75 bp, synthetic construct
  source 1..75: mol_type = other DNA
aagcaataccaggaaggaagtcttaccgctgtcgccgccggagaacaggttgttcctgcctctgaacttgctgcc

SEQ ID NO: 137184 - DNA, 75 bp, synthetic construct
  source 1..75: mol_type = other DNA
atgacgtctatttaagtgatgttatttttgataacaaccaggcatatacatcaacaagttacagtgatggcgatg

SEQ ID NO: 137185 - DNA, 75 bp, synthetic construct
  source 1..75: mol_type = other DNA
cggaaattgaagaagatggcagcactatcagtgacgatgcggtgaagcaacggggtgaaataaaagtgggagtca

SEQ ID NO: 137186 - DNA, 75 bp, synthetic construct
  source 1..75: mol_type = other DNA
gaattattatcacgatcccaattcggcggaaattgaagaagatgacagcaatatcagcgacgatacggcgaagca

SEQ ID NO: 137187 - DNA, 75 bp, synthetic construct
  source 1..75: mol_type = other DNA
agacctggagtgttgctgacgggcaatggcttattttttcctctatggcaaatgatgccagtggcggggcggtat

SEQ ID NO: 137188 - DNA, 75 bp, synthetic construct
  source 1..75: mol_type = other DNA
acgtgtcgaagaaggcaccctgaaaggcgatgttgcggatatcttcccttatgcttcgtcgctgtgggtcggtga

SEQ ID NO: 137189 - DNA, 75 bp, synthetic construct
  source 1..75: mol_type = other DNA
gtgtcgaagaaggcacgctgcaaggcgatgttgcggatatcttcccttatgcttcgtcgctgtgggtcggtgacg

SEQ ID NO: 137190 - DNA, 75 bp, synthetic construct
  source 1..75: mol_type = other DNA
tctccgctaccattctggcgatttattttgtaccgctgttctttgtgctggtacgccgccgcttcccgctaaaac

SEQ ID NO: 137191 - DNA, 75 bp, synthetic construct
  source 1..75: mol_type = other DNA
gcgccttactggcgacctggatgcgtgggctggaaaacgacgtttacttccaggttggcctgttaacagtcattg

SEQ ID NO: 137192 - DNA, 75 bp, synthetic construct
  source 1..75: mol_type = other DNA
gccgtatttgtgccaatggctttcttcggcggcaccaccggggctatctatcgtcagttttccatcaccatcgtt

SEQ ID NO: 137193 - DNA, 75 bp, synthetic construct
  source 1..75: mol_type = other DNA
gcgatcacaagaagtcaatccgacgccgccgcctgatccagacccgactccagatcctgatcccacgccggatcc

SEQ ID NO: 137194 - DNA, 75 bp, synthetic construct
  source 1..75: mol_type = other DNA
acggtgggttatccccaaacgaatcggaaaatcgatactggaaaaactctaactcggtggctaatgccgatcagt

SEQ ID NO: 137195 - DNA, 75 bp, synthetic construct
  source 1..75: mol_type = other DNA
cgatattaacgacacgctgcaaaccgcgtggggttcaagctatgtaaatgactttatggatcgcggtcgcgtgaa

SEQ ID NO: 137196 - DNA, 75 bp, synthetic construct
  source 1..75: mol_type = other DNA
atatgaagtggatgccacggatgaagatataaccgttgagtgtgatgccgggattgtatcggccacattgcttca

SEQ ID NO: 137197 - DNA, 75 bp, synthetic construct
  source 1..75: mol_type = other DNA
ctttcaggtgaatgccacgaatgaagaactaaccgtggagtgtacgatgaatgccgctaaatgccgcatggcatc

SEQ ID NO: 137198 - DNA, 75 bp, synthetic construct
  source 1..75: mol_type = other DNA
cgtgggactatctgggaagcgcgacctcatttacaacaggcatgatggctcccggtcgtggtgtccttgcaaaca

SEQ ID NO: 137199 - DNA, 75 bp, synthetic construct
  source 1..75: mol_type = other DNA
tgagcgtcatgtcatgatacctaaagaaaatggtagctggctttatcttgctgatttagaacatgcactacgtgt

SEQ ID NO: 137200 - DNA, 75 bp, synthetic construct
  source 1..75: mol_type = other DNA
atactgatgatcaaaacccaagcagagttatctacactgccattgttcgatttcttgatgacaagtcagctaagt

SEQ ID NO: 137201 - DNA, 75 bp, synthetic construct
  source 1..75: mol_type = other DNA
gcaaagcagagcttgacgccaaacagcaacttctggctcagcgtgatatcgacgacatcaagttcgttatgggta

SEQ ID NO: 137202 - DNA, 75 bp, synthetic construct
  source 1..75: mol_type = other DNA
acgagtggataccggtgacgggttacatgaacttcagcgatgctgcccatgaaataacggactatatcgttgggt

SEQ ID NO: 137203 - DNA, 75 bp, synthetic construct
  source 1..75: mol_type = other DNA
gtatggtgcggcgacgtgacgtacatctggacggggaaacgttgggcataccttgccgttgttctcgatctgttt

SEQ ID NO: 137204 - DNA, 75 bp, synthetic construct
  source 1..75: mol_type = other DNA
ttagcgttaccaatgctgtatttacaggtaatattgctaacgacggcaaaggtggcgcaatttattcgattaata

SEQ ID NO: 137205 - DNA, 75 bp, synthetic construct
  source 1..75: mol_type = other DNA
agacgcacagggccgtgaaacgcagtatgagtacaacgccgcaggcgacctgactgccgttatcaccccggacgg

SEQ ID NO: 137206 - DNA, 75 bp, synthetic construct
  source 1..75: mol_type = other DNA
ctttcgggtggatgcctcgaatgaagagctaaccgttgagtgtgctgcgaatgccgctaaatgccgcagggtatc

SEQ ID NO: 137207 - DNA, 75 bp, synthetic construct
  source 1..75: mol_type = other DNA
gtcgacgtcgccggactcggccctcacggtcaaagcgttgcagatggcctgggagcttcggggtaagccaacagg

SEQ ID NO: 137208 - DNA, 75 bp, synthetic construct
  source 1..75: mol_type = other DNA
ttacgtaagcttcagcgaggcagctcacgccataacggactatatcgttggatattacagcgcactaagaccgca

SEQ ID NO: 137209 - DNA, 75 bp, synthetic construct
  source 1..75: mol_type = other DNA
acgccataaatgcgattcctggcgtggtgactgttggcttgtttgctaaccgtggcgcggacgttgcgctgattg

SEQ ID NO: 137210 - DNA, 75 bp, synthetic construct
  source 1..75: mol_type = other DNA
gtatcgggtggatctctggcgtaatgatgagttcattggttcgcaggatatcgtatttgaatcgacggtgatgct

SEQ ID NO: 137211 - DNA, 75 bp, synthetic construct
  source 1..75: mol_type = other DNA
actaaaggcgtaaaactgagtcgctggcgagcaacaaagctgatgaaagaacttaatctcatcagctgtcagcag

SEQ ID NO: 137212 - DNA, 75 bp, synthetic construct
  source 1..75: mol_type = other DNA
tatcgaaaaattatcgcctcccccgattatatttcccgctacgggaagccagaaacgatcgacgatttaaagcaa

SEQ ID NO: 137213 - DNA, 75 bp, synthetic construct
  source 1..75: mol_type = other DNA
cgaatataacggtggttaccccccaaacgaatcggaaaatcgatactggaaaaacgctgacgcggtgaccagttt

SEQ ID NO: 137214 - DNA, 75 bp, synthetic construct
  source 1..75: mol_type = other DNA
agtggagtgaacgcgcggaacaggtcttacagttgttcgccggactgattgcacaatatattcaaaaagaggcac

SEQ ID NO: 137215 - DNA, 75 bp, synthetic construct
  source 1..75: mol_type = other DNA
agtggagtgaacgcgcggaacaggtcttacagttattcgccggactgattgcacaatatattcaaaaagaggcgc

SEQ ID NO: 137216 - DNA, 75 bp, synthetic construct
  source 1..75: mol_type = other DNA
gcacgcaatcttggcatcaccacatttctgagcacgccaattcacttaccggatggatcattctatggcacgctt

SEQ ID NO: 137217 - DNA, 75 bp, synthetic construct
  source 1..75: mol_type = other DNA
cacaagtgcccagagcctgctaaaaggtagcgatggatatacatttaccagcagtgccaaaatgacaggtgccct

SEQ ID NO: 137218 - DNA, 75 bp, synthetic construct
  source 1..75: mol_type = other DNA
tgtcgttctcgccgaacagttggctcaccatgaaagcgcaggaaatggcatgggaaactcgtggtaagcacggcg

SEQ ID NO: 137219 - DNA, 75 bp, synthetic construct
  source 1..75: mol_type = other DNA
attaatcaacgatcgttttggtcataatagtggcgatctgtttctcattcaggttggcgagcgccttaatacgct

SEQ ID NO: 137220 - DNA, 75 bp, synthetic construct
  source 1..75: mol_type = other DNA
atccgcacgacttgctgacggggtctgaatcgctttttttgtatataatgcgtctgaaatttcataccacaggcg

SEQ ID NO: 137221 - DNA, 75 bp, synthetic construct
  source 1..75: mol_type = other DNA
atataacggtggattacccccaaacgaatcagaaaaccgatactggaaaaactctaacgcggaggccagttttag

SEQ ID NO: 137222 - DNA, 75 bp, synthetic construct
  source 1..75: mol_type = other DNA
gttcaaacaaaaagatctgtttcgtcgctgtggcgtggtttgctttagcagcaattatgagctttacgcagacat

SEQ ID NO: 137223 - DNA, 75 bp, synthetic construct
  source 1..75: mol_type = other DNA
gacgcctacggttcacagtattcgatgcgtatctggcttgatccggcaaaactgaacagcttccagatgacggct

SEQ ID NO: 137224 - DNA, 75 bp, synthetic construct
  source 1..75: mol_type = other DNA
gacgctggcttgccggaaggctcatgaaagaaccgggtctggtgagttgtcagcagccaactcaccggtataaac

SEQ ID NO: 137225 - DNA, 75 bp, synthetic construct
  source 1..75: mol_type = other DNA
ggttactgttggtctgtttgccaaccgtggtgcggatgtcgcgctgattggcacacctgacggcgtcaaaaccat

SEQ ID NO: 137226 - DNA, 75 bp, synthetic construct
  source 1..75: mol_type = other DNA
tgattgccggtgatgccgccggaatgtgtatgaacctcggttttaccattcgcggtatggatctggcgattgccg

SEQ ID NO: 137227 - DNA, 75 bp, synthetic construct
  source 1..75: mol_type = other DNA
accgttttcagttgcagggtaatcagggggcggcttgcctgtttgcgggatcacccaccgatggcctgatgggcg

SEQ ID NO: 137228 - DNA, 75 bp, synthetic construct
  source 1..75: mol_type = other DNA
actgggggcgggtaaacgggcgattcatgatgttgccgatctgacgcgaggatcgctgcgtatcgccgtcacccc

SEQ ID NO: 137229 - DNA, 75 bp, synthetic construct
  source 1..75: mol_type = other DNA
cgttttatgccagctgtgagacggtgtttcgccctgatttatggggtgttgtgctatcgaataatgacggttgcg

SEQ ID NO: 137230 - DNA, 75 bp, synthetic construct
  source 1..75: mol_type = other DNA
ttatctgttcccgctcgtttggtgaacgcatcacggattatccgtcgatgcggcaggccatttgtagttacgctg

SEQ ID NO: 137231 - DNA, 75 bp, synthetic construct
  source 1..75: mol_type = other DNA
atgactatggactactgcaatggtgacgaaacctcgccatcccagcgttcttactccgttttgcgcagtaaattt

SEQ ID NO: 137232 - DNA, 75 bp, synthetic construct
  source 1..75: mol_type = other DNA
gaatgatttgttttctggggatctgcaactttgcccaggctactgtctcccccgacaggacacgcatcattttta

SEQ ID NO: 137233 - DNA, 75 bp, synthetic construct
  source 1..75: mol_type = other DNA
cgggcttatcaacttgtcagtaaactcgatgcccgacgcaagcaaaccagcaaaatcgctccctattttgttccc

SEQ ID NO: 137234 - DNA, 75 bp, synthetic construct
  source 1..75: mol_type = other DNA
aaattctcacattacgctgggaacacctcgatttgcagcacggagtggcgcatcttcctgaaacgaaaaatggtt

SEQ ID NO: 137235 - DNA, 75 bp, synthetic construct
  source 1..75: mol_type = other DNA
tgactaatcagggcgcggcgcgactggctaacgcgacgatgcccggcagtaagctgaatctgacgcaaatggccg

SEQ ID NO: 137236 - DNA, 75 bp, synthetic construct
  source 1..75: mol_type = other DNA
acagcggcggtgtatcagaaagttgtgacactggaagataaactggtggagaaacctgtcacggaagagccggaa

SEQ ID NO: 137237 - DNA, 75 bp, synthetic construct
  source 1..75: mol_type = other DNA
ctcatggggttatggcatgtgggtgaatctcgacgtcgctcccgtcaccttactcatttgctctattgtcgcagc

SEQ ID NO: 137238 - DNA, 75 bp, synthetic construct
  source 1..75: mol_type = other DNA
ttgctgaagtatcgcctgatatctgcttttgtgttaatacccgtcgtcatcgcggcgttgtttctgttgccgccg

SEQ ID NO: 137239 - DNA, 75 bp, synthetic construct
  source 1..75: mol_type = other DNA
cgatttcgaccttgaaacccgtgcagaaacccgggaactggctatatctcatgccagcgtattgttgctgcgcac

SEQ ID NO: 137240 - DNA, 75 bp, synthetic construct
  source 1..75: mol_type = other DNA
ccgctatttcaggccaccgctccctgaacatgttaaaacggtacacgcatctccgggcatatcagctggtcagca

SEQ ID NO: 137241 - DNA, 75 bp, synthetic construct
  source 1..75: mol_type = other DNA
gctctacgttatcttccatctggccctggaaacagcaatgcgacagggggaaatcctcacattacgctgggaaca

SEQ ID NO: 137242 - DNA, 75 bp, synthetic construct
  source 1..75: mol_type = other DNA
ctgttgtttcaattacgttgattggtggcgctggatttaacgtcggttcacctcaacaggcaggtatatctgaac

SEQ ID NO: 137243 - DNA, 75 bp, synthetic construct
  source 1..75: mol_type = other DNA
tctttacgtcatttttcatctggcactggaaacagcaatgcgacaaggtgaaatcctgtcattgcgttgggaaca

SEQ ID NO: 137244 - DNA, 75 bp, synthetic construct
  source 1..75: mol_type = other DNA
ctggatctgaaaatgaaaatctgcattttcacgatctccgccatgaggccatcagccgtttgttcgagctcggca

SEQ ID NO: 137245 - DNA, 75 bp, synthetic construct
  source 1..75: mol_type = other DNA
ctatcgtacatctgaaataaagcaaagccaccctactattcaattgaaccttaatcatattactttcgagcttgt

SEQ ID NO: 137246 - DNA, 75 bp, synthetic construct
  source 1..75: mol_type = other DNA
cgtaatacaatgcttcctcgtagctatgatccttcttctgatgttgattatatggttgtattcaaaaatgtaata

SEQ ID NO: 137247 - DNA, 75 bp, synthetic construct
  source 1..75: mol_type = other DNA
ccccttctttcatcaacctgtccatcgacccggaaaaatgtaataaggctacccttttccgcgcgctggaagaga

SEQ ID NO: 137248 - DNA, 75 bp, synthetic construct
  source 1..75: mol_type = other DNA
tggcatacctggtatgtcattgatatcggtaatggcttcactgactataaaaaatatatcgaagggccgtatgaa

SEQ ID NO: 137249 - DNA, 75 bp, synthetic construct
  source 1..75: mol_type = other DNA
aaaaatatatcgaagggccgtatgaagatctctactgtttcccgacgattaagagcaatgataattgcatcgtaa

SEQ ID NO: 137250 - DNA, 75 bp, synthetic construct
  source 1..75: mol_type = other DNA
tagcaaaatattacgaaacgatagactgtcctttgtctgctgaaaaagaaataaaaagtatcttaccagagatat

SEQ ID NO: 137251 - DNA, 75 bp, synthetic construct
  source 1..75: mol_type = other DNA
cattgcgttaattaatggtattatcggcggcgttggcggctggtttggttttgcacatgcctcgctggagtccat

SEQ ID NO: 137252 - DNA, 75 bp, synthetic construct
  source 1..75: mol_type = other DNA
ttgctgattctctggctgtggcaagggaaactcttcgcatatcgggatatttctgacggtgtggcaaaacaggtc

SEQ ID NO: 137253 - DNA, 75 bp, synthetic construct
  source 1..75: mol_type = other DNA
acctgttagcggcatcgctgatggcgatccctggcgggattttgtttgcacgtattcttagcccggcaaccgagc

SEQ ID NO: 137254 - DNA, 75 bp, synthetic construct
  source 1..75: mol_type = other DNA
aatcagagcatttcttgatggctctggatgccggaactggaagtgttcgtgccgtaattttcgatctgaaaggca

SEQ ID NO: 137255 - DNA, 75 bp, synthetic construct
  source 1..75: mol_type = other DNA
tgcgtgaggcagcagtagcaattgaaacagtggcaacgcctcaaaaattgcaggcgtttcggatgaaggtcacac

SEQ ID NO: 137256 - DNA, 75 bp, synthetic construct
  source 1..75: mol_type = other DNA
ccgccagattaaaagtgctgggcaacctggatattgcggaacatcgcctgccgcaggacgggcaattcactgtcg

SEQ ID NO: 137257 - DNA, 75 bp, synthetic construct
  source 1..75: mol_type = other DNA
cggtagtaacgcgagaactggtttacactgcggtaacccgcgcgcgtcgacgtttgtctctgtatgccgatgagc

SEQ ID NO: 137258 - DNA, 75 bp, synthetic construct
  source 1..75: mol_type = other DNA
cagcgtttacgccatcatgcgggtaacccattgcatcttgatgtgttggtggtcgatgaagcgtcaatgatcgat

SEQ ID NO: 137259 - DNA, 75 bp, synthetic construct
  source 1..75: mol_type = other DNA
ctggaaaaacaaataaatgcgcgagttgatgaagatgtcctgaaagagctgatgcgtctcgggcgcctccagaag

SEQ ID NO: 137260 - DNA, 75 bp, synthetic construct
  source 1..75: mol_type = other DNA
gcctatgtaatttacagttcacatattaaacctactgctgctgaccttggcttgagcgatgtaagtggatacgtt

SEQ ID NO: 137261 - DNA, 75 bp, synthetic construct
  source 1..75: mol_type = other DNA
cagtggcgctgacgcggcggatctcggtgatttccggcggccctggcaccggtaaaacgaccaccgtggcgaagt

SEQ ID NO: 137262 - DNA, 75 bp, synthetic construct
  source 1..75: mol_type = other DNA
gccgggcaattaagttgtctgacgggaagtcatgttccggcaggaactggtacagaagcagcatctttacgcgac

SEQ ID NO: 137263 - DNA, 75 bp, synthetic construct
  source 1..75: mol_type = other DNA
catttctgggtgaaacagccgcaaatctgcgtaaaatttttgattttattgcccaaaatccgctggtggtcttgt

SEQ ID NO: 137264 - DNA, 75 bp, synthetic construct
  source 1..75: mol_type = other DNA
tgaagtgattgaatttcctctgccagatcagacacagttacgcgagttgctggcgttaaagctacgcggcattcg

SEQ ID NO: 137265 - DNA, 75 bp, synthetic construct
  source 1..75: mol_type = other DNA
gtgtcagaagtgcaggtcttacttttcctaatgatttttattttctggctgagcgtaaaattttcaactatgcca

SEQ ID NO: 137266 - DNA, 75 bp, synthetic construct
  source 1..75: mol_type = other DNA
gtagtgaaaaacggcagaataaagtcatcattgctgcaagagtacctccggaagaagccgaatttatccgggaaa

SEQ ID NO: 137267 - DNA, 75 bp, synthetic construct
  source 1..75: mol_type = other DNA
aaagtggtgctgatttagaacggattgtaagacgtgcaatcaagagaatgattttacgtagccaagagtttttga

SEQ ID NO: 137268 - DNA, 75 bp, synthetic construct
  source 1..75: mol_type = other DNA
catctgtttgttcagggaaaaagaaccggtgataaggaatacgcagaagtgcttgttgccataaccgaacttaca

SEQ ID NO: 137269 - DNA, 75 bp, synthetic construct
  source 1..75: mol_type = other DNA
gagcatcacaggaaaaaacatactgcttactggcagggatcttgatgataataatgctggttgccggacgtgctg

SEQ ID NO: 137270 - DNA, 75 bp, synthetic construct
  source 1..75: mol_type = other DNA
atcacctgctggacgcgccaacaaatggaaggtcacgccagtcgcacacaacagacattacccgtagctgttcag

SEQ ID NO: 137271 - DNA, 75 bp, synthetic construct
  source 1..75: mol_type = other DNA
atgagagatctgttacaacgcccggatttattcagcatcaataccgcgacgctgggctataaaaccccgctaccc

SEQ ID NO: 137272 - DNA, 75 bp, synthetic construct
  source 1..75: mol_type = other DNA
cgcgttagccataaaacacagcatctggatgagaaaaaagagctcggtcatttgagtgccggggcgcggcggttg

SEQ ID NO: 137273 - DNA, 75 bp, synthetic construct
  source 1..75: mol_type = other DNA
gatccggtcagcctggtgtgcgggcttattctgctcttcgctgaaacgtacgcgtggattgtgctggtgctcggc

SEQ ID NO: 137274 - DNA, 75 bp, synthetic construct
  source 1..75: mol_type = other DNA
gtgtaggtgtggcgtttcacggtgtcgcggatggtaaaaatccggatgtgctttccgtgggagaggggccaggga

SEQ ID NO: 137275 - DNA, 75 bp, synthetic construct
  source 1..75: mol_type = other DNA
acgttaaaagggctgtggaaacagcgcctgcgctgggctcagggcggtgcagaagtattcctcaaaaatatgaca

SEQ ID NO: 137276 - DNA, 75 bp, synthetic construct
  source 1..75: mol_type = other DNA
tattcctcaattattggtttgatcaagcgaacccagcgtatctatggaaacgtatttaccgtttccggtgttatt

SEQ ID NO: 137277 - DNA, 75 bp, synthetic construct
  source 1..75: mol_type = other DNA
tgtcagaacactcagattcactcctgttgaggatgaaactatcagaaaaaaagctgaagattccggactcactgt

SEQ ID NO: 137278 - DNA, 75 bp, synthetic construct
  source 1..75: mol_type = other DNA
gccgcctgttatatgcaggtggttggcgggttaccgcagggcacaaaagatctgtatgaagcacgggaactggtg

SEQ ID NO: 137279 - DNA, 75 bp, synthetic construct
  source 1..75: mol_type = other DNA
ccgtcaataacatgcgcgtttccggtttatgccgtagcacctactacaccgcgccgacgctggcggaacgcaaac

SEQ ID NO: 137280 - DNA, 75 bp, synthetic construct
  source 1..75: mol_type = other DNA
attgaactggaaatattctcgccttactggtggcagaaagatattaacagcacgctggatattagcgtcgatcgc

SEQ ID NO: 137281 - DNA, 75 bp, synthetic construct
  source 1..75: mol_type = other DNA
cccgatggttcacagcctcgatcagatcttatgggtgaagggcgagatccaaaaagcgatcgttgagcttaagcg

SEQ ID NO: 137282 - DNA, 75 bp, synthetic construct
  source 1..75: mol_type = other DNA
gcgtttacgccggaagaagacgttcgcccactgctggcactagagaatatctttgttgatcagtcctttagtaat

SEQ ID NO: 137283 - DNA, 75 bp, synthetic construct
  source 1..75: mol_type = other DNA
aggtgcgctttatcgacagcgacagcgtccagccgacgcaggcagaactgacggcgcatccgctgccgcgttcat

SEQ ID NO: 137284 - DNA, 75 bp, synthetic construct
  source 1..75: mol_type = other DNA
gcgcggcgatcatcagtaatatggaacaggtttgcgacaaactttctgcctctgccagcgattacctgcgtgagc

SEQ ID NO: 137285 - DNA, 75 bp, synthetic construct
  source 1..75: mol_type = other DNA
atccgtcattccagtatcagcattgcccggctggtgaaaccggttgactggcagtcagaaatgggcgaagtcgaa

SEQ ID NO: 137286 - DNA, 75 bp, synthetic construct
  source 1..75: mol_type = other DNA
gcggtaacctcggtgttaacgggcgtactgaacatccgttcgagctggaagaggatgtctggcagcgggaagaga

SEQ ID NO: 137287 - DNA, 75 bp, synthetic construct
  source 1..75: mol_type = other DNA
ttcagttactgctttgaaaatgaacagacactatcgctcgagcagcttcaggagcgcctgtcctgtatgcctgaa

SEQ ID NO: 137288 - DNA, 75 bp, synthetic construct
  source 1..75: mol_type = other DNA
gcggagttaccgctaatgccattatgaaactatttctggacaaggatggcttcagttactgctttgaaaatgaac

SEQ ID NO: 137289 - DNA, 75 bp, synthetic construct
  source 1..75: mol_type = other DNA
gctgcaatgttgcagtgggggagagcagttgtctagtcagcatggattactgtaagacgagcggtaaaggctata

SEQ ID NO: 137290 - DNA, 75 bp, synthetic construct
  source 1..75: mol_type = other DNA
tcgcgtccggcatcaccgtttgaaaatacggcaccggcacgcccgacatcaagtacagcaacggctgcaaccagc

SEQ ID NO: 137291 - DNA, 75 bp, synthetic construct
  source 1..75: mol_type = other DNA
tcgtcttgccttattgaatatgattgctatttgcatttaaaatcgagacctggtttttctactgaaatgattatg

SEQ ID NO: 137292 - DNA, 75 bp, synthetic construct
  source 1..75: mol_type = other DNA
atgcaacacacttcagccttacatgtaagagattttgcttccctgtgctcacagaacctcaaagctaatgtattg

SEQ ID NO: 137293 - DNA, 75 bp, synthetic construct
  source 1..75: mol_type = other DNA
atgaataaaatatactccctgaaatattgccatataaccaaaagcctcattgctgtctccgaactggcccgcagg

SEQ ID NO: 137294 - DNA, 75 bp, synthetic construct
  source 1..75: mol_type = other DNA
actgcagtgattgccggcgcgctgttaatgacccttggccatgtggtgctgggcattgatacaaattcaaccttt

SEQ ID NO: 137295 - DNA, 75 bp, synthetic construct
  source 1..75: mol_type = other DNA
tcaagatgaaagcaagaagataattatgacgattatcagcgcacttgatgaaaaagacttagagcagctatcgaa

SEQ ID NO: 137296 - DNA, 75 bp, synthetic construct
  source 1..75: mol_type = other DNA
gccttatatgtatcacggccagctaaacggcaatatggatgtgaatattccgcagctctccggtaaggatgtact

SEQ ID NO: 137297 - DNA, 75 bp, synthetic construct
  source 1..75: mol_type = other DNA
gtaaatatgaacaatgctctgtggtactctgacgaaaactcaacgatcggagcactgaagagtagggggggacga

SEQ ID NO: 137298 - DNA, 75 bp, synthetic construct
  source 1..75: mol_type = other DNA
tcagtgcagagatcccttatcagatattccgcgactttgccgagaataaaggccagtttacgccggggagcacga

SEQ ID NO: 137299 - DNA, 75 bp, synthetic construct
  source 1..75: mol_type = other DNA
gcgttttaacgagcgcctgctcgctgccgtgcgggtaaccttaagcggcaccgagggggcactggattctctacg

SEQ ID NO: 137300 - DNA, 75 bp, synthetic construct
  source 1..75: mol_type = other DNA
tttatcttattacgctatgggggcatttgtgttgctgatatgtggattcattgtttccctttatgcaacgtggtt

SEQ ID NO: 137301 - DNA, 75 bp, synthetic construct
  source 1..75: mol_type = other DNA
atggaatgtataaaatgtaaaatgtcagaagcaaacaaagagtcgggattgtgtgatgcctgtgaaagagaagag

SEQ ID NO: 137302 - DNA, 75 bp, synthetic construct
  source 1..75: mol_type = other DNA
gctggctgaatgaaggcgacaccatcagcatagggaatgtgactttacaggtgttacattgcccagggcatacgc

SEQ ID NO: 137303 - DNA, 75 bp, synthetic construct
  source 1..75: mol_type = other DNA
atgcggaaaaaattaaagaggaagttgatgccagcggcctgacgctgatgcagatcctactgacacatggccatc

SEQ ID NO: 137304 - DNA, 75 bp, synthetic construct
  source 1..75: mol_type = other DNA
tgatgccagcggcctgacactgatgcagatcctgctgacgcatggtcatctggaccacgttggcgcagcggcgga

SEQ ID NO: 137305 - DNA, 75 bp, synthetic construct
  source 1..75: mol_type = other DNA
aaaaaatcattaacccggttcaggaacataaaaacacatccgcttgccgcgcggaacgtgaaacaacaattattg

SEQ ID NO: 137306 - DNA, 75 bp, synthetic construct
  source 1..75: mol_type = other DNA
aaatttactgctctggaaaatacgttgaatgctgcacgaccacatctgggtgaattatatgaggcgtataaaacg

SEQ ID NO: 137307 - DNA, 75 bp, synthetic construct
  source 1..75: mol_type = other DNA
ggaaatcctgccgactgcatggcaatcatcatgcaagccatgcaatggggcatgaacccctacgctgtggctcag

SEQ ID NO: 137308 - DNA, 75 bp, synthetic construct
  source 1..75: mol_type = other DNA
gccgtcggtcgctgccgcgcaatacaacattgccgctaaccatattgataacgtacaaattattcgtatggcggc

SEQ ID NO: 137309 - DNA, 75 bp, synthetic construct
  source 1..75: mol_type = other DNA
tacaacattgccgctaaccatattgataacgtacaaattattcgtatggcggcagaagaatttactcaggcgatg

SEQ ID NO: 137310 - DNA, 75 bp, synthetic construct
  source 1..75: mol_type = other DNA
ctgcgccacaagttgttccagattgattacctcaccacgctgagtaatcaggcggtggtttccctgttgtaccat

SEQ ID NO: 137311 - DNA, 75 bp, synthetic construct
  source 1..75: mol_type = other DNA
acgtacaaattattcgtatggcggcagaagaatttactcaggcgatgaatggcgtgcgcgagtttaaccgcctgc

SEQ ID NO: 137312 - DNA, 75 bp, synthetic construct
  source 1..75: mol_type = other DNA
cgcatctggcacgatggcgatgacctgtaccacatcattttcgatcaacaaaccaaaagccgtatccgggtggat

SEQ ID NO: 137313 - DNA, 75 bp, synthetic construct
  source 1..75: mol_type = other DNA
aaattatcgggaaatttgaaatcaggaagaacgacaaggggaaagaatatcgtgtacctggctggaagctggccg

SEQ ID NO: 137314 - DNA, 75 bp, synthetic construct
  source 1..75: mol_type = other DNA
ggtatagttcgcagcgatatattatcgcagtttagccgtcttgagcagacaattatgctacagcgtaattttctt

SEQ ID NO: 137315 - DNA, 75 bp, synthetic construct
  source 1..75: mol_type = other DNA
taaccatccttggcggggtgcattcgtttctgaatggggttcgtgaaaaacgttacgaagcgtcatgcaggcaat

SEQ ID NO: 137316 - DNA, 75 bp, synthetic construct
  source 1..75: mol_type = other DNA
cggttacgtcgcgaataattttttccctaatgagcagagacgagatcgttttgaagcaattatgacaaaagttgg

SEQ ID NO: 137317 - DNA, 75 bp, synthetic construct
  source 1..75: mol_type = other DNA
ccgctcgatgccgccttcacgccggaaggggccgagtacgtggagcatttctgcgggcggcgctgttgcaaatag

SEQ ID NO: 137318 - DNA, 75 bp, synthetic construct
  source 1..75: mol_type = other DNA
gtcggcttctgacgttcagtgcagccgtcttctgaaaacgacaatggaggtggtagccgagggtgtggaaacacc

SEQ ID NO: 137319 - DNA, 75 bp, synthetic construct
  source 1..75: mol_type = other DNA
tatgaaaacccggtaaaattccggttcaaacgccttaaatcggactcaacaaattttaacgggactgattttggc

SEQ ID NO: 137320 - DNA, 75 bp, synthetic construct
  source 1..75: mol_type = other DNA
tggcgtcctgatccccatcttcccggccaccagcggcaatgtcggtgaatcaagcttcatgatcgagctgccgca

SEQ ID NO: 137321 - DNA, 75 bp, synthetic construct
  source 1..75: mol_type = other DNA
caaaccgatataatccgactgtcccggacagatcaggaaatttttgctcaggcattactgtcaccaacagagccg

SEQ ID NO: 137322 - DNA, 75 bp, synthetic construct
  source 1..75: mol_type = other DNA
gacgtaaaaacccgaaccgcaagccgtggacaccaaacctgaatttctcgatggttgattaccacgaacgccagc

SEQ ID NO: 137323 - DNA, 75 bp, synthetic construct
  source 1..75: mol_type = other DNA
ctgttaaccatgatggcgcacggactggctctgctggttccttccctctggctctttattcagtggcggtgggat

SEQ ID NO: 137324 - DNA, 75 bp, synthetic construct
  source 1..75: mol_type = other DNA
gccgtcagtcgccgcggcgcaatacaacattgccgctaaccatattgataacgtacaaataattcgtatggcagc

SEQ ID NO: 137325 - DNA, 75 bp, synthetic construct
  source 1..75: mol_type = other DNA
atcgtgatgtactgccagagcctcatacattgtcagacgtagttcgtgagtttgtttactgggactggctctaca

SEQ ID NO: 137326 - DNA, 75 bp, synthetic construct
  source 1..75: mol_type = other DNA
agcaacatcagtcagggctacgtttggtagctatgaagcagcactcgaagatgtggaagccgagcgagtgatcaa

SEQ ID NO: 137327 - DNA, 75 bp, synthetic construct
  source 1..75: mol_type = other DNA
ggtttttagcaagcggaaagggagaatatatgaaagacaatggctcggcggtcatcctcaatctggttggggagt

SEQ ID NO: 137328 - DNA, 75 bp, synthetic construct
  source 1..75: mol_type = other DNA
caggtggcgcggaatctgtcgcggtgtacgttaacgacgtcaaaggcggttcgaaatcgttcgttaaagtgatca

SEQ ID NO: 137329 - DNA, 75 bp, synthetic construct
  source 1..75: mol_type = other DNA
tcacctgccacgtgatttccgtatgggttcccgccgcaccggtattatcgttgtttcaatgctgattgcgatatt

SEQ ID NO: 137330 - DNA, 75 bp, synthetic construct
  source 1..75: mol_type = other DNA
ggcatggcggcgtattttggtctaccggaagcgttgatgaatcgctttgtcggtctggtgtcctttaccgcgatg

SEQ ID NO: 137331 - DNA, 75 bp, synthetic construct
  source 1..75: mol_type = other DNA
attgttgtcgggggattttcttgtgtctgaagaagataaaacaatatcatcatcagacttcctgaaaaaggttcc

SEQ ID NO: 137332 - DNA, 75 bp, synthetic construct
  source 1..75: mol_type = other DNA
tggtaccacctggcgatggcgggccgtgccccggaagacgtcgccgacagggaccatctgcgcctcaccggaatg

SEQ ID NO: 137333 - DNA, 75 bp, synthetic construct
  source 1..75: mol_type = other DNA
tcctttaccgcgatgttcggttccctgctgatgtggaccgcaacgccggtgaaaattttcttctccgaaatcccg

SEQ ID NO: 137334 - DNA, 75 bp, synthetic construct
  source 1..75: mol_type = other DNA
cccgtaccaaacttattgagtttctggcaggctgtgcctcgtctaccgttgtgatggaagcctgcgccggagctc

SEQ ID NO: 137335 - DNA, 75 bp, synthetic construct
  source 1..75: mol_type = other DNA
ccacgaacagaagctcagcaggccatgcgggcgcttcaccgggtcagggaatcattggtcagtgataaagtcaaa

SEQ ID NO: 137336 - DNA, 75 bp, synthetic construct
  source 1..75: mol_type = other DNA
caatgggtgatgctatcaattcgctcattaaccccattagaagctttaggatatgttattgcaggaggtgctgta

SEQ ID NO: 137337 - DNA, 75 bp, synthetic construct
  source 1..75: mol_type = other DNA
ccgctgatgattatcccgatgctcggttccaataccgtgcaggatctgatgaatactattattaatatgaccgcc

SEQ ID NO: 137338 - DNA, 75 bp, synthetic construct
  source 1..75: mol_type = other DNA
ctgatgtggaccgcaacgccggtgaaaattttcttctccgaaatcccggaaggcatctttggtaagaaaaccgtc

SEQ ID NO: 137339 - DNA, 75 bp, synthetic construct
  source 1..75: mol_type = other DNA
gtgagtaataaaaacgtcaatgtaaggaaatcgcaggaaataacattctgcttgctggcaggtatcctgatgttc

SEQ ID NO: 137340 - DNA, 75 bp, synthetic construct
  source 1..75: mol_type = other DNA
aaaaccggattgacctgcgtactgacggtctgccggacgatatcgtactggcagagacgtctgctcgtactgttc

SEQ ID NO: 137341 - DNA, 75 bp, synthetic construct
  source 1..75: mol_type = other DNA
agctttagctggaaagatatttatttcagtaccaccttctccatggaccagatgagggggagcagctatggctac

SEQ ID NO: 137342 - DNA, 75 bp, synthetic construct
  source 1..75: mol_type = other DNA
tgaaaaaccggatgagcctgagtctgaatcagtcactgggtactctgggctcggtctctctgagtgcgtcgcagc

SEQ ID NO: 137343 - DNA, 75 bp, synthetic construct
  source 1..75: mol_type = other DNA
atagctgccgataaacagatccgtgctaaagcgacaatagcagagaaggcagagattaaacgtcaacaggctttt

SEQ ID NO: 137344 - DNA, 75 bp, synthetic construct
  source 1..75: mol_type = other DNA
ctgaaatgatgagcgcctttgctggtgctgtatcgtggcttactgctgcataccagaatataaatccagagaaca

SEQ ID NO: 137345 - DNA, 75 bp, synthetic construct
  source 1..75: mol_type = other DNA
aactacagtcagtatctgactgactcccggtggtcacacagccggaatgaaaacaccgctttctataacacttat

SEQ ID NO: 137346 - DNA, 75 bp, synthetic construct
  source 1..75: mol_type = other DNA
aacagtgtcacgcggattttatcctgtctcaggataaaaagcggaccggccctgtgactgaaacagcagcggtat

SEQ ID NO: 137347 - DNA, 75 bp, synthetic construct
  source 1..75: mol_type = other DNA
ttcccgtctgaggaactactcgccaaccgtgaagggctttgcacgtacacaggctgtggtcgtgataacacagaa

SEQ ID NO: 137348 - DNA, 75 bp, synthetic construct
  source 1..75: mol_type = other DNA
tacggtgacatccggattggtcagtcttatggctttaaatactccaagagccagattgaaacgggcacaacggta

SEQ ID NO: 137349 - DNA, 75 bp, synthetic construct
  source 1..75: mol_type = other DNA
gcaggtattggcagcaccctttcgctggggcgcgtgggggctgtctctgccgatgtttctgtatcgcgagctgaa

SEQ ID NO: 137350 - DNA, 75 bp, synthetic construct
  source 1..75: mol_type = other DNA
gtggaaactggggtaatggtggtgctgatgaagggcagagtgcctccctgacctggaacagtgatttcagcacag

SEQ ID NO: 137351 - DNA, 75 bp, synthetic construct
  source 1..75: mol_type = other DNA
ggagatgaaacgtgagggtgtgtcgggatttgaactgtccgcagggcgttacgataacagcggctcggaagatta

SEQ ID NO: 137352 - DNA, 75 bp, synthetic construct
  source 1..75: mol_type = other DNA
gaaaaagcgtcctggctgcacccggatgcgccagtagaagtcgaagtagagaatctggaagaacttgatgaagcc

SEQ ID NO: 137353 - DNA, 75 bp, synthetic construct
  source 1..75: mol_type = other DNA
gaggcctcagcgacagcgaatttgccaaattcagttttactcaggatggttcgccattcccggtaaaagagcctg

SEQ ID NO: 137354 - DNA, 75 bp, synthetic construct
  source 1..75: mol_type = other DNA
aaaggagaaacacctgtattgcatggtggaggggtcaccggaagtcggttcggaaacggctgggttgatattgcc

SEQ ID NO: 137355 - DNA, 75 bp, synthetic construct
  source 1..75: mol_type = other DNA
aagtacgtgcggttcacggtcaacttaatgacggcggttttgacagccaacgttctgctgttgcccagcaccagc

SEQ ID NO: 137356 - DNA, 75 bp, synthetic construct
  source 1..75: mol_type = other DNA
atttgcaattcccctggtgacatttatcacggttccgttgatcctcgcagcgatggttatgcatttaagcgggcc

SEQ ID NO: 137357 - DNA, 75 bp, synthetic construct
  source 1..75: mol_type = other DNA
cagcgatcgcgtatttcgtctcgctcaggcgcaatcacgaatgaataacggtttggttgatgcgagtgattttga

SEQ ID NO: 137358 - DNA, 75 bp, synthetic construct
  source 1..75: mol_type = other DNA
tcctgacaataactcaccagtttcaatgagtgacgttgaaagtaaattcccttttgaatctcttgttgcatatca

SEQ ID NO: 137359 - DNA, 75 bp, synthetic construct
  source 1..75: mol_type = other DNA
atgaaaaaccgtaaagcaaagatgcttatttcccgtatatacagccgttgctatcccagccagtggttgagagtt

SEQ ID NO: 137360 - DNA, 75 bp, synthetic construct
  source 1..75: mol_type = other DNA
atgaaaaaccgtaaagcaaaaattcttttgacctgtagaaacattcgcggcgtccagcaatggttaaaactcagt

SEQ ID NO: 137361 - DNA, 75 bp, synthetic construct
  source 1..75: mol_type = other DNA
gagttaggtcgagcaaggaaatttactgtaagactaatgtgggatgacgatttcaaggatgataatgaaattgtt

SEQ ID NO: 137362 - DNA, 75 bp, synthetic construct
  source 1..75: mol_type = other DNA
tcccgataataattcaccagtatcaatgagtgacgttaaaagcaaatttccgcttgagtatctcgcgacagatca

SEQ ID NO: 137363 - DNA, 75 bp, synthetic construct
  source 1..75: mol_type = other DNA
ttggtggtttggcgttttttctctcaatctatgcaacaattaaaaccgtaaagttcaatgaaagacaaaaagcgt

SEQ ID NO: 137364 - DNA, 75 bp, synthetic construct
  source 1..75: mol_type = other DNA
ctgcgagcgcaatatctggcctctttacaaacgtctctgcaaccctatccgtggaaaacggtcattcttggttta

SEQ ID NO: 137365 - DNA, 75 bp, synthetic construct
  source 1..75: mol_type = other DNA
acgctgatattgctgttttttctttggggcgtactggcggcgaagcaagttatgtgggtaggagaagccttagct

SEQ ID NO: 137366 - DNA, 75 bp, synthetic construct
  source 1..75: mol_type = other DNA
aaatttttctgcctgggcgctggatccactggcaaataccattaattggcggaatctgctgtgctgctttttatg

SEQ ID NO: 137367 - DNA, 75 bp, synthetic construct
  source 1..75: mol_type = other DNA
aatgaacagcgagatgaacttaaggaagatatgctccaggttgaatatcctggtgggtatcttttggatgttggg

SEQ ID NO: 137368 - DNA, 75 bp, synthetic construct
  source 1..75: mol_type = other DNA
gatgacggaatgtatagcattcttttaactggtgatattgaagcactagctgaacaaaaaatgctaagtcgttac

SEQ ID NO: 137369 - DNA, 75 bp, synthetic construct
  source 1..75: mol_type = other DNA
catggcagtaatacctcatcatcgttgccattaattcagcgagtgaatggaaaagtggcactcgcatcggcatcg

SEQ ID NO: 137370 - DNA, 75 bp, synthetic construct
  source 1..75: mol_type = other DNA
gtgtacatgcttgatgtcgggcaagggctggcaatggtcattgcgcgaaacggcaaagcgattctctatgatacg

SEQ ID NO: 137371 - DNA, 75 bp, synthetic construct
  source 1..75: mol_type = other DNA
cactggcaaatgccattaattggtggaatctgctgtgctgctttttatgcctggttgacgggaatgcaacctcct

SEQ ID NO: 137372 - DNA, 75 bp, synthetic construct
  source 1..75: mol_type = other DNA
gtggtttccctgtcctgtctggtcgctgccgcccaccttgcgcacagccgtttcactcatccatctgcagttggg

SEQ ID NO: 137373 - DNA, 75 bp, synthetic construct
  source 1..75: mol_type = other DNA
cgatgatagtgcatttaagcggaccattaatcgtggaacaaggattatggtttctggtcgacagatctttggctt

SEQ ID NO: 137374 - DNA, 75 bp, synthetic construct
  source 1..75: mol_type = other DNA
tggcggcgctgattttttggtatcagtggtttccctgtccggtctggtcgctgccgccagtattgcgcgctattg

SEQ ID NO: 137375 - DNA, 75 bp, synthetic construct
  source 1..75: mol_type = other DNA
cctggtcattggatccactggcagatgccattaattggcggaatttgctgtgccgctttttatgcctggttgact

SEQ ID NO: 137376 - DNA, 75 bp, synthetic construct
  source 1..75: mol_type = other DNA
cgttatggtgaaattagtggaaatgtaggtacagaaacccgtccacgaaatattgcatttaactttctggtgagg

SEQ ID NO: 137377 - DNA, 75 bp, synthetic construct
  source 1..75: mol_type = other DNA
ctcagacggtgttactcatccgtccgtgtacgcatctgaaacccgtccgcgcaacattgcatttaactacatcgt

SEQ ID NO: 137378 - DNA, 75 bp, synthetic construct
  source 1..75: mol_type = other DNA
cagacaaggtaatcctttatcgcaaggacctttcaccaacaggtaataacaacgcaatagcgaccggattaccac

SEQ ID NO: 137379 - DNA, 75 bp, synthetic construct
  source 1..75: mol_type = other DNA
cggtgtcactcagtatttaatgctgccaaaccgggcgctgggctttttgtccttttcccgttgcagcgcgcgcga

SEQ ID NO: 137380 - DNA, 75 bp, synthetic construct
  source 1..75: mol_type = other DNA
atacgctgactcatttgagtggaaaggatgttgccggtcttctcgtataccttggtttgggagaaggttcggcat

SEQ ID NO: 137381 - DNA, 75 bp, synthetic construct
  source 1..75: mol_type = other DNA
atattgagggattcgcagatggcgggatcggtatgtcttttgatgcaatcagaggggctttttacgatgcaggaa

SEQ ID NO: 137382 - DNA, 75 bp, synthetic construct
  source 1..75: mol_type = other DNA
tgaatgaaagtgttgctatggatgtcgcgtatgaaagctctggctctggtgactggcgcacaagcggggttactg

SEQ ID NO: 137383 - DNA, 75 bp, synthetic construct
  source 1..75: mol_type = other DNA
atgccagtgctgcggcgaaggtagttgccaatttcctgctctcacccgatgcgcaactgcgtaaagcagatcccg

SEQ ID NO: 137384 - DNA, 75 bp, synthetic construct
  source 1..75: mol_type = other DNA
gcagttacagctttggctttcgcgagggaatgattggcaacgtgcatttcgtcactatccccgccaacgctaatg

SEQ ID NO: 137385 - DNA, 75 bp, synthetic construct
  source 1..75: mol_type = other DNA
gcaaaagtgtttccttcgctggtattacctgaagcccgcggtgatttcattcgtatctgggatgatgggcgaggg

SEQ ID NO: 137386 - DNA, 75 bp, synthetic construct
  source 1..75: mol_type = other DNA
ccactggatgagacgctgactcatttgagtgggaaggatgttgccggtcttcttgcataccttggtttgggagaa

SEQ ID NO: 137387 - DNA, 75 bp, synthetic construct
  source 1..75: mol_type = other DNA
attgacctttcaggtaaaaaaacaaccgctgttttaaaagcaaaagatcgcattatcttgaacggcactataata

SEQ ID NO: 137388 - DNA, 75 bp, synthetic construct
  source 1..75: mol_type = other DNA
cgcttgccagagcacgaaactacgtgggcgatgacggtacataaatcgcagggatcggagttcgaccatgcggcg

SEQ ID NO: 137389 - DNA, 75 bp, synthetic construct
  source 1..75: mol_type = other DNA
attgacgatccggttgccggaacgccgctcgtggtgccgctcggacgaacggcaccttcaaccgcaaatagttaa

SEQ ID NO: 137390 - DNA, 75 bp, synthetic construct
  source 1..75: mol_type = other DNA
ttgcacgatcttaatcaggcctgtcgttacgccagccatttgattgcattgcgggaagggaaaattgttgctcag

SEQ ID NO: 137391 - DNA, 75 bp, synthetic construct
  source 1..75: mol_type = other DNA
ctttctgtttcaggtactggatatcaaaaattaccatcaggttttattcttcagtggggctcaatcggcgctcca

SEQ ID NO: 137392 - DNA, 75 bp, synthetic construct
  source 1..75: mol_type = other DNA
cgcctgccagagcacgaaaccacgtgggcgatgactgtacataaatcgcaagggtcggagttcgaccatgctgcg

SEQ ID NO: 137393 - DNA, 75 bp, synthetic construct
  source 1..75: mol_type = other DNA
ctcgcctcggttgaagctggggcggtgctgggtgatatctgcgcttatgccaacgctgggtttaccacagcgcgc

SEQ ID NO: 137394 - DNA, 75 bp, synthetic construct
  source 1..75: mol_type = other DNA
aggccgcagaagaggtctaccatgaaatagagcttcaggctcagcagctggagtacgattactattcgttatgtg

SEQ ID NO: 137395 - DNA, 75 bp, synthetic construct
  source 1..75: mol_type = other DNA
ggcgtcgcacgatgctattgcgttttcagaggatggaggttgcggaagaggtttaccatgaaatagagcatcagg

SEQ ID NO: 137396 - DNA, 75 bp, synthetic construct
  source 1..75: mol_type = other DNA
tttattgtggaatgatgatttattcaacgaagcacagccgctatgggaagccgcacgtgcgcatggtttacgccg

SEQ ID NO: 137397 - DNA, 75 bp, synthetic construct
  source 1..75: mol_type = other DNA
ggtgcgggacacgcaattaactttcatgatggcatcgccggaaatcagccaggattttcacgatttaatttcacc

SEQ ID NO: 137398 - DNA, 75 bp, synthetic construct
  source 1..75: mol_type = other DNA
agaaggcccaacattaaccggttttaattctgcttacagaacgtcatcaaccagcgacacggtatcgatgaatta

SEQ ID NO: 137399 - DNA, 75 bp, synthetic construct
  source 1..75: mol_type = other DNA
caattattgtgttgttgcatcgtacgataatgcacggtcaggtgtgtcaacaatggttagttttgcagcattacc

SEQ ID NO: 137400 - DNA, 75 bp, synthetic construct
  source 1..75: mol_type = other DNA
agaatctgatctgtcaaaatcatggcgattagttgatctggcaaatgttttacatatgtctgaagtctcaattcg

SEQ ID NO: 137401 - DNA, 75 bp, synthetic construct
  source 1..75: mol_type = other DNA
gtcattatgcgtaaaagaggtaatatctatcaaagtgatggtgagcgtgcacctaacaaggaaaaacctgcagcc

SEQ ID NO: 137402 - DNA, 75 bp, synthetic construct
  source 1..75: mol_type = other DNA
atggaatcaaaccgtcgcatcagggcagagattaagcagatcatgattaattcctccccacaacattcaagctga

SEQ ID NO: 137403 - DNA, 75 bp, synthetic construct
  source 1..75: mol_type = other DNA
cagcttgcgtctctaccggaataacaccactgaaccgggcaatcccactcagacacatggtgacagcggcctgcg

SEQ ID NO: 137404 - DNA, 75 bp, synthetic construct
  source 1..75: mol_type = other DNA
gacttcagaactgccgatgcagcagattttcttccccccggagagacaaacggtttaagtctgtggggaaatatc

SEQ ID NO: 137405 - DNA, 75 bp, synthetic construct
  source 1..75: mol_type = other DNA
atgttagtacatcatattttatccgtaattttaaaagttattttggtataacaccaaaacagttttcattgaaag

SEQ ID NO: 137406 - DNA, 75 bp, synthetic construct
  source 1..75: mol_type = other DNA
gtgctttaggcttatcgcctatccctggcacagaagacaagccaacgactggcggaactgcaattcagaactatg

SEQ ID NO: 137407 - DNA, 75 bp, synthetic construct
  source 1..75: mol_type = other DNA
tatgtattataaggactcgtttgtaggtggtatggttgattggggtcgtagtgctttaggcttagatcctattcc

SEQ ID NO: 137408 - DNA, 75 bp, synthetic construct
  source 1..75: mol_type = other DNA
aagcaagctcaaacagataagaagaatgctgataaggtggcaaaggcagaagctaaagcgaaggctaaagccgcg

SEQ ID NO: 137409 - DNA, 75 bp, synthetic construct
  source 1..75: mol_type = other DNA
atccattaggtttcctgggtgctgtagtgaaagaaggcgaacgccgtggactctctgaccaggagcagggtcaca

SEQ ID NO: 137410 - DNA, 75 bp, synthetic construct
  source 1..75: mol_type = other DNA
caagcccatctgataacgtgcaatccctgaaacagaacgttagccgtgatctgaacactaccccatctatgacgt

SEQ ID NO: 137411 - DNA, 75 bp, synthetic construct
  source 1..75: mol_type = other DNA
caagcccatctgataacgtgcaatcgctgaaagagaacgttagccgtgatctgaacactaccccatctatgacgt

SEQ ID NO: 137412 - DNA, 75 bp, synthetic construct
  source 1..75: mol_type = other DNA
tttatttaatagagtatatatcattaaccataatatgcgcaggggatgtatatggttaataaaagtaaaagacaa

SEQ ID NO: 137413 - DNA, 75 bp, synthetic construct
  source 1..75: mol_type = other DNA
ggaaaaccttacgatttgtccatacttatatcatgatcatcgagtatattgatggcatagagttatgtgatatgc

SEQ ID NO: 137414 - DNA, 75 bp, synthetic construct
  source 1..75: mol_type = other DNA
gatgccagcagcagggaatggctgggctccggcaatcctgacacacttatcagtgacatcagcatacctgttggt

SEQ ID NO: 137415 - DNA, 75 bp, synthetic construct
  source 1..75: mol_type = other DNA
aggccaatttactgcaaaccggctgggctgagactctgccaaactggcgttatgtcgatacacaactgccggtac

SEQ ID NO: 137416 - DNA, 75 bp, synthetic construct
  source 1..75: mol_type = other DNA
tccgcaaaaactgcctgacgggcagcgcgaaatattgcaatcaagaatgccgcaggatctgccgccggtactggc

SEQ ID NO: 137417 - DNA, 75 bp, synthetic construct
  source 1..75: mol_type = other DNA
caactgcgtaaagcagatcccgctgtctggggcgatccttctgttctcgatccgcaaaaactgcctgacgggcag

SEQ ID NO: 137418 - DNA, 75 bp, synthetic construct
  source 1..75: mol_type = other DNA
accaacagcgattctgaaacgcttgcggcaacgccaaaggcggtaaagacagcatatgaccttgctaacgggaaa

SEQ ID NO: 137419 - DNA, 75 bp, synthetic construct
  source 1..75: mol_type = other DNA
caccgcggtgacccgcgcgcgtcgccgtctgtcgctgtatgccgatgagcgcatattaagtgcggcaatcgccac

SEQ ID NO: 137420 - DNA, 75 bp, synthetic construct
  source 1..75: mol_type = other DNA
gcattttaagtgcggcaattgccacgcgcaccgagcggcgcagtggtctggcggcgttgtttagttcacggggat

SEQ ID NO: 137421 - DNA, 75 bp, synthetic construct
  source 1..75: mol_type = other DNA
tctatcaaagtgatggtgagcacgcacctaacaaggaaaaacctgcagccctgtttgcgaaaggctctgtcggta

SEQ ID NO: 137422 - DNA, 75 bp, synthetic construct
  source 1..75: mol_type = other DNA
gtattcttgtcgtactgtcaccggccttacaggttgcgaccgctcatccatcatcgccggataaagatacgatca

SEQ ID NO: 137423 - DNA, 75 bp, synthetic construct
  source 1..75: mol_type = other DNA
caaatcctgttattacattaattgctgtcgtgatttctttattcttccttcctgcaatcgccgcaggactgggga

SEQ ID NO: 137424 - DNA, 75 bp, synthetic construct
  source 1..75: mol_type = other DNA
ttggtgtcacctcctcaaagacagcctccggaaataactgggtcgtcaccactcaggatttccttggtcagcaac

SEQ ID NO: 137425 - DNA, 75 bp, synthetic construct
  source 1..75: mol_type = other DNA
ggtattgaccggatcgcggcaatccatctgaaagacacccagccagtcaccgagcatagccctggacagttccgc

SEQ ID NO: 137426 - DNA, 75 bp, synthetic construct
  source 1..75: mol_type = other DNA
ttaccgcgatgatcgaaacgggcattgctattccgtcaatgtgcctgtctgcccatcgccgtttcccttttggta

SEQ ID NO: 137427 - DNA, 75 bp, synthetic construct
  source 1..75: mol_type = other DNA
tgattttgtcgaaatgtcggtggatgaaaccgacgaacggctctcacgtcttgactggagcgccgcacaaaggac

SEQ ID NO: 137428 - DNA, 75 bp, synthetic construct
  source 1..75: mol_type = other DNA
cgccgcattctccaggatcagaaccccaaatacctgctagcggacgaagtaggactgggcaaaaccatcgaagcg

SEQ ID NO: 137429 - DNA, 75 bp, synthetic construct
  source 1..75: mol_type = other DNA
agagtatatagagatcttatttttaactatatccatagtagctaatattttaacttatcaaaataacagcatcat

SEQ ID NO: 137430 - DNA, 75 bp, synthetic construct
  source 1..75: mol_type = other DNA
cacttaagcaacgccagctttttgatgactggcggcagacacataccctgaaagacgaatccgactgggaggact

SEQ ID NO: 137431 - DNA, 75 bp, synthetic construct
  source 1..75: mol_type = other DNA
tgcctgtgttacgccccggacagactggcagcagtttgcccaaaaaagggctgaacactgccaccggcgctgccg

SEQ ID NO: 137432 - DNA, 75 bp, synthetic construct
  source 1..75: mol_type = other DNA
gtggtcaccgaatcagtgagtgtcgcgcgcaaatcgatagtgttctgatggagatgacgcagaatcttcagatcc

SEQ ID NO: 137433 - DNA, 75 bp, synthetic construct
  source 1..75: mol_type = other DNA
ttcaactggaaaacagcgtatccgactggatacttaaagaagttttactcgatcaggatacagcgaaatacatcc

SEQ ID NO: 137434 - DNA, 75 bp, synthetic construct
  source 1..75: mol_type = other DNA
cgcgaacagtgcccggacaaaatcatcgtcgctgactggaaggtcgccgatgccggtgaaacgctcgcgcaacag

SEQ ID NO: 137435 - DNA, 75 bp, synthetic construct
  source 1..75: mol_type = other DNA
ctacctggaaatgatggaacataacgtaacggcgattgcgacagcggcgagcaatagccgtaatacccagccata

SEQ ID NO: 137436 - DNA, 75 bp, synthetic construct
  source 1..75: mol_type = other DNA
gggtaaggccgggcatccaccatgcccttcaggaggtagtggatgtctgatgaaaaccaaagaacatacacttca

SEQ ID NO: 137437 - DNA, 75 bp, synthetic construct
  source 1..75: mol_type = other DNA
gcttaaaagtattattacccatctctgggagcaggatgcagaagtgacagatcctgtcatagctatgtttaatca

SEQ ID NO: 137438 - DNA, 75 bp, synthetic construct
  source 1..75: mol_type = other DNA
ctgattctctgggctggtgcaataatgattgttcttgcctgtttgtatctgaggccgcttctggccccatttggc

SEQ ID NO: 137439 - DNA, 75 bp, synthetic construct
  source 1..75: mol_type = other DNA
acaacaattgcagactacatactttatgcagtccaccgaaatctctgtattaatcatgatcagttgagtgaggat

SEQ ID NO: 137440 - DNA, 75 bp, synthetic construct
  source 1..75: mol_type = other DNA
ctatccacctgactcacagaaaaaatcccggctgtcttttaaggaatttctctgtcaaacgattacaccgcttct

SEQ ID NO: 137441 - DNA, 75 bp, synthetic construct
  source 1..75: mol_type = other DNA
acgtcagaaggctattcagtaacggtgactgatgtaaaaaatgcggtaagagcaaaaataccccaaatgaaattt

SEQ ID NO: 137442 - DNA, 75 bp, synthetic construct
  source 1..75: mol_type = other DNA
tgaagtatgagccacgtattaagcgcgtcgacgtgacgatgcaggaacagactcaaccaggtgagttgcattatg

SEQ ID NO: 137443 - DNA, 75 bp, synthetic construct
  source 1..75: mol_type = other DNA
taaaatctgtggttatttattcaacaatgcctgtcggtaaagttgttgctgaatttgacattgcagacgttatag

SEQ ID NO: 137444 - DNA, 75 bp, synthetic construct
  source 1..75: mol_type = other DNA
tgctcactatggtgatcggcccgtccgccatcaattgcttgcaatgaaggcgattattctgtgtacccgtgacat

SEQ ID NO: 137445 - DNA, 75 bp, synthetic construct
  source 1..75: mol_type = other DNA
cgaaaaatttatgcaacgcgtggcagagcgcgagcgtctggggggaatttacagctctctgacccctgaaacacc

SEQ ID NO: 137446 - DNA, 75 bp, synthetic construct
  source 1..75: mol_type = other DNA
ttgagtttacacctgatactggaatttcagaacgctgggaaaaacaatggattaatattggtattgataaggaaa

SEQ ID NO: 137447 - DNA, 75 bp, synthetic construct
  source 1..75: mol_type = other DNA
ggggggcatcatataacgaaaaagccgcactgtccctgacaatgtataatgtgataacagatcttcgactgttcc

SEQ ID NO: 137448 - DNA, 75 bp, synthetic construct
  source 1..75: mol_type = other DNA
acaacaatttcagactacatacttaatgcagtccaccgaaatctctgtattaatcgtggtcagttgagtgaggat

SEQ ID NO: 137449 - DNA, 75 bp, synthetic construct
  source 1..75: mol_type = other DNA
atgtctaaccaacaccagtatggcctcttaccgtgcaaattgcaaggaggagtaaaccatgaaactaccgggaaa

SEQ ID NO: 137450 - DNA, 75 bp, synthetic construct
  source 1..75: mol_type = other DNA
ccgcgtcgtgccgatgaaggcaaactgccgctggcactggattcacgcccgccgtcagaagcactggaagaaacg

SEQ ID NO: 137451 - DNA, 75 bp, synthetic construct
  source 1..75: mol_type = other DNA
ggtgctggatacgcaatgctattccaacaccggtggtcaggcgtcgaaagcgacaccgctgggtgcagtaactaa

SEQ ID NO: 137452 - DNA, 75 bp, synthetic construct
  source 1..75: mol_type = other DNA
cgtttattgtggtattacccgacgttaatgaagtcagtctcaggcaaagtggcaaagcgatactggcacatgcgt

SEQ ID NO: 137453 - DNA, 75 bp, synthetic construct
  source 1..75: mol_type = other DNA
tacgctggcgcaggcgctgcatcgcttctttaacgagcagggattcttctgggtttcaacgccactgattaccgc

SEQ ID NO: 137454 - DNA, 75 bp, synthetic construct
  source 1..75: mol_type = other DNA
gcttacctgccaaaaggcaaggagaagaaggccatgaaactgccgcgaaacgcccttatctggtgcgtattaatc

SEQ ID NO: 137455 - DNA, 75 bp, synthetic construct
  source 1..75: mol_type = other DNA
accaatctgtcactgccgttgccggaaaacaccctgccaaactcggcgaaactggaagccttgttttatggcctt

SEQ ID NO: 137456 - DNA, 75 bp, synthetic construct
  source 1..75: mol_type = other DNA
ctctatttttggcgatcattcagatgtgatggccgtgcgccaaaccggttgcgccatgttgtgtgcagcaaacgt

SEQ ID NO: 137457 - DNA, 75 bp, synthetic construct
  source 1..75: mol_type = other DNA
gatgaatgatttctctgccgcgacaggtcgtcagtatcagccgtttgaatattacgggcatccgcaagcggaacg

SEQ ID NO: 137458 - DNA, 75 bp, synthetic construct
  source 1..75: mol_type = other DNA
atgctattccaataccggtggtcaggcgtcaaaagccacgccgctcggcgcggtgactaagtttggcgaacacgg

SEQ ID NO: 137459 - DNA, 75 bp, synthetic construct
  source 1..75: mol_type = other DNA
cgcgaacaggttgccacactgcgccagcatctcaaagatgtgagtgaagctcatgaactactacgcgacgctgat

SEQ ID NO: 137460 - DNA, 75 bp, synthetic construct
  source 1..75: mol_type = other DNA
agcaactcaacaatgtgcctgaagcgcatgaattgctgcgtgacgctgatgctctggtagagaaatcaatctggt

SEQ ID NO: 137461 - DNA, 75 bp, synthetic construct
  source 1..75: mol_type = other DNA
atgctcatccggttccccgattacctcgtctcttttccacgggaggttaccttgtttctcgcacaagaaattatt

SEQ ID NO: 137462 - DNA, 75 bp, synthetic construct
  source 1..75: mol_type = other DNA
actgatatggcgcgtctgggcgaccaggtagacggtcagcgtccgctggcggttatccacgcgaaagacgaaaac

SEQ ID NO: 137463 - DNA, 75 bp, synthetic construct
  source 1..75: mol_type = other DNA
tttctgaatttgaaaccattgaacaggaaaacagttacaacgaatggctacgcgcgaaagtagcagcaagccttg

SEQ ID NO: 137464 - DNA, 75 bp, synthetic construct
  source 1..75: mol_type = other DNA
tgaattcaaaaataagcagtggcatattgtccgcatacctaaaagtgcaagcctaagagaagtacttgaactttt

SEQ ID NO: 137465 - DNA, 75 bp, synthetic construct
  source 1..75: mol_type = other DNA
gaaaccgaagagcaactgataaaacactttctggaagtccagcgcccactaccaatcatcggtaatacaggagtt

SEQ ID NO: 137466 - DNA, 75 bp, synthetic construct
  source 1..75: mol_type = other DNA
ctttaccgaacatcagacagtgtattcgtaccgaggcggaagagctctcggaccataccttgctggccgttcatg

SEQ ID NO: 137467 - DNA, 75 bp, synthetic construct
  source 1..75: mol_type = other DNA
acttactgatttttctgccactggcaggaataagccagcctgtaatacccgtaatgaaaacattctttacggata

SEQ ID NO: 137468 - DNA, 75 bp, synthetic construct
  source 1..75: mol_type = other DNA
atccgcatccaggacaacagcatgaaaatgctccccccggcagcaccaacacattaggttttatcgcctgggctg

SEQ ID NO: 137469 - DNA, 75 bp, synthetic construct
  source 1..75: mol_type = other DNA
taggttttatcgcctggctgcgacgtttatcttattttcctggatcttttgctacacgactcgttttatttatgc

SEQ ID NO: 137470 - DNA, 75 bp, synthetic construct
  source 1..75: mol_type = other DNA
cagatacacgtactccgactccacatgacgaagtgatggcggaaatggaaaatcttattgctcaaattgctgtag

SEQ ID NO: 137471 - DNA, 75 bp, synthetic construct
  source 1..75: mol_type = other DNA
ccgccaggcagcacctcgacattaggttttatctcctgggctgcagcgtttgtcttattttccaggatcttttac

SEQ ID NO: 137472 - DNA, 75 bp, synthetic construct
  source 1..75: mol_type = other DNA
gttatttttatcgccgtcggtttattaatcagtatgccctcctcaaaaaagacacgcaggaaacggaagtcccgc

SEQ ID NO: 137473 - DNA, 75 bp, synthetic construct
  source 1..75: mol_type = other DNA
gagcttttttgacgtatgtatcatctctcttaaagggtattacaatatgattttttatattctgcggacactaaa

SEQ ID NO: 137474 - DNA, 75 bp, synthetic construct
  source 1..75: mol_type = other DNA
tgagtatccccgtgatttccggtaatggtcagtttgccacggtagctgaagtcaccgttactgaagcgggcgctg

SEQ ID NO: 137475 - DNA, 75 bp, synthetic construct
  source 1..75: mol_type = other DNA
caccggcgtggcggcaggcaccgtcgaaatcatcgttatgagcaatgacggtaactttgtggcgatctgcaaagt

SEQ ID NO: 137476 - DNA, 75 bp, synthetic construct
  source 1..75: mol_type = other DNA
ccgttcagcctgatacagcatcggacaaaaccttcagggtgtcatctgaccacaacagtgtggcgacagtgaccg

SEQ ID NO: 137477 - DNA, 75 bp, synthetic construct
  source 1..75: mol_type = other DNA
ctgtgttgccggataatgcgtctgatccttcattaagggtgtcgaccgtgcatcgtgcggtggccacagccacgt

SEQ ID NO: 137478 - DNA, 75 bp, synthetic construct
  source 1..75: mol_type = other DNA
acctggatgatgaagacgcggactggaccgcgaccgggcagggacagaaatctgcaggtgataccagttttacgc

SEQ ID NO: 137479 - DNA, 75 bp, synthetic construct
  source 1..75: mol_type = other DNA
actgcagaatcatatgatgattcctatattgatgatgatgcgcctgactgggattcaacagctcagggtgttaag

SEQ ID NO: 137480 - DNA, 75 bp, synthetic construct
  source 1..75: mol_type = other DNA
ggcgatggcatattccctggcccacaatatctggagcataacggcgtctggggaataggttccgacagccatatt

SEQ ID NO: 137481 - DNA, 75 bp, synthetic construct
  source 1..75: mol_type = other DNA
gttaaaaaatgaggtgtcaaaaggaaaactgattgacaccgggttctgtatttttgccctcagtaagctggcaat

SEQ ID NO: 137482 - DNA, 75 bp, synthetic construct
  source 1..75: mol_type = other DNA
aaggtcaacattccggtcgtatccggtaatggtgaacttgctgcggttgcagaaatcaccgtcaccgacagttaa

SEQ ID NO: 137483 - DNA, 75 bp, synthetic construct
  source 1..75: mol_type = other DNA
aagattacatccgcaccgcgcgcgccaaagggttgacccgcatgcgggtgattatcgtccatgcgctgcgtaacg

SEQ ID NO: 137484 - DNA, 75 bp, synthetic construct
  source 1..75: mol_type = other DNA
gtaccgcaggcggtcgcagcagaagtattagcactggcacaatccattgatagccgcgagctggaacaggccaaa

SEQ ID NO: 137485 - DNA, 75 bp, synthetic construct
  source 1..75: mol_type = other DNA
aggtgttgcggcaggtaaagcgcagatccctgtggttaccggcaatggtgagtttgcggcggtggcggagatcac

SEQ ID NO: 137486 - DNA, 75 bp, synthetic construct
  source 1..75: mol_type = other DNA
cgtgaagaatacagtttatggtgcgttggctttagactggccaaaggataaattacatatctggatccttgatga

SEQ ID NO: 137487 - DNA, 75 bp, synthetic construct
  source 1..75: mol_type = other DNA
aagaagtgatcacccgtacggtaaaaatcaccaatattggtcgtccgtcgctggcggaggatcggggagaaatca

SEQ ID NO: 137488 - DNA, 75 bp, synthetic construct
  source 1..75: mol_type = other DNA
attcccgtcatgagtaatggcggcgatttcgccgcagtggccaccgtagcggttataaccccggcagcacaaccc

SEQ ID NO: 137489 - DNA, 75 bp, synthetic construct
  source 1..75: mol_type = other DNA
tgaaggacagcatcataacggtgaaaggggtggcaaaaggcactgcgcttattcctgtcatgagcaatggcggcg

SEQ ID NO: 137490 - DNA, 75 bp, synthetic construct
  source 1..75: mol_type = other DNA
gaaggatctgacgccgggcgagatgacggcagaatcctacgatgataactacctggatgatgaagacgcagactg

SEQ ID NO: 137491 - DNA, 75 bp, synthetic construct
  source 1..75: mol_type = other DNA
gccgatccgtcgaaagccaccattagtgtgaaagatatgacaattacggtaaacggcgtggcgacaggtaaggtg

SEQ ID NO: 137492 - DNA, 75 bp, synthetic construct
  source 1..75: mol_type = other DNA
agcgctcacagggtttggtactttccacgttaaggcgcgggcagcgagaaccgggcggaatccccagactggaga

SEQ ID NO: 137493 - DNA, 75 bp, synthetic construct
  source 1..75: mol_type = other DNA
gcggaagccgcggtggaagccgttacgaaggctatgcgttcgccagtgaccctcgagtacgatctggacgacgcc

SEQ ID NO: 137494 - DNA, 75 bp, synthetic construct
  source 1..75: mol_type = other DNA
accactatggcattgctgccgggattagatgaaaaagcattcagtgaagagccctatttccaactgacattcaga

SEQ ID NO: 137495 - DNA, 75 bp, synthetic construct
  source 1..75: mol_type = other DNA
acaggcctcaacttgaggtcgtggagcatcgcgtggcagataccgaagatggtttcatgcgcgttgctaacgaga

SEQ ID NO: 137496 - DNA, 75 bp, synthetic construct
  source 1..75: mol_type = other DNA
tacgccagtacctgtcggatgttggtgatactgtccggatcgctgtaacgtaccagaatgttaatattagcctcg

SEQ ID NO: 137497 - DNA, 75 bp, synthetic construct
  source 1..75: mol_type = other DNA
aatgcgctgatcaactcagtgaaagaggtgcttaaagcgggtgggacagtagcgcttactgggtttggtactttc

SEQ ID NO: 137498 - DNA, 75 bp, synthetic construct
  source 1..75: mol_type = other DNA
atgcagaacttaaagatgccgggctggttcgttacggaacaacatttatgccggagggcagggtgttgttgcgcc

SEQ ID NO: 137499 - DNA, 75 bp, synthetic construct
  source 1..75: mol_type = other DNA
tggatcacacattccccgatgtcacatgtccgctatctgaaagaaaataacattcgctatcgcacactgtcagcg

SEQ ID NO: 137500 - DNA, 75 bp, synthetic construct
  source 1..75: mol_type = other DNA
attttctctattgccggacggtgttttctgatatgaaactaaaagtcggaagcaaacgtagtgatgatattttag

SEQ ID NO: 137501 - DNA, 75 bp, synthetic construct
  source 1..75: mol_type = other DNA
agaattcaccctgttaaacgacggtgaagtcacagaactcgaatatgtcgagattgccaccatgctccaccaaat

SEQ ID NO: 137502 - DNA, 75 bp, synthetic construct
  source 1..75: mol_type = other DNA
gaaacggtaaacgcggatgagccagaacaggtagaagagcatgacgaccggagccagattcatctggttgaacaa

SEQ ID NO: 137503 - DNA, 75 bp, synthetic construct
  source 1..75: mol_type = other DNA
catgagcagattatactctctattctggacaacatgcagcgtattctgaatacccgggccggaagtcttaaacat

SEQ ID NO: 137504 - DNA, 75 bp, synthetic construct
  source 1..75: mol_type = other DNA
aaagctgaaaatgatgctcttcgtcgcaagcttgataatggtggcagggtgctcgtcaaaggaaaatgccctgtg

SEQ ID NO: 137505 - DNA, 75 bp, synthetic construct
  source 1..75: mol_type = other DNA
gatgctaaatacacgaaggagttggctgatgcgaaagctgaaaatgatgctcttcggcgcaagcttgataatggt

SEQ ID NO: 137506 - DNA, 75 bp, synthetic construct
  source 1..75: mol_type = other DNA
aagaacagcgtgataaaaaagtcagtgagctgaagcaggcgaccgccaccatcgctgacatgcagcagcgccagc

SEQ ID NO: 137507 - DNA, 75 bp, synthetic construct
  source 1..75: mol_type = other DNA
gaccgcgaccgggcagggtcagaaatctgcgggtgacaccagttttacgctggcctggaagccgggagaggaagg

SEQ ID NO: 137508 - DNA, 75 bp, synthetic construct
  source 1..75: mol_type = other DNA
aagaacagcgcgataaaaaagtcagtgagctgaagcaggcgaccgccaccattactgacatgcagcagcgccagc

SEQ ID NO: 137509 - DNA, 75 bp, synthetic construct
  source 1..75: mol_type = other DNA
tgccgatattctccgacagaatgcgctttaaaacctggtatcacgctgcgccttcctttatgaacagccatcacc

SEQ ID NO: 137510 - DNA, 75 bp, synthetic construct
  source 1..75: mol_type = other DNA
atgctttctgtgccgaagaaaaactgattgccgaacgtttaggcatcgacacctatacgctgctggaagagatgg

SEQ ID NO: 137511 - DNA, 75 bp, synthetic construct
  source 1..75: mol_type = other DNA
tgtgccgaagaaaaactgattgccgaacgtttaggcatcgacacctataactcaatacagacctctgacaattta

SEQ ID NO: 137512 - DNA, 75 bp, synthetic construct
  source 1..75: mol_type = other DNA
gctgttaatcattaccgtgataatgcaatcgcctacaaagaacagcgcgataacaaggccagtgaactggagaag

SEQ ID NO: 137513 - DNA, 75 bp, synthetic construct
  source 1..75: mol_type = other DNA
caaaagctgacgttagccgaacatggcggagcctatggcgcaacggccgatatgtcggcaaaaatcggtggtgaa

SEQ ID NO: 137514 - DNA, 75 bp, synthetic construct
  source 1..75: mol_type = other DNA
gtggtcgacgccgggcagggcgtagaagcgcaaaccctggcaaactgctacaccgcaatggaaatggatctcgaa

SEQ ID NO: 137515 - DNA, 75 bp, synthetic construct
  source 1..75: mol_type = other DNA
ggcttcaccgtcaccggagagagcgcctgtgcaagcccggaaaactttgatgcagaaattggtcggaagattgcc

SEQ ID NO: 137516 - DNA, 75 bp, synthetic construct
  source 1..75: mol_type = other DNA
atcgctgggcgtctttctcgctggcggcacggtcgctctggctgccgaccccagcgccacgctctgcttcccatt

SEQ ID NO: 137517 - DNA, 75 bp, synthetic construct
  source 1..75: mol_type = other DNA
gaactgcagtacaccttctctccgtccagcttcagtaagctcaccccgtcgcaggatctggatgaagataaaatt

SEQ ID NO: 137518 - DNA, 75 bp, synthetic construct
  source 1..75: mol_type = other DNA
tcgacgatcagtattacctcaccgtgaccacaaagaccggacagagctaccgcgtgaatgatgtccgtctgccag

SEQ ID NO: 137519 - DNA, 75 bp, synthetic construct
  source 1..75: mol_type = other DNA
gttcgataaagcgaaacatgcaaacgtactggagagcgctgcaatggacgtggcatcgctggataaagcccgcca

SEQ ID NO: 137520 - DNA, 75 bp, synthetic construct
  source 1..75: mol_type = other DNA
tcagggcattaaacctggtgaaaccgcgctggtacaactgggtaacgtcgctgaattgtatattacctttttcgc

SEQ ID NO: 137521 - DNA, 75 bp, synthetic construct
  source 1..75: mol_type = other DNA
gacgcggaaaggtcagttgtctgattttaaaattgcccatcgtgtgggtatggggggcttcagtgctctgcgtca

SEQ ID NO: 137522 - DNA, 75 bp, synthetic construct
  source 1..75: mol_type = other DNA
accggcccatatttatgccggaaacggcaattttgtgggggacgggatccgccaggcgatgctggcccgtgccgg

SEQ ID NO: 137523 - DNA, 75 bp, synthetic construct
  source 1..75: mol_type = other DNA
gcctgtggttgcaggcgctgaccgaaggcgaaagccgggcgcagcttgcctcgctgaaactgttacaggtcggtg

SEQ ID NO: 137524 - DNA, 75 bp, synthetic construct
  source 1..75: mol_type = other DNA
tgccagttgcagcaggtgtttggcatggcggaagggctggtgaactacacccgtcttgatgatagcgcggagaaa

SEQ ID NO: 137525 - DNA, 75 bp, synthetic construct
  source 1..75: mol_type = other DNA
tatcgggaactgaatcaggcggcggataatctcgcctgtagcctgcgccgtcagggaattaaatcgggcgaaacc

SEQ ID NO: 137526 - DNA, 75 bp, synthetic construct
  source 1..75: mol_type = other DNA
tctttgctgaccttgcgcaccacgtcgcaaacacattgaaagaaatggttggaatggaagatgatatcgctgaac

SEQ ID NO: 137527 - DNA, 75 bp, synthetic construct
  source 1..75: mol_type = other DNA
gtcacctggtgttgtctaccctacacaccaattccaccactgaaacgctggtacgtttacagcaaatgggggtcg

SEQ ID NO: 137528 - DNA, 75 bp, synthetic construct
  source 1..75: mol_type = other DNA
tgctggcgatagccaataagttgctgatgcgccgaccgacctggcttatagtgcggcagaaattgctgttacgca

SEQ ID NO: 137529 - DNA, 75 bp, synthetic construct
  source 1..75: mol_type = other DNA
cctgttgtaatttgtaatgaagctcaccgttttatagtcgctgagcagttacatcagataaattgtttggcaaag

SEQ ID NO: 137530 - DNA, 75 bp, synthetic construct
  source 1..75: mol_type = other DNA
gaatcaacattcataccttcaggtacgattcatgccttagaaaatccaggagaaataatgctggagcttattgag

SEQ ID NO: 137531 - DNA, 75 bp, synthetic construct
  source 1..75: mol_type = other DNA
aatagctttggctgcattcacagctttacagagctcttctcttaaggaagatcctatattgttagtattagcggc

SEQ ID NO: 137532 - DNA, 75 bp, synthetic construct
  source 1..75: mol_type = other DNA
gttacggcgtttccgctgaacgtgtacgccagctggaaaagaacgcgatgaaaaaacttcgcgccgccattgaag

SEQ ID NO: 137533 - DNA, 75 bp, synthetic construct
  source 1..75: mol_type = other DNA
ctttagcccctgttggcaacctggattcttacatccgggcggctaatgcgtggccgatgttgtcggctgacgagg

SEQ ID NO: 137534 - DNA, 75 bp, synthetic construct
  source 1..75: mol_type = other DNA
ttacggtccggcagcacccgtgcctggtgggaagtgccgctgccgacggtgtacgccttcagcttttatattttt

SEQ ID NO: 137535 - DNA, 75 bp, synthetic construct
  source 1..75: mol_type = other DNA
cggcagatgggaatgtgcacactttttgaaaacggctgccttgctgtggagcaaggcttaaccacctttgaagaa

SEQ ID NO: 137536 - DNA, 75 bp, synthetic construct
  source 1..75: mol_type = other DNA
attgccataaaagccgcacaaaccggtcacctggtgttgtccacgctacacaccaattccacctgcgaaacgctg

SEQ ID NO: 137537 - DNA, 75 bp, synthetic construct
  source 1..75: mol_type = other DNA
ggtgtttccgctgagcgtgtacgccagctggaaaagaacgcgatgaaaaaactgcgcgctgctatagaagcgtaa

SEQ ID NO: 137538 - DNA, 75 bp, synthetic construct
  source 1..75: mol_type = other DNA
tatgccaaacatattaaagagatgggcagcgcagtacccgaagagccagtgctgtttattaaaccagaaacggca

SEQ ID NO: 137539 - DNA, 75 bp, synthetic construct
  source 1..75: mol_type = other DNA
acagacagcaatgcaagcagccacgccttcagtggtaaaaccaaatccgtggggggagggttgtacgcttcagca

SEQ ID NO: 137540 - DNA, 75 bp, synthetic construct
  source 1..75: mol_type = other DNA
cagtaaacgggaccggtgtgaatgcaggcggactcaaggtgggggacggtagtgttattctcagccagcaggctg

SEQ ID NO: 137541 - DNA, 75 bp, synthetic construct
  source 1..75: mol_type = other DNA
agatagtctgattacccgcatcaacctgattctgaaagatgagaaggacacgactgcgcgactgcgtctgattgt

SEQ ID NO: 137542 - DNA, 75 bp, synthetic construct
  source 1..75: mol_type = other DNA
cgcagctgcgtcaggtattgcgtgaaaagagaatgcgtgagggtgaaggttacaccaccgatgaaaccctgctgg

SEQ ID NO: 137543 - DNA, 75 bp, synthetic construct
  source 1..75: mol_type = other DNA
gtgggaaaaggccaaagcgtttgataactcttgtccgctttccgggtttattcccgcggcggaatttaccggcga

SEQ ID NO: 137544 - DNA, 75 bp, synthetic construct
  source 1..75: mol_type = other DNA
tccggttatccatgccgagacgacaacctctgccagccagagcgactgggaaactcgtcagtttacgctgggaaa

SEQ ID NO: 137545 - DNA, 75 bp, synthetic construct
  source 1..75: mol_type = other DNA
taggtatacattaaatggcaatgaaactcaatttgaaaaagttaataataactataaagatctaagttttagtgg

SEQ ID NO: 137546 - DNA, 75 bp, synthetic construct
  source 1..75: mol_type = other DNA
atgggcggcgggattatcacagataaaggaacccacgttctgtggcaggtgaacggagtggccggtgataacctg

SEQ ID NO: 137547 - DNA, 75 bp, synthetic construct
  source 1..75: mol_type = other DNA
ggaacgacaacttcagccagccagagcgactgggaaacccgtcagttcacgctgggcaagctgaaactcgatgca

SEQ ID NO: 137548 - DNA, 75 bp, synthetic construct
  source 1..75: mol_type = other DNA
caccggggctgtggacgtaaaagaaaatgcctccctgaccctgacggggacaccctctgcacagaaacaggagta

SEQ ID NO: 137549 - DNA, 75 bp, synthetic construct
  source 1..75: mol_type = other DNA
cgttaacctgccagaaggttcgataaccaagaagtccggtacgctgatattccagggccatccggttattcatgc

SEQ ID NO: 137550 - DNA, 75 bp, synthetic construct
  source 1..75: mol_type = other DNA
tatcttgaggagcaggagggctttactgttgatggcgtcgcctggaaggtgcgcatagatgcaggtgtcgcggcc

SEQ ID NO: 137551 - DNA, 75 bp, synthetic construct
  source 1..75: mol_type = other DNA
ccatccgtcagagcaatggcgcgaattgaatcgaagcgcacaggagattttttacatatgccggaaaccattaaa

SEQ ID NO: 137552 - DNA, 75 bp, synthetic construct
  source 1..75: mol_type = other DNA
ggcgtggaagatcgcggcgtgatgacagcgtttatgcaagcacaggggtttacggcacagcagggcggctgggag

SEQ ID NO: 137553 - DNA, 75 bp, synthetic construct
  source 1..75: mol_type = other DNA
cgaaccctgaatatccgtccggcctacatgctggtgcccgtcgccctggaaactctggcaaatcagaccatcaag

SEQ ID NO: 137554 - DNA, 75 bp, synthetic construct
  source 1..75: mol_type = other DNA
cgctgacaaagacagcgccaccagccagttctttatcaacgttgccgataacgccttccttgaccatggtcagcg

SEQ ID NO: 137555 - DNA, 75 bp, synthetic construct
  source 1..75: mol_type = other DNA
ccgataagatttcccaggtgccgactcatgacgttggtccataccagaatgtgccgtcaaagccagtagttatcc

SEQ ID NO: 137556 - DNA, 75 bp, synthetic construct
  source 1..75: mol_type = other DNA
gaggcgaccattcgcgcccgcgttatggctgagcagaaagcccgcatgtcaggcattaacgatctgtttgccatg

SEQ ID NO: 137557 - DNA, 75 bp, synthetic construct
  source 1..75: mol_type = other DNA
ctggtaccggtggcactggagacggtggcgaaccagaccatcaaatcggccagtgtgaaaggggcggatgcaaac

SEQ ID NO: 137558 - DNA, 75 bp, synthetic construct
  source 1..75: mol_type = other DNA
gcgtgaatatgcccgtatgtcactgactgaacgtggtattggtgtttccagttataacccgatgcagatggtcgg

SEQ ID NO: 137559 - DNA, 75 bp, synthetic construct
  source 1..75: mol_type = other DNA
attggtgacctggtctacagggtgttaacggataacccgaaactgtcagacggtaaggcgctgttccatgccgat

SEQ ID NO: 137560 - DNA, 75 bp, synthetic construct
  source 1..75: mol_type = other DNA
gatgggcggttttggttctctgcgccaggttcgtgagggggcggagtataaatacatcaccacctcagatcgcaa

SEQ ID NO: 137561 - DNA, 75 bp, synthetic construct
  source 1..75: mol_type = other DNA
gctgttgaggcaatggcatgtattcagtcaaaacgtacagaggaatttaaaaagatgccggaatccatccgaaac

SEQ ID NO: 137562 - DNA, 75 bp, synthetic construct
  source 1..75: mol_type = other DNA
tggcgtttaaaagcctgatgccgctgctcggcatgggcggcgaaaccgaaaaaggcatcgccctgcccattctgc

SEQ ID NO: 137563 - DNA, 75 bp, synthetic construct
  source 1..75: mol_type = other DNA
aaagctatccagttcgctcaggacgtcggcattcgcgtgatccagctggcgggctatgacgtttactatcaggaa

SEQ ID NO: 137564 - DNA, 75 bp, synthetic construct
  source 1..75: mol_type = other DNA
cgaacggtgtgttactaaggttagtagaaaggttgacaatcatgataaatcagtatggatcgtcagtttaggtag

SEQ ID NO: 137565 - DNA, 75 bp, synthetic construct
  source 1..75: mol_type = other DNA
atattcgtaaaccaacttaatggcggccatagttttagcgtaaatggcagagtaccggtaataaatagaaatctg

SEQ ID NO: 137566 - DNA, 75 bp, synthetic construct
  source 1..75: mol_type = other DNA
ggaggtcagggtagcgactctagtgccacgatatacgtattttcgaaaggtatagccaaaaaagaaacttggggc

SEQ ID NO: 137567 - DNA, 75 bp, synthetic construct
  source 1..75: mol_type = other DNA
ccatgacaatggtttatggatatgcggcatatggaaatactgttagctcgatattcgtaaaccaacttaatggcg

SEQ ID NO: 137568 - DNA, 75 bp, synthetic construct
  source 1..75: mol_type = other DNA
agagtgccgctggaaaatgtcgaatatgttgccgatcttggctgtggcccaggtaacagcaccgcccttctaaac

SEQ ID NO: 137569 - DNA, 75 bp, synthetic construct
  source 1..75: mol_type = other DNA
atatcgccgctctgggcagggctgattggtgtctgtacgtttattgccgcgttgttattgacgagtaaacggtaa

SEQ ID NO: 137570 - DNA, 75 bp, synthetic construct
  source 1..75: mol_type = other DNA
aatggcaaagcgatgctggcgcatgcggcatcttcaatgagtaatgtaaaaggaagtgttctgttactctttact

SEQ ID NO: 137571 - DNA, 75 bp, synthetic construct
  source 1..75: mol_type = other DNA
gtattgccttctcgtagtagagaaaatcatttattgcatagttttaccgacgatattaaagctcgaggtggtata

SEQ ID NO: 137572 - DNA, 75 bp, synthetic construct
  source 1..75: mol_type = other DNA
atgataaaaatttataaagccagtaaaggtcagctaaagcatcgtgaaatctttgatgaaataaagaaaaaagta

SEQ ID NO: 137573 - DNA, 75 bp, synthetic construct
  source 1..75: mol_type = other DNA
gccgctgggtattcagacatcatggcttgcgttaaatgacggacaagaaataactctggaagagctgctggcgac

SEQ ID NO: 137574 - DNA, 75 bp, synthetic construct
  source 1..75: mol_type = other DNA
gatgcagctgttggtgacattgatggtcgtgtcactaataacacgcaatcaattggtgaaaacagcaaaactatt

SEQ ID NO: 137575 - DNA, 75 bp, synthetic construct
  source 1..75: mol_type = other DNA
cgtgctgatggtgcaggcaaaacaatttctgttaatgacgggctggttaaattatctggtcgtactgataaaatt

SEQ ID NO: 137576 - DNA, 75 bp, synthetic construct
  source 1..75: mol_type = other DNA
ttctgtcatcttctctgggtgggcttctgcttgggatcagctcaggtgttttagctcaggagttacctcctatca

SEQ ID NO: 137577 - DNA, 75 bp, synthetic construct
  source 1..75: mol_type = other DNA
attaccccaagttccacgatggcggaacaggccgatgcatgggccggaaacggcttgaaaaacgtgtggggagat

SEQ ID NO: 137578 - DNA, 75 bp, synthetic construct
  source 1..75: mol_type = other DNA
aaccgactttcttcaggaagttatttcccaccggcagtgaaagcggtggcaattccgaagaaattgggtggagag

SEQ ID NO: 137579 - DNA, 75 bp, synthetic construct
  source 1..75: mol_type = other DNA
ggctcgttctgatgcgatggaagccatacgttgtgccgggcaaaaagactggcagggcgcaactcagctaatggc

SEQ ID NO: 137580 - DNA, 75 bp, synthetic construct
  source 1..75: mol_type = other DNA
aacgaaatgaactggtgatggccaccacattctcacccggagctaccgcgtggataatacagcgctggcaaacag

SEQ ID NO: 137581 - DNA, 75 bp, synthetic construct
  source 1..75: mol_type = other DNA
tgaaaaaaggagaaaagcgttcgttcttattttctttcgatgcgagattgggggttggctcctattctgtcgctg

SEQ ID NO: 137582 - DNA, 75 bp, synthetic construct
  source 1..75: mol_type = other DNA
ctcctggccggagcggctggtgctggcaaaaagctgtggttttgattttgtcgaaatgtcggtggatgaaaccga

SEQ ID NO: 137583 - DNA, 75 bp, synthetic construct
  source 1..75: mol_type = other DNA
ggtagcaaattcaaagtttattacagtaagtcatctcaccggggagttgtgcgatatgtgcaaaatggacaagat

SEQ ID NO: 137584 - DNA, 75 bp, synthetic construct
  source 1..75: mol_type = other DNA
ggcgacggggcctgaactggacccaggaacgcgccgcggctgagctcggtatcagccgtaccagcctggtaaaat

SEQ ID NO: 137585 - DNA, 75 bp, synthetic construct
  source 1..75: mol_type = other DNA
ccaaaatcaacgggcggattttcccgcttaacggcaagcgtaactatctcccgctctctccctatggaagatatg

SEQ ID NO: 137586 - DNA, 75 bp, synthetic construct
  source 1..75: mol_type = other DNA
gacgtcctggcgcatctgccggaatggccagaggagcgactggcagagttgctgccccttgagggatttaccttc

SEQ ID NO: 137587 - DNA, 75 bp, synthetic construct
  source 1..75: mol_type = other DNA
aagttcctagctcatttggtgacgtaggtggttctgctttctccgaaataacaggaaaaggaatcgaaaaaattt

SEQ ID NO: 137588 - DNA, 75 bp, synthetic construct
  source 1..75: mol_type = other DNA
ttgatcggcgcgacgctacgccaggccacggaagagcatgtacgcaaagccattgccggttatggtgtggcgctc

SEQ ID NO: 137589 - DNA, 75 bp, synthetic construct
  source 1..75: mol_type = other DNA
agttaatgaatctgggggcgacgatttacttcaaccatcgcccggaaaacgtgcgcgacgccagcgtggtcgttg

SEQ ID NO: 137590 - DNA, 75 bp, synthetic construct
  source 1..75: mol_type = other DNA
tcccgctggagccagtgaatggtaaaagcggtacggcaatgttggtcgatgactacggccaccacccgacggaag

SEQ ID NO: 137591 - DNA, 75 bp, synthetic construct
  source 1..75: mol_type = other DNA
cggcgcaggtagccgagatgctggcaccggtattaaccggtaacgacctgattctcgttcagggggctggtaata

SEQ ID NO: 137592 - DNA, 75 bp, synthetic construct
  source 1..75: mol_type = other DNA
tgcaatcttaaatgcttgtaaattatcaatggttggggcttgccatgatttggattttatccgtatacgggtgga

SEQ ID NO: 137593 - DNA, 75 bp, synthetic construct
  source 1..75: mol_type = other DNA
ttattgccggaggaaccggaagccgtctatggccgttgtctcgagtattataccctaaacaatttttaaatttag

SEQ ID NO: 137594 - DNA, 75 bp, synthetic construct
  source 1..75: mol_type = other DNA
gctgcgccagctcaacaggctgtccaacaacattattcttgagccggtcgggcgcaacactgccccggccattgc

SEQ ID NO: 137595 - DNA, 75 bp, synthetic construct
  source 1..75: mol_type = other DNA
agccacgcaagcaccttaaaatcaccatcatacactaaatcagtaagttggcagcattaccagcaacttgatgat

SEQ ID NO: 137596 - DNA, 75 bp, synthetic construct
  source 1..75: mol_type = other DNA
atcaaagctgatggtcgccatgagcatcgggtgcatcgcgaagtgtatcgtccgtggggcaaatatgactctatc

SEQ ID NO: 137597 - DNA, 75 bp, synthetic construct
  source 1..75: mol_type = other DNA
ccagatatttactctttctgtaaacttgcaatgcagacacaagatgtggatgaggattttattcgcataaataaa

SEQ ID NO: 137598 - DNA, 75 bp, synthetic construct
  source 1..75: mol_type = other DNA
gacctggctgcctttacgctggctcgtgaccacaaattgccgattcgtgttttcaacatgaataaaccgggtgcg

SEQ ID NO: 137599 - DNA, 75 bp, synthetic construct
  source 1..75: mol_type = other DNA
tttcaacatgaacaaaccgggtgcgctgcgccgtgtggtaatgggtgaaaaagaagggactttaatcacggaata

SEQ ID NO: 137600 - DNA, 75 bp, synthetic construct
  source 1..75: mol_type = other DNA
caaacgccgtagaagggatcggcgcggtgcataaactgcgcccggacgtgctgtttctcgatatccagatgccgc

SEQ ID NO: 137601 - DNA, 75 bp, synthetic construct
  source 1..75: mol_type = other DNA
cactgatggcttcacaacaggctcagcgagcgattgactgggagatgaaccgccgatacggccgttcccgtcagt

SEQ ID NO: 137602 - DNA, 75 bp, synthetic construct
  source 1..75: mol_type = other DNA
acgaatacgctattaaagcctttgaagaacatgcctttgattatctgctgaagccaattgatgaagcgcgactgg

SEQ ID NO: 137603 - DNA, 75 bp, synthetic construct
  source 1..75: mol_type = other DNA
gtggtgaaagacgtcaaaaaaggcatgagccgggcgcaggttgcacaaattgcgggtaaaccttcgtctgaagtg

SEQ ID NO: 137604 - DNA, 75 bp, synthetic construct
  source 1..75: mol_type = other DNA
aaatctgaaacggcttgatgaactggccctgattctggggcgtgagccggatatatccgggagtgccgcagagat

SEQ ID NO: 137605 - DNA, 75 bp, synthetic construct
  source 1..75: mol_type = other DNA
cagtttctctcccttgaatttcagcaaatactggacaaaatggcctacctgacgatatggcagggcgatgacgta

SEQ ID NO: 137606 - DNA, 75 bp, synthetic construct
  source 1..75: mol_type = other DNA
gtgatgctgtttcagccgcaccgtttcacccgcactcgtgatctgtatgacgattttgccaatgtcctgacccag

SEQ ID NO: 137607 - DNA, 75 bp, synthetic construct
  source 1..75: mol_type = other DNA
acgaatacgccattaaagcctttgaagaacatgcttttgattatctgctgaagccgattgatgaagcgcggctgg

SEQ ID NO: 137608 - DNA, 75 bp, synthetic construct
  source 1..75: mol_type = other DNA
gaactgactttgcgcaccctggagagtcgtacaccgctactgcgttgtcatcgtcagtatctggttaacctcgcg

SEQ ID NO: 137609 - DNA, 75 bp, synthetic construct
  source 1..75: mol_type = other DNA
tgttgttacaggtatgactgtcagagttgatccagtgaatgttgcggaacttgtcctggaggggcttgttacaga

SEQ ID NO: 137610 - DNA, 75 bp, synthetic construct
  source 1..75: mol_type = other DNA
gtgatgtgttcacttaacaagcccagcgcggcgcaaaaccgctggaaaaaccacttgcgcactaaaggagagtga

SEQ ID NO: 137611 - DNA, 75 bp, synthetic construct
  source 1..75: mol_type = other DNA
atatcggttttgatcgcggaggacatggcagtgtgggcagttattctctgggcggctatgccagttgggaacatg

SEQ ID NO: 137612 - DNA, 75 bp, synthetic construct
  source 1..75: mol_type = other DNA
tcccgcgaacggagcgaccagcaccggcagcctgggcgatgcttccagccccggacttactgactccgctgaacg

SEQ ID NO: 137613 - DNA, 75 bp, synthetic construct
  source 1..75: mol_type = other DNA
atcaaagatatgcagacccggcagcgagatgtcgctgcactggatgctaaatacacgaaggaattagctgatgcg

SEQ ID NO: 137614 - DNA, 75 bp, synthetic construct
  source 1..75: mol_type = other DNA
taccgcgataacgccatcacttacaaagcgcagcgcgataaaaaagccagagagctggagcaggcaaatgcaacc

SEQ ID NO: 137615 - DNA, 75 bp, synthetic construct
  source 1..75: mol_type = other DNA
tgcgctgtggctggcaacagaccattaccgcgataacgccatcacctacaaagcgcagcgcgataaaaaagccag

SEQ ID NO: 137616 - DNA, 75 bp, synthetic construct
  source 1..75: mol_type = other DNA
ttctatacaacgcataacatggatatttttgagttggatctgcctgttcactcgttcatttttattaaaaaaacg

SEQ ID NO: 137617 - DNA, 75 bp, synthetic construct
  source 1..75: mol_type = other DNA
taaatccgttacttatgaaggggctaacatgcggaatgcaaatctattaaattcaattaacattagcgttaaaga

SEQ ID NO: 137618 - DNA, 75 bp, synthetic construct
  source 1..75: mol_type = other DNA
tacagacagcgctaacagtactgccgactggattaaagagcactggggattcgatccccgcagcgtgggccggac

SEQ ID NO: 137619 - DNA, 75 bp, synthetic construct
  source 1..75: mol_type = other DNA
ataaaagacatgcaggcccgccagcgtgatgtcgctgcactggatgccaaatacaccggagaactagctgatgcg

SEQ ID NO: 137620 - DNA, 75 bp, synthetic construct
  source 1..75: mol_type = other DNA
gttgcagctcaacgccagatgcacagcgaacggagagaccggcaccggcggcatgggcgatgcttccggcccccg

SEQ ID NO: 137621 - DNA, 75 bp, synthetic construct
  source 1..75: mol_type = other DNA
gcttgggcgatgttaccagcccccgacttaatgactccgctgaacgggattatttcacccttagagagcgaatcg

SEQ ID NO: 137622 - DNA, 75 bp, synthetic construct
  source 1..75: mol_type = other DNA
atcgctgacatgcggaagcgtcaacgtgatgtagcagaactcgacgccagatacacaaaggagcttgctgatgct

SEQ ID NO: 137623 - DNA, 75 bp, synthetic construct
  source 1..75: mol_type = other DNA
gatgcgagagctgaaaatgaaactcttcgcgctgacgttgccgctggtcgtaagcgcctgcggatcaacgccacc

SEQ ID NO: 137624 - DNA, 75 bp, synthetic construct
  source 1..75: mol_type = other DNA
cattaccacaataaagccattgaatacaaaaaacagcgcgacgaaaacgctatggcattagattcggctatggcg

SEQ ID NO: 137625 - DNA, 75 bp, synthetic construct
  source 1..75: mol_type = other DNA
ataagcgacatgcagacgcgccagcgcgacgttgccgctctcgacgctaaatacacgaaggagctttctgatgct

SEQ ID NO: 137626 - DNA, 75 bp, synthetic construct
  source 1..75: mol_type = other DNA
taccgtgataacgcaatcgcctacaaagagcagcgcgataacaaggccagtgaactggagaaggcgaacgccacc

SEQ ID NO: 137627 - DNA, 75 bp, synthetic construct
  source 1..75: mol_type = other DNA
atacacgaaggagctagctgatgcgaaagctgaaaatgatgctcttcggcgcaagcttgataatggtggcagggt

SEQ ID NO: 137628 - DNA, 75 bp, synthetic construct
  source 1..75: mol_type = other DNA
atataccaggcaggtattaaagcctcattcagcagtacgttaagcgggcatcttggggtggggtatagccatagt

SEQ ID NO: 137629 - DNA, 75 bp, synthetic construct
  source 1..75: mol_type = other DNA
aggtgcgccagcgcgatgttgctgcgctcgatgcaaaatactcgagggaattagccgatgcgagagctgaaaatg

SEQ ID NO: 137630 - DNA, 75 bp, synthetic construct
  source 1..75: mol_type = other DNA
tgatgccgccgtcgaactctctccggttgctggacgaaacgttctcggtatcagagacggaatcatcagcgacca

SEQ ID NO: 137631 - DNA, 75 bp, synthetic construct
  source 1..75: mol_type = other DNA
ggaggcaaatagaggcgactttgacgacccaatgctgctcttccagactttttctaagcgtttatataccggaac

SEQ ID NO: 137632 - DNA, 75 bp, synthetic construct
  source 1..75: mol_type = other DNA
tcgggatggattaacggcgaccggaccacttttatcagccagtatcaggtgaaacatcgcccggacgggttactg

SEQ ID NO: 137633 - DNA, 75 bp, synthetic construct
  source 1..75: mol_type = other DNA
gccagacgcgcaacagcgagaaaataagacaactgctgaacttcctgaaagaagaaacctacagtgattttaaaa

SEQ ID NO: 137634 - DNA, 75 bp, synthetic construct
  source 1..75: mol_type = other DNA
cgctgcaatatccgctggcccctgctgacattccactattagaggcgtttatggctttacgcgccgccagaccag

SEQ ID NO: 137635 - DNA, 75 bp, synthetic construct
  source 1..75: mol_type = other DNA
cgcgagttacgcgaagagctgggtatcaacgcgaccattggtgaatatattgccagccatcagcgggaagtttcg

SEQ ID NO: 137636 - DNA, 75 bp, synthetic construct
  source 1..75: mol_type = other DNA
tgttgccagccatcagcgagaagtttcggggcggattatccatcttcatgcctggcacgtacccgacttccacgg

SEQ ID NO: 137637 - DNA, 75 bp, synthetic construct
  source 1..75: mol_type = other DNA
aaccgggctgggccatccgaaacagatcctcgatctgttaaccgcaccagtttatgaaccgtggatcgacttgcg

SEQ ID NO: 137638 - DNA, 75 bp, synthetic construct
  source 1..75: mol_type = other DNA
aaaaatcctgatgcgccaataaactctatagccggtaagttttttgatccggcaaccggagagatggggccagaa

SEQ ID NO: 137639 - DNA, 75 bp, synthetic construct
  source 1..75: mol_type = other DNA
agaatatttcgcccgcaaaaacggtacatactcaggttcacaacaaaatactggtgcatctgacacgaccgcaca

SEQ ID NO: 137640 - DNA, 75 bp, synthetic construct
  source 1..75: mol_type = other DNA
acgcacagctggcggcgttactggggatcacggtcatgggcgaaattgagccgttggtgccgtggggagagctga

SEQ ID NO: 137641 - DNA, 75 bp, synthetic construct
  source 1..75: mol_type = other DNA
agctgcattaagcctaccagagcatcagcgctggcgtcgtagcctgaacagcgggcaagggcatcaggcttgcgg

SEQ ID NO: 137642 - DNA, 75 bp, synthetic construct
  source 1..75: mol_type = other DNA
gccaataaatccgaccgtgcgacgcccgaaagtgagcaagcgctacagcgctggtggcagcaaaatggtggcgat

SEQ ID NO: 137643 - DNA, 75 bp, synthetic construct
  source 1..75: mol_type = other DNA
ggcggcggcactcttgctgatcgtaacaataaccccgggaacattcgcccggtgagcggtaaagggttccggttt

SEQ ID NO: 137644 - DNA, 75 bp, synthetic construct
  source 1..75: mol_type = other DNA
tccgggaaaccttaattttgctggtcaggcaggggcttctcttgaacgcccgggcgggcgatttgccagatttga

SEQ ID NO: 137645 - DNA, 75 bp, synthetic construct
  source 1..75: mol_type = other DNA
atgataagggacaggaaagctgaagaactggggtcaaaagggctataccggagagctgccgcacgatggatggaa

SEQ ID NO: 137646 - DNA, 75 bp, synthetic construct
  source 1..75: mol_type = other DNA
tttatgacctccctgcgtgagtttagcgcgatggcaggcatggcccgtgacaaaatcggctctaatcttgcgggt

SEQ ID NO: 137647 - DNA, 75 bp, synthetic construct
  source 1..75: mol_type = other DNA
tgggcattgacgaaaatacccttatggcgatgcgtcggggtgtgggtggtttctccgggcagtacagcgcaatgg

SEQ ID NO: 137648 - DNA, 75 bp, synthetic construct
  source 1..75: mol_type = other DNA
tgggtgagatagtcgggcgggtagcatttcggatagtcgatggtgtcggagatatcatcgagtggtgggggaaac

SEQ ID NO: 137649 - DNA, 75 bp, synthetic construct
  source 1..75: mol_type = other DNA
atagcgcaaccgaacggtaacgccttccggttaaatggcggcaagaagcaacgacaggccaccatcgggggcgac

SEQ ID NO: 137650 - DNA, 75 bp, synthetic construct
  source 1..75: mol_type = other DNA
ccattatcgaacgggatagcaaaattttactcgcacagcgccccgctcatagcgatcaggcggggttatgggagt

SEQ ID NO: 137651 - DNA, 75 bp, synthetic construct
  source 1..75: mol_type = other DNA
gttacgggcgcacgaacatcaggcactgatctggtgtctgccagaagaggcattgcaacatccactagcccctgc

SEQ ID NO: 137652 - DNA, 75 bp, synthetic construct
  source 1..75: mol_type = other DNA
tgatgttgcctgttttacttgatagtttgcgcggtgactggcaagccaacgaactggctcgtcctctggcacggc

SEQ ID NO: 137653 - DNA, 75 bp, synthetic construct
  source 1..75: mol_type = other DNA
tactcccgcacttactgaatgggcgcaacggctggggatcgatctcaatcaaccgcgagtggtggctattgttga

SEQ ID NO: 137654 - DNA, 75 bp, synthetic construct
  source 1..75: mol_type = other DNA
acctgttggcgcaggatagccgtttgcgggaagaactggtgatgaacctcattcaggctgaggagaatactcccg

SEQ ID NO: 137655 - DNA, 75 bp, synthetic construct
  source 1..75: mol_type = other DNA
tcaacgcgccgcgcggcgatatctctgagttcgctccgcgtatccataccatcaagatcaacccggacaagatca

SEQ ID NO: 137656 - DNA, 75 bp, synthetic construct
  source 1..75: mol_type = other DNA
ccgctgttcccggaaggcttcgtcaacgaagttcaggttatcgccaccgtggtttctgttaacccgcaggttaac

SEQ ID NO: 137657 - DNA, 75 bp, synthetic construct
  source 1..75: mol_type = other DNA
gtatccgtctgagcattaaagaagcgactgagcagtctcaacctgctgcagcaccggaagctccggctgctgaac

SEQ ID NO: 137658 - DNA, 75 bp, synthetic construct
  source 1..75: mol_type = other DNA
gtggataatgcagcctccccccgactggcagacaccgctgaacgggattatttcaccctccgggaacgactggta

SEQ ID NO: 137659 - DNA, 75 bp, synthetic construct
  source 1..75: mol_type = other DNA
ctggcagacaccgctgaacgggattatttcatcctcagagaacggttgatgacaatgcagaagcaggtggaaggg

SEQ ID NO: 137660 - DNA, 75 bp, synthetic construct
  source 1..75: mol_type = other DNA
tgttatcggtaaaggcggctctgttatccgtgccctgaccgaagaaactggcaccaccatcgaaatcgaagatga

SEQ ID NO: 137661 - DNA, 75 bp, synthetic construct
  source 1..75: mol_type = other DNA
caggcagtgatgcttggactggcagcgaccatttcgcacaccgcggtggtttggctgatagcctttggcggaatg

SEQ ID NO: 137662 - DNA, 75 bp, synthetic construct
  source 1..75: mol_type = other DNA
agcaagtggcaaaacgctggagcggatttaacacactagcccaaaaagccccctatttttccagcttgttaattg

SEQ ID NO: 137663 - DNA, 75 bp, synthetic construct
  source 1..75: mol_type = other DNA
ccttgcgttaacgctggtcaccgtgggcgttggcgcggcaatcagtgtccagcaagtggcaaaacgctggagcgg

SEQ ID NO: 137664 - DNA, 75 bp, synthetic construct
  source 1..75: mol_type = other DNA
ttcgtcgtatcgaagagatcactgcagaaatcgaagtgggccgcgtctacactggtaaagtgacccgtatcgttg

SEQ ID NO: 137665 - DNA, 75 bp, synthetic construct
  source 1..75: mol_type = other DNA
actaactggcaaatactgttgtttggcttaacgggcgggctgattccctgccctgcggcgattaccgttctgctg

SEQ ID NO: 137666 - DNA, 75 bp, synthetic construct
  source 1..75: mol_type = other DNA
tgcaaaacgctggagcggatttaacactctcgctaaacgcgccccctatttttccagtctgttaattggtttagt

SEQ ID NO: 137667 - DNA, 75 bp, synthetic construct
  source 1..75: mol_type = other DNA
aagaccagctcgataaagcgaaggaaaaactcagcaaggcgaacgccaccattactgacatgcagcagcgtcagc

SEQ ID NO: 137668 - DNA, 75 bp, synthetic construct
  source 1..75: mol_type = other DNA
aaccggcccccaactggcagacaccgttacacgggattatttcaccctcagagagcggctgatgacgatgcacaa

SEQ ID NO: 137669 - DNA, 75 bp, synthetic construct
  source 1..75: mol_type = other DNA
atgctgggggttgcttcaacggcgggccagttactgggatcagtattgattgacgtattaattccatcgctgggc

SEQ ID NO: 137670 - DNA, 75 bp, synthetic construct
  source 1..75: mol_type = other DNA
tacacgggattatttcaccctcagagagcggctgatgacgatgcagaagcaactggaaggggcacaggactatat

SEQ ID NO: 137671 - DNA, 75 bp, synthetic construct
  source 1..75: mol_type = other DNA
gccaaatacacgaaggacttagctgatgctaaaaagcagcttgatgatttgcagcgttgtgttcgcactggcaag

SEQ ID NO: 137672 - DNA, 75 bp, synthetic construct
  source 1..75: mol_type = other DNA
taccgcgataacgccatcacctacaaagcgcagcgcgataaaaaagccagtgagctggagctggcaaacgcaacc

SEQ ID NO: 137673 - DNA, 75 bp, synthetic construct
  source 1..75: mol_type = other DNA
tgaactggagaaggcgaacgccaccatcgctgacatgcggaagcgtcaacgtgatgtagcagaactcgacgcaag

SEQ ID NO: 137674 - DNA, 75 bp, synthetic construct
  source 1..75: mol_type = other DNA
ctgcctgtcatgggctgttaatcattaccgtgataacgccatcgcctacaaagaacagcgcgataaggccgcatc

SEQ ID NO: 137675 - DNA, 75 bp, synthetic construct
  source 1..75: mol_type = other DNA
tagccgatgcgagagctgaaaatgaaactctgcgtgctgatgttgccgctggtcgtaagcgcctgcggatcaacg

SEQ ID NO: 137676 - DNA, 75 bp, synthetic construct
  source 1..75: mol_type = other DNA
cagctggaaggggcgcaggactatatccgcactcagtgcactaagctggctttttattatccggaggatacatga

SEQ ID NO: 137677 - DNA, 75 bp, synthetic construct
  source 1..75: mol_type = other DNA
ctggaacaggcaggtgatgcctatgcgctgatggcgagcggcaaatgcgggaaagttgtgattaacttcccggat

SEQ ID NO: 137678 - DNA, 75 bp, synthetic construct
  source 1..75: mol_type = other DNA
ggcgcggatgttgcgctcgattgttccggtaatgccgcaggtcgcttgctggcactgcaatccaccgctgactgg

SEQ ID NO: 137679 - DNA, 75 bp, synthetic construct
  source 1..75: mol_type = other DNA
gtggctgcgcgtcaaagcagtctgtcccgacatgcataaaatcaccgccgcctccggcgtggatgatggctccag

SEQ ID NO: 137680 - DNA, 75 bp, synthetic construct
  source 1..75: mol_type = other DNA
cgccagcgtgatgttgctgcacttgatgccagatactcgagggaattagccgatgcgagagctgaaaatgaaact

SEQ ID NO: 137681 - DNA, 75 bp, synthetic construct
  source 1..75: mol_type = other DNA
tgtggtgattattgtcctgctggtagcctgtggtgtgcttagtctggggctgaatcattaccgtgataacgccat

SEQ ID NO: 137682 - DNA, 75 bp, synthetic construct
  source 1..75: mol_type = other DNA
ttattaccgtctccgatgtggaatcgacaagataaccgcgcaggttaactacgtgcaggagtacatcaggacgca

SEQ ID NO: 137683 - DNA, 75 bp, synthetic construct
  source 1..75: mol_type = other DNA
cgaagtggaatcgacaagataaccgcgcaggttaactacctgcaggaatacatcaggacgcaatgcctgaaataa

SEQ ID NO: 137684 - DNA, 75 bp, synthetic construct
  source 1..75: mol_type = other DNA
agcaaaagactggcaggaagctatcgatttttcaatgacatcattgttagcaataaattatgtcaacgagagcta

SEQ ID NO: 137685 - DNA, 75 bp, synthetic construct
  source 1..75: mol_type = other DNA
gcgccgatctgatgcaccatcaacggcggattattggctcctgggtgaccagtctgttccatatggaaaaatgcg

SEQ ID NO: 137686 - DNA, 75 bp, synthetic construct
  source 1..75: mol_type = other DNA
ttattaccgtctccgaggtggaatcgacaagataaccgcgcaggttaactacgtgcaggattacatcaggacgca

SEQ ID NO: 137687 - DNA, 75 bp, synthetic construct
  source 1..75: mol_type = other DNA
ttattaccgtctccgaggtggaatcgacaagataaccgcgcaggttaactacttgcaggagtacatcaggacgca

SEQ ID NO: 137688 - DNA, 75 bp, synthetic construct
  source 1..75: mol_type = other DNA
tggtacgccacgtatcgccaaccgcctgttgcgtcgcgtgcgcgattttgccgaagtgaaacacgatggcaccat

SEQ ID NO: 137689 - DNA, 75 bp, synthetic construct
  source 1..75: mol_type = other DNA
ctggaaccttatttaattcagcagggctttttgcaacgtacgccgcgtgggcgtatggcaacagcgcgagcgtgg

SEQ ID NO: 137690 - DNA, 75 bp, synthetic construct
  source 1..75: mol_type = other DNA
tgtccaggctccgtgcgtgaagcccccaccacctccggcgtggataatgcaaccggcccccgactggcagacacc

SEQ ID NO: 137691 - DNA, 75 bp, synthetic construct
  source 1..75: mol_type = other DNA
agcaaggaaacgcctggttcttcatccccagcgccatcttactcggtgcacttcatggtctggagcctgggcact

SEQ ID NO: 137692 - DNA, 75 bp, synthetic construct
  source 1..75: mol_type = other DNA
ctgcctgtcgtgggctgttaatcattaccgtgataacgccatcgcctacaaagagcagcgcgataaagccacatc

SEQ ID NO: 137693 - DNA, 75 bp, synthetic construct
  source 1..75: mol_type = other DNA
tgatgttgccgctggtcgtaagcgcctgcggatcaacgccacctgctccggtaccgtgcgtgaagccaccggcac

SEQ ID NO: 137694 - DNA, 75 bp, synthetic construct
  source 1..75: mol_type = other DNA
gcggctgatgacgatgcagaagcaactggaaggggcacaggactatatccgcactcagtgtactaagcaggcttt

SEQ ID NO: 137695 - DNA, 75 bp, synthetic construct
  source 1..75: mol_type = other DNA
ccacaaaggttaactctggtgggcaatatacccttgggcggtcaaaagatgagtttcaggctctggcccgggctg

SEQ ID NO: 137696 - DNA, 75 bp, synthetic construct
  source 1..75: mol_type = other DNA
acccaaatccgaagccagatccaaaaccagacccaaaaccggatccgaaaccagacccgactcccgatccaacgc

SEQ ID NO: 137697 - DNA, 75 bp, synthetic construct
  source 1..75: mol_type = other DNA
tgcgcttagtctggggctgaatcattaccgtgataacgccatcacctacaaagcgcagcgcgataaaaaagccag

SEQ ID NO: 137698 - DNA, 75 bp, synthetic construct
  source 1..75: mol_type = other DNA
aattactgatatgcagatacgccagcgtgatgtcgctgcacttgatgccagatactcgagggaattagccgatgc

SEQ ID NO: 137699 - DNA, 75 bp, synthetic construct
  source 1..75: mol_type = other DNA
cctgcgtatcaacgccacctgtccaggttccgtgcgtgaagccaccggcaccgcccgcgtggataatgcaaccgg

SEQ ID NO: 137700 - DNA, 75 bp, synthetic construct
  source 1..75: mol_type = other DNA
actggtattggtagacgagccggtgcaagccttacaacaggacagcgcaatgttctacttggacatgaggctgga

SEQ ID NO: 137701 - DNA, 75 bp, synthetic construct
  source 1..75: mol_type = other DNA
gtagctttaggctaccgtgccagagttggtggagatcatgagattcagttaggaaattcttctcagacagtttat

SEQ ID NO: 137702 - DNA, 75 bp, synthetic construct
  source 1..75: mol_type = other DNA
tgtggtatatatcaagatcatctagtaaacaatggatgcgatgtaaaaacaattgcctacgaacaggttataccg

SEQ ID NO: 137703 - DNA, 75 bp, synthetic construct
  source 1..75: mol_type = other DNA
gaaaatgcgtcggcctcaccttgtacctttatcatctcaagtgattaccctatttaatcaattaaaacccatctc

SEQ ID NO: 137704 - DNA, 75 bp, synthetic construct
  source 1..75: mol_type = other DNA
gaagccatatgtagagaatggcacactaacaaagcggatcgctggacagtggcctaccgcgaagaaatcattaaa

SEQ ID NO: 137705 - DNA, 75 bp, synthetic construct
  source 1..75: mol_type = other DNA
gcaatccgatttttgaaactagaattcatcaacatgaaaaagatggcagtagaaaaaggaaaagagaacatgccg

SEQ ID NO: 137706 - DNA, 75 bp, synthetic construct
  source 1..75: mol_type = other DNA
ctggcgggacaattttcttacaccggtgaactatggctcaatgagcaacgcctcgacaccctacccaccgcccgg

SEQ ID NO: 137707 - DNA, 75 bp, synthetic construct
  source 1..75: mol_type = other DNA
gtgagctatggctcaatgagcaacggattgacatgctacccaccgcacagcgtcagattggcattcttttccagg

SEQ ID NO: 137708 - DNA, 75 bp, synthetic construct
  source 1..75: mol_type = other DNA
aaaatgttccatcaacttttcaggttggttatatcaatgattttggtggcttaagtttttatgaaataaactgcc

SEQ ID NO: 137709 - DNA, 75 bp, synthetic construct
  source 1..75: mol_type = other DNA
acgtttcttatgcaggtgccttttcatctgccaggtggtgtcgtttataaacttgatttcatggtgttttatgac

SEQ ID NO: 137710 - DNA, 75 bp, synthetic construct
  source 1..75: mol_type = other DNA
catcgggaaaagttaaccccggagcatctgacggcgttaaccgactgctgcccgacacaggcgttaaccgtgtgt

SEQ ID NO: 137711 - DNA, 75 bp, synthetic construct
  source 1..75: mol_type = other DNA
cacgttcatcacgccttttttgttgctcccgggcacttttcagttcatccacaatatagctgctcttctcgcatt

SEQ ID NO: 137712 - DNA, 75 bp, synthetic construct
  source 1..75: mol_type = other DNA
catgggtgcaggtgttgcagttgaccaggctggcctgaagcgcttctgtaaactaatgcctttacgtgggcggtg

SEQ ID NO: 137713 - DNA, 75 bp, synthetic construct
  source 1..75: mol_type = other DNA
gaagcggttaaaaacgctaaagctggccaggttcgttatcgtaacgacaaaaacggcatcatccataccaccatc

SEQ ID NO: 137714 - DNA, 75 bp, synthetic construct
  source 1..75: mol_type = other DNA
cccgcgcgctggcagaagcaggttgcagcgcggttaaagtcggtatcggccctggctccatttgtacgactcgta

SEQ ID NO: 137715 - DNA, 75 bp, synthetic construct
  source 1..75: mol_type = other DNA
attaaccgtctgatgtggatctggcgcggcattgacccccgtgaaatcctcgatgtccaggcgcgtattgtgatg

SEQ ID NO: 137716 - DNA, 75 bp, synthetic construct
  source 1..75: mol_type = other DNA
attttaaagagggcgaccgcgtgctggtgtatcacatttctggctgtggtttttgcccgaactgccgtcgcggtt

SEQ ID NO: 137717 - DNA, 75 bp, synthetic construct
  source 1..75: mol_type = other DNA
atttatacgatacggtgattggctaccgtggtggcaactggatttatgagtgggccacccaggcgatggtgtggc

SEQ ID NO: 137718 - DNA, 75 bp, synthetic construct
  source 1..75: mol_type = other DNA
atctcgcttggtgtctatccaacgatcacacttgctgaagctcgttctcgccgtgatgaggcccgaaaaatagtg

SEQ ID NO: 137719 - DNA, 75 bp, synthetic construct
  source 1..75: mol_type = other DNA
gagcgctggagaaaatgcgcaaggtccgtcagcgctgtggtgaagtgttccgctatgcaattgtcactggcagag

SEQ ID NO: 137720 - DNA, 75 bp, synthetic construct
  source 1..75: mol_type = other DNA
gagcactggaaaaaatgcgcaaagtccgccagcgctgtggcgaggtgttccgctatgcaattgtcacaggtaggg

SEQ ID NO: 137721 - DNA, 75 bp, synthetic construct
  source 1..75: mol_type = other DNA
ggtaggaacgatcctcgcaagccaattagtaaggaaagcattaaccaagtcattgaattactgggatataaggga

SEQ ID NO: 137722 - DNA, 75 bp, synthetic construct
  source 1..75: mol_type = other DNA
gaaatgcaattagcacatgttgataagaacaatatccgaggaacctataatcatgcacaatatttttctcaaagg

SEQ ID NO: 137723 - DNA, 75 bp, synthetic construct
  source 1..75: mol_type = other DNA
tatttaaacaactcaaacctattacaggacattacccatacatttttattggaaggaacaatcgtagcaagccga

SEQ ID NO: 137724 - DNA, 75 bp, synthetic construct
  source 1..75: mol_type = other DNA
ctgatatcaatgagtttgctaaatggattgatgaaaatcttgaggtagaactctcaataaatattgaggcaaaaa

SEQ ID NO: 137725 - DNA, 75 bp, synthetic construct
  source 1..75: mol_type = other DNA
atggcatctaatcaaacgaccctgccgaacgtcagtgaaaacgaagaagcactgctgactggcgtcaatgaaaac

SEQ ID NO: 137726 - DNA, 75 bp, synthetic construct
  source 1..75: mol_type = other DNA
ttgggcgttgcgtttttgtgcctaccccccctgccgatttgtggcgggataggtgcaagcctcgcgctacaaggc

SEQ ID NO: 137727 - DNA, 75 bp, synthetic construct
  source 1..75: mol_type = other DNA
gagcgtcagccgttacccttcactggatcaagcctggcaaattgttgaggccgggaatttgagcgaaactcgtat

SEQ ID NO: 137728 - DNA, 75 bp, synthetic construct
  source 1..75: mol_type = other DNA
ggaagggcgaccgctcaaaacactggtgctcagcacggcaacccattttaatgatgagcaacaaaccctggtatt

SEQ ID NO: 137729 - DNA, 75 bp, synthetic construct
  source 1..75: mol_type = other DNA
aagtacgtctgctgaaaaataccgctgcgggcgtcattttttcggtgaagtcaggtaaaggatttctgcgtcaat

SEQ ID NO: 137730 - DNA, 75 bp, synthetic construct
  source 1..75: mol_type = other DNA
caaaacggaggagttctgtccgaacgccaaaatcatccatgtggatattgaccgcgcagagctgggtaaagtgaa

SEQ ID NO: 137731 - DNA, 75 bp, synthetic construct
  source 1..75: mol_type = other DNA
tcagggaatggcgcgcaccgacggtaaaccggcggtctgtatggcctgtagtggaccgggtgcgactaacctggt

SEQ ID NO: 137732 - DNA, 75 bp, synthetic construct
  source 1..75: mol_type = other DNA
tctgatgaataacgaagcgctggggctggtgcatcagcaacagagtctgttctacaagcagggcgtttttgccgc

SEQ ID NO: 137733 - DNA, 75 bp, synthetic construct
  source 1..75: mol_type = other DNA
ctatcgttgggatgacggtaatcggcgcgctggtggcaacctatgttcgtttaagcaccacgctggaaatcacag

SEQ ID NO: 137734 - DNA, 75 bp, synthetic construct
  source 1..75: mol_type = other DNA
tcgcggctggagtccgctgcgcctgattgcaatcactgtggttctcggcatcgtcggtaaattctgtcatttcct

SEQ ID NO: 137735 - DNA, 75 bp, synthetic construct
  source 1..75: mol_type = other DNA
acaaactgatgccagccttcttaccgctggtctataccctgacgatgttctggctggtacgtcgcggctggagtc

SEQ ID NO: 137736 - DNA, 75 bp, synthetic construct
  source 1..75: mol_type = other DNA
tgggtattgctaacggtcagactattgaggcaacttttgatcaggctgtagctgccagcactcagtggagcgctc

SEQ ID NO: 137737 - DNA, 75 bp, synthetic construct
  source 1..75: mol_type = other DNA
gtatcggtcgaatgacattatttttaacaacccgctctgttctgatgtttcaaatggccgaaaacttccagagat

SEQ ID NO: 137738 - DNA, 75 bp, synthetic construct
  source 1..75: mol_type = other DNA
gggtggtggcgggaaagcagaagttgaaatgagacagcgtgtcggtcgtggcttacgagccaagaaaaatcaggc

SEQ ID NO: 137739 - DNA, 75 bp, synthetic construct
  source 1..75: mol_type = other DNA
atcccagtgagcaaattcaaataagaatgataagtcaggaaaaaattgctcaactgcctaatgacagagaaacgc

SEQ ID NO: 137740 - DNA, 75 bp, synthetic construct
  source 1..75: mol_type = other DNA
agctgttattcctggggctactgtgactgatgggacgagctcagaacattgtacaatgagactattggcctcagc

SEQ ID NO: 137741 - DNA, 75 bp, synthetic construct
  source 1..75: mol_type = other DNA
ggctcaaattcaggctgtaaaaccaagcgttaccgatttacattctcatgatcaggctgataatgaaaatatgag

SEQ ID NO: 137742 - DNA, 75 bp, synthetic construct
  source 1..75: mol_type = other DNA
tgaccgctatcagcaaacagattggctgcaatggtttcttcccgttccagatccgcccaggcaaaaatgaaaccg

SEQ ID NO: 137743 - DNA, 75 bp, synthetic construct
  source 1..75: mol_type = other DNA
gacggtgacaattcgagataaccaaccggagaaagttaccatttccggcacggcggtgattcttttccatgctga

SEQ ID NO: 137744 - DNA, 75 bp, synthetic construct
  source 1..75: mol_type = other DNA
ggaagggcgaccgctcaaaacactggtactcagcacggcaacccgttttaatgatgagcaacaaaccctggtatt

SEQ ID NO: 137745 - DNA, 75 bp, synthetic construct
  source 1..75: mol_type = other DNA
accgtctggcgctgacagctacgccgttcatgaaggactcgactgaagcaaatatgcgtctcatggccgttgcgg

SEQ ID NO: 137746 - DNA, 75 bp, synthetic construct
  source 1..75: mol_type = other DNA
gattgcgacgggtggcggtaaatcgaacgtagcgtgtaaggctgctgctcgcattggtcgtatgacgctgttttt

SEQ ID NO: 137747 - DNA, 75 bp, synthetic construct
  source 1..75: mol_type = other DNA
cacggtctggcaaacgtcgctggcaggaaaacatcgtgtgactatagaaaagcaaaatgatgattatcgtatttc

SEQ ID NO: 137748 - DNA, 75 bp, synthetic construct
  source 1..75: mol_type = other DNA
atcagcaatggtccttattatattctcgctccaggcgtggcaatgcctcatgcgcgaccggaatgtggggcgctt

SEQ ID NO: 137749 - DNA, 75 bp, synthetic construct
  source 1..75: mol_type = other DNA
gggatccattggtttatgtcacgaacggtgcaatagtgatccacacccaacgcctgaaatcagatccagggggta

SEQ ID NO: 137750 - DNA, 75 bp, synthetic construct
  source 1..75: mol_type = other DNA
ccattgcttttacagcattaagtctagatatctattcaactaaatatgattatatatatgcatatggaagttgga

SEQ ID NO: 137751 - DNA, 75 bp, synthetic construct
  source 1..75: mol_type = other DNA
gccgaacgcaaagaaaccggaaaatacacgtctgttgttgatctcgcctgcgccagagtcaaccggcagaacact

SEQ ID NO: 137752 - DNA, 75 bp, synthetic construct
  source 1..75: mol_type = other DNA
accccgccctgccctcgattcctgggataccgaatatatgcaggaaaaccgctgggatgaggagtcagcttcctt

SEQ ID NO: 137753 - DNA, 75 bp, synthetic construct
  source 1..75: mol_type = other DNA
agtcatctatctcagttatatatgcagcaaaagactggcaggaagctatcgatttttcaatgacatcattgttag

SEQ ID NO: 137754 - DNA, 75 bp, synthetic construct
  source 1..75: mol_type = other DNA
gttgacccatcctgagcgtgtccaggcactggtcaccgtggcgtcgtcgccgtgcttcagcgctcgcgaagagtg

SEQ ID NO: 137755 - DNA, 75 bp, synthetic construct
  source 1..75: mol_type = other DNA
ctggctatatctgaaaaccagagcgaagaaaaagaaagtccagcaggttgttcagcagataaaagaaagcagtcc

SEQ ID NO: 137756 - DNA, 75 bp, synthetic construct
  source 1..75: mol_type = other DNA
ttggtctggatattcacaactttacccgcacggttgctgaagacggcaagctggaaatccacaccacctatgtga

SEQ ID NO: 137757 - DNA, 75 bp, synthetic construct
  source 1..75: mol_type = other DNA
atttacccaaacaatgtcatggatgtgattggtctggatattcacaacttcacccgaacagttgctgaagacggc

SEQ ID NO: 137758 - DNA, 75 bp, synthetic construct
  source 1..75: mol_type = other DNA
gctggatgaactctggcctcacagcgagtcatacatcttcgccaaagcggcccatgcaccgtttatttcgcatcc

SEQ ID NO: 137759 - DNA, 75 bp, synthetic construct
  source 1..75: mol_type = other DNA
gagtcgtacattttcgccaaagcggcccatgcgccgtttatttcgcatccagtcgagtttcgtcacgtgctggtg

SEQ ID NO: 137760 - DNA, 75 bp, synthetic construct
  source 1..75: mol_type = other DNA
gagatatgggaccggaatttagcaagaccatcgatctggatactgctggcggagttattgatcgtgacgtcatta

SEQ ID NO: 137761 - DNA, 75 bp, synthetic construct
  source 1..75: mol_type = other DNA
aaccggaaaaagtctgcaccgcctgcggtcagagcggtggcggcaactgccccgattgtggcgctgtcatgggca

SEQ ID NO: 137762 - DNA, 75 bp, synthetic construct
  source 1..75: mol_type = other DNA
gtggaaacggcaattccggacaacgaaaaaaccgaatgcaaagtggaagtcgaaccatctgtagagcgtgagggg

SEQ ID NO: 137763 - DNA, 75 bp, synthetic construct
  source 1..75: mol_type = other DNA
atatccgcacaaagagaacgctggcggtaatcagcatcacaccagcgataatgaagctggcgggacggcaaatcc

SEQ ID NO: 137764 - DNA, 75 bp, synthetic construct
  source 1..75: mol_type = other DNA
cggtcatcatgaaatcacatccaccagcaggttgtggcaccatctgatgattgaccttgaaacaatgggaaaaaa

SEQ ID NO: 137765 - DNA, 75 bp, synthetic construct
  source 1..75: mol_type = other DNA
catcacgtggtgaatttgttgcagggattagcgacccgaatgatccgaaatgggtgaaggggattgaaacccgcg

SEQ ID NO: 137766 - DNA, 75 bp, synthetic construct
  source 1..75: mol_type = other DNA
accatctgtagagcgtgaggggccgttctatttcctcttcgcagataaggacggagaaaaatacggtcgcgcaaa

SEQ ID NO: 137767 - DNA, 75 bp, synthetic construct
  source 1..75: mol_type = other DNA
catctgatgatcgaccttgaaaccatgggaaaaaatcctgatgccccgattatctcaataggtgcaatatttttc

SEQ ID NO: 137768 - DNA, 75 bp, synthetic construct
  source 1..75: mol_type = other DNA
taagctgcatgccatcgggtgggttaagcataaatgtattcctggtgccaaatggcccgaaattcaggcagagat

SEQ ID NO: 137769 - DNA, 75 bp, synthetic construct
  source 1..75: mol_type = other DNA
ctcaggaaaatgatccggaggaaatggaaggcactgaacatctgcacaaggagaacactgtcagcgatcagtatc

SEQ ID NO: 137770 - DNA, 75 bp, synthetic construct
  source 1..75: mol_type = other DNA
accatcgatctggatactgctggcggtgtcattgacagggacaccgttaagtggtggctgaagcaatcgcgcgaa

SEQ ID NO: 137771 - DNA, 75 bp, synthetic construct
  source 1..75: mol_type = other DNA
cgccagagtcaaccgacagcacactgaaaactcagcagaaaatatcccccctgtcactgcagtcattcgtcgcga

SEQ ID NO: 137772 - DNA, 75 bp, synthetic construct
  source 1..75: mol_type = other DNA
atatccggatctgcaaatcatcggcggtaatgtggcaacagctgcgggcgcccgcgctctggcagaagcaggttg

SEQ ID NO: 137773 - DNA, 75 bp, synthetic construct
  source 1..75: mol_type = other DNA
cggcaattctgccggtgttgttttccccgccgataatcttagcgaagcgcaaatgcagcttatcgcccgcgagtt

SEQ ID NO: 137774 - DNA, 75 bp, synthetic construct
  source 1..75: mol_type = other DNA
taggtcgtgatggagtgattgatgtgacggtgacaattcgcgataaccagccggagaaagtgactatttctggta

SEQ ID NO: 137775 - DNA, 75 bp, synthetic construct
  source 1..75: mol_type = other DNA
cgcgatgtccaaaggttcttctgaccgttatttccagagcgataacgctgccgacaaactggtgccggaaggtat

SEQ ID NO: 137776 - DNA, 75 bp, synthetic construct
  source 1..75: mol_type = other DNA
ctttgcgggttacccggtcgttaccgaagaaaacgaactggtcggcatcatcaccggtcgtgacgtgcgttttgt

SEQ ID NO: 137777 - DNA, 75 bp, synthetic construct
  source 1..75: mol_type = other DNA
gtttacatgacgccgaaagagcgtctggtaaccgtgcgtgaaggcgaagcccgtgaagtggtgctggcaaaaatg

SEQ ID NO: 137778 - DNA, 75 bp, synthetic construct
  source 1..75: mol_type = other DNA
ccctgttcaaaccccgctttaaacaccctgaaacctcgacgcttgtccgccgctttaatcacggtgcacaaccgc

SEQ ID NO: 137779 - DNA, 75 bp, synthetic construct
  source 1..75: mol_type = other DNA
ttaatcgcttcgtcatctgctgacggtaaattgttagagattccgttcaatccggtgtatcggaattttgacaaa

SEQ ID NO: 137780 - DNA, 75 bp, synthetic construct
  source 1..75: mol_type = other DNA
ttttgcgccgcgcggcattgctatgctgactattgatatgccgtcggtgggcttttcttcaaaatggaagctcac

SEQ ID NO: 137781 - DNA, 75 bp, synthetic construct
  source 1..75: mol_type = other DNA
caccgtctggcaaacgtcactggcgggaaagcaccgcgtgactatcgaaaaacataacgatgattatcgtatttc

SEQ ID NO: 137782 - DNA, 75 bp, synthetic construct
  source 1..75: mol_type = other DNA
tcccgtataaatactgtattcaggccaccatcgaaaaacccggcggtacaccggtttcatggattcgcttccaga

SEQ ID NO: 137783 - DNA, 75 bp, synthetic construct
  source 1..75: mol_type = other DNA
caggctgtttttaaaagaaaaagaggccggtaaatcgttcagtgtgaaagtgaacgtcaccgcattctcatgcag

SEQ ID NO: 137784 - DNA, 75 bp, synthetic construct
  source 1..75: mol_type = other DNA
gatagacattcctaaggatgtgcaaacggcggtttttgagattgaagcacagcccgcggtggcagaaaaagccgc

SEQ ID NO: 137785 - DNA, 75 bp, synthetic construct
  source 1..75: mol_type = other DNA
cagcaccaactatatcttgcaggaggcggatctgctgattgttctcggagcacgttttgatgaccgggcgattgg

SEQ ID NO: 137786 - DNA, 75 bp, synthetic construct
  source 1..75: mol_type = other DNA
gatacctacggcatctctatccccatcaccaaacataactatctggtcagacatatcgaagaactcccgcaggtc

SEQ ID NO: 137787 - DNA, 75 bp, synthetic construct
  source 1..75: mol_type = other DNA
tgccagagtcgccgaagctagggcgcaggcgctcgtaggatgggatgatgccagaaaagcgtggcttgaacaggt

SEQ ID NO: 137788 - DNA, 75 bp, synthetic construct
  source 1..75: mol_type = other DNA
tcagccaactgaacgactggcagacgtttattgagactgtgcggaccgagcactatcccacaggcagcgctcagt

SEQ ID NO: 137789 - DNA, 75 bp, synthetic construct
  source 1..75: mol_type = other DNA
ggcattggcggataagcattgccgcgacagcagcggcgagttgatttttaacccgcgcacaatcattaaccgcat

SEQ ID NO: 137790 - DNA, 75 bp, synthetic construct
  source 1..75: mol_type = other DNA
atgactaagagcaccacgatgatgatccacttcatcatgaccctttccttatttaaggccccttcctcgggaggg

SEQ ID NO: 137791 - DNA, 75 bp, synthetic construct
  source 1..75: mol_type = other DNA
cgcggaatgaagcgtaaccgtttaaaaacgttgctggcgaatgatatcaacctgtatggctggcatctgcccctg

SEQ ID NO: 137792 - DNA, 75 bp, synthetic construct
  source 1..75: mol_type = other DNA
atcttgaatcgccgcgtctgaaagcggttgcctgtcttggtccggtagttcataccctgttgagtgattttaagt

SEQ ID NO: 137793 - DNA, 75 bp, synthetic construct
  source 1..75: mol_type = other DNA
ggtaacgaaaagttaggtctgctaattcaaaaaaaattgatggataagaagcctgaagagactaatttagagaat

SEQ ID NO: 137794 - DNA, 75 bp, synthetic construct
  source 1..75: mol_type = other DNA
gtgaggttaacaatgtttgggatatttttagtgactcattcaaggacaatgaatctgagtttatttctaagataa

SEQ ID NO: 137795 - DNA, 75 bp, synthetic construct
  source 1..75: mol_type = other DNA
gaaaagaaatataaagaactaattttatctgaaacggatcgaactatgattcgttatagaaatgggttttgggga

SEQ ID NO: 137796 - DNA, 75 bp, synthetic construct
  source 1..75: mol_type = other DNA
gccagttactgggatcagtattgattgacgtattaattccatcgctgggcaatagcgtttatctggtcacgatca

SEQ ID NO: 137797 - DNA, 75 bp, synthetic construct
  source 1..75: mol_type = other DNA
tgctggcagtcagccaccggctgtaccgggcggaagacagaacggaacgtctggcgctggtcgcctgcctgctgg

SEQ ID NO: 137798 - DNA, 75 bp, synthetic construct
  source 1..75: mol_type = other DNA
atcattaccccgtttctggcccggagactttttcccgacgttctatgcctgtcatctggctgtgctgggcgttct

SEQ ID NO: 137799 - DNA, 75 bp, synthetic construct
  source 1..75: mol_type = other DNA
ctgtcccgtcatgcgcatatccggcagtcggccattaaccggctgtggggatgggctgtgattgcccagttcgcg

SEQ ID NO: 137800 - DNA, 75 bp, synthetic construct
  source 1..75: mol_type = other DNA
ggcgacagaggcagctggtagtgcgacggcggcagctcagagcaaaagtacggcggaatccgcggcaacgcgcgc

SEQ ID NO: 137801 - DNA, 75 bp, synthetic construct
  source 1..75: mol_type = other DNA
gctgtaccgggcggaagacagaatggaacgtctggtggttgtcgcttgcctgctggccgtgattccggcgcttaa

SEQ ID NO: 137802 - DNA, 75 bp, synthetic construct
  source 1..75: mol_type = other DNA
tgtttctggccggacgcggtgcttttccgctgtttgccctggtgtgggggctgaatctgtcccgtcatgcgcata

SEQ ID NO: 137803 - DNA, 75 bp, synthetic construct
  source 1..75: mol_type = other DNA
acggatgttgaccagcgaaatccgaactatccgggctggatcagcatttacgtacggctggataccccggctggc

SEQ ID NO: 137804 - DNA, 75 bp, synthetic construct
  source 1..75: mol_type = other DNA
acgttctatgcctgtcatctggctgtgccgggcgttctggcactgtgacgggtgtggtatctttgactgtaacag

SEQ ID NO: 137805 - DNA, 75 bp, synthetic construct
  source 1..75: mol_type = other DNA
gtttccgctgtttgcgctggtctggggactgaatctgtcccgtcatgcgaatatccggcagtcggctattaaccg

SEQ ID NO: 137806 - DNA, 75 bp, synthetic construct
  source 1..75: mol_type = other DNA
atgacaacggataacacgaatacgacacgtaacgattcactggctgcccggaccgatacctggttgcagtcgttt

SEQ ID NO: 137807 - DNA, 75 bp, synthetic construct
  source 1..75: mol_type = other DNA
gggcggggggcctttccgctgtttgccctggtgtgggggctgaatctctcccgtcatgtgcatatccggcagtca

SEQ ID NO: 137808 - DNA, 75 bp, synthetic construct
  source 1..75: mol_type = other DNA
ggatgtttctggccgggcgtggggcctttccgctgttttccctggtgtgggggctgaatctgtcccgccatgcgc

SEQ ID NO: 137809 - DNA, 75 bp, synthetic construct
  source 1..75: mol_type = other DNA
gtgacccgcctggatattctggaagatattcgcgggacactgcagcaggctgttgatgaaggaaaaaccgatcgc

SEQ ID NO: 137810 - DNA, 75 bp, synthetic construct
  source 1..75: mol_type = other DNA
agcaaaagctggcttcggtaaccgatgccgaaaacatcaagaatcaggtgctggaaaagctgggcctgaacagtg

SEQ ID NO: 137811 - DNA, 75 bp, synthetic construct
  source 1..75: mol_type = other DNA
atgactcgtttatcattatttatatcgttgcttcttacatcggtcgctgtactggctgatgtgcagattagcatc

SEQ ID NO: 137812 - DNA, 75 bp, synthetic construct
  source 1..75: mol_type = other DNA
caatggctgggcagactaatgtactggcaacaaatatagccaattttggtatagcgttgtatcagggaaaaggaa

SEQ ID NO: 137813 - DNA, 75 bp, synthetic construct
  source 1..75: mol_type = other DNA
atgcacatactgtaggtattggtgcgcatacgcactccgttgcgattggttcacatggacacaccatcaccgtta

SEQ ID NO: 137814 - DNA, 75 bp, synthetic construct
  source 1..75: mol_type = other DNA
gggcttatccatgaagtctggcgacatgcgctgaacaaaatcaccctggacaaacgaaacagtaattatattatc

SEQ ID NO: 137815 - DNA, 75 bp, synthetic construct
  source 1..75: mol_type = other DNA
gatcatcttggcgctgaggttctggaagaactccgcctgttacaggagtccgcccgtattggccttgttctgatg

SEQ ID NO: 137816 - DNA, 75 bp, synthetic construct
  source 1..75: mol_type = other DNA
ccagcacatcagcccgtgaggcggcaacccatgcgactgatgctgcagactcagcacgcgcagccagcacgtcag

SEQ ID NO: 137817 - DNA, 75 bp, synthetic construct
  source 1..75: mol_type = other DNA
tggtcagtgccgcgattctggtattcgtggtgattttctggcggacacaccatcgcgaccaccgtaactggctgg

SEQ ID NO: 137818 - DNA, 75 bp, synthetic construct
  source 1..75: mol_type = other DNA
ccagcggtgaaggtgcggcgctgacagaaaaacatattaatgcggcctttaaagaggtttataccaaccctgaat

SEQ ID NO: 137819 - DNA, 75 bp, synthetic construct
  source 1..75: mol_type = other DNA
gcgcagtctcttgaacgctggctggagaactatcaccgcgccgcagaactgccagaacccccgcgttttgtggaa

SEQ ID NO: 137820 - DNA, 75 bp, synthetic construct
  source 1..75: mol_type = other DNA
gaatatcctgtttgcctttgcagtggcggcacaggtgctgacgtggtgtgaaacgcgcagtctgtggcgtactgc

SEQ ID NO: 137821 - DNA, 75 bp, synthetic construct
  source 1..75: mol_type = other DNA
ctatcaattgattcatctctgcttactgatggtaaggttgatatttctaagctgatgctggaaattcaaaagctt

SEQ ID NO: 137822 - DNA, 75 bp, synthetic construct
  source 1..75: mol_type = other DNA
cttttgcagcaatgaataacgcggcgaaaggggcaggcgaagctgctgaaaaagcaagctccgcatcttcaaagg

SEQ ID NO: 137823 - DNA, 75 bp, synthetic construct
  source 1..75: mol_type = other DNA
cgttaacctgcaggacagcgtgactgccgctgtcagtggtgtgttagtgacatacatggtcgtcaggatggtatc

SEQ ID NO: 137824 - DNA, 75 bp, synthetic construct
  source 1..75: mol_type = other DNA
cgctggtatggtcagtcagtgcacttacacttctggttctctggttctctggttcccgttatcttccaccagtta

SEQ ID NO: 137825 - DNA, 75 bp, synthetic construct
  source 1..75: mol_type = other DNA
ctggtctggtcacccggacagcgggataccatcaaaacggtggcactggtgctgatggtgctggaccatgcaaac

SEQ ID NO: 137826 - DNA, 75 bp, synthetic construct
  source 1..75: mol_type = other DNA
tggaatgcaatcgctataactactgcgcagatgcagttaagggcgttgagtatgcctgccgcgccgccatgcttc

SEQ ID NO: 137827 - DNA, 75 bp, synthetic construct
  source 1..75: mol_type = other DNA
cattccgcaagttccggtaactccggatggttggataagctgtagtgagcgaatgccggataagttaattccggt

SEQ ID NO: 137828 - DNA, 75 bp, synthetic construct
  source 1..75: mol_type = other DNA
atcccgtattgaggggttccgcaagaccagtgcacagctcgccgtgactggtcaggaactgaaaaaagccagaca

SEQ ID NO: 137829 - DNA, 75 bp, synthetic construct
  source 1..75: mol_type = other DNA
aatgatggagttgatgcgctcagaaacaggatgttaagcgtgcttcctggaatggcggcgcaacgacaagagaac

SEQ ID NO: 137830 - DNA, 75 bp, synthetic construct
  source 1..75: mol_type = other DNA
cccactgacccgggaaccaataacggcatcaataattgtaaaacatgaagaatgcatttatgacgataccagagg

SEQ ID NO: 137831 - DNA, 75 bp, synthetic construct
  source 1..75: mol_type = other DNA
ctgccgcgccgccatgcttcagtccggaaactttcgggaaaataagaattcgtcaaccaataattttcgggaaat

SEQ ID NO: 137832 - DNA, 75 bp, synthetic construct
  source 1..75: mol_type = other DNA
cgtttctggcccggggattttttcccgactttctatgcctgccatcttactgtgctgggcgttctggctgtgtga

SEQ ID NO: 137833 - DNA, 75 bp, synthetic construct
  source 1..75: mol_type = other DNA
agagcggaacgtctggcgctgttggcctgcctgctggcggttattccggcccttaaccttgccgccagtgatgca

SEQ ID NO: 137834 - DNA, 75 bp, synthetic construct
  source 1..75: mol_type = other DNA
agagcggaacgtctggcgctgttggcctgcctgctggccgttattccggcgcttaaccttgccgccagtgatgca

SEQ ID NO: 137835 - DNA, 75 bp, synthetic construct
  source 1..75: mol_type = other DNA
ctggcccgctcacggggaaaacgcgccggtgtggcggttgcactgtctcttgctgctgttacgtcagtcccggca

SEQ ID NO: 137836 - DNA, 75 bp, synthetic construct
  source 1..75: mol_type = other DNA
ttctggccgggcgtggagcctttccgctttttgccctggtgtgggggctgaatctgtcccgccatgcgcatatcc

SEQ ID NO: 137837 - DNA, 75 bp, synthetic construct
  source 1..75: mol_type = other DNA
cgacacgtaacgattcactggctgcacggaccgatacctggtttcagtcatttctggtctggtcacccggacagc

SEQ ID NO: 137838 - DNA, 75 bp, synthetic construct
  source 1..75: mol_type = other DNA
agagcggaacgtctggcgctgttggcctgcctgctggctgttattccggcccttaaccttgcctccagtgatgca

SEQ ID NO: 137839 - DNA, 75 bp, synthetic construct
  source 1..75: mol_type = other DNA
agagcggaacgtctggcgctgttggcctgcctgctggcagttattccggcccttaaccttgccaccagtgatgca

SEQ ID NO: 137840 - DNA, 75 bp, synthetic construct
  source 1..75: mol_type = other DNA
ctctacgctcgctacggttaatggccgccatcccgaaggtgaattcagcgttgataaaggttatgcctgcggttt

SEQ ID NO: 137841 - DNA, 75 bp, synthetic construct
  source 1..75: mol_type = other DNA
agagcggaacgtctggcgctgttggcctgcctgctggccgttattccggcccttaaccttgcccccagtgatgca

SEQ ID NO: 137842 - DNA, 75 bp, synthetic construct
  source 1..75: mol_type = other DNA
agagcggaacgtctggcgctgttggcctgcctgctggccgttattccggctcttaaccttgcctccagtgatgca

SEQ ID NO: 137843 - DNA, 75 bp, synthetic construct
  source 1..75: mol_type = other DNA
agagcggaacgtctggcgctgttggcctgcctgctggccgttattccggcacttaaccttgccaccagtgatgca

SEQ ID NO: 137844 - DNA, 75 bp, synthetic construct
  source 1..75: mol_type = other DNA
atcagcgacccaaccgacccgaagtgggtgaaggggatccagactcgcgacactgaggaccagaatcaatccaaa

SEQ ID NO: 137845 - DNA, 75 bp, synthetic construct
  source 1..75: mol_type = other DNA
atgcgccagtcaacgctatagccggtaagttttttgatccggtaaccggagagatgggaccagaattcagcaaaa

SEQ ID NO: 137846 - DNA, 75 bp, synthetic construct
  source 1..75: mol_type = other DNA
caatccaaagtggaacaaaatgagccagaagcggaacaaaacagcccggatacgcaacaaaacggaccggaagag

SEQ ID NO: 137847 - DNA, 75 bp, synthetic construct
  source 1..75: mol_type = other DNA
agaatgtggggattatttagctgactcgtttgatctggagagcataagtcaagcaatagtagaaaaaggtggttt

SEQ ID NO: 137848 - DNA, 75 bp, synthetic construct
  source 1..75: mol_type = other DNA
cagccttcatggccgagatatgcggtcggtcaggtggtatttgaaaccagactgaagcccacggtcgtcatcggg

SEQ ID NO: 137849 - DNA, 75 bp, synthetic construct
  source 1..75: mol_type = other DNA
tcgatggcggtccattatctgcattatgcgttgttggttctgatgagtgaatcattgtcttttgagcaacaggct

SEQ ID NO: 137850 - DNA, 75 bp, synthetic construct
  source 1..75: mol_type = other DNA
tatcgtgaagatgcccggtaagagcgatgaaaacgcgcaaccttttttacatgcgttaattgcgcagacggataa

SEQ ID NO: 137851 - DNA, 75 bp, synthetic construct
  source 1..75: mol_type = other DNA
catcatcgattaccgggaagccgtatatcgtgaagatgcccggtaagagcgatgaaaatgcgcaaccttttttac

SEQ ID NO: 137852 - DNA, 75 bp, synthetic construct
  source 1..75: mol_type = other DNA
gatatttgtgcgcaacggtgatgaacatacctgcgatgaagcggtttctcatctgcgtctgaagctgggcaatac

SEQ ID NO: 137853 - DNA, 75 bp, synthetic construct
  source 1..75: mol_type = other DNA
accgtgttaccgaatatctgaacaaagtactgaccgaaaccgaccatgccaaccctgatccagaaatcgtggata

SEQ ID NO: 137854 - DNA, 75 bp, synthetic construct
  source 1..75: mol_type = other DNA
tccatgaagccaagaaaaacattccacccaaaaatcctgtcgatgcagataaattactggctgcttctcacggag

SEQ ID NO: 137855 - DNA, 75 bp, synthetic construct
  source 1..75: mol_type = other DNA
actgctcgctctgtgttaaataaaaccagattagataattttactcatgctgttctcagtaactgcactacagga

SEQ ID NO: 137856 - DNA, 75 bp, synthetic construct
  source 1..75: mol_type = other DNA
gttaccagtgtggcttcaggaccacgcgcattaagccgtaatcagccgcagtatccggcacgagcacaggcattg

SEQ ID NO: 137857 - DNA, 75 bp, synthetic construct
  source 1..75: mol_type = other DNA
gtgtcgccattagagctactgaacgttcctctcacgatgttctggatgctcagtcgcaatatagaccgtctgcgt

SEQ ID NO: 137858 - DNA, 75 bp, synthetic construct
  source 1..75: mol_type = other DNA
gccctggctgaagtgggttactggagtgacgatatgatcaccgaagatattgatattagctggaagctgcagttg

SEQ ID NO: 137859 - DNA, 75 bp, synthetic construct
  source 1..75: mol_type = other DNA
atgaaaaaccgtaaagcaaaaattcttttgacctgtagaaatgctcgcggcgtccagcaatggttaaaactcagt

SEQ ID NO: 137860 - DNA, 75 bp, synthetic construct
  source 1..75: mol_type = other DNA
tatattctggaattgccagagagggaatcaaagataagcgcagcgcggcgcaaaaccgctggaaaaaccacttgc

SEQ ID NO: 137861 - DNA, 75 bp, synthetic construct
  source 1..75: mol_type = other DNA
atggcgttatgagccgggtaagccaggcagtgggattgtggtgaatatcctgtttaaaattaacggcaccaccga

SEQ ID NO: 137862 - DNA, 75 bp, synthetic construct
  source 1..75: mol_type = other DNA
ctgcactttcgcagtaatcagctgcctaatcaggtgtctgatgcaatgcaagcctggggtattgacggccaccag

SEQ ID NO: 137863 - DNA, 75 bp, synthetic construct
  source 1..75: mol_type = other DNA
cacacgcgggcgtcagcagatggccagccagatcccgggggcaacgaccgtcgaagccgtagatttggtcgacct

SEQ ID NO: 137864 - DNA, 75 bp, synthetic construct
  source 1..75: mol_type = other DNA
atgaatataaagacaaaaaaagggttctcactgttggagcttattttagtattgggtgttgggacaatggtttct

SEQ ID NO: 137865 - DNA, 75 bp, synthetic construct
  source 1..75: mol_type = other DNA
ttacctgcctggtcggtttcattatttacgcagtccaacttgcaggtgtaccgttaaatattgaattgacacata

SEQ ID NO: 137866 - DNA, 75 bp, synthetic construct
  source 1..75: mol_type = other DNA
gatatgatcaccgaagatattgatattagctggaagctgcagttgaatcagtggacgatttttacgagccacggg

SEQ ID NO: 137867 - DNA, 75 bp, synthetic construct
  source 1..75: mol_type = other DNA
aaccatacacgccgctttagcacagcgttatgagaacattgaagttattgccgtaaatgacggttcaacagataa

SEQ ID NO: 137868 - DNA, 75 bp, synthetic construct
  source 1..75: mol_type = other DNA
aaccgacttacttatttccacaggcgataatattgatcgtgggccgaagagtcttaacgtgctgcgcctgctaaa

SEQ ID NO: 137869 - DNA, 75 bp, synthetic construct
  source 1..75: mol_type = other DNA
accgacgcgcagggtaatcagcatgaaggcattattaccagcgggactttctccccaacgctgggttacagcatt

SEQ ID NO: 137870 - DNA, 75 bp, synthetic construct
  source 1..75: mol_type = other DNA
cagataccttggtctgtaattttgatgaatacagttccagaaataattcagattattatgttaaattaacttcag

SEQ ID NO: 137871 - DNA, 75 bp, synthetic construct
  source 1..75: mol_type = other DNA
tgcgtccatccatcggttactcctattctaaagcactggacgtagcaggttacaaagattctgatcgtctgaact

SEQ ID NO: 137872 - DNA, 75 bp, synthetic construct
  source 1..75: mol_type = other DNA
catgggttggcgcactctgctggaacgtcgccagccagcgattaccgacagtgattctcgggccgctgatcgttt

SEQ ID NO: 137873 - DNA, 75 bp, synthetic construct
  source 1..75: mol_type = other DNA
agaaacgcgatcaggttatcgagcacgtagcggacatgtacggtcgtgatgcggtatcgcagatcatcaccttcg

SEQ ID NO: 137874 - DNA, 75 bp, synthetic construct
  source 1..75: mol_type = other DNA
ctgggttttcagataataatgcttttgatttgtcatataaacattatgatcagatttcgtgtttcagtaatctac

SEQ ID NO: 137875 - DNA, 75 bp, synthetic construct
  source 1..75: mol_type = other DNA
tagaggcacagatcccaagagtatcaaattgtggcttgctcttaaacgatttaattctgggcataaaaatgtatc

SEQ ID NO: 137876 - DNA, 75 bp, synthetic construct
  source 1..75: mol_type = other DNA
attggtattcagggctttatttacaacctcagcattttcagtctattgatttacatcatagcttcatgcttgcca

SEQ ID NO: 137877 - DNA, 75 bp, synthetic construct
  source 1..75: mol_type = other DNA
atactgtcagaattgaaaaaataaaagcagtgttatcttcagggcattatatcgagtatccgggtaactgtgtgg

SEQ ID NO: 137878 - DNA, 75 bp, synthetic construct
  source 1..75: mol_type = other DNA
taatttggttgcagatagataaacactcggaattatggttattagctcaggataaaaaaaaggttgcattttatt

SEQ ID NO: 137879 - DNA, 75 bp, synthetic construct
  source 1..75: mol_type = other DNA
ttcagagttatggaagttatctcaggcccaaaaaagggttgcattttattggtcatgtagccctgatgatttact

SEQ ID NO: 137880 - DNA, 75 bp, synthetic construct
  source 1..75: mol_type = other DNA
tgattcggaaacgctggccgcaacaccaaaagcggtgaaggctgcctatgacaatgctgagaaacgtcttcagaa

SEQ ID NO: 137881 - DNA, 75 bp, synthetic construct
  source 1..75: mol_type = other DNA
caccaaacgaatcagaaaaccgatactggaaaaactctaacgcggaggccagttttagttgaccacaacagacta

SEQ ID NO: 137882 - DNA, 75 bp, synthetic construct
  source 1..75: mol_type = other DNA
catcacggtcgcaagcataaagaagatatggaagcgcgccacgaacagttaaccaaaggcggcaccatcctgtga

SEQ ID NO: 137883 - DNA, 75 bp, synthetic construct
  source 1..75: mol_type = other DNA
gaccgccggaatgtttctcggtgcgctggtgggcggcatcatcggtgacaaaaccggtcgcagaaatgcgttcat

SEQ ID NO: 137884 - DNA, 75 bp, synthetic construct
  source 1..75: mol_type = other DNA
tatcgctacggcgctggcctggcgctactttcctgaatccccgcgctggctggaatcgcgcggacggtatcagga

SEQ ID NO: 137885 - DNA, 75 bp, synthetic construct
  source 1..75: mol_type = other DNA
ttgaagcacgcctacagcagttgtttgatcgaagcgttgagctcaagtggtctcaaaatggaatgactattagaa

SEQ ID NO: 137886 - DNA, 75 bp, synthetic construct
  source 1..75: mol_type = other DNA
cttgaaatgacattgaacagtagcgatcaagaacttgatacactagctagatctaccatcggggttgatgcaaca

SEQ ID NO: 137887 - DNA, 75 bp, synthetic construct
  source 1..75: mol_type = other DNA
ataagagtgattatgttctcgctcatggactgaacaccgacgaccaactcgcatttggtatcgtctaccagttct

SEQ ID NO: 137888 - DNA, 75 bp, synthetic construct
  source 1..75: mol_type = other DNA
tacccttcagcagtccggcggcgaagacggtggcagtgtggtgttcccgccggtgctggtgcagatgctcgaccg

SEQ ID NO: 137889 - DNA, 75 bp, synthetic construct
  source 1..75: mol_type = other DNA
taccctgcgcaacggaagatgccaccggcagccggaaaaccatgacgtggagccgttacggccagttgctgagct

SEQ ID NO: 137890 - DNA, 75 bp, synthetic construct
  source 1..75: mol_type = other DNA
attattgtcctgctggtagcctgtggtgcacttagtctggggctgaatcattaccgcgataacgccataacctac

SEQ ID NO: 137891 - DNA, 75 bp, synthetic construct
  source 1..75: mol_type = other DNA
tcaggcgaaagtgctggaatccgcaaagcgtgcggcggaggacttacaggcgaaatataaccgcctgacggattc

SEQ ID NO: 137892 - DNA, 75 bp, synthetic construct
  source 1..75: mol_type = other DNA
tgcgattacatggccggtcgtggccgttgcggcggtggttgtcgctggcgcgctgcttattcgcaaatactggga

SEQ ID NO: 137893 - DNA, 75 bp, synthetic construct
  source 1..75: mol_type = other DNA
ccttgcgtaagctggtacaaacggcgaccgggtatgttttaaaacttgatggctggatacaaaaaaataaatcac

SEQ ID NO: 137894 - DNA, 75 bp, synthetic construct
  source 1..75: mol_type = other DNA
tttgtcgtgccgccattcttgtccggctcaccgcgaaatctatgcttgatattgcactctctttgcattttgatt

SEQ ID NO: 137895 - DNA, 75 bp, synthetic construct
  source 1..75: mol_type = other DNA
atatccgggaaacacaaaaatcactgcgcgagctgaacggtcacgcatcccgtattgagggattccgcaagacca

SEQ ID NO: 137896 - DNA, 75 bp, synthetic construct
  source 1..75: mol_type = other DNA
tgatgcccggttatgagtttgcgcagaaaaactcagaattgcaggccgtgctgggtgtggcaaaagactccgccg

SEQ ID NO: 137897 - DNA, 75 bp, synthetic construct
  source 1..75: mol_type = other DNA
ggggtcaatggctgggactggcggcgctgctgttataacgagactacaggcacccacaggcaaagcatacgatgc

SEQ ID NO: 137898 - DNA, 75 bp, synthetic construct
  source 1..75: mol_type = other DNA
gtcaactcggaaatcagttgcaggatgcgttagaaaaatatgaacgcgacaagcgagccaaagcccgcgccagca

SEQ ID NO: 137899 - DNA, 75 bp, synthetic construct
  source 1..75: mol_type = other DNA
atgtcattctcgaaaagctcggccttgtgaaaaaggagtcgagcagcattgatgcagaaacatcaaaagcgtcgt

SEQ ID NO: 137900 - DNA, 75 bp, synthetic construct
  source 1..75: mol_type = other DNA
atgagtaataacctcaaactcgaagtgctgctgaaagctgtcgaccaggcgacccgaccctttaaagcgatccag

SEQ ID NO: 137901 - DNA, 75 bp, synthetic construct
  source 1..75: mol_type = other DNA
acgataaggcgtcgcatatcgctgacgttatatcgatggcgataaataaatctcaggccagctttgagggtttaa

SEQ ID NO: 137902 - DNA, 75 bp, synthetic construct
  source 1..75: mol_type = other DNA
gcctcagcagatgatgccgccgccgcgcagattatcgtagccaaatctggcgcagataaagacggcatagtggcg

SEQ ID NO: 137903 - DNA, 75 bp, synthetic construct
  source 1..75: mol_type = other DNA
actgggagcctgtcagcgcattctttggcggtgtgatggaagggctgaaagcggcatttgcgccggtgggggaac

SEQ ID NO: 137904 - DNA, 75 bp, synthetic construct
  source 1..75: mol_type = other DNA
tgttcacgccacttaagccggtgtttgactggctgggcgaaaagttacaggccgcgtggcagtggtttaaaaacc

SEQ ID NO: 137905 - DNA, 75 bp, synthetic construct
  source 1..75: mol_type = other DNA
cgtgttgtcggcaacgatgaataagtcggcggctgattttcagggactcagtgatgcactgacttacctcggtcc

SEQ ID NO: 137906 - DNA, 75 bp, synthetic construct
  source 1..75: mol_type = other DNA
atgattgtctgttacgttattcttgttaaccgtccgtttgaaacagagattgccgggaaaaagatattttttcag

SEQ ID NO: 137907 - DNA, 75 bp, synthetic construct
  source 1..75: mol_type = other DNA
acattgccacaacaattttctgagcagatgttttttgcctgcctttccattttttccacacacagaggtttcatg

SEQ ID NO: 137908 - DNA, 75 bp, synthetic construct
  source 1..75: mol_type = other DNA
aaccgacggcctgccttgtggatgtaagagtacagcgaatgaattactggcggtgaacaatgaaaatcactgctg

SEQ ID NO: 137909 - DNA, 75 bp, synthetic construct
  source 1..75: mol_type = other DNA
gtaaagctacgtttggcgaaaaggcagctagacgtattgagcaaacatatgggatgcctggggggtatcttgata

SEQ ID NO: 137910 - DNA, 75 bp, synthetic construct
  source 1..75: mol_type = other DNA
agtggtttaaagataaaactctgccacccaaagagaagagctacctatctcaactaatgagtgggagagcctcgt

SEQ ID NO: 137911 - DNA, 75 bp, synthetic construct
  source 1..75: mol_type = other DNA
ggcgtgcaggcgggcgatctgtttattgccaccactggttataccggtgaagcgggctatgaaattgcgctgccc

SEQ ID NO: 137912 - DNA, 75 bp, synthetic construct
  source 1..75: mol_type = other DNA
tagctggccggttgtggccgtggtggccgccattgtcgccggggcgttgcttatccgtaaatactgggagcctgt

SEQ ID NO: 137913 - DNA, 75 bp, synthetic construct
  source 1..75: mol_type = other DNA
gaccgatggtttacctgttggatgtaaggctaacacacaaaatacaccggagttgattcatgaaaatcaggcatg

SEQ ID NO: 137914 - DNA, 75 bp, synthetic construct
  source 1..75: mol_type = other DNA
gcagggcgacctgccgaatgcgctgaaatgtggttccgattttatcgggatcactcattcgtggtggtgttgtgc

SEQ ID NO: 137915 - DNA, 75 bp, synthetic construct
  source 1..75: mol_type = other DNA
acaggccagagtgctggaatcagcaaagcgttcggctgaagggttacaggcaaaatataacagcctcacccaatc

SEQ ID NO: 137916 - DNA, 75 bp, synthetic construct
  source 1..75: mol_type = other DNA
caggcaggaataccagcggctggagaaggaacttgccttccagcgtgcctatgattccgcctggcagcgcctcta

SEQ ID NO: 137917 - DNA, 75 bp, synthetic construct
  source 1..75: mol_type = other DNA
ggatgaaattactggtggtgaattgaaatacaacccagagctatacaaaaagaagaataacacctcgcacgaaat

SEQ ID NO: 137918 - DNA, 75 bp, synthetic construct
  source 1..75: mol_type = other DNA
atgcctcatgtatgtgatgaatcgatttcatacttactgggcgaaaatggtatgcttgaagaaatagataagctc

SEQ ID NO: 137919 - DNA, 75 bp, synthetic construct
  source 1..75: mol_type = other DNA
tgatttgggataagttggttgcatatgtcaatgattttaacttaagcaatcaagaaaaatcacgcttaatactaa

SEQ ID NO: 137920 - DNA, 75 bp, synthetic construct
  source 1..75: mol_type = other DNA
cgctatcaggcaggaaaggcactggctggaaatgcggcatcgatgggcgctgccgggataggcatggcaacgacc

SEQ ID NO: 137921 - DNA, 75 bp, synthetic construct
  source 1..75: mol_type = other DNA
aggccaaccgactctgacattcggttcagttttctttggtaacagtcgtggcactttgaataacgatatgtccat

SEQ ID NO: 137922 - DNA, 75 bp, synthetic construct
  source 1..75: mol_type = other DNA
agccagggcgttttcgtgtaatgcccaccaggacttatctgactacaaaaatataaaaatcctgttcaacaagtt

SEQ ID NO: 137923 - DNA, 75 bp, synthetic construct
  source 1..75: mol_type = other DNA
gacattttatgtacgtcacttgttacaggtgaaatttcatcaaattattgtcatggatcagaaaaaaatatatca

SEQ ID NO: 137924 - DNA, 75 bp, synthetic construct
  source 1..75: mol_type = other DNA
tgcatgctccgtgataaatcatattgattttagccgcgatcaatctaaagattttagctgcgatcaatctaaaat

SEQ ID NO: 137925 - DNA, 75 bp, synthetic construct
  source 1..75: mol_type = other DNA
gattatagaaatttcactttctactaccactactatggggactcgtcaaggacatacagccattatatttccaca

SEQ ID NO: 137926 - DNA, 75 bp, synthetic construct
  source 1..75: mol_type = other DNA
tgacagcaccgatattaaaaacctcacgttaaccaacggtaaagggacctggaacttccaggcatcttacgttaa

SEQ ID NO: 137927 - DNA, 75 bp, synthetic construct
  source 1..75: mol_type = other DNA
atgacggcggcctcaaccggcaagctcgataagctcaccgccgcgtttaaagcctcggacggcaagactgaggaa

SEQ ID NO: 137928 - DNA, 75 bp, synthetic construct
  source 1..75: mol_type = other DNA
gccggggcggtggtggccagtgcgctgctcatccgtaaatactgggagccgattggcgcattcttctcgggtgtg

SEQ ID NO: 137929 - DNA, 75 bp, synthetic construct
  source 1..75: mol_type = other DNA
gcacacttcatgataataacatcagggggtcaatggctgggactggcggcgctgctgttataacgagactacagg

SEQ ID NO: 137930 - DNA, 75 bp, synthetic construct
  source 1..75: mol_type = other DNA
ggcatccgacggaaaaaccgaggaactggtcaaggttatgcaggataacctcggcggtgattttaaagagtttca

SEQ ID NO: 137931 - DNA, 75 bp, synthetic construct
  source 1..75: mol_type = other DNA
tgcgattacctggccgattgtggccgtcggtgcggcgattgtggccggggcgctactcatccgcaaatattggga

SEQ ID NO: 137932 - DNA, 75 bp, synthetic construct
  source 1..75: mol_type = other DNA
gaccagaccgcagcgaaagcgaataaggcgtccccgaatggtgggtatatccctgcgactgcaggttatggcggg

SEQ ID NO: 137933 - DNA, 75 bp, synthetic construct
  source 1..75: mol_type = other DNA
cagttacaggatgcgctcgaaaaatacgagcgggataaacgtgcgcgcgcccgtgccagcatgatgcatgacggt

SEQ ID NO: 137934 - DNA, 75 bp, synthetic construct
  source 1..75: mol_type = other DNA
tcaagccgccacgtatggcagcggtggttatattccggcgaccagctcttatgcaggctatcaggcttatcagcc

SEQ ID NO: 137935 - DNA, 75 bp, synthetic construct
  source 1..75: mol_type = other DNA
atgcgctctgcgtttcagctttccaatgacaaggtggcgcacattggcgacgttctgtcgacggtgatgaataaa

SEQ ID NO: 137936 - DNA, 75 bp, synthetic construct
  source 1..75: mol_type = other DNA
acgacaccggtcaccctcaatatggcgcttgccaaccgtcgcacgatggaagaaaacgccgcattactgatgggg

SEQ ID NO: 137937 - DNA, 75 bp, synthetic construct
  source 1..75: mol_type = other DNA
tgatgcccggttatgaatttgcgcagaaaaactcagaattacaggccgtgctcggtgtggcaaaagattctgccg

SEQ ID NO: 137938 - DNA, 75 bp, synthetic construct
  source 1..75: mol_type = other DNA
ggccagctcagccgccgccgtgctgatgactgccgcctcaaccggaaagctggacaaactgaccgctgcgtttaa

SEQ ID NO: 137939 - DNA, 75 bp, synthetic construct
  source 1..75: mol_type = other DNA
gtgtcagatatcgaattccaacagaaacaaattgatgtttctgccgctcaacaaaacgttgaagatcagcgtcag

SEQ ID NO: 137940 - DNA, 75 bp, synthetic construct
  source 1..75: mol_type = other DNA
tcttgagggggacgtcaaccttgatacacgtcatttatgggaatggatgacagaacctctctggagcctgaaagg

SEQ ID NO: 137941 - DNA, 75 bp, synthetic construct
  source 1..75: mol_type = other DNA
tcgaagtcttgtaaaggtgttttacgcggactgcattatcagttagaaccttatgcacaagggaaattggtgcgc

SEQ ID NO: 137942 - DNA, 75 bp, synthetic construct
  source 1..75: mol_type = other DNA
ggataagctgtagtgagcgaatgccagaaatgggagagcgacaatgctatgtgttagcagctgactttaaaaaca

SEQ ID NO: 137943 - DNA, 75 bp, synthetic construct
  source 1..75: mol_type = other DNA
gcagcagaaccgatagcgactaatgacgttcgagagcaaacagccgttccgccagttcctgtaatacaggctgat

SEQ ID NO: 137944 - DNA, 75 bp, synthetic construct
  source 1..75: mol_type = other DNA
gagagtgtcagagcggttcgcgggtttggtgcgcattatgtcctggatcattcatgtgcgcttgcgccacaggtt

SEQ ID NO: 137945 - DNA, 75 bp, synthetic construct
  source 1..75: mol_type = other DNA
ctgggtgcagtaactaagtttggcgagcatggcaaacgtaaagcgcgtaaagatcttggcgtcagtatgatgatg

SEQ ID NO: 137946 - DNA, 75 bp, synthetic construct
  source 1..75: mol_type = other DNA
gaatgtggcctggcggcccgtattaataccgtcatgcagatggcttttttccatctgacgcagattctgcctggc

SEQ ID NO: 137947 - DNA, 75 bp, synthetic construct
  source 1..75: mol_type = other DNA
gcgcaacgtggcggtactggacagaaccaaagagcctggtgcccaggcagaaccgctctatctggatgtgatgac

SEQ ID NO: 137948 - DNA, 75 bp, synthetic construct
  source 1..75: mol_type = other DNA
tccggcagatcaggtgatcccgcagcaagatccgcgcggcaatacgctgtactggattggcccgccgggcggtaa

SEQ ID NO: 137949 - DNA, 75 bp, synthetic construct
  source 1..75: mol_type = other DNA
tcgaagtcttgtaaaggtgttttacgcggactgcattatcagttagagccttatgcgcaaggaaaactggttcgc

SEQ ID NO: 137950 - DNA, 75 bp, synthetic construct
  source 1..75: mol_type = other DNA
atgtttatgtggcgcagatttctctcggcgcgcagctgaaccagacggtgaaagcgattcaggaagcggaagcgt

SEQ ID NO: 137951 - DNA, 75 bp, synthetic construct
  source 1..75: mol_type = other DNA
tcgaattattcattaaaaatccgcttgataacgggcttacccgtggcgaacaaatggaagtggcacgaattgcac

SEQ ID NO: 137952 - DNA, 75 bp, synthetic construct
  source 1..75: mol_type = other DNA
gcgctggcatcactggaggcagagccagtggcaaaaattatagctcactacccattaggaattgacgtaggcaaa

SEQ ID NO: 137953 - DNA, 75 bp, synthetic construct
  source 1..75: mol_type = other DNA
gtagtgatcgaatgccagaaatgggagagcgacaatactatgtgttagcagctgactttaaaaacaactacccac

SEQ ID NO: 137954 - DNA, 75 bp, synthetic construct
  source 1..75: mol_type = other DNA
gcacagcttaaccgtcagcgtgatgcgctggcgcgtgtcagtgcgcaacaggcaaaacttaacgcagtaaaacag

SEQ ID NO: 137955 - DNA, 75 bp, synthetic construct
  source 1..75: mol_type = other DNA
gtggcaaaagactccgccgaaatggctgcactacgcaagcaggcgcgccagctcggcgacaataccgccgcctcg

SEQ ID NO: 137956 - DNA, 75 bp, synthetic construct
  source 1..75: mol_type = other DNA
actgggtactggaaaaactcggtgttatcaacaaagagtcagacacacttgaccagactgcgtattttcatgaaa

SEQ ID NO: 137957 - DNA, 75 bp, synthetic construct
  source 1..75: mol_type = other DNA
cgccgaaaacatcaagaatcaggtactggaaaaactgggcctgaacagtgaagagcaaaaagaagacaccaacta

SEQ ID NO: 137958 - DNA, 75 bp, synthetic construct
  source 1..75: mol_type = other DNA
tgcagcatcttgcagagcatggcattcaaccagcccggaatatggctgaacatattcctccggcacctaactggc

SEQ ID NO: 137959 - DNA, 75 bp, synthetic construct
  source 1..75: mol_type = other DNA
actattggttcataagatggccagggctttattgccgctggtggctgaaaagcatgaggtggaccatgccaacga

SEQ ID NO: 137960 - DNA, 75 bp, synthetic construct
  source 1..75: mol_type = other DNA
actggaagcagaaccagttgcttatattttcaaacatccggccgggaaattattctgggctttaacggatgaaag

SEQ ID NO: 137961 - DNA, 75 bp, synthetic construct
  source 1..75: mol_type = other DNA
gtaagtcttacggctggactgagtgcgataccttcgaagggtattacgattggtcgagaaacaaatggtgggcag

SEQ ID NO: 137962 - DNA, 75 bp, synthetic construct
  source 1..75: mol_type = other DNA
ccggaaactttcgggaaaataaagattcgtcaaccaataattttcggaaaatcccggaagcgtcaaccagctctc

SEQ ID NO: 137963 - DNA, 75 bp, synthetic construct
  source 1..75: mol_type = other DNA
cgcatattgctgaccaactggctctcttgcaggataaagttgcgccttttgatggcgaactggcgaagcaacaga

SEQ ID NO: 137964 - DNA, 75 bp, synthetic construct
  source 1..75: mol_type = other DNA
tcaacccgccgcgatctttttccaccgcatattgccgatcagctggcgttattgcaggacaaagttgctccgttt

SEQ ID NO: 137965 - DNA, 75 bp, synthetic construct
  source 1..75: mol_type = other DNA
tatatttcatcattcgcacttttttaagctacggacttgatgaactgatccccaaaatgcgtatcaccctgccgc

SEQ ID NO: 137966 - DNA, 75 bp, synthetic construct
  source 1..75: mol_type = other DNA
tgatccgtacactgagcactgtaccactgagaacagaggagcgttacagctttctggctgatgtcgtaacgatcc

SEQ ID NO: 137967 - DNA, 75 bp, synthetic construct
  source 1..75: mol_type = other DNA
gctgacttaaatgcatgggtcgataatgatatttgttataacgctgtcatagcaagggcctctctctcagccaaa

SEQ ID NO: 137968 - DNA, 75 bp, synthetic construct
  source 1..75: mol_type = other DNA
acccggaaaacccgaaatatatcggcattgattgcgggattgttggctcgctaaacaaagaagataaacgctatc

SEQ ID NO: 137969 - DNA, 75 bp, synthetic construct
  source 1..75: mol_type = other DNA
accctgattactaatctcgatctgttcgatgtgcaatatcatacagaaaacagcattcttcttaccgacctgatt

SEQ ID NO: 137970 - DNA, 75 bp, synthetic construct
  source 1..75: mol_type = other DNA
gcgttaatactgcggtagtaactccatttgcttatgagaatgcacttaataccctgattactaatctcgatctgt

SEQ ID NO: 137971 - DNA, 75 bp, synthetic construct
  source 1..75: mol_type = other DNA
atttggcaactatcaacagcgtgaccagtcgtgatctggaacaatacagccgcaagaatatgtctaccgctgatt

SEQ ID NO: 137972 - DNA, 75 bp, synthetic construct
  source 1..75: mol_type = other DNA
gagatgctggcagtcgcgacccgggaagggtttgatgtcagtaaatttatttgggtacagcagcctggtagttag

SEQ ID NO: 137973 - DNA, 75 bp, synthetic construct
  source 1..75: mol_type = other DNA
aataaaggctataaccctgacagagaaatgtggcagcagagtgaagggaaagcgtactttaccggcgcaccaact

SEQ ID NO: 137974 - DNA, 75 bp, synthetic construct
  source 1..75: mol_type = other DNA
aggctaaaaccacggtacccgctatcgactttgcatcgactactgttaacccgttccttgctattcgtaaagcgg

SEQ ID NO: 137975 - DNA, 75 bp, synthetic construct
  source 1..75: mol_type = other DNA
atgaaaaagttaaaatcattaatattactctcctctgtgatctcgacttccgtatttgctggagcgtatgtcgaa

SEQ ID NO: 137976 - DNA, 75 bp, synthetic construct
  source 1..75: mol_type = other DNA
aaattgaaggttggtatcctttattcaaaccaaccgataaattaaccatccagcccggtggcttaattaatgata

SEQ ID NO: 137977 - DNA, 75 bp, synthetic construct
  source 1..75: mol_type = other DNA
gaagatgaactaaaacatggatataacgaaatcgaaggttggtatccgttatttaaaccaaccgataaattaacc

SEQ ID NO: 137978 - DNA, 75 bp, synthetic construct
  source 1..75: mol_type = other DNA
gaagtgaatctattaagaacgtggggaaccctggcaccatttttgtaaccggctcatttaaaccgtctggtctgt

SEQ ID NO: 137979 - DNA, 75 bp, synthetic construct
  source 1..75: mol_type = other DNA
agaatgaaggtaagagtaaggaggttgtttctaaatttattacagattgcgatgtgtctgaatcaatctactctt

SEQ ID NO: 137980 - DNA, 75 bp, synthetic construct
  source 1..75: mol_type = other DNA
gccagttatggatccctgaaggatttgcacatggatttttggtgctgagtgagacggcagagtttttgtataaga

SEQ ID NO: 137981 - DNA, 75 bp, synthetic construct
  source 1..75: mol_type = other DNA
gcgatgtgaagattattgagccaaaagtctttggtgatgaacgagggttctttttagaaacatttgaaaaaaaga

SEQ ID NO: 137982 - DNA, 75 bp, synthetic construct
  source 1..75: mol_type = other DNA
cgttatcgcctgggtgaaaccggtgatgccatcgccaaacaaacccgtgtcgcggcggcgcgtgccgatgagtat

SEQ ID NO: 137983 - DNA, 75 bp, synthetic construct
  source 1..75: mol_type = other DNA
cgctgagcgactgcgcgctgtcgctgtcggagaaagatctacaggcacatactctggccaccgcggaagtatata

SEQ ID NO: 137984 - DNA, 75 bp, synthetic construct
  source 1..75: mol_type = other DNA
ccagaggttgatataaaatggccaataatgacgcttcctatattgtcggaaaaggacatggtaggaaaaagatta

SEQ ID NO: 137985 - DNA, 75 bp, synthetic construct
  source 1..75: mol_type = other DNA
cggacgtcaaaatcattgagcccacggtatttggtgatgagcgtggctttttcatggaaacctggcaacagaaaa

SEQ ID NO: 137986 - DNA, 75 bp, synthetic construct
  source 1..75: mol_type = other DNA
tcacgttccagcaaaggcgtacttcgtgggcttcactttcagcgcaataatcctcaggggaaacttgttcgagta

SEQ ID NO: 137987 - DNA, 75 bp, synthetic construct
  source 1..75: mol_type = other DNA
ttcttggtcatgggcttgcttacagtagaacagtatcaggagtagaggctatcaaacggtctttaggcgctggtc

SEQ ID NO: 137988 - DNA, 75 bp, synthetic construct
  source 1..75: mol_type = other DNA
cgtatgttgcagaaggtgaaccctgaaacggagttcagtgcgggtgaggttaaaacgctatcattttctaagagt

SEQ ID NO: 137989 - DNA, 75 bp, synthetic construct
  source 1..75: mol_type = other DNA
caattttgctctgccaggttgtgatacatgtgcatatcaaccattttgcggtgcagatccatgccagaacataag

SEQ ID NO: 137990 - DNA, 75 bp, synthetic construct
  source 1..75: mol_type = other DNA
ggggattgttgataagcatctgacacagaacagtggtgaatatcttctggcacagtctaataacatcattcggaa

SEQ ID NO: 137991 - DNA, 75 bp, synthetic construct
  source 1..75: mol_type = other DNA
atggaattgatgccattcaattttgacagattgcctaatggacaggtgtttataagcaacctcgctggttttcat

SEQ ID NO: 137992 - DNA, 75 bp, synthetic construct
  source 1..75: mol_type = other DNA
ttcttggtcatgggcttgcttacagtagaacagtgtcaggggtagaggctatcaaacggtctttaggcgctggtc

SEQ ID NO: 137993 - DNA, 75 bp, synthetic construct
  source 1..75: mol_type = other DNA
aaacaggtgcgaaaggaagcgccttaaatcactctgattacatatccagatccggcgattataagaaatacaaat

SEQ ID NO: 137994 - DNA, 75 bp, synthetic construct
  source 1..75: mol_type = other DNA
aagaatacgcacggcgtatacagcaatctttggctagaggaatgttaaatagtaaggagcgtgatcagggtattg

SEQ ID NO: 137995 - DNA, 75 bp, synthetic construct
  source 1..75: mol_type = other DNA
aacgcaatgctttgaatgggattcgtggcctgtttcggggggctgacaaaagggagattgatgcgcgtattctgg

SEQ ID NO: 137996 - DNA, 75 bp, synthetic construct
  source 1..75: mol_type = other DNA
tacggtagtgatgaaagtcgtatgcttcagaaagtaaacccggaagcagatttcagtgcaggagagtttgcctca

SEQ ID NO: 137997 - DNA, 75 bp, synthetic construct
  source 1..75: mol_type = other DNA
acaggatgcctgacggccgggtattcatcagtaacctcgctggctttcatcattttttaggagagcaggaatttc

SEQ ID NO: 137998 - DNA, 75 bp, synthetic construct
  source 1..75: mol_type = other DNA
aaatcggtggtggacgaggtacagtacctgctgaatgccgtgctgatccggggggcgcagcggattccgctggaa

SEQ ID NO: 137999 - DNA, 75 bp, synthetic construct
  source 1..75: mol_type = other DNA
ggagcgattccggctacatccaacatttcatcaacgtgatcgagaggatatcgacccgctaataaatgatgcgtt

SEQ ID NO: 138000 - DNA, 75 bp, synthetic construct
  source 1..75: mol_type = other DNA
cttgagatccataaatgctctgaattatttacaggttccgtctatcgactggagcgattccggctacatccaaca

SEQ ID NO: 138001 - DNA, 75 bp, synthetic construct
  source 1..75: mol_type = other DNA
tttgcggaagctatccacgcgaaatatccgggcaaactgctggcttataactgctcgccgtcgttcaactggcag

SEQ ID NO: 138002 - DNA, 75 bp, synthetic construct
  source 1..75: mol_type = other DNA
tactgaccaatttactctggggattgctgaccgacccgatcgccgccgcatttgcgcccgtcgcgatggtcatcg

SEQ ID NO: 138003 - DNA, 75 bp, synthetic construct
  source 1..75: mol_type = other DNA
aggcactggtgttgatcgttatctctatcgccatcaatatgatcggcgggcaactggccagcatggtcaaattac

SEQ ID NO: 138004 - DNA, 75 bp, synthetic construct
  source 1..75: mol_type = other DNA
aaagtcgttgtcagcggcgtgattattacgcttgcggtaacggtcgtcgctgtaccgctgcgtactgcgctgttc

SEQ ID NO: 138005 - DNA, 75 bp, synthetic construct
  source 1..75: mol_type = other DNA
aacagcggagagtacctgctgccccaatcgaacaagattaaacgcgccgatggtaagcgtggcccgtggtactcg

SEQ ID NO: 138006 - DNA, 75 bp, synthetic construct
  source 1..75: mol_type = other DNA
cagaaagcgaaaactgaagcattcagaacctacagcaaaggcgcggggatgaaggaactatcagagtatgtggag

SEQ ID NO: 138007 - DNA, 75 bp, synthetic construct
  source 1..75: mol_type = other DNA
atagcgttttgccaacagctacagatcggcagtgcttccactctttgagagggatgttcatcacctgcctggacc

SEQ ID NO: 138008 - DNA, 75 bp, synthetic construct
  source 1..75: mol_type = other DNA
aaaaaaggctacatcaacagcctcggcgcactgactggcggtcaggcgctgcaacaggcgaaagcgggtattgaa

SEQ ID NO: 138009 - DNA, 75 bp, synthetic construct
  source 1..75: mol_type = other DNA
gtgaaggcttcttccgtactcatgcgggcattgagcaagcgatcagccgtggcctggcgtatgcgccatatgctg

SEQ ID NO: 138010 - DNA, 75 bp, synthetic construct
  source 1..75: mol_type = other DNA
aacaccttccgtcgagctgatcagatccagtggtccgcaggtattgagccgggcgatccgcgttatgttgattat

SEQ ID NO: 138011 - DNA, 75 bp, synthetic construct
  source 1..75: mol_type = other DNA
aagaaggaaataaaccgccgaaatccgcgcgacagattttccagtatctgcgcgaattagcggaaaacgacgggt

SEQ ID NO: 138012 - DNA, 75 bp, synthetic construct
  source 1..75: mol_type = other DNA
tgggtcagtaaaagtgaaattaaacgcgatgccgaggagttaaaacgcctgggtgcggaaattgtagatctgggg

SEQ ID NO: 138013 - DNA, 75 bp, synthetic construct
  source 1..75: mol_type = other DNA
tccgaccatttcagccatgtttcggtgatgcgaaaagtgctgctgagaatgaccagttggatgcattatttgtat

SEQ ID NO: 138014 - DNA, 75 bp, synthetic construct
  source 1..75: mol_type = other DNA
tatctcgcgtatcaccgtatctcattcgaagcattgaccgctgaagatccagaagaatttaaagcccgcgctaaa

SEQ ID NO: 138015 - DNA, 75 bp, synthetic construct
  source 1..75: mol_type = other DNA
tttgaatttgtcaaagaaaccaaaattggcaaaatcagtaagaaggctgtgatttataacagtgaggttttcgaa

SEQ ID NO: 138016 - DNA, 75 bp, synthetic construct
  source 1..75: mol_type = other DNA
cgcgaatgaatttgataagtatgtaatcccggttacgcctgataataaggccattgatgaaagcctgaaaacagc

SEQ ID NO: 138017 - DNA, 75 bp, synthetic construct
  source 1..75: mol_type = other DNA
agttacttcaggctggccctttaaagtcaacattaacactgaaactccataccagttatgcaatccggctatggg

SEQ ID NO: 138018 - DNA, 75 bp, synthetic construct
  source 1..75: mol_type = other DNA
gccgaacgcctgttgggtatcgctgtgtctggcttttaattggtgttgatcaattagctttaaaagttcttcagg

SEQ ID NO: 138019 - DNA, 75 bp, synthetic construct
  source 1..75: mol_type = other DNA
accgttgatggtcagggctcgaccggaactgaaatcgcgggtaataacgcggtggtgaaccaggacggcgagctg

SEQ ID NO: 138020 - DNA, 75 bp, synthetic construct
  source 1..75: mol_type = other DNA
gtgccaggtggttcgtatcaggcgcagggggtactgcaatcattaaccgtcgtacccggcacggacggtgtgctg

SEQ ID NO: 138021 - DNA, 75 bp, synthetic construct
  source 1..75: mol_type = other DNA
tgtacccggcacggacggtgtgctgggaaccatcgaactggaccctaacgctgatattgatgccttacctgacgg

SEQ ID NO: 138022 - DNA, 75 bp, synthetic construct
  source 1..75: mol_type = other DNA
ggcagccaggcggcggtgaatccgttctcggaacgtgacatcgacgatgcgcggcaaaatttcctcgcgcaggac

SEQ ID NO: 138023 - DNA, 75 bp, synthetic construct
  source 1..75: mol_type = other DNA
atccgacattaacaatattaaagaaatttattctgatgatgagttaaaccgtttactggaagctgttaatcagaa

SEQ ID NO: 138024 - DNA, 75 bp, synthetic construct
  source 1..75: mol_type = other DNA
atatttttgggtgaaactgcaagagctacatgaggcatggtttaataaaaaaagtaatggtattcaattagattg

SEQ ID NO: 138025 - DNA, 75 bp, synthetic construct
  source 1..75: mol_type = other DNA
tctcgattattttcaatacagatgcatctttttgggtgaaactgcaagagctacgtgaattgcaactgtttctgt

SEQ ID NO: 138026 - DNA, 75 bp, synthetic construct
  source 1..75: mol_type = other DNA
catgagttactggcagaaatggcgcaggaacggcagcaacaggaggaaaaggcactgcgtatacagcgatcctgg

SEQ ID NO: 138027 - DNA, 75 bp, synthetic construct
  source 1..75: mol_type = other DNA
gagatcgcgttaccgcgtgaactgacacgcgaacaacggatagaacttgttgaagatttcgtgcaaaaggaactt

SEQ ID NO: 138028 - DNA, 75 bp, synthetic construct
  source 1..75: mol_type = other DNA
atgttactcaccgatctccttcacggtaatacgcagaaaaatggcacgattggtattaccggcctgatgcaggga

SEQ ID NO: 138029 - DNA, 75 bp, synthetic construct
  source 1..75: mol_type = other DNA
tatcgtttcttattgctcatgaaggaaagcctccagttgaagcaatcgttgcattactgggtacaagtacaatta

SEQ ID NO: 138030 - DNA, 75 bp, synthetic construct
  source 1..75: mol_type = other DNA
ctccggacgactggacagcaaaatcactgaaccggtatggggtggtgtcggtgttatcgagtgcatcgctcccgc

SEQ ID NO: 138031 - DNA, 75 bp, synthetic construct
  source 1..75: mol_type = other DNA
cgggtggctttgttcactattaccgcgttggctcaggtgcccgcattcctctccctgtcagtgcagaagttgttg

SEQ ID NO: 138032 - DNA, 75 bp, synthetic construct
  source 1..75: mol_type = other DNA
caactgtcggagagattttatacgaagaattcttgaaaccattggatatgcctcccgcaagacttgctgaactga

SEQ ID NO: 138033 - DNA, 75 bp, synthetic construct
  source 1..75: mol_type = other DNA
tgaagtgttcaatcctgaagaccgtgcgtacgacaaagtgaccgtcacggttggtgctgacggtaatgccaccgg

SEQ ID NO: 138034 - DNA, 75 bp, synthetic construct
  source 1..75: mol_type = other DNA
cgctattcttatcatacacagaaaactggatactaaattctcttaccaattatgcctcaaaatgttttatcttaa

SEQ ID NO: 138035 - DNA, 75 bp, synthetic construct
  source 1..75: mol_type = other DNA
tggaagtgaatgccgctcagcagaaaaggctttttttaatatagtcaaaaagaataagcatggtttcttacctaa

SEQ ID NO: 138036 - DNA, 75 bp, synthetic construct
  source 1..75: mol_type = other DNA
gcatttttgaatcagtgctcaacggcggatccggctgctatctcaaaaattatgagtaagttcggtaagattaag

SEQ ID NO: 138037 - DNA, 75 bp, synthetic construct
  source 1..75: mol_type = other DNA
tttttgaatcagtgctcaacggcggatccggctgctatctcaaaaattatgagtaagttcggtaagattaagggg

SEQ ID NO: 138038 - DNA, 75 bp, synthetic construct
  source 1..75: mol_type = other DNA
tttcgttaacgtcaatttcaccctgccgaaagagggcgagaaatatgttccgccagaggggcaatcactgcgcga

SEQ ID NO: 138039 - DNA, 75 bp, synthetic construct
  source 1..75: mol_type = other DNA
aaattgtcgcccagttccggcaaaactcgctgttgcgtctgaaacccggcgatgatgcggaagtggtatttaacg

SEQ ID NO: 138040 - DNA, 75 bp, synthetic construct
  source 1..75: mol_type = other DNA
ggaaccattgaactggaccctaacgatgatatcgatgccttacccgacggcatctacgcccaggtggtaagcggc

SEQ ID NO: 138041 - DNA, 75 bp, synthetic construct
  source 1..75: mol_type = other DNA
acgcgattgtcggtgcgtttgtcgccgcactcctgttcgaagcaggaaaaaaaggtttcgcgctttatatcacca

SEQ ID NO: 138042 - DNA, 75 bp, synthetic construct
  source 1..75: mol_type = other DNA
agattgaagaaacccgctggcgtaacatgtgggactggggcatcttcattggtagcttcgttccgccgttggtga

SEQ ID NO: 138043 - DNA, 75 bp, synthetic construct
  source 1..75: mol_type = other DNA
agccttgggatggcgattttgcaaggtggcgtctggttacaactgaaaactgttggtgtgattcatctgcgttca

SEQ ID NO: 138044 - DNA, 75 bp, synthetic construct
  source 1..75: mol_type = other DNA
atgactggaaaaaatagagtggttttatctgtctttctggcgttaggattaatatcaacaaatgctaatgcatct

SEQ ID NO: 138045 - DNA, 75 bp, synthetic construct
  source 1..75: mol_type = other DNA
gccccaaaatttattcgtttgctgtgtactggatgatcctgacgctggggccgctgctggcgggggccagtctgg

SEQ ID NO: 138046 - DNA, 75 bp, synthetic construct
  source 1..75: mol_type = other DNA
ccaggcatcgtacccgtccgctatgggcctggctgaaactactctggcaacgcattaatgaggacaacatgacaa

SEQ ID NO: 138047 - DNA, 75 bp, synthetic construct
  source 1..75: mol_type = other DNA
gctttttagagacgtacttagttcagggccatttagtcaacatgggaaagtattatctacaggtctaaaggaagc

SEQ ID NO: 138048 - DNA, 75 bp, synthetic construct
  source 1..75: mol_type = other DNA
ttcctgccatcggttcaaagcctatcgatacgctcaaaacccgtgacttgatgccgatgctggttgagatgactg

SEQ ID NO: 138049 - DNA, 75 bp, synthetic construct
  source 1..75: mol_type = other DNA
gtggtcgccccggttggggatttctgctgacgtcattgatgcaatttggcgtgattttcacggcaggcatcacgc

SEQ ID NO: 138050 - DNA, 75 bp, synthetic construct
  source 1..75: mol_type = other DNA
aaattgccgatgcacgctggcgtaaaatgtgggatgccggtctggtcatcggcagtctggtgccgccggtagtct

SEQ ID NO: 138051 - DNA, 75 bp, synthetic construct
  source 1..75: mol_type = other DNA
cttctgaagacgaagaaaatactgtggaagaaagcgaagagaaagccggtttaagagagcgtgtcaaaaatgcac

SEQ ID NO: 138052 - DNA, 75 bp, synthetic construct
  source 1..75: mol_type = other DNA
ttttcataaacgttggtttgggagaaggctctgcattacctgttggtgtccctgttccatggccttccgccactc

SEQ ID NO: 138053 - DNA, 75 bp, synthetic construct
  source 1..75: mol_type = other DNA
gccctgactaccacgttgaatatgcccgtcactggtactccgttccacacgaactggtcggtcagcgtctgtcac

SEQ ID NO: 138054 - DNA, 75 bp, synthetic construct
  source 1..75: mol_type = other DNA
gcaacgggaaacgcctcagacttacgacgaactgtcgttcgaggaaaggctgacactgctggttgatgacgagct

SEQ ID NO: 138055 - DNA, 75 bp, synthetic construct
  source 1..75: mol_type = other DNA
gtttatcgatgagccgccagcaggtaagtatcgtggagtggatgatgcaggtatgccctgctggcttgaaattcc

SEQ ID NO: 138056 - DNA, 75 bp, synthetic construct
  source 1..75: mol_type = other DNA
attgatggcttcgtattgctcgctcaggatgttaacggtccatccaatccgttaatgaaactggttgtggtattg

SEQ ID NO: 138057 - DNA, 75 bp, synthetic construct
  source 1..75: mol_type = other DNA
ttgaatcgccgattttgtggatcttcccgctgctgggttttttctgcccattactgacggtgatggctatttatc

SEQ ID NO: 138058 - DNA, 75 bp, synthetic construct
  source 1..75: mol_type = other DNA
ggtcatctgggcggcgccagccagcgggcgcgggagttaatgctgttatgcgaggcggcaggttatgacgtggtg

SEQ ID NO: 138059 - DNA, 75 bp, synthetic construct
  source 1..75: mol_type = other DNA
cgcacaccggacaggccgcaaaagcagcgatgaccgttgctgcgctgtgtgaaaaacataacgttgaactggtag

SEQ ID NO: 138060 - DNA, 75 bp, synthetic construct
  source 1..75: mol_type = other DNA
cccggaacaggttgacgctgccgttcgcctgcttgacgaagggaataccgtgccgtttatcgcacgttatcgtaa

SEQ ID NO: 138061 - DNA, 75 bp, synthetic construct
  source 1..75: mol_type = other DNA
aaagcgtctgactttactgatgaaaaattcggtgtgccgacagtaactgacatcatcaaagagctggaaaaaccg

SEQ ID NO: 138062 - DNA, 75 bp, synthetic construct
  source 1..75: mol_type = other DNA
gcgggcttcctgcgtattaaccacggtgataacccgcttgacgcttctaccgttcacccggaagcctatccggtg

SEQ ID NO: 138063 - DNA, 75 bp, synthetic construct
  source 1..75: mol_type = other DNA
acgtctttgcccgtaacctgcacgatctgctgatggcagcccctgccggactgcgtgcgacgatggggctcgatc

SEQ ID NO: 138064 - DNA, 75 bp, synthetic construct
  source 1..75: mol_type = other DNA
gaagacctctatctgccctacaaacctaaacgtcgcacccgtgggcaaatcgccattgaagcaggtcttgagccg

SEQ ID NO: 138065 - DNA, 75 bp, synthetic construct
  source 1..75: mol_type = other DNA
tgataaatttgacagaagaacgctgcatgtagatttttgtgatctcgactcagcctttttcttgtattacctttc

SEQ ID NO: 138066 - DNA, 75 bp, synthetic construct
  source 1..75: mol_type = other DNA
atggcgcgtcgccacttttccagtcaagcactggtgttgattgttatctctatcgccatcaatatgattggcggg

SEQ ID NO: 138067 - DNA, 75 bp, synthetic construct
  source 1..75: mol_type = other DNA
aatggggcaaaacctggtggaatcagtggcgattacggtgataggcgctaacctggtcgataaaattctcacggc

SEQ ID NO: 138068 - DNA, 75 bp, synthetic construct
  source 1..75: mol_type = other DNA
aaatcgatccgaaatctatcggtgtgggtcagtatcaacatgacgtcagccagacgcagctggctcgtaaactgg

SEQ ID NO: 138069 - DNA, 75 bp, synthetic construct
  source 1..75: mol_type = other DNA
acgtctttgcccgtaacctgcacgatctgttgatggcagccccagccggattgcgtgcgacgatgggtctcgatc

SEQ ID NO: 138070 - DNA, 75 bp, synthetic construct
  source 1..75: mol_type = other DNA
aatataacggcgtgtccgtcaccctttccgaactgtctgcgctgcagcgtattgagcatcttgccctcctgaaac

SEQ ID NO: 138071 - DNA, 75 bp, synthetic construct
  source 1..75: mol_type = other DNA
ggatgatcgaggctgttcgtccggatactgatattactgaagtggcgaaaaataacacgctgactgatgatgatt

SEQ ID NO: 138072 - DNA, 75 bp, synthetic construct
  source 1..75: mol_type = other DNA
acgacctttacgacggcactgcctggctgcaagcgttgacctttggttaccgggcggctgatgtagtggatttgc

SEQ ID NO: 138073 - DNA, 75 bp, synthetic construct
  source 1..75: mol_type = other DNA
cgggcggctgacgtagtggatttgcgtctggaaggcacctgggttaaagccgacggtcagcagggatacttcctg

SEQ ID NO: 138074 - DNA, 75 bp, synthetic construct
  source 1..75: mol_type = other DNA
atgtttctgaaaacagaacaatttgaatataacggtgtgtccgtcacgctttccgagctgtctgcgctgcagcgt

SEQ ID NO: 138075 - DNA, 75 bp, synthetic construct
  source 1..75: mol_type = other DNA
atcttcagcgtaaacgtatcgcgctgaccatgcgtctggacgagcaaccaggtgaaaccaacacccgtcgcggcg

SEQ ID NO: 138076 - DNA, 75 bp, synthetic construct
  source 1..75: mol_type = other DNA
aggtcagtatcagcatgacgtcagccagacgcagctggcccgcaaactggatgcagtagtagaagactgcgtaaa

SEQ ID NO: 138077 - DNA, 75 bp, synthetic construct
  source 1..75: mol_type = other DNA
gtacagaaacagttcccgaaagtcactgcgcagaaagtgatcgtcagcgaagcaggcgcatcagtttactccgct

SEQ ID NO: 138078 - DNA, 75 bp, synthetic construct
  source 1..75: mol_type = other DNA
agcaattgttaaaagttagccgtttagggcctaaagccttcgagcagtgtgcgggcttcctgcgtattaaccacg

SEQ ID NO: 138079 - DNA, 75 bp, synthetic construct
  source 1..75: mol_type = other DNA
caagatccgctggcggagctggtgaaaatcgatccgaaatccatcggcgtgggtcagtatcagcatgacgtcagc

SEQ ID NO: 138080 - DNA, 75 bp, synthetic construct
  source 1..75: mol_type = other DNA
caatgctccggcggatagctggcgcaaaggcgtggtgagctggacctggcgcatcaaggtgctgatgcatctgga

SEQ ID NO: 138081 - DNA, 75 bp, synthetic construct
  source 1..75: mol_type = other DNA
gaaactggcgcaactggtggcggtgctggcgcagtttgaacaacatattgaggatgactcgccactggctgaggt

SEQ ID NO: 138082 - DNA, 75 bp, synthetic construct
  source 1..75: mol_type = other DNA
aaagacctacaaaaagcgatgttccgccagcagagtttcccgtcagtggtgatgaatccccaggatgcgcatagc

SEQ ID NO: 138083 - DNA, 75 bp, synthetic construct
  source 1..75: mol_type = other DNA
tgttgaagtgcctgcgggcgttacggcgattatcaacggtaacgagcagcagtggctggtgctggagtctgctgc

SEQ ID NO: 138084 - DNA, 75 bp, synthetic construct
  source 1..75: mol_type = other DNA
aagcggctcgcaattactggtctgctcttgatggcgacaagaaaaatagcttccgttttcatcatatttctactg

SEQ ID NO: 138085 - DNA, 75 bp, synthetic construct
  source 1..75: mol_type = other DNA
tcaccaactgctcgaataactacggtccttaccactttccggaaaaactgatcccgctgatgactgtattgcgtg

SEQ ID NO: 138086 - DNA, 75 bp, synthetic construct
  source 1..75: mol_type = other DNA
atgcttctaccagcccgttctacccgctgtttgccgcgctggacgttaacgccaaaattcatgaaggagagagtg

SEQ ID NO: 138087 - DNA, 75 bp, synthetic construct
  source 1..75: mol_type = other DNA
ttccgtttccatcacatctccaccgacgaagtgtatggcgatctgccgcacccggatgaagtgagcgcaggtaca

SEQ ID NO: 138088 - DNA, 75 bp, synthetic construct
  source 1..75: mol_type = other DNA
gttatataccgtcgtaaccgaaggtaaagcgggcgaaacttataacattggtggacacaacgaaaagaaaaacat

SEQ ID NO: 138089 - DNA, 75 bp, synthetic construct
  source 1..75: mol_type = other DNA
cgtgatgttgggcttgcatcgggagagcctgatgtaagagggggattccctccgagtgtttttcctcgttaccca

SEQ ID NO: 138090 - DNA, 75 bp, synthetic construct
  source 1..75: mol_type = other DNA
acaggcgcgtttttgcccgcataagcggttgaataatgcctttatgctccatgcttctaccagcccgttctaccc

SEQ ID NO: 138091 - DNA, 75 bp, synthetic construct
  source 1..75: mol_type = other DNA
aaaacgatccggggatctttgtgactcagtcggtgcacaaacagcaggcgggattctcacagacgtcgcagatcc

SEQ ID NO: 138092 - DNA, 75 bp, synthetic construct
  source 1..75: mol_type = other DNA
ttgcgcacctatggtttcccgaccattgtcaccaactgttcaaataactatggcccgtatcatttccctgaaaaa

SEQ ID NO: 138093 - DNA, 75 bp, synthetic construct
  source 1..75: mol_type = other DNA
aaaaagttgggctcaaaaaaacagtaaagtactatgccaactttttgaaaaagcacgtgaaagttaccacagata

SEQ ID NO: 138094 - DNA, 75 bp, synthetic construct
  source 1..75: mol_type = other DNA
accctggcaggtatccacagcatgtggttcaacatgtttgacctggcaaacgcctatgcccagggcgagggtatg

SEQ ID NO: 138095 - DNA, 75 bp, synthetic construct
  source 1..75: mol_type = other DNA
tgcctttgaactgatgaaagcgatgattgaagccggtgcagcggcagttcacttcgaagatcagctggcatcagt

SEQ ID NO: 138096 - DNA, 75 bp, synthetic construct
  source 1..75: mol_type = other DNA
aagaaattatatcaagagataattaaggtaaacccaatacatactgatagctattatgggttggctgatgtttat

SEQ ID NO: 138097 - DNA, 75 bp, synthetic construct
  source 1..75: mol_type = other DNA
caaaggtattttatttgttaatataatatcttatctgctgctaacaattgcgataagaaaaggtcattcgaaaga

SEQ ID NO: 138098 - DNA, 75 bp, synthetic construct
  source 1..75: mol_type = other DNA
ccaatgagcagataaataaaatcatgcgaaaaggtaatacaaaagaagatacctggtatatctttaatggggtta

SEQ ID NO: 138099 - DNA, 75 bp, synthetic construct
  source 1..75: mol_type = other DNA
catttagttcgtgcttggtacagaacttgggggcttcctgtaatagtaacgaattgttccaataattatggtccc

SEQ ID NO: 138100 - DNA, 75 bp, synthetic construct
  source 1..75: mol_type = other DNA
cccgtttgagtttatacagaccaatatcataggcacctttatcttacttgaaatagccaagtcttactggctgca

SEQ ID NO: 138101 - DNA, 75 bp, synthetic construct
  source 1..75: mol_type = other DNA
gggattcgtaaaacggtggaatggtatctggctaatacaaattgggttgagaatgtgaaaagcggtgcttatcag

SEQ ID NO: 138102 - DNA, 75 bp, synthetic construct
  source 1..75: mol_type = other DNA
gggcgtgaagcgcagcctgccggtaacagcgcgatgatggatgcgctggcggcagcaatgggcaaaaaacgttaa

SEQ ID NO: 138103 - DNA, 75 bp, synthetic construct
  source 1..75: mol_type = other DNA
ctgctggcgaaagtgcgtgattatctgtggaagaacgcgcatctggtctcaaccgtggtgagcggtaaagaagag

SEQ ID NO: 138104 - DNA, 75 bp, synthetic construct
  source 1..75: mol_type = other DNA
cgatcggcaacggtacagcttcccgcgaaaccgagcgtttctatctcgacgtgcagaagcagttcccgaaagtga

SEQ ID NO: 138105 - DNA, 75 bp, synthetic construct
  source 1..75: mol_type = other DNA
catgtggtgctctccgataccggcgacgcgctgctggcgaacgaagcggtgagaagcgcgtatttaggcgggtaa

SEQ ID NO: 138106 - DNA, 75 bp, synthetic construct
  source 1..75: mol_type = other DNA
ctggcgatgggcggtttttttgccgaacgcgaccagttccaggagcgcataaagtgggtgtatgaactgtttcca

SEQ ID NO: 138107 - DNA, 75 bp, synthetic construct
  source 1..75: mol_type = other DNA
gggcaggcaccatgtccggcggtgaacagcagatgctggcgattggtcgcgctttgatgagtaacccacgtttgc

SEQ ID NO: 138108 - DNA, 75 bp, synthetic construct
  source 1..75: mol_type = other DNA
acagcagatgctggcgattggtcgtgcgctgatgagcaacccgcgtttgttgttgcttgatgagccatcgctcgg

SEQ ID NO: 138109 - DNA, 75 bp, synthetic construct
  source 1..75: mol_type = other DNA
gcgttgatgagcaatccgcgcttgttactgcttgatgaaccttcgctcggactggcgccgattatcatccagcaa

SEQ ID NO: 138110 - DNA, 75 bp, synthetic construct
  source 1..75: mol_type = other DNA
cgtctgcatgagcgccgtgttcagcgggcgggaacgatgtccggtggtgaacagcagatgctggcgattggtcgt

SEQ ID NO: 138111 - DNA, 75 bp, synthetic construct
  source 1..75: mol_type = other DNA
aaattcgatagcaccgatgatgcggcattcgaagcattaaaaaaacaaatggacattcaatatgccaaggtgttg

SEQ ID NO: 138112 - DNA, 75 bp, synthetic construct
  source 1..75: mol_type = other DNA
gtgaggccgatgcgttaacccgcagccagcgcgaacaaagcatcgctttactggcaaaaacgatgggcttaccgg

SEQ ID NO: 138113 - DNA, 75 bp, synthetic construct
  source 1..75: mol_type = other DNA
ctctgttgcacgcacggttctgcgggccgtccgtgactcggtggtctctgttgcccgcgcagtatggaactggat

SEQ ID NO: 138114 - DNA, 75 bp, synthetic construct
  source 1..75: mol_type = other DNA
agactcaacgcctgtctgacgctgctccagcccacgctgttagaacctgtccctccccatctggttgaaagtctg

SEQ ID NO: 138115 - DNA, 75 bp, synthetic construct
  source 1..75: mol_type = other DNA
ggatgcagccaaaagtggagcagacgataacaggcttattatgtgaactggtctggtattttgccgccgaaatga

SEQ ID NO: 138116 - DNA, 75 bp, synthetic construct
  source 1..75: mol_type = other DNA
ctggcgcaacttcttatcgggcaggggatgcagccaaaagtggagcagacgataacaggcttattatgtgaactg

SEQ ID NO: 138117 - DNA, 75 bp, synthetic construct
  source 1..75: mol_type = other DNA
ttaactccctgatacgccagattaataattttgataaagcattgcagcatgctgcggcgcgtagtgatataactc

SEQ ID NO: 138118 - DNA, 75 bp, synthetic construct
  source 1..75: mol_type = other DNA
cgttattttgcaaccggtgccgcaacccctggcgcagctaatgcggatgcgaccttcaaggttcagtatcaataa

SEQ ID NO: 138119 - DNA, 75 bp, synthetic construct
  source 1..75: mol_type = other DNA
gctctgtccctcagttctacagcggctctggccgctgccacgacggtaaatggtgggaccgttcactttaaaggg

SEQ ID NO: 138120 - DNA, 75 bp, synthetic construct
  source 1..75: mol_type = other DNA
cgctgcgccaggtgtgcaaactgtcagcgcgtaaacagaagcaggtgcaggagtttattggggtgattgccggta

SEQ ID NO: 138121 - DNA, 75 bp, synthetic construct
  source 1..75: mol_type = other DNA
tacggatgggacggcgaccggctgacgacggtacagaccgacaccacgcgtatccagacggtatatcagccgggg

SEQ ID NO: 138122 - DNA, 75 bp, synthetic construct
  source 1..75: mol_type = other DNA
cgacagagtcttgttgattatatcgactcgcttcaacccggcactttcaatcatgagaaagagcatgttaagtct

SEQ ID NO: 138123 - DNA, 75 bp, synthetic construct
  source 1..75: mol_type = other DNA
cctgctctgtgattactgcctggcgctggcgcaggtactggcgggacggtcactgttgccggaaactgaaaaaac

SEQ ID NO: 138124 - DNA, 75 bp, synthetic construct
  source 1..75: mol_type = other DNA
attacgaatgatcttcccgatgtttcacccggtttgagcctgatgcaggatcactctgcgattactgcctggcgc

SEQ ID NO: 138125 - DNA, 75 bp, synthetic construct
  source 1..75: mol_type = other DNA
catgtggtgctctccgataccggcgacgcgctgctggcgaatgaagcggtgagaagtgcgtatttaggcgggtaa

SEQ ID NO: 138126 - DNA, 75 bp, synthetic construct
  source 1..75: mol_type = other DNA
gtgcagattctggacagaacaggaaatgagctgacgctggacggtgcgacatttagtgcacaaacaaccctgaat

SEQ ID NO: 138127 - DNA, 75 bp, synthetic construct
  source 1..75: mol_type = other DNA
tagctttgcagagttcagctgcgggtagcgcaacaaacgttggtgtgcagatcctggacagaacgggtgctgcgc

SEQ ID NO: 138128 - DNA, 75 bp, synthetic construct
  source 1..75: mol_type = other DNA
gcgataccactgttgccacaaaagccgctgttgccttcttaggtacggcaattgatgctacgcatactgatgtac

SEQ ID NO: 138129 - DNA, 75 bp, synthetic construct
  source 1..75: mol_type = other DNA
taacgtacgccggaaacctggaatcacttgctgatgtttctgattctgaacgctatgtttttgaacatgcggata

SEQ ID NO: 138130 - DNA, 75 bp, synthetic construct
  source 1..75: mol_type = other DNA
tacaccggcgaacgcgaagcaggtaaatctgctatcggtgcaggtctgggctctctcgttggcgcgggtattggt

SEQ ID NO: 138131 - DNA, 75 bp, synthetic construct
  source 1..75: mol_type = other DNA
cgcagcggggataacattatcctcaatatgccgaacaatgtgaccttcgacagcagcagcgcgaccctgaaaccg

SEQ ID NO: 138132 - DNA, 75 bp, synthetic construct
  source 1..75: mol_type = other DNA
cagcttacgcgccaagcagcccttattccgcatcaaaagcatccagcgatcatttagtccgtgcgtggaaacgta

SEQ ID NO: 138133 - DNA, 75 bp, synthetic construct
  source 1..75: mol_type = other DNA
gcgttaccgctatttacggaaacgacagcctacgcgccaagtagcccgtattctgcttctaaagcttccagcgat

SEQ ID NO: 138134 - DNA, 75 bp, synthetic construct
  source 1..75: mol_type = other DNA
aaaggggatcaaattcgcgattggctgtatgttgaagatcatgcgcgtgcgttatataccgtcgtaaccgaaggt

SEQ ID NO: 138135 - DNA, 75 bp, synthetic construct
  source 1..75: mol_type = other DNA
aacgtgcggaagtacgtatttttgccggtaatgattcggctcataccgccacaggcagcagcgggatttctcagg

SEQ ID NO: 138136 - DNA, 75 bp, synthetic construct
  source 1..75: mol_type = other DNA
tatcagtcgaccggcaccttacagacgttaaacacagcgccgggttcagatggcgttatcgcgaccattgaactg

SEQ ID NO: 138137 - DNA, 75 bp, synthetic construct
  source 1..75: mol_type = other DNA
acaggcagcagcgggatttcctcggcaacaccggcactgacgcccctgatgctggatgaagccagcgggaaactg

SEQ ID NO: 138138 - DNA, 75 bp, synthetic construct
  source 1..75: mol_type = other DNA
tggcaatggtgctgaaagagtatccgaaaacggcggttaacgtgattggttataccgacagcacgggtggtcacg

SEQ ID NO: 138139 - DNA, 75 bp, synthetic construct
  source 1..75: mol_type = other DNA
gccgcatccgtactcaaggccttggcccggctaacccaatcgccagcaacagcaccgcagaaggtaaggcgcaaa

SEQ ID NO: 138140 - DNA, 75 bp, synthetic construct
  source 1..75: mol_type = other DNA
gggaaactggtggtctgggacggacagaaagccggtagtgcggttggcatactggtactgccgcttgaaggcaca

SEQ ID NO: 138141 - DNA, 75 bp, synthetic construct
  source 1..75: mol_type = other DNA
aatattctggagtcaacccagtaaaaaaggggccgaagcccctttgaattttgcgctgaaaaaagtgttgctagg

SEQ ID NO: 138142 - DNA, 75 bp, synthetic construct
  source 1..75: mol_type = other DNA
gctggatgaagccagcgggaaactggtggtctgggacggacagaaagccggtagtgcagttggcatactggtact

SEQ ID NO: 138143 - DNA, 75 bp, synthetic construct
  source 1..75: mol_type = other DNA
gggggaatgtcggtgtgcaactaggtgataaaggctatagcgatactcagggcatgctgggtgtgaaatatagct

SEQ ID NO: 138144 - DNA, 75 bp, synthetic construct
  source 1..75: mol_type = other DNA
atggcaggtttctgtcccggatgaagcaccattcgacgttcagcatgtcatccagtggatactcccttcaccgct

SEQ ID NO: 138145 - DNA, 75 bp, synthetic construct
  source 1..75: mol_type = other DNA
cagtcatcgcgtaccagacatcctgtatcccccgaaaacggagaaaaaagaatgcaaagacaatctgcaaccaca

SEQ ID NO: 138146 - DNA, 75 bp, synthetic construct
  source 1..75: mol_type = other DNA
cgtgaagcgtcgtaccttcacgctcatcgataaccgtaaccgtcagggatggatcacgcgccgcttccagtgttt

SEQ ID NO: 138147 - DNA, 75 bp, synthetic construct
  source 1..75: mol_type = other DNA
aggtaagatgttgcctatttatggcaaaggggatcaaattcgtgattggctgtatgtagaggatcatgctcgagc

SEQ ID NO: 138148 - DNA, 75 bp, synthetic construct
  source 1..75: mol_type = other DNA
acctgtccaatacaaaatgggttaataatgtgaaaagtggtgcctatcagtcatggattgaacaaaactacgagg

SEQ ID NO: 138149 - DNA, 75 bp, synthetic construct
  source 1..75: mol_type = other DNA
cgatgtagtgctcactatttgtgatttgctggatgagattgtaccgaaagagaaatcttatcgtgagcaaattac

SEQ ID NO: 138150 - DNA, 75 bp, synthetic construct
  source 1..75: mol_type = other DNA
aggcgtatgccgaacaggcacgcaaactgtgcttgctgggctatacagacgccgaacttgctgatttctttgaag

SEQ ID NO: 138151 - DNA, 75 bp, synthetic construct
  source 1..75: mol_type = other DNA
cgatgtagtgctcacgatttgtgatttgttggatgaaattgtaccgaaagaaaaatcttatcgtgagcaaattac

SEQ ID NO: 138152 - DNA, 75 bp, synthetic construct
  source 1..75: mol_type = other DNA
gggattcgcaaaacggttgaatggtatctggcaaacacctcatgggttgaaaatatcaaaagtggggcgtaccaa

SEQ ID NO: 138153 - DNA, 75 bp, synthetic construct
  source 1..75: mol_type = other DNA
ctacgagttctccagactcccgtctgaagtgcaaactgaaattgacgaagcaataaaaaaaatcattgggaaaat

SEQ ID NO: 138154 - DNA, 75 bp, synthetic construct
  source 1..75: mol_type = other DNA
gttgatacggtgcgcgaacgaattgcagagactgagggcgcgcaagaggataaagcgaagatactggctatcttc

SEQ ID NO: 138155 - DNA, 75 bp, synthetic construct
  source 1..75: mol_type = other DNA
cctaaagtccattttgggttatctaaacttgaaaatcatggggatacagataatgaccctgttgatatcaggaca

SEQ ID NO: 138156 - DNA, 75 bp, synthetic construct
  source 1..75: mol_type = other DNA
atgtttctggtttggcaatgaaccatgaagaggagggtgatcggtcagtaaagcgtggtggtgactggcgggtct

SEQ ID NO: 138157 - DNA, 75 bp, synthetic construct
  source 1..75: mol_type = other DNA
attgatattgccgacgcgagacaacttgcaaaagatatacagacagccagagagcatagcctccgagaactagga

SEQ ID NO: 138158 - DNA, 75 bp, synthetic construct
  source 1..75: mol_type = other DNA
gctgaagtacaatcagaaattgatgaagcaataaaacgcatcctcgaaaaactgcctgattttgatgataaaaat

SEQ ID NO: 138159 - DNA, 75 bp, synthetic construct
  source 1..75: mol_type = other DNA
agcaataaaaatttttctgttaatgctgctaaaattgcattattagatctaaaaaaatattggatactaataaaa

SEQ ID NO: 138160 - DNA, 75 bp, synthetic construct
  source 1..75: mol_type = other DNA
gctatgggactcctggtttagctcctattgctggagcgttatttgttgcaacctctatgttcctgagtggaacag

SEQ ID NO: 138161 - DNA, 75 bp, synthetic construct
  source 1..75: mol_type = other DNA
tattgtatattaagtaagtattcgttatgctacgtcgaaaatgctcaaatttcttatgtttttaaagcgtatata

SEQ ID NO: 138162 - DNA, 75 bp, synthetic construct
  source 1..75: mol_type = other DNA
taatgaaataaaagtttgttatttgtatttggttccgttagtttgtatatcttcagtcttgatgtatacatttcg

SEQ ID NO: 138163 - DNA, 75 bp, synthetic construct
  source 1..75: mol_type = other DNA
ttatgaaaatcgtctggtgccgaaaaaagtcgatatccgccaacgcatctggcagcccactcaactggaaggaaa

SEQ ID NO: 138164 - DNA, 75 bp, synthetic construct
  source 1..75: mol_type = other DNA
cagatctgcaagtaaagcgcctcaaacaatatgcatcacaatataaagaattggttggtggttttggcacaaccc

SEQ ID NO: 138165 - DNA, 75 bp, synthetic construct
  source 1..75: mol_type = other DNA
agctttgaagataaatactggtcggaaaagcaacgccgtggacgtattaataaaccacgcatggagtggctagta

SEQ ID NO: 138166 - DNA, 75 bp, synthetic construct
  source 1..75: mol_type = other DNA
tgatgcaaacaatcaattgcaaatggacacgaatcagcctggacatgagtttacattcaagcgaaggaaaccata

SEQ ID NO: 138167 - DNA, 75 bp, synthetic construct
  source 1..75: mol_type = other DNA
atccctactactccgctgcgttattgcagggcggcgtgcgggtgctgaaagatggcaccgatctcaatcaaaccg

SEQ ID NO: 138168 - DNA, 75 bp, synthetic construct
  source 1..75: mol_type = other DNA
gtcggtgtcgagccaccgaaaccaaaagccgaagtgattctggtgcccgaaaacagcccgatcaaaactgtggct

SEQ ID NO: 138169 - DNA, 75 bp, synthetic construct
  source 1..75: mol_type = other DNA
taaaccacgcatggagtggctagtgcatgcgacattgcaatcagaaaggcaacgtgaaattgatctgtctcgtct

SEQ ID NO: 138170 - DNA, 75 bp, synthetic construct
  source 1..75: mol_type = other DNA
atcatatattttgtttattatagtgtgttgccacctatattattcacaccaagagagactttgttctatttcttc

SEQ ID NO: 138171 - DNA, 75 bp, synthetic construct
  source 1..75: mol_type = other DNA
atgaaacagcctgcgcccgtttatcagagaattgcgggtcatcaatggcgacatatctggctttctggcgatata

SEQ ID NO: 138172 - DNA, 75 bp, synthetic construct
  source 1..75: mol_type = other DNA
gacagagaagcctgatgttccaaatctttccaatctcgatatcgatcatcttatgcctcaaagttggtattcctg

SEQ ID NO: 138173 - DNA, 75 bp, synthetic construct
  source 1..75: mol_type = other DNA
tggcctggtgactcagaatttctcaatgcttgcatcaatgctccactttatcctggcaggctcgacgcaccgaaa

SEQ ID NO: 138174 - DNA, 75 bp, synthetic construct
  source 1..75: mol_type = other DNA
ttacaatgagtatcgtgattatgtaagtaaggacttgccttcacaacgagctgatctgcaagtaaagcgcctcaa

SEQ ID NO: 138175 - DNA, 75 bp, synthetic construct
  source 1..75: mol_type = other DNA
ccgttggtgtgcctgttccgtggcctgcagccactccgccaacaggctggctgaaatgcaatggtgcggcttttt

SEQ ID NO: 138176 - DNA, 75 bp, synthetic construct
  source 1..75: mol_type = other DNA
catgaagttaagtttgcctgtaatggggaatacagcccgtaacctgattggattcagtaacggtgtttttgatac

SEQ ID NO: 138177 - DNA, 75 bp, synthetic construct
  source 1..75: mol_type = other DNA
atgttgttgattcgtgagggattaaaggttgcggttattgcggtcgatcccagcagcccggtcactggcggtagc

SEQ ID NO: 138178 - DNA, 75 bp, synthetic construct
  source 1..75: mol_type = other DNA
cgtattgccgaagcgatcctggggcatcgtccatatgcccgtatcgacatggcggaagtgcgggtgctacagact

SEQ ID NO: 138179 - DNA, 75 bp, synthetic construct
  source 1..75: mol_type = other DNA
atgaaagttacatggaccgtcacgcccgtggggtatcagcgcattgcgaagcgatgccattcatgcaacattaaa

SEQ ID NO: 138180 - DNA, 75 bp, synthetic construct
  source 1..75: mol_type = other DNA
ccgcgcgcaggagcgcagtgaagaagccagtcgtcagctagtggaattcatcgaggagcaggcaggggaagagga

SEQ ID NO: 138181 - DNA, 75 bp, synthetic construct
  source 1..75: mol_type = other DNA
caggcggtgacaaggtggcaattgacccgaaacacaaagccccctactcaacgcgtattccggcagtagtgctgg

SEQ ID NO: 138182 - DNA, 75 bp, synthetic construct
  source 1..75: mol_type = other DNA
atattgcgctaagctcgcaggcagaaggcggcgtgccgctggtgatggacacgctggagatcctcggagctgata

SEQ ID NO: 138183 - DNA, 75 bp, synthetic construct
  source 1..75: mol_type = other DNA
cgcgatccggcggtgttcctgtttgatgagccgctctctaacctcgatgccaagctgcgcgtgcagatgcgtctt

SEQ ID NO: 138184 - DNA, 75 bp, synthetic construct
  source 1..75: mol_type = other DNA
cgaggtatccgcgccaaaatacgcagcctggtcagtcagggctatctcattggtggtgattgctggctggatgag

SEQ ID NO: 138185 - DNA, 75 bp, synthetic construct
  source 1..75: mol_type = other DNA
gcgggtagagctggacacgctatgcggctatgtttggccggatgaaccgacgaacccgaataccatcaaaaagcg

SEQ ID NO: 138186 - DNA, 75 bp, synthetic construct
  source 1..75: mol_type = other DNA
gtcgcctgaaaacgacttcactctacgttactcacgatcaggttgaggcgatgacgctcgcccagcgagtaatgg

SEQ ID NO: 138187 - DNA, 75 bp, synthetic construct
  source 1..75: mol_type = other DNA
tgaaaacgacttcactctacgttactcacgatcaggttgaggcgatgacgctcgctcagcgggtgatggtgatga

SEQ ID NO: 138188 - DNA, 75 bp, synthetic construct
  source 1..75: mol_type = other DNA
ggtcagctggatacgaactttaaaactggtcgtcgtgcggcgttacgtgagattgaggatgtgaaacacgatacg

SEQ ID NO: 138189 - DNA, 75 bp, synthetic construct
  source 1..75: mol_type = other DNA
gaagaacgccggatgctgtttgatgatataaggaaaaacagtccgaaggccggaagaccaaccgttaacaaatag

SEQ ID NO: 138190 - DNA, 75 bp, synthetic construct
  source 1..75: mol_type = other DNA
atggcaaagctccccaagaaaataaatcaggaaattaaggcgctggatttacgccagtttgtaagttctactgca

SEQ ID NO: 138191 - DNA, 75 bp, synthetic construct
  source 1..75: mol_type = other DNA
ttcaacgttcgctactgttaatggccgccatcctgaaggtgaatttagcgttgatcagggctatgcctgcggttt

SEQ ID NO: 138192 - DNA, 75 bp, synthetic construct
  source 1..75: mol_type = other DNA
ttgttgaagctggcggaagagccgaaaataccgtggtcacgggggctggctggttgaaagtggcaaccggtggga

SEQ ID NO: 138193 - DNA, 75 bp, synthetic construct
  source 1..75: mol_type = other DNA
ggtcagctggatacgaactttaaaattggtcgtcgtgcggcgttacgtgagatcgaggatgtgaaacacgatacg

SEQ ID NO: 138194 - DNA, 75 bp, synthetic construct
  source 1..75: mol_type = other DNA
ccaaatccagatcttttgaatttgattcttaatgaagatcggctggaaaaagatgatttgttaatgattggtgac

SEQ ID NO: 138195 - DNA, 75 bp, synthetic construct
  source 1..75: mol_type = other DNA
ccgtggggtataagcgcattgcgaaacgttgcccttcatgcagcattaaacgggactttttgccttcgggggcat

SEQ ID NO: 138196 - DNA, 75 bp, synthetic construct
  source 1..75: mol_type = other DNA
ctgtggggtatcagcgcatcgcgaaacgatgcccttcatgcaacattaaacgggacttcacgccgtcaggtgcat

SEQ ID NO: 138197 - DNA, 75 bp, synthetic construct
  source 1..75: mol_type = other DNA
atcaggaaattaagcctctggatttgcgccagtttgttagttctgcggcacaaaaaccggcatcggcatccgcag

SEQ ID NO: 138198 - DNA, 75 bp, synthetic construct
  source 1..75: mol_type = other DNA
tgaatccgaaggcgaactgcgctttaactgggattttgtcgccgcgctgtttcctgccgggcaggtggagcgcca

SEQ ID NO: 138199 - DNA, 75 bp, synthetic construct
  source 1..75: mol_type = other DNA
gcgcctccacatgagaacaacactttggcttatgtgaacgaggtatccaaagccgttggagtagcaccagatatg

SEQ ID NO: 138200 - DNA, 75 bp, synthetic construct
  source 1..75: mol_type = other DNA
agtaaggaatttagcttattccataattacagaacaaaataatgaaattaatatcatgaataaacttatcgaggg

SEQ ID NO: 138201 - DNA, 75 bp, synthetic construct
  source 1..75: mol_type = other DNA
atgctaaacccgctacctggcagagcaatccggatgcgtactacgacaagaaccggactattgaagagtctgcat

SEQ ID NO: 138202 - DNA, 75 bp, synthetic construct
  source 1..75: mol_type = other DNA
gtacgctggcgctggctatcgccggtgttacagcaatgtcgggctttgtggcaatgccagaggctcgcgccgaag

SEQ ID NO: 138203 - DNA, 75 bp, synthetic construct
  source 1..75: mol_type = other DNA
ccggcgatgatgccgatgcgtccgtgttccccctcaataagccggtccttctgaccgatgtgctgaccgccagcg

SEQ ID NO: 138204 - DNA, 75 bp, synthetic construct
  source 1..75: mol_type = other DNA
agcagaaattgcagtatctcgccgaaatcaattcatgcaatttgataacctctatcgggcctggactgtttgtag

SEQ ID NO: 138205 - DNA, 75 bp, synthetic construct
  source 1..75: mol_type = other DNA
tcattaaaaaaagaacgtgttcgaaaaggtataaaatggcaagatctaaatgtcagacttgaagcacattgggta

SEQ ID NO: 138206 - DNA, 75 bp, synthetic construct
  source 1..75: mol_type = other DNA
atcaggccaacgcattgaaaggcgaaggacaaccgatcgccaccgtcttccctaaagagggcgtcaccggctggg

SEQ ID NO: 138207 - DNA, 75 bp, synthetic construct
  source 1..75: mol_type = other DNA
tgaacatggaacccggtacaatccgtctaatggcatcctgatgactccaacaatgcatgcgctgtttgatgccga

SEQ ID NO: 138208 - DNA, 75 bp, synthetic construct
  source 1..75: mol_type = other DNA
agatggggtcgtctcagaaaacggaatctatggtcactcccgtttttgcaacaccgattttgacgacaagttggc

SEQ ID NO: 138209 - DNA, 75 bp, synthetic construct
  source 1..75: mol_type = other DNA
acgatctttatgacggcaccgcctggctgcaagcgttgacctttggttaccgggcggctgacgtagtggatttgc

SEQ ID NO: 138210 - DNA, 75 bp, synthetic construct
  source 1..75: mol_type = other DNA
tcaatggggtccgaacctgctgatgtacaacactaaaaccttcacgacgccgccagatagctggcaagaggtttt

SEQ ID NO: 138211 - DNA, 75 bp, synthetic construct
  source 1..75: mol_type = other DNA
cttatgatggccctatctacattgcggacgctgcgttgttcgttaaagccactcagccgcagttgggcatcagcg

SEQ ID NO: 138212 - DNA, 75 bp, synthetic construct
  source 1..75: mol_type = other DNA
ggcctgatttcatcaactttgacaccgtgctgaatgcagatgcgacggcttacgcctcagtccgtgcgctcggcc

SEQ ID NO: 138213 - DNA, 75 bp, synthetic construct
  source 1..75: mol_type = other DNA
ggtgctgaatgccgaagcaacggcttatgccaccgcccgtgcgctcggtctgcgcgccaaaattgacgagcagac

SEQ ID NO: 138214 - DNA, 75 bp, synthetic construct
  source 1..75: mol_type = other DNA
ctgcgtggatttgcttacctatcagcgtatggctgcaagacagtgcaggaggcgatcacttaccgcgaaaacttc

SEQ ID NO: 138215 - DNA, 75 bp, synthetic construct
  source 1..75: mol_type = other DNA
gacggacacgatggcagaagcacacatgtgggcggtggacaaaccgctgaacccgtcgctggcccgcgacattat

SEQ ID NO: 138216 - DNA, 75 bp, synthetic construct
  source 1..75: mol_type = other DNA
aaaaaacaggcatgaaagccctgctatctgcccagtcacagctcggcgttaaaccgcgcattctcggcgtacctg

SEQ ID NO: 138217 - DNA, 75 bp, synthetic construct
  source 1..75: mol_type = other DNA
tgcgcgttgttgaagtcaacgaaggctcccgatccattaccacggtgagcaccgccatcgtgggcatggtctgca

SEQ ID NO: 138218 - DNA, 75 bp, synthetic construct
  source 1..75: mol_type = other DNA
ttggtggtgattgctggctggacgagtcggtgaatgacaaagacacactgaaagccggaaaactcaccatcgatt

SEQ ID NO: 138219 - DNA, 75 bp, synthetic construct
  source 1..75: mol_type = other DNA
gctgtggcacaaacggaatagccataacccgaagatcgtctggttacgggaaaccattaaaaatatttacgcctc

SEQ ID NO: 138220 - DNA, 75 bp, synthetic construct
  source 1..75: mol_type = other DNA
tacgcaaagatcatccggcactacgtgaagcgtgggatctggacacctttctgcgttatccgcatatcagcattt

SEQ ID NO: 138221 - DNA, 75 bp, synthetic construct
  source 1..75: mol_type = other DNA
ttccgtttaaatccctgcgccagtggccgcaggatgttgcaaaagccgaaaaacgagccagagcacctgaaatta

SEQ ID NO: 138222 - DNA, 75 bp, synthetic construct
  source 1..75: mol_type = other DNA
atgtcaaaaccccgatggaccattgaacagaaaaggcagcacgttgctgcctggcgcgccagtggtcttacacgt

SEQ ID NO: 138223 - DNA, 75 bp, synthetic construct
  source 1..75: mol_type = other DNA
ggtgctgaatgccgaagcaacggcttatgccaccgcccgtgcgcttggtctgcgtgccaaaattgatgatcagac

SEQ ID NO: 138224 - DNA, 75 bp, synthetic construct
  source 1..75: mol_type = other DNA
atgcttatcaccggcaaaaatgctaacccggaaatcctgcaacaactggaagcgcaaggggtcagcattctgcgt

SEQ ID NO: 138225 - DNA, 75 bp, synthetic construct
  source 1..75: mol_type = other DNA
agtttgcacgtgatttttctctggtgcaggccgtgccgcgcggtaagccagccagcaacgcaaagcagaagcgaa

SEQ ID NO: 138226 - DNA, 75 bp, synthetic construct
  source 1..75: mol_type = other DNA
gggccatcgtaaagccgttaatcagaaacgtgctgcaagttatatccgcaaaatccgtgaaatgctggtcgcagg

SEQ ID NO: 138227 - DNA, 75 bp, synthetic construct
  source 1..75: mol_type = other DNA
gcgtctcctggcgcgcgcagtggctctccttgctgattcatgggctggttgccgctgctattttactcatgccct

SEQ ID NO: 138228 - DNA, 75 bp, synthetic construct
  source 1..75: mol_type = other DNA
ctgccagcggccccgctcggcctgaaatccgccccggcgatattttccgggataactacggcggcacgataacga

SEQ ID NO: 138229 - DNA, 75 bp, synthetic construct
  source 1..75: mol_type = other DNA
ggcgggaaatgtgcggcaaaccggtgcaaatcatcaccaattatctaccgctggcaaactacctgatcgatcagg

SEQ ID NO: 138230 - DNA, 75 bp, synthetic construct
  source 1..75: mol_type = other DNA
aggggcagattgtctgcaccggttatatcgattcacggcgacgccagatgaccgctgacagtatgaaaatcactg

SEQ ID NO: 138231 - DNA, 75 bp, synthetic construct
  source 1..75: mol_type = other DNA
gacggtggattttgacgaagatttccgtgaccggttcagcgaatacattgtcaagggttatgcccgcgcaaacgg

SEQ ID NO: 138232 - DNA, 75 bp, synthetic construct
  source 1..75: mol_type = other DNA
gggaaggcgttcacgctggaaatcgggggacagattgtctgcaccggttatatcgattcgcggcgacgtcagatg

SEQ ID NO: 138233 - DNA, 75 bp, synthetic construct
  source 1..75: mol_type = other DNA
accagcagggagaaagcacgcgccaatattcagaagatgaaaaacatgattaacggattcaggggcaaaaaatga

SEQ ID NO: 138234 - DNA, 75 bp, synthetic construct
  source 1..75: mol_type = other DNA
ggcctagaccttggtgcaatgtgccgttatgacaaaccccagcatgtcgagttcaaagtccttcctgatcagaca

SEQ ID NO: 138235 - DNA, 75 bp, synthetic construct
  source 1..75: mol_type = other DNA
acagtcgtgcggcagaactgcaacgcctgaacccgcagttacgtgacccgaacaacataaccgccggggtggtaa

SEQ ID NO: 138236 - DNA, 75 bp, synthetic construct
  source 1..75: mol_type = other DNA
ctgccagtatggcagaaggttactggcgtaacgggcaactggttccactggttaatgacgaaggctggtacgcca

SEQ ID NO: 138237 - DNA, 75 bp, synthetic construct
  source 1..75: mol_type = other DNA
gcggttttgcaggtgtttatcgtccccgttgccgacaaggagtttggtcatcgaccggtagcggtggtggagtat

SEQ ID NO: 138238 - DNA, 75 bp, synthetic construct
  source 1..75: mol_type = other DNA
ttagacaatctgttcttcagtggcggtgagggtattcagccggaagaagtcgagcgcgtaattgctgcacatcct

SEQ ID NO: 138239 - DNA, 75 bp, synthetic construct
  source 1..75: mol_type = other DNA
gaatatgactgcgtaatgccgcgccgtcagtttgagcgtgattttattctggttgaaaacaaacaacaggcggtg

SEQ ID NO: 138240 - DNA, 75 bp, synthetic construct
  source 1..75: mol_type = other DNA
ctgccagtggcaacactcaccctaaatttacgcgcggtgatatttaccgcgaccagtacggcggcacggtaacga

SEQ ID NO: 138241 - DNA, 75 bp, synthetic construct
  source 1..75: mol_type = other DNA
ctgtactcacgcatcgctggtgccgacgcagctctggcgtttgctggttaaccgcagttccgtttccctgaaagc

SEQ ID NO: 138242 - DNA, 75 bp, synthetic construct
  source 1..75: mol_type = other DNA
cgatgaaatcgccctctatattcgccaggtcgccactgagaatcaggtggaagtggtcgagttcccgcgactggc

SEQ ID NO: 138243 - DNA, 75 bp, synthetic construct
  source 1..75: mol_type = other DNA
cgcctttctcggcctgcaggcgctgccgttcaaactggcaattaacgatggtttatcgctctacgccagcgtgat

SEQ ID NO: 138244 - DNA, 75 bp, synthetic construct
  source 1..75: mol_type = other DNA
gactgttttccagcgaacatctggcggaaacggggaagatgacagtgaagtcggtggtggtgctggtaatgctgt

SEQ ID NO: 138245 - DNA, 75 bp, synthetic construct
  source 1..75: mol_type = other DNA
gagcaactcaactggcgcgagctttgtgctcgcgtcgatgaattagcgtcgggctttgcggcgcagggcgtggtt

SEQ ID NO: 138246 - DNA, 75 bp, synthetic construct
  source 1..75: mol_type = other DNA
cgtggaatacgccgcaaacgctgctcgcctggctggcgttactgcaatgcggggcgcgggtgttgcccgtgaacc

SEQ ID NO: 138247 - DNA, 75 bp, synthetic construct
  source 1..75: mol_type = other DNA
tacgactgtgtaatgcctgtttatcagttccagcgtgattttacgctggtggatcatcgtgaaaccgtaaatcag

SEQ ID NO: 138248 - DNA, 75 bp, synthetic construct
  source 1..75: mol_type = other DNA
ggtttatgtttttgccgatcctttctgcccgtattgcaaacaattctggcaacaagcgcgcccatgggttgatgc

SEQ ID NO: 138249 - DNA, 75 bp, synthetic construct
  source 1..75: mol_type = other DNA
aagattgtggtgattatattgatgacctggcttattgccctgggtgacaccacccacatcgttgtcggttctgtt

SEQ ID NO: 138250 - DNA, 75 bp, synthetic construct
  source 1..75: mol_type = other DNA
aagcgcaaagcagaagcacgccaaaaagcagaacgtgcggaaaacattaagaaaaatgataaaaacccggcataa

SEQ ID NO: 138251 - DNA, 75 bp, synthetic construct
  source 1..75: mol_type = other DNA
tccgcactcaatcgcggctattgtcgaaggtggtgatgcgacggtcattgcaaacagtattcgtggtgttaaagg

SEQ ID NO: 138252 - DNA, 75 bp, synthetic construct
  source 1..75: mol_type = other DNA
agcgttgctttaccgtctctgacgccgtttgaggcggtagatggtgcgatagcaaatatcagcggcgtaacgcga

SEQ ID NO: 138253 - DNA, 75 bp, synthetic construct
  source 1..75: mol_type = other DNA
taacgggatcacgcgaaaagtagcgacaaactctacagctgaccttctgttaaccggtacggcaggcacgactat

SEQ ID NO: 138254 - DNA, 75 bp, synthetic construct
  source 1..75: mol_type = other DNA
gtattgctggtcattctggtttatttaattcagttcgcaggcgaccgcatcgtccgggctgtcactcgcaagtaa

SEQ ID NO: 138255 - DNA, 75 bp, synthetic construct
  source 1..75: mol_type = other DNA
tcatgtctcccaccagcgcggacgataaatttgtagtggaagaggattgtgcgccagttgaactgataggtaacg

SEQ ID NO: 138256 - DNA, 75 bp, synthetic construct
  source 1..75: mol_type = other DNA
gtagaggaagatcgcgcaccggttgaactgaccgggagtgttgcattactggacggcgcttcaatgattattggc

SEQ ID NO: 138257 - DNA, 75 bp, synthetic construct
  source 1..75: mol_type = other DNA
atcggctataacgcgacggtgatgaatacggtactggtattgctggtcattctggtttatttaattcagttcgca

SEQ ID NO: 138258 - DNA, 75 bp, synthetic construct
  source 1..75: mol_type = other DNA
gattgttccgctgacagttggcgcagcaccgtttattgcccgtatggtcgaaaacgccctgctggagatcccaac

SEQ ID NO: 138259 - DNA, 75 bp, synthetic construct
  source 1..75: mol_type = other DNA
ttgtgaacatttttcgttccatcccgttcattatcttgctggtatggatgattccgtttacccgcgttattgtcg

SEQ ID NO: 138260 - DNA, 75 bp, synthetic construct
  source 1..75: mol_type = other DNA
gaggcagtggaggcgaattgcccgcagggagtctggatgtggtgatgcagagcacccttgaacagggacttcctc

SEQ ID NO: 138261 - DNA, 75 bp, synthetic construct
  source 1..75: mol_type = other DNA
gcgacagaacctgcactggtaaccctgtaccgtgaaacaggaaacagcacccgctggcaacattttgtgcgtcgt

SEQ ID NO: 138262 - DNA, 75 bp, synthetic construct
  source 1..75: mol_type = other DNA
tgaatcgctggccggaatgtttgccgtgctgaccgggctgcccggcgatccttccctgtcgctgaccggaaaagc

SEQ ID NO: 138263 - DNA, 75 bp, synthetic construct
  source 1..75: mol_type = other DNA
cggatggcaggctttttaccggctggacgtcagtctctgtcacccgctcgattgaatccgtagccggatattttg

SEQ ID NO: 138264 - DNA, 75 bp, synthetic construct
  source 1..75: mol_type = other DNA
tctgactgccagaggcaccagcacggtacaatacttgcacactaaaagtggttttttggggataacagattgccc

SEQ ID NO: 138265 - DNA, 75 bp, synthetic construct
  source 1..75: mol_type = other DNA
cctggtacttccagcaagcaggcaacgggattttcgctcgccaggcgttactggcactggttctgaatcgcgatc

SEQ ID NO: 138266 - DNA, 75 bp, synthetic construct
  source 1..75: mol_type = other DNA
tgctaacgttgctggcgtgacacgtcacaagctctacgagaatgatactggcgctaccgatagtaacgggctgcc

SEQ ID NO: 138267 - DNA, 75 bp, synthetic construct
  source 1..75: mol_type = other DNA
catggtgaaatgtgggtgcccatgccgggggatgcggcctgcgtttggttgagcgacactaacgagcaagtgaat

SEQ ID NO: 138268 - DNA, 75 bp, synthetic construct
  source 1..75: mol_type = other DNA
gccgaaaagttggcattttgtttctcatggggaaatgtgggcgccgatgccaggtgatgccgcctgtgtctggtt

SEQ ID NO: 138269 - DNA, 75 bp, synthetic construct
  source 1..75: mol_type = other DNA
ttctaatgttaccggtgtaacccgccacaaactctatgaaaacgatactggttcagaggacggtaacgggttacc

SEQ ID NO: 138270 - DNA, 75 bp, synthetic construct
  source 1..75: mol_type = other DNA
ggctatcagagggaataaaggccaggggacagccactcacggtacaacatccgttacggttccggataaatacgg

SEQ ID NO: 138271 - DNA, 75 bp, synthetic construct
  source 1..75: mol_type = other DNA
caaatctgccggaacggtagcggcggctaatatcaatatcgcctacaacgaatcagcgtcctgtaagcctgaaaa

SEQ ID NO: 138272 - DNA, 75 bp, synthetic construct
  source 1..75: mol_type = other DNA
tataccgattgggagcaagtggcgaatttcgcccgagaaatcgcccatttaaccgacaaaccgacgctgaaataa

SEQ ID NO: 138273 - DNA, 75 bp, synthetic construct
  source 1..75: mol_type = other DNA
caagacgctgtaccttcttaattatattgatgatgaggattatcgtcggcggatcctgacgcagctaaaccgggg

SEQ ID NO: 138274 - DNA, 75 bp, synthetic construct
  source 1..75: mol_type = other DNA
ttttgtgctggaaggccttctggagcagcagacagggctgaatccggttgagatcatgacagacacagccggtac

SEQ ID NO: 138275 - DNA, 75 bp, synthetic construct
  source 1..75: mol_type = other DNA
gttgtttacgcgtgtcctgaatcagcaggctgaaaaccatgattcgacgtcaattacgtcaatgctaaaactccg

SEQ ID NO: 138276 - DNA, 75 bp, synthetic construct
  source 1..75: mol_type = other DNA
caagggacggacaaacgcgcgagattgccgcctacctggcttcggaactgaaagaactggggatccaggcagatg

SEQ ID NO: 138277 - DNA, 75 bp, synthetic construct
  source 1..75: mol_type = other DNA
taaacctgagaagcgtactccacagaccaacagctacgcgcggaagtttctgatgagttcacaatggcgtcccga

SEQ ID NO: 138278 - DNA, 75 bp, synthetic construct
  source 1..75: mol_type = other DNA
tattacggctatcatgaatttggtgattttccatggtctttccgcctgaagcgtctgctatatacccgggcgtgg

SEQ ID NO: 138279 - DNA, 75 bp, synthetic construct
  source 1..75: mol_type = other DNA
tcgcgcggctttcgcctctgatgcatggtcatatcaacatgctgggacattatacgttcacactaccggaggata

SEQ ID NO: 138280 - DNA, 75 bp, synthetic construct
  source 1..75: mol_type = other DNA
ggtctggtgaccaatgcggttgtgctgtggaacacactttacatgcaggaggcgttgtcacatcttcgcaaatcg

SEQ ID NO: 138281 - DNA, 75 bp, synthetic construct
  source 1..75: mol_type = other DNA
cgattgctgtatactcgtgcatggctcagtaatgaacgccccggactgatgttcgattttgccaccgcgtggttg

SEQ ID NO: 138282 - DNA, 75 bp, synthetic construct
  source 1..75: mol_type = other DNA
atgaaatggtggagcagtacggccgggtgaagcgcttccttcctgcgcttctgcgcgacctgcacttttgtgctg

SEQ ID NO: 138283 - DNA, 75 bp, synthetic construct
  source 1..75: mol_type = other DNA
cctgcatttccgtgcggcaccggcaggtgaacatgtactggctgcgattcattatctggcagaactgaatggttc

SEQ ID NO: 138284 - DNA, 75 bp, synthetic construct
  source 1..75: mol_type = other DNA
tgaacaacaccaccaccaacctgtctgaagcgcagtcccgtattcaggacgccgactatgcgaccgaagtgtcca

SEQ ID NO: 138285 - DNA, 75 bp, synthetic construct
  source 1..75: mol_type = other DNA
atcccgtctcgatgaaattgaccgcgtatccggtcagactcagttcaacggcgtgaacgtactggcaaaagatgg

SEQ ID NO: 138286 - DNA, 75 bp, synthetic construct
  source 1..75: mol_type = other DNA
ttcagccgcgccagttaaagtggatctggatgcagcagcaacagatattggtactgctttggggcaaaaggttaa

SEQ ID NO: 138287 - DNA, 75 bp, synthetic construct
  source 1..75: mol_type = other DNA
aaggcctgactcaggctgcacgtaacgccaacgacggtatttctgttgcgcagaccactgaaggcgcgctgtccg

SEQ ID NO: 138288 - DNA, 75 bp, synthetic construct
  source 1..75: mol_type = other DNA
catgtcgaaagcgcagatcatccagcaggccggtaactccgtgctggcaaaagccaaccaggtaccacagcaggt

SEQ ID NO: 138289 - DNA, 75 bp, synthetic construct
  source 1..75: mol_type = other DNA
caatatgtcgaaagcgcagatcatccagcaggccggtaactccgtgctggcaaaagccaaccaggtaccgcagca

SEQ ID NO: 138290 - DNA, 75 bp, synthetic construct
  source 1..75: mol_type = other DNA
gaggtgttcagctacatcccaaggcaaaagctggctgaaatcatcacgcttgtccgtgaaattgcccggccctca

SEQ ID NO: 138291 - DNA, 75 bp, synthetic construct
  source 1..75: mol_type = other DNA
cccggtgtccagttttatgtcgcaaggcaacttaacatccgctatccagagatcatttcccgctatgctcaaagg

SEQ ID NO: 138292 - DNA, 75 bp, synthetic construct
  source 1..75: mol_type = other DNA
gcgtttaatgaagcgctggaacgatatatccgattacgaagtcttgagttttcccgactgaacttttccggtctg

SEQ ID NO: 138293 - DNA, 75 bp, synthetic construct
  source 1..75: mol_type = other DNA
gctaaccgttttacttctaacattaaaggtctgactcaggccgcgcgtaacgccaacgacggaatctctctggcg

SEQ ID NO: 138294 - DNA, 75 bp, synthetic construct
  source 1..75: mol_type = other DNA
gctaaccgttttacttctaatattaaaggcctgactcaggctgcacgtaacgccaatgacggtatttctctggcg

SEQ ID NO: 138295 - DNA, 75 bp, synthetic construct
  source 1..75: mol_type = other DNA
gcgaatggaccatgatgccgactatggcgtgctgaatgatattgccagagggcaatcagatggcactgttgcaaa

SEQ ID NO: 138296 - DNA, 75 bp, synthetic construct
  source 1..75: mol_type = other DNA
gccgtcagtacgctggtggtttttctggtcgtgagctggagctcgcacctggtgcacggtgaacgcaaagtcgtt

SEQ ID NO: 138297 - DNA, 75 bp, synthetic construct
  source 1..75: mol_type = other DNA
tctatatctgagaaggttcccagagcatttaggctatattctttttttgctcaaaatatagataaatcgtgtggg

SEQ ID NO: 138298 - DNA, 75 bp, synthetic construct
  source 1..75: mol_type = other DNA
actttattaacgaatcaagagcatgcagtaatttctcataatcatggaatacctacaaaagtggggtcagttact

SEQ ID NO: 138299 - DNA, 75 bp, synthetic construct
  source 1..75: mol_type = other DNA
cgaagagaaaatctcaatgcaggaggcgctggaaaaaggggcgcagccgctgcgtgagtttatgctgcgtcagac

SEQ ID NO: 138300 - DNA, 75 bp, synthetic construct
  source 1..75: mol_type = other DNA
tgcgtgaatttatgttgcgccagacccgcgaagctgatttgaccttgtttgcccgactggcgaactccgggccat

SEQ ID NO: 138301 - DNA, 75 bp, synthetic construct
  source 1..75: mol_type = other DNA
tgcagggacctgaagccgtgccgatgcgcattttgctcccggcctacgtgaccagcgagttgaaaaccgcatttc

SEQ ID NO: 138302 - DNA, 75 bp, synthetic construct
  source 1..75: mol_type = other DNA
tgcgctaacaggttttgatccaacgggaggtcggttcgtagttacggctgatgctttcggggaacttattacggc

SEQ ID NO: 138303 - DNA, 75 bp, synthetic construct
  source 1..75: mol_type = other DNA
ctacatcagcagataaactcccatattttacaggggcagatcgtgccgcgttaaccgcgttgacaagtgttggac

SEQ ID NO: 138304 - DNA, 75 bp, synthetic construct
  source 1..75: mol_type = other DNA
ccgccaacggggtggctgaaatgtaacggcgcagcattttcttctgaaatgtaccccaatctggcaaaggcctac

SEQ ID NO: 138305 - DNA, 75 bp, synthetic construct
  source 1..75: mol_type = other DNA
tacccggaactggcaaaggtttacccgaccaataaattgcctgatttacgtggtgagtttattcgtggctgggat

SEQ ID NO: 138306 - DNA, 75 bp, synthetic construct
  source 1..75: mol_type = other DNA
cgactaataaattgcctgatttacgcggtgaatttattcgtggctgggatgacggtcgcgggattgattctggtc

SEQ ID NO: 138307 - DNA, 75 bp, synthetic construct
  source 1..75: mol_type = other DNA
aatgctggaaaagcaccgtcatcctgttgtcgccaacgatgggtatgactcaaaagaggaatgggaactagcgac

SEQ ID NO: 138308 - DNA, 75 bp, synthetic construct
  source 1..75: mol_type = other DNA
ccgcctgaatccgctttatcgcattttccctatcaatgactgcatagaacgtcagtttatgattgaaaagtgtga

SEQ ID NO: 138309 - DNA, 75 bp, synthetic construct
  source 1..75: mol_type = other DNA
tgtacgcaaaatgtggctttactctcggcggcattgacctgttcacgtataaaactagacctcaagtctcgaacg

SEQ ID NO: 138310 - DNA, 75 bp, synthetic construct
  source 1..75: mol_type = other DNA
aggtggcggaaacattggatgctgagaaccatttcattgttcgtgaagtgttcgatgtgcacctatccgaccaag

SEQ ID NO: 138311 - DNA, 75 bp, synthetic construct
  source 1..75: mol_type = other DNA
ttcccggtatgctgaaagagacaatacccgctgggagcatcaggggcttatcaagctctattatgattatcatga

SEQ ID NO: 138312 - DNA, 75 bp, synthetic construct
  source 1..75: mol_type = other DNA
aatttattgtttatcatgatcgccagcgtatcgtttatctatttgctgatgctgcttcgcaacgccggtcatacg

SEQ ID NO: 138313 - DNA, 75 bp, synthetic construct
  source 1..75: mol_type = other DNA
cctcaaaacgcggtgagagagaagagtatttgctcatcgatacgaaatatcttgagccaacgaagtgggatctga

SEQ ID NO: 138314 - DNA, 75 bp, synthetic construct
  source 1..75: mol_type = other DNA
ggaaaccttctgggcgcatggcttcggcaaagtcaccgataaatatggagtgccgtggatgattaatgttgttaa

SEQ ID NO: 138315 - DNA, 75 bp, synthetic construct
  source 1..75: mol_type = other DNA
atgcgcattttgctcccggcctacgtgaccagcgagttgaaaaccgcatttcagataggcttcacgattttcatt

SEQ ID NO: 138316 - DNA, 75 bp, synthetic construct
  source 1..75: mol_type = other DNA
atgcgtcgtttgttgtctgtcgcacctgtccttctctggctggttacgcccctcgccttcgcgcaactgccgggt

SEQ ID NO: 138317 - DNA, 75 bp, synthetic construct
  source 1..75: mol_type = other DNA
aataagttggagtcattaccagaaattggtggtcttatcgcttccggttttggtcctatcctggcgggtattttc

SEQ ID NO: 138318 - DNA, 75 bp, synthetic construct
  source 1..75: mol_type = other DNA
atggtagtgtccgctattgccagtacacctcagaccattccgttccttggttggttatccgataaaattggtcgc

SEQ ID NO: 138319 - DNA, 75 bp, synthetic construct
  source 1..75: mol_type = other DNA
ggtattttctgcaccatgacggaatcctggtatccgatcgccattatgatcatggcatattcagtgattggttta

SEQ ID NO: 138320 - DNA, 75 bp, synthetic construct
  source 1..75: mol_type = other DNA
gaagatcgttacatattagtaagtcaactgatatcatttttatcttttttactatttgttttttttagcgtatat

SEQ ID NO: 138321 - DNA, 75 bp, synthetic construct
  source 1..75: mol_type = other DNA
cggtcagtttacgcttacctaaaatttatgtcagaagatgttccattaccgaaagtcaatcagcgatacaaagac

SEQ ID NO: 138322 - DNA, 75 bp, synthetic construct
  source 1..75: mol_type = other DNA
atgtacaacttcctgggaaaattcaaacccgaaccccgggaaaaaaaaatccctgccggcaatcacactgcctga

SEQ ID NO: 138323 - DNA, 75 bp, synthetic construct
  source 1..75: mol_type = other DNA
cttcaacaaacgatgagttttatgagtcatgatttgacacaaattgtgccacgccagatgagaagggaaaacggt

SEQ ID NO: 138324 - DNA, 75 bp, synthetic construct
  source 1..75: mol_type = other DNA
tgaaggcgatctgttcctaagaataactaatatgcaaagaggtaggatagatattgatctttcagataacaagtt

SEQ ID NO: 138325 - DNA, 75 bp, synthetic construct
  source 1..75: mol_type = other DNA
tttgatagattcgcggtagaaaaaatatcgggcctagaagttttggggggatatacattatttgttagtatgact

SEQ ID NO: 138326 - DNA, 75 bp, synthetic construct
  source 1..75: mol_type = other DNA
ccgtaaggcgcgctcccgtgcggatgatgacgataacgacgacgatgaaaacgcagaagacgacgatgacgaaga

SEQ ID NO: 138327 - DNA, 75 bp, synthetic construct
  source 1..75: mol_type = other DNA
ggccattgctgcggtacgcggcctggggtcgatgattgcggcagagtttaacgatccgcaaacgggcaagccgtc

SEQ ID NO: 138328 - DNA, 75 bp, synthetic construct
  source 1..75: mol_type = other DNA
gtgctgaataccgggcatcgccaccctgatctggtcgcggcggtggagcagcaattgcaacagtttacccacacg

SEQ ID NO: 138329 - DNA, 75 bp, synthetic construct
  source 1..75: mol_type = other DNA
atctcaatttactgctctgcctgcaactgctgatgcaggaacgcagcgtgactaaagcggctaagcggatgaacg

SEQ ID NO: 138330 - DNA, 75 bp, synthetic construct
  source 1..75: mol_type = other DNA
tccggtcgcgaaagtcatccccgttcgcgggagctgttaagctcgctaccgttagccattgattatgaagtgctg

SEQ ID NO: 138331 - DNA, 75 bp, synthetic construct
  source 1..75: mol_type = other DNA
agtgatggtctgtggtggtgatgtcttctgccttgacggtgaatgcgataaggcacagagcggaaaaagcagtga

SEQ ID NO: 138332 - DNA, 75 bp, synthetic construct
  source 1..75: mol_type = other DNA
gcgttttgtcgcgggcgtcggctgtgccatgatttgggtggttgttgagagcgcgctgatgtgcagtgggacgtc

SEQ ID NO: 138333 - DNA, 75 bp, synthetic construct
  source 1..75: mol_type = other DNA
gattcgctccgtttgcagttctacgacggcacgcgctggcaggagagctggtcatcagtgcaggcgattcctgtg

SEQ ID NO: 138334 - DNA, 75 bp, synthetic construct
  source 1..75: mol_type = other DNA
agtaaggccggacatgtgtcgcttcgcagggcgttgtatatgcccgcaatggtagccaccagtaagactgagtgg

SEQ ID NO: 138335 - DNA, 75 bp, synthetic construct
  source 1..75: mol_type = other DNA
ttgaacaaacaattaatatagtcaataagtccgaactaaagaaaactttattatctacggccctcagctcatttc

SEQ ID NO: 138336 - DNA, 75 bp, synthetic construct
  source 1..75: mol_type = other DNA
tgccatttttgcctcgctggcactgatggcgcagcaggtgacaaacggcgttacacgcgtgaatagcgccgtcgc

SEQ ID NO: 138337 - DNA, 75 bp, synthetic construct
  source 1..75: mol_type = other DNA
tacgctctatccggtggcgatggcctgggcttgtgagaaagttgaacatcatcaactggtcgcaatgaatcaagc

SEQ ID NO: 138338 - DNA, 75 bp, synthetic construct
  source 1..75: mol_type = other DNA
gacctgggccagaagctaaaagacggattattggcgatcgccgaaaaacacaccgagatcggcgacgttcgcggg

SEQ ID NO: 138339 - DNA, 75 bp, synthetic construct
  source 1..75: mol_type = other DNA
atgtgcagtatttgtgtggattcttttatgttcgaaaatggtgagagatattgtcatgttgtaaataaagatact

SEQ ID NO: 138340 - DNA, 75 bp, synthetic construct
  source 1..75: mol_type = other DNA
tgccacgcagcaatctgctcaccgtcggttaccgcattcatgacggttatctcgaacggttagcctggccgctga

SEQ ID NO: 138341 - DNA, 75 bp, synthetic construct
  source 1..75: mol_type = other DNA
cttcattatatcggtatcgacaccgctaaagagaaactggatgtcgatgtgttgcgtcctgatggtcgtcatcgc

SEQ ID NO: 138342 - DNA, 75 bp, synthetic construct
  source 1..75: mol_type = other DNA
ccactaaagggcacgatgagctggtgagctggctgaaaggtcacaagattgaccatgcgcatatctgcatcgaag

SEQ ID NO: 138343 - DNA, 75 bp, synthetic construct
  source 1..75: mol_type = other DNA
tttgccaagaaaactctgctggttacgaccggttccgaagcggtggaaaatgcggtgaaaatcgcccgcgccgcc

SEQ ID NO: 138344 - DNA, 75 bp, synthetic construct
  source 1..75: mol_type = other DNA
gtgcaggtagataccagcgttctggataaatttaacaaacgagttgaggggttatttgaacaaacgcttgctgga

SEQ ID NO: 138345 - DNA, 75 bp, synthetic construct
  source 1..75: mol_type = other DNA
ttgcggcagatatcatcatcagccagaagcgaatcggcaacctgcctgctgtgcgtgtgccgtacttcccggcga

SEQ ID NO: 138346 - DNA, 75 bp, synthetic construct
  source 1..75: mol_type = other DNA
atgttgctgattcgccaggggctgaaagtcgcggtgattgccgtcgatcccagcagcccagtgaccggtggcagc

SEQ ID NO: 138347 - DNA, 75 bp, synthetic construct
  source 1..75: mol_type = other DNA
tgatcaccttcattgtttgttgcattaacccgaacgcgatttcgatgatttacgcgatcagcggcccgctcattg

SEQ ID NO: 138348 - DNA, 75 bp, synthetic construct
  source 1..75: mol_type = other DNA
gggcatcgcgttggatcgatctcggtttgctgcgtatccagcctgcggagctgacaaaactgtcgctgttttgct

SEQ ID NO: 138349 - DNA, 75 bp, synthetic construct
  source 1..75: mol_type = other DNA
gcgatgctaaacaaggcatacaagcaaagctggaatgaccattatcctgatgaagtatcgaaagcactgtcagca

SEQ ID NO: 138350 - DNA, 75 bp, synthetic construct
  source 1..75: mol_type = other DNA
aaacctcctggcttgttgatgcgattcgcatgaagctgggacagccggaaaagtctattgattcacgaatgcttg

SEQ ID NO: 138351 - DNA, 75 bp, synthetic construct
  source 1..75: mol_type = other DNA
caaaaccatataacgaaacggcagttataaagatcattgccgataccatccaacagggatttgataatgggcgtg

SEQ ID NO: 138352 - DNA, 75 bp, synthetic construct
  source 1..75: mol_type = other DNA
gctaaccgtttcaccgcgaacatcaaaggtctgactcaggcttctcgtaacgccaatgatggtatttctgttgct

SEQ ID NO: 138353 - DNA, 75 bp, synthetic construct
  source 1..75: mol_type = other DNA
acctcgatgcgctggtgatggattcgaccaccaacctgattgatgagatttatcaggatgacccggagctcgtcg

SEQ ID NO: 138354 - DNA, 75 bp, synthetic construct
  source 1..75: mol_type = other DNA
atttattcgcccggttccgtcatccggtcatctgggcggcgccagccagcgggcgcgggagttaatgctgttatg

SEQ ID NO: 138355 - DNA, 75 bp, synthetic construct
  source 1..75: mol_type = other DNA
tgagcaacatcaccgacgctgacggtaaggtcgtttcggcggtgattcgtgtcggtaagaacggcgactatgaga

SEQ ID NO: 138356 - DNA, 75 bp, synthetic construct
  source 1..75: mol_type = other DNA
atgaatcacttaatggttgaccttgaaacaatgggcaacgggccatacgcgccagttatttctattggggcggta

SEQ ID NO: 138357 - DNA, 75 bp, synthetic construct
  source 1..75: mol_type = other DNA
atgaatcacttgatggttgaccttgaaacaatgggcaacgggccatacgcgccagttatttctattggggcggtg

SEQ ID NO: 138358 - DNA, 75 bp, synthetic construct
  source 1..75: mol_type = other DNA
attaaagaaataccaaagaccgatgctcgtgatgataaaagattcctcagggctgctgaaaatgctctttcgacc

SEQ ID NO: 138359 - DNA, 75 bp, synthetic construct
  source 1..75: mol_type = other DNA
cgctgggcctgtcgcccacaccgctaatggtcagcatggagcaaaatctggcggaatggatgcaaatgagcaacc

SEQ ID NO: 138360 - DNA, 75 bp, synthetic construct
  source 1..75: mol_type = other DNA
cgcggtcgctatcagcaaatcaatctgcgtgacgcttacgttgatcacctgttcggttatatcaacgtcaaaaac

SEQ ID NO: 138361 - DNA, 75 bp, synthetic construct
  source 1..75: mol_type = other DNA
caacaacaatcaagttggcatggaatgataatggggaaatctgtaagtcgttgtcgcaaaactcatttcgtcatg

SEQ ID NO: 138362 - DNA, 75 bp, synthetic construct
  source 1..75: mol_type = other DNA
aagaaaaaacgtcaacctatctctcccgtgcgctgggtgagtccgggtttacggtagatgtctctgcagatggcg

SEQ ID NO: 138363 - DNA, 75 bp, synthetic construct
  source 1..75: mol_type = other DNA
catgtgggtgcaagatggagttcaggagatcagcttgctggtaaaattgggaaattggctacaggcgccagtgta

SEQ ID NO: 138364 - DNA, 75 bp, synthetic construct
  source 1..75: mol_type = other DNA
gcggcgactggttacggggcaacctgaacgcgattgcggcgtttatggggaccagcacatggtcgactatagaaa

SEQ ID NO: 138365 - DNA, 75 bp, synthetic construct
  source 1..75: mol_type = other DNA
aagattcctcaaggctgctgaagatgctctttcaacagtgaagcgcagcttagatgcgccgcgcgatcaagaata

SEQ ID NO: 138366 - DNA, 75 bp, synthetic construct
  source 1..75: mol_type = other DNA
aaataatcaaccaagaaaatgacgttaaaaaacagcatgcagatctggaaaacaaccataaaacagagggaaata

SEQ ID NO: 138367 - DNA, 75 bp, synthetic construct
  source 1..75: mol_type = other DNA
gtggcgccatgtcgaaactgccggtagatatcaacgtcggacgtcaaattgccagcgcacagcagcagatggcca

SEQ ID NO: 138368 - DNA, 75 bp, synthetic construct
  source 1..75: mol_type = other DNA
ctctgttgcacgcacggttctgcgggccgtccgtgactcagtggtctctgttgcccgcgcggtatggaactggat

SEQ ID NO: 138369 - DNA, 75 bp, synthetic construct
  source 1..75: mol_type = other DNA
tcaaacgggatgatggacgtttatttgccgtaccggatgcgcctgacgagccaaatgtggtggatattatcgatc

SEQ ID NO: 138370 - DNA, 75 bp, synthetic construct
  source 1..75: mol_type = other DNA
ttcgtcggtgatgcgaacacgcagacgccggagtttaaatccttcctcgtgaatgtggaaaaggtggatacctaa

SEQ ID NO: 138371 - DNA, 75 bp, synthetic construct
  source 1..75: mol_type = other DNA
tagctggacgccggaaggcaaccagatggcgcgtcgtgataacgccgatccgtctggcctcggtaacacgctggg

SEQ ID NO: 138372 - DNA, 75 bp, synthetic construct
  source 1..75: mol_type = other DNA
aataccggctcggcccgatgagactggaagaggcgctgaaaacgctggccgggccaggctggctgatgcataccg

SEQ ID NO: 138373 - DNA, 75 bp, synthetic construct
  source 1..75: mol_type = other DNA
gcacagttgcgtgaacgctgggagcgttatgtggtactcaatgctgaatgggcagcaagagggcgcaggggattt

SEQ ID NO: 138374 - DNA, 75 bp, synthetic construct
  source 1..75: mol_type = other DNA
acgcctttatcaccgagcagcaaagctggtttgaacagcatctggcggcagacttcgatcagtcatgggatgacc

SEQ ID NO: 138375 - DNA, 75 bp, synthetic construct
  source 1..75: mol_type = other DNA
atgatgaggaaaggcaaacagccgttggtggcccttctcttgaagatctggacaaagttgcgcgagaacgggccg

SEQ ID NO: 138376 - DNA, 75 bp, synthetic construct
  source 1..75: mol_type = other DNA
tgtatcaaacgacccatggctggaacaagacctggacgaagacgaggaggaagatgaagaagttacccgcatgaa

SEQ ID NO: 138377 - DNA, 75 bp, synthetic construct
  source 1..75: mol_type = other DNA
attcgaagctggcgattacctgatagataacgttgaagcgcggaaggccgcgcgcgctatgttgcgtcggtccgg

SEQ ID NO: 138378 - DNA, 75 bp, synthetic construct
  source 1..75: mol_type = other DNA
gcggcgtcgggccgtttatcatgcagcaggaaggcatggggcgtctgtttgccctcgataagatggcggaaggtc

SEQ ID NO: 138379 - DNA, 75 bp, synthetic construct
  source 1..75: mol_type = other DNA
gaataaacttggcattgcccagggcgatactgtgaaagtctcctccaaccgtggctatatcaaagccaaagcggt

SEQ ID NO: 138380 - DNA, 75 bp, synthetic construct
  source 1..75: mol_type = other DNA
taacgccctgcgcggtcactccaatattcaggggctgacggacctggggctgctgtcgcagagtctgccaggtta

SEQ ID NO: 138381 - DNA, 75 bp, synthetic construct
  source 1..75: mol_type = other DNA
ttcgaaaaaatattttctaattgttttataggaggagggactcttataagagcattgagttgttattactcaggg

SEQ ID NO: 138382 - DNA, 75 bp, synthetic construct
  source 1..75: mol_type = other DNA
gcccgccatgccttatctggcatcaggggacatccgtaccatcttcccgcccgggcatcttcacccgactggtca

SEQ ID NO: 138383 - DNA, 75 bp, synthetic construct
  source 1..75: mol_type = other DNA
gatatcaccgcttccagcgatggacgcgtggtagataaaagctgggtatcgcgcgttgcggaagtgatcgacatc

SEQ ID NO: 138384 - DNA, 75 bp, synthetic construct
  source 1..75: mol_type = other DNA
gggttcaacgaggccggggagttatatgccatttctcaaggtccggcattcatctcttccgcaggaaatctcgat

SEQ ID NO: 138385 - DNA, 75 bp, synthetic construct
  source 1..75: mol_type = other DNA
cacgtaacaagcagcgaatgaacgccattatgcgctacgctgtacagaatggaatgattaaatacaatccagcgc

SEQ ID NO: 138386 - DNA, 75 bp, synthetic construct
  source 1..75: mol_type = other DNA
tatagaacgaataggttatcactcgaaagtaaaatacctggttccgagtattaaggaggacatatcgaagactga

SEQ ID NO: 138387 - DNA, 75 bp, synthetic construct
  source 1..75: mol_type = other DNA
tccacaaacaaataatcaatattagtgaattaaaagcgtacctggcatcacagggcgtggagatcaggatatgtt

SEQ ID NO: 138388 - DNA, 75 bp, synthetic construct
  source 1..75: mol_type = other DNA
gattattggacgtctggtagcaggtgaaacgctggatatgcgtaaactggccgccgaatttggcgtatcggcccg

SEQ ID NO: 138389 - DNA, 75 bp, synthetic construct
  source 1..75: mol_type = other DNA
gacagcgtgtgtccggtgcgtattccgctgtcaaaactgattttgcgtcatcgtcgggtgatggctgaaaaaggg

SEQ ID NO: 138390 - DNA, 75 bp, synthetic construct
  source 1..75: mol_type = other DNA
ctcaacatgatgaatcaggacggtgtgcgtaacggttacgacctcgaacaactaaaaaagtacgtgaagtttgcc

SEQ ID NO: 138391 - DNA, 75 bp, synthetic construct
  source 1..75: mol_type = other DNA
ctcaacatgatgaatcaggacggcgtgcgtaatggttacgacctcaagcagctgaaaaaagtacgtgaagtttgc

SEQ ID NO: 138392 - DNA, 75 bp, synthetic construct
  source 1..75: mol_type = other DNA
cgaagccttccgcgatgcggatgtcgatggcgcgctggccgcctcggtattccacaagcaaattattaatattgg

SEQ ID NO: 138393 - DNA, 75 bp, synthetic construct
  source 1..75: mol_type = other DNA
accctcattcgaatgcttaccggcagtgaacgtccggatagcggtgatatctggattggcgagacgcgactggaa

SEQ ID NO: 138394 - DNA, 75 bp, synthetic construct
  source 1..75: mol_type = other DNA
aaaccgccttcgggcgctcggtttttgccgttggcggtaatgccacggcggcgcagttgtgcggtattaacgttc

SEQ ID NO: 138395 - DNA, 75 bp, synthetic construct
  source 1..75: mol_type = other DNA
tcctgaacaacttgtttcgacactaagcccggcgcaaaagcaactggtggaaattgcgcgggtgatgaaaggcga

SEQ ID NO: 138396 - DNA, 75 bp, synthetic construct
  source 1..75: mol_type = other DNA
tcggcagcaaaaacctctgaaacaaatgcaaagacttcagaagacaatgccgcttcctctaagtcggcagctgct

SEQ ID NO: 138397 - DNA, 75 bp, synthetic construct
  source 1..75: mol_type = other DNA
cagcatcttccagcgcaggaacggcatcaacaaaggccactgaagcatcaaaaagtgctgccgctgcagagtctt

SEQ ID NO: 138398 - DNA, 75 bp, synthetic construct
  source 1..75: mol_type = other DNA
cccaagctggaggatatcagctttacgctacgtcgtggcgaagtgctcggcattgctggcctgctgggggcaggg

SEQ ID NO: 138399 - DNA, 75 bp, synthetic construct
  source 1..75: mol_type = other DNA
ggtgaatacaccggcggctggctggtcggggagggtaattatcagcgatggattactgcacaacgccctgcggaa

SEQ ID NO: 138400 - DNA, 75 bp, synthetic construct
  source 1..75: mol_type = other DNA
aggcaataaacatgtgttggtgaaattcaccgtgccacagcaaaccgcagtcagccaacgttgggggacctgcta

SEQ ID NO: 138401 - DNA, 75 bp, synthetic construct
  source 1..75: mol_type = other DNA
tcagccaacgttggggtgacctgctaattgctgaatctattgccgcgcaaatcctgcgtgacggtgggatccacg

SEQ ID NO: 138402 - DNA, 75 bp, synthetic construct
  source 1..75: mol_type = other DNA
ttgctgttaggcgcgctgatgggaacgctcgccggggtgctgcgcggcgtgtttaacgtaccaagtttcgttgcc

SEQ ID NO: 138403 - DNA, 75 bp, synthetic construct
  source 1..75: mol_type = other DNA
cattgctggcctgctgggggcagggcgcagtgaattgctgaaggcgattgttgggctggaggagtatgaacaggg

SEQ ID NO: 138404 - DNA, 75 bp, synthetic construct
  source 1..75: mol_type = other DNA
tgacgctgattattatctccggtgaaattgatgtcagcgttgggccgatggtggcttttgtctcggtgtgcctgg

SEQ ID NO: 138405 - DNA, 75 bp, synthetic construct
  source 1..75: mol_type = other DNA
gataatcacaatgaaaaattacaaaatgagttagctcttgaaaaggttcgctcagacaatttcagagataaggtt

SEQ ID NO: 138406 - DNA, 75 bp, synthetic construct
  source 1..75: mol_type = other DNA
tgcctgggaggttgcaataggaagaattgaatcaatttgctataaaagtgagtttggagtatctatttggttcta

SEQ ID NO: 138407 - DNA, 75 bp, synthetic construct
  source 1..75: mol_type = other DNA
gtcacttatgatattgccgaggggtcggttgtcagtctggcggccggagggatcagttttgccctgacggcatcg

SEQ ID NO: 138408 - DNA, 75 bp, synthetic construct
  source 1..75: mol_type = other DNA
gcaaaaagacgatgatgaaggtactccgcctgaataccgtatcgcgagcatgctaaacagctgttccgcgcagat

SEQ ID NO: 138409 - DNA, 75 bp, synthetic construct
  source 1..75: mol_type = other DNA
gacatgaatgaattcaatcgaaatcagaaaaaaatagtagccgctttaaagaaaatgtatgacaacggatatgaa

SEQ ID NO: 138410 - DNA, 75 bp, synthetic construct
  source 1..75: mol_type = other DNA
caaaactataaaaatactattgcagaaattgattttcatggtttgaactttacagaggtggattcagagtggatc

SEQ ID NO: 138411 - DNA, 75 bp, synthetic construct
  source 1..75: mol_type = other DNA
tatcgctcgacttgtgaaagggacagaaaggactgggggcattatggccttattgcggaagaagttggagagatt

SEQ ID NO: 138412 - DNA, 75 bp, synthetic construct
  source 1..75: mol_type = other DNA
cagtctgcagatctttgatgttcagacaacaaccgatagtcctaacatgttcgtaagtccgattgctggttacaa

SEQ ID NO: 138413 - DNA, 75 bp, synthetic construct
  source 1..75: mol_type = other DNA
agcgagtaagccttccagcgttaccgatggtgttgtttatacgatgtatagttcacatcagaaaccgacgccgtc

SEQ ID NO: 138414 - DNA, 75 bp, synthetic construct
  source 1..75: mol_type = other DNA
tgaaactgccggaaacctggagtacaaatgagaaaatgtttgcttccggagggcagggacatgggtttgccgctg

SEQ ID NO: 138415 - DNA, 75 bp, synthetic construct
  source 1..75: mol_type = other DNA
acctgatgaactgaaaacgctcttccggaaccgcctgaatttatcaccggaagcgaatgacgattttctcgatcg

SEQ ID NO: 138416 - DNA, 75 bp, synthetic construct
  source 1..75: mol_type = other DNA
gcaaaacgattacagccttcctgaaacgctgacggagcgcatctggctgacactcatttcacaacggatttcccg

SEQ ID NO: 138417 - DNA, 75 bp, synthetic construct
  source 1..75: mol_type = other DNA
cgattcatttgggtggcaacccaccgttatattcgtgcggcctgagcgcgttgtaatacccaacgatatagtccg

SEQ ID NO: 138418 - DNA, 75 bp, synthetic construct
  source 1..75: mol_type = other DNA
atcttgattttcaggaggtcattcagcaaatggaggttatcctctctggatctcagtcagaacagaagccaacgg

SEQ ID NO: 138419 - DNA, 75 bp, synthetic construct
  source 1..75: mol_type = other DNA
ttctggtgtgcgctgggggcgttgtgtttcttgtttatcagtagcttgttcaagccacaacacagaaaaaatcaa

SEQ ID NO: 138420 - DNA, 75 bp, synthetic construct
  source 1..75: mol_type = other DNA
gataaatctctcgacagcgttgtcgatgaaacccgcctcctggttgctgctattgaaaaagaacttgagagtggt

SEQ ID NO: 138421 - DNA, 75 bp, synthetic construct
  source 1..75: mol_type = other DNA
ttgctcacagccgcagtattgagtttagtggtgagatggtaccccgttacgatctgggggtgactgatttcagtt

SEQ ID NO: 138422 - DNA, 75 bp, synthetic construct
  source 1..75: mol_type = other DNA
cgtgagttgcgccgccagcttgaggaagcattagccaagcctgcggaacatcagcaaccacaaccagacgctatt

SEQ ID NO: 138423 - DNA, 75 bp, synthetic construct
  source 1..75: mol_type = other DNA
gggatttgtgctggaaacaggtaatggttattcaaactataaaccttacctccgagcaacatggacgttaaatga

SEQ ID NO: 138424 - DNA, 75 bp, synthetic construct
  source 1..75: mol_type = other DNA
ggtagcgcagattggcagcggcatcctgtctcagctgaatatacgctatcccgttggggtagcggctgaggcgga

SEQ ID NO: 138425 - DNA, 75 bp, synthetic construct
  source 1..75: mol_type = other DNA
ggtctgaacgtcaggggaacaatacccgtaggccagatgaaataaggtcggaatacgaacgtgatctttcccgac

SEQ ID NO: 138426 - DNA, 75 bp, synthetic construct
  source 1..75: mol_type = other DNA
ttctggtgtgcgctgggcgcattgtgtttcttatttatcagtagtttgtttaaaccacagcacaaaaaaaatcag

SEQ ID NO: 138427 - DNA, 75 bp, synthetic construct
  source 1..75: mol_type = other DNA
gagaagtccttaaaccactgtttggcgcaatgctggcagcaccgtgttctatgttaattatgcgtctgttttttt

SEQ ID NO: 138428 - DNA, 75 bp, synthetic construct
  source 1..75: mol_type = other DNA
gtgtcacgtgtgaatgtggataaaaaactacaggaactgaaaaacatgattgccgcgtggagagagcagaaatga

SEQ ID NO: 138429 - DNA, 75 bp, synthetic construct
  source 1..75: mol_type = other DNA
tgcggattattattttgatcacacgccaccggatgtggatctgctcggctccattgccaaagtggcagcctcagc

SEQ ID NO: 138430 - DNA, 75 bp, synthetic construct
  source 1..75: mol_type = other DNA
cacctggcaggcactgacgaccggccatgtggagctgccgcgccgacgcatccacgctggattgtggtttcggct

SEQ ID NO: 138431 - DNA, 75 bp, synthetic construct
  source 1..75: mol_type = other DNA
tgcatcccgccccgaaagaaggcgaggcgctgtcctcatggctcaaccgcgtggccctttgctatcacatggagg

SEQ ID NO: 138432 - DNA, 75 bp, synthetic construct
  source 1..75: mol_type = other DNA
gcgagtaacctggcctatggtgaccaacgccgtctggagattgcccgctgcatggtgacgcagccggagatttta

SEQ ID NO: 138433 - DNA, 75 bp, synthetic construct
  source 1..75: mol_type = other DNA
accgcaaaaactctgattacgccgcctttattggcgcgcagtctctacaaaaaccgcaggagtattacgatccgg

SEQ ID NO: 138434 - DNA, 75 bp, synthetic construct
  source 1..75: mol_type = other DNA
cctggcaggaactggctaacccacgcgacctcaccaaaattgtgacccagaacctcgaatatgcaccgtggaact

SEQ ID NO: 138435 - DNA, 75 bp, synthetic construct
  source 1..75: mol_type = other DNA
gtattcctttcgatgtgacaaccggcaagcgtatttacaacaatatgttgataaaaacgctggaggttacgaccg

SEQ ID NO: 138436 - DNA, 75 bp, synthetic construct
  source 1..75: mol_type = other DNA
cgtgctctctggctttgcaggatctggttgccagtcgcgccagtaagaatatcgagctatttatcggtgatgaaa

SEQ ID NO: 138437 - DNA, 75 bp, synthetic construct
  source 1..75: mol_type = other DNA
gcgcaatggcagtggcggactccatcaacggtattgggctggttatcggcgggttgatggtgcggtatttggcct

SEQ ID NO: 138438 - DNA, 75 bp, synthetic construct
  source 1..75: mol_type = other DNA
gaaaagcattctgatgcgctcgaaattactgagcacccggtggagaagccaacaacgaatagcgcgtcgggtttc

SEQ ID NO: 138439 - DNA, 75 bp, synthetic construct
  source 1..75: mol_type = other DNA
tcggtaattaagtcaacagggtggtttgatggactaaaaggaaccagacttggtaactctataggtatccaatga

SEQ ID NO: 138440 - DNA, 75 bp, synthetic construct
  source 1..75: mol_type = other DNA
atcgctgccacagatggcgcaagaaggtatctccactgttgatgggtatttgagcaatttatttctgggaaggtg

SEQ ID NO: 138441 - DNA, 75 bp, synthetic construct
  source 1..75: mol_type = other DNA
tgattgaggagacatcgcagccgggtaatatcaagcttaccggaatggtaaaagatgcacagcagaataagctgg

SEQ ID NO: 138442 - DNA, 75 bp, synthetic construct
  source 1..75: mol_type = other DNA
atccgcactcatccatctcggtgctaacgttgcttcactctcgttgtcgggtgaaccctggcgcttattgagcag

SEQ ID NO: 138443 - DNA, 75 bp, synthetic construct
  source 1..75: mol_type = other DNA
ggcaattatcgtggcgtgctgaatggtattcacccgtgggcagagtgggtaagcctgatgcgcgggcttgtcgca

SEQ ID NO: 138444 - DNA, 75 bp, synthetic construct
  source 1..75: mol_type = other DNA
atgaaattgacgctgaaaaaccttagcatggcgatcatgatgagcactatggtcatgggaagcggtgcaatggcg

SEQ ID NO: 138445 - DNA, 75 bp, synthetic construct
  source 1..75: mol_type = other DNA
gcatggcgatcatgatgagttcgatgatcatggggagcggtgcaatggcggcggatagcagcgagaaaatagtga

SEQ ID NO: 138446 - DNA, 75 bp, synthetic construct
  source 1..75: mol_type = other DNA
attccgttgagggtattagcccggacggtcagtatttagcgttggtgtcatatggcctgcaaggttatgtcatcc

SEQ ID NO: 138447 - DNA, 75 bp, synthetic construct
  source 1..75: mol_type = other DNA
tgtatgccgcaattgaaaacacgaacagcattgttgttttcgacctcggacaaaagaaaatcctgcataccttta

SEQ ID NO: 138448 - DNA, 75 bp, synthetic construct
  source 1..75: mol_type = other DNA
catccggtggcgctcccaatgtgccgcctgaagcgtcaggacaaggtgaaggctatgtaccgcctgaagttgaag

SEQ ID NO: 138449 - DNA, 75 bp, synthetic construct
  source 1..75: mol_type = other DNA
tgaggatcaacaagccagcattatgacgcaatggtgtagtgtagcaggagcgtttattccgttgagggtattagc

SEQ ID NO: 138450 - DNA, 75 bp, synthetic construct
  source 1..75: mol_type = other DNA
gggtgatgaatcgcaccagtaatagtgtgtcagccattgatctggtggcttatcagcatgtggcggatatcccgc

SEQ ID NO: 138451 - DNA, 75 bp, synthetic construct
  source 1..75: mol_type = other DNA
ggaggagcgcaacgccctcagggaaacattatccgctccggtaagtcgtgagcaggccagtggtgatttgctcgc

SEQ ID NO: 138452 - DNA, 75 bp, synthetic construct
  source 1..75: mol_type = other DNA
accattctgaacgtgactgaagatcatatggaccgctatccgtttggtttgcagcaataccgtgcggcaaaattg

SEQ ID NO: 138453 - DNA, 75 bp, synthetic construct
  source 1..75: mol_type = other DNA
tcattcatcccgtccggcggtaatgtctctggtcgtctggagcgcattaatcccgataattccgttttttgtcgc

SEQ ID NO: 138454 - DNA, 75 bp, synthetic construct
  source 1..75: mol_type = other DNA
gcgaacggctgcacggtaagcaactggcggggattgcgttagcgatttctggcgtactggtgttaatcgaagata

SEQ ID NO: 138455 - DNA, 75 bp, synthetic construct
  source 1..75: mol_type = other DNA
ggatgcgcactgacctttctgccacgctgtttttaagcgatccacaaagctacgacggcggcgaactggtcgtta

SEQ ID NO: 138456 - DNA, 75 bp, synthetic construct
  source 1..75: mol_type = other DNA
accattttgaacgtgactgaagatcatatggatcgctatccgtttggtttgcagcaataccgcacagcaaaactg

SEQ ID NO: 138457 - DNA, 75 bp, synthetic construct
  source 1..75: mol_type = other DNA
agcgttaaccaccttcaccggtctgccgcatcgctttgaagtggtgctggagcacaatggcgtacgctggattaa

SEQ ID NO: 138458 - DNA, 75 bp, synthetic construct
  source 1..75: mol_type = other DNA
gcgaattactgcgcgagtttcccgactatacatggcaggtagcgattgctgaccttgagcagagcgaagccatcg

SEQ ID NO: 138459 - DNA, 75 bp, synthetic construct
  source 1..75: mol_type = other DNA
ccgaattactgcgtgaatttccagactatacatggcaggtcgcgattgccgaccttgagcaaagcgaagccatcg

SEQ ID NO: 138460 - DNA, 75 bp, synthetic construct
  source 1..75: mol_type = other DNA
ggaaactatcgcggcgtgctgaatggtattcacccgtgggcggaactgataaacctgatgcgcgggcttgtcgaa

SEQ ID NO: 138461 - DNA, 75 bp, synthetic construct
  source 1..75: mol_type = other DNA
gtctgaatggtcagcatgtggcaatgctcggttttatgttgaccctggcggcggcgtttagctgggcgtgtggca

SEQ ID NO: 138462 - DNA, 75 bp, synthetic construct
  source 1..75: mol_type = other DNA
atgtcgcgaaaagatggggtgttggcgctactagtcgtcgttgtatgggggcttaattttgtggtcatcaaagtg

SEQ ID NO: 138463 - DNA, 75 bp, synthetic construct
  source 1..75: mol_type = other DNA
tgctggccggtttgcgctttatgctggtcgcttttccggctatcttttttgtcgcacgaccgaaagtaccactga

SEQ ID NO: 138464 - DNA, 75 bp, synthetic construct
  source 1..75: mol_type = other DNA
tctttcctttggcgcggataaaatctccatcaactctcctgcgctggcggacccgacattgatcacccgtctggc

SEQ ID NO: 138465 - DNA, 75 bp, synthetic construct
  source 1..75: mol_type = other DNA
gatatcaccgcttccagcgatggacgggtggtagataaaagctgggtatctcgtgtggcggaagtgatcgacatt

SEQ ID NO: 138466 - DNA, 75 bp, synthetic construct
  source 1..75: mol_type = other DNA
cctctcctttggagccgacaaaatttcgatcaactcccctgcgctggccgacccggagctgatcacccgtctggc

SEQ ID NO: 138467 - DNA, 75 bp, synthetic construct
  source 1..75: mol_type = other DNA
ccaatatgttaatcaaaccactggtggtcagtatcatcaggcaacgccccgtcatggaatatgatgcatcccatc

SEQ ID NO: 138468 - DNA, 75 bp, synthetic construct
  source 1..75: mol_type = other DNA
ggtattactgctgtttttatactgcttttttccttatggcgtgttctgcatacgcaccattgatcgcattgccgt

SEQ ID NO: 138469 - DNA, 75 bp, synthetic construct
  source 1..75: mol_type = other DNA
gacggtgcgctggcagcttccgtattccacaaacaaataatcaatattggcgaattaaaagcgtacctggcaaca

SEQ ID NO: 138470 - DNA, 75 bp, synthetic construct
  source 1..75: mol_type = other DNA
agcgcagaacaactgcgtaatgccactcatctggtgtgggcgacgggaggtggaatggtgccggaagaagagatg

SEQ ID NO: 138471 - DNA, 75 bp, synthetic construct
  source 1..75: mol_type = other DNA
gcagcgcagtctgacccgaactgtttctttattgatgacgagaattcccgcacgttgttccttgggtattccgtc

SEQ ID NO: 138472 - DNA, 75 bp, synthetic construct
  source 1..75: mol_type = other DNA
aaccttcggcactggcgggtatggccggacctcagcgcgtgtgtgcatcagtaagttaccaacagatgcacggtt

SEQ ID NO: 138473 - DNA, 75 bp, synthetic construct
  source 1..75: mol_type = other DNA
tggagacctgagggaatttgaactggcagacggaaactggctactggacaatgcctggtatgaaagaaacatggc

SEQ ID NO: 138474 - DNA, 75 bp, synthetic construct
  source 1..75: mol_type = other DNA
agcgcggcagcccgtcgggggattatttctgacaggtttgtagaagcaattttgcggttttggcgcgaaaggtga

SEQ ID NO: 138475 - DNA, 75 bp, synthetic construct
  source 1..75: mol_type = other DNA
gataccacctggtactggaaagaaaatttcccgcattcgtatgaagctattgtaagcgtcaacggagcaccgtat

SEQ ID NO: 138476 - DNA, 75 bp, synthetic construct
  source 1..75: mol_type = other DNA
tacggtggtgattattactgccggtcggggtattccgctgagcgaagaggaagaaacctttgactggtcccacgg

SEQ ID NO: 138477 - DNA, 75 bp, synthetic construct
  source 1..75: mol_type = other DNA
gtgaaaaagtctcccagatggttagttgggggcactggtttgcactgttcaatattctgctctcactcgttattg

SEQ ID NO: 138478 - DNA, 75 bp, synthetic construct
  source 1..75: mol_type = other DNA
aactgttttatttccgatgcaacggcgaatggtctgattctcatgaaactgccggaaacctggagtacaaatgag

SEQ ID NO: 138479 - DNA, 75 bp, synthetic construct
  source 1..75: mol_type = other DNA
cccgtttccatctccatcttaatcccatcgtctggcagctagttatcaacccggacgaaaatgagatggcgcgcg

SEQ ID NO: 138480 - DNA, 75 bp, synthetic construct
  source 1..75: mol_type = other DNA
tatggacggcattctgtcgacccgtacgcctgcggcgttaattaccgctctcaaccagcaaggctatcagttggg

SEQ ID NO: 138481 - DNA, 75 bp, synthetic construct
  source 1..75: mol_type = other DNA
cggggtattccgctgagcgaagacgaagaaacctttgactggtcccacggtcatctgcaggtgccattagtgatt

SEQ ID NO: 138482 - DNA, 75 bp, synthetic construct
  source 1..75: mol_type = other DNA
catcttcctgtgtggcaggtggtgctgtcgggtcagtggcgggcgggatattgttcagtccagctgggacccttt

SEQ ID NO: 138483 - DNA, 75 bp, synthetic construct
  source 1..75: mol_type = other DNA
ctttgactctgtgaaatttattctgaccactgctctcgccggtggtctgctggctgttcccctgcagatcaaaaa

SEQ ID NO: 138484 - DNA, 75 bp, synthetic construct
  source 1..75: mol_type = other DNA
cccggctttactggctggctatatcactgaacgcataacccggttattccatattcgctggctggcaggcgtatt

SEQ ID NO: 138485 - DNA, 75 bp, synthetic construct
  source 1..75: mol_type = other DNA
acttatactcaggcccgtaatatcacccggttcgggaccatcgaatcggtcacttatgatattgccgagggttcg

SEQ ID NO: 138486 - DNA, 75 bp, synthetic construct
  source 1..75: mol_type = other DNA
aaatagccggagcgctggttgaagaagatcgcgtcaaaattctggcaatgattcaggagcaggtgacatggcttg

SEQ ID NO: 138487 - DNA, 75 bp, synthetic construct
  source 1..75: mol_type = other DNA
attactatgttcttaccgttgctggtcagtctaatgctatggcgtatggcgaaggactgccattaccggacaggg

SEQ ID NO: 138488 - DNA, 75 bp, synthetic construct
  source 1..75: mol_type = other DNA
cacaccttgatcctttttggaaattaatgataacaacgggactttgtggaggtctgagtactttctctacatttt

SEQ ID NO: 138489 - DNA, 75 bp, synthetic construct
  source 1..75: mol_type = other DNA
tgcttttttcaaacatcacgaagaccgtagattttgttttgtgtttttggttttgtcacctctatttttcattaa

SEQ ID NO: 138490 - DNA, 75 bp, synthetic construct
  source 1..75: mol_type = other DNA
gagttactatattgagtacattccttctttcaattaaagcaatacgttcaaattataaaagtgatgtcagaatat

SEQ ID NO: 138491 - DNA, 75 bp, synthetic construct
  source 1..75: mol_type = other DNA
cgtcagcttgcgccgcagctccctgcgatgcaaaacgaactgttagataagcactacctgcgtaagcatggggcc

SEQ ID NO: 138492 - DNA, 75 bp, synthetic construct
  source 1..75: mol_type = other DNA
gacgatttaagcacgggatatttcggttcagcgtaccggtcaccggagaactggacgacggcactgcgaagcagt

SEQ ID NO: 138493 - DNA, 75 bp, synthetic construct
  source 1..75: mol_type = other DNA
aaatatagatccattaggattagaaacactaaaatgcattaagccactgcattcaatgggcggaactggtgaaag

SEQ ID NO: 138494 - DNA, 75 bp, synthetic construct
  source 1..75: mol_type = other DNA
ctcggacgctttgccgataagctgccgtcagaaccacgggaaaatatcgtttatcagtgctgggagcgtttttgc

SEQ ID NO: 138495 - DNA, 75 bp, synthetic construct
  source 1..75: mol_type = other DNA
tggatgcggtaaatcagcttgattttaatcattacgccacggcgctggcgaagtatcgccaacaacgggaggcgg

SEQ ID NO: 138496 - DNA, 75 bp, synthetic construct
  source 1..75: mol_type = other DNA
cgtgaaggcgagatcgatccggatctgattgggcgtaatattctcgactgggcgctgcgtttcgacgcctttaac

SEQ ID NO: 138497 - DNA, 75 bp, synthetic construct
  source 1..75: mol_type = other DNA
gggtataaaaacagggagagtgagggcgtttattttgtgcccttcatgacagatggtaacggcgtcaataccgcc

SEQ ID NO: 138498 - DNA, 75 bp, synthetic construct
  source 1..75: mol_type = other DNA
accgtgaacgtttattgccaggcttcaggcagtcgcggcaggcggttgcggaaataggcgcggtagcgagcggta

SEQ ID NO: 138499 - DNA, 75 bp, synthetic construct
  source 1..75: mol_type = other DNA
atggttaaagtttatgctccggcttccagtgccaatatgagcgttgggtttgatgtgctcggcgcggcggtaacg

SEQ ID NO: 138500 - DNA, 75 bp, synthetic construct
  source 1..75: mol_type = other DNA
caaactctgacgtttatcccgtggtttagctgggctaaccggggtgaaggcgaaatgcggatctgggtgaatgag

SEQ ID NO: 138501 - DNA, 75 bp, synthetic construct
  source 1..75: mol_type = other DNA
gcaggagcaggtgacgattgcggttgaatcgccccagccggtacgtcatacgctggctttacgtctgccggactg

SEQ ID NO: 138502 - DNA, 75 bp, synthetic construct
  source 1..75: mol_type = other DNA
tgaactggcgcaactggcgcgagaaaacgacgcaatggtgattgccctcacctcagcgggaacgccactcgcccg

SEQ ID NO: 138503 - DNA, 75 bp, synthetic construct
  source 1..75: mol_type = other DNA
gtgattttgttactgctgtattgaatatgtaccgcggactttccaatgctttcaggaaacttagtgatgacgagc

SEQ ID NO: 138504 - DNA, 75 bp, synthetic construct
  source 1..75: mol_type = other DNA
cagctcggcagcccgtcgggggattatttccgacaaatttgctgacgttattttgcggttttggcaggaagagtg

SEQ ID NO: 138505 - DNA, 75 bp, synthetic construct
  source 1..75: mol_type = other DNA
tggaagtggtttgccgtctggccgatcatatcgacagcgtatttggtccagatgaagacaagctgcagggttatc

SEQ ID NO: 138506 - DNA, 75 bp, synthetic construct
  source 1..75: mol_type = other DNA
tttgccctgggcatttactggcagttgtcgtccctgccggagggggtgatgctgtcaggagaaggtaacgatatg

SEQ ID NO: 138507 - DNA, 75 bp, synthetic construct
  source 1..75: mol_type = other DNA
tctgccggaacagttgcaaaaagcgttctggccgcacgatgttcacgtaaccaaagtggcgtgcgccagctgcca

SEQ ID NO: 138508 - DNA, 75 bp, synthetic construct
  source 1..75: mol_type = other DNA
gtggtggttgagatagccagcggcaaggtggtggaaggcagcaaaaagccctcttccgacacgccaacgcatctg

SEQ ID NO: 138509 - DNA, 75 bp, synthetic construct
  source 1..75: mol_type = other DNA
tccagcaacaaggtgaaagaggactgacgaacgcgcctgatgaagatccggacgatttaagcacgggatattacg

SEQ ID NO: 138510 - DNA, 75 bp, synthetic construct
  source 1..75: mol_type = other DNA
tggttttgcggcgataccacctggtactggaaagaaaatttccctcatgcgtatgaagctatttatggcaattat

SEQ ID NO: 138511 - DNA, 75 bp, synthetic construct
  source 1..75: mol_type = other DNA
gccatcctggttcacaataaaaaaggtggcccgctggcagacggtatcgtgattacaccgtcccataacccgccg

SEQ ID NO: 138512 - DNA, 75 bp, synthetic construct
  source 1..75: mol_type = other DNA
tcgtccaggaaggacgggtaaataaatttattcgggaactaccggaaattactttcagcggaaaaatcgctctcg

SEQ ID NO: 138513 - DNA, 75 bp, synthetic construct
  source 1..75: mol_type = other DNA
aaattgctcccggcgttgatttgcaaaaagatattctcgacagaatggatttcaccccagttatttcgcctgagc

SEQ ID NO: 138514 - DNA, 75 bp, synthetic construct
  source 1..75: mol_type = other DNA
gttaatacccgcgccattctggatatgacgtcccagttcgatttttaccacggcggtggtctggatgtttgttat

SEQ ID NO: 138515 - DNA, 75 bp, synthetic construct
  source 1..75: mol_type = other DNA
gggccgaaatgaccgaactttcgaccaacgtgaagcgccacgacgcgcaccgtttctatctgcgcgaaggctacg

SEQ ID NO: 138516 - DNA, 75 bp, synthetic construct
  source 1..75: mol_type = other DNA
cagcagacgatgacttacgcgcattttgcaccggattacctggcagatgccatgagatttaacccggtagccaac

SEQ ID NO: 138517 - DNA, 75 bp, synthetic construct
  source 1..75: mol_type = other DNA
gatgaagtgatgtatctcgacgcgctggtcattgctcaggcggtgcacaataacggcggtatcgtaatgatgcag

SEQ ID NO: 138518 - DNA, 75 bp, synthetic construct
  source 1..75: mol_type = other DNA
catgattcacagtctggttactatcgatatgaccaccatcttgtctctgatgtatctggcgtttgtggcgacaat

SEQ ID NO: 138519 - DNA, 75 bp, synthetic construct
  source 1..75: mol_type = other DNA
tgaaacctggcgggttgcaccgttatcgttactggtgcctgtagttggactggcaagtgcggcactattgttgga

SEQ ID NO: 138520 - DNA, 75 bp, synthetic construct
  source 1..75: mol_type = other DNA
tctggtgcatgcggcactggctggcgttgagcagatcgttaccgacagttcagcgtcgcggcagttacgcctcgt

SEQ ID NO: 138521 - DNA, 75 bp, synthetic construct
  source 1..75: mol_type = other DNA
agccaccacgttaattactgctcttgctgataaatataaacagactcaaacgccacgtaatttatcgattattag

SEQ ID NO: 138522 - DNA, 75 bp, synthetic construct
  source 1..75: mol_type = other DNA
ccctaaaccaacgtaaattagtcgcgcggcgcgcattatttgaaatgcgcaaaggtgcggtgggaaatgtcggtg

SEQ ID NO: 138523 - DNA, 75 bp, synthetic construct
  source 1..75: mol_type = other DNA
ttaatgggcgtgtaccggtcctgtcagcacaggaagcggtaaattatattcccgacgaagcaacgctttgtgtat

SEQ ID NO: 138524 - DNA, 75 bp, synthetic construct
  source 1..75: mol_type = other DNA
atttgactaagtacggctcggagtctttaaaaaaaaatcgctctattgattcaattaaaaataaatattttgggt

SEQ ID NO: 138525 - DNA, 75 bp, synthetic construct
  source 1..75: mol_type = other DNA
caacgtgaagcgccacgacgcacaccgattttacctgcgcgaaggctacgagcagagccatttccgcttcacgaa

SEQ ID NO: 138526 - DNA, 75 bp, synthetic construct
  source 1..75: mol_type = other DNA
cagaatacctatccatgggcgcagaaagccggtatgtactggagtgatatcactgaccgggatggctggtatcac

SEQ ID NO: 138527 - DNA, 75 bp, synthetic construct
  source 1..75: mol_type = other DNA
tggtaaagcacgggcaacgcgatatgcactgctgcgtccttatcgcggaattgagcgtattcccgtctggcgggt

SEQ ID NO: 138528 - DNA, 75 bp, synthetic construct
  source 1..75: mol_type = other DNA
aaaactggaaagtcggtccgggtaaaattgatatcgcgctggttcgcgaagatgtcgacgattacgatcgcagcc

SEQ ID NO: 138529 - DNA, 75 bp, synthetic construct
  source 1..75: mol_type = other DNA
cgaaattatagcatatatttcgataataaacctggacatatagaccgttacgatacgttacgacgaagaattaaa

SEQ ID NO: 138530 - DNA, 75 bp, synthetic construct
  source 1..75: mol_type = other DNA
ttttcttcacgtttgatgaacgttaatgaattaaccgacatgccggtccgtgaaactaaaattgcgggcattcct

SEQ ID NO: 138531 - DNA, 75 bp, synthetic construct
  source 1..75: mol_type = other DNA
gacgtaagatcctgctcacctgcattattgcgggcgtgatgattgcgatactggtcagctgccttcagtttttag

SEQ ID NO: 138532 - DNA, 75 bp, synthetic construct
  source 1..75: mol_type = other DNA
ttcccccggatgccttcattaactttgccgaatcgcaaaagatgattgtgccactgactcagcacctgtttgagt

SEQ ID NO: 138533 - DNA, 75 bp, synthetic construct
  source 1..75: mol_type = other DNA
tggccaaagttcaacaaaagcaggggctgccgttgtttggttgcaatgaggtccctgagcgaccagcaaccggac

SEQ ID NO: 138534 - DNA, 75 bp, synthetic construct
  source 1..75: mol_type = other DNA
cttctggctggatggctgtaaaacccagaacacatatccctgggctcaacaagcaggtttgcactggagtgatat

SEQ ID NO: 138535 - DNA, 75 bp, synthetic construct
  source 1..75: mol_type = other DNA
atggagggaacattattacccttcagcgtattttagggcacagcacaattcagcaaacaatgacctatgcgcact

SEQ ID NO: 138536 - DNA, 75 bp, synthetic construct
  source 1..75: mol_type = other DNA
tggcatcttgtcatggcagaaggcggtgaaatcaattgggagctggatgatggttctcgcatggtgttaagggca

SEQ ID NO: 138537 - DNA, 75 bp, synthetic construct
  source 1..75: mol_type = other DNA
agatcgcgtgggaacttgatgatggttctcgcatggtgttgaaggcagagaagcaggagacaaccagtgagcaag

SEQ ID NO: 138538 - DNA, 75 bp, synthetic construct
  source 1..75: mol_type = other DNA
ccggcagtttcctgctgaccggacatgagattgaaaatctgaacgcgaatctggcccgtgttatcgatcagaatg

SEQ ID NO: 138539 - DNA, 75 bp, synthetic construct
  source 1..75: mol_type = other DNA
gtgcactcagtattttttcccttgtcggatgtgaggaaaccaaatctgttgattggtggttggagcaccatgaag

SEQ ID NO: 138540 - DNA, 75 bp, synthetic construct
  source 1..75: mol_type = other DNA
gctgaagcacattgatttttcgactgccagcccgactgtccgactggctcttcagaaggggaacggtgcaggaaa

SEQ ID NO: 138541 - DNA, 75 bp, synthetic construct
  source 1..75: mol_type = other DNA
actcaggcctcggttgcatggctgcttacggatccggaagctcaactatttgaggtatggttcagggacaccatt

SEQ ID NO: 138542 - DNA, 75 bp, synthetic construct
  source 1..75: mol_type = other DNA
cccctgccatcgcggattgatatgcccgccacgcttgttatacgggcggcaggcaaacacgcctgtgcgctcgtt

SEQ ID NO: 138543 - DNA, 75 bp, synthetic construct
  source 1..75: mol_type = other DNA
gccgctacgcgcaagaagataatcgctggttctcatgggtatctttcaatggcaccaacattgacgacagcaacc

SEQ ID NO: 138544 - DNA, 75 bp, synthetic construct
  source 1..75: mol_type = other DNA
tgcgagagtcaggcaagctggacaatacggtggtgataatcactgcaggtcgggggattccgctgtccccggaag

SEQ ID NO: 138545 - DNA, 75 bp, synthetic construct
  source 1..75: mol_type = other DNA
aggggaccggtgcaggaaatatcagtgccctgaacaaagtgatgaaggggtcgctggtgacatctctggcactgg

SEQ ID NO: 138546 - DNA, 75 bp, synthetic construct
  source 1..75: mol_type = other DNA
gatccggaatggtactgctcctctctttgtcgcgaaacagaaacactgtgtcaggacatttatgaacgttcttac

SEQ ID NO: 138547 - DNA, 75 bp, synthetic construct
  source 1..75: mol_type = other DNA
cggccagccagatccaggcgctgaaaaaactgaccagtgccatcagccagacactggaagaacaaccggtgctca

SEQ ID NO: 138548 - DNA, 75 bp, synthetic construct
  source 1..75: mol_type = other DNA
attgttgcgccaggcccgatctggacagcactgcaaatttccggcggacagacgcaggataagatcccgcagttc

SEQ ID NO: 138549 - DNA, 75 bp, synthetic construct
  source 1..75: mol_type = other DNA
acgatattgcgaaaacatttattacagatgataatggtgtggtatatcttacaggcgtacctaagaaaggagaac

SEQ ID NO: 138550 - DNA, 75 bp, synthetic construct
  source 1..75: mol_type = other DNA
aaagactctatttatggcggttttgaaagccaactaaattatgggccatggagacttaaaaacttcagtaatttt

SEQ ID NO: 138551 - DNA, 75 bp, synthetic construct
  source 1..75: mol_type = other DNA
aggcgtttgccagttttcgaaatgcccgtactctttggattactcacactaagaacagaaaagccgttgaactgc

SEQ ID NO: 138552 - DNA, 75 bp, synthetic construct
  source 1..75: mol_type = other DNA
ctgaaattgccgatgattatcgtgagattctggatgaatctggtgtgatacctgatcccctgatgatccgagatt

SEQ ID NO: 138553 - DNA, 75 bp, synthetic construct
  source 1..75: mol_type = other DNA
atgtctcatttaaaagacccgaccactcagtattacactggtgaatatcccaaacagaaacaaccgacgccaggc

SEQ ID NO: 138554 - DNA, 75 bp, synthetic construct
  source 1..75: mol_type = other DNA
aaataccagtgtttcaggttctaaacatagtgatacacagagggttggcttcagtggtaatgggttagataatca

SEQ ID NO: 138555 - DNA, 75 bp, synthetic construct
  source 1..75: mol_type = other DNA
tgaaaatataagtggaattgcaaaaaaagcagggtataatagtatttcatattttatatcagtttttgtcaaata

SEQ ID NO: 138556 - DNA, 75 bp, synthetic construct
  source 1..75: mol_type = other DNA
atgcagcgtattttaatcgttgaagacgaacaaaaaacaggtcgttacctgcagcagggactggttgaggaaggc

SEQ ID NO: 138557 - DNA, 75 bp, synthetic construct
  source 1..75: mol_type = other DNA
atgtatcgagcaatgtattcaaatatcttctctcctacaaatacgacattttctcttgctggatacaaatatcaa

SEQ ID NO: 138558 - DNA, 75 bp, synthetic construct
  source 1..75: mol_type = other DNA
tgtacagtggggaagtgataatggtagaaaatgcaaatctgaatttaacttgggtgaggtgaatagtacttacct

SEQ ID NO: 138559 - DNA, 75 bp, synthetic construct
  source 1..75: mol_type = other DNA
attacattgtcccagccgttgtcattgaatggtgccaatgctttgctcaaagtagaaagagctaatggtataaaa

SEQ ID NO: 138560 - DNA, 75 bp, synthetic construct
  source 1..75: mol_type = other DNA
gtgagcatatcacctctgttcaggtggccaaattcagtaaaccacaacaatgcggtcgttacctatgatggcaac

SEQ ID NO: 138561 - DNA, 75 bp, synthetic construct
  source 1..75: mol_type = other DNA
aaccaatggtgaagtgaaagcgatgaaccggcacatacaggtgctgacccatcaactggagcttttgctcgaaaa

SEQ ID NO: 138562 - DNA, 75 bp, synthetic construct
  source 1..75: mol_type = other DNA
agcctcgcaagcaccttaaaatcaccatcatacactaaatcagtaagttggcagcattaccaaaacctgattgtt

SEQ ID NO: 138563 - DNA, 75 bp, synthetic construct
  source 1..75: mol_type = other DNA
gaactggctggggaatgtcgttgatgtttttcggaattcttatcatcggatacgggctgctttattggtggcaca

SEQ ID NO: 138564 - DNA, 75 bp, synthetic construct
  source 1..75: mol_type = other DNA
tatcaggcgttaaataaagaattacatattaaacgacgggcagttattcaggccgtaaacgataaacaaaatatc

SEQ ID NO: 138565 - DNA, 75 bp, synthetic construct
  source 1..75: mol_type = other DNA
attttctggcgcagcgggggcaaggacaggttgaacaggtctttgccagagcggtaaatatcgcactcccggctc

SEQ ID NO: 138566 - DNA, 75 bp, synthetic construct
  source 1..75: mol_type = other DNA
atggatactcaagcactcttgccagctactaaaacgtttaaaaaacgcgccagtataaagcaatctaacgaattg

SEQ ID NO: 138567 - DNA, 75 bp, synthetic construct
  source 1..75: mol_type = other DNA
gcgccacgccggaagacgttgagccgttggctgatgcgttaaaggtgcgcggggtgagccggttgatatttccgg

SEQ ID NO: 138568 - DNA, 75 bp, synthetic construct
  source 1..75: mol_type = other DNA
cggaggatgtggaacaactggctgatgcgttacgggagcgcggggtgagccggttaatatttccggcgctatatt

SEQ ID NO: 138569 - DNA, 75 bp, synthetic construct
  source 1..75: mol_type = other DNA
gtaatggtttaactgtttatggttctgttggcctgggtactgcaaatgctcttggtggtaactctatcgtccttg

SEQ ID NO: 138570 - DNA, 75 bp, synthetic construct
  source 1..75: mol_type = other DNA
atctggcattgattattgggatacatatagaccagcgcctgaaagattattaaaaagttggagtaaaggaaccca

SEQ ID NO: 138571 - DNA, 75 bp, synthetic construct
  source 1..75: mol_type = other DNA
tgctttcaattgattcgaataatgtgcggcagcgtgtctttcagactggatgcagcacttttgaggcaatccaat

SEQ ID NO: 138572 - DNA, 75 bp, synthetic construct
  source 1..75: mol_type = other DNA
ggtttacaggaaacggtaaacaaggctggtaacgctgttcagcgttctggcgatacaatgaccggaaaactgaat

SEQ ID NO: 138573 - DNA, 75 bp, synthetic construct
  source 1..75: mol_type = other DNA
tggagagctggcagaacgtgtatcctgtcagcgggaatgcagttgcccgtgaactggatgactggcggatttggt

SEQ ID NO: 138574 - DNA, 75 bp, synthetic construct
  source 1..75: mol_type = other DNA
gttaaccgagagcgggtatctgtcagaagggtttacccgtagtctgctgatgtccagtccggcgcagtggctggc

SEQ ID NO: 138575 - DNA, 75 bp, synthetic construct
  source 1..75: mol_type = other DNA
ctggcccacggcagtatacccgaacctgctgatatggccggcggccatgcttcttggagttgccatcaccgtgac

SEQ ID NO: 138576 - DNA, 75 bp, synthetic construct
  source 1..75: mol_type = other DNA
atcggtattgcgttcttttggcctgatcagggagcggaacatagccgcgccgttatgctgacggagagcggttat

SEQ ID NO: 138577 - DNA, 75 bp, synthetic construct
  source 1..75: mol_type = other DNA
ttgtgtccgagctgagagactatctgctggcgacggtttatgtgacgctgaccttttttatccgggtgactattc

SEQ ID NO: 138578 - DNA, 75 bp, synthetic construct
  source 1..75: mol_type = other DNA
gcatagcgttgaacaggcataccggtggttgtttgtggagtccgggctgatgaacagctggcagaatgtataccc

SEQ ID NO: 138579 - DNA, 75 bp, synthetic construct
  source 1..75: mol_type = other DNA
tctttcctggccgacggcggtgtaccccaatctgctgctgttgcctgccgccatattgttgggtgtcgccatcac

SEQ ID NO: 138580 - DNA, 75 bp, synthetic construct
  source 1..75: mol_type = other DNA
cgtaacatcgaatctgtactcaacgaatcgcatgtttcgctgttcgcactgcgcaacgggatgccgatacactga

SEQ ID NO: 138581 - DNA, 75 bp, synthetic construct
  source 1..75: mol_type = other DNA
gcggcagaaataacaccacattattaagtgccataacgctggaagccgcattacaacaacgctgccgggaaaata

SEQ ID NO: 138582 - DNA, 75 bp, synthetic construct
  source 1..75: mol_type = other DNA
ctgctgatatggccggcggccatgcttctgggagttgccatcaccgtgaccatggcatccttcaagaagtattta

SEQ ID NO: 138583 - DNA, 75 bp, synthetic construct
  source 1..75: mol_type = other DNA
ctgctgatatggccggcggccatgcttctggggggagctatcaccgtgaccatggcgtctttcaagaaatattta

SEQ ID NO: 138584 - DNA, 75 bp, synthetic construct
  source 1..75: mol_type = other DNA
ctatctttcctggccgacggccgtgtacccgaatctgctgatatggccggcggccatgctgctgggtatggctgt

SEQ ID NO: 138585 - DNA, 75 bp, synthetic construct
  source 1..75: mol_type = other DNA
aattgcatttttggtgattgccgtgatgttaaaatcacatcatctgagtttgaaaatggaattatgattgcgtat

SEQ ID NO: 138586 - DNA, 75 bp, synthetic construct
  source 1..75: mol_type = other DNA
ctgtgaaaattattcttggagaagccgtgctggctgtgggtaaacagggccgaccgattaatacccgcaccttgc

SEQ ID NO: 138587 - DNA, 75 bp, synthetic construct
  source 1..75: mol_type = other DNA
ggaaatagctctctcgctcggcgaaccgcccgccaccaaaggctatccgccatcggcattcggcatgatccccaa

SEQ ID NO: 138588 - DNA, 75 bp, synthetic construct
  source 1..75: mol_type = other DNA
ttctcaatgctgcttgctgttcttgaatggggtgtcgtcgactgtcaacgacggatgaaaagtgatccacttata

SEQ ID NO: 138589 - DNA, 75 bp, synthetic construct
  source 1..75: mol_type = other DNA
ctggcaaaagagcggaacggagcagatattcccaataaaccgctgtttatccaaaacctcggtttgcaggaaacg

SEQ ID NO: 138590 - DNA, 75 bp, synthetic construct
  source 1..75: mol_type = other DNA
aacgaacaacagcaacgtcttgaacaggcgctgatgaccccggacaccgacgaatattacaacgcggcagcatta

SEQ ID NO: 138591 - DNA, 75 bp, synthetic construct
  source 1..75: mol_type = other DNA
agaaagcaaaaggcgcgattgatgaagaggctgaagtgtatgaatttgagggaatggatgatctgatccagtttc

SEQ ID NO: 138592 - DNA, 75 bp, synthetic construct
  source 1..75: mol_type = other DNA
tcgccgtccggtaacggtgttgagcctcggctgtgtggtgattattgtcgccgccaacatcgtcggcatgggcat

SEQ ID NO: 138593 - DNA, 75 bp, synthetic construct
  source 1..75: mol_type = other DNA
tggtcatgggaaaccatgtggtcagtcggtgggattgtttcgtggattattctgccgtgggccatcagcgccctg

SEQ ID NO: 138594 - DNA, 75 bp, synthetic construct
  source 1..75: mol_type = other DNA
agattgatccggagatccgtgcactggtggccgcgatgaacatttacggcttccgtacatatgcttcctgtcagg

SEQ ID NO: 138595 - DNA, 75 bp, synthetic construct
  source 1..75: mol_type = other DNA
acagtgattttcagctttgcttccggcttcagcctgaaggccctcatcactggtatcaccggtactgtcgccgct

SEQ ID NO: 138596 - DNA, 75 bp, synthetic construct
  source 1..75: mol_type = other DNA
ctctgtatggcaggaatgcttaaaggtgaatattctggtgaatgcagtggggcaaagaaaaaatttttcagcatt

SEQ ID NO: 138597 - DNA, 75 bp, synthetic construct
  source 1..75: mol_type = other DNA
ctcggtttacaggaaacggtaaacaaggctggtaacgccgttcagcgttccggcgataaaatgaccggagaactg

SEQ ID NO: 138598 - DNA, 75 bp, synthetic construct
  source 1..75: mol_type = other DNA
ccggaaacagcaacaccgatgaatttattgatacattaaccagaaggcctattcagaagttgattggtgggacat

SEQ ID NO: 138599 - DNA, 75 bp, synthetic construct
  source 1..75: mol_type = other DNA
tagttaagggcttgtccattcgcaatggacagggctatcccggcgcggtcagctttggttatttgctgactgaac

SEQ ID NO: 138600 - DNA, 75 bp, synthetic construct
  source 1..75: mol_type = other DNA
tgcgagcagtgtgatacctgcctgaagatgtgtccacaacacgctacgccgatggcgcaatccatgaacgtggac

SEQ ID NO: 138601 - DNA, 75 bp, synthetic construct
  source 1..75: mol_type = other DNA
agcaattaaccggacgcgataatcagcagattaagcgcagcatctgtttgctggcagagcgcggtaagctggcgg

SEQ ID NO: 138602 - DNA, 75 bp, synthetic construct
  source 1..75: mol_type = other DNA
ctcaatccttgcctggattcgaaatactgactgggcgaagattggatttaaaaatgatgccgatggtgacactga

SEQ ID NO: 138603 - DNA, 75 bp, synthetic construct
  source 1..75: mol_type = other DNA
aggccggggatggtaaaaaattcacgctatccagctccaacaactccacgaagaacgtagagtttaatttatggg

SEQ ID NO: 138604 - DNA, 75 bp, synthetic construct
  source 1..75: mol_type = other DNA
gaccgggcagctgtgccgcatcgaaagcgccaatcacacgcttatcgacgcgcaggccgtaggctttaatcgcga

SEQ ID NO: 138605 - DNA, 75 bp, synthetic construct
  source 1..75: mol_type = other DNA
ctgctggggatgatcacccgccagaccaaagccgatatcgtggtggtcgggctgattggcgaacgcgggcgcgaa

SEQ ID NO: 138606 - DNA, 75 bp, synthetic construct
  source 1..75: mol_type = other DNA
caggttatgttttaacagccgcaattaacggcaatgcggatgatcttgtcgacactgttgccagaaggccaattc

SEQ ID NO: 138607 - DNA, 75 bp, synthetic construct
  source 1..75: mol_type = other DNA
ttatggttcagtgtggggaaacaactggttaagcacatggctgcataatcatgtcgttcgggatattcgtcttgg

SEQ ID NO: 138608 - DNA, 75 bp, synthetic construct
  source 1..75: mol_type = other DNA
gcgtgatgtatgaaaaatcaggccatgcaattacggggcttggcattgtcggcgaagttgatggcgatgatccgg

SEQ ID NO: 138609 - DNA, 75 bp, synthetic construct
  source 1..75: mol_type = other DNA
ttgaagatgcagcccgtcacggcctgcactatgtcgagctgcgtttttcaccaggctacatggcaatggcacatc

SEQ ID NO: 138610 - DNA, 75 bp, synthetic construct
  source 1..75: mol_type = other DNA
gaacttggccgccagtataatatctcgcttcctgcacaatccctggaaacactgattccccacgttcaggtcatt

SEQ ID NO: 138611 - DNA, 75 bp, synthetic construct
  source 1..75: mol_type = other DNA
caagcatagttgcaggtatttgctttggtgttctcatggctgcgtatcacgggtggcaaaagttagttaacaatc

SEQ ID NO: 138612 - DNA, 75 bp, synthetic construct
  source 1..75: mol_type = other DNA
cgtcgccgcacccgctgcgggtttatctcgcgagcaaattcgccaggcgcagattaacggtctggaaatggcgtt

SEQ ID NO: 138613 - DNA, 75 bp, synthetic construct
  source 1..75: mol_type = other DNA
ccgctgaaaacgttccttgagcatggcattcgtgccagcattaacactgacgatcccggcgtacagggagtggat

SEQ ID NO: 138614 - DNA, 75 bp, synthetic construct
  source 1..75: mol_type = other DNA
aggcgattcgtgaactgggggcggagcgtattggacatggcgtaaaagccattgaagatcgggcgctgatggatt

SEQ ID NO: 138615 - DNA, 75 bp, synthetic construct
  source 1..75: mol_type = other DNA
tttatgactaacgagaatctggcgctgtatcaggacgcttacgaaattggcgcagaaaagattatcgacacctac

SEQ ID NO: 138616 - DNA, 75 bp, synthetic construct
  source 1..75: mol_type = other DNA
gcgttttctcgatacaaaacgggaaaatgccgacgaaaaaatccgcattaaaacactgtcgctgggcgtggtgat

SEQ ID NO: 138617 - DNA, 75 bp, synthetic construct
  source 1..75: mol_type = other DNA
gcgttttctcgatacaaagcgggaaaatgccgacgagaaaatccgcattaaaacactgtcgctgggcgtggtgat

SEQ ID NO: 138618 - DNA, 75 bp, synthetic construct
  source 1..75: mol_type = other DNA
atgagctttgaagctaaaaaggaacacgctattgccattatggaaagcaagaagatgtggcgtagtaattatgcc

SEQ ID NO: 138619 - DNA, 75 bp, synthetic construct
  source 1..75: mol_type = other DNA
atgagtcatatccgcagcgtgccgtccatcgaagccggaaatgccgcctcgcacgccatcggactggggcagatg

SEQ ID NO: 138620 - DNA, 75 bp, synthetic construct
  source 1..75: mol_type = other DNA
tacatccgcctgcgtcagatggcgctggaaggcactgaaattgaaggctgcgtctcctgtgcactttaaggaata

SEQ ID NO: 138621 - DNA, 75 bp, synthetic construct
  source 1..75: mol_type = other DNA
atccggttgtggccgtatcggcccgcaccggctgggaagtggatacgctggtcagtgcgctcatgacagcgcttc

SEQ ID NO: 138622 - DNA, 75 bp, synthetic construct
  source 1..75: mol_type = other DNA
tggaaaaaactttcgatcttaataacgtaatccgctccctggtagatggcgacgtgctcggcgctaacgaagctg

SEQ ID NO: 138623 - DNA, 75 bp, synthetic construct
  source 1..75: mol_type = other DNA
attgctaaactgaccgacgctggcgttcctgctcaggcgatcaagtttgcaatgagcggtgcaactgctgctgaa

SEQ ID NO: 138624 - DNA, 75 bp, synthetic construct
  source 1..75: mol_type = other DNA
ctctgttgcacgcacggttctgcgagccgtccgtgactcggtggtctctgttgcccgcgcggtatggaactggat

SEQ ID NO: 138625 - DNA, 75 bp, synthetic construct
  source 1..75: mol_type = other DNA
aaattggtagatcagctagatggtcgcttgaggaggttgaagcttggatccagaataaacttgattcgcgggctg

SEQ ID NO: 138626 - DNA, 75 bp, synthetic construct
  source 1..75: mol_type = other DNA
acacggcggagagtgtctgtgttgcctctgttgtccgtacggccctgcgcgcagttcgtgacacggtggtctctg

SEQ ID NO: 138627 - DNA, 75 bp, synthetic construct
  source 1..75: mol_type = other DNA
ggtgtagtgaatatcatcaccaaaaaaatcggtcagaaatggtcgggtaccgttaccgtcgatatcaccattcag

SEQ ID NO: 138628 - DNA, 75 bp, synthetic construct
  source 1..75: mol_type = other DNA
gctatacggctccgatgcgctcggcggtgtagtgaatatcatcaccaaaaaaatcggtgatgctgccaacttact

SEQ ID NO: 138629 - DNA, 75 bp, synthetic construct
  source 1..75: mol_type = other DNA
tagaagatgctgcccgtaatggcctgcactatgttgaactgcgtttttcgccgggttatatggcgatggcgcatc

SEQ ID NO: 138630 - DNA, 75 bp, synthetic construct
  source 1..75: mol_type = other DNA
ggtggctctgtattcgttccgactgctgctatgcgtgctgctgctgatggtaacaccaaagctactctgaccgct

SEQ ID NO: 138631 - DNA, 75 bp, synthetic construct
  source 1..75: mol_type = other DNA
tcatcgtcctcccaccaccatcaaaccgttgagcgctgaagttgccgccttacagcagcaaacggcagatctgtt

SEQ ID NO: 138632 - DNA, 75 bp, synthetic construct
  source 1..75: mol_type = other DNA
tgatgcagaaggcaaagattggcacggtcgggactgacattttctgtcactacttgcctgccaatgtgaaatctg

SEQ ID NO: 138633 - DNA, 75 bp, synthetic construct
  source 1..75: mol_type = other DNA
agaatggtgcgcagaatacgatgaatggggcaacctgctgaatgaagagaacccgcaacagctgcagcaactcat

SEQ ID NO: 138634 - DNA, 75 bp, synthetic construct
  source 1..75: mol_type = other DNA
ggcaaacgtgccttgtatcgatgttggtacggctaaaagcatccttagcatgaccatagagcaggaacgtccgaa

SEQ ID NO: 138635 - DNA, 75 bp, synthetic construct
  source 1..75: mol_type = other DNA
gccaccgctattatgacccgctgcaggggaggtatatcactcaggattcgattgggctgaaggggggatggaatt

SEQ ID NO: 138636 - DNA, 75 bp, synthetic construct
  source 1..75: mol_type = other DNA
ggcgatcgatggaacgctcgcaacagttcctgctgctttcggcgcttctgaccttgctgctggcagtggcagcag

SEQ ID NO: 138637 - DNA, 75 bp, synthetic construct
  source 1..75: mol_type = other DNA
tggttatgaagtcaatgatatccatggtcataatattggtgttgtcggccagggaagtcagttatttattcgcac

SEQ ID NO: 138638 - DNA, 75 bp, synthetic construct
  source 1..75: mol_type = other DNA
gaaggacaagccgcgctctgatgcgattatggcgcttgatgaatctggcgactatcagccgctgttacgtgcaat

SEQ ID NO: 138639 - DNA, 75 bp, synthetic construct
  source 1..75: mol_type = other DNA
tttacccataggcattgaaatggatactcaagcactcttgccagctactaaaacgtttaaaaaacgcgccagtat

SEQ ID NO: 138640 - DNA, 75 bp, synthetic construct
  source 1..75: mol_type = other DNA
aagttaagcaagccgctcacaaaatcgtcaagtggaatacagaaagcatcgtttctgccattcgtgagctggctt

SEQ ID NO: 138641 - DNA, 75 bp, synthetic construct
  source 1..75: mol_type = other DNA
cccaatctgttgttgttgccggcggctgtcctgttgggtatcgctgtgaccgtgaccactgcctcattcaagaag

SEQ ID NO: 138642 - DNA, 75 bp, synthetic construct
  source 1..75: mol_type = other DNA
atggcaacgaatgaaagtatcatggcgctaccgctggcgagtaaatttaaagctgaagcgcgggcaatggctgac

SEQ ID NO: 138643 - DNA, 75 bp, synthetic construct
  source 1..75: mol_type = other DNA
tcagctggcatggcgtacgatggcagaaaccagggcgatgacggcgacatcgatcgcatactgaaaaccatctga

SEQ ID NO: 138644 - DNA, 75 bp, synthetic construct
  source 1..75: mol_type = other DNA
agcagaagcgcgggcaatggctgacagaggtttatcaacctacgaggccgtatatcaactcaacaaactggaaga

SEQ ID NO: 138645 - DNA, 75 bp, synthetic construct
  source 1..75: mol_type = other DNA
ggcggtaaattccgcactgcaactgtcgaaacgcggcggcggcgtggcatttttgctgtcgaatctgcgggaagc

SEQ ID NO: 138646 - DNA, 75 bp, synthetic construct
  source 1..75: mol_type = other DNA
atgaaaattaaaactctggcaatcgttgttctgtcggctctgtccctcagttctacagcggctctggctgatact

SEQ ID NO: 138647 - DNA, 75 bp, synthetic construct
  source 1..75: mol_type = other DNA
gccacctaaacagggaaatgtgaatacatcttatccttttgaaagtccatgtcctaatggaacagaaacagttgc

SEQ ID NO: 138648 - DNA, 75 bp, synthetic construct
  source 1..75: mol_type = other DNA
tacatgcccatcatcccgatattctgcgttttctcgatacaaagcgggaaaatgccgacgagaaaatccgcatta

SEQ ID NO: 138649 - DNA, 75 bp, synthetic construct
  source 1..75: mol_type = other DNA
gccatcagcgaacactatgccgaactggttgccgatgaacgcatccgcaaaaaatacatcaacgcccgtgatttc

SEQ ID NO: 138650 - DNA, 75 bp, synthetic construct
  source 1..75: mol_type = other DNA
tttcaccaatctctatttctataccatcacctggcacgcactgcgtacctcgatgttgctggcacgcgaacgcgg

SEQ ID NO: 138651 - DNA, 75 bp, synthetic construct
  source 1..75: mol_type = other DNA
agttgccgccagaaagcccgaactactttttaatcaacatcgccacggaacaggtaacgccgctaaaagcgttcc

SEQ ID NO: 138652 - DNA, 75 bp, synthetic construct
  source 1..75: mol_type = other DNA
tgcttgggtttgtttccggcctggtggccgcaattggtgcggaaacggcgctggcagtgttgcaggcgaaagtgt

SEQ ID NO: 138653 - DNA, 75 bp, synthetic construct
  source 1..75: mol_type = other DNA
tgctggcaacgcagcctttacgcgtattacgtaatgatgtggtagcgaacgtctggccgctgaagttttatctgc

SEQ ID NO: 138654 - DNA, 75 bp, synthetic construct
  source 1..75: mol_type = other DNA
aggcgcgttattatgcaatcggcgaggcaacccctggcgcagctaatgcggatgcgaccttcaaggttcagtatc

SEQ ID NO: 138655 - DNA, 75 bp, synthetic construct
  source 1..75: mol_type = other DNA
tagcgcaacaaacgttggtgtgcagatcctggataaaacagggactgcgttggctttggatggtgcgtcatttag

SEQ ID NO: 138656 - DNA, 75 bp, synthetic construct
  source 1..75: mol_type = other DNA
ggttttaacattcaactgaatgattgcgataccgatgttgcaagtaaagctgctgttgccttcttaggtacaaca

SEQ ID NO: 138657 - DNA, 75 bp, synthetic construct
  source 1..75: mol_type = other DNA
ggcaaatcacttgttgcgccaggcagcagagcgacataaaccctttgttcgcgcgttctccaccgatgcaatgaa

SEQ ID NO: 138658 - DNA, 75 bp, synthetic construct
  source 1..75: mol_type = other DNA
aggctattgtcacccgcagtccgctgatgctgcgtttgctggaacaggcgaggctggtagcgcagtctgacgtta

SEQ ID NO: 138659 - DNA, 75 bp, synthetic construct
  source 1..75: mol_type = other DNA
gcggcggaaggcggtacgctatttctcgatgagattggcgatatgcccgcaccgttgcaggtcaaactgctgcgc

SEQ ID NO: 138660 - DNA, 75 bp, synthetic construct
  source 1..75: mol_type = other DNA
tctctattaccgcctcaacgttgtcagcctgaaaattccggctctggcagagcgcacagaagacattccgctact

SEQ ID NO: 138661 - DNA, 75 bp, synthetic construct
  source 1..75: mol_type = other DNA
ttcagtttcctgactaaacccgttgataaagacgcgctgtatcaggcgattgacgatgcgctggagcaatccgcg

SEQ ID NO: 138662 - DNA, 75 bp, synthetic construct
  source 1..75: mol_type = other DNA
caccgggaaagagattttcgcccaggctatccacaacgccagcccgcgcaacagcaaaccatttattgctattaa

SEQ ID NO: 138663 - DNA, 75 bp, synthetic construct
  source 1..75: mol_type = other DNA
aacccaccgtggcccccctcactggcagcgcaggcacgcggtggtcagactctccaggatagcgggcatctggcg

SEQ ID NO: 138664 - DNA, 75 bp, synthetic construct
  source 1..75: mol_type = other DNA
cctggcttatgcggccattcaccagaaaggtggtaaggctggacgtaaacgcgctgtaacgctacccgctcgccc

SEQ ID NO: 138665 - DNA, 75 bp, synthetic construct
  source 1..75: mol_type = other DNA
cgacagaaggcaatgaagatgaggcgctcaaccgcgaactcaatctcacctggcaaaatacgcggcccgatcata

SEQ ID NO: 138666 - DNA, 75 bp, synthetic construct
  source 1..75: mol_type = other DNA
cgtcaggtggtggataaaattggtcatctgtgtgactacatcctctttgactccgcatgggtcggctatgagcag

SEQ ID NO: 138667 - DNA, 75 bp, synthetic construct
  source 1..75: mol_type = other DNA
taaggaacacttcccacgcgtaagcatgaatccgcaagaagccaactacgcctatttacgcggtgaagtggagct

SEQ ID NO: 138668 - DNA, 75 bp, synthetic construct
  source 1..75: mol_type = other DNA
tgtccgtggtgcagcgcggttttctttaagcaggtaaaaggcgcgaaggtaaaatccagtgcagttattcagaat

SEQ ID NO: 138669 - DNA, 75 bp, synthetic construct
  source 1..75: mol_type = other DNA
aacccggtcgccagctatctggaacagctaggggcatcagaccccgaagccgccgcacacctggcatccacactt

SEQ ID NO: 138670 - DNA, 75 bp, synthetic construct
  source 1..75: mol_type = other DNA
gttttgatgctgatgagctgaagcgtattaagaatgagctggaacccaaaatgggcatggatctcaatctggtac

SEQ ID NO: 138671 - DNA, 75 bp, synthetic construct
  source 1..75: mol_type = other DNA
tgtataacaaagcgggtgtaaatgggttgtttactgatttccctgataaagcggttaaattcctgcataaagata

SEQ ID NO: 138672 - DNA, 75 bp, synthetic construct
  source 1..75: mol_type = other DNA
ttgaccttcagggcggccctgccgccccttggactcgtggcaataactgtccccgtgtacaggaaacggacaaca

SEQ ID NO: 138673 - DNA, 75 bp, synthetic construct
  source 1..75: mol_type = other DNA
cggggtggcctgaccagcggaaacaaaaaacagacagaaacgggactcacgaatcccgtaaatgagcaaaaaacg

SEQ ID NO: 138674 - DNA, 75 bp, synthetic construct
  source 1..75: mol_type = other DNA
cctgctgcggggtggcctgaccagtggaaacaaaaaacagacagaaacgggattcacaaatcccgtaaatgagca

SEQ ID NO: 138675 - DNA, 75 bp, synthetic construct
  source 1..75: mol_type = other DNA
atgaaattgacgctgaaaaaccttagcatggcgatcatgatgagtggaatgatcatgggaagcagtgcaatggcg

SEQ ID NO: 138676 - DNA, 75 bp, synthetic construct
  source 1..75: mol_type = other DNA
atgaaattgacgctgaaaaaccttagcatggcgatcatgatgagcactatagtcatgggaagcagtgcaatggcg

SEQ ID NO: 138677 - DNA, 75 bp, synthetic construct
  source 1..75: mol_type = other DNA
gatttagtcatcagcgacctgcggatggatgaaatggacggtatgcagctgtttgctgaaatccagaaagtgcag

SEQ ID NO: 138678 - DNA, 75 bp, synthetic construct
  source 1..75: mol_type = other DNA
gtgcacacctttgaagaagagattgaatttgttcaggggttaaatcactctaccgggaaaaatatcggtatctat

SEQ ID NO: 138679 - DNA, 75 bp, synthetic construct
  source 1..75: mol_type = other DNA
actggatgtttaagccgggtgctatgaaacaggtggcggaatatgccgacggtatcgggccggattaccatatgt

SEQ ID NO: 138680 - DNA, 75 bp, synthetic construct
  source 1..75: mol_type = other DNA
ggtaagaaagtacagacttatccggggcgtttcccgatgggtaaatctgacttccgggtacacactttcgaagaa

SEQ ID NO: 138681 - DNA, 75 bp, synthetic construct
  source 1..75: mol_type = other DNA
ggttaacaacctggctggtctggcgtcgcggtgcgaaaacgcgtccgctcgaggcatttattcaactgctggatg

SEQ ID NO: 138682 - DNA, 75 bp, synthetic construct
  source 1..75: mol_type = other DNA
gccggggcatcaccaggttgaagcgtggccgttagctgagcaatggcgttggttaacaacctggctggtctggcg

SEQ ID NO: 138683 - DNA, 75 bp, synthetic construct
  source 1..75: mol_type = other DNA
ttccacgctctatgctggaaagtatgccggggcatcaccaggttgaagcgtggccgttagctgagcaatggcgtt

SEQ ID NO: 138684 - DNA, 75 bp, synthetic construct
  source 1..75: mol_type = other DNA
ggacgaatttattggtatgtggatcacgctcatggcgctgccgaccaatgactggcagtgggtcgccgccgggtt

SEQ ID NO: 138685 - DNA, 75 bp, synthetic construct
  source 1..75: mol_type = other DNA
ggggatcatgatagatgatattgtcgccggggtgatctccgctggcatcctgtattttatcggtcatcattggcc

SEQ ID NO: 138686 - DNA, 75 bp, synthetic construct
  source 1..75: mol_type = other DNA
tcgtggtgcgaaaacgcgtccgctcgaggcatttattcaactactggatgtgcctgactcgacaaaacagggtta

SEQ ID NO: 138687 - DNA, 75 bp, synthetic construct
  source 1..75: mol_type = other DNA
gatctggaatacctggaaccagactggtgttgaactcggttggtttaaacaaaaaaacaaaacccaacagggtgt

SEQ ID NO: 138688 - DNA, 75 bp, synthetic construct
  source 1..75: mol_type = other DNA
ataattcatatgccagcagctttgccagcttttctgatgccagtaataccatggcgcatggtcgttattattatg

SEQ ID NO: 138689 - DNA, 75 bp, synthetic construct
  source 1..75: mol_type = other DNA
gccttgaattgcttgaaaatgaattgtcgaaaaataaacaagagctgaaagcaacacagaatgaactgggagtat

SEQ ID NO: 138690 - DNA, 75 bp, synthetic construct
  source 1..75: mol_type = other DNA
gtgctagcacgcgcacccgcacaagccgcgccgcgaatgattcgcgaactgtccggcagaaactctaccagtgca

SEQ ID NO: 138691 - DNA, 75 bp, synthetic construct
  source 1..75: mol_type = other DNA
ggccctggtggtaagcggcgcggtttgggcggctaatggcgtcgattttagccagtcgccggaagtatccgggac

SEQ ID NO: 138692 - DNA, 75 bp, synthetic construct
  source 1..75: mol_type = other DNA
acgtacccaacggggctgcctaccgaaccaccgtgcgtcgccattccgcacacggaccataaacatgtccggcac

SEQ ID NO: 138693 - DNA, 75 bp, synthetic construct
  source 1..75: mol_type = other DNA
caccatgacagtcatctcgctgctggtggggctacgaccgtaccgcttgttgctggcaacgcagcctttacgcgt

SEQ ID NO: 138694 - DNA, 75 bp, synthetic construct
  source 1..75: mol_type = other DNA
gatggtgctgctcaaacccgtgctacctgccgctttacctcctgccagcctctggccgtggctgtgggcgctcgg

SEQ ID NO: 138695 - DNA, 75 bp, synthetic construct
  source 1..75: mol_type = other DNA
agcgttaccactacagaagaacagcgacgcaccgaatggatggttactgaatcgctggccgatttcctcgaccca

SEQ ID NO: 138696 - DNA, 75 bp, synthetic construct
  source 1..75: mol_type = other DNA
tgctcgggtttgtttctggcctggtggccgcaattggtgcggaaacggcgctggcagtgttgcaggcgaaagtgt

SEQ ID NO: 138697 - DNA, 75 bp, synthetic construct
  source 1..75: mol_type = other DNA
gaccgttggcaacaacaactgccgccagaaagcccgaactactttttaatcaacatcgctacggaacaggttacg

SEQ ID NO: 138698 - DNA, 75 bp, synthetic construct
  source 1..75: mol_type = other DNA
tgatttcccgtgggagccagactggcgattgtggattgtgctgccgtgcagcggtgcgctactgctgtcgctttg

SEQ ID NO: 138699 - DNA, 75 bp, synthetic construct
  source 1..75: mol_type = other DNA
acatcaaaacacgcctccggcgttcactcttcagaagatatcccgtggcatgagctgccagcttcacacagggga

SEQ ID NO: 138700 - DNA, 75 bp, synthetic construct
  source 1..75: mol_type = other DNA
attgtcgccggggtgatttccgcaggcatcctgtactttattggacatcactggccgctgggtattctgtcgtag

SEQ ID NO: 138701 - DNA, 75 bp, synthetic construct
  source 1..75: mol_type = other DNA
tggaaaccgtggccgatccgctggtttgatcgcaatgtgcatggcggcatggggatcatgatcgatgatattgtc

SEQ ID NO: 138702 - DNA, 75 bp, synthetic construct
  source 1..75: mol_type = other DNA
atcgctggccgatttcctcgacccgcatgatccgagtaagacagttgaaggttatccggcacctaaacgcgcggt

SEQ ID NO: 138703 - DNA, 75 bp, synthetic construct
  source 1..75: mol_type = other DNA
ttacgcgcaaatgcgtaatgtctatttcatcccttccgcgctggcgctgaaaaactggctgaagaagtgtggttt

SEQ ID NO: 138704 - DNA, 75 bp, synthetic construct
  source 1..75: mol_type = other DNA
ttattaccgttggggattgagcagcttccagcgctgaaagcctttgataccgtattttcgatgggcgtgctttat

SEQ ID NO: 138705 - DNA, 75 bp, synthetic construct
  source 1..75: mol_type = other DNA
gtacccggatccggaaacgctgcaaattttcggtgtggtgacggccttcattcataaaacccgggggacagactg

SEQ ID NO: 138706 - DNA, 75 bp, synthetic construct
  source 1..75: mol_type = other DNA
cttcactgttaaacagctccagactactcccagactggccctgttgcctatgaacaatgcttattccccaattta

SEQ ID NO: 138707 - DNA, 75 bp, synthetic construct
  source 1..75: mol_type = other DNA
gaacggctcgatcaccaggaataccgacaaattctggcagatacagaacaggaaactcatctgaaaaaattacgg

SEQ ID NO: 138708 - DNA, 75 bp, synthetic construct
  source 1..75: mol_type = other DNA
tacggaaaagacggcaacggtgaagatatattgctccctacccccgacaaagataaatgcatgtttgacgcagaa

SEQ ID NO: 138709 - DNA, 75 bp, synthetic construct
  source 1..75: mol_type = other DNA
tgccgatgaatcccgcctaccccaccctctacccggaggaactgcagatattcggcgtggtgatggcattcatac

SEQ ID NO: 138710 - DNA, 75 bp, synthetic construct
  source 1..75: mol_type = other DNA
tggcgagttcaccgttaaacgcctgcagcttaaaccccgaatcgccctgctgccgatgaatcccgcctaccccac

SEQ ID NO: 138711 - DNA, 75 bp, synthetic construct
  source 1..75: mol_type = other DNA
acgcacttatcaggaacgcctcgatacgctggaaaaagtgcgcgatgccgggatcaaagtctgctcaggtggcat

SEQ ID NO: 138712 - DNA, 75 bp, synthetic construct
  source 1..75: mol_type = other DNA
gaacatattgaccgacaggagtaccgcaaaattctggcgggcactgagcaggaaatgcgcctgaaaaaattacgc

SEQ ID NO: 138713 - DNA, 75 bp, synthetic construct
  source 1..75: mol_type = other DNA
aaaccgggatgcgatttacggatggtaactggaacctgacgccgtatgcatcgttaacggggttcaccgctgata

SEQ ID NO: 138714 - DNA, 75 bp, synthetic construct
  source 1..75: mol_type = other DNA
gttttttgctcaccatgacggatgatgatggaaatatccatgagctggggactaacacttttggacttatcagta

SEQ ID NO: 138715 - DNA, 75 bp, synthetic construct
  source 1..75: mol_type = other DNA
atgcaggttaattgtttttttaatagcgaaattttctattcattcgtgatcaagatcacgatgctgtcgcaatgt

SEQ ID NO: 138716 - DNA, 75 bp, synthetic construct
  source 1..75: mol_type = other DNA
ataacgatgatgtcgatgcctttgattttattcgcaccattgcagttgcgcggatcatgatgccgacctcttacg

SEQ ID NO: 138717 - DNA, 75 bp, synthetic construct
  source 1..75: mol_type = other DNA
gaacaaaatgatgggatctattattttcaatgtaactggtcagctaacccacgctttgcgcatgaattgcgttgt

SEQ ID NO: 138718 - DNA, 75 bp, synthetic construct
  source 1..75: mol_type = other DNA
agaacgtgcaaagcaaaccgttgacggtatacctatcgcgctcgatcctttgctgcagtcacttcgagcaccgga

SEQ ID NO: 138719 - DNA, 75 bp, synthetic construct
  source 1..75: mol_type = other DNA
atgcttttcatgaaaagcagttacctcatggagatctttgcccagagaaactgctggtacaagtcggggagcaga

SEQ ID NO: 138720 - DNA, 75 bp, synthetic construct
  source 1..75: mol_type = other DNA
aagctggcccaggtggcgtatggagtgctgaagtcaggcgtgccgttcgatgcggcacggcataatccagtagcg

SEQ ID NO: 138721 - DNA, 75 bp, synthetic construct
  source 1..75: mol_type = other DNA
acacttctgaacctatagatatgatgaaaggaatggatatcgttgtattgccaactataaaaccagaaccatttg

SEQ ID NO: 138722 - DNA, 75 bp, synthetic construct
  source 1..75: mol_type = other DNA
ctattggctattcgctttgattttgatgctgctcgtaagcgaattagtagcggcagccagctacaattggaatcg

SEQ ID NO: 138723 - DNA, 75 bp, synthetic construct
  source 1..75: mol_type = other DNA
atgtcatcaatccgcttaactacgagaatgaaagaggaaatcgctcgtaacgatttaattaagtctggggttttc

SEQ ID NO: 138724 - DNA, 75 bp, synthetic construct
  source 1..75: mol_type = other DNA
tgaagtttggcctgaaagcaaagagttgctaccaaaagaagcagataaagcaagtacagcacttcctgctttacg

SEQ ID NO: 138725 - DNA, 75 bp, synthetic construct
  source 1..75: mol_type = other DNA
cagagttattgcgtttggcgggaaaaagaaaactgaggaagtggacaaactggcatcaaacttaatggctataag

SEQ ID NO: 138726 - DNA, 75 bp, synthetic construct
  source 1..75: mol_type = other DNA
gatcgatagttcgagccctaatgaagcaggtgcagaagaacataagggtaatggtcgttactataatcaacgaga

SEQ ID NO: 138727 - DNA, 75 bp, synthetic construct
  source 1..75: mol_type = other DNA
caggcctttgccactaaaagaaagcggttatcttgcgaacgataagccattctttagtcaccctcacatggtcta

SEQ ID NO: 138728 - DNA, 75 bp, synthetic construct
  source 1..75: mol_type = other DNA
cagagttattgcgtttggcggtaaaaagaaaactgaggaagtggatcagttatcatccaggttagtagctataag

SEQ ID NO: 138729 - DNA, 75 bp, synthetic construct
  source 1..75: mol_type = other DNA
ccaaatccgaaaccggatccaaaaccagacccaaaaccggatccgaaaccagacccgactcccgatccaacgccg

SEQ ID NO: 138730 - DNA, 75 bp, synthetic construct
  source 1..75: mol_type = other DNA
gaatattcagataggtgcctgggtactggcacgccactttcagagctgtggtgtgaactggaactgtcttggcag

SEQ ID NO: 138731 - DNA, 75 bp, synthetic construct
  source 1..75: mol_type = other DNA
ctggaagaaggggtgaatttgctgccaggtttttcaccggagctgcaaggtgtctatagcgaaaccgatgcggat

SEQ ID NO: 138732 - DNA, 75 bp, synthetic construct
  source 1..75: mol_type = other DNA
cccgataaaaattcttcgctgcataaacaacactgtgttgtacagaagaatggatgggcgaacacagtcggtaaa

SEQ ID NO: 138733 - DNA, 75 bp, synthetic construct
  source 1..75: mol_type = other DNA
agcttctcatcaccgatcttttactgcgtattgagcattacctgcaaccgggcgttgtgctaccggttcctcatc

SEQ ID NO: 138734 - DNA, 75 bp, synthetic construct
  source 1..75: mol_type = other DNA
tctgagcgccggttcgcctggcgcggcgttggggctgtttcagggagatacctggcaggcacgtgagatactttg

SEQ ID NO: 138735 - DNA, 75 bp, synthetic construct
  source 1..75: mol_type = other DNA
tacgcatccctggcatggaaatgctggttaagaactatggcatcatgctgcggattcaatatgaggtgtactggc

SEQ ID NO: 138736 - DNA, 75 bp, synthetic construct
  source 1..75: mol_type = other DNA
cacgcagctggccataacctcctccagttatctggtattctcttttattgtcaattatatggctgtactggcaac

SEQ ID NO: 138737 - DNA, 75 bp, synthetic construct
  source 1..75: mol_type = other DNA
ggcatcagaccccgaagccgccgcacgcctggcatccacacttcagcaggtccagaacaccatgaaaacacccgt

SEQ ID NO: 138738 - DNA, 75 bp, synthetic construct
  source 1..75: mol_type = other DNA
aagacgactactccaacacaatcgagatctacgatgcgttacctaagtacatttgggaccaaaagcgtgagcacg

SEQ ID NO: 138739 - DNA, 75 bp, synthetic construct
  source 1..75: mol_type = other DNA
tattcgtaactctgtcgctgcatattatgcaaaatattacctgagtggtggggatgctttaatttcaccgttttt

SEQ ID NO: 138740 - DNA, 75 bp, synthetic construct
  source 1..75: mol_type = other DNA
gtgactttcctgacggatatccagcttcccatttattgggcatccattgctgagtccgtggattacggtgaaatg

SEQ ID NO: 138741 - DNA, 75 bp, synthetic construct
  source 1..75: mol_type = other DNA
ctgtcgctactgggcacgttgattgtgcgttccggcattctggtttcagtccatgcgttcgcgctggataacgtg

SEQ ID NO: 138742 - DNA, 75 bp, synthetic construct
  source 1..75: mol_type = other DNA
tgatggcaaattgtggcaggattatccgacgtcagtgttagccagcgaccggcgttttttcagttttgagccggg

SEQ ID NO: 138743 - DNA, 75 bp, synthetic construct
  source 1..75: mol_type = other DNA
gtttgcctggcattatcggcagcaaaccgatccgctatttccgctgacgttagccgttttatctctcatgctcgc

SEQ ID NO: 138744 - DNA, 75 bp, synthetic construct
  source 1..75: mol_type = other DNA
atgatgcgactcacttgcatcggcattctggcgcagttcgcgctcctgctgctcgcctttggcgtactgacgtat

SEQ ID NO: 138745 - DNA, 75 bp, synthetic construct
  source 1..75: mol_type = other DNA
gcgggaaatgttaatcctcgctacgctgttgctgttttgcgcagtgctactgatcgtgctggtgggaacgcttta

SEQ ID NO: 138746 - DNA, 75 bp, synthetic construct
  source 1..75: mol_type = other DNA
tgctgcaacatcccggtcttatctttcatccaccgctgctttatctcggctatggcggtttgatggtagcggcga

SEQ ID NO: 138747 - DNA, 75 bp, synthetic construct
  source 1..75: mol_type = other DNA
atgttcgctctgattcaacgtggtcagatatacaccgatagtgctggctacccgataaaaattattcgctgcata

SEQ ID NO: 138748 - DNA, 75 bp, synthetic construct
  source 1..75: mol_type = other DNA
ttccggcgctactggcgcattccggtgtgttgctgtttgccgccggtatcgtggtttccagcgttagtcgtcagg

SEQ ID NO: 138749 - DNA, 75 bp, synthetic construct
  source 1..75: mol_type = other DNA
atgatgcggcttgcctgcattggcatcctggcgcagttcgcgctgctactgctggcgtttgccattcttactttt

SEQ ID NO: 138750 - DNA, 75 bp, synthetic construct
  source 1..75: mol_type = other DNA
cagcaaatgatagaaccgtcaattcgctggaacggcatccatgactggtatgcggtcatgggtgaaaaaaccgga

SEQ ID NO: 138751 - DNA, 75 bp, synthetic construct
  source 1..75: mol_type = other DNA
ctgccagcggcaccgctcggcctgaaatccgtaacggcgatatttaccgcgataaatatggcggcatggtaacga

SEQ ID NO: 138752 - DNA, 75 bp, synthetic construct
  source 1..75: mol_type = other DNA
ctgtttaactatggacgggcaatgtatcggctggagaatacgcctcacgaagaaaatgtttcagtgagttcggat

SEQ ID NO: 138753 - DNA, 75 bp, synthetic construct
  source 1..75: mol_type = other DNA
acccggtccggaaggggagccgcagccagccagttatccgccgcaaaccggcgccgcggtaccgcctccgacggc

SEQ ID NO: 138754 - DNA, 75 bp, synthetic construct
  source 1..75: mol_type = other DNA
cggcgtgttctgggtaatggcgctggtggcgctgccggcaatgtttttgcgcccgaaagttgttccctcatgctg

SEQ ID NO: 138755 - DNA, 75 bp, synthetic construct
  source 1..75: mol_type = other DNA
agcgcgcattaatgtaacggcctatcagggcaaagtgctgctggttgggcagtcaccaaacgctgaactttcggc

SEQ ID NO: 138756 - DNA, 75 bp, synthetic construct
  source 1..75: mol_type = other DNA
acccagggcgcggaggggacattcagcgagtccacgggggccagtcaggattcggcacgctggggggtgggcaag

SEQ ID NO: 138757 - DNA, 75 bp, synthetic construct
  source 1..75: mol_type = other DNA
aagaccaatgaccagagttcaattgttcaactatgggcgggctatgtatcggctggagacttcagagcaaacaga

SEQ ID NO: 138758 - DNA, 75 bp, synthetic construct
  source 1..75: mol_type = other DNA
ttttctgcgcaatgttttttaagacaaaaattatttagtttctctttttggcgattcaggagtttatgcgttttg

SEQ ID NO: 138759 - DNA, 75 bp, synthetic construct
  source 1..75: mol_type = other DNA
tgttatcgcgatagccacatatctgttctactcggttggtagtggtcgtatccctttttattccgatatagttca

SEQ ID NO: 138760 - DNA, 75 bp, synthetic construct
  source 1..75: mol_type = other DNA
atgcaacgtcaatataaaaaatacattcttcttttttggggtgtcatggatgttatcgcgatagccacatatctg

SEQ ID NO: 138761 - DNA, 75 bp, synthetic construct
  source 1..75: mol_type = other DNA
cacgtcttcattgtttcataactcaatttttggagacaatactgttataaacttcggaaatgaaaactcattttc

SEQ ID NO: 138762 - DNA, 75 bp, synthetic construct
  source 1..75: mol_type = other DNA
tcaatcagtcaaatcgaagaactagtgaccaatgctggtgatagccatgctcttcagcagccaattcctttagat

SEQ ID NO: 138763 - DNA, 75 bp, synthetic construct
  source 1..75: mol_type = other DNA
ttgttggcacaagaattcttgcagatctgaacaatggcattcgcctatatagagcttttcctttaccgattggct

SEQ ID NO: 138764 - DNA, 75 bp, synthetic construct
  source 1..75: mol_type = other DNA
cctgttgccgacagccggagaggctgctgcgcagggctggaccataagcggcggcagtagttgcgttgtcgggtg

SEQ ID NO: 138765 - DNA, 75 bp, synthetic construct
  source 1..75: mol_type = other DNA
accggagattaaaccctcgcccggcggcgacactccatcggggccgtctgatggtgacacatccgttcgtacagt

SEQ ID NO: 138766 - DNA, 75 bp, synthetic construct
  source 1..75: mol_type = other DNA
ggttcggcattcacccagggcgcggaggggacattcagtgcggacgcgggggccagccaggattcggcacgctgg

SEQ ID NO: 138767 - DNA, 75 bp, synthetic construct
  source 1..75: mol_type = other DNA
ccggaaacacgaagctgggggagttcggcgattacggtaacgactggcagacgctggagctggtgttcaccgccg

SEQ ID NO: 138768 - DNA, 75 bp, synthetic construct
  source 1..75: mol_type = other DNA
ctgatatcactaaaaatgccgcgtacggcgtcgatatcggcagcctggtgctggaaatcaataatcccgcagcat

SEQ ID NO: 138769 - DNA, 75 bp, synthetic construct
  source 1..75: mol_type = other DNA
actgacggcagagtgaatctgatgcatcacaggaaagccggaaacacgaagctgggggagttcggcgattacggt

SEQ ID NO: 138770 - DNA, 75 bp, synthetic construct
  source 1..75: mol_type = other DNA
gaaagcggcggcagatattgccagccgggtgagtggtgtgaaacgtgtgaccacggcatttacgtttattaaata

SEQ ID NO: 138771 - DNA, 75 bp, synthetic construct
  source 1..75: mol_type = other DNA
atgaaggcattatcgccaatcgcagtccttatttccgcactgctgttgcaaggttgcgttgctgccgccgtagtg

SEQ ID NO: 138772 - DNA, 75 bp, synthetic construct
  source 1..75: mol_type = other DNA
gaagtgcgcgttaaccgcgcattgtcgaaggacgaacagattaagaaagaagcgcgcattaatgtcacggcgtat

SEQ ID NO: 138773 - DNA, 75 bp, synthetic construct
  source 1..75: mol_type = other DNA
atggcgggcgaggctgccgtgtccgactccatcagcctggcatgggcagcctccctggcatcgatcgcggtggcg

SEQ ID NO: 138774 - DNA, 75 bp, synthetic construct
  source 1..75: mol_type = other DNA
atccggtggatgacgcagtctccctgctgacacggggtggcagactgagctgtaagtttcgactgtcaggcgcac

SEQ ID NO: 138775 - DNA, 75 bp, synthetic construct
  source 1..75: mol_type = other DNA
gtgatgtggtggtcagtggtgcaactgagccggattggtactacgtcatcgtactggccgggcagtccaatgcca

SEQ ID NO: 138776 - DNA, 75 bp, synthetic construct
  source 1..75: mol_type = other DNA
gtgaggctctggatgcctggatatgtcgaccaggaatgacacaggagcaggcgacgatattaatcactgaatcat

SEQ ID NO: 138777 - DNA, 75 bp, synthetic construct
  source 1..75: mol_type = other DNA
attgctttcaagcgtgcctatcgtcagcagtaccaacaaaaagccggatggaattatgagccttctttttgctga

SEQ ID NO: 138778 - DNA, 75 bp, synthetic construct
  source 1..75: mol_type = other DNA
cacgccgtgggggctgctcatcagcggcggcactgccctcccgctcgctggccatccatatgagcatcctcgatt

SEQ ID NO: 138779 - DNA, 75 bp, synthetic construct
  source 1..75: mol_type = other DNA
atgaaaatcacccttgagcaggcacgcgatgccctggatgcctggataagccgaccaggaatgacgcaggagcag

SEQ ID NO: 138780 - DNA, 75 bp, synthetic construct
  source 1..75: mol_type = other DNA
cgaccaggaatgacacaggagcaggcgacgatattaatcacggaagcattctgggctctgaaagaacgcccgaac

SEQ ID NO: 138781 - DNA, 75 bp, synthetic construct
  source 1..75: mol_type = other DNA
agccttcccagcaatcgtcgattgttataccagtccacccacgttagtgtggccagttccacttctgcacggttt

SEQ ID NO: 138782 - DNA, 75 bp, synthetic construct
  source 1..75: mol_type = other DNA
acggtaacgctgaattttaaggcttttgtgcaggcaacacctgatgccattgcacagaaaagcgtacagcccgga

SEQ ID NO: 138783 - DNA, 75 bp, synthetic construct
  source 1..75: mol_type = other DNA
accgtccagtttctggaacgaccggtaaaggattttcagtatgcacccgggcgggggccggcggagaatttcagt

SEQ ID NO: 138784 - DNA, 75 bp, synthetic construct
  source 1..75: mol_type = other DNA
atacagatactatccctgttgtaggcgttgctgctgcattgcttacttatgctggcggtattttggcaatgattg

SEQ ID NO: 138785 - DNA, 75 bp, synthetic construct
  source 1..75: mol_type = other DNA
ttatgggcaaaaggtgcataagctgacgctgcacggcggttttagctgccctaaccgtgacggtaccatcgggcg

SEQ ID NO: 138786 - DNA, 75 bp, synthetic construct
  source 1..75: mol_type = other DNA
acaggcaacacctgatgcactggcacagaaaagtgtgaccccgggggggtatgaatcaacagcgaattttgagtt

SEQ ID NO: 138787 - DNA, 75 bp, synthetic construct
  source 1..75: mol_type = other DNA
acggtaacgctgagttttaaggcttttgtgcaggcaacacctgatgctattgcacagaaaagcgttcagcccgga

SEQ ID NO: 138788 - DNA, 75 bp, synthetic construct
  source 1..75: mol_type = other DNA
aaaacgggacaataatcgctcacaatcgataccttctggtgatgagccttcccgaagacgtcatgctccgagcat

SEQ ID NO: 138789 - DNA, 75 bp, synthetic construct
  source 1..75: mol_type = other DNA
gagtgctgaacattttgtgatgaatgcaacggaggaggaagcgcggcgcgggcttactagagtgatgggggaatt

SEQ ID NO: 138790 - DNA, 75 bp, synthetic construct
  source 1..75: mol_type = other DNA
cactttgtcatggagctcagcgccagcctgctggctaccgtaccgaatatctcgtatgccgaaatgaccgacggc

SEQ ID NO: 138791 - DNA, 75 bp, synthetic construct
  source 1..75: mol_type = other DNA
tctgaaataccagatgagaaaaacatgacagaaaaacttaaaaatatcgacacgtcttcattattccataactca

SEQ ID NO: 138792 - DNA, 75 bp, synthetic construct
  source 1..75: mol_type = other DNA
ttggccaatgatcttctccgggaaatgcgtgagtatgatgtatggttacagtgtgactgtattccgggagattcg

SEQ ID NO: 138793 - DNA, 75 bp, synthetic construct
  source 1..75: mol_type = other DNA
catggccgttgtgcttatggctgaattagcactgtccgggcctgataaaatttcgcatcgtatacgctggaatgg

SEQ ID NO: 138794 - DNA, 75 bp, synthetic construct
  source 1..75: mol_type = other DNA
acaccatatcaggagagaaagcgtcagccgctcagggcaaaaaaagggcgaattaaacgggcgatgtttcagaag

SEQ ID NO: 138795 - DNA, 75 bp, synthetic construct
  source 1..75: mol_type = other DNA
agcagcagagcgccagaaaaaagaccggtcgcgttaagcgaaaaatgtttgcgaaacttatcaccagtcgttttt

SEQ ID NO: 138796 - DNA, 75 bp, synthetic construct
  source 1..75: mol_type = other DNA
gtggagtccggactgctttttgctgatcctgccgtagtggatcgtgaaacattactcataccacgaaataaaaga

SEQ ID NO: 138797 - DNA, 75 bp, synthetic construct
  source 1..75: mol_type = other DNA
cctgccggtgcgacctatattgtgcagcagttttcaggaacagtgtcagatgttacctgggtagaggtggataaa

SEQ ID NO: 138798 - DNA, 75 bp, synthetic construct
  source 1..75: mol_type = other DNA
cagccaggaagtgcaatatccggcacgtcccttactcggttttagccgggacgatgagcagatgattgaagacat

SEQ ID NO: 138799 - DNA, 75 bp, synthetic construct
  source 1..75: mol_type = other DNA
ccctacgcaccacgccagcagcagagcgccagaaaaaagaccggtcgcgttaagcgaaaaatgtttgcgaaactt

SEQ ID NO: 138800 - DNA, 75 bp, synthetic construct
  source 1..75: mol_type = other DNA
gcgccgttaccctcgattttcaccgtgagcaaccggatgccccgcagcaagcgtcttataccgtattgcgcaacc

SEQ ID NO: 138801 - DNA, 75 bp, synthetic construct
  source 1..75: mol_type = other DNA
ttccaggctttgcagcatcagcgccggtagaacgcaaggtcacacgcgagaaaatctccttcttaaccgaagaaa

SEQ ID NO: 138802 - DNA, 75 bp, synthetic construct
  source 1..75: mol_type = other DNA
ttgtggtcggtgcgggcgttgccggtagcgttgccgcactggtcatggcgcgagccggactggatgtcctggtga

SEQ ID NO: 138803 - DNA, 75 bp, synthetic construct
  source 1..75: mol_type = other DNA
gagctggaacaaagctgcgtcatgcgtgatatgcagcattttcgcaagatcccggcgctgatggaaaacccgcgc

SEQ ID NO: 138804 - DNA, 75 bp, synthetic construct
  source 1..75: mol_type = other DNA
agccgagcaggcgggcgcacagtttatcccgggagttcgcgtcgatgcgttggttcgtgaaggaaacaaggtcac

SEQ ID NO: 138805 - DNA, 75 bp, synthetic construct
  source 1..75: mol_type = other DNA
gccagaacaaatcaacgatcgctttaacgttaccgacaatgaaggcgccgcctggctgtttgccggttctccttc

SEQ ID NO: 138806 - DNA, 75 bp, synthetic construct
  source 1..75: mol_type = other DNA
cggttactccgaaactgaatggagtggctggcccggcattccaggttataaaagacggtctgacactgggactga

SEQ ID NO: 138807 - DNA, 75 bp, synthetic construct
  source 1..75: mol_type = other DNA
agttcgggctggggatttatctgtatacggatgctcccgttcctgatggtgtggcgatgacgggtaccggtaatc

SEQ ID NO: 138808 - DNA, 75 bp, synthetic construct
  source 1..75: mol_type = other DNA
cagtcaggattcggcacgctggggggtgggcaagccgttatatcaggatctgatttcccgcacaaaagcggcatt

SEQ ID NO: 138809 - DNA, 75 bp, synthetic construct
  source 1..75: mol_type = other DNA
gattagcggcggcaaactgcttgaatattccgcgcatatggtgccggaaggcggtctggcaatggtgccgcaact

SEQ ID NO: 138810 - DNA, 75 bp, synthetic construct
  source 1..75: mol_type = other DNA
ggtgacgccgcaggcttctgcctgaatttgggttttacagttcgcggcatggatttagccattgcatcggctcag

SEQ ID NO: 138811 - DNA, 75 bp, synthetic construct
  source 1..75: mol_type = other DNA
atgtcgattaaacgttatgatttggtcagggctgcctcgccgtcagatctggcggaaaaactgacacaaaagctg

SEQ ID NO: 138812 - DNA, 75 bp, synthetic construct
  source 1..75: mol_type = other DNA
ccatgctgacacagtttcgtgctgacctctccgtgtttaacgcgcagtgccatggtggcagtgctgcagatgtgc

SEQ ID NO: 138813 - DNA, 75 bp, synthetic construct
  source 1..75: mol_type = other DNA
atggaacagcgcactgtcggcattggtcgtctggacccggaaatcgcccgcgatttcagtaacgttggcccgatg

SEQ ID NO: 138814 - DNA, 75 bp, synthetic construct
  source 1..75: mol_type = other DNA
tgcagttcttccgcgtgcgtgaaacctccatgaaaatggcagagatccttaccggtgcgcgtaaaacctacggcc

SEQ ID NO: 138815 - DNA, 75 bp, synthetic construct
  source 1..75: mol_type = other DNA
ggcagtgccacggttactccgaaactgaatggagtggctggcccggcattccaggtcataaaagacagtctgaca

SEQ ID NO: 138816 - DNA, 75 bp, synthetic construct
  source 1..75: mol_type = other DNA
tcaccgccggcagtgccacggttactccgaaactgaatggagtggctggcccggcattccaggttataaaagaca

SEQ ID NO: 138817 - DNA, 75 bp, synthetic construct
  source 1..75: mol_type = other DNA
gatacgtccgttcgcacaatctccctgctgccggcagccggagaggctgctgcgcagggctggagcattaaggat

SEQ ID NO: 138818 - DNA, 75 bp, synthetic construct
  source 1..75: mol_type = other DNA
atttcagttcatgggcgcgcaggtagcattattccggatcgtgtggcaaccgctattctgaacgcagccgggcgc

SEQ ID NO: 138819 - DNA, 75 bp, synthetic construct
  source 1..75: mol_type = other DNA
atttcagttcatgggcgcgcaggaagcattattccggatcgtttggcaaccgctattctgaacgcagccgggcgc

SEQ ID NO: 138820 - DNA, 75 bp, synthetic construct
  source 1..75: mol_type = other DNA
attccggccgaccactgcctgcatgatgtgcaggatatgagtacgctgaatcatccgaaggcagacctgagcaaa

SEQ ID NO: 138821 - DNA, 75 bp, synthetic construct
  source 1..75: mol_type = other DNA
aagaagagcaaagtggtgccgtacaaagaactcgagcgttacagcattgagcgtaaaaactcgccgctgaaataa

SEQ ID NO: 138822 - DNA, 75 bp, synthetic construct
  source 1..75: mol_type = other DNA
catcacaggaaagccggaaacacgaagctgggggagttcggcgattacggtaacgactggcagacgctggagctg

SEQ ID NO: 138823 - DNA, 75 bp, synthetic construct
  source 1..75: mol_type = other DNA
gtacaaaaacagggagagtgagggcgtttattttgtgcccttcatgacagacggtaacggcgtcaataccgccac

SEQ ID NO: 138824 - DNA, 75 bp, synthetic construct
  source 1..75: mol_type = other DNA
agagggttgtacgtataacgacatcatcccggctgaccactgtctgcatgatgtgcaggatatgagtacgctgaa

SEQ ID NO: 138825 - DNA, 75 bp, synthetic construct
  source 1..75: mol_type = other DNA
gttgtgcttgccgggcagtccaacggcatggcttacggtgaagggcttccgttaccggattcttacgatgctccg

SEQ ID NO: 138826 - DNA, 75 bp, synthetic construct
  source 1..75: mol_type = other DNA
acacacgggtagcttacgagcccggcaccccgtggtatctcatgcaggccatggtggccgatggtgccaccgaga

SEQ ID NO: 138827 - DNA, 75 bp, synthetic construct
  source 1..75: mol_type = other DNA
ggcagctgaactggacgcgctgggtaaagcactgaaagaacctgctcgcccgatggtggctatcgttggtggttc

SEQ ID NO: 138828 - DNA, 75 bp, synthetic construct
  source 1..75: mol_type = other DNA
caccttagccttcatcagtggtaaggcaccggaaatcaaaccctcgcccggcggcaacacgccatcgggtccgtc

SEQ ID NO: 138829 - DNA, 75 bp, synthetic construct
  source 1..75: mol_type = other DNA
cttgccggacagtccaacggcatggcttacggtgaagggcttccgttaccggattcttacgatgctccggatccg

SEQ ID NO: 138830 - DNA, 75 bp, synthetic construct
  source 1..75: mol_type = other DNA
gcgtctgggcgataaagtgctggaagtcagcaacctgcgtaaatcctacggtgatcgcctgctgattgatgacct

SEQ ID NO: 138831 - DNA, 75 bp, synthetic construct
  source 1..75: mol_type = other DNA
acgaccgttacttcctcgataacgttgcgggctggatcctcgaacttgaccgcggtgaaggtattccgtgggaag

SEQ ID NO: 138832 - DNA, 75 bp, synthetic construct
  source 1..75: mol_type = other DNA
tcatccgaaggcagacctgagcaaagggcagtacggctgtgtcggccagggcttacatattgccaaaaaactgct

SEQ ID NO: 138833 - DNA, 75 bp, synthetic construct
  source 1..75: mol_type = other DNA
gcgggctggatcctcgaacttgaccgtggcgaaggtattccgtgggaaggtaactactcctcctggctggagcag

SEQ ID NO: 138834 - DNA, 75 bp, synthetic construct
  source 1..75: mol_type = other DNA
ctcacgacggtcacaacctgaacgttcagctggagcgtgcggcggatgcgctgcgtctgccggactgggacgcga

SEQ ID NO: 138835 - DNA, 75 bp, synthetic construct
  source 1..75: mol_type = other DNA
gtggcaaaaaacattcaagccattcgcatgaacgattacctgcctggcgaaacggccatctggcagcgcattgaa

SEQ ID NO: 138836 - DNA, 75 bp, synthetic construct
  source 1..75: mol_type = other DNA
gtgagcactttgctggtctgtgcaaactgctggagagcgcggggatcgtttacaccgtaaaccagcgtctggtgc

SEQ ID NO: 138837 - DNA, 75 bp, synthetic construct
  source 1..75: mol_type = other DNA
ccggaatttaaagccgatcctgttgtcgatatatacctggtggcttcaggtgctgatacacaatctgcggctatg

SEQ ID NO: 138838 - DNA, 75 bp, synthetic construct
  source 1..75: mol_type = other DNA
atggcatttaaacactatgatgttgtcaaggcggcgtcgccgtcagagcttgcggaaaagctgacacacaaactg

SEQ ID NO: 138839 - DNA, 75 bp, synthetic construct
  source 1..75: mol_type = other DNA
tggtggcgcgcgctgggtatctccgaacacgtaactcttgagctgaactctatcggttcgctggaagcacgtgcc

SEQ ID NO: 138840 - DNA, 75 bp, synthetic construct
  source 1..75: mol_type = other DNA
tacaccgtaaaccagcgtctggtgcgtggtctggattactataaccgtaccgttttcgagtgggtgactaacagc

SEQ ID NO: 138841 - DNA, 75 bp, synthetic construct
  source 1..75: mol_type = other DNA
cggttggcgtgttcgaattcccgaacttccgcaaaggtactgaaatcgtggctaacgctatcgcagacagcgaag

SEQ ID NO: 138842 - DNA, 75 bp, synthetic construct
  source 1..75: mol_type = other DNA
tactgctcaccgcgcgcaggcttctactcacggtatcggtaaattcgctgacgttgcgtgcgcaggcccgctgct

SEQ ID NO: 138843 - DNA, 75 bp, synthetic construct
  source 1..75: mol_type = other DNA
tctccactggcggcggcgcattcctcgaattcgtggaaggtaaagtactgcctgcagtagcgatgctcgaagagc

SEQ ID NO: 138844 - DNA, 75 bp, synthetic construct
  source 1..75: mol_type = other DNA
gtggcctggattactataaccgtaccgttttcgagtgggtgactaacagcctcggttcccagggcaccgtgtgtg

SEQ ID NO: 138845 - DNA, 75 bp, synthetic construct
  source 1..75: mol_type = other DNA
gtctgcaaggcccggatatcgacgccgaactgattatgctcaccgcccgctggtggcgcgcgctgggtatctctg

SEQ ID NO: 138846 - DNA, 75 bp, synthetic construct
  source 1..75: mol_type = other DNA
aaaacgtctgctgaccacctgcaacatcccggttccgtctgatgttcgcgtagcaaccgagttctctgaaactgc

SEQ ID NO: 138847 - DNA, 75 bp, synthetic construct
  source 1..75: mol_type = other DNA
gaggcacttaccgacgcgctcttactcgctgaagacgaacgcgttttggggtacagaatcgaacctgtcaaatga

SEQ ID NO: 138848 - DNA, 75 bp, synthetic construct
  source 1..75: mol_type = other DNA
gaaggcgaggcacttactgacgcgcttttactcgctgaagacgaacgcgttttggggtacaggatcgaacccgtc

SEQ ID NO: 138849 - DNA, 75 bp, synthetic construct
  source 1..75: mol_type = other DNA
gagggggaagcattggttgacgcgcttttacttgctgaggatgaccgccttttgggataccagatcgaacctgtc

SEQ ID NO: 138850 - DNA, 75 bp, synthetic construct
  source 1..75: mol_type = other DNA
gttccttctggcgcagttaagcggttgcacgaatacgcgaacgatatacgtgtcggtgccggtcgttccgttacc

SEQ ID NO: 138851 - DNA, 75 bp, synthetic construct
  source 1..75: mol_type = other DNA
ggatgatgattgtgcttcacgtcctgtgcctgctgccgctgctgaccggttgcggaagtacgcggacagtttacg

SEQ ID NO: 138852 - DNA, 75 bp, synthetic construct
  source 1..75: mol_type = other DNA
acagcgcgctgattcctttgagaccatcaccgcgaatgtcctgcgcaccgtagcaataacgaacatcattctgga

SEQ ID NO: 138853 - DNA, 75 bp, synthetic construct
  source 1..75: mol_type = other DNA
ctgatgtatatgtcgtttgcggcaggcaccgggaaatatccgatgtggcccggaaaaatgaaatgtgtccgggtg

SEQ ID NO: 138854 - DNA, 75 bp, synthetic construct
  source 1..75: mol_type = other DNA
agaaaatctgccgttaccgtgctgctgatgctgcagattatgtcagggagactgaccggtcactgatgcaactgg

SEQ ID NO: 138855 - DNA, 75 bp, synthetic construct
  source 1..75: mol_type = other DNA
cagaatggggtgcggaagttatctggatcgagaacgtcgcctgggccgacaccattcgcgttcaaccgaactacc

SEQ ID NO: 138856 - DNA, 75 bp, synthetic construct
  source 1..75: mol_type = other DNA
accgaataaacgaaacatcaatccgaccattccgcaaatccacatatacccacttccctgaatatatcgacccgc

SEQ ID NO: 138857 - DNA, 75 bp, synthetic construct
  source 1..75: mol_type = other DNA
ctggttcaggaaattgacttcgtaagacaaacagcccctgccgggcagtttcctgtaagagaatgtctgccttct

SEQ ID NO: 138858 - DNA, 75 bp, synthetic construct
  source 1..75: mol_type = other DNA
gccggaaaaaatcaggaaatgccctgtttattttcctgatgacagaacaaacagaaacaacggagataaaaatga

SEQ ID NO: 138859 - DNA, 75 bp, synthetic construct
  source 1..75: mol_type = other DNA
atacaccagtgttgatcagctgaaaggcaaaaaagtcggcgttcagaacgggacgacacaccagaaattcattat

SEQ ID NO: 138860 - DNA, 75 bp, synthetic construct
  source 1..75: mol_type = other DNA
agagaaataagttttttcatctcataagttcagaatgcgttccattaaagtcatttgttgaaattgaaaacgaat

SEQ ID NO: 138861 - DNA, 75 bp, synthetic construct
  source 1..75: mol_type = other DNA
tccaagctcacaaaaatgaaaattatattagagaattggcgttaaacaatccatcagttcgtttttatgtacata

SEQ ID NO: 138862 - DNA, 75 bp, synthetic construct
  source 1..75: mol_type = other DNA
ttacagacccaaaaagaaaactcacactgattcaaagaaagagaggattaaaccgaagatgtattttgctggtgg

SEQ ID NO: 138863 - DNA, 75 bp, synthetic construct
  source 1..75: mol_type = other DNA
aagattcagaaaggcgaagctaaagaacaggattgatgaacttgatgactttgatgatagtgacgatgattttac

SEQ ID NO: 138864 - DNA, 75 bp, synthetic construct
  source 1..75: mol_type = other DNA
agtgacgatgattttacttacagacccaaaaagaaaactcacactgattcaaagaaagagaggattaaaccgaag

SEQ ID NO: 138865 - DNA, 75 bp, synthetic construct
  source 1..75: mol_type = other DNA
ctctgcttgccgagcggattgagcaagggctgtatcgtcacggggagaaattgccgtcggtgcgctgcttaagtc

SEQ ID NO: 138866 - DNA, 75 bp, synthetic construct
  source 1..75: mol_type = other DNA
gtgcctgctgccgctgctgagcggttgcggaagtacgcggacagtttacgtacaagttccggcagtaccactccc

SEQ ID NO: 138867 - DNA, 75 bp, synthetic construct
  source 1..75: mol_type = other DNA
atgaagctgagatataagctggttattgttgccttcgttgttagcgtcattggttccttcatctggtctgccaac

SEQ ID NO: 138868 - DNA, 75 bp, synthetic construct
  source 1..75: mol_type = other DNA
agcttcgactttctgggctatacattccggccgcgtctgtcgatgaatcgctggggtaagaccttcgttaacttc

SEQ ID NO: 138869 - DNA, 75 bp, synthetic construct
  source 1..75: mol_type = other DNA
gaaaatgaaaccggcgctgaaaaaaacgctgatggcggtagcgtggctgagcgcagtacctgcagcccaggctgc

SEQ ID NO: 138870 - DNA, 75 bp, synthetic construct
  source 1..75: mol_type = other DNA
gaaaatgaaaccggcgctgaaaaaaacgctgatggcggtagcgtgtctgagcgcagtaccagcagcccaggctgc

SEQ ID NO: 138871 - DNA, 75 bp, synthetic construct
  source 1..75: mol_type = other DNA
acatttgcagttagtttggctgcatattatgaacaaatagagattggtcatatagaggcaggtttgcggacagga

SEQ ID NO: 138872 - DNA, 75 bp, synthetic construct
  source 1..75: mol_type = other DNA
gaattgtaaagaagcttataatgcaatgagttttgcacataatccatatggcaatggtaaatcatctaaattaat

SEQ ID NO: 138873 - DNA, 75 bp, synthetic construct
  source 1..75: mol_type = other DNA
gggaggtattcaggaagaagctccatctttaggtaaacctgttttggttatgcgggaaaccacagaacgtcccga

SEQ ID NO: 138874 - DNA, 75 bp, synthetic construct
  source 1..75: mol_type = other DNA
gctctgccggagccggaatttacaccagctgaacttgccgccttccgggactactgggcagcggaggggaaagtt

SEQ ID NO: 138875 - DNA, 75 bp, synthetic construct
  source 1..75: mol_type = other DNA
gccagagttttttggctcccgaatgctgcgaaacacaatccgccaaactcgataaatgtcattaaatcctgggca

SEQ ID NO: 138876 - DNA, 75 bp, synthetic construct
  source 1..75: mol_type = other DNA
tggcatggtgaaagcagatatcaaagccagagttttttggctcccgaatgctgcgaaacacaatccgccaaactc

SEQ ID NO: 138877 - DNA, 75 bp, synthetic construct
  source 1..75: mol_type = other DNA
agtgcaagccgcacctgtctgttcgagtggcagcagatccccgatggactggtccaagacccgttatcggaatct

SEQ ID NO: 138878 - DNA, 75 bp, synthetic construct
  source 1..75: mol_type = other DNA
tattttgctcaactgaatggtcaggatgtgaatgacctctatgagctggtactggctgaagtagatacggcatga

SEQ ID NO: 138879 - DNA, 75 bp, synthetic construct
  source 1..75: mol_type = other DNA
attccggagctgacaccgtctgctccgtcagaattctgaatgcctttaaaaaccgcctgcaggacattgcccagt

SEQ ID NO: 138880 - DNA, 75 bp, synthetic construct
  source 1..75: mol_type = other DNA
tcggaaaccggtaaaagacatactaagcggcataagtaatatctaccttatcgaaccattagagtatttgcaatt

SEQ ID NO: 138881 - DNA, 75 bp, synthetic construct
  source 1..75: mol_type = other DNA
aagggccccaataaaacgatgccgaccatatctctggttggagtcgatgactcaggtggcagatccgaagctgtt

SEQ ID NO: 138882 - DNA, 75 bp, synthetic construct
  source 1..75: mol_type = other DNA
gagctgctggagtacaccttcaaggctccagatggtgctcaacggtctctgcctccgaatgccaactatgccaac

SEQ ID NO: 138883 - DNA, 75 bp, synthetic construct
  source 1..75: mol_type = other DNA
gtaaccgcagatgaacatctgaaagaagtttatacggaagacgcttccctgccgggaaaaatcaggaaatgccct

SEQ ID NO: 138884 - DNA, 75 bp, synthetic construct
  source 1..75: mol_type = other DNA
aggagattaacttcgtaagacaaacagcacctgccggacagttcccggtcagtgaatgctggttttcttcctctg

SEQ ID NO: 138885 - DNA, 75 bp, synthetic construct
  source 1..75: mol_type = other DNA
cctgatggctctgtttgttttatggaaggacaacaccacaccaggaaaattactggttcaggaaattgacttcgt

SEQ ID NO: 138886 - DNA, 75 bp, synthetic construct
  source 1..75: mol_type = other DNA
atggatcatctacccatgccgaaattcgggccgttggccggattgcgcgttgtcttctccggtatcgaaatcgcc

SEQ ID NO: 138887 - DNA, 75 bp, synthetic construct
  source 1..75: mol_type = other DNA
ctggttcaggaaattgacttcgtaagacaaacagcccctgccgggcagttttctgtaagagaatgtttgccttct

SEQ ID NO: 138888 - DNA, 75 bp, synthetic construct
  source 1..75: mol_type = other DNA
gaagttcttgcagaagacacttccctgccgggaaaaatcagggaatgccatgtttatttccctgatgacagaaca

SEQ ID NO: 138889 - DNA, 75 bp, synthetic construct
  source 1..75: mol_type = other DNA
cacggtgtgtcacgacgaggtcacgttgatgtcacggcagaagatttggcaagtgcactcgacgtgacagaagag

SEQ ID NO: 138890 - DNA, 75 bp, synthetic construct
  source 1..75: mol_type = other DNA
ggtgagttgaatgacgcgtcgttgcagacagccgaacctgaatacctggacggcctgagcgaaccgatcgggaaa

SEQ ID NO: 138891 - DNA, 75 bp, synthetic construct
  source 1..75: mol_type = other DNA
aaattcgggcagcacgtgagcagtgggaacgtgaaaacggatttatcagcgacggaaacggcgtggaagctgtgg

SEQ ID NO: 138892 - DNA, 75 bp, synthetic construct
  source 1..75: mol_type = other DNA
tcccggtcagatctgaatgactggttttggtcctccgatcttcagcagatgcctccgtactgtatacgtgcggtt

SEQ ID NO: 138893 - DNA, 75 bp, synthetic construct
  source 1..75: mol_type = other DNA
atgctgcacacattacatcgttcaccctggctgacggattttgctgcgctgctgcgtctgctcagtgagggcgac

SEQ ID NO: 138894 - DNA, 75 bp, synthetic construct
  source 1..75: mol_type = other DNA
ttccgatgaccgatggctggcatccgtcgctggattttcgacgacgggctgcactgtggggcgttgccctgccag

SEQ ID NO: 138895 - DNA, 75 bp, synthetic construct
  source 1..75: mol_type = other DNA
gccgcaattgttacgctagtattaactaaatcgattcttgccacgcaattaaataaagggaatgactattttgat

SEQ ID NO: 138896 - DNA, 75 bp, synthetic construct
  source 1..75: mol_type = other DNA
cccattgcttgcaacctttttatttattttaaataaaaaaaaacaactatctattccgtttgtgattgtagggct

SEQ ID NO: 138897 - DNA, 75 bp, synthetic construct
  source 1..75: mol_type = other DNA
cacgtctgcgcagggagtgaacctgatcgacgttgcgaaagagttggtgctgaccccgcaggatgcgacggatta

SEQ ID NO: 138898 - DNA, 75 bp, synthetic construct
  source 1..75: mol_type = other DNA
gctaaaattctcaggtactgtcagcaactgttttgacgtattgaaaaatgctgtcgatgataaattattagatct

SEQ ID NO: 138899 - DNA, 75 bp, synthetic construct
  source 1..75: mol_type = other DNA
atttccgaattagttcaggggcgcaacattaccatcaccgcgcctctggctgagtctgtactccaaaacatggtt

SEQ ID NO: 138900 - DNA, 75 bp, synthetic construct
  source 1..75: mol_type = other DNA
tcacaccaaccgcagcagcctgaagccgattgggttaacccgggagataccgggaccgtctgcggtatggagtaa

SEQ ID NO: 138901 - DNA, 75 bp, synthetic construct
  source 1..75: mol_type = other DNA
gaattagtaatcttgctaacgacccgaaacagttttgttcttttttttgtgagtacataaaaagagatgatatta

SEQ ID NO: 138902 - DNA, 75 bp, synthetic construct
  source 1..75: mol_type = other DNA
tgactgtggtgttttatcgtacactgaaactaaaagatcttccttctattttactccagacagttgtgatgactg

SEQ ID NO: 138903 - DNA, 75 bp, synthetic construct
  source 1..75: mol_type = other DNA
gtggtttatacgtcggtgccagcgtcggaaaggtaaaggttgaagaagtaatcaagccgtactccccttttatgc

SEQ ID NO: 138904 - DNA, 75 bp, synthetic construct
  source 1..75: mol_type = other DNA
ttgagtgttgcgaaggggaaatcactatcgataagtttatagattatctttcctctttgcccagtattaatgctg

SEQ ID NO: 138905 - DNA, 75 bp, synthetic construct
  source 1..75: mol_type = other DNA
taaaatcaaatggtcaaccaatatattatggtaagtactatcagcaagtgtgtaacatcgttggagatagctcat

SEQ ID NO: 138906 - DNA, 75 bp, synthetic construct
  source 1..75: mol_type = other DNA
cctgataacattgaactaatctctgagttcgagagtcaatgtaaaattatgcatgatataaataattctttcttt

SEQ ID NO: 138907 - DNA, 75 bp, synthetic construct
  source 1..75: mol_type = other DNA
cgcactgattaattttatcggtcagcatcgtattgaacgctttgctcaacgttgcgccggtaaccctgtttcccg

SEQ ID NO: 138908 - DNA, 75 bp, synthetic construct
  source 1..75: mol_type = other DNA
cgcactgattaattttatcggtcagcatcgtattgaacgttttgctcaacgttgtgccggtaaccctgtttcccg

SEQ ID NO: 138909 - DNA, 75 bp, synthetic construct
  source 1..75: mol_type = other DNA
caatgaatggcctcttcccccatatcaaccctggcgaactgtttgtttatcttggcattgccagcggtctgacga

SEQ ID NO: 138910 - DNA, 75 bp, synthetic construct
  source 1..75: mol_type = other DNA
ccgctcgcgatgtgatacttaatactcttgaccagtcaacaactggtcagttagatcgtatttcttcaatagcat

SEQ ID NO: 138911 - DNA, 75 bp, synthetic construct
  source 1..75: mol_type = other DNA
aaacgggagtaacttcattagctgctggcattttcatggcatggattatctggcaggcgaaaagttatgcttcac

SEQ ID NO: 138912 - DNA, 75 bp, synthetic construct
  source 1..75: mol_type = other DNA
tttgacagattccgccgccgcgacaaaaacgagcagtatgacttggccgccgatcatctccgtcttgtcggaaag

SEQ ID NO: 138913 - DNA, 75 bp, synthetic construct
  source 1..75: mol_type = other DNA
cataaaaagccgtgagagttggttatcattctttcaacgtaaggggattgcagcagatgcagcaaaaaaactgat

SEQ ID NO: 138914 - DNA, 75 bp, synthetic construct
  source 1..75: mol_type = other DNA
ataaacgtatgcaaaacttggctaagatgggtattaaatctgatatgcactatccaaatgaagaaattaggtgga

SEQ ID NO: 138915 - DNA, 75 bp, synthetic construct
  source 1..75: mol_type = other DNA
aaatatgcagatcttgtaagaaaaaaagaaggtaatgatgggacatactataaaaataacttaaaccaacatatt

SEQ ID NO: 138916 - DNA, 75 bp, synthetic construct
  source 1..75: mol_type = other DNA
ttacctgctgctaccgtgcattggcacgtttgtcttttgcaatccgatgaccttaagcctgggtcgctttatgcc

SEQ ID NO: 138917 - DNA, 75 bp, synthetic construct
  source 1..75: mol_type = other DNA
atggtgaccggcattcttccgctgttgattagcctgctggttatcatgaacgcactgattaattttatcggtcag

SEQ ID NO: 138918 - DNA, 75 bp, synthetic construct
  source 1..75: mol_type = other DNA
tggcgaaaaatatcattgatgggtttgagtgttgcgaaggggaaatcactatcgataagtttatggattatcttt

SEQ ID NO: 138919 - DNA, 75 bp, synthetic construct
  source 1..75: mol_type = other DNA
gtcgatccaccgttccgccgtggcttgttagaagagacgataaatttactggaagataacggctggctggctgac

SEQ ID NO: 138920 - DNA, 75 bp, synthetic construct
  source 1..75: mol_type = other DNA
ggatggcggcggaggaaggcatcttcttttatgaggagcacgcgcaaaaaagtaccgaccagagccaggtcctgt

SEQ ID NO: 138921 - DNA, 75 bp, synthetic construct
  source 1..75: mol_type = other DNA
aggcgtgcagtttaaatcctgtctgctgaacggctctgttgaagtcgcgccgcgtgcgggcctggcggatgccat

SEQ ID NO: 138922 - DNA, 75 bp, synthetic construct
  source 1..75: mol_type = other DNA
ctacgccgccgcgtgcatgccgggctgaacaagggcgaggcgcgcaatgcgctggcccgtgccgtgttcttcaac

SEQ ID NO: 138923 - DNA, 75 bp, synthetic construct
  source 1..75: mol_type = other DNA
gcagcgctaccgggccagcggcctcaacctggtgacggcggctaatcgtgctgtggaacacggtgtacctggaac

SEQ ID NO: 138924 - DNA, 75 bp, synthetic construct
  source 1..75: mol_type = other DNA
atgcacctgctaggcttccgcttcgcgccgcgcatccgcgacctcggcgaaaccaagctgtacgtgccgcagggc

SEQ ID NO: 138925 - DNA, 75 bp, synthetic construct
  source 1..75: mol_type = other DNA
atagtgaagctactaaagagacctctaaaacatctgacttagatgaccttgaagtaagccctaaaaagacttcta

SEQ ID NO: 138926 - DNA, 75 bp, synthetic construct
  source 1..75: mol_type = other DNA
gtgaccataaaaacacacagtgccccgccactgatgatgagatggaccccttcgatgattaccttgatgaagagt

SEQ ID NO: 138927 - DNA, 75 bp, synthetic construct
  source 1..75: mol_type = other DNA
ccccttcgatgattaccttgatgaagagtcagaacgtgaagaggctattaaaaaagcacaacgcaaagcagagat

SEQ ID NO: 138928 - DNA, 75 bp, synthetic construct
  source 1..75: mol_type = other DNA
cgccctgctgccaggtgccgaacgcccaaccattctgccgctggcgggtgatcaacagcgcgtcgccatgcacat

SEQ ID NO: 138929 - DNA, 75 bp, synthetic construct
  source 1..75: mol_type = other DNA
ttgcgatctggtttccaccggtgccacgctggaagcaaacggcctgcgcgaagtcgaagttatctaccgctcgaa

SEQ ID NO: 138930 - DNA, 75 bp, synthetic construct
  source 1..75: mol_type = other DNA
ccgacgcgatcaacctgggcctgaccaagatggccgagtcctgccccggcacgacctacgcgaagctcgcttggc

SEQ ID NO: 138931 - DNA, 75 bp, synthetic construct
  source 1..75: mol_type = other DNA
aaaatccggcggcattaattacccaatcggcaaaagccattcaggcacaatttaaagtcgcatgtaccggaacac

SEQ ID NO: 138932 - DNA, 75 bp, synthetic construct
  source 1..75: mol_type = other DNA
ctctggctgggatctcgataatcatcaacattttcaggaactggaagagcggctggaagaggcaaaagccacgga

SEQ ID NO: 138933 - DNA, 75 bp, synthetic construct
  source 1..75: mol_type = other DNA
agacgtcctgacctccgtgcacgctattacggggcgtcgcgtggcgggggatgatgcgctctcatttgttcgcaa

SEQ ID NO: 138934 - DNA, 75 bp, synthetic construct
  source 1..75: mol_type = other DNA
tcagttcaccgaacagcagtggcacgattgccaggcactgctaactcgctggcaacaagaaattgaaggaaaaga

SEQ ID NO: 138935 - DNA, 75 bp, synthetic construct
  source 1..75: mol_type = other DNA
catcgcctgaaacttatttgcgcatggccttattccgtcagtgcagatttgcgcttacggaacgatgccccgaaa

SEQ ID NO: 138936 - DNA, 75 bp, synthetic construct
  source 1..75: mol_type = other DNA
ccaggtttgttgggggctttaaataattttggtaaagattatctgcgccccattgagcaacagaatgataatgct

SEQ ID NO: 138937 - DNA, 75 bp, synthetic construct
  source 1..75: mol_type = other DNA
tgatcggcggcaccctgaacatcaagcacgtgcgtgcccactgggacgacatcctggactggctgcaaagtgttg

SEQ ID NO: 138938 - DNA, 75 bp, synthetic construct
  source 1..75: mol_type = other DNA
agcgtggtgagcctcaattttgcttgcgttaaaagctttatgtttttgcgttttatccatgccagcggtcgcggt

SEQ ID NO: 138939 - DNA, 75 bp, synthetic construct
  source 1..75: mol_type = other DNA
cctcgctgatgctgcgcaagctcggcagctacccgcgccagaacggactggccgtggccctgcgcgagctgggcc

SEQ ID NO: 138940 - DNA, 75 bp, synthetic construct
  source 1..75: mol_type = other DNA
cttgctgcaacgggaagtattagcgatgatacttttcgcgttttcattgataaatggacgcagcccgacgactat

SEQ ID NO: 138941 - DNA, 75 bp, synthetic construct
  source 1..75: mol_type = other DNA
taactggcctgtcgcctcatgcctggaacagcttcatgaggaagattatgtttcacactggtctgattgctggtt

SEQ ID NO: 138942 - DNA, 75 bp, synthetic construct
  source 1..75: mol_type = other DNA
tggtaacgcatcacggttttgatattcagggttcggccagacacccagcctgccctagcgcccgtgaattggtcg

SEQ ID NO: 138943 - DNA, 75 bp, synthetic construct
  source 1..75: mol_type = other DNA
tgcgggcagcatcgccatcagatctggcggacaagctcacgcaaaaactgaaagaaggctggcagccgtttggta

SEQ ID NO: 138944 - DNA, 75 bp, synthetic construct
  source 1..75: mol_type = other DNA
gccatcgacatcgatgatccggatgacgatacgctgatggcgaaggctgcaggtatttcaggaggcgtgcgctat

SEQ ID NO: 138945 - DNA, 75 bp, synthetic construct
  source 1..75: mol_type = other DNA
accatctcaaccctgttttttgccgatccggagttaaccccggacagtttcagcattctttcctctgcaccggaa

SEQ ID NO: 138946 - DNA, 75 bp, synthetic construct
  source 1..75: mol_type = other DNA
aaatcccttacgcaggcactgtatggaaagctgcatcatacgaatatgcaggaatacaatatggtgcaaaaagtc

SEQ ID NO: 138947 - DNA, 75 bp, synthetic construct
  source 1..75: mol_type = other DNA
gacaaggatgaagtcgtaactaagaccttcacgcttgctgtagatggtgctgctattgattcaggactgattact

SEQ ID NO: 138948 - DNA, 75 bp, synthetic construct
  source 1..75: mol_type = other DNA
tgatggcgacaaagatgaagtagtaactaaagcattcaacctagctgtagacggtgcagccgttgaatcaggtac

SEQ ID NO: 138949 - DNA, 75 bp, synthetic construct
  source 1..75: mol_type = other DNA
gtgctgcgtagaatggaaagccgtggcgcgacagagaaggccaagaaggttcgccagcgctgcagtgaagttttt

SEQ ID NO: 138950 - DNA, 75 bp, synthetic construct
  source 1..75: mol_type = other DNA
ttgtatcttgaagttgttccctctggttctcgatactggcggatgaaatatcgcttcaatgggaaagagaagcgt

SEQ ID NO: 138951 - DNA, 75 bp, synthetic construct
  source 1..75: mol_type = other DNA
aaggcatggcctgtggatgcgttcaccccggaacagctggcggtgctgaaggctgaccccatgctgattgtggtg

SEQ ID NO: 138952 - DNA, 75 bp, synthetic construct
  source 1..75: mol_type = other DNA
gatctccacctgcattatgggcgctaactacaccaacgatccgatgatgattatgtgcctgatggcgctggcatt

SEQ ID NO: 138953 - DNA, 75 bp, synthetic construct
  source 1..75: mol_type = other DNA
tacatcctattttaaatgagtttaatagtcatcttgaaagtgaaaggctattaacatcggaaaaaaacaacctag

SEQ ID NO: 138954 - DNA, 75 bp, synthetic construct
  source 1..75: mol_type = other DNA
cgtcagggatggaggcccgccagggcggagacagcttcgctggctccgttcacgacagcccgccccgccaggggg

SEQ ID NO: 138955 - DNA, 75 bp, synthetic construct
  source 1..75: mol_type = other DNA
caccagttgttacaaataagtgattataaatggatatcggaaaattccagacttatggcccgatcaaatgctctc

SEQ ID NO: 138956 - DNA, 75 bp, synthetic construct
  source 1..75: mol_type = other DNA
ttctaccatcacggcagagaaaaaaaccggtgtcgcggggatgaacctggcgatccctctcgctggtgggccagg

SEQ ID NO: 138957 - DNA, 75 bp, synthetic construct
  source 1..75: mol_type = other DNA
ttttcatcgcatgatgagtgaagcagaaccacgaggtactcgctggtatcacccgaaaatgggcctgtttcaggc

SEQ ID NO: 138958 - DNA, 75 bp, synthetic construct
  source 1..75: mol_type = other DNA
agcgagacgctccgcgctatagaagtcacccttgtcgtgcatgacgacatcatcccgtggcgttatccggctaag

SEQ ID NO: 138959 - DNA, 75 bp, synthetic construct
  source 1..75: mol_type = other DNA
tgattgaacgtcatctggaaccgaccctgctggccgtgcatctgtatggcagcgcggtggatggcggcctgaaac

SEQ ID NO: 138960 - DNA, 75 bp, synthetic construct
  source 1..75: mol_type = other DNA
cgatataattaaacaccgtttcccgcattatttcccggctgctaaagcgttccccgtagatacattccaccttca

SEQ ID NO: 138961 - DNA, 75 bp, synthetic construct
  source 1..75: mol_type = other DNA
tatgcaggctatcgtcagctggcggcgaaaacgggtatgtcagatgcgaaatgccgcaatctggtgaacgcatat

SEQ ID NO: 138962 - DNA, 75 bp, synthetic construct
  source 1..75: mol_type = other DNA
agtgcgacggcggtagttggcccgattgcttttattggcctgatgatgccgcacatggcacgttggttggttgga

SEQ ID NO: 138963 - DNA, 75 bp, synthetic construct
  source 1..75: mol_type = other DNA
agtgcgacggcagtggtgggtccgattgcctttattggcctgatgatgccgcatatggcacgctggttggtagga

SEQ ID NO: 138964 - DNA, 75 bp, synthetic construct
  source 1..75: mol_type = other DNA
gaagggattgacacgtatcttattgaatattcagaaaacaacgtattacgtccttttaatgttgatgtgcctttt

SEQ ID NO: 138965 - DNA, 75 bp, synthetic construct
  source 1..75: mol_type = other DNA
aacagcttccggcagtcgaatatcgcggtcagcgtgttgtgacgctggcgatgattgatgaagtccaccagcgac

SEQ ID NO: 138966 - DNA, 75 bp, synthetic construct
  source 1..75: mol_type = other DNA
gtgcgcaaaccaatgagcgaaatcgaaatggttgccgcgatggctcttgaagcagttcgtcagcaaaaacgcctc

SEQ ID NO: 138967 - DNA, 75 bp, synthetic construct
  source 1..75: mol_type = other DNA
actttctgacacacaaagtgatccggcaagactgagggaacaggcacaacaagtggttgccggtatgaagggggc

SEQ ID NO: 138968 - DNA, 75 bp, synthetic construct
  source 1..75: mol_type = other DNA
ttaaaattgctgaaaactcgcaaaccgggcgaaatccaaccgtataagcgcaaagatctttatcccatcaaataa

SEQ ID NO: 138969 - DNA, 75 bp, synthetic construct
  source 1..75: mol_type = other DNA
accagaacaatacacctggatactaaaattgctgaaaactcgcaaaccgggcgaaatccaaccgtataagcgtaa

SEQ ID NO: 138970 - DNA, 75 bp, synthetic construct
  source 1..75: mol_type = other DNA
gctgctgacccgctggtttgaaaaaccgctgatgagtgtcggtaagctactgaatatgaacaatattgcggcggc

SEQ ID NO: 138971 - DNA, 75 bp, synthetic construct
  source 1..75: mol_type = other DNA
tggccggtattgtgaccattccgattggttgtatcgccggtggtctggtggcgatgtattccggtgtgcagatca

SEQ ID NO: 138972 - DNA, 75 bp, synthetic construct
  source 1..75: mol_type = other DNA
ttttgatagagaaaacaggccttgaacgacttatcacaccaataacgcagactcttaatgagctggagaatacct

SEQ ID NO: 138973 - DNA, 75 bp, synthetic construct
  source 1..75: mol_type = other DNA
aaacgtgcacttacgaatagaagagtggcagagcatcgaaaacgagtaacgcaaaaagtaacgccaacagcgtta

SEQ ID NO: 138974 - DNA, 75 bp, synthetic construct
  source 1..75: mol_type = other DNA
cgcagcaactggtaaaatcgcgccgaaggatgtcgctgccaactgggcaatggaacatctacctgcccagcatca

SEQ ID NO: 138975 - DNA, 75 bp, synthetic construct
  source 1..75: mol_type = other DNA
ctttcgccacccgcgctactggggagcatggctgggcgtagcagcgatggcgggtatcgctttaacgccgccaaa

SEQ ID NO: 138976 - DNA, 75 bp, synthetic construct
  source 1..75: mol_type = other DNA
gcctcgcaagggcagaaaatggcggcgatgttccataatcagggcaatccggtttttgattatgtctggaacacc

SEQ ID NO: 138977 - DNA, 75 bp, synthetic construct
  source 1..75: mol_type = other DNA
gaagtatgtaaacaatgagacgaattttttgtctgtgtttaatgccatatcatccaggaaaaataatcttgaagc

SEQ ID NO: 138978 - DNA, 75 bp, synthetic construct
  source 1..75: mol_type = other DNA
ggcaataaaagatgagtggaatgccggtataagccagccagtgggtgacatattcaacgtttcagtatctggctg

SEQ ID NO: 138979 - DNA, 75 bp, synthetic construct
  source 1..75: mol_type = other DNA
ccagtggtgatgtgacaatgaaaattacaggtgaagacgggcgggagcagacacaggtatttccgttatccgtgg

SEQ ID NO: 138980 - DNA, 75 bp, synthetic construct
  source 1..75: mol_type = other DNA
tcaacggacaactgaatccgggacagcatgaatttaatatcgctgcaggattaccggatgatgacagtcacctga

SEQ ID NO: 138981 - DNA, 75 bp, synthetic construct
  source 1..75: mol_type = other DNA
gagaaagacgttatttttacggtgatcaccagccccgataccgacaaagcgcggatgtggggacatatgttaggc

SEQ ID NO: 138982 - DNA, 75 bp, synthetic construct
  source 1..75: mol_type = other DNA
atcattttcggcacgctgctcgcgttcatcgacaacgtgctggatgccacgctcacttcgctgaacatccatttt

SEQ ID NO: 138983 - DNA, 75 bp, synthetic construct
  source 1..75: mol_type = other DNA
aaaagtaaaggatgaatggagtgctggtataagccagccagtagcggggctatttaatttttcagtaactggctg

SEQ ID NO: 138984 - DNA, 75 bp, synthetic construct
  source 1..75: mol_type = other DNA
tgaatatcgtgaaattatgggttcatggtgaattaaataaacctgataataacagtatggtgaaagtccggaata

SEQ ID NO: 138985 - DNA, 75 bp, synthetic construct
  source 1..75: mol_type = other DNA
tgtattgcgaaaactgcgacgatgacggcatggtagtaaaaactgaaaaaggttgcggcttcatgctgtatcaag

SEQ ID NO: 138986 - DNA, 75 bp, synthetic construct
  source 1..75: mol_type = other DNA
aattctggcttgagtgtattcaaagcccacttaagcaaatgctgctggcgggagctgtttgagcgtctggattac

SEQ ID NO: 138987 - DNA, 75 bp, synthetic construct
  source 1..75: mol_type = other DNA
attattttcgtgaagggtatgacgccacccggaaatgttatgcgctgtcaaaagcgcaggctgtaaaagtggatt

SEQ ID NO: 138988 - DNA, 75 bp, synthetic construct
  source 1..75: mol_type = other DNA
ctgcctgacagaggagtggctgacgaaggcgggtgtttatatcagtacggattattttcgtgaagggtatgacgc

SEQ ID NO: 138989 - DNA, 75 bp, synthetic construct
  source 1..75: mol_type = other DNA
tgtacagtgacggtaaagacacggggctgacgggaacgctgagtacgcagattaaaggtgtcagtctgaactttg

SEQ ID NO: 138990 - DNA, 75 bp, synthetic construct
  source 1..75: mol_type = other DNA
cggtgatggccgggcagttaagcccggggcagcacgagttcagtgtggcagccggtttgcctgacgatgacagtg

SEQ ID NO: 138991 - DNA, 75 bp, synthetic construct
  source 1..75: mol_type = other DNA
cgctgtacaccagtggtgatgtgacgatgacaatgaccggtgaggatggccgcgagcaggtacagaacttccctc

SEQ ID NO: 138992 - DNA, 75 bp, synthetic construct
  source 1..75: mol_type = other DNA
ttacagcagcagtacgtcggtgagcaccagcaaaggcggtggtacgggcgtcagcaccggcgtgtccggctcgct

SEQ ID NO: 138993 - DNA, 75 bp, synthetic construct
  source 1..75: mol_type = other DNA
ggagtgaaggtaacgtccggtgacggacagaccgacagcgacggtaacctggtggtgccactgaacagttatgac

SEQ ID NO: 138994 - DNA, 75 bp, synthetic construct
  source 1..75: mol_type = other DNA
gaatgaccgcttcagctatggttttggtggtggtcgtgacagtgatggtggtaccagcagttatctgaacgcgtc

SEQ ID NO: 138995 - DNA, 75 bp, synthetic construct
  source 1..75: mol_type = other DNA
tcagtacggggttgtccggctcactgaatgatcgcttcagctatggcctgggcggtggtcgtgacagcggtggcg

SEQ ID NO: 138996 - DNA, 75 bp, synthetic construct
  source 1..75: mol_type = other DNA
ccgtgatggcagccgcagcggaaataaggtgcagttatcctggagtaaacaactggagatgacgaacaccggact

SEQ ID NO: 138997 - DNA, 75 bp, synthetic construct
  source 1..75: mol_type = other DNA
ggcggtggtcgtgacagcggtggtggtgtgagcagttatctgaatgcgtcgtacagtggtgaccgggcttatctg

SEQ ID NO: 138998 - DNA, 75 bp, synthetic construct
  source 1..75: mol_type = other DNA
atcttcacaacggggggtacaagaccataagcgctaacttaagggttgaaccatctgaagaatgcgacgcctcgg

SEQ ID NO: 138999 - DNA, 75 bp, synthetic construct
  source 1..75: mol_type = other DNA
ccggtgaagacgggcgcgagcaggtacagaacttcccgttgtcggtgatggccgggcagttaagtccggggcagc

SEQ ID NO: 139000 - DNA, 75 bp, synthetic construct
  source 1..75: mol_type = other DNA
cagaacgggcggttgctgcattcggagatggtgccggcgggtccgttctccatcacggatgtgccgctgtacacc

SEQ ID NO: 139001 - DNA, 75 bp, synthetic construct
  source 1..75: mol_type = other DNA
gtcggtgtccggctggcagcggagttattaccccgcatccatgaccgggagttaccggtacagcgatgacaacgg

SEQ ID NO: 139002 - DNA, 75 bp, synthetic construct
  source 1..75: mol_type = other DNA
gggcggaacgatccgaacaagcctatgagcgaagcgagtattaaccaagttatcaagcgtatcggatatggcggt

SEQ ID NO: 139003 - DNA, 75 bp, synthetic construct
  source 1..75: mol_type = other DNA
gtgcgttggagaaaatgcgcaaagtgcggcagcgttgctcggaagtgtttcgctacgcaattgcaacgggtagag

SEQ ID NO: 139004 - DNA, 75 bp, synthetic construct
  source 1..75: mol_type = other DNA
caggcagttgcgcttgaatggcacggaacgaaggtgagccgatggtcagaaggctatgcctccgatatcatcgaa

SEQ ID NO: 139005 - DNA, 75 bp, synthetic construct
  source 1..75: mol_type = other DNA
aagttggcagcatcacctggtgtttacccgaccattaccttagcggatgccagaagcaaaagagatgatgctaaa

SEQ ID NO: 139006 - DNA, 75 bp, synthetic construct
  source 1..75: mol_type = other DNA
cgtgagatgctgcaatggtatgctgactatatggatagccttgagaatggtggcaatgtgatgcatgggacgttt

SEQ ID NO: 139007 - DNA, 75 bp, synthetic construct
  source 1..75: mol_type = other DNA
ggacgtaataacccaaagaaaccgatgagtgatatggctttgactgtgttggtaaggcgcatcggctatgcaggt

SEQ ID NO: 139008 - DNA, 75 bp, synthetic construct
  source 1..75: mol_type = other DNA
cggtacgcaatcatcaccggacgcgctgaatataaccccgcaccagatctggcaagcgcatttgctccacacaaa

SEQ ID NO: 139009 - DNA, 75 bp, synthetic construct
  source 1..75: mol_type = other DNA
gaaaacacatttcccattcctcacagtcgaagagctaccacacttccttaaagatctgaccggatacactggcag

SEQ ID NO: 139010 - DNA, 75 bp, synthetic construct
  source 1..75: mol_type = other DNA
ggcgctttagaaaaaatgcgcaaagttcgccagcgttgtaacgaagtctaccgttacaccatcgttaccgggaga

SEQ ID NO: 139011 - DNA, 75 bp, synthetic construct
  source 1..75: mol_type = other DNA
caggctgtggcacttgaatggcatggaacgaaggtgagccgatggtcagaaggttatgcctcggacattatcgaa

SEQ ID NO: 139012 - DNA, 75 bp, synthetic construct
  source 1..75: mol_type = other DNA
cagtctgtggcgcttgaatggcacggaacgaaggtaagccgatggtcagaaggttatgcctccgacattatcgaa

SEQ ID NO: 139013 - DNA, 75 bp, synthetic construct
  source 1..75: mol_type = other DNA
ccgttagttgttcttgcagcacgtctgctgatccttacgggagttcgcactggcgagctcagaggtgcttcctgg

SEQ ID NO: 139014 - DNA, 75 bp, synthetic construct
  source 1..75: mol_type = other DNA
tttaaagctctcgcaggctacacaggaagcccgttagttgttcttgcggcacgtctgctgatcctcacggggggt

SEQ ID NO: 139015 - DNA, 75 bp, synthetic construct
  source 1..75: mol_type = other DNA
agcactattgaagataaacgtcaggcattattggcggggcttggtgtcgcgacgatgccgtatccgatggtcgaa

SEQ ID NO: 139016 - DNA, 75 bp, synthetic construct
  source 1..75: mol_type = other DNA
atcgcaccaaattcaccaatgttggtcgtatgctgctggagcggggacgcgttctgctggaagccgcagataagc

SEQ ID NO: 139017 - DNA, 75 bp, synthetic construct
  source 1..75: mol_type = other DNA
tttgggagatccctgcacaacggatgaagatgcggcgaccacatatcgttccactttccattcaggcgattgcga

SEQ ID NO: 139018 - DNA, 75 bp, synthetic construct
  source 1..75: mol_type = other DNA
gcaaggttttaactcagcatggattgaaacgcagcttgcccatatcgataaaaacgctattcgcggaacgtataa

SEQ ID NO: 139019 - DNA, 75 bp, synthetic construct
  source 1..75: mol_type = other DNA
tctgggagatacctgcttcacggatgaaaatgcgtcgccctcatgtggtgcctttgtctaagcaggctctttcgc

SEQ ID NO: 139020 - DNA, 75 bp, synthetic construct
  source 1..75: mol_type = other DNA
tgtgggaaattccagcggaacggatgaagatgcgccgaccgcatatagtgccactgtcatcacaggcccaggcca

SEQ ID NO: 139021 - DNA, 75 bp, synthetic construct
  source 1..75: mol_type = other DNA
cgggagatgctccagtggtatgccgactatatggatgcgctggagcaccgggaaaacgtgattcatggcgcgttc

SEQ ID NO: 139022 - DNA, 75 bp, synthetic construct
  source 1..75: mol_type = other DNA
tattaaatgaactcaagataataacagggaattatcgttacgtttttcctggtaggaacgatccaaataaaccta

SEQ ID NO: 139023 - DNA, 75 bp, synthetic construct
  source 1..75: mol_type = other DNA
gcggtggcggataccgctcgtgagcgcccggtgttgactgtacagctgctggacaaacagccgcgcttaacggtg

SEQ ID NO: 139024 - DNA, 75 bp, synthetic construct
  source 1..75: mol_type = other DNA
attgtgaccgaggcactggtgccgacggctgccttttttccgttgatcgacaaactggcggtgaaggctaacacc

SEQ ID NO: 139025 - DNA, 75 bp, synthetic construct
  source 1..75: mol_type = other DNA
ggcggttgcgtgtcgtcagcccggaatcgaccagcgagatcgatattattatggcctggcgtcgtgacagtatgg

SEQ ID NO: 139026 - DNA, 75 bp, synthetic construct
  source 1..75: mol_type = other DNA
gtgttttgctgaatcagcgataaatgaaccacgttttgaaaaagatggtctgctcattgaaggtcagagaacgaa

SEQ ID NO: 139027 - DNA, 75 bp, synthetic construct
  source 1..75: mol_type = other DNA
tggggaatggttggtacgcagctgcaaattgcagccgacagagcagtgggggcttttgcaacaggtgactggata

SEQ ID NO: 139028 - DNA, 75 bp, synthetic construct
  source 1..75: mol_type = other DNA
agactgcatcggcaaactccgcgacagcagccaaaaaatcagaaaccaacgcgaaaaacagcgagacagccgcaa

SEQ ID NO: 139029 - DNA, 75 bp, synthetic construct
  source 1..75: mol_type = other DNA
aatctgcaaatatgaatgtcgctgaggttggaactgatagttttggttttacttatggaaagtttgtttgtaatg

SEQ ID NO: 139030 - DNA, 75 bp, synthetic construct
  source 1..75: mol_type = other DNA
gattcgtcattaacaatgactacgccgcaaattgaaaaagggtcatgcgcttcatcgtttattatttccggaaac

SEQ ID NO: 139031 - DNA, 75 bp, synthetic construct
  source 1..75: mol_type = other DNA
tcggcaaatgaatcagttactttatcctgcagagttaaaaaagtaagtggggatggtattatcacgttgcgtcca

SEQ ID NO: 139032 - DNA, 75 bp, synthetic construct
  source 1..75: mol_type = other DNA
aaaagcagtcaggatgcagcggcccaaagcgagagtgccgcagccagttctgcaagcgcggcggctgcttctgcc

SEQ ID NO: 139033 - DNA, 75 bp, synthetic construct
  source 1..75: mol_type = other DNA
aacaaaaaccacatggtcttatattcagaacaccgcaattatccgtattggaggccagactacagccgggttacg

SEQ ID NO: 139034 - DNA, 75 bp, synthetic construct
  source 1..75: mol_type = other DNA
gtccagccagacggcagcgaagaccagcgaaacgaatgctaaagccagtgaaactgcggcaaaaaacagccaggt

SEQ ID NO: 139035 - DNA, 75 bp, synthetic construct
  source 1..75: mol_type = other DNA
agcatggatgttgagtatggccagtacagcgttatcctgcttgttgaaggttttccgccttcacatgccggaacc

SEQ ID NO: 139036 - DNA, 75 bp, synthetic construct
  source 1..75: mol_type = other DNA
agtcaattacatacgcttttaacacaactgagaaatattacggtcagctttatatgcaaacttataaagcgtcga

SEQ ID NO: 139037 - DNA, 75 bp, synthetic construct
  source 1..75: mol_type = other DNA
agtgaaactaacgcaaagtccagccagacggcagcgaagaccagcgaaacgaatgccaaagccagtgaaactgcg

SEQ ID NO: 139038 - DNA, 75 bp, synthetic construct
  source 1..75: mol_type = other DNA
agcgaaacgaatgccaaaaccagtgaaactgcggcgaaaagcagtcaggctgcagcagccgaaagcgagagtgcg

SEQ ID NO: 139039 - DNA, 75 bp, synthetic construct
  source 1..75: mol_type = other DNA
attaggaaaacgggaggaggggctgcaagaataaccgcccgagcggagaaagaatctaatggatggatttatttc

SEQ ID NO: 139040 - DNA, 75 bp, synthetic construct
  source 1..75: mol_type = other DNA
catcattaatcataactaacgacgtaccagctacccgcgctagtgatttggttaacattcctgttaagaataata

SEQ ID NO: 139041 - DNA, 75 bp, synthetic construct
  source 1..75: mol_type = other DNA
attggtggttttaatatttattctgatggtactaaacgagtagtttctaacggtgaggctactaaaaccatgaaa

SEQ ID NO: 139042 - DNA, 75 bp, synthetic construct
  source 1..75: mol_type = other DNA
ggtagtgcaacaacttttcttggcgatgcgtacattgatacgcaaacgcttgaaattaatatgacaggtggtgct

SEQ ID NO: 139043 - DNA, 75 bp, synthetic construct
  source 1..75: mol_type = other DNA
aactcaaaagcgagtgagacagcttcaaagaccagcgaaactaatgcgaaaaatagcgaggtggctgcagaatcg

SEQ ID NO: 139044 - DNA, 75 bp, synthetic construct
  source 1..75: mol_type = other DNA
agaaaatcaccagtccggaggcccatttattatggggtttggttcttctggaactattagtcaggacggttattc

SEQ ID NO: 139045 - DNA, 75 bp, synthetic construct
  source 1..75: mol_type = other DNA
atggaacaagtcgtcaaatatgatcttaagtgcatcaggtgtagatgatttcggattccagtacgcaaaatttac

SEQ ID NO: 139046 - DNA, 75 bp, synthetic construct
  source 1..75: mol_type = other DNA
aaaaactggtggtttgatggttgctggatttgtttgtaaatccaattatgaatttaaatgtgttgtgaatggtac

SEQ ID NO: 139047 - DNA, 75 bp, synthetic construct
  source 1..75: mol_type = other DNA
tggtggaagaagcggcacgcaacgccgaagccgcctctcagagcgcagcggcggcaaagaaatccgaaactgcag

SEQ ID NO: 139048 - DNA, 75 bp, synthetic construct
  source 1..75: mol_type = other DNA
aaagcgagagtgccgcagccagttctgcaagtgaggcggcggcttctgctactgcatcagccaacagtcaaaaag

SEQ ID NO: 139049 - DNA, 75 bp, synthetic construct
  source 1..75: mol_type = other DNA
gatgtatcaggcgataataagtgtgtgacgacatcgtgcagatttaaaacggatttggaactccggttaaggatc

SEQ ID NO: 139050 - DNA, 75 bp, synthetic construct
  source 1..75: mol_type = other DNA
aggagcagttcagggagatttcggataaaattcgcttgtccggcctgagcatcagtgattatctgaagcagaacg

SEQ ID NO: 139051 - DNA, 75 bp, synthetic construct
  source 1..75: mol_type = other DNA
aggagcagttcagggagatttcggataacattcgcttgtccggtctgagcatcagtgattatcttacacagaacg

SEQ ID NO: 139052 - DNA, 75 bp, synthetic construct
  source 1..75: mol_type = other DNA
ccgagaaactgggcagaacgcctttcagtgttgctttccagatcgcggcaatcagggagctgcaggacggctggg

SEQ ID NO: 139053 - DNA, 75 bp, synthetic construct
  source 1..75: mol_type = other DNA
gtagtcagtaacggtaagttaagcagcgaaactaaaaccaaatgggaatatatccggagtacagcaaccattcgc

SEQ ID NO: 139054 - DNA, 75 bp, synthetic construct
  source 1..75: mol_type = other DNA
ttcgccagctttccaacgcatggaaagttaccccttctgatgccatcgcgctgctacgccaatcagcgtggatgg

SEQ ID NO: 139055 - DNA, 75 bp, synthetic construct
  source 1..75: mol_type = other DNA
gtataatatcattacctcaacataatgaaaggagagataaattaaaaaatgaaatggcgaagtatgacatagaat

SEQ ID NO: 139056 - DNA, 75 bp, synthetic construct
  source 1..75: mol_type = other DNA
atggcatttaaacactatgatgttgtcagggcggtatcgccgtcagaccttgctgatgcacttgctcaaaaaatt

SEQ ID NO: 139057 - DNA, 75 bp, synthetic construct
  source 1..75: mol_type = other DNA
atggtggccgatggtgccaccgagacgccctctgagccattaccaaacaacaagacgccggaatggtactacgtg

SEQ ID NO: 139058 - DNA, 75 bp, synthetic construct
  source 1..75: mol_type = other DNA
gggtggagtattaccgggggcagcgttcagttatcggatggcgtactgagaattgtcaaagagagcggtaaaagc

SEQ ID NO: 139059 - DNA, 75 bp, synthetic construct
  source 1..75: mol_type = other DNA
gacatggctaaatttgcccctgcacctaagaactttaatgcttctgcaaacctgacggatgaaattaaaaacgac

SEQ ID NO: 139060 - DNA, 75 bp, synthetic construct
  source 1..75: mol_type = other DNA
attgtcctgtttatcttgtttttcaaacagatccaccgactatgcgaaacgacatggctaaatttgcccctgcac

SEQ ID NO: 139061 - DNA, 75 bp, synthetic construct
  source 1..75: mol_type = other DNA
agtgagggcgtttattttgtgcccttcatgacagacggtaacggcgtcaataccgccactaacgcgccggcagaa

SEQ ID NO: 139062 - DNA, 75 bp, synthetic construct
  source 1..75: mol_type = other DNA
agaaagtcgagaattgtgtgttgtggttaacggtaatattggtgctaaggtagtttctccttataaaaaacacaa

SEQ ID NO: 139063 - DNA, 75 bp, synthetic construct
  source 1..75: mol_type = other DNA
cgggcacgctgaatgattttctcggggccatgacggaagacgatgtcatgccggaggcattgcgtcgttttgagg

SEQ ID NO: 139064 - DNA, 75 bp, synthetic construct
  source 1..75: mol_type = other DNA
caggcacgctgaatgattttctcggagccatgacggaagaggatgtcatgccggaggcattgcgtcgttttgagg

SEQ ID NO: 139065 - DNA, 75 bp, synthetic construct
  source 1..75: mol_type = other DNA
tattgcagccgcttcctgatgtgtggataccatttaacgattcactggatatgattacggggttttcgccgtcat

SEQ ID NO: 139066 - DNA, 75 bp, synthetic construct
  source 1..75: mol_type = other DNA
ccggatcagcaactgctgcggctaacagccagaaagctgcgaagacgagtgaaactaacgcaaagtccagccaga

SEQ ID NO: 139067 - DNA, 75 bp, synthetic construct
  source 1..75: mol_type = other DNA
tctacgtcatcttttcggtcacattcgtaattttcgtatatggcataaagaattaaccgatgcacaaatgggaga

SEQ ID NO: 139068 - DNA, 75 bp, synthetic construct
  source 1..75: mol_type = other DNA
gtaacgggcatatatccagcgaaacaaaaaccacatggtcctgtattcagaacaccgcaattatccgtattggag

SEQ ID NO: 139069 - DNA, 75 bp, synthetic construct
  source 1..75: mol_type = other DNA
gtttgaagccttcgatggcagcgcttcatctaatcttggatatgccattgttaatacgcggtctttattggttga

SEQ ID NO: 139070 - DNA, 75 bp, synthetic construct
  source 1..75: mol_type = other DNA
tatctcgatgtaaccactccacagattgaggctggtacaggcgcatcatcttttattgttacggggacggcaccg

SEQ ID NO: 139071 - DNA, 75 bp, synthetic construct
  source 1..75: mol_type = other DNA
ttacgatttgaagaatatgatggatctacctacaaattcctgggtgatgcttacttaaatatgacagatttatcg

SEQ ID NO: 139072 - DNA, 75 bp, synthetic construct
  source 1..75: mol_type = other DNA
gcggtggcaaagaaatccgaaactgcagcggcatcatcgaagaacgcggcgaaaacctcagaaacgaatgcagct

SEQ ID NO: 139073 - DNA, 75 bp, synthetic construct
  source 1..75: mol_type = other DNA
tgacaggcggtgctgcctcaaggattacagcgagagtcagaaaggacgaagctaccggatggatttttgcagagg

SEQ ID NO: 139074 - DNA, 75 bp, synthetic construct
  source 1..75: mol_type = other DNA
aagtgcggcggcttcttctgccactgcatcagccaacagtcaaaaagcagcaaaaaccagtgaaaccaacacaaa

SEQ ID NO: 139075 - DNA, 75 bp, synthetic construct
  source 1..75: mol_type = other DNA
aaaaactggtttatttctcataatgctgcaccgcgtgtcattgattcagaaaatcaccagtccgggggcccattt

SEQ ID NO: 139076 - DNA, 75 bp, synthetic construct
  source 1..75: mol_type = other DNA
aatatgtataccatgccttttacgttcatggtggaagtccataaaaactggtttatttctcataatgctgcaccg

SEQ ID NO: 139077 - DNA, 75 bp, synthetic construct
  source 1..75: mol_type = other DNA
ttacctcaatttatcaacacttgtaattgataaaactggtactgctgcagaccgtattattgcaaaggctgtaaa

SEQ ID NO: 139078 - DNA, 75 bp, synthetic construct
  source 1..75: mol_type = other DNA
tgtattaaccgttgctgaagttgacgaaccgcgatttgaacgagaaggtttgctgattgaaggacagagaacaaa

SEQ ID NO: 139079 - DNA, 75 bp, synthetic construct
  source 1..75: mol_type = other DNA
aagatttgcggctagatttgataaaggggattcgccagttgctgtagctgccatttttattgatagcgccacact

SEQ ID NO: 139080 - DNA, 75 bp, synthetic construct
  source 1..75: mol_type = other DNA
agcaagcctgaaccttaccacccgcataattagcaagacaggtcagacaagccgtgttacagcaaggtctgttaa

SEQ ID NO: 139081 - DNA, 75 bp, synthetic construct
  source 1..75: mol_type = other DNA
atgattacgggcttttcgccatcttataaaaagattgttattggtgacgacgaaataacgatgcctggtgacaag

SEQ ID NO: 139082 - DNA, 75 bp, synthetic construct
  source 1..75: mol_type = other DNA
cgccgttcgtattttatttgaacattatgatggggaggtaaggacatcaataggagcagcaaacctgaaccttac

SEQ ID NO: 139083 - DNA, 75 bp, synthetic construct
  source 1..75: mol_type = other DNA
aaagatccggttacagggtggattttctatgaggcaactatagaagctgttgaaggtgaaaccttaattggcgca

SEQ ID NO: 139084 - DNA, 75 bp, synthetic construct
  source 1..75: mol_type = other DNA
ttaatatggcatcaattgctgctacaaagtcagttgatgtttcaggcgataacaagtacgtgacaacctcatgtc

SEQ ID NO: 139085 - DNA, 75 bp, synthetic construct
  source 1..75: mol_type = other DNA
ttccttttacggttctttgtgaggtacataagaactggtataaaacgccaaatgcagcaccgcgtgtttttaaga

SEQ ID NO: 139086 - DNA, 75 bp, synthetic construct
  source 1..75: mol_type = other DNA
acgccagccagtgaccgaaatagctcaggaactagccaaactagttggcaaaccatgcttcgatgacctcttgtt

SEQ ID NO: 139087 - DNA, 75 bp, synthetic construct
  source 1..75: mol_type = other DNA
cagcttaaataccgtgacgattggtcacaagttaagcctttagcccaatgcctagcagagcatgcctttcctcat

SEQ ID NO: 139088 - DNA, 75 bp, synthetic construct
  source 1..75: mol_type = other DNA
aatttcacaagtggagtcggtctcaggctggatgcatttggacgtggcgtgatttttttttccgataatgtgcaa

SEQ ID NO: 139089 - DNA, 75 bp, synthetic construct
  source 1..75: mol_type = other DNA
gctgctgtttgccgatatcatcgggcgtgtgattgtgcccggcgagctgcgcgtttctgtagtcagcgcctttat

SEQ ID NO: 139090 - DNA, 75 bp, synthetic construct
  source 1..75: mol_type = other DNA
gtctacgatcaactgcgtttctggcaagccggttcgctggatattcgcaatctacataccttaaaagtggtgctg

SEQ ID NO: 139091 - DNA, 75 bp, synthetic construct
  source 1..75: mol_type = other DNA
ggccctctccggcacctgccagagcgccgactgcaccatcgtgctcgacgcgcgactgccgcgcacccttgccgg

SEQ ID NO: 139092 - DNA, 75 bp, synthetic construct
  source 1..75: mol_type = other DNA
gcagtcagccagatagcgatgcgacacgtaattttattaccggaatggccaccgctaaagctaaccaggaaatac

SEQ ID NO: 139093 - DNA, 75 bp, synthetic construct
  source 1..75: mol_type = other DNA
taacgattcgctggatatgattacgggcttttcgccgtcatataaaaaaattgttattggtgacgatgaaataac

SEQ ID NO: 139094 - DNA, 75 bp, synthetic construct
  source 1..75: mol_type = other DNA
aataatgtgacggtgacggcagaaagagtcggtgaatggtggttgtttaccgccactctttttgcagatgcggaa

SEQ ID NO: 139095 - DNA, 75 bp, synthetic construct
  source 1..75: mol_type = other DNA
ttaactgttcacactgttcacctcggttatttatcattttatatcatgtggttaggtggtgatgagttggtgaag

SEQ ID NO: 139096 - DNA, 75 bp, synthetic construct
  source 1..75: mol_type = other DNA
attcaatacacttgatgattatcgattaagaagtgatgctccggaattccgagaagctatagagtctgcgattca

SEQ ID NO: 139097 - DNA, 75 bp, synthetic construct
  source 1..75: mol_type = other DNA
aaatattgtttcatcacctgaacttaccaatcactttgcacttgcgcacccatccctctgccttgagttaatcaa

SEQ ID NO: 139098 - DNA, 75 bp, synthetic construct
  source 1..75: mol_type = other DNA
actggtataaaacgccaaatgcagcaccgcgtgtttttgataccggcggtcatcaaaccggagcggctattattc

SEQ ID NO: 139099 - DNA, 75 bp, synthetic construct
  source 1..75: mol_type = other DNA
cggcttacgtcatttatttggttatatcaggaattttagaatatggcataaagaattaaccgatgcgcaaatggg

SEQ ID NO: 139100 - DNA, 75 bp, synthetic construct
  source 1..75: mol_type = other DNA
tggttgaagtgaataaaaattggtctatagcaccaaattccgcgcctagaatttatgatataacaggatttaaaa

SEQ ID NO: 139101 - DNA, 75 bp, synthetic construct
  source 1..75: mol_type = other DNA
ataaaaagattgttattggtgatgatgaaataacgatgcctggtgacaaggttgttaagtttaaacgcgcatcga

SEQ ID NO: 139102 - DNA, 75 bp, synthetic construct
  source 1..75: mol_type = other DNA
gcagccagttctgcaagtgcggcggctacttctgccacggcatcagccaacagtcaaagagctgcaaaaaccagt

SEQ ID NO: 139103 - DNA, 75 bp, synthetic construct
  source 1..75: mol_type = other DNA
gaggctgccattgacgagccacgatttgaacgtgatggcctgcttattgaggggcaaagaactaatcttctgctt

SEQ ID NO: 139104 - DNA, 75 bp, synthetic construct
  source 1..75: mol_type = other DNA
gtgataatgtggttcaggttgccagtgataaacaggttaatttcagtcgcgcatcaacggcaacatatatcaaca

SEQ ID NO: 139105 - DNA, 75 bp, synthetic construct
  source 1..75: mol_type = other DNA
ccgggttataaaaaagtgaagattggtgataatgtggttcaggttgccagtgataaacaggttaatttcagtcgc

SEQ ID NO: 139106 - DNA, 75 bp, synthetic construct
  source 1..75: mol_type = other DNA
catcaggggattatctcgatgtaaccactccacagattgaggctggtacaggcgcatcatcttttattgttacgg

SEQ ID NO: 139107 - DNA, 75 bp, synthetic construct
  source 1..75: mol_type = other DNA
tcgcgcatcaacggcaacatatatcaacaaatctggcgaactgaaaacggcggaaattaatgagccacgatttga

SEQ ID NO: 139108 - DNA, 75 bp, synthetic construct
  source 1..75: mol_type = other DNA
gatttttgtagaggcaacgattcaagcaagtaaagaaacttacataacctctgcaatacaatacgcaccaaaaaa

SEQ ID NO: 139109 - DNA, 75 bp, synthetic construct
  source 1..75: mol_type = other DNA
aataaatgaaaatgccgggctggaaaaaatgcttattggtatgcgggtaaagtccgaacggtccacatgtgtagt

SEQ ID NO: 139110 - DNA, 75 bp, synthetic construct
  source 1..75: mol_type = other DNA
caacctcatgtcgttttaaaacagaactgcaggtaaggttgcgtatccggtttgataaatatgacggtagcgcaa

SEQ ID NO: 139111 - DNA, 75 bp, synthetic construct
  source 1..75: mol_type = other DNA
agttctggttgaggctcataaaaactggaataaaacaccaaatgcagcaccgcgtgtttttgataccggcggtca

SEQ ID NO: 139112 - DNA, 75 bp, synthetic construct
  source 1..75: mol_type = other DNA
acgcatcgttgaaaaaaatggttatggggatgcgtgtaaagtcagatcagtctacatgtgcagtaagtaacgggc

SEQ ID NO: 139113 - DNA, 75 bp, synthetic construct
  source 1..75: mol_type = other DNA
cccgaaaccgggacagatagttttggttttacttatggaaagtttgtctgcaacgattctctggttgggcaaact

SEQ ID NO: 139114 - DNA, 75 bp, synthetic construct
  source 1..75: mol_type = other DNA
acagtcaggatgcagcagcccaaagcgagagtgctgcagctggttctgcaagtgcggcggctgcttctgccactg

SEQ ID NO: 139115 - DNA, 75 bp, synthetic construct
  source 1..75: mol_type = other DNA
tgcaagcgcggcggctgcttctgccactgcatcagccaacagtcaaaaagctgcaaaaaccagtgaaaccaacgc

SEQ ID NO: 139116 - DNA, 75 bp, synthetic construct
  source 1..75: mol_type = other DNA
ttacacttttttgggagatgcttacctcaatttatcaacacttgtaattgataaaactggtggtgcagcaaatcg

SEQ ID NO: 139117 - DNA, 75 bp, synthetic construct
  source 1..75: mol_type = other DNA
gctccagtgatatggtgacgatcccaactgaaaataatatctataatagaccgcttacgtgtcttgtcgaggtta

SEQ ID NO: 139118 - DNA, 75 bp, synthetic construct
  source 1..75: mol_type = other DNA
tgaaattaatatgacaggtggtgctgccggcagaattacggcacgagtcaggaaggataagaccacgggctggat

SEQ ID NO: 139119 - DNA, 75 bp, synthetic construct
  source 1..75: mol_type = other DNA
gttacagttccgattaagaataatctttataatcttccttttacggttctttgtgaggtacataagaactggtat

SEQ ID NO: 139120 - DNA, 75 bp, synthetic construct
  source 1..75: mol_type = other DNA
ctattattcttgggttcggatcttcggcagatgggccagacggatttccttattgcgatattggaggagctaaca

SEQ ID NO: 139121 - DNA, 75 bp, synthetic construct
  source 1..75: mol_type = other DNA
cagatgggccagacggatttccttattgcgatattggtggatcaaataggcgtgttaacgaaaacgcatcgttga

SEQ ID NO: 139122 - DNA, 75 bp, synthetic construct
  source 1..75: mol_type = other DNA
gatgtaaaagctgacaaagaaatcggtggcgacaagttgatttctaaccttagcgccgcacagcgtgcgcttgac

SEQ ID NO: 139123 - DNA, 75 bp, synthetic construct
  source 1..75: mol_type = other DNA
ggctgaatattgatgtcgtacccgtcgaatcgatggtcgatcagatgggaaagtcagcgggtgacgaatttttac

SEQ ID NO: 139124 - DNA, 75 bp, synthetic construct
  source 1..75: mol_type = other DNA
catttgctttcatgcgaataatccactccgagccgccatgattgtatttctcatgatgcaggaaaatcagaatgg

SEQ ID NO: 139125 - DNA, 75 bp, synthetic construct
  source 1..75: mol_type = other DNA
acgttggcatcggttgttgcaaaaagcgcgtcttgctgcgccgatcacggatgcccaggtccgtcaggcgctggg

SEQ ID NO: 139126 - DNA, 75 bp, synthetic construct
  source 1..75: mol_type = other DNA
aggaaaaatccttggttgccattgcaaaccctatccgtgccacggagatgttcttgccagatttttaaacgaatt

SEQ ID NO: 139127 - DNA, 75 bp, synthetic construct
  source 1..75: mol_type = other DNA
gtgaatatgctgacatgccaaaagagtggacaacgacccgaggactttatgcctctttccgttatgaaggaaact

SEQ ID NO: 139128 - DNA, 75 bp, synthetic construct
  source 1..75: mol_type = other DNA
gcacctgcaaaatgctgcgcaggtgttgctcatctggcaaattgtcattgtcgatggcagcgaacagaatctgca

SEQ ID NO: 139129 - DNA, 75 bp, synthetic construct
  source 1..75: mol_type = other DNA
gttattccgactaatgaagaaaaaatgattgccttagatgcaattcatttaggcaaagttaacgcctccgcagag

SEQ ID NO: 139130 - DNA, 75 bp, synthetic construct
  source 1..75: mol_type = other DNA
cttatggcgaacgaattatttccagcgaaaatgcccgcgtaacttgtgccgttattccgacaaatgaagaaaaaa

SEQ ID NO: 139131 - DNA, 75 bp, synthetic construct
  source 1..75: mol_type = other DNA
attgaatcggcgcagcaattattcccgggtgtcactcaggtagcggtatttgataccagtttccaccagacaatg

SEQ ID NO: 139132 - DNA, 75 bp, synthetic construct
  source 1..75: mol_type = other DNA
tggtctccccgctgttgctgggcgtcctctttttggtcgccatattggcgggatttatcgactcgatagcgggcg

SEQ ID NO: 139133 - DNA, 75 bp, synthetic construct
  source 1..75: mol_type = other DNA
gcggtgggcacctatcacggctctgtgcacaacggcctgcttcagccgccggcggcgcgctggtcagaagccgtg

SEQ ID NO: 139134 - DNA, 75 bp, synthetic construct
  source 1..75: mol_type = other DNA
tgttatcgtctcggcggtgatgagtgccaaattactttacgatagccacggacaggagatcctccactggttggg

SEQ ID NO: 139135 - DNA, 75 bp, synthetic construct
  source 1..75: mol_type = other DNA
ggattcaacctcgctaaagccaccgcccacgcgaaattactcaatgcaacgtcaaacctcggcggtttgttgctg

SEQ ID NO: 139136 - DNA, 75 bp, synthetic construct
  source 1..75: mol_type = other DNA
gtcaaacatcggcggtttgctgctgtttattctcggcggcaaagtgatttgggcgacaggatttgtgatgctggt

SEQ ID NO: 139137 - DNA, 75 bp, synthetic construct
  source 1..75: mol_type = other DNA
aaaccgttcgatcagatcgaggagtggtcgccgtcgatgaatataagaggacttgccatggaatgctctcggaca

SEQ ID NO: 139138 - DNA, 75 bp, synthetic construct
  source 1..75: mol_type = other DNA
ccgagcagggcgtggccaccctgcccgatgcggcatgggcacaggcccggcaccggaccgaaatcatcgggccgc

SEQ ID NO: 139139 - DNA, 75 bp, synthetic construct
  source 1..75: mol_type = other DNA
ggccgcgcgctgggccgaggccgtggagcgcgttggcgtcccggccgtcgttacccgccccaccgcgtttttggt

SEQ ID NO: 139140 - DNA, 75 bp, synthetic construct
  source 1..75: mol_type = other DNA
tccagacattgcgtttcacccgctgcgtgctcggcatggtcgtcacgctggaagcgccgtctgccgtttcggttg

SEQ ID NO: 139141 - DNA, 75 bp, synthetic construct
  source 1..75: mol_type = other DNA
ggccgcgcgctggccgaggccgtggcgcgtgtcggcgtaccggccgtcgtcacacgcgctacttcgttcctggtc

SEQ ID NO: 139142 - DNA, 75 bp, synthetic construct
  source 1..75: mol_type = other DNA
cgctgggccgaggccgtggcgcgtgtcggcgtaccggccgtcgtcacacgcgctacttggcactgttgcaaatag

SEQ ID NO: 139143 - DNA, 75 bp, synthetic construct
  source 1..75: mol_type = other DNA
tatttgctgccagaaagccatggcgaaattatcctcgtaccgcttcccggccatgctgccggacatattggcgcg

SEQ ID NO: 139144 - DNA, 75 bp, synthetic construct
  source 1..75: mol_type = other DNA
agatattgatgcgattattctgtcgcattttcatgccgatcatattgctggtctgcgcgatttccctgatgtcgc

SEQ ID NO: 139145 - DNA, 75 bp, synthetic construct
  source 1..75: mol_type = other DNA
ggcagtaccacttttgagctggctaacctgttatgtatgaaatctgggtttaaaatcttcacagattcgctcccc

SEQ ID NO: 139146 - DNA, 75 bp, synthetic construct
  source 1..75: mol_type = other DNA
aggatataactatgacattaaaagttgtcagcttgaaattctgcgcgatgagttaacaaagattggtgtatcaga

SEQ ID NO: 139147 - DNA, 75 bp, synthetic construct
  source 1..75: mol_type = other DNA
ccgtttgtcgggcgtatttatgactggtatcaggcacgcaagccgatggacccgtatgtggtggaagaagatccg

SEQ ID NO: 139148 - DNA, 75 bp, synthetic construct
  source 1..75: mol_type = other DNA
cgggctggtgtacacatattggctgtattgcgctgaaaggggcagggctgaaggtgtgtaaattccccgcccgtg

SEQ ID NO: 139149 - DNA, 75 bp, synthetic construct
  source 1..75: mol_type = other DNA
ttactgatacatcaataagcagcttattgttagccactttaatgtcaggaagcttaagctctgttagtgttttgg

SEQ ID NO: 139150 - DNA, 75 bp, synthetic construct
  source 1..75: mol_type = other DNA
ttctggtatagaagttgtttctttagatggtttaagtgatttattgatgaatgaaaaactgaatccattgtttga

SEQ ID NO: 139151 - DNA, 75 bp, synthetic construct
  source 1..75: mol_type = other DNA
cacgcctgattataaaacaccgttatagtgatccttctattgtgccaccgccacctgcctggcaaatgaaagcgg

SEQ ID NO: 139152 - DNA, 75 bp, synthetic construct
  source 1..75: mol_type = other DNA
gactattagataaggaattacgaagagctttggtatcattgaaaactttgaagagtaaagcggtgagttcacttg

SEQ ID NO: 139153 - DNA, 75 bp, synthetic construct
  source 1..75: mol_type = other DNA
gagcaggttttggctgcggaaaaattatatgctcaattgagaagcgggaaggccgcgaggccgaaattggctgct

SEQ ID NO: 139154 - DNA, 75 bp, synthetic construct
  source 1..75: mol_type = other DNA
gagtgcgtatcggtacagttgattctggaaaacggcgcggtcgccgtaggtgactgtactgccgtacagtattcc

SEQ ID NO: 139155 - DNA, 75 bp, synthetic construct
  source 1..75: mol_type = other DNA
atataaaaaacattctatctgtaaaacaaagatatgttattccacgtaatcaacgtgagtttagttgggaaaagc

SEQ ID NO: 139156 - DNA, 75 bp, synthetic construct
  source 1..75: mol_type = other DNA
acagcctggtagccccgcatttctggcaggtagtgcttcaggatgggcgtttgttcggtagccccatagacattc

SEQ ID NO: 139157 - DNA, 75 bp, synthetic construct
  source 1..75: mol_type = other DNA
agtgcggcacagataaggcactgacgcagagagaaattttagaactggcggtaaaaatcggggatttcatcaaag

SEQ ID NO: 139158 - DNA, 75 bp, synthetic construct
  source 1..75: mol_type = other DNA
tgcattcttatccgtaaatggaggagagccagctaagctggctcaccacagctacgaaggtgcgttgaaggcaat

SEQ ID NO: 139159 - DNA, 75 bp, synthetic construct
  source 1..75: mol_type = other DNA
ctatctgtgcagttcgcaatggtcagagcgtggatacctcaatgggaatgacgccgctggaagggttgatgatgg

SEQ ID NO: 139160 - DNA, 75 bp, synthetic construct
  source 1..75: mol_type = other DNA
caaaccaaccagagcctgggtgacctggaacgcgtagtgaataaagagtcgggattattaggtatttccggtctt

SEQ ID NO: 139161 - DNA, 75 bp, synthetic construct
  source 1..75: mol_type = other DNA
caatattacctataaagatgttgctgcgcgtaaacgcaggaagtcagatgtgatgcgccgaaagctgtttgaacc

SEQ ID NO: 139162 - DNA, 75 bp, synthetic construct
  source 1..75: mol_type = other DNA
ctatgacatcaagggatgccagcttgagatactacgacatgagttgttgagtattggcattccggccaagtcgct

SEQ ID NO: 139163 - DNA, 75 bp, synthetic construct
  source 1..75: mol_type = other DNA
aaaaagtcaggtaatgggggaaaatggcagccccagcaaatgcgccgcaagctactttctcatatgttacagggg

SEQ ID NO: 139164 - DNA, 75 bp, synthetic construct
  source 1..75: mol_type = other DNA
atgaaaccatacattacgcataacaatatccttgtgacaggttcaacgcttgagtatttcaaagaagttgttttc

SEQ ID NO: 139165 - DNA, 75 bp, synthetic construct
  source 1..75: mol_type = other DNA
gcgcgtaaacgcaggaagtcagatgtgatgcgccgaaagctgtttgaaccgccccgggaatcctggagactaaac

SEQ ID NO: 139166 - DNA, 75 bp, synthetic construct
  source 1..75: mol_type = other DNA
agtctaaacgcgatatccctaacgctgccttcagagaactggtagtagatgtctgggacaaccttgagccgcttg

SEQ ID NO: 139167 - DNA, 75 bp, synthetic construct
  source 1..75: mol_type = other DNA
agcttccgtaacatcggcgaaattctggaactggcaggctgcgaccgtcttaccatcgcacctacactgctgaaa

SEQ ID NO: 139168 - DNA, 75 bp, synthetic construct
  source 1..75: mol_type = other DNA
tggcagttaagctcgcggcgggcagcgttaccttactggcggtaggcggcgtggtttactcgctcggggtgattt

SEQ ID NO: 139169 - DNA, 75 bp, synthetic construct
  source 1..75: mol_type = other DNA
tgccaacagcgtcagtcacggtattggactggtgtttggtatcgtcgggttggtattgctactggttcaggcggt

SEQ ID NO: 139170 - DNA, 75 bp, synthetic construct
  source 1..75: mol_type = other DNA
caagtgacctggtacggctgggacggcgaccggctgaccacgatacagaacgacaggagccgcatccagacgatt

SEQ ID NO: 139171 - DNA, 75 bp, synthetic construct
  source 1..75: mol_type = other DNA
aaactggcagtaaacattggtctggaaatcctgaaactggttcctggccgtatctcaactgaagttgatgcacgt

SEQ ID NO: 139172 - DNA, 75 bp, synthetic construct
  source 1..75: mol_type = other DNA
atcaactgtaacctgaccctgctgttctccttcgctcaggctcgtgcttgtgcggaagcgggcgtgttcctgatc

SEQ ID NO: 139173 - DNA, 75 bp, synthetic construct
  source 1..75: mol_type = other DNA
atgaagaagaatacccgctttgcttttaacgcttacttgcagcagctggcgcgtctgaacggtgtggcagttgaa

SEQ ID NO: 139174 - DNA, 75 bp, synthetic construct
  source 1..75: mol_type = other DNA
aagagaaaaggtggtgatggtgactcattccttgcgcatgaaatagatctcattattgagtttaatctccctgtg

SEQ ID NO: 139175 - DNA, 75 bp, synthetic construct
  source 1..75: mol_type = other DNA
cctttattgtgatgccggaaggaaagaccggcggcattggcctgccagtcagcttccgcctgcctgaacatcccg

SEQ ID NO: 139176 - DNA, 75 bp, synthetic construct
  source 1..75: mol_type = other DNA
gcagtatgatcctgctgtttcttgcttcgacgctttatcacgccgttccccatcaacgggcaaaaatgtggctga

SEQ ID NO: 139177 - DNA, 75 bp, synthetic construct
  source 1..75: mol_type = other DNA
gattttctatgtctgcaaacgcattccttacaaccacgctatctggcacggctttgtgctgggcggcagcgtgtg

SEQ ID NO: 139178 - DNA, 75 bp, synthetic construct
  source 1..75: mol_type = other DNA
tatggggggcctgcaggccgtgcgtgcgccgttcttcccgccgaatgcattgctgatcacccgtctggataacct

SEQ ID NO: 139179 - DNA, 75 bp, synthetic construct
  source 1..75: mol_type = other DNA
caggatatcgcggctatcggcgaaatgtgccgtgctcgtggcattatctatcacgttgatgcaacccagagcgtg

SEQ ID NO: 139180 - DNA, 75 bp, synthetic construct
  source 1..75: mol_type = other DNA
tttatgacgatggacggaacctttggtaacccggcctcccgttctcaccgtttcggctggcaggctgaagaagcg

SEQ ID NO: 139181 - DNA, 75 bp, synthetic construct
  source 1..75: mol_type = other DNA
atacctgccgtcagctggagcgcgaaggtttcgaagtcacctacctggcaccgcagcgtaacggcattatcgacc

SEQ ID NO: 139182 - DNA, 75 bp, synthetic construct
  source 1..75: mol_type = other DNA
gaacaccgtgcagatgtcctcggcctttttgcagaaaattaatatcgtgccggtggatgagctgaagggtgaaaa

SEQ ID NO: 139183 - DNA, 75 bp, synthetic construct
  source 1..75: mol_type = other DNA
caggagaacagtgaaaaactggctgcagatatgatcatcagccagaaacgcatgggtggcctgcaggccgtgcgt

SEQ ID NO: 139184 - DNA, 75 bp, synthetic construct
  source 1..75: mol_type = other DNA
gttgaggactaccgctgcgccgcactggtggaaaacatccagattggtgatttcagtgccgccgcagccgaaacc

SEQ ID NO: 139185 - DNA, 75 bp, synthetic construct
  source 1..75: mol_type = other DNA
gaccaccaacctgattgatgagatttatcaggatgacccggagctcgtcgttatcactgggcgtaagctgatggc

SEQ ID NO: 139186 - DNA, 75 bp, synthetic construct
  source 1..75: mol_type = other DNA
gacgctgatggtcgatgtggaatataaatgcgaacagaccaactttgatacggtgctgacctacgcgaagctgga

SEQ ID NO: 139187 - DNA, 75 bp, synthetic construct
  source 1..75: mol_type = other DNA
tacgtggtggaagactacgccgccggttgtctggtggaaaaaatcagggtcggtgacttctccacaccggctaag

SEQ ID NO: 139188 - DNA, 75 bp, synthetic construct
  source 1..75: mol_type = other DNA
gtgcgtgtgccgtacttcccggcgaatgccgtgttagtgaccacgctggaaaacctctctatctatttcatggat

SEQ ID NO: 139189 - DNA, 75 bp, synthetic construct
  source 1..75: mol_type = other DNA
atgcgtcaggaaacccgttttaagttcaatgcctatctgacccagctcgccaaactgaacggcatcagcgttgat

SEQ ID NO: 139190 - DNA, 75 bp, synthetic construct
  source 1..75: mol_type = other DNA
tggctgctgacatcatcatcagccagaagcgtatcggcaacctgcctgctgtgcgcgtgccgtacttcccggcga

SEQ ID NO: 139191 - DNA, 75 bp, synthetic construct
  source 1..75: mol_type = other DNA
aatccaccttgctgcgccatacacgccatgagctggcaaacgatcggcaactgctcgaggaggagtcccgtgagc

SEQ ID NO: 139192 - DNA, 75 bp, synthetic construct
  source 1..75: mol_type = other DNA
gtggcggacatcagcaggataatccccgttttgctgaaggaacgctgaagtatggtctgcctgcaggctggacgg

SEQ ID NO: 139193 - DNA, 75 bp, synthetic construct
  source 1..75: mol_type = other DNA
agcggcgtaatgagactcgacaactcaatgcggcgcatcttgataaaaacggcagtcttcttaccgttgaaggca

SEQ ID NO: 139194 - DNA, 75 bp, synthetic construct
  source 1..75: mol_type = other DNA
tcagcagccacaacaacagctgcacctacccgtttcttctcatcctaaaatccgcacgatggtggagatgatggc

SEQ ID NO: 139195 - DNA, 75 bp, synthetic construct
  source 1..75: mol_type = other DNA
actgtcagaagtacagtcaaaagccctttcagcgcgttttaacacggcactggaagccagcctgcaggcgtggca

SEQ ID NO: 139196 - DNA, 75 bp, synthetic construct
  source 1..75: mol_type = other DNA
tgaccgttcctcagttatatatgagtaatcaggcccgtggttatattgcgccggaatactgggataacggaatta

SEQ ID NO: 139197 - DNA, 75 bp, synthetic construct
  source 1..75: mol_type = other DNA
acaatttaagtgaagaggctgattcacacatactaaacagagactatgaagccctagaaagtcttattgagagat

SEQ ID NO: 139198 - DNA, 75 bp, synthetic construct
  source 1..75: mol_type = other DNA
ggcgcagaaactgctcaggctacagtgagggtctggatgagattccggcgagatgtgacagcaacttcatgtctg

SEQ ID NO: 139199 - DNA, 75 bp, synthetic construct
  source 1..75: mol_type = other DNA
atggaaacgtttaatagcctgtttatggtctccccgctattgctgggcgttctcttttttgtcgccatgctggcg

SEQ ID NO: 139200 - DNA, 75 bp, synthetic construct
  source 1..75: mol_type = other DNA
atgcagctttactccttctggtaagttaagactaaaacctggattgatgcccaccagcgacgttatcacactggc

SEQ ID NO: 139201 - DNA, 75 bp, synthetic construct
  source 1..75: mol_type = other DNA
agaaacaaacaaaaacgaccaaatgtattgcttgataaaaaggcttatgacgatggaatgagggaggctatggag

SEQ ID NO: 139202 - DNA, 75 bp, synthetic construct
  source 1..75: mol_type = other DNA
tttactgcccacagcatacctgatgaagaacagcacttctacaactcaacataccgacatgttgacgacatgtct

SEQ ID NO: 139203 - DNA, 75 bp, synthetic construct
  source 1..75: mol_type = other DNA
aaaagaacagcaaaggcgtaccgccatcaatcgaacaaccgcaggttttcgacccgactgaaacgccgaccagaa

SEQ ID NO: 139204 - DNA, 75 bp, synthetic construct
  source 1..75: mol_type = other DNA
cggcaatgcagcacaacatggaaccagacgccactgtctgctgccggatggcgttataccctggctgaatgttct

SEQ ID NO: 139205 - DNA, 75 bp, synthetic construct
  source 1..75: mol_type = other DNA
cgcttcagcgagccatctgtccgttttctctctgtcacaagacaactggaaaatggtcgtttccgttatcagttc

SEQ ID NO: 139206 - DNA, 75 bp, synthetic construct
  source 1..75: mol_type = other DNA
gctgcccgacaggtcacagaggaacaaatcagtcccccctggcccggactccccgaaaccgacgcctttatccag

SEQ ID NO: 139207 - DNA, 75 bp, synthetic construct
  source 1..75: mol_type = other DNA
cgtttattgtgatgccggaaggaaagaccggcggcattggcctgccggtcaccttccggctgtctgaaaacgccg

SEQ ID NO: 139208 - DNA, 75 bp, synthetic construct
  source 1..75: mol_type = other DNA
gtgacggatatttcaccgacagggcggcaggtgtttccgctgacggcagggcgcaatgtgtttctggccggtctg

SEQ ID NO: 139209 - DNA, 75 bp, synthetic construct
  source 1..75: mol_type = other DNA
gtgtcgcctgccgtggtacagggagcgccggatatcacgcggcagatccagcaggatattgcccggcggatgagg

SEQ ID NO: 139210 - DNA, 75 bp, synthetic construct
  source 1..75: mol_type = other DNA
ttacccgtttcttcacaccccaaaatccgcgtgatggtggatacgatggcaaaagagcccgttgaatgggggaca

SEQ ID NO: 139211 - DNA, 75 bp, synthetic construct
  source 1..75: mol_type = other DNA
agttttcgccagtggcgtcagcagttacagctgattatggcgcttcagggattagtgaaaggcgatactgtacag

SEQ ID NO: 139212 - DNA, 75 bp, synthetic construct
  source 1..75: mol_type = other DNA
cacgacagtgacagccttcatccggcgcatcactgaactcacagacacccggccgtttattgttatgcctgaagg

SEQ ID NO: 139213 - DNA, 75 bp, synthetic construct
  source 1..75: mol_type = other DNA
ccttctggggcatctctgctttatgcggaggtttggcagtctttctgcctaatgtattgtttatgatatttgcct

SEQ ID NO: 139214 - DNA, 75 bp, synthetic construct
  source 1..75: mol_type = other DNA
acgttgctcggaagcttctgctcgttcagttactggtggtgatagcaagtggattgctgttcagcctcaaagacc

SEQ ID NO: 139215 - DNA, 75 bp, synthetic construct
  source 1..75: mol_type = other DNA
cggtctgggcggcacctatgccggtaacccgattgcctgcgtggcagcgctggaagtgttgaaggtgttcgagca

SEQ ID NO: 139216 - DNA, 75 bp, synthetic construct
  source 1..75: mol_type = other DNA
gtcccgctcactattgaagatgctcagatccgtcagggtctggaaattatcagccagtgttttgatgaggcgaag

SEQ ID NO: 139217 - DNA, 75 bp, synthetic construct
  source 1..75: mol_type = other DNA
ctgtttgcgatggagcaaatgggcgtcgcgccggatctcaccacctttgcgaaatcgatcgcaggcggcttcccg

SEQ ID NO: 139218 - DNA, 75 bp, synthetic construct
  source 1..75: mol_type = other DNA
agttccccgaagcactggaacggatgaaagagagactgccaccgtatctcattatggtactggaaaaccagtaca

SEQ ID NO: 139219 - DNA, 75 bp, synthetic construct
  source 1..75: mol_type = other DNA
gcccgcttcgttaagacattcgtcatgggcaataagaatgatgtgatggatgcccgggctatctggatggcggtt

SEQ ID NO: 139220 - DNA, 75 bp, synthetic construct
  source 1..75: mol_type = other DNA
ttctggcttttatatttgttggcgttatggctatgattgtatgtattcctttttacatcgtttaccttgcgcaac

SEQ ID NO: 139221 - DNA, 75 bp, synthetic construct
  source 1..75: mol_type = other DNA
catcgcagccacaactggcagcagaagtgatgccgtggttaagtactcaagccagggcagtgctgaatagttatt

SEQ ID NO: 139222 - DNA, 75 bp, synthetic construct
  source 1..75: mol_type = other DNA
gctacatgtcgcatgaaaaccacttcggctacgcggcctgcgctgcccttttgcgcgaacaaggactggcagccg

SEQ ID NO: 139223 - DNA, 75 bp, synthetic construct
  source 1..75: mol_type = other DNA
acgcaggccatcaacttgatcggcgaacacaaaccctcaatcccggcccggacaatggcggcgctagtctgtatc

SEQ ID NO: 139224 - DNA, 75 bp, synthetic construct
  source 1..75: mol_type = other DNA
agggtgaaggcggtttctacgccgcgacacctgcgtttatgcagcgtttacgcgcgctgtgtgacgagcacggga

SEQ ID NO: 139225 - DNA, 75 bp, synthetic construct
  source 1..75: mol_type = other DNA
gacgcctgcgtttatgcagcgtttacgcgcgctgtgtgacgagcacgggatcatgctgattgccgatgaagtgca

SEQ ID NO: 139226 - DNA, 75 bp, synthetic construct
  source 1..75: mol_type = other DNA
tcgccagcatccaccggatcttcaaaaatgacgccgcgccggaagatatcgccgccatcgtgattgagccggttc

SEQ ID NO: 139227 - DNA, 75 bp, synthetic construct
  source 1..75: mol_type = other DNA
tacatgagtaaggaaaatacgctgcaacaggccgtggggttgcccgatcagaaaacgcttaatatcattatgggg

SEQ ID NO: 139228 - DNA, 75 bp, synthetic construct
  source 1..75: mol_type = other DNA
atggaacaatcccactggctcctcgacggtaaaaaagatgcgccggtcattgtctacgtcttcgccgatccgttc

SEQ ID NO: 139229 - DNA, 75 bp, synthetic construct
  source 1..75: mol_type = other DNA
agaggaacttcctgctccagtaaaagcgattgaaaaacagggcattacaatcatcaaaacgttcgatgcccccgg

SEQ ID NO: 139230 - DNA, 75 bp, synthetic construct
  source 1..75: mol_type = other DNA
tgtttaaaggcgttttaacccgtgacggggattactttatctcggtgatggggcgcagtgatgtggcacgtaagc

SEQ ID NO: 139231 - DNA, 75 bp, synthetic construct
  source 1..75: mol_type = other DNA
atcccgtcagtactggtcgaaaccggttttatcagcaataacagcgaagagcgtttgctggcgagcgacgattat

SEQ ID NO: 139232 - DNA, 75 bp, synthetic construct
  source 1..75: mol_type = other DNA
tggcgttggttatcgcggcctgtgtgacgttcaccggggcgctgtgttacttctttattgtcaaagatcgcattg

SEQ ID NO: 139233 - DNA, 75 bp, synthetic construct
  source 1..75: mol_type = other DNA
tgggcaataagaatgacgtgatggatgcgcgagctatctggatggcggtacagcagccagttaaagaaatcgccg

SEQ ID NO: 139234 - DNA, 75 bp, synthetic construct
  source 1..75: mol_type = other DNA
atggaagcttgtggaggctcccagcactgggcgcgtgaattaacaaagcagggacacaaagtccggttgttgcag

SEQ ID NO: 139235 - DNA, 75 bp, synthetic construct
  source 1..75: mol_type = other DNA
tgggaaataagaatgatgtgatggatgcccgggctatctggatggctgttcagcagccaggtaaggacatcgcgg

SEQ ID NO: 139236 - DNA, 75 bp, synthetic construct
  source 1..75: mol_type = other DNA
accagcgatctattacatgagtaaggaaaatacgctgcaacaggccgtggggttgcccgatcagaaaacgcttaa

SEQ ID NO: 139237 - DNA, 75 bp, synthetic construct
  source 1..75: mol_type = other DNA
agattaatgccctgcatggcacgctcctcgagtttggtgaaaccctacacaaaggtcgggcagcgatggacagag

SEQ ID NO: 139238 - DNA, 75 bp, synthetic construct
  source 1..75: mol_type = other DNA
ggggcataaagtccgcttgttgcaggcccgcttcgttaaggcattcgtcatgggaaacaagaacgacgtgatgga

SEQ ID NO: 139239 - DNA, 75 bp, synthetic construct
  source 1..75: mol_type = other DNA
cacgggtagtacagatgcccaggagattctatccgttgaatctagtagctctattgctgggactcataaaggtaa

SEQ ID NO: 139240 - DNA, 75 bp, synthetic construct
  source 1..75: mol_type = other DNA
tcagactattacttcaacccgcgatactatcaacgcgacaattaacaagaacaagacagatattaatgcgcgagt

SEQ ID NO: 139241 - DNA, 75 bp, synthetic construct
  source 1..75: mol_type = other DNA
aacaggcccagcgcgtaccgttccggtttcacaggaggttgctgattatatcctcacccggaaatcaggaaagct

SEQ ID NO: 139242 - DNA, 75 bp, synthetic construct
  source 1..75: mol_type = other DNA
cgtgcttctggtattcaggtcgactgtcaacaatcaaccgattccgctcataacgtatggaaagcaacccatcaa

SEQ ID NO: 139243 - DNA, 75 bp, synthetic construct
  source 1..75: mol_type = other DNA
gtatttgcggttaatacttccggtgataactacgatatctacgttaactacggtcgttacaccgataacgttatt

SEQ ID NO: 139244 - DNA, 75 bp, synthetic construct
  source 1..75: mol_type = other DNA
aattcacactggcggtaatatcactatcaacggtgctgatattgagtttaaacgcactggcaataagcacatctg

SEQ ID NO: 139245 - DNA, 75 bp, synthetic construct
  source 1..75: mol_type = other DNA
gataccggcgcggtcggcaaggtaatgcaactgattgccctcctgcaccagacgggcgccgaaacagggcgtcgc

SEQ ID NO: 139246 - DNA, 75 bp, synthetic construct
  source 1..75: mol_type = other DNA
aaggggtgcaggaggccaaaccatcacaattcagtacgcggggttttaccccgcgtggtggctacttcttcgatt

SEQ ID NO: 139247 - DNA, 75 bp, synthetic construct
  source 1..75: mol_type = other DNA
ttaagggcgtggaggaacggcgcgtaacttaccgccgtgaaggctacgaatatgattgcgtgatgcccgtttatc

SEQ ID NO: 139248 - DNA, 75 bp, synthetic construct
  source 1..75: mol_type = other DNA
atggaggtaacataatcacattgcagcgcatcctaggtcattctaacattcagcaaactatgacctacgcacact

SEQ ID NO: 139249 - DNA, 75 bp, synthetic construct
  source 1..75: mol_type = other DNA
ctggatgtgcggttacttgatcactttatcgtggcaggaactgaaacggtgtcgatggctgaacgggggctggtg

SEQ ID NO: 139250 - DNA, 75 bp, synthetic construct
  source 1..75: mol_type = other DNA
atgaccctatttacccagcgtgaaacccgtatccttgaccaagcgcgtgacattatcagccggtactatcagcgt

SEQ ID NO: 139251 - DNA, 75 bp, synthetic construct
  source 1..75: mol_type = other DNA
tcttcgcctgccagacccgtgtgcgcgaccagagccgccgggaatataccaaacatatgctgcgtctgcggcggg

SEQ ID NO: 139252 - DNA, 75 bp, synthetic construct
  source 1..75: mol_type = other DNA
tgatggtattgaaggtagtgctaacgcagcatatatcaagaagaacacaaagacctatcacggcgcgtatttgta

SEQ ID NO: 139253 - DNA, 75 bp, synthetic construct
  source 1..75: mol_type = other DNA
atcgccttacaactggcggaccatgtgatttacaccaaagacaaaaataataacgtagtccaaattagtgtttct

SEQ ID NO: 139254 - DNA, 75 bp, synthetic construct
  source 1..75: mol_type = other DNA
ggacgcgtgattacgaaacggtttatcgctacgggggcgaagaatttatcattattgtcaaagcggctaatgatg

SEQ ID NO: 139255 - DNA, 75 bp, synthetic construct
  source 1..75: mol_type = other DNA
cgggcaatgtatgagggtaagcaaaccggaagaaatcgctgcatgtttattgacgaacaaaatgtgattaaccga

SEQ ID NO: 139256 - DNA, 75 bp, synthetic construct
  source 1..75: mol_type = other DNA
ggatgtggtcattggaagagcagaccgggcaatgtatgagggtaagcaaaccggaagaaatcgctgcatgtttat

SEQ ID NO: 139257 - DNA, 75 bp, synthetic construct
  source 1..75: mol_type = other DNA
ccagaaaaacacgctgaacttaacacgaaagtagaccagaataaaactagcactgaccgtgttattgcttccaac

SEQ ID NO: 139258 - DNA, 75 bp, synthetic construct
  source 1..75: mol_type = other DNA
taacaacaaggtagaccagaacaagactagcactgatgccgcaattgccgcagctaaccagcgaattgattctat

SEQ ID NO: 139259 - DNA, 75 bp, synthetic construct
  source 1..75: mol_type = other DNA
ccagaaaaacacgctgaactgaatacgaaagtagacaccaacaaggtcaacacagataaggttattgcagcaaac

SEQ ID NO: 139260 - DNA, 75 bp, synthetic construct
  source 1..75: mol_type = other DNA
ttattgctcaggatctggaagaagtgttgccggaagcagtaggtattcaatccaccgaagatccagaacaaccgg

SEQ ID NO: 139261 - DNA, 75 bp, synthetic construct
  source 1..75: mol_type = other DNA
gctggcggtaatatcacactgaacggtgctgatattgaatttaagcgcactggcaataagcacatctggtttaga

SEQ ID NO: 139262 - DNA, 75 bp, synthetic construct
  source 1..75: mol_type = other DNA
tggcggtttgcttgctcacttccgtggtgacttaaccgcagaaggtaagatcacatggggtaaaaatacatctgc

SEQ ID NO: 139263 - DNA, 75 bp, synthetic construct
  source 1..75: mol_type = other DNA
gggcgtctggacaatctccacgtcgcaatggtcggtgacctgaaatatggccgtaccgtgcactctctgacccag

SEQ ID NO: 139264 - DNA, 75 bp, synthetic construct
  source 1..75: mol_type = other DNA
cagcatccgtaagccactgctggaaatgctgcgtgaaaaacgtctgacgcaggtccagatacgcgaggaaatcaa

SEQ ID NO: 139265 - DNA, 75 bp, synthetic construct
  source 1..75: mol_type = other DNA
tttttaaggccatgatgcggcaaatcgaaaacccggaatctgacgtggatattgacctgctgaaaaatgccatgc

SEQ ID NO: 139266 - DNA, 75 bp, synthetic construct
  source 1..75: mol_type = other DNA
tcagaaactggccctccctgggccgaggcaaccatcgtaaatccgcgttcaatgttgcgtatttctttgtggaaa

SEQ ID NO: 139267 - DNA, 75 bp, synthetic construct
  source 1..75: mol_type = other DNA
cgggcacggttacattgattttgtcattgatgatgtagccgttgagtttgcagtacgtaaaccaactgcggcacg

SEQ ID NO: 139268 - DNA, 75 bp, synthetic construct
  source 1..75: mol_type = other DNA
tccgcaactggccctctcttggtcgagggaatcatcgcaagtctgcattcaacgtcgtttatttctttgtggaaa

SEQ ID NO: 139269 - DNA, 75 bp, synthetic construct
  source 1..75: mol_type = other DNA
atggataagccgacgcgtggccgcgtgcgcaaggtggatttgctcccggacagtatccgtaagccgctgctggaa

SEQ ID NO: 139270 - DNA, 75 bp, synthetic construct
  source 1..75: mol_type = other DNA
attctggaaatgtcccgcgccctgatgtaccgccgtctgcgtgccgcgaccgaatccctgaacagtgacagcgac

SEQ ID NO: 139271 - DNA, 75 bp, synthetic construct
  source 1..75: mol_type = other DNA
caatatcgccatgacctttgtcggctcaatgagcggcgcgctactggtgcagtatgttcaggccgatgtcttacg

SEQ ID NO: 139272 - DNA, 75 bp, synthetic construct
  source 1..75: mol_type = other DNA
aggcccgcattctggaagaaattaacgcactgattgaagacgctggcctgccggatgagatgaaactctcccgtt

SEQ ID NO: 139273 - DNA, 75 bp, synthetic construct
  source 1..75: mol_type = other DNA
ggaaagtgccgccgagcgcagcattaagcgtgaaaaagaaatccgggccgcatttgctgaagagatggcaaacgc

SEQ ID NO: 139274 - DNA, 75 bp, synthetic construct
  source 1..75: mol_type = other DNA
ctgattctggagatgtcccgcgccctgatgtaccgccgcctgcgtgccgcgaccgaatccctgaatgacgacagc

SEQ ID NO: 139275 - DNA, 75 bp, synthetic construct
  source 1..75: mol_type = other DNA
tgagattaagtgagattctttttcctgccagtgaatacggctctgatatgttttttaacgagtttgaggtgatta

SEQ ID NO: 139276 - DNA, 75 bp, synthetic construct
  source 1..75: mol_type = other DNA
aatggatattgattttatgaaatgtgattcgctggcagaattgcttaccagcgataagctggaaaatttattagt

SEQ ID NO: 139277 - DNA, 75 bp, synthetic construct
  source 1..75: mol_type = other DNA
aacagatattgattttgtgaaatatgattcgctggcagaattgcttaccagcgagaagctggatgcgttatttaa

SEQ ID NO: 139278 - DNA, 75 bp, synthetic construct
  source 1..75: mol_type = other DNA
gtggaaaatcgtggagtttccttggtttcaatgtgcctccctttgttaccccaaacagcgaaattaaagcactga

SEQ ID NO: 139279 - DNA, 75 bp, synthetic construct
  source 1..75: mol_type = other DNA
ttttttaaggagtttgaggaaataaacaacgttaccttgcctttagttgtttttgaaataaatgaacgtgaacct

SEQ ID NO: 139280 - DNA, 75 bp, synthetic construct
  source 1..75: mol_type = other DNA
attagacattaaggttttggttattgatgacctgtctgaattgctgaccaatgaaactctggatttattatacaa

SEQ ID NO: 139281 - DNA, 75 bp, synthetic construct
  source 1..75: mol_type = other DNA
gaaaaaagcgaagctgcaaatgctggagaacgtagtttgcagcagttgcgtgagcagtttgtcacgcctcgccat

SEQ ID NO: 139282 - DNA, 75 bp, synthetic construct
  source 1..75: mol_type = other DNA
cacgtccttaccaacagactcacgccacactggatcgtgaaattgcctgcgccctgttacctgttgccccggaaa

SEQ ID NO: 139283 - DNA, 75 bp, synthetic construct
  source 1..75: mol_type = other DNA
atgaccatttttaacggcttgttagaagcgaaaaaaggcgcgctcaaaaacggcgcgatcccggcgctggccatc

SEQ ID NO: 139284 - DNA, 75 bp, synthetic construct
  source 1..75: mol_type = other DNA
ttgagtcagcaggagtcagcttttcgctcagaacaaacgcagaacagcagctactgctacctgaacggcgtcaaa

SEQ ID NO: 139285 - DNA, 75 bp, synthetic construct
  source 1..75: mol_type = other DNA
tgctgcattatctgttgcgcctgaagttaccgctatagcagaaaaaatcagagtattagataaggaattacgaag

SEQ ID NO: 139286 - DNA, 75 bp, synthetic construct
  source 1..75: mol_type = other DNA
catcgtatctgggatcacgtctgcgccgtatcaccgacatcaaaactgaacgcctcgccgccctcaccgctgcac

SEQ ID NO: 139287 - DNA, 75 bp, synthetic construct
  source 1..75: mol_type = other DNA
cactggaagcaaaacttacccgtaacccatcttttcaccggaagatgttcgcttttcttaatttctgctttcagt

SEQ ID NO: 139288 - DNA, 75 bp, synthetic construct
  source 1..75: mol_type = other DNA
atgagcaccactatcgaaaaaatccaacgccagattgctgaaaacccgatcctgctgtacatgaaaggttcaccg

SEQ ID NO: 139289 - DNA, 75 bp, synthetic construct
  source 1..75: mol_type = other DNA
gatgatcgcccgggaagcggaaatacatggaatcgatctccgtttgtgcggtgaaatggcgggcgatcccatgtg

SEQ ID NO: 139290 - DNA, 75 bp, synthetic construct
  source 1..75: mol_type = other DNA
tttatattcaatgggggttattgaaaaacgttacagatcgaaagtattgacgttgaaagcaaatacatcggttta

SEQ ID NO: 139291 - DNA, 75 bp, synthetic construct
  source 1..75: mol_type = other DNA
tttcaactaaaaataaatcttatcctattacggattcgccactttataaacttaaaagtaaaaaaaagttggcta

SEQ ID NO: 139292 - DNA, 75 bp, synthetic construct
  source 1..75: mol_type = other DNA
atgcattaaaagttaggaatgagcagcattttttgatggctagggaaatagattattggaaaataattaaagacg

SEQ ID NO: 139293 - DNA, 75 bp, synthetic construct
  source 1..75: mol_type = other DNA
tggtagcgacgttggtgctgctgtgcgcgcaggctggcgccgcgacgctctctgatattcaggtttctaatggca

SEQ ID NO: 139294 - DNA, 75 bp, synthetic construct
  source 1..75: mol_type = other DNA
tttagccatcaaagcaaacgcaccgtggcgctcgatatcaaacaaacgggcgtgattcaggggctgccgttgttg

SEQ ID NO: 139295 - DNA, 75 bp, synthetic construct
  source 1..75: mol_type = other DNA
cgggtcgatttcatctctgttggcaccaacgatctgacgcaatacatcctggccgttgatcgcaacaatacccgg

SEQ ID NO: 139296 - DNA, 75 bp, synthetic construct
  source 1..75: mol_type = other DNA
ccgcgcgtcagcgaaccggcgcgtaatccgtttaaaaccgagagcaaccgggctacgggtgtcatcagtagcaat

SEQ ID NO: 139297 - DNA, 75 bp, synthetic construct
  source 1..75: mol_type = other DNA
ttaaaacggaaagtaaccgcactacgggtgttatcagcagtaatacggtaacgcgtccggcagcgcgcgcgacgg

SEQ ID NO: 139298 - DNA, 75 bp, synthetic construct
  source 1..75: mol_type = other DNA
ttgacgggccgcgatctcaaatcattgatgacgcatgcaaccaatctaactaacggtgtgttacaagtttctaaa

SEQ ID NO: 139299 - DNA, 75 bp, synthetic construct
  source 1..75: mol_type = other DNA
acaaaataacacaggaagttgtcggccattctcccgtagttttaacacgtgagtatggtagttcctcttctaccg

SEQ ID NO: 139300 - DNA, 75 bp, synthetic construct
  source 1..75: mol_type = other DNA
aatcatcgattatttcaaaaatcataaacctgtcaccccagacttaactaaacgagtcatggacgtcgccaaata

SEQ ID NO: 139301 - DNA, 75 bp, synthetic construct
  source 1..75: mol_type = other DNA
atcgccagcgccggatgtacggtttacccttcgcgttaattgcaggtggttgcgtcggtttttacgatggatttt

SEQ ID NO: 139302 - DNA, 75 bp, synthetic construct
  source 1..75: mol_type = other DNA
tccggggtggctcaggtccttgaggatttgcccggtttctgtaatcaggttattggtgatcttcttaatgagctt

SEQ ID NO: 139303 - DNA, 75 bp, synthetic construct
  source 1..75: mol_type = other DNA
gtcgggctaaattgcttgaattgattgcaacacttccagcatgtctgattggaattgaagcatgtacaggtgcac

SEQ ID NO: 139304 - DNA, 75 bp, synthetic construct
  source 1..75: mol_type = other DNA
ctaatggtgctgcaatttctttattagtcacggagttgtttgttacagctcagatgtacttatttttacgggcca

SEQ ID NO: 139305 - DNA, 75 bp, synthetic construct
  source 1..75: mol_type = other DNA
tgtgtggataacctacaaaggaaagctaccgggaagaattacaggttctctgaagacgccaccgacggcattgcg

SEQ ID NO: 139306 - DNA, 75 bp, synthetic construct
  source 1..75: mol_type = other DNA
tgtgtggataacctacaaaggaaagctaccaggaagaattactggttctctgaagactcctccggaatcacaacc

SEQ ID NO: 139307 - DNA, 75 bp, synthetic construct
  source 1..75: mol_type = other DNA
atatcagtaccctgaccaaaggtgaagctattattgatatcatgaacactatgccctttgatgcggtgtctgttg

SEQ ID NO: 139308 - DNA, 75 bp, synthetic construct
  source 1..75: mol_type = other DNA
ttcccatatcttgttcgtgtattgggaccagagttttttggggtgctgggtttctgccaagcatcaatgcaatat

SEQ ID NO: 139309 - DNA, 75 bp, synthetic construct
  source 1..75: mol_type = other DNA
ttgattcaaggcggcgttaattttatagcaggtttaattggatttgctattattataaataataactggattggg

SEQ ID NO: 139310 - DNA, 75 bp, synthetic construct
  source 1..75: mol_type = other DNA
cgattgtgggccgtaagctgctggccgacaaatatttcccgatcgtcaacaaagaccagccgaacagcgaagcgc

SEQ ID NO: 139311 - DNA, 75 bp, synthetic construct
  source 1..75: mol_type = other DNA
gtatcgctaaccgcattcaccgtctgaccgatatcctggcggcgggcctgcaacaaaaaggtctgaaactgcgcc

SEQ ID NO: 139312 - DNA, 75 bp, synthetic construct
  source 1..75: mol_type = other DNA
ctggctatccgcgcagaaatcgaccaggttaaagccggagtctggccgctggaagataacccgctagtgaacgcg

SEQ ID NO: 139313 - DNA, 75 bp, synthetic construct
  source 1..75: mol_type = other DNA
ccgatgggctacggtggcccgcacgcggccttctttgcggcgaaagatgaatataaacgttctatgccgggccgt

SEQ ID NO: 139314 - DNA, 75 bp, synthetic construct
  source 1..75: mol_type = other DNA
ttcattgcagaccgcagcgcagagcacggtcacgccgatgttttctttgcaatcgctcacgcgctctttaatgag

SEQ ID NO: 139315 - DNA, 75 bp, synthetic construct
  source 1..75: mol_type = other DNA
agggcatcgcgatatctgcctgatcccggcttctgctcacggcactaaccccgcttccgcgcatatggcggggat

SEQ ID NO: 139316 - DNA, 75 bp, synthetic construct
  source 1..75: mol_type = other DNA
ccggcatctgcccacgggactaacccggcttccgcgcatatggcggggatgcaggtggtggttgtggcgtgtgat

SEQ ID NO: 139317 - DNA, 75 bp, synthetic construct
  source 1..75: mol_type = other DNA
gtcattatcatgaaagccgcaatgaagggcatcgcgatatctgcctgatcccggcttctgcgcacggaactaacc

SEQ ID NO: 139318 - DNA, 75 bp, synthetic construct
  source 1..75: mol_type = other DNA
gcaggaatttgggattgcaattaagggtaatcctgtcaggttaagtaatatggctgagctgtattttctggcaac

SEQ ID NO: 139319 - DNA, 75 bp, synthetic construct
  source 1..75: mol_type = other DNA
gcgtcaggcggtgcctatccgctatggcgtggagacgaaaaatcgcctggtgatgaagatgatcgacgttatcga

SEQ ID NO: 139320 - DNA, 75 bp, synthetic construct
  source 1..75: mol_type = other DNA
gcaggtggtggttgtggcgtgtgataaaaacggcaacatcgatctgactgatctgcgcgcgaaagcggaacaggc

SEQ ID NO: 139321 - DNA, 75 bp, synthetic construct
  source 1..75: mol_type = other DNA
tgaagttgcagtattcccggcaggcgtggcagataaatactggccgacagtgaaacgtctggatgatgtttacgg

SEQ ID NO: 139322 - DNA, 75 bp, synthetic construct
  source 1..75: mol_type = other DNA
cgatggctaaacgcgtcagcaaactgaaaaatgccaaccgcttctttgttgcttctgacgttcatccgcaaacgc

SEQ ID NO: 139323 - DNA, 75 bp, synthetic construct
  source 1..75: mol_type = other DNA
atgtacgcgctttcaaaactggcgagtcagatttcatcaatcatggacagcctcccgcttactatgcaaaggagc

SEQ ID NO: 139324 - DNA, 75 bp, synthetic construct
  source 1..75: mol_type = other DNA
acttttacgagtcaggatcagattactgacagcacaggcagaggcgcaggaacttaaaaacgagcgcgatcgcgg

SEQ ID NO: 139325 - DNA, 75 bp, synthetic construct
  source 1..75: mol_type = other DNA
cagtgtaatagataatcgggttaacaatgcaatcagccagattacaaacgaaacgggcgagattgatgatgatga

SEQ ID NO: 139326 - DNA, 75 bp, synthetic construct
  source 1..75: mol_type = other DNA
gttgctgacaacctcccgcagatactggctgattacctgatggaaactaccggagacgtaccggagaagttacta

SEQ ID NO: 139327 - DNA, 75 bp, synthetic construct
  source 1..75: mol_type = other DNA
aacttaaaaacgagcgcgatcgcggtgacgtgattgatacagagttttgcatgtacgcgctttcaaaactggcga

SEQ ID NO: 139328 - DNA, 75 bp, synthetic construct
  source 1..75: mol_type = other DNA
tagatgctgcggataatattggtgagttgagggagaagtacaaacttacttcttctgattccgaagttcagaaag

SEQ ID NO: 139329 - DNA, 75 bp, synthetic construct
  source 1..75: mol_type = other DNA
agatagatgtctggcgtcgtcagctgatgctggacgaaacgcaaaccgccgaacaaaagctgctggcacgttatc

SEQ ID NO: 139330 - DNA, 75 bp, synthetic construct
  source 1..75: mol_type = other DNA
gatgcgctgcgttatcttagccaacagatagatgtctggcgtcgtcagctgatgctggacgaaacgcaaaccgcc

SEQ ID NO: 139331 - DNA, 75 bp, synthetic construct
  source 1..75: mol_type = other DNA
attcggcgttacgctgaaaggcaacccgatcaaactgaacaccgcgcacggcatcgcagaactgcattttctggc

SEQ ID NO: 139332 - DNA, 75 bp, synthetic construct
  source 1..75: mol_type = other DNA
ctgacagcgcaggcggaggcgcaggagcttaaaaacgagcgcgaacgaggcgacgttattgatacagggttttgc

SEQ ID NO: 139333 - DNA, 75 bp, synthetic construct
  source 1..75: mol_type = other DNA
gtccgccatatctatcactgcgttgtcaaaattaatgcgacatccggagaatgtagtcggcgtccattttatgaa

SEQ ID NO: 139334 - DNA, 75 bp, synthetic construct
  source 1..75: mol_type = other DNA
ttggacgacattgtagaatgtgatttggtgattgagaatattactgaggatatagagaaaaaaaatgcactatac

SEQ ID NO: 139335 - DNA, 75 bp, synthetic construct
  source 1..75: mol_type = other DNA
gccacaccgcggcagcaggcggagtttttcgcccgttctgagcaatggctggagaacaaatacgggaaagatcgc

SEQ ID NO: 139336 - DNA, 75 bp, synthetic construct
  source 1..75: mol_type = other DNA
aacgaggccacaccgcggcagcaggcggagtttttcgcccgctctgagcaatggctggagaagaaatacgggaag

SEQ ID NO: 139337 - DNA, 75 bp, synthetic construct
  source 1..75: mol_type = other DNA
tcaccgggacgaggccaccccgcacttgtctgcgttcgtggtgccattgacgcaggatggacggctgtccgcgaa

SEQ ID NO: 139338 - DNA, 75 bp, synthetic construct
  source 1..75: mol_type = other DNA
aaaccataccaggtattaatgctcatcttgcagaacaagagaaagaccatgctcttatggcaatttcttcagtag

SEQ ID NO: 139339 - DNA, 75 bp, synthetic construct
  source 1..75: mol_type = other DNA
tttccgctacgtaagcctattggcctgaaatcctgcggatggctattaagtgatctgctctattggatcaatgaa

SEQ ID NO: 139340 - DNA, 75 bp, synthetic construct
  source 1..75: mol_type = other DNA
atgtgggttccattaacagatgaacaacgttcagtaattttgaaagcttatggggctgtgggtgacagactggta

SEQ ID NO: 139341 - DNA, 75 bp, synthetic construct
  source 1..75: mol_type = other DNA
cgggatcgctgaacgcgtgctaaatgatttctttgactacgcggtaggcgcagcgccgatgtctgaaaaagctgt

SEQ ID NO: 139342 - DNA, 75 bp, synthetic construct
  source 1..75: mol_type = other DNA
atgtcacaaagaaagatcagcgatgaggaactgatcgccgagtacaacaaggggaaaacttacaagcaaatagca

SEQ ID NO: 139343 - DNA, 75 bp, synthetic construct
  source 1..75: mol_type = other DNA
ttgaaacattcattgatgaatcacatttccgtttcccgtgcgattctcgcggcgcgatggtttatacacctccac

SEQ ID NO: 139344 - DNA, 75 bp, synthetic construct
  source 1..75: mol_type = other DNA
ctgaaattgattttcaaaaaagcctggccctttatccggtatttgatctgcatatcggggcgcttgctcataaag

SEQ ID NO: 139345 - DNA, 75 bp, synthetic construct
  source 1..75: mol_type = other DNA
catatcggggctcttgcccataaagctgaatgcggtgagagctacgacactgggatcgctgaacgcgtgctaaat

SEQ ID NO: 139346 - DNA, 75 bp, synthetic construct
  source 1..75: mol_type = other DNA
acgtcgaacggctgggcgcacgattggcaaagcgcggtttaatatccacgcgtcgcgcgcctggttttggcatca

SEQ ID NO: 139347 - DNA, 75 bp, synthetic construct
  source 1..75: mol_type = other DNA
tcttccgcgaatacatcgtccagatcgcccagaaccatttcggcgtgacgctgacgggtaaaaatatccgcctca

SEQ ID NO: 139348 - DNA, 75 bp, synthetic construct
  source 1..75: mol_type = other DNA
cgcagccaggacactggccacgcagaggcattctgggcaatcacccacgccctgcataacgaaccactcaactat

SEQ ID NO: 139349 - DNA, 75 bp, synthetic construct
  source 1..75: mol_type = other DNA
ccgtggagaagttccgcgttctgaaggtgatttactggaaaggcatgaacttccggtaccaggcaaaacagatcg

SEQ ID NO: 139350 - DNA, 75 bp, synthetic construct
  source 1..75: mol_type = other DNA
caagaacaccgcccagtcatacagcggccatctgtactgcgatgaatatttctgggtacccaactttgcaaaatt

SEQ ID NO: 139351 - DNA, 75 bp, synthetic construct
  source 1..75: mol_type = other DNA
agtcatgaatccaccgaagatgcattaaaccgtcgcattcagtcactgacattacgtgaagggaaatcggagctg

SEQ ID NO: 139352 - DNA, 75 bp, synthetic construct
  source 1..75: mol_type = other DNA
cgccccccatagaggacggcgagcgcttccgcgtgctggccgtctggcaatggcagggctttaacttcagctggc

SEQ ID NO: 139353 - DNA, 75 bp, synthetic construct
  source 1..75: mol_type = other DNA
ccgaactgcgcgagcttatcgcacagcacgtgaagattatcgcccagaaaaacaaacacgctgaaaggatggcgg

SEQ ID NO: 139354 - DNA, 75 bp, synthetic construct
  source 1..75: mol_type = other DNA
gccagtaccgcccagggatttaacggccacctttacggcgatgaggtgttctggatcccaaaattcacgcgactg

SEQ ID NO: 139355 - DNA, 75 bp, synthetic construct
  source 1..75: mol_type = other DNA
cacgatgaactcgatcgcctgattggtcatcacgtcaaactgatgtcggtcaggaacaagcacacggaacgaatg

SEQ ID NO: 139356 - DNA, 75 bp, synthetic construct
  source 1..75: mol_type = other DNA
ggcttacccgttctggacgggtgaggaatggaaacagggcagcaaaaaacgcgcggccgcccagttcccctcctt

SEQ ID NO: 139357 - DNA, 75 bp, synthetic construct
  source 1..75: mol_type = other DNA
ctgtactgtgacgaatatttctgggtgcctaacttcgccaggcttaacgaagtggccagcgcaatggccacccat

SEQ ID NO: 139358 - DNA, 75 bp, synthetic construct
  source 1..75: mol_type = other DNA
gcgacacagtatttaaattctcagaccttgaaaaatgtgaggttgagttcggcatctggcaggacttcgacccct

SEQ ID NO: 139359 - DNA, 75 bp, synthetic construct
  source 1..75: mol_type = other DNA
gtattcactctgaacgtatccaattccaccattgatgatgactatgaagctctttacttcactgacacatatctt

SEQ ID NO: 139360 - DNA, 75 bp, synthetic construct
  source 1..75: mol_type = other DNA
tcatgacacagtatttcagctacctgaaacaactggcgcacggtgatttcggtccatcgtttaaatataaagatt

SEQ ID NO: 139361 - DNA, 75 bp, synthetic construct
  source 1..75: mol_type = other DNA
gcagcagcaaaaactgtgctttcagcgatgaaaagcgacgatttcagtaagcaaaaactcgcggaatatcgtcag

SEQ ID NO: 139362 - DNA, 75 bp, synthetic construct
  source 1..75: mol_type = other DNA
accggctttatgcaatttttccgcgtgcgggaaaagtcgatgacaatggcggaattgctgaccgggtcgcgtaaa

SEQ ID NO: 139363 - DNA, 75 bp, synthetic construct
  source 1..75: mol_type = other DNA
ggacgacacaccagaagttcattatggataagcatccggaaatcactaccgtgccatatgacagttaccagaacg

SEQ ID NO: 139364 - DNA, 75 bp, synthetic construct
  source 1..75: mol_type = other DNA
gcaaaagccttgtgcaaacaaatgcaggcagaatgtacttttactaatcacgctttcgacagcctgatcccgtca

SEQ ID NO: 139365 - DNA, 75 bp, synthetic construct
  source 1..75: mol_type = other DNA
cgatctctgtcgtgatgcgccactggtcgcgggctatgggtatgccttctgctggtgggcgggctgcttatatcg

SEQ ID NO: 139366 - DNA, 75 bp, synthetic construct
  source 1..75: mol_type = other DNA
tacagaacttgcgcgggcgcgccgcgctggtctggcgatggaatctctacttggcagcgttaaccgctgggcgat

SEQ ID NO: 139367 - DNA, 75 bp, synthetic construct
  source 1..75: mol_type = other DNA
cgggcgcgccgcgctggtctggcgatggaatctctacttggcagcgttaaccgctgggcgatggataatatgggg

SEQ ID NO: 139368 - DNA, 75 bp, synthetic construct
  source 1..75: mol_type = other DNA
taacgtctggcgtcatcatgcccgggatggctggcttgaccatatcaaaggcagtgtcgaagaaagccctgatga

SEQ ID NO: 139369 - DNA, 75 bp, synthetic construct
  source 1..75: mol_type = other DNA
gtctggttgatgacgtagtgaagattgctcagggcataccgttaaatgctgtggaagggaagaatgagcagactg

SEQ ID NO: 139370 - DNA, 75 bp, synthetic construct
  source 1..75: mol_type = other DNA
aatgacatggcatcaggccgtaatccgcgggatatggtcggtgaagatgctgctaaattctggcttggtgctctg

SEQ ID NO: 139371 - DNA, 75 bp, synthetic construct
  source 1..75: mol_type = other DNA
ccggaaaatcttccccatatccccgtcacgggcgcgacgggcaatataaaatccatgctgaaagagcatgagaaa

SEQ ID NO: 139372 - DNA, 75 bp, synthetic construct
  source 1..75: mol_type = other DNA
acaccgtggcgcgttacactgcacagtttacgcaattagataccatgatgagcaaactgaataacaccagtacct

SEQ ID NO: 139373 - DNA, 75 bp, synthetic construct
  source 1..75: mol_type = other DNA
cgacatggattgccggtgggtttgccgggacggttgagctgctggcgcaaagcctgaaaccgggcgggatcatgc

SEQ ID NO: 139374 - DNA, 75 bp, synthetic construct
  source 1..75: mol_type = other DNA
aaccagagggtgcgcctgagaagtacgagtttcaggctgccgaaggcgtagagctggatacagaagcgttgaagg

SEQ ID NO: 139375 - DNA, 75 bp, synthetic construct
  source 1..75: mol_type = other DNA
gacggcgataaaccagagggtgcgccggagaagtacgagtttcaggctgccgaaggcgtagagctggatacagaa

SEQ ID NO: 139376 - DNA, 75 bp, synthetic construct
  source 1..75: mol_type = other DNA
gcgcatcgagatgcctgggcagaatcaatgacaatttttgaaacgcaaaatgacaaagcacaacaagaaatcgaa

SEQ ID NO: 139377 - DNA, 75 bp, synthetic construct
  source 1..75: mol_type = other DNA
tagggcgcatcctgaagatgctggaagatcaaaatctgatctccgcacacggtaaaaccatcgtcgtttacggca

SEQ ID NO: 139378 - DNA, 75 bp, synthetic construct
  source 1..75: mol_type = other DNA
gggtgattttattggcgaactgggcctgtttgaagagggccaggaacgtagcgcatgggtacgtgcgaaaaccgc

SEQ ID NO: 139379 - DNA, 75 bp, synthetic construct
  source 1..75: mol_type = other DNA
acctcacgtattcgcgctgggctttgtcgaagcgccacgcggtgaagacgtgcactggagcatgctcggtgataa

SEQ ID NO: 139380 - DNA, 75 bp, synthetic construct
  source 1..75: mol_type = other DNA
ggtcgcgtgctgcgcatgaagccgggcacccgcattcttgacctcggcagcggctcgggcgagatgctctgtacc

SEQ ID NO: 139381 - DNA, 75 bp, synthetic construct
  source 1..75: mol_type = other DNA
attatggccggtatcgacaccgatatcgaaggtgaagcgcgtccgcagccgggcattaaaattggttatttgccg

SEQ ID NO: 139382 - DNA, 75 bp, synthetic construct
  source 1..75: mol_type = other DNA
atcgtcgcctttgcaacgaacaacctgctgatggtggcgcagctcctgctgcatctgaacctgctgcatcaactg

SEQ ID NO: 139383 - DNA, 75 bp, synthetic construct
  source 1..75: mol_type = other DNA
tcaatatttatatcagatgatttatcaactgataatacattaaacatctgtgaagaatttaaagcattacatccg

SEQ ID NO: 139384 - DNA, 75 bp, synthetic construct
  source 1..75: mol_type = other DNA
gagcagatattgccggtcactcgtcgtggcacgttgctggagctggtttatctaccctcgggagctagtcatttg

SEQ ID NO: 139385 - DNA, 75 bp, synthetic construct
  source 1..75: mol_type = other DNA
ctgctcgccagcagcgaagtggcggaatgcgaactgaatattgcccgctttgcgcaggtgtctgcgggcaacagc

SEQ ID NO: 139386 - DNA, 75 bp, synthetic construct
  source 1..75: mol_type = other DNA
actatgaaacgcagaagaagattgctatgcaggctgatattgagcagcttacgaagatttctagcaaatatgcaa

SEQ ID NO: 139387 - DNA, 75 bp, synthetic construct
  source 1..75: mol_type = other DNA
caggctatgaaagaacttgttagtgaatatgaatcacagaagaagattgctatgcaggctgatattgagcagctt

SEQ ID NO: 139388 - DNA, 75 bp, synthetic construct
  source 1..75: mol_type = other DNA
gcaatttgatcttggctttaagtttttggaagttaaggcggaaaaaggctgataaaatttatattttattaatgt

SEQ ID NO: 139389 - DNA, 75 bp, synthetic construct
  source 1..75: mol_type = other DNA
aaggcctggttgatttgattcataaactgcatggcagttgcggctatagcggtgtgccgcgtatgaagaatctct

SEQ ID NO: 139390 - DNA, 75 bp, synthetic construct
  source 1..75: mol_type = other DNA
ggagtcgaccatacgccgactgcaattttctaagaaaacctttccttgaagcatgtgaggctattggccttttaa

SEQ ID NO: 139391 - DNA, 75 bp, synthetic construct
  source 1..75: mol_type = other DNA
aagggtgggaaccatagcaagcgcgaggcctatgaccattatttgcccaaagctttatatccatttaattcaata

SEQ ID NO: 139392 - DNA, 75 bp, synthetic construct
  source 1..75: mol_type = other DNA
gatcattttcacagtggcctgaccgccgatgaacccggctaccagcgcagggcggtgagtgcgcaggagctgtct

SEQ ID NO: 139393 - DNA, 75 bp, synthetic construct
  source 1..75: mol_type = other DNA
agaacaacaaaacagacagtaatcagagcagtagaaaaaagaagaacagtagcagtagcagtagcagtagcagta

SEQ ID NO: 139394 - DNA, 75 bp, synthetic construct
  source 1..75: mol_type = other DNA
cgcgaccggaacggtcgctgcaagcccggggtttcgcgtcagggatggaagcccgccagggcggagacagctccg

SEQ ID NO: 139395 - DNA, 75 bp, synthetic construct
  source 1..75: mol_type = other DNA
ctgacaaacgggagcttcgccagttcaaagaaacgccggaacagcgcttcgcgctggagcaggaacatctgcggc

SEQ ID NO: 139396 - DNA, 75 bp, synthetic construct
  source 1..75: mol_type = other DNA
aaacgggggggggggggagccggtgacgctggtgtcgctgatggaccactcgccgggccagcgccagttcgctaa

SEQ ID NO: 139397 - DNA, 75 bp, synthetic construct
  source 1..75: mol_type = other DNA
ttcgctggaggtgcagaacggcgaaatccgcgcctttgccgaaagccagagccgcctgccggaggcgatggacgg

SEQ ID NO: 139398 - DNA, 75 bp, synthetic construct
  source 1..75: mol_type = other DNA
atgcagacggtaaatcgaatttcctctctgttgaatccagaacaaaagccacccgtgattatgcattgagtcaat

SEQ ID NO: 139399 - DNA, 75 bp, synthetic construct
  source 1..75: mol_type = other DNA
tgctgttatttacctgttttgcgcgcgctcaggttgtagacacctggcaattcgccaatccgcaacaacaggaac

SEQ ID NO: 139400 - DNA, 75 bp, synthetic construct
  source 1..75: mol_type = other DNA
ataacgggaaaagcaagagcctgatgcaacaatatatcatggctatcaaaaatgaatataaaaaggattaccggg

SEQ ID NO: 139401 - DNA, 75 bp, synthetic construct
  source 1..75: mol_type = other DNA
atctttgtgtctcctgaacctcaagaaatgcctgatatttgcaaaactgaagcattacttgagcttgaaaagaaa

SEQ ID NO: 139402 - DNA, 75 bp, synthetic construct
  source 1..75: mol_type = other DNA
aaaagattgatagcttcggggactggttaccacaggttgaacatccgctacatactattcagcgtcaagagcatg

SEQ ID NO: 139403 - DNA, 75 bp, synthetic construct
  source 1..75: mol_type = other DNA
atgacaaacgatttatattttaacggtcgaaagattgatagcttcggtgactggtcgccacagactgaacatcca

SEQ ID NO: 139404 - DNA, 75 bp, synthetic construct
  source 1..75: mol_type = other DNA
atttcctttgtgtctcctgagcctcaagagatgcctgatgtatgcaaaactgaagcattacttgagcttgagcgt

SEQ ID NO: 139405 - DNA, 75 bp, synthetic construct
  source 1..75: mol_type = other DNA
gtaaaaagattgatagcttcggggactggtcaccacagactgagcatccactacatattattcagcgcaaagaac

SEQ ID NO: 139406 - DNA, 75 bp, synthetic construct
  source 1..75: mol_type = other DNA
atttcctttgtgtctcctgagcctcaagaaatgcctgatatctgcaaaactgaagcactatttgagcttgagcgt

SEQ ID NO: 139407 - DNA, 75 bp, synthetic construct
  source 1..75: mol_type = other DNA
agaggcctgttcagcgatgcagatgcgtaccctctggaccaggcctttcccctgctgatgaaacaactgaaactc

SEQ ID NO: 139408 - DNA, 75 bp, synthetic construct
  source 1..75: mol_type = other DNA
agaggcctgttcagcgatgcagatgcgtaccctctggaccaggcctttccactgctgatgaaacaactgcaactc

SEQ ID NO: 139409 - DNA, 75 bp, synthetic construct
  source 1..75: mol_type = other DNA
agaggcctgttcagcgatgcagatgcgtaccctctggaccaggcttttccactgctgatgaaacaactgtaactc

SEQ ID NO: 139410 - DNA, 75 bp, synthetic construct
  source 1..75: mol_type = other DNA
gcggattcgtaccacctggaccaggcctttccgctgctgatgaaacaactggagctcatgctcaccagtggtgaa

SEQ ID NO: 139411 - DNA, 75 bp, synthetic construct
  source 1..75: mol_type = other DNA
agaggcctgttcagcgatgcagatgcgtaccctctggaccaggcgtttccgctgctgatgaaacaactgaaactc

SEQ ID NO: 139412 - DNA, 75 bp, synthetic construct
  source 1..75: mol_type = other DNA
agaggcctgttcagcgatgcagatgcgtaccctctggaccaggcgtttccactgctgatgaaacaactggaactc

SEQ ID NO: 139413 - DNA, 75 bp, synthetic construct
  source 1..75: mol_type = other DNA
ttcaaatctttgccccgtcttcaccgcgggagtgccgtcaggtgattgattatgctcttcgctatcaggggcctg

SEQ ID NO: 139414 - DNA, 75 bp, synthetic construct
  source 1..75: mol_type = other DNA
tccgttacgatgtacttgaccggctgatacaggaaaccggctttgacggccgcacacagcgttatcaccacgacc

SEQ ID NO: 139415 - DNA, 75 bp, synthetic construct
  source 1..75: mol_type = other DNA
taagttttccgtactcgatgccagcgactgtgaagtattaatgtcaggtattgccgacggtattaactcggaaaa

SEQ ID NO: 139416 - DNA, 75 bp, synthetic construct
  source 1..75: mol_type = other DNA
agaggcctgttcagcgatgcagatgcgtaccctctggaccaggcatttccactgctgatgaaacaactgaaactc

SEQ ID NO: 139417 - DNA, 75 bp, synthetic construct
  source 1..75: mol_type = other DNA
gtgtcagacacactccccgggacaacgcatcccgacgataacaacgaccgcccctggtgggggctaccctgctcc

SEQ ID NO: 139418 - DNA, 75 bp, synthetic construct
  source 1..75: mol_type = other DNA
gatgcataccatctggaccaggcctttccgctgctgatgaaacaactggagctcatgctcaccagcggtgaactg

SEQ ID NO: 139419 - DNA, 75 bp, synthetic construct
  source 1..75: mol_type = other DNA
cattattaccggttctatggttatcgaaaccatttatggtttgccggggattggacaactgttcgttaatggcgc

SEQ ID NO: 139420 - DNA, 75 bp, synthetic construct
  source 1..75: mol_type = other DNA
gaagtgagagtaccggccagtgaagaagatgcggtcgatgactggcgttatcacccctggttgggagtgttccgc

SEQ ID NO: 139421 - DNA, 75 bp, synthetic construct
  source 1..75: mol_type = other DNA
ttgtgtttaccactcccgacatccactggcagtacgttcagatattgagaagcgcctggaccgcgcttttacccg

SEQ ID NO: 139422 - DNA, 75 bp, synthetic construct
  source 1..75: mol_type = other DNA
atacaatcccggcattcttccggcagaaatgattattcgccaacgcgtaaagccaatgccatcgagagaggaatt

SEQ ID NO: 139423 - DNA, 75 bp, synthetic construct
  source 1..75: mol_type = other DNA
catcacggaccgtatcatcggccagccagaaacccgtacaggtcacggtcaccctggtgatggaagaaaccgaaa

SEQ ID NO: 139424 - DNA, 75 bp, synthetic construct
  source 1..75: mol_type = other DNA
aaaaacctggtgtagtccatttggttactcaggcagactcagggatgactggcctgtaccggtttgaaacccaaa

SEQ ID NO: 139425 - DNA, 75 bp, synthetic construct
  source 1..75: mol_type = other DNA
aaacggtgattactctggaaggcgttaatacactccgccgtttactgcgcaaaaccgccaggcgaaataccgcag

SEQ ID NO: 139426 - DNA, 75 bp, synthetic construct
  source 1..75: mol_type = other DNA
gctgtgaaagttggctggagaagcaactcaatgctgactggaatgccgttaaccaccgtaagaatgactggtcac

SEQ ID NO: 139427 - DNA, 75 bp, synthetic construct
  source 1..75: mol_type = other DNA
tcatcgttaaactatcattcaccgattttctatgaggattttatcgtgtcagacacactctccgggacaacgcat

SEQ ID NO: 139428 - DNA, 75 bp, synthetic construct
  source 1..75: mol_type = other DNA
caacgggtagacgaacatcttgttggcgtcgcgcatcatgcgtatctgcttgggcggcaactgatgcacacacgg

SEQ ID NO: 139429 - DNA, 75 bp, synthetic construct
  source 1..75: mol_type = other DNA
gaagtgagagtacccgtcagtgaagaagatgcggtcgatgactggcgttatcacccatggcttggggtgtttcgc

SEQ ID NO: 139430 - DNA, 75 bp, synthetic construct
  source 1..75: mol_type = other DNA
ataaccgtccggaatcgcaccatctgtttgtggtgttggggacatcggttatagaagtggggcgtgactgggatg

SEQ ID NO: 139431 - DNA, 75 bp, synthetic construct
  source 1..75: mol_type = other DNA
ggtgctggtggttaatcttaataaccgctatttggggatggtgaagcagtggcaggacatgatctattccggtcg

SEQ ID NO: 139432 - DNA, 75 bp, synthetic construct
  source 1..75: mol_type = other DNA
tgttgatgttaccgttgatggcagtgagcatgtctacccgatgcatattcgcgggggtggaatggatgaaatgtg

SEQ ID NO: 139433 - DNA, 75 bp, synthetic construct
  source 1..75: mol_type = other DNA
aagcctatggtcacgtcgggatccagatctctcatccgcatgagctggaaagcaaacttagcgaggcgctggaac

SEQ ID NO: 139434 - DNA, 75 bp, synthetic construct
  source 1..75: mol_type = other DNA
tggccggaatcggtcagtatgcgctcgtataacccgacaacgttgggtcataaagggcagattaaacgtgcacta

SEQ ID NO: 139435 - DNA, 75 bp, synthetic construct
  source 1..75: mol_type = other DNA
ttgatttaccgaaagatattcttaatccggcgaacaaattaccttacgtctggccggaatcggtcagtatgcgct

SEQ ID NO: 139436 - DNA, 75 bp, synthetic construct
  source 1..75: mol_type = other DNA
gtccgatgtcgggcagcaccagatgtttgctgcgctttattatccattcgacaaaccgcgtcgctggatcaactc

SEQ ID NO: 139437 - DNA, 75 bp, synthetic construct
  source 1..75: mol_type = other DNA
atatagttttttccaaaattacaacaacgctgacgcttacctcgaagtgcgtgaggcatttaacagaggaaagta

SEQ ID NO: 139438 - DNA, 75 bp, synthetic construct
  source 1..75: mol_type = other DNA
aagaagaggccgcgatgctcgctgctgacgggccgcgttacaaagcgattggcaacagcatggcagttcctgtta

SEQ ID NO: 139439 - DNA, 75 bp, synthetic construct
  source 1..75: mol_type = other DNA
gaactgtccagcaagttcaccgtagagccgtctgttcagcagacgctggaagaccagattcagcaatccgccgct

SEQ ID NO: 139440 - DNA, 75 bp, synthetic construct
  source 1..75: mol_type = other DNA
taaagggcaaattaagcgtgctctgcaaacgctggtggcggcaaaaaaaccggttgtctacgtaggcggtggggc

SEQ ID NO: 139441 - DNA, 75 bp, synthetic construct
  source 1..75: mol_type = other DNA
ggacaagtatttccccatcgtcaacaaggagcaggacaacagcgaaatgctggccgctgacgtcatcatcagcca

SEQ ID NO: 139442 - DNA, 75 bp, synthetic construct
  source 1..75: mol_type = other DNA
gcggcagaattcgaacggtccatattcaaatgggctggtggaaaatttggtgttctggaacaaatctttcgctat

SEQ ID NO: 139443 - DNA, 75 bp, synthetic construct
  source 1..75: mol_type = other DNA
tggttctttgtaaaaatggttataaaccaatagaagatgtttgccctggcgattacgtagtcagtcatctcgggc

SEQ ID NO: 139444 - DNA, 75 bp, synthetic construct
  source 1..75: mol_type = other DNA
ggcagcggttacctggcaggcatgaaactcggcgacacaccgctggtggagtacacccgcgaccgcctgcaccgg

SEQ ID NO: 139445 - DNA, 75 bp, synthetic construct
  source 1..75: mol_type = other DNA
tggtgtgtcgaacgtggtcagcgacagaacatatcacctataccgatttttcgtgtcagtttgacgaagtggtga

SEQ ID NO: 139446 - DNA, 75 bp, synthetic construct
  source 1..75: mol_type = other DNA
tcagagtggaacctctttttgccagacgttctgtgtcctgtaagggagacactcgtggtgttgctcatgacgtta

SEQ ID NO: 139447 - DNA, 75 bp, synthetic construct
  source 1..75: mol_type = other DNA
ttgacgatgaaaccgcatcgacagtaaaggcaagagattttaaagatgccactgaccttgccgtttttagcagca

SEQ ID NO: 139448 - DNA, 75 bp, synthetic construct
  source 1..75: mol_type = other DNA
cttcctggcggttcggtggaaagcccaaaacacccggaaaaatggcacatattttaagagagagttgttgtctga

SEQ ID NO: 139449 - DNA, 75 bp, synthetic construct
  source 1..75: mol_type = other DNA
atctgcccgttgtttcctcattaatggggctgggggcgtttccggcaacgcatcgtcaggcactgggcatgctgg

SEQ ID NO: 139450 - DNA, 75 bp, synthetic construct
  source 1..75: mol_type = other DNA
ttaaacacagttttctggttaagcaaacggaagacattccgcaggtgctgaaaaaggctttctggctggcggcaa

SEQ ID NO: 139451 - DNA, 75 bp, synthetic construct
  source 1..75: mol_type = other DNA
cgtataacccgacaacgttgggtcataaagggcagattaaacgtgcactacaaacgctggctgcggcgaaaaaac

SEQ ID NO: 139452 - DNA, 75 bp, synthetic construct
  source 1..75: mol_type = other DNA
gtgatggatgcgaccaacaacctgattgagccgtggtatcaggaagaccctgaccttgtggtgattgtggggcgt

SEQ ID NO: 139453 - DNA, 75 bp, synthetic construct
  source 1..75: mol_type = other DNA
accacctctgaggtcatccgcgtgggtaagggcggtgattatgccagcctcgatgcactggtgatggatgcgacc

SEQ ID NO: 139454 - DNA, 75 bp, synthetic construct
  source 1..75: mol_type = other DNA
caataaccgctatctggggatggtgaagcagtggcaggacatgatctattccggccgtcattcacaatcttatat

SEQ ID NO: 139455 - DNA, 75 bp, synthetic construct
  source 1..75: mol_type = other DNA
cgcttcccgacgacaacaaagaccgcccctggtggggactgccctgcaccgtgacgccctgtttcggagcgcgtc

SEQ ID NO: 139456 - DNA, 75 bp, synthetic construct
  source 1..75: mol_type = other DNA
ggggcttaaacgcagtatcacgccctgttttggcgcacggctggtacaggcgggcaaccgtctgtattatctcgc

SEQ ID NO: 139457 - DNA, 75 bp, synthetic construct
  source 1..75: mol_type = other DNA
cataccacctggaccaggcctttccgctgctgatgaaacaactggagctcatgctcaccagtggtgaactgaatc

SEQ ID NO: 139458 - DNA, 75 bp, synthetic construct
  source 1..75: mol_type = other DNA
gcgccggtatcaggggccggttcaacaatgcggatgcataccatctggaccaggcttttccactgctgatgaaac

SEQ ID NO: 139459 - DNA, 75 bp, synthetic construct
  source 1..75: mol_type = other DNA
aagggctgacctgcaaagccgacaccctcggtagttgtggttacgtttatctggctgtttatccaacatccgaaa

SEQ ID NO: 139460 - DNA, 75 bp, synthetic construct
  source 1..75: mol_type = other DNA
tgaatccccgccatcagcataccgtcacgctgtatgcaaaagggctgacctgcaaagccgataccctcagcagtt

SEQ ID NO: 139461 - DNA, 75 bp, synthetic construct
  source 1..75: mol_type = other DNA
gttggctggcaaaacaacatgttgttacctggtgcgtgcaacaggacggggaactttggtgctctaatgcctttt

SEQ ID NO: 139462 - DNA, 75 bp, synthetic construct
  source 1..75: mol_type = other DNA
aatccggctcgatgaaatcaaattcaccgacaacacgctgggctttggtaaaaaactggtatggctacgcggctc

SEQ ID NO: 139463 - DNA, 75 bp, synthetic construct
  source 1..75: mol_type = other DNA
aaacggtcagccgaaaacggtagcgttaattcgcggcgtgcagtttaaaggtgagatccgcaggctggaaggtga

SEQ ID NO: 139464 - DNA, 75 bp, synthetic construct
  source 1..75: mol_type = other DNA
tggtgcaggagggtaaccggttgcattaccttgccgaccgcgccggtatcagagggcagttcagcgacgcggatg

SEQ ID NO: 139465 - DNA, 75 bp, synthetic construct
  source 1..75: mol_type = other DNA
gtgaggccctgttttggcgctcgtctggtgcaagagggtaaccgcctgcattaccttgccgaccgcgccggtatc

SEQ ID NO: 139466 - DNA, 75 bp, synthetic construct
  source 1..75: mol_type = other DNA
gtgtcagacaaactctccgggataactcatcccgacgacaatcacgaccgcccctggtggggactgccctgcacc

SEQ ID NO: 139467 - DNA, 75 bp, synthetic construct
  source 1..75: mol_type = other DNA
tcaggcaatggctggtaggattaatacgcagcgtgagccctcgctgatagagccattcatcaatattattaatgc

SEQ ID NO: 139468 - DNA, 75 bp, synthetic construct
  source 1..75: mol_type = other DNA
gtgaatcagagttcatcacaactaatgtcatttattaatatcattcatgcaactcaacttatgggggaaagaaaa

SEQ ID NO: 139469 - DNA, 75 bp, synthetic construct
  source 1..75: mol_type = other DNA
ttcctctcttcaggaaagcattattattaccacgttactggctcacatggctcgagctgtgcattatcggtgtgt

SEQ ID NO: 139470 - DNA, 75 bp, synthetic construct
  source 1..75: mol_type = other DNA
atttaaacgggtttttgttccaattcgtgaagcgttgcaggcgctgcgcggggaattaagaaacacaatgcggat

SEQ ID NO: 139471 - DNA, 75 bp, synthetic construct
  source 1..75: mol_type = other DNA
ggactggcaggatgtctcggaaaaagtgcccgtcaaagagcacggataaatttatcactttgttttccagaatat

SEQ ID NO: 139472 - DNA, 75 bp, synthetic construct
  source 1..75: mol_type = other DNA
atcgttactaagccctctgattaacataattcgcggcacacagagacttgcggaaaaaagcgttccacacggaat

SEQ ID NO: 139473 - DNA, 75 bp, synthetic construct
  source 1..75: mol_type = other DNA
ttcaagatggagcaggaaactggttttatcttccagacgctgagtacacagccgaaaaaacgcatctgctcgcgc

SEQ ID NO: 139474 - DNA, 75 bp, synthetic construct
  source 1..75: mol_type = other DNA
gtccgatgacgggatatgaaaatttcaaccgcgaggcgtttcacagggcggaagatgcgctgaaacgggaagggc

SEQ ID NO: 139475 - DNA, 75 bp, synthetic construct
  source 1..75: mol_type = other DNA
atgaaaatttatattgccgggccaatgacgggatatgagaactttaatcgtgacgcctttaataaagaggcagat

SEQ ID NO: 139476 - DNA, 75 bp, synthetic construct
  source 1..75: mol_type = other DNA
tttttcaacatcaactggagcgaaataacgacagagcatgttctgacgttactatgttgctttgcgacggaatac

SEQ ID NO: 139477 - DNA, 75 bp, synthetic construct
  source 1..75: mol_type = other DNA
gctcccttgtgaatataattcaagctactcatgaaatgaccgcacggaaagtgcctcaaggttcattaaccggca

SEQ ID NO: 139478 - DNA, 75 bp, synthetic construct
  source 1..75: mol_type = other DNA
gcgaaattcacccttgcactacactgaacctcatcacattgtacctatgtccaggcaagatgcttttgatacttc

SEQ ID NO: 139479 - DNA, 75 bp, synthetic construct
  source 1..75: mol_type = other DNA
acagcctgcattaccttgccgaccgcgccggtatcagaggccggttcagcgacgcggatgcgaaccatctgaacc

SEQ ID NO: 139480 - DNA, 75 bp, synthetic construct
  source 1..75: mol_type = other DNA
ctcatcccgatgacaatcacgaccgtccctggtggggactacccagcaccgtgacgccctgtttcggggcccgtc

SEQ ID NO: 139481 - DNA, 75 bp, synthetic construct
  source 1..75: mol_type = other DNA
tgattgataccgcatttttcgaccgctttcatgcctatattcccggttgggaaatccccaaaatgcgcccggaat

SEQ ID NO: 139482 - DNA, 75 bp, synthetic construct
  source 1..75: mol_type = other DNA
cccgggacaacgcatcccgacgacaatcacgaccgcctctggtggggactgccctgcaccgtgacgccctgtttc

SEQ ID NO: 139483 - DNA, 75 bp, synthetic construct
  source 1..75: mol_type = other DNA
attatcccgacgacaacaacgaccgctcctggtgggggctcccctgccccgtgacgccctgtttcagggcacgtc

SEQ ID NO: 139484 - DNA, 75 bp, synthetic construct
  source 1..75: mol_type = other DNA
gcacgtctggtgcaggagggtaaccgcttgcattaccttgcagaccgcgccggtatcagaggccggttcagcgac

SEQ ID NO: 139485 - DNA, 75 bp, synthetic construct
  source 1..75: mol_type = other DNA
atatggatatggaagaagtgttcgatgcgcgtaaacactttaaccgtgaccagtggatcgatgtgctgctgcgct

SEQ ID NO: 139486 - DNA, 75 bp, synthetic construct
  source 1..75: mol_type = other DNA
agtgaaatcactaattcgcgagcgtggttcttacaagattatcgataaggtcacggtaaagctaaatcagaagaa

SEQ ID NO: 139487 - DNA, 75 bp, synthetic construct
  source 1..75: mol_type = other DNA
cgcttcccgacgacaacaaagaccgcccctggtgggggctgccctgcaccgtgacgccctgtttcggcgcccgtc

SEQ ID NO: 139488 - DNA, 75 bp, synthetic construct
  source 1..75: mol_type = other DNA
aacgaccgttgccaacctgttctacaacatggccagtcgccagatcggcctggttggtatgtgggatgtggtagc

SEQ ID NO: 139489 - DNA, 75 bp, synthetic construct
  source 1..75: mol_type = other DNA
cagtggatcgatgtgctgctgcgctcagtgggtatggagcccgccaatattgagcaacgcaccaaatggcacctt

SEQ ID NO: 139490 - DNA, 75 bp, synthetic construct
  source 1..75: mol_type = other DNA
atgtcgttgaactgcataatactggccctagcaccgcaaccagtcttgctgcgcttatcgctttatgttcgatat

SEQ ID NO: 139491 - DNA, 75 bp, synthetic construct
  source 1..75: mol_type = other DNA
actcatgctcaccagcggtgaactgaatccccgccatcagcataccgtcacactgtatgcgaaaggactgacctg

SEQ ID NO: 139492 - DNA, 75 bp, synthetic construct
  source 1..75: mol_type = other DNA
actcatgctcaccagcggtgaactgaatccccgccatcagcataccgtaaccctgtatgcgaaaggactgacctg

SEQ ID NO: 139493 - DNA, 75 bp, synthetic construct
  source 1..75: mol_type = other DNA
actcatgctcaccagcggtgaactgaatccccgccatcagcataccgtaacactgtatgcgaacggactgacctg

SEQ ID NO: 139494 - DNA, 75 bp, synthetic construct
  source 1..75: mol_type = other DNA
cgcttccagacgacaataacgaccgcacctggtggggactgccctgcaccgtgacgccctgttttggggcacgtc

SEQ ID NO: 139495 - DNA, 75 bp, synthetic construct
  source 1..75: mol_type = other DNA
cgcatcccgatgacaatcacgaccatccctggtggggactaccctgcacagtgacgccctgtttcggcgtctgtc

SEQ ID NO: 139496 - DNA, 75 bp, synthetic construct
  source 1..75: mol_type = other DNA
actcatgctcaccagcggtgaactgaatccccgccatcagcataccgtgacgctgtatgcgaagggactgacctg

SEQ ID NO: 139497 - DNA, 75 bp, synthetic construct
  source 1..75: mol_type = other DNA
gtgtcagacaaactctccgggataactcatcccgacgacaatcacaaccgcccctggtgggggctgccctgcacc

SEQ ID NO: 139498 - DNA, 75 bp, synthetic construct
  source 1..75: mol_type = other DNA
cctgccatcagcataccgtcacgctgtatgccagagggctgacctgcgaagccgacaccctcggcagctgtggtt

SEQ ID NO: 139499 - DNA, 75 bp, synthetic construct
  source 1..75: mol_type = other DNA
gtatcagaggccggttcagagatgcggatgcgtaccctctggaccaggcctttccgctgctgatgaaacaactgg

SEQ ID NO: 139500 - DNA, 75 bp, synthetic construct
  source 1..75: mol_type = other DNA
agcataccgtcacgctgtatgcgaaaggtctgacctgcaaagctgacaccctcggtagcggtggttacgtttatc

SEQ ID NO: 139501 - DNA, 75 bp, synthetic construct
  source 1..75: mol_type = other DNA
gtgtcagacacacttcccgggataacgcatcccgacgacaatcacgaccgcccctggtgggggcttccctgcaca

SEQ ID NO: 139502 - DNA, 75 bp, synthetic construct
  source 1..75: mol_type = other DNA
cgtaccacctggaccaggcctttccgctgctgatgaaacaactggaactcatgttcaccagcggtgaactgaatc

SEQ ID NO: 139503 - DNA, 75 bp, synthetic construct
  source 1..75: mol_type = other DNA
gcaaatcagcaggcaacagccggagctggattgagcggtgcatttattgaagcatttttcgaggttgataatgat

SEQ ID NO: 139504 - DNA, 75 bp, synthetic construct
  source 1..75: mol_type = other DNA
gtaaattttgaacatatcagtaattcagcgtggcgcgtggcaatcagtgatatctctcaacaatacagattcagt

SEQ ID NO: 139505 - DNA, 75 bp, synthetic construct
  source 1..75: mol_type = other DNA
ggctctcgaaaaccttggtttaggagatatcagtgctacaggtgttgcgacaggtagtatgggcggaaccggata

SEQ ID NO: 139506 - DNA, 75 bp, synthetic construct
  source 1..75: mol_type = other DNA
ccaaatgcacaaatagcaacgctggcaacactagcgagctcagagttttcgaaacagacaacaatggccggaaaa

SEQ ID NO: 139507 - DNA, 75 bp, synthetic construct
  source 1..75: mol_type = other DNA
caaatggtatgattcgacaggctggtactgtgacactgacaccagttggtaacttcaactcgcaggtgcttggtg

SEQ ID NO: 139508 - DNA, 75 bp, synthetic construct
  source 1..75: mol_type = other DNA
catctgcaaacacatcatatattcaggtatttcatggggtgccgagtccggacatcgtccggtactgtactaaga

SEQ ID NO: 139509 - DNA, 75 bp, synthetic construct
  source 1..75: mol_type = other DNA
cgttatgcatgccgtcaggcggggattgcgctggcaggcggtcactccattgatgccccggaaccgattttcggt

SEQ ID NO: 139510 - DNA, 75 bp, synthetic construct
  source 1..75: mol_type = other DNA
gggggctggtgtgcaggcacgcgtcgactatgaagcgatcccgaaactccccggtgttgaagagtacattaagtt

SEQ ID NO: 139511 - DNA, 75 bp, synthetic construct
  source 1..75: mol_type = other DNA
tgggccatttgagcgaaatgtgtcagggcgcaggtgtgcaggcgcgcgttgactatgacgcgatcccaaaattgc

SEQ ID NO: 139512 - DNA, 75 bp, synthetic construct
  source 1..75: mol_type = other DNA
cgatggtttcagtcagtgttatgtctgatgccgttcagtcagacccgtcgaatcctgccacgcaggttttgtctg

SEQ ID NO: 139513 - DNA, 75 bp, synthetic construct
  source 1..75: mol_type = other DNA
atgttattttcggcgttggcatgattgccgcttgtgtatcaaccgtagcggcatcttccggacattttctgttga

SEQ ID NO: 139514 - DNA, 75 bp, synthetic construct
  source 1..75: mol_type = other DNA
ctgctacaactatgatttggggatggtcactgttggcaagcaataatgtgatggcagatgaatttgtcgccggtc

SEQ ID NO: 139515 - DNA, 75 bp, synthetic construct
  source 1..75: mol_type = other DNA
catcgattggcgtactcaacacgctcattcactgggttgtgtttggtgtttgcgtgtatggactatcaacaagcc

SEQ ID NO: 139516 - DNA, 75 bp, synthetic construct
  source 1..75: mol_type = other DNA
cacaaaccttggtttgggagaagcggctaaaagaaatgtagggacaggggcgaatcagatacctgatatgggtag

SEQ ID NO: 139517 - DNA, 75 bp, synthetic construct
  source 1..75: mol_type = other DNA
gcggtatctacaaatgtgactttcaccattccttttacgcaggagccagacgtagtgattgtatatgacggcggt

SEQ ID NO: 139518 - DNA, 75 bp, synthetic construct
  source 1..75: mol_type = other DNA
actggaagggtatctgcgtaattcgatgaatcttccggctcgcgcggtggtgctgacatttgatgatggcttgaa

SEQ ID NO: 139519 - DNA, 75 bp, synthetic construct
  source 1..75: mol_type = other DNA
catattttacgcgatgaagagaatacccgttttcgccatacttcgaccacgacctcggtacgtgcattcaataac

SEQ ID NO: 139520 - DNA, 75 bp, synthetic construct
  source 1..75: mol_type = other DNA
tgctgctggtttcatctggtgtcggcgcagtgcttcccgcgcgttatatgcaaaccactcaggatgcggctatct

SEQ ID NO: 139521 - DNA, 75 bp, synthetic construct
  source 1..75: mol_type = other DNA
atctggatgatgactactttgacatgttgcaggaagaactttgtagcgttgttgaggcatccggtgccagtcttg

SEQ ID NO: 139522 - DNA, 75 bp, synthetic construct
  source 1..75: mol_type = other DNA
agcggcaaaacgggatgtgggaacaggggaaaatcagataccggatatggcttcttttgccagtggtgatggatg

SEQ ID NO: 139523 - DNA, 75 bp, synthetic construct
  source 1..75: mol_type = other DNA
atgccagttagccgtaatctctgcattttcttaaacgttggtttgggagaagcggcaaaacgggatgtgggaaca

SEQ ID NO: 139524 - DNA, 75 bp, synthetic construct
  source 1..75: mol_type = other DNA
gtgcagcggcgatttctacggctctcacaaaccttggtttgggagaagcggcgaaaagggatgtgggcacaggag

SEQ ID NO: 139525 - DNA, 75 bp, synthetic construct
  source 1..75: mol_type = other DNA
ctctcgaaaaccttggtttaggagaagcggcgaaaagggatgtgggcacaggagataatcagataccggatatgg

SEQ ID NO: 139526 - DNA, 75 bp, synthetic construct
  source 1..75: mol_type = other DNA
tggatgaaattacccaacgggaaaatcctgcaatatggtcgtggtgcggttacgccgacattatcgacgcaaaca

SEQ ID NO: 139527 - DNA, 75 bp, synthetic construct
  source 1..75: mol_type = other DNA
taccgccagttaacggcgcagtacccggatggcgtacctgaagccgcgctggatgaggtgatggttaccctgacc

SEQ ID NO: 139528 - DNA, 75 bp, synthetic construct
  source 1..75: mol_type = other DNA
ggggccatcctggcttcaggttatgacggttaccggttcagatggcctgagtcgtttcagtgatgcggccctgcg

SEQ ID NO: 139529 - DNA, 75 bp, synthetic construct
  source 1..75: mol_type = other DNA
taatccgtgggtgtggaaagtcgggcagggaaatgaaggtctggaggttaaacagaaccgtagtgttcgtgacgg

SEQ ID NO: 139530 - DNA, 75 bp, synthetic construct
  source 1..75: mol_type = other DNA
ggatgaagtcatggccacactgaccacgccggcccgcagcagcgttatcagcagcgttatcagcattgttaacgg

SEQ ID NO: 139531 - DNA, 75 bp, synthetic construct
  source 1..75: mol_type = other DNA
gccacacttccggcctacatgccgaagcgcggtcaggcctctgacgtacgcgggccgcgcactgaacaacgtccc

SEQ ID NO: 139532 - DNA, 75 bp, synthetic construct
  source 1..75: mol_type = other DNA
ttcctggtcgaagaagtcagaaagaacgagtttggctttgctgaaggcgcggcggtatttggcgaaagttacaaa

SEQ ID NO: 139533 - DNA, 75 bp, synthetic construct
  source 1..75: mol_type = other DNA
gaacagatgaaaccaccggtgagtttttcccgttgtccgaagatgccatcagccgagccctgcgtaactatggcc

SEQ ID NO: 139534 - DNA, 75 bp, synthetic construct
  source 1..75: mol_type = other DNA
tgcacccggaacaactggatgcgcctgcaccgcataccgaagtggccagtctgcagcccaatcatgtctggcaga

SEQ ID NO: 139535 - DNA, 75 bp, synthetic construct
  source 1..75: mol_type = other DNA
tgcacccggaacaactggatgcccctgcaccgcataccgaagtggccagtctgcaccccaatcatgtctggcaga

SEQ ID NO: 139536 - DNA, 75 bp, synthetic construct
  source 1..75: mol_type = other DNA
ctacctgagcaatggacataaagggctgcaggtgatggacagcgcgaagttctacaagaacaagcccgctaacct

SEQ ID NO: 139537 - DNA, 75 bp, synthetic construct
  source 1..75: mol_type = other DNA
atagcgcacaagccgcataacgcccgcgccaccggacaggtggaaaaggcgcgtgacattatcgaacgcaagctg

SEQ ID NO: 139538 - DNA, 75 bp, synthetic construct
  source 1..75: mol_type = other DNA
ccatgcaggagcgtggcggcgcagacgtgctgcacggtgtgccgaaaatactctatctcgaccccggctcggcaa

SEQ ID NO: 139539 - DNA, 75 bp, synthetic construct
  source 1..75: mol_type = other DNA
ttggtacgcccggcaaccgtggaatggccaagccgtcaggaagtagtagaacgggttattgcccgtgccatttca

SEQ ID NO: 139540 - DNA, 75 bp, synthetic construct
  source 1..75: mol_type = other DNA
tttcactggttgaagagacacgtccattattaccaggcgtgcgtgaagccgttgcgttatgcaaagaacaaggtt

SEQ ID NO: 139541 - DNA, 75 bp, synthetic construct
  source 1..75: mol_type = other DNA
ctctacgagcgatgcctttatgcgaatgctctactccaccattgacgttgtggtgcatatggaaaagcggaaaat

SEQ ID NO: 139542 - DNA, 75 bp, synthetic construct
  source 1..75: mol_type = other DNA
taaagctaccgcagccgaatttggtattgaactgacggcgattggcgagctggtgcctgcgcgtggtggtcgtgc

SEQ ID NO: 139543 - DNA, 75 bp, synthetic construct
  source 1..75: mol_type = other DNA
ggcgatgtctataccgcctctgaagcgaagcaagtgcagaatgtcagctatggcacaatcgttaatgtacgacag

SEQ ID NO: 139544 - DNA, 75 bp, synthetic construct
  source 1..75: mol_type = other DNA
tgttgccggtcttctcgcataccttggtttgggagaagcggcaacgaggaacgtcggaacggataccgggcaagt

SEQ ID NO: 139545 - DNA, 75 bp, synthetic construct
  source 1..75: mol_type = other DNA
ggaccactttgacatggaactctcgttttgctttcaagaaatgctcatcaataaattctgatgggtatttaatga

SEQ ID NO: 139546 - DNA, 75 bp, synthetic construct
  source 1..75: mol_type = other DNA
tggtcgccagtttatttccggtggctgttctggcctggaacaccccgggagacgatttcagtggagagcttaagc

SEQ ID NO: 139547 - DNA, 75 bp, synthetic construct
  source 1..75: mol_type = other DNA
gtgactgacaaacgtaaaaaacgcgccgatgccgggcgcagtgccctgagccgcgacgaagccgcgctgatatct

SEQ ID NO: 139548 - DNA, 75 bp, synthetic construct
  source 1..75: mol_type = other DNA
gaatggaagaacgtcagggctgatagtttgatttttgctgtcaacgttaatctggatggcgagaccaaacgtgga

SEQ ID NO: 139549 - DNA, 75 bp, synthetic construct
  source 1..75: mol_type = other DNA
gtaaacaaagccgtgagatgttgaatgatgccaaacgcatcaaagaagaaatggaaaaaggtcctctgacgggcc

SEQ ID NO: 139550 - DNA, 75 bp, synthetic construct
  source 1..75: mol_type = other DNA
tgctgatcggctcggtaagaatatcactttcgtatctacgcatctgtcgttgctcaagctacctgactgtgtgcg

SEQ ID NO: 139551 - DNA, 75 bp, synthetic construct
  source 1..75: mol_type = other DNA
actgtcaccattaagactgccgctgcaaccgggacgctgagtgttctgttgcgttataccgtggtgggatactga

SEQ ID NO: 139552 - DNA, 75 bp, synthetic construct
  source 1..75: mol_type = other DNA
gacaagaactagatcatgctttctctgcaatgggttataaaaccttttggaaacttcataacgcttctgattacg

SEQ ID NO: 139553 - DNA, 75 bp, synthetic construct
  source 1..75: mol_type = other DNA
tttgtgcaggggcaggaggtcaagctctagggttacataacgctggcttcactcaccgcgcgctcgtcgagattg

SEQ ID NO: 139554 - DNA, 75 bp, synthetic construct
  source 1..75: mol_type = other DNA
gagtcgataaacgcatatctgcacaaattagaggagcagggtgcgattaacggagggcgagcgtggttagacggt

SEQ ID NO: 139555 - DNA, 75 bp, synthetic construct
  source 1..75: mol_type = other DNA
atcggaaaagattgtggcaaaaactacttttccgtagatttcgtcgaaatgaagacgcggtttgatcgagatgtt

SEQ ID NO: 139556 - DNA, 75 bp, synthetic construct
  source 1..75: mol_type = other DNA
tgtggactcacaacatgtcatcaaccgcataaacgtggttatatcgtagtgacaaaagaaggttacgaaaccaac

SEQ ID NO: 139557 - DNA, 75 bp, synthetic construct
  source 1..75: mol_type = other DNA
caccgttacccgcggcggctttggcgagtctgttgccaaacaaagcaccatgcagcgtagcgcaaccggcacctc

SEQ ID NO: 139558 - DNA, 75 bp, synthetic construct
  source 1..75: mol_type = other DNA
cgcacgccatctgacacctgtcgctcttgctgttgccactgtttttatgctggcaggctgtgaaaagagtgatga

SEQ ID NO: 139559 - DNA, 75 bp, synthetic construct
  source 1..75: mol_type = other DNA
gaacgtactgcgccgaaatacgccacccgtgaagactgtgttgctgaatttggcgaaggtcaatgccagcaggca

SEQ ID NO: 139560 - DNA, 75 bp, synthetic construct
  source 1..75: mol_type = other DNA
atgagcaaaaaatttgaaggcagcgtcgcgcctcgcgagcgtataaatatatcctatgtcccgaagacggacggc

SEQ ID NO: 139561 - DNA, 75 bp, synthetic construct
  source 1..75: mol_type = other DNA
agatgtgctggcgctgcccaccgttagtgcaccggtcacgcaggctcctgcacctacggccttgttgcaccatgg

SEQ ID NO: 139562 - DNA, 75 bp, synthetic construct
  source 1..75: mol_type = other DNA
tatgcaatccctggataaaaaagcgcggttacaagagttggcgcgcctgcttggtggcagtgaagtcacacgtaa

SEQ ID NO: 139563 - DNA, 75 bp, synthetic construct
  source 1..75: mol_type = other DNA
ctatttgcaacagtgccggaacaggagggtgcatgcttggtgataacggcaattccgggagtaccggcggctgat

SEQ ID NO: 139564 - DNA, 75 bp, synthetic construct
  source 1..75: mol_type = other DNA
ttcccgccgcggtgagctcgctggagagcgtgaccgcctcatttggctcaaaggtcgaggtgtggcttgccccga

SEQ ID NO: 139565 - DNA, 75 bp, synthetic construct
  source 1..75: mol_type = other DNA
tcagacatacagttgcgactcagttaaaacaacatggtgtcgaattggcgtatgctcaggcaattatgggccata

SEQ ID NO: 139566 - DNA, 75 bp, synthetic construct
  source 1..75: mol_type = other DNA
ttaagaaaacatcttcatctcatgctcgcctgaatgtgcctgcgcttgtgcaggtggcggcgctcgccattatta

SEQ ID NO: 139567 - DNA, 75 bp, synthetic construct
  source 1..75: mol_type = other DNA
gcctgatgttacaaaagctgccggatatgctcatcttattgctgttgttcgttcccgccaccagtcggcggttct

SEQ ID NO: 139568 - DNA, 75 bp, synthetic construct
  source 1..75: mol_type = other DNA
ccgcgaaagatgcggtgatcccgggtttgcagaaagattatgaagaagatttcaaaacggcgctgttacgcgctc

SEQ ID NO: 139569 - DNA, 75 bp, synthetic construct
  source 1..75: mol_type = other DNA
agatgcgctaattgttgttgttcgcgtagacgaaaacacagacgcgacaaaagagcgtgagaacgtaatcaacgg

SEQ ID NO: 139570 - DNA, 75 bp, synthetic construct
  source 1..75: mol_type = other DNA
aaccgccgccataaatatagcgcgcgcatggaaatactacgcccgcgtgtgttttccacgggcgatctcagtgat

SEQ ID NO: 139571 - DNA, 75 bp, synthetic construct
  source 1..75: mol_type = other DNA
gccgctttactgggtgagcgcggcacgttgccgaaagatattgccgatattttcaatcaggacaacgccttgctt

SEQ ID NO: 139572 - DNA, 75 bp, synthetic construct
  source 1..75: mol_type = other DNA
tgatcaatgtccgtttgagcgcaggctgtcgcgaatgttcggacgcgccgttgatgtggtgtcccgcaatgccgt

SEQ ID NO: 139573 - DNA, 75 bp, synthetic construct
  source 1..75: mol_type = other DNA
cagaactggaagccagcgaccctaagcgaaaaccgagcgtctcactctacgttaatcgagatattcgactatctg

SEQ ID NO: 139574 - DNA, 75 bp, synthetic construct
  source 1..75: mol_type = other DNA
ccactgaggccgggaccgtgtatatccatatcaacgaagacgatagcagcctgccgggtaagagcatcaagaacg

SEQ ID NO: 139575 - DNA, 75 bp, synthetic construct
  source 1..75: mol_type = other DNA
atgatgccagtgccgccggtacattcaacgcaaaacattaagctgatggccgtcgtgcatcgcctgcaacaaatt

SEQ ID NO: 139576 - DNA, 75 bp, synthetic construct
  source 1..75: mol_type = other DNA
tgcgcaaattgttagggataattacgagcgtttgaacgatatgattcagcttggtactttccagccaacaatacc

SEQ ID NO: 139577 - DNA, 75 bp, synthetic construct
  source 1..75: mol_type = other DNA
tgccgaaatagtccgggataattacgggcggtttaactatatcggtcagtccagagttgcgccaccaccacgcag

SEQ ID NO: 139578 - DNA, 75 bp, synthetic construct
  source 1..75: mol_type = other DNA
ttaggtcaggcccgttccggggcaacaattgtatcgagtagcaatcagatacttgatgatgattatgatccaccg

SEQ ID NO: 139579 - DNA, 75 bp, synthetic construct
  source 1..75: mol_type = other DNA
gcgagaaccgagcgtcgcactccacgctaatcgagatattcgactatctggatattcaggatgtcggcaaggcga

SEQ ID NO: 139580 - DNA, 75 bp, synthetic construct
  source 1..75: mol_type = other DNA
ctactttaaacttaagaaggctcgccgttggtaccgctcagcaatatttaaccacgacacaaataaaaaatgtag

SEQ ID NO: 139581 - DNA, 75 bp, synthetic construct
  source 1..75: mol_type = other DNA
aaaggccatcttgaacctgtacaagggcggcaaaaagttgaagatggtctgggcgatctgaataaaccactgagc

SEQ ID NO: 139582 - DNA, 75 bp, synthetic construct
  source 1..75: mol_type = other DNA
aaaccgggggataatccattgttgttaaaacggctttatatcttaagaacggattcgctggagacaatgtcgcgg

SEQ ID NO: 139583 - DNA, 75 bp, synthetic construct
  source 1..75: mol_type = other DNA
gtatctttcgtatccgtttggtggatttaatgacaaagccgtgaaggcagcaaacgatgccgggtttcgtctggc

SEQ ID NO: 139584 - DNA, 75 bp, synthetic construct
  source 1..75: mol_type = other DNA
ctcagcataaaactaaaaatatcaagctgatggccattgttcaccgtctacagcagattatggtcaacgaaaatc

SEQ ID NO: 139585 - DNA, 75 bp, synthetic construct
  source 1..75: mol_type = other DNA
caacgcaaaacattaagctgatggccgtcgtacatcgcctgcaacaaattatgattaacgagaatctgacccctg

SEQ ID NO: 139586 - DNA, 75 bp, synthetic construct
  source 1..75: mol_type = other DNA
gtttggatgtgactgatataaaaaacaagatttacaacaagtatagattttttcgcatatggttctttttacaac

SEQ ID NO: 139587 - DNA, 75 bp, synthetic construct
  source 1..75: mol_type = other DNA
gcagtgtcgcgccgaaagaaagaatcagcgttcggtatacaccaaaagttgatggggtggctgctgatatcgaat

SEQ ID NO: 139588 - DNA, 75 bp, synthetic construct
  source 1..75: mol_type = other DNA
gtgcgcacccttaaccaccgtgacggtgaaagcagcccggcggagtactccgtcagcctgacgcgcgccgacatg

SEQ ID NO: 139589 - DNA, 75 bp, synthetic construct
  source 1..75: mol_type = other DNA
tgcgcaccctgcgtcgggtcaacggcgtcgcgctctgtttaatcgaccactactttgcggacctcaccctctggc

SEQ ID NO: 139590 - DNA, 75 bp, synthetic construct
  source 1..75: mol_type = other DNA
tggcaggctgtgaaaagagtgatgaaacagtgtctctgtatcaaaatgctgatgattgttcagcggcaaacccag

SEQ ID NO: 139591 - DNA, 75 bp, synthetic construct
  source 1..75: mol_type = other DNA
attaaaaccaaattactttcatcaagactaaataaatttaatgacttcgaggacagttttaatggcttaggaatc

SEQ ID NO: 139592 - DNA, 75 bp, synthetic construct
  source 1..75: mol_type = other DNA
ctcgcaccgacaaactctctggcgtttacgagcatcatattctccatcctcatgcgcttctgacgcgtggctttg

SEQ ID NO: 139593 - DNA, 75 bp, synthetic construct
  source 1..75: mol_type = other DNA
ggtctggcaaggcgtcatcaccagcgacatttgggcaccgttacgcgccctcacccgcagcagttccaacgcacg

SEQ ID NO: 139594 - DNA, 75 bp, synthetic construct
  source 1..75: mol_type = other DNA
aagtggctggagacgggaagttaatacccgctattgttggtgctgtttcagctgcggtaagtgctgctacggccg

SEQ ID NO: 139595 - DNA, 75 bp, synthetic construct
  source 1..75: mol_type = other DNA
acttgatgatgattatgatccaccgtgcatccgggctaagcgtgagtatgaggatattctggacagtgttgatgg

SEQ ID NO: 139596 - DNA, 75 bp, synthetic construct
  source 1..75: mol_type = other DNA
tgctgcgcccggcctccggtcacgtcgctgacgcgctggggataaccgagggcgagaacgttatccacctgcgca

SEQ ID NO: 139597 - DNA, 75 bp, synthetic construct
  source 1..75: mol_type = other DNA
ggcgagaacgttatccatttgcgcaccctgcgtcgcgtcaacggcgtcgcgctctgtttaatcgaccactacttt

SEQ ID NO: 139598 - DNA, 75 bp, synthetic construct
  source 1..75: mol_type = other DNA
atgcacttgtctacacatccgaccagctacccaacacgctatcaggagatagccgcaaaacttgagcaggagctt

SEQ ID NO: 139599 - DNA, 75 bp, synthetic construct
  source 1..75: mol_type = other DNA
tcgcgaaagcgcgtaaattgtatgttggtattcctgctggcgtgtattctgacaattgtcggtttgtttatcgcc

SEQ ID NO: 139600 - DNA, 75 bp, synthetic construct
  source 1..75: mol_type = other DNA
agaactttgacggtgaaattaacgttctgtatgacgggaaagcgctgggctgggaaaagtatgttgatggcccgg

SEQ ID NO: 139601 - DNA, 75 bp, synthetic construct
  source 1..75: mol_type = other DNA
agacactgggcatcgagccaatccatgccaacagcccgcaggcaaaagggcgggtagagcgcgccaatcagacac

SEQ ID NO: 139602 - DNA, 75 bp, synthetic construct
  source 1..75: mol_type = other DNA
taaggccagtcgttctttatctattggtgaatatcagtatttattgttattagcaaatatgcatccgtcttacag

SEQ ID NO: 139603 - DNA, 75 bp, synthetic construct
  source 1..75: mol_type = other DNA
aagtaaagaatgcgcgggttgcggcaggtcttactcttaaagaagctgctgatatttttggttatcaactgaatt

SEQ ID NO: 139604 - DNA, 75 bp, synthetic construct
  source 1..75: mol_type = other DNA
acgccgtggactttagcggtgatggtcatatcaacctgtgggatccggttgatgctattggtagtgtggcaaact

SEQ ID NO: 139605 - DNA, 75 bp, synthetic construct
  source 1..75: mol_type = other DNA
aaaacatcgcatttaaagcctcccagcttgggaagatgtattcatgggcgaatcttcaaaagatcctcaactacg

SEQ ID NO: 139606 - DNA, 75 bp, synthetic construct
  source 1..75: mol_type = other DNA
gattttttctgcttcaccactttctatagacctaagatctcttccgtctgttgaaaaacctgtaaaaacagacat

SEQ ID NO: 139607 - DNA, 75 bp, synthetic construct
  source 1..75: mol_type = other DNA
aaagccaagaagctttctagaaatgaaaccatgtatgaaaaacgaacaggtgagatctgcaataagaagcaatta

SEQ ID NO: 139608 - DNA, 75 bp, synthetic construct
  source 1..75: mol_type = other DNA
gatagacacagtatattcagggtaaataacccagagcgggaaggtgagctgacccagttcactcgtgcgataaag

SEQ ID NO: 139609 - DNA, 75 bp, synthetic construct
  source 1..75: mol_type = other DNA
ttactcctgaagctgaagacgaagtgaaagccactgccgctgagtttggtattgaactgtcggctattggtgaac

SEQ ID NO: 139610 - DNA, 75 bp, synthetic construct
  source 1..75: mol_type = other DNA
cgctggcgttcgaacgcactgatttcgaccaggttcgttcactcatggaaaatagcgatcgctgccaggatatac

SEQ ID NO: 139611 - DNA, 75 bp, synthetic construct
  source 1..75: mol_type = other DNA
cggttagctgaacctttctggcaggatcattttttgggcgcgcggcggatattgacggaagagacgattttgtag

SEQ ID NO: 139612 - DNA, 75 bp, synthetic construct
  source 1..75: mol_type = other DNA
ttgcttgccgttttcttcatttgccagcgccaccacatcacatatctctttcagctacgccgcccgccagcggat

SEQ ID NO: 139613 - DNA, 75 bp, synthetic construct
  source 1..75: mol_type = other DNA
ctgcgcaccggggaaaccattcgggtaagccggttagccgaacctttctggcaggaccattttttaggcgcgcgc

SEQ ID NO: 139614 - DNA, 75 bp, synthetic construct
  source 1..75: mol_type = other DNA
atgtccttcatgtcttcgttctttcacggtagatttctgcatccaggcgtgttttcgttatgcgttttgcttcct

SEQ ID NO: 139615 - DNA, 75 bp, synthetic construct
  source 1..75: mol_type = other DNA
tgtgttgtcgggattactgttgctttgcttgccgttttcttcatttgccagcgccaccacatcacatatcacttt

SEQ ID NO: 139616 - DNA, 75 bp, synthetic construct
  source 1..75: mol_type = other DNA
cagcacaaccgggagcagataaaacagcatccagaatggtttcctgcgccgctcaaggcgagtgacagacgctgg

SEQ ID NO: 139617 - DNA, 75 bp, synthetic construct
  source 1..75: mol_type = other DNA
atgaaattcattaaagtagcccaggctttactgataatgacggttatgactggcagcgggcaggctgccaccact

SEQ ID NO: 139618 - DNA, 75 bp, synthetic construct
  source 1..75: mol_type = other DNA
gtcaccgcgcaccggggaaaccattcgggtaagtcggttagctgaacctttctggcaggatcactttttaggcgc

SEQ ID NO: 139619 - DNA, 75 bp, synthetic construct
  source 1..75: mol_type = other DNA
cgggtaagtcggttagccgaacctttctggcaggaccattttttaggcgcgcgacggattttgacggaagagacg

SEQ ID NO: 139620 - DNA, 75 bp, synthetic construct
  source 1..75: mol_type = other DNA
cacttatctgccgccgcgcccgtgatctgctgatagcacagggctggccggaacgaactgatgttgatcagcgtg

SEQ ID NO: 139621 - DNA, 75 bp, synthetic construct
  source 1..75: mol_type = other DNA
tgcgccagaagcgcaaaatgatccacgttttgtattagcaaacgtcaaactctcatcgctgacaaaactcaccgc

SEQ ID NO: 139622 - DNA, 75 bp, synthetic construct
  source 1..75: mol_type = other DNA
ctgggcaccctgactccagggtcaaagatacatgctccgctggagatcacctggaagtgtgaaggtgacactccg

SEQ ID NO: 139623 - DNA, 75 bp, synthetic construct
  source 1..75: mol_type = other DNA
agaggctgaccagctgctttctgacactgccagcccggaagtgcgggcagaacgcgaaagactggtacaggcctt

SEQ ID NO: 139624 - DNA, 75 bp, synthetic construct
  source 1..75: mol_type = other DNA
caggagcttaaggattttcgcgatgcgatggatgtggtggcctccagccgtgtcactgacagtggcagccacacg

SEQ ID NO: 139625 - DNA, 75 bp, synthetic construct
  source 1..75: mol_type = other DNA
ggccgcgtcgcagatgagccagtggagtcagcagcggggcaacagcgacaccaccgtggcgggcagtgacatctc

SEQ ID NO: 139626 - DNA, 75 bp, synthetic construct
  source 1..75: mol_type = other DNA
caacggggtaacagcgacaccaccgtggcaggcagcgacacctcgagcagcagcaatctgaccaaagcgctgaac

SEQ ID NO: 139627 - DNA, 75 bp, synthetic construct
  source 1..75: mol_type = other DNA
tcgatcaggtacagaatacctattcggatattggcacaaccgccggctggctggcgctgtccatcccgtttattg

SEQ ID NO: 139628 - DNA, 75 bp, synthetic construct
  source 1..75: mol_type = other DNA
agattagaggtgtatcagcacccgtagccggttttgatttgcagggtgagttcagggagcagaaaagcgatatgg

SEQ ID NO: 139629 - DNA, 75 bp, synthetic construct
  source 1..75: mol_type = other DNA
tctcaaaatggcgctggagagctggcacaaacaggtcattaaggtggggctgaagggggaattttcccctcactc

SEQ ID NO: 139630 - DNA, 75 bp, synthetic construct
  source 1..75: mol_type = other DNA
tggcggcggcgctggaactggcgcggctgatggggttgcgctctcaggaggcggttcgctgttcacgttcattgc

SEQ ID NO: 139631 - DNA, 75 bp, synthetic construct
  source 1..75: mol_type = other DNA
ggaatggaagtgttttacttctgcgctgacccgcacaataaaccgatcgttcacccgaaagtcaccacctttacc

SEQ ID NO: 139632 - DNA, 75 bp, synthetic construct
  source 1..75: mol_type = other DNA
ctaattttgaccaggtacagaatacctactcggatattggcacaaccgccggctggctggcgctgtccatcccgt

SEQ ID NO: 139633 - DNA, 75 bp, synthetic construct
  source 1..75: mol_type = other DNA
acccgtaacattatggagctggtcaaatgggccggattttatgttctggtcattgccgttctgattggtgacaaa

SEQ ID NO: 139634 - DNA, 75 bp, synthetic construct
  source 1..75: mol_type = other DNA
gaggagctacgggagcacctgaagaccattgtcgagtgggaacttagtgtcagccgtgatgacctgaacgacccg

SEQ ID NO: 139635 - DNA, 75 bp, synthetic construct
  source 1..75: mol_type = other DNA
gcatcgcagatgactatatgagaagaatgggattcagtgatactcacctccgttgctatgttctacatgacgatt

SEQ ID NO: 139636 - DNA, 75 bp, synthetic construct
  source 1..75: mol_type = other DNA
ggggtaagagcttcgctggtgtcgttcaatatgcattgaagccgggagcacatcataaaagcgatccagccgtaa

SEQ ID NO: 139637 - DNA, 75 bp, synthetic construct
  source 1..75: mol_type = other DNA
agaaccttatcagcactcgaatcattagtgaactcgaaaccagatatggtctcattgagacagcccagcataaga

SEQ ID NO: 139638 - DNA, 75 bp, synthetic construct
  source 1..75: mol_type = other DNA
aaaaaaattgcagaactggaactacggctcagagaagacaaacggaacgaaatcgtagaaaagatccttcaaaag

SEQ ID NO: 139639 - DNA, 75 bp, synthetic construct
  source 1..75: mol_type = other DNA
cctccacaaggttcctacaaacttctcagaagtctattcaacacatcatctgaaacctacaagaaaaattcgttt

SEQ ID NO: 139640 - DNA, 75 bp, synthetic construct
  source 1..75: mol_type = other DNA
cctcccctaaagaagctctccagcagatacttgataaaagtttggcagatacacctgaccttttaacttttatcg

SEQ ID NO: 139641 - DNA, 75 bp, synthetic construct
  source 1..75: mol_type = other DNA
gttaaccagccagtatctcaacatcgtcaaaaactcctctcttgccgccgctattggctatccggatatggtttc

SEQ ID NO: 139642 - DNA, 75 bp, synthetic construct
  source 1..75: mol_type = other DNA
gccgcgacaaaaagtcaggaggcgagtgcaggtggaggccttcaggtttcatttgatacagatcgccatatactc

SEQ ID NO: 139643 - DNA, 75 bp, synthetic construct
  source 1..75: mol_type = other DNA
gcgaagagttaggtgataatagtatcgggagaaaggaattgaataatatcaaagataatctgcaaagaaagtttg

SEQ ID NO: 139644 - DNA, 75 bp, synthetic construct
  source 1..75: mol_type = other DNA
tggcgcaatggctttttggcgcagcactactctgggatgtcccagcccttcgaggctttaatttccgcggcggga

SEQ ID NO: 139645 - DNA, 75 bp, synthetic construct
  source 1..75: mol_type = other DNA
tagccatgaccatgtcggtctatctgattatcagcctgactatctcgctgctgatgaatatctataaccgccgca

SEQ ID NO: 139646 - DNA, 75 bp, synthetic construct
  source 1..75: mol_type = other DNA
tgggggcaggcgagatttggtgggtctggtggtgaagatgccggatatcttaatgattttccttttgcctttccg

SEQ ID NO: 139647 - DNA, 75 bp, synthetic construct
  source 1..75: mol_type = other DNA
ggtgtcattggcctgaatgggtatgtaacgatcccgttaattatttcaggttcccggagaacactgattattcag

SEQ ID NO: 139648 - DNA, 75 bp, synthetic construct
  source 1..75: mol_type = other DNA
agacggtgaaagtgactacctttaaccgcccaaaagagatggcggatcaggtgtttacgcttaatgttctggaca

SEQ ID NO: 139649 - DNA, 75 bp, synthetic construct
  source 1..75: mol_type = other DNA
tccgaagtgctggcgctggcggatattcgtgggcatttgcctgcacaaatcgccctggtcgggctgcaaccggca

SEQ ID NO: 139650 - DNA, 75 bp, synthetic construct
  source 1..75: mol_type = other DNA
ttgctggggtatgtcgaaagcgccagtcatctgttgattctcgatgccattgactacgggctggaacctggaacg

SEQ ID NO: 139651 - DNA, 75 bp, synthetic construct
  source 1..75: mol_type = other DNA
tccgaagtgctggcgctggcggatatacgtggtcatttgccagcacatattgccctcgtcggtctgcaacccgca

SEQ ID NO: 139652 - DNA, 75 bp, synthetic construct
  source 1..75: mol_type = other DNA
tgtctgtgccaacctggcggcggtgatcagtcagaccaataaacgggtgttgttgatcgactgcgatatgcgcaa

SEQ ID NO: 139653 - DNA, 75 bp, synthetic construct
  source 1..75: mol_type = other DNA
tgtgctgctgcgctcgttgtttaatcgcggcatcgaaagcccgcaagtactggaagaacacggtatcagcgtcta

SEQ ID NO: 139654 - DNA, 75 bp, synthetic construct
  source 1..75: mol_type = other DNA
tgtgctgctgcgctcgttgtttaatcgcggcatcgaaagcccgcaggtgctggaagaacacggtatcagcgtcta

SEQ ID NO: 139655 - DNA, 75 bp, synthetic construct
  source 1..75: mol_type = other DNA
cgcgccagcgcgtatcaggattatggctattacgaatacgaatataagtcggatgcgaaaaacgacgcctgcatt

SEQ ID NO: 139656 - DNA, 75 bp, synthetic construct
  source 1..75: mol_type = other DNA
acggccgggtgacggcgatgccgaaaactcagcaagagattgtgcgcctgacccgcgatgtggaatctggtcaac

SEQ ID NO: 139657 - DNA, 75 bp, synthetic construct
  source 1..75: mol_type = other DNA
ttcgccacgccgatttacagcgccgatgcactggttcaaatcgaacaaagtggcggtaattcgctggtgcaggac

SEQ ID NO: 139658 - DNA, 75 bp, synthetic construct
  source 1..75: mol_type = other DNA
gcactggatgaagtcatggccacgctgaccacgccggcgcgcagcagtgttatcagcattgttaacggcaactga

SEQ ID NO: 139659 - DNA, 75 bp, synthetic construct
  source 1..75: mol_type = other DNA
gcactggatgaagtcatggccacgctgaccacgccggctcgcagcagagttatcagcattgttaacggcaactga

SEQ ID NO: 139660 - DNA, 75 bp, synthetic construct
  source 1..75: mol_type = other DNA
gagcaggtgagcaaatggtttaaccgaacgttgctacctaaagtccttgctgaccgtagcggcttagcgtttcac

SEQ ID NO: 139661 - DNA, 75 bp, synthetic construct
  source 1..75: mol_type = other DNA
tgcacccggaacaactggatgctcctgcaccgcataccgaagtggccagtctgcatcccaatcatgtctggcaga

SEQ ID NO: 139662 - DNA, 75 bp, synthetic construct
  source 1..75: mol_type = other DNA
tgcacccggaacaactggatgcacctgcaccgcataccgaagtggccagtctgcaacccaatcatgtctggcaga

SEQ ID NO: 139663 - DNA, 75 bp, synthetic construct
  source 1..75: mol_type = other DNA
gtgactgataaacgcaaaaaacgcgcggatgccggtcgcagcgccctgacccgcgacgaagccgcgctgatatct

SEQ ID NO: 139664 - DNA, 75 bp, synthetic construct
  source 1..75: mol_type = other DNA
tgctcctgtaattgaagcattgaagcagttagggcgatacaccgatgctgaattggttgctgcggttgtgtcagg

SEQ ID NO: 139665 - DNA, 75 bp, synthetic construct
  source 1..75: mol_type = other DNA
gtgactgataatcgtaagcgcagaacagacgcagggaaaaccgcgctgacccgcgacgaggcggtgatgatatcc

SEQ ID NO: 139666 - DNA, 75 bp, synthetic construct
  source 1..75: mol_type = other DNA
cctagcccgtctatcacagacgtccccgttggggtgaaattcttcggcatgaaggcaccacatcagggggcaccg

SEQ ID NO: 139667 - DNA, 75 bp, synthetic construct
  source 1..75: mol_type = other DNA
taccgccagttaacggcacagtacccggacggcgtaccggaagccgcactggatgaagtcatggccacgctgacc

SEQ ID NO: 139668 - DNA, 75 bp, synthetic construct
  source 1..75: mol_type = other DNA
gtgccgttctctgggtatcgagctgacagcacacaagccgcataacgcccgcgccaccgggcaggtggaaaaggc

SEQ ID NO: 139669 - DNA, 75 bp, synthetic construct
  source 1..75: mol_type = other DNA
gagtggcgctcaatggtatggcccatcacaaggccaattagatccccttaaagaagtcaaagctgcaaaactgcg

SEQ ID NO: 139670 - DNA, 75 bp, synthetic construct
  source 1..75: mol_type = other DNA
ttttcagttcgtagttgtattaagctctttgttcgtccgtcatcagtgaaaggtcatccggaggatgtggcgggg

SEQ ID NO: 139671 - DNA, 75 bp, synthetic construct
  source 1..75: mol_type = other DNA
gtccgtcaagtgtaaaaggacatcctgaagatgttgccggagaagtaaagtggcagagggttaacaataaattaa

SEQ ID NO: 139672 - DNA, 75 bp, synthetic construct
  source 1..75: mol_type = other DNA
gatttgtgtgaaaggaattccgccaaagtctgatgaaaaatgggctgagagtaataaaaatagtttaaacaatgt

SEQ ID NO: 139673 - DNA, 75 bp, synthetic construct
  source 1..75: mol_type = other DNA
gtctaaaaatctcactttccagtacaaaagcagtgcgtttcaggtacgcagtgagggccggggatatcgacttag

SEQ ID NO: 139674 - DNA, 75 bp, synthetic construct
  source 1..75: mol_type = other DNA
ccaacagcccgcaggcaaaagggcgggtagagcgcgccaatcagacactacaggacaggctggtcaaagaaatgc

SEQ ID NO: 139675 - DNA, 75 bp, synthetic construct
  source 1..75: mol_type = other DNA
gccgttttttatcaatctgtcggaactgaaagtgggcggaaaggatgttaaggatcgtcattatattgcgccatt

SEQ ID NO: 139676 - DNA, 75 bp, synthetic construct
  source 1..75: mol_type = other DNA
agccggttagccgaacctttctggcaggaccattttttaggtgctcggcggattttgacggaagagacgattttg

SEQ ID NO: 139677 - DNA, 75 bp, synthetic construct
  source 1..75: mol_type = other DNA
taccatcgggcgacgattgtggcgaacaacgacctgcgccggggggatttgctgtttttccatattcatagccgt

SEQ ID NO: 139678 - DNA, 75 bp, synthetic construct
  source 1..75: mol_type = other DNA
tcctgcgccactcaaggcgagtgacagacgctggcaggcactggcagagaacaaccatttcttaagcagcaatca

SEQ ID NO: 139679 - DNA, 75 bp, synthetic construct
  source 1..75: mol_type = other DNA
aaaaagcgtcaatacggtgctctattaactcttactatcaatgtatgatatttttttatctcacaataaattggc

SEQ ID NO: 139680 - DNA, 75 bp, synthetic construct
  source 1..75: mol_type = other DNA
actaatggtgctaaaaaagtagaatggaaaataataacagattatgggggggttggtaaaaaatttgaagaattt

SEQ ID NO: 139681 - DNA, 75 bp, synthetic construct
  source 1..75: mol_type = other DNA
gctagatccgttgcaatctactcgtcttcgtattgttcgtactggaggtaattttccaatagatcgtgaaagcat

SEQ ID NO: 139682 - DNA, 75 bp, synthetic construct
  source 1..75: mol_type = other DNA
cagttgattgatcaggcaaagcgcacgtcggtaaggcagtttcggggaataatggctcccggcggtggagctgtc

SEQ ID NO: 139683 - DNA, 75 bp, synthetic construct
  source 1..75: mol_type = other DNA
tatacgcaaccgctgttgggatgacaaaaaggtcgatgcgcaccacgccatcattccgaccgcacggagttctgc

SEQ ID NO: 139684 - DNA, 75 bp, synthetic construct
  source 1..75: mol_type = other DNA
gcatgaagccagcgaaatcgttcacgccggagacccggatcgcgaagggcaattgctggtggatgaagtgctgga

SEQ ID NO: 139685 - DNA, 75 bp, synthetic construct
  source 1..75: mol_type = other DNA
gacgcaggcgtactgagcctgacttataccggtgaagatcgcgaacagatccgcgacattcttaacagcatcgcc

SEQ ID NO: 139686 - DNA, 75 bp, synthetic construct
  source 1..75: mol_type = other DNA
cgcgacctgggctccggcgcgtgggacaccttctgcaatgcctatctgccgctgttaaaaccgagcttcctggcg

SEQ ID NO: 139687 - DNA, 75 bp, synthetic construct
  source 1..75: mol_type = other DNA
ttcccgccggtgctgtcgttcagccgctggctgctggtatgggaaaagacttcgctttccgaggcgctgttcaac

SEQ ID NO: 139688 - DNA, 75 bp, synthetic construct
  source 1..75: mol_type = other DNA
taatttttttacagacttcttatcgggtggaagatcttttattggaagaggccacattgcttctgagctttatcc

SEQ ID NO: 139689 - DNA, 75 bp, synthetic construct
  source 1..75: mol_type = other DNA
acaagttacctccaggaagttcagggaaaattcagtggcagataataacggattatggaggcaagagtaaggtat

SEQ ID NO: 139690 - DNA, 75 bp, synthetic construct
  source 1..75: mol_type = other DNA
gattcatcgggggcctcactgacggtaatgaatgacctggattatccgatgctggttcagtctgaggtgctggca

SEQ ID NO: 139691 - DNA, 75 bp, synthetic construct
  source 1..75: mol_type = other DNA
gcagccgctggtggggacattgtacctatcaggactttatgcagccgctggtggggacattgtaccagttgattg

SEQ ID NO: 139692 - DNA, 75 bp, synthetic construct
  source 1..75: mol_type = other DNA
atgtattcacctttaattgctcattattcagcgcttcagacgcagtctgctctgctggctgatatcagtcagatg

SEQ ID NO: 139693 - DNA, 75 bp, synthetic construct
  source 1..75: mol_type = other DNA
ataccggcgaggcgctgggctggctgctgtatgacctggagcaggagaacattcctgctccgggagttcaggccc

SEQ ID NO: 139694 - DNA, 75 bp, synthetic construct
  source 1..75: mol_type = other DNA
ggtattggtgagtttatccatcgtagtgtgcaaacctggagcctgacgctggtctttttaagcagtctggcgctg

SEQ ID NO: 139695 - DNA, 75 bp, synthetic construct
  source 1..75: mol_type = other DNA
ggtccggatatttgctggcgatcgtttgccttattgccgcacaaatcattgcccgcatgatgatcaaattccccg

SEQ ID NO: 139696 - DNA, 75 bp, synthetic construct
  source 1..75: mol_type = other DNA
tcgcgatcatcgtggtattggcctttgctgcccgttttctgtttagcacgccgacgaatatgatacaggagagca

SEQ ID NO: 139697 - DNA, 75 bp, synthetic construct
  source 1..75: mol_type = other DNA
ttgttctgggtactggcacaacagggcggcagtaccatcagcttgtttatcgatcgctttgtgaatcgtcaggca

SEQ ID NO: 139698 - DNA, 75 bp, synthetic construct
  source 1..75: mol_type = other DNA
acggcaactcaacattgcgcgtctggctgaagtttgcctttggcttactgctgatggcttgtggctttatgttgc

SEQ ID NO: 139699 - DNA, 75 bp, synthetic construct
  source 1..75: mol_type = other DNA
gctgaagtttgcctttggcttactgctgatggcttgtggctttatgttgctggcatttgatgcccggcacgccgc

SEQ ID NO: 139700 - DNA, 75 bp, synthetic construct
  source 1..75: mol_type = other DNA
tgccgaccgcctgctcggcaaccgcactgcagtgattgccggcgcgctgttaatgactcttggccatgtggtgct

SEQ ID NO: 139701 - DNA, 75 bp, synthetic construct
  source 1..75: mol_type = other DNA
acatcaccacattaccgggcaggcagtggccaaaaattgaggcatttattacttggttaagagaacaggtaaaaa

SEQ ID NO: 139702 - DNA, 75 bp, synthetic construct
  source 1..75: mol_type = other DNA
ggcaatctactttgatgacgcgccgtcagcgcaactgactcatcactttctgatggatgaagaaatcctgcctgt

SEQ ID NO: 139703 - DNA, 75 bp, synthetic construct
  source 1..75: mol_type = other DNA
acacgccgatatccgtctatttcgctcaccgtgctcactggtaatgacaatgtcaatttgcaacgtgccggaatc

SEQ ID NO: 139704 - DNA, 75 bp, synthetic construct
  source 1..75: mol_type = other DNA
gagccgctctatcggttgttttgtcagagtttatcgctactctttttatgactattttcatggttaagaaaaaaa

SEQ ID NO: 139705 - DNA, 75 bp, synthetic construct
  source 1..75: mol_type = other DNA
ctaagcatgtttctctttgtaatgactcctgatataatcaatttaatgtatggggacgaatattaccgctcggtt

SEQ ID NO: 139706 - DNA, 75 bp, synthetic construct
  source 1..75: mol_type = other DNA
tgttgtggctgttaccggcgtcgaaatcgacccaaatagcacaaccgttgaggcaaacaaaactgttcagctgac

SEQ ID NO: 139707 - DNA, 75 bp, synthetic construct
  source 1..75: mol_type = other DNA
tcggtggcgcaaaagatgtgccttacgatgaaataattaaagcactgaacttgttacatagtgcgggtgtgaaat

SEQ ID NO: 139708 - DNA, 75 bp, synthetic construct
  source 1..75: mol_type = other DNA
actaccagagaagttcatcctgaccgcttttgataccgatcgtaaagaaaatcagtcatggcaattttctgatta

SEQ ID NO: 139709 - DNA, 75 bp, synthetic construct
  source 1..75: mol_type = other DNA
acgtactctcgacagatacacacggtgtcaatcatgttaacttcgccttactggatctatgcggttacagttttg

SEQ ID NO: 139710 - DNA, 75 bp, synthetic construct
  source 1..75: mol_type = other DNA
atgagcaaaattaaagcaataaggagggggctgaaccgccccgggtttcctggagagtgttttatctgtgaactc

SEQ ID NO: 139711 - DNA, 75 bp, synthetic construct
  source 1..75: mol_type = other DNA
gtaacggcgctgggaacggacagttttagccagcagatgctggacgcctggcacggcgagaacgttgatacttcc

SEQ ID NO: 139712 - DNA, 75 bp, synthetic construct
  source 1..75: mol_type = other DNA
cccgaccagccgcgaaaagctgctttccctgctgcgcgaatgccgcactaacggtggaaaagtgattttcgacaa

SEQ ID NO: 139713 - DNA, 75 bp, synthetic construct
  source 1..75: mol_type = other DNA
gagtacaagcgcaatcacccgctgctggaagccctgacggaatacaatcgcctggtgaaagcgaattatctactg

SEQ ID NO: 139714 - DNA, 75 bp, synthetic construct
  source 1..75: mol_type = other DNA
accttgagcgtgcaatgtcacgcggtcttaagcaagcactggcggagctcgtgaacggcacaggtccactgccgt

SEQ ID NO: 139715 - DNA, 75 bp, synthetic construct
  source 1..75: mol_type = other DNA
tggcgatcatcgtggtattggcccttgctgcccgatttctgtttagcacgcctaccaatatgatacaggagactc

SEQ ID NO: 139716 - DNA, 75 bp, synthetic construct
  source 1..75: mol_type = other DNA
atcttccgccactaccatattcaggaggaccagctgcatgccagtgcggatggtcagaaattcgaaacccatctg

SEQ ID NO: 139717 - DNA, 75 bp, synthetic construct
  source 1..75: mol_type = other DNA
aatgtgatcatgaaaaatcgtaccggtacccgctggcgtctgccgaccaaaagcgctacatctctggtcaacaat

SEQ ID NO: 139718 - DNA, 75 bp, synthetic construct
  source 1..75: mol_type = other DNA
gtcgcccaacttcaacagatgcagacggaaatcgcattcggtggaccactgaagacgatggatacgtcgctcatc

SEQ ID NO: 139719 - DNA, 75 bp, synthetic construct
  source 1..75: mol_type = other DNA
actggccgttgcgttacacaatattcctgaaggtctggcggttgcaggcccggtttatgcagcaacgggttctaa

SEQ ID NO: 139720 - DNA, 75 bp, synthetic construct
  source 1..75: mol_type = other DNA
acctggagctgggatttggtatcgccctggccgtcgcgttgcacaatatccctgaaggtctggcggttgcaggcc

SEQ ID NO: 139721 - DNA, 75 bp, synthetic construct
  source 1..75: mol_type = other DNA
ccattctgctcactctcggtatcagtctgcataacttcccggaagggattgccacctttgttacagcaagcagca

SEQ ID NO: 139722 - DNA, 75 bp, synthetic construct
  source 1..75: mol_type = other DNA
ggtgaatggattgaagagatgaaagaagagtggcgtcacgacgtagatgtgctgaaagcgtgggttgcgaaagcc

SEQ ID NO: 139723 - DNA, 75 bp, synthetic construct
  source 1..75: mol_type = other DNA
cgacgctgccattaccgcatcaggtcattaccgacgggacgcgtttacggcagatcctgtggaacctcatcagta

SEQ ID NO: 139724 - DNA, 75 bp, synthetic construct
  source 1..75: mol_type = other DNA
cggtagcatgatttctccggtggtcatggcggcaatcatggcggcggttgcaggaattatggtggcgctctccgt

SEQ ID NO: 139725 - DNA, 75 bp, synthetic construct
  source 1..75: mol_type = other DNA
gaatcgctttcgcggtacgtttcatttcgttgtcgccttcaaaataggcgacgttgggccgccaggtgcgagctt

SEQ ID NO: 139726 - DNA, 75 bp, synthetic construct
  source 1..75: mol_type = other DNA
gacaaccatgaaaggcaaagtaaaaccgggggataatccgttgttactaaaacgactttatatcttaagaacgga

SEQ ID NO: 139727 - DNA, 75 bp, synthetic construct
  source 1..75: mol_type = other DNA
ccttggtgaccttaacaaaccactgagtaatcagaatctcattacctggaaagacacgccggtctataacgcgcc

SEQ ID NO: 139728 - DNA, 75 bp, synthetic construct
  source 1..75: mol_type = other DNA
tccatgctattgcttaatcttatcaataaagagattaagcacagtgtgaagaacaccgagttccgcaaactctaa

SEQ ID NO: 139729 - DNA, 75 bp, synthetic construct
  source 1..75: mol_type = other DNA
aaatgaatgaaaatgatatttttcttgaagatgaaataaaataccagaggatgaaaaataaagagtgttttggtg

SEQ ID NO: 139730 - DNA, 75 bp, synthetic construct
  source 1..75: mol_type = other DNA
aacacccgttttcgccatacttcgacgaccacctcggtacgcgctttcaataaccagatggcctggctgcgcgac

SEQ ID NO: 139731 - DNA, 75 bp, synthetic construct
  source 1..75: mol_type = other DNA
gtggccaaaaattgaggcatttattacctggctaagagagcaggtatgtcagtcttgtcagtaaccgtgataccg

SEQ ID NO: 139732 - DNA, 75 bp, synthetic construct
  source 1..75: mol_type = other DNA
ggtaatgacaatgtcaatttgcaacgtgccggaatcgatttggcgatctactttgatgatgcgccgtcagcgcaa

SEQ ID NO: 139733 - DNA, 75 bp, synthetic construct
  source 1..75: mol_type = other DNA
cggtagcgcataacgaacagtatcgacagctcattgaaggctacatgctgcgccataaggtgaaaccgggcatta

SEQ ID NO: 139734 - DNA, 75 bp, synthetic construct
  source 1..75: mol_type = other DNA
agcatcaacagggcgtacaggcgactcgtatggcagcgcgatggcggagagcatcaatgatctttacaaagcgga

SEQ ID NO: 139735 - DNA, 75 bp, synthetic construct
  source 1..75: mol_type = other DNA
gtggccaaaaattgaggcatttattacctggctaagagagcaggtatgtcagtcttgtcagtagctgggataccg

SEQ ID NO: 139736 - DNA, 75 bp, synthetic construct
  source 1..75: mol_type = other DNA
gtggccaaaaattgaggcatttattacctggctaagagagcaggtatgtcagtcttgtcagtatccgagataccg

SEQ ID NO: 139737 - DNA, 75 bp, synthetic construct
  source 1..75: mol_type = other DNA
atgaatataaaaattgctgctttaacgctggctattgccagcggtatttctgctcaatgggccatagcagcggat

SEQ ID NO: 139738 - DNA, 75 bp, synthetic construct
  source 1..75: mol_type = other DNA
gttaggtctggtgcgcttctcaatgttgctggcgctggcccttgtcgttcttgccattgtggtacaaatggcggt

SEQ ID NO: 139739 - DNA, 75 bp, synthetic construct
  source 1..75: mol_type = other DNA
taagatggaacggcgcaaggtccagcttgataatcagccggttgatttcaccagcttccttgccgatctggaaaa

SEQ ID NO: 139740 - DNA, 75 bp, synthetic construct
  source 1..75: mol_type = other DNA
gcaaacctgtagcgggatttctgatctgcaggtgtcactgcgtgacttgtggaatccggcaaccagtccggtcag

SEQ ID NO: 139741 - DNA, 75 bp, synthetic construct
  source 1..75: mol_type = other DNA
cagccagtgattttatgcgcggtgcagaggccgcaacatggcgcgtgagtggtttacccgtaggcctgaaaacgt

SEQ ID NO: 139742 - DNA, 75 bp, synthetic construct
  source 1..75: mol_type = other DNA
accaggaatatccgggtctgaaccatgaaatggatgtctggcggcctgcctatgcagccttcgtacagaaattat

SEQ ID NO: 139743 - DNA, 75 bp, synthetic construct
  source 1..75: mol_type = other DNA
aatcaaataactgtgtcgatgcatatgctgactcatttggatactcttcgtttggtgacggttcccagcgattag

SEQ ID NO: 139744 - DNA, 75 bp, synthetic construct
  source 1..75: mol_type = other DNA
tgtcggaaaaaaccatgccgtttgacctgctgacggttctgcccacccgcctggatgttgaagtgaatggcttta

SEQ ID NO: 139745 - DNA, 75 bp, synthetic construct
  source 1..75: mol_type = other DNA
gccgatggcagaaagcgagttgttgcagggcacgctggagccgaccaacgagccttatgccattgccaaaatcgc

SEQ ID NO: 139746 - DNA, 75 bp, synthetic construct
  source 1..75: mol_type = other DNA
tctctataaatatgaatgatgcaattcctcgtgatgagaaagggatcaccgtcagaatagataatattaatggaa

SEQ ID NO: 139747 - DNA, 75 bp, synthetic construct
  source 1..75: mol_type = other DNA
agcaaaattattaaaatccccacttaatagcgatcatgaacttgttatgcgcgcattggatacgtatctgtgcta

SEQ ID NO: 139748 - DNA, 75 bp, synthetic construct
  source 1..75: mol_type = other DNA
taccaatgtcgccattgcccggcatatgtacgagagtgccctgcatattctgcgacgtaaatacgacgaatggca

SEQ ID NO: 139749 - DNA, 75 bp, synthetic construct
  source 1..75: mol_type = other DNA
cgccatcaggcggcagctcgaacagcgcggtgatgtggaactggtattacgcacccgcgacgagctgaacctgct

SEQ ID NO: 139750 - DNA, 75 bp, synthetic construct
  source 1..75: mol_type = other DNA
cggtatggcgtgaagtggccttgtgggtatgacctgaatatcagcagtcagggagacaacttcattcaggttgat

SEQ ID NO: 139751 - DNA, 75 bp, synthetic construct
  source 1..75: mol_type = other DNA
atttctgtggctggcagcgatatgagcgtggcgagcttgttgatgtgctgtggggggagctggaatggtcttccc

SEQ ID NO: 139752 - DNA, 75 bp, synthetic construct
  source 1..75: mol_type = other DNA
atgagtaaacaacgcatttttattgctggccatcgcgggatggtcggttctgccataaagcgacagctcgaacag

SEQ ID NO: 139753 - DNA, 75 bp, synthetic construct
  source 1..75: mol_type = other DNA
tggtacgccgcgcaaactgctggatgtgacgcgcctgcatcagcttggctggtatcacgaaatctcactggaagc

SEQ ID NO: 139754 - DNA, 75 bp, synthetic construct
  source 1..75: mol_type = other DNA
aaaacacccagccgatgctgtcgcacattaacgtcggcacgggcgttgactgcactatccgcgagctggcgcaaa

SEQ ID NO: 139755 - DNA, 75 bp, synthetic construct
  source 1..75: mol_type = other DNA
atggttaaaacccaacgtgttgtgatcactcccggcgaacccgccgggagtggcccggacttagttgtccaactc

SEQ ID NO: 139756 - DNA, 75 bp, synthetic construct
  source 1..75: mol_type = other DNA
aaaaaagtggtgatgatgctggcgaccgaagaacttcgcgtggcgctggcaacgacgcatttaccgctgcgcgat

SEQ ID NO: 139757 - DNA, 75 bp, synthetic construct
  source 1..75: mol_type = other DNA
cgggccgcatgacaacttccacccgagtaattcgcatgtgatccctgcattgctgcgtcgcttccacgaggcgac

SEQ ID NO: 139758 - DNA, 75 bp, synthetic construct
  source 1..75: mol_type = other DNA
accagctttgaccgcctcaccgcagccaataaaaaaaccaccgaacaactggcccaggcgaaagaacaggcccgg

SEQ ID NO: 139759 - DNA, 75 bp, synthetic construct
  source 1..75: mol_type = other DNA
gaatggtctgcgcgatgatagcggcaaccgcacagctcagtttgctgagatgcaaaaggccatcaaagacgcttc

SEQ ID NO: 139760 - DNA, 75 bp, synthetic construct
  source 1..75: mol_type = other DNA
ccggtcgaactggttgtttgtgccgatgccttttttacttctccttaccgaccgggactagcgatgctcggtttg

SEQ ID NO: 139761 - DNA, 75 bp, synthetic construct
  source 1..75: mol_type = other DNA
gcgcggagagctcgttgatgtgctgtggggggaactggaatggtcttccccgacagatgatgatgagctgccgga

SEQ ID NO: 139762 - DNA, 75 bp, synthetic construct
  source 1..75: mol_type = other DNA
atgccaaactggtgctcgaatcgtatgtatttttctggtgaaccgacacagatcgctgagattaaacgactggcc

SEQ ID NO: 139763 - DNA, 75 bp, synthetic construct
  source 1..75: mol_type = other DNA
ccgacagatgacgatgagctgccggaagtcaccggacctgcgtggatagtcgacaaggtggcgcattacggtgga

SEQ ID NO: 139764 - DNA, 75 bp, synthetic construct
  source 1..75: mol_type = other DNA
ccgcctggatattgaagtgaatggctttaacggcggtgttctgaacggtgttccttctgcatatcactggtatac

SEQ ID NO: 139765 - DNA, 75 bp, synthetic construct
  source 1..75: mol_type = other DNA
cgcaaaaagaggtgactggtgtggcttctggagtaacgaggatgtatcggtgtggtggaaccgtctgtgtgacaa

SEQ ID NO: 139766 - DNA, 75 bp, synthetic construct
  source 1..75: mol_type = other DNA
aaccatcactgtgcatttcaccgcaaaaagaggtgactggtgtgacatctggggtaacgaggatgtatcggttgc

SEQ ID NO: 139767 - DNA, 75 bp, synthetic construct
  source 1..75: mol_type = other DNA
gtaagcagcgtttcaaggatgtcccattggttgacctgctggaccgtgaggataaaaccgattgtatggatgttg

SEQ ID NO: 139768 - DNA, 75 bp, synthetic construct
  source 1..75: mol_type = other DNA
taatggccaagcctctgcaactctatctgttagtgctccccaaaaaacaagcattactgaaggcaaacactgcgt

SEQ ID NO: 139769 - DNA, 75 bp, synthetic construct
  source 1..75: mol_type = other DNA
tctggtaagccgtatcattattatgttaccgccttggctgctatcactggggcgagactcaatgaaatagcccaa

SEQ ID NO: 139770 - DNA, 75 bp, synthetic construct
  source 1..75: mol_type = other DNA
tgttgctggatgaacaaaactgcctgatgctgcatgaactctggttacagggcggtactggccagcgtcgctggg

SEQ ID NO: 139771 - DNA, 75 bp, synthetic construct
  source 1..75: mol_type = other DNA
atgctgcatgaactctggctgcagagcggtactggccggcgtcgctgggaagaattaccggatgatgccagggaa

SEQ ID NO: 139772 - DNA, 75 bp, synthetic construct
  source 1..75: mol_type = other DNA
tggaaccgtctgtgtgacaacgtactgccggaaaaaaccatgccgtttgacctgctgacggttctgccgacccgc

SEQ ID NO: 139773 - DNA, 75 bp, synthetic construct
  source 1..75: mol_type = other DNA
gccacctttgtcacggcgagcagcaacctggagctgggatttggcatcgctctggccgtagcgttgcacaatatt

SEQ ID NO: 139774 - DNA, 75 bp, synthetic construct
  source 1..75: mol_type = other DNA
gaaattgatcccaataataaccccagctatggcgtgctatgtggaatgtcagtaatggggttcagtttagtgctg

SEQ ID NO: 139775 - DNA, 75 bp, synthetic construct
  source 1..75: mol_type = other DNA
attggtatctacctggaaccttcccgcgctcagccggtgccttcggcctctctcaccggtcagtaccggatggag

SEQ ID NO: 139776 - DNA, 75 bp, synthetic construct
  source 1..75: mol_type = other DNA
catgaagcgcattgaagcaggagatagtcagccacttatagattatatagatggattttatgctgctggtgcaga

SEQ ID NO: 139777 - DNA, 75 bp, synthetic construct
  source 1..75: mol_type = other DNA
gtcggccgtcaccgggtgacgctgtgtgacaacgacattaccgtttaccggtttgccccggggaataaggcgtac

SEQ ID NO: 139778 - DNA, 75 bp, synthetic construct
  source 1..75: mol_type = other DNA
gacgccggataaagccggctggcaatgcgtgcctttttcattatctgaactgaactgtcacggtgagtttgcccg

SEQ ID NO: 139779 - DNA, 75 bp, synthetic construct
  source 1..75: mol_type = other DNA
acatcaccacattaccgggcaggcagtggccaaaaattgaggcatttattacctggttaagagaacaggtaagtc

SEQ ID NO: 139780 - DNA, 75 bp, synthetic construct
  source 1..75: mol_type = other DNA
tcaccgtgctcaccggtaatgacaacattaatctgcaacgtgccggggtcgatttagcgatttactttgatgatg

SEQ ID NO: 139781 - DNA, 75 bp, synthetic construct
  source 1..75: mol_type = other DNA
acatcaccacattaccgggcaggcagtggccaaaaattgaggcatttattacctggctaagagagcaggtatgtc

SEQ ID NO: 139782 - DNA, 75 bp, synthetic construct
  source 1..75: mol_type = other DNA
ggtgtactgctggatgagcaaaactgcctgatgctgcatgaactctggctgcagagcggtactggacagcgtcgc

SEQ ID NO: 139783 - DNA, 75 bp, synthetic construct
  source 1..75: mol_type = other DNA
ggatgtatcggtgtggtggaaccgtctgtgtgacaacgtactgccggaaaaaaccatgccgtttgacctgctgac

SEQ ID NO: 139784 - DNA, 75 bp, synthetic construct
  source 1..75: mol_type = other DNA
gatgaagaaatcctgccagtatgtagcccggaatacgctcaaagacatgctttaaccaacacggtaattaacctg

SEQ ID NO: 139785 - DNA, 75 bp, synthetic construct
  source 1..75: mol_type = other DNA
ctggccatcgcgggatggtcggttctgccatcaggcggcagctcgaacagcgcggtgatgtggaactggtattac

SEQ ID NO: 139786 - DNA, 75 bp, synthetic construct
  source 1..75: mol_type = other DNA
ggcggcggcgagcattcacgtgatggagctggcgcatgaagtctggctggagaacacccagccgatgctgtcgca

SEQ ID NO: 139787 - DNA, 75 bp, synthetic construct
  source 1..75: mol_type = other DNA
ttgctgggcataaaggtatggttggttcagcaatcgtaagacaattgaaaaacagagacgacattgagctcgtac

SEQ ID NO: 139788 - DNA, 75 bp, synthetic construct
  source 1..75: mol_type = other DNA
cggattaaagtcggaaggctggcccgtgtggatacgcacgaaatcactgtatacgcacttcatgaaaagccagta

SEQ ID NO: 139789 - DNA, 75 bp, synthetic construct
  source 1..75: mol_type = other DNA
cggtatggcgtgaagtggcctgtggggtatggactgaatatcagcagtcagggagaaaacttcattcaggtggat

SEQ ID NO: 139790 - DNA, 75 bp, synthetic construct
  source 1..75: mol_type = other DNA
gtgttctgaacggtgttccttctgcatatcactggtatacagaacggtatggcgtgaagtggccttgtgggtatg

SEQ ID NO: 139791 - DNA, 75 bp, synthetic construct
  source 1..75: mol_type = other DNA
aaatgaccaccttgtttggtgcagtattgctgttgttgattccgataatgctgattcggcaagtgattgtcgaac

SEQ ID NO: 139792 - DNA, 75 bp, synthetic construct
  source 1..75: mol_type = other DNA
tggcgttagttactggcgtggtccatccgggcgatattccggtggtgtggaatatcgtctggaacgcgacggctg

SEQ ID NO: 139793 - DNA, 75 bp, synthetic construct
  source 1..75: mol_type = other DNA
tattacttccgtacagggattatcatgaccctgccggtgctttttgtgacgctggctgcgctggcgctacgtctc

SEQ ID NO: 139794 - DNA, 75 bp, synthetic construct
  source 1..75: mol_type = other DNA
tcctaaccctgtacagtccaccgccagcgagtttaggacctccggcggtggttacattccatcaatcaaggaggc

SEQ ID NO: 139795 - DNA, 75 bp, synthetic construct
  source 1..75: mol_type = other DNA
ctgacaatcgaggcgatacagacgccgaacgcgtctttttttgtatcggcgcacacgcacaccttatcaatggtg

SEQ ID NO: 139796 - DNA, 75 bp, synthetic construct
  source 1..75: mol_type = other DNA
gccggagaaaaaaaccgcttgatcgccaccagcaaaaatggctatgattcccgcgcacctcataaaacgggtgtc

SEQ ID NO: 139797 - DNA, 75 bp, synthetic construct
  source 1..75: mol_type = other DNA
ttatgagcacggaatatcacttattaacgaaaaatatgctcgattgattactgaaatattaactcccaatgagag

SEQ ID NO: 139798 - DNA, 75 bp, synthetic construct
  source 1..75: mol_type = other DNA
tgtttaccaactggctcaactattacgtctaccagatcacgccatacgatctacggcacatgaatccaacgctgg

SEQ ID NO: 139799 - DNA, 75 bp, synthetic construct
  source 1..75: mol_type = other DNA
caggtgctggaatggtcgaaagatcacgtcacctcaacactttttgtctgttgggcggtacaagctgcgctcaat

SEQ ID NO: 139800 - DNA, 75 bp, synthetic construct
  source 1..75: mol_type = other DNA
gatgttgcatctctatttccgcaaagatattccgcagaactacgacatggcgctgctgaaatctcccgcagaagc

SEQ ID NO: 139801 - DNA, 75 bp, synthetic construct
  source 1..75: mol_type = other DNA
ggttggcgcgttgtccattgatggcagcacggcatctggtgtcatcaaagaagcgatggtttatgccaacgtgat

SEQ ID NO: 139802 - DNA, 75 bp, synthetic construct
  source 1..75: mol_type = other DNA
tccgggtgatattccggtggtgtggaatatcgtctggaacgcgacggcggcgtttattgccgtcattatcatcag

SEQ ID NO: 139803 - DNA, 75 bp, synthetic construct
  source 1..75: mol_type = other DNA
caactgattgatcaggctaagcgcacgccggtgcggcagtttcgcggcatagtggctccgggcagcggcgaagag

SEQ ID NO: 139804 - DNA, 75 bp, synthetic construct
  source 1..75: mol_type = other DNA
gacgaagaagggcgcttgctgcatcgtccactggcggagcatgtggttaaccgcatcagtggtcaaccggctatt

SEQ ID NO: 139805 - DNA, 75 bp, synthetic construct
  source 1..75: mol_type = other DNA
acgacggtacgccgctgcctgtagtagcgaagggcgatgagctgctgtgcgagaaaggtgaagtggtggagcggc

SEQ ID NO: 139806 - DNA, 75 bp, synthetic construct
  source 1..75: mol_type = other DNA
ctgtcagccggcctgttgtgacagcccgtcccgggcagaaactgctggcaccccgcccgctgtttactgccgccc

SEQ ID NO: 139807 - DNA, 75 bp, synthetic construct
  source 1..75: mol_type = other DNA
ccgcatcagcggccaaccggcgattgtcaccagttataacgataaacgggaatcagaatccgcgccgttgccgtt

SEQ ID NO: 139808 - DNA, 75 bp, synthetic construct
  source 1..75: mol_type = other DNA
cgcgctggaacctggccgatctccccattgtcccggaaaagtggcaattacagccacgaccctccgtgaccaaac

SEQ ID NO: 139809 - DNA, 75 bp, synthetic construct
  source 1..75: mol_type = other DNA
gcgtgtggaccaactgttatcacgcttacccggcacatgcggcgtttggcggctacaaacaatcaggcattggcc

SEQ ID NO: 139810 - DNA, 75 bp, synthetic construct
  source 1..75: mol_type = other DNA
gctgaaacccgcacgtcttaccccgctttctgtactgctgctaatggaaatcgtcggtgatttactgccgccggg

SEQ ID NO: 139811 - DNA, 75 bp, synthetic construct
  source 1..75: mol_type = other DNA
cgcgctggaatcttgcggatttgccgattgtcccggaaaagtggcaattacagccccgaccctccgtgactaaac

SEQ ID NO: 139812 - DNA, 75 bp, synthetic construct
  source 1..75: mol_type = other DNA
agacggctgcattatggatagcgccttatattgataatcaggatgtttatcatcagccatccagtgtgttctttg

SEQ ID NO: 139813 - DNA, 75 bp, synthetic construct
  source 1..75: mol_type = other DNA
aagggcgggactcgcacaacctgaataaacccgatgtaaaaaacctgttgctcgccactgccagccagggctatg

SEQ ID NO: 139814 - DNA, 75 bp, synthetic construct
  source 1..75: mol_type = other DNA
tccagggtgataagcgcgatttattaaaatcactacttgaagcgaaagggatgaaggtaaaactcgcaggcggct

SEQ ID NO: 139815 - DNA, 75 bp, synthetic construct
  source 1..75: mol_type = other DNA
aactgacaaaactggcagcggaactgaagaaaaaatgcggctgcggcggagcagttaaagatggaattattgaaa

SEQ ID NO: 139816 - DNA, 75 bp, synthetic construct
  source 1..75: mol_type = other DNA
atgagtgattccaacagccgtctggtctactcaacagaaaccgggcgtattgatgagcccaaagcggccccagta

SEQ ID NO: 139817 - DNA, 75 bp, synthetic construct
  source 1..75: mol_type = other DNA
atgattaacgatgcggatatcgatttttatatttctttcgataacgaaaaagtcggtgaactgcaggcaaaagcc

SEQ ID NO: 139818 - DNA, 75 bp, synthetic construct
  source 1..75: mol_type = other DNA
ctaacggaatatctttctggcgtactcaacgtgctggcggataacggcctgtgggcggcgacgctcggtaccgga

SEQ ID NO: 139819 - DNA, 75 bp, synthetic construct
  source 1..75: mol_type = other DNA
atggcagtactacggcgacccgctgggctatccccggattattgccgccaatccgcacgtggccatcacgccggt

SEQ ID NO: 139820 - DNA, 75 bp, synthetic construct
  source 1..75: mol_type = other DNA
gggcaccactttgagcacgactaaccatgatcaccacatttacgtcttgatgggcgtatcgggcagcggcaaatc

SEQ ID NO: 139821 - DNA, 75 bp, synthetic construct
  source 1..75: mol_type = other DNA
aagtgtcactgatcgtctgttccgcgctgaaaaagcactatcgcgacctgctgcgtgaaggcaatccaaatctct

SEQ ID NO: 139822 - DNA, 75 bp, synthetic construct
  source 1..75: mol_type = other DNA
gcctgatgttgcagaagttgccggatatgctcatcttgatgctgctattcgtgcccgccaccagtcggcggttct

SEQ ID NO: 139823 - DNA, 75 bp, synthetic construct
  source 1..75: mol_type = other DNA
aaatattcctacacttgatgtacttattctagatgatggattcgcatttacggttgaacagtaccagttaaaata

SEQ ID NO: 139824 - DNA, 75 bp, synthetic construct
  source 1..75: mol_type = other DNA
atactggaatgcgagaaaaaacatcatgaacgaatggggaggagacactcagctaatacctaaagagagtgagct

SEQ ID NO: 139825 - DNA, 75 bp, synthetic construct
  source 1..75: mol_type = other DNA
aacaaaaagacaccatcgcccataaagaatatttaaaaatttccgacaccaatttacttggacatatacacattg

SEQ ID NO: 139826 - DNA, 75 bp, synthetic construct
  source 1..75: mol_type = other DNA
tggtgaatatagtctcggcggacttctttggactgggctttactgagtatgcctcggtaatggtgccagtggata

SEQ ID NO: 139827 - DNA, 75 bp, synthetic construct
  source 1..75: mol_type = other DNA
tattaaagcattggttttagtgatttttctgtttttatttttgttaaaaaaaacacaaacacccttgtatgatat

SEQ ID NO: 139828 - DNA, 75 bp, synthetic construct
  source 1..75: mol_type = other DNA
gcatccgtcatggtgccggtgaacattgcctccattgcggccacgctggtgatgcttcatctctttttccgcagg

SEQ ID NO: 139829 - DNA, 75 bp, synthetic construct
  source 1..75: mol_type = other DNA
ttgattcgtgattacaccgatctggaaattctggcggagacagaagaaggggacgcatatctgtttgccagcaaa

SEQ ID NO: 139830 - DNA, 75 bp, synthetic construct
  source 1..75: mol_type = other DNA
ggttggtgctctctctattgatagcagcactgcaacaggcgttatcaaagaggcgatgatttttgccaacgtgat

SEQ ID NO: 139831 - DNA, 75 bp, synthetic construct
  source 1..75: mol_type = other DNA
gcctcggtaatggtgccagtggatattgccgctattatcgccacgctggtgatgctgcatctgttcttccgcaaa

SEQ ID NO: 139832 - DNA, 75 bp, synthetic construct
  source 1..75: mol_type = other DNA
gttatgggcagcaacgttcggcaccggcttcctgaccgcgttcctgtcgtcggtgatgaacaatatgccgacggt

SEQ ID NO: 139833 - DNA, 75 bp, synthetic construct
  source 1..75: mol_type = other DNA
tgctgcttgtcggtttcttcgttctggagccgctggggatccctgtcagcgcgatagcagctgctggcgcagcag

SEQ ID NO: 139834 - DNA, 75 bp, synthetic construct
  source 1..75: mol_type = other DNA
gcaattcaggcattaagcgcgcaaggtttatcagggaaagtggctatttccggccaggatgcggatctcgcggga

SEQ ID NO: 139835 - DNA, 75 bp, synthetic construct
  source 1..75: mol_type = other DNA
gctgctgttcacgtatatcgttctgctgggtgccgcagtggcggcgctgtttgccaatgacggagccgcgctaat

SEQ ID NO: 139836 - DNA, 75 bp, synthetic construct
  source 1..75: mol_type = other DNA
ctgactgattacctttccgccgccctgaaccggtttgcagagcacggcgtatggggcgcaacgctcggcaccggc

SEQ ID NO: 139837 - DNA, 75 bp, synthetic construct
  source 1..75: mol_type = other DNA
tcctgttattgctgcttgtgggtttctttgttctggagccgcaggggatcccggtcagtgcgatagcggcggctg

SEQ ID NO: 139838 - DNA, 75 bp, synthetic construct
  source 1..75: mol_type = other DNA
cctgatgtacgagctggatgcctttctggggcgctccggaccggctgcgccgtggctgtccgtcgctgcggcaac

SEQ ID NO: 139839 - DNA, 75 bp, synthetic construct
  source 1..75: mol_type = other DNA
aaactataagcaacatgaactcttatgctccctataatcagataaataaaaaaagtaacttacttagaaaggttc

SEQ ID NO: 139840 - DNA, 75 bp, synthetic construct
  source 1..75: mol_type = other DNA
agtgctgaatacctctgtgcgacgagtgctgacgtttctggaacagcacggcggggggcggatagccgagcttta

SEQ ID NO: 139841 - DNA, 75 bp, synthetic construct
  source 1..75: mol_type = other DNA
gtgaattgcctggcaccgatgatcaccctggaaaaaatcgtgcgtggcaaacgtactgcagtcagtgagccattg

SEQ ID NO: 139842 - DNA, 75 bp, synthetic construct
  source 1..75: mol_type = other DNA
ccgttatcgcctggtgtgcgcaactggccttaggcggctggcaaatttctcgttttaaccgtgccttcgatgcac

SEQ ID NO: 139843 - DNA, 75 bp, synthetic construct
  source 1..75: mol_type = other DNA
atgccagtccgacttaataccattcccgacgcagaaccctatcccgtaccgccagcccgaattaagtggctgaca

SEQ ID NO: 139844 - DNA, 75 bp, synthetic construct
  source 1..75: mol_type = other DNA
acaagaaacgcttgcgctggcggtaacgaaacatcatcagcaggcactggaaatcgcgcgcgcattacaccaaca

SEQ ID NO: 139845 - DNA, 75 bp, synthetic construct
  source 1..75: mol_type = other DNA
cttgaacagcgcatctcaaaacagatttcgctggcacgtaaacatcacgtcagccctgaggcattgccacagtat

SEQ ID NO: 139846 - DNA, 75 bp, synthetic construct
  source 1..75: mol_type = other DNA
acgccaacattatgcagctgagctggcacacctgatcaccgacagtatgcatgcactctccatgccacatgggca

SEQ ID NO: 139847 - DNA, 75 bp, synthetic construct
  source 1..75: mol_type = other DNA
acgccagcattatgcaaatgagttggcacagctgatcaccaaaagtatgcatgcgctctctatgccacatgggca

SEQ ID NO: 139848 - DNA, 75 bp, synthetic construct
  source 1..75: mol_type = other DNA
tacgccactactgcgatcgtctggatctcgaccctaaccggttgttcgaacttgaacaacgtatctcaaaacaga

SEQ ID NO: 139849 - DNA, 75 bp, synthetic construct
  source 1..75: mol_type = other DNA
ggtcgctcacgaggttttatcaacggtacagctgttcctctgtcacaactgcgcgaactgggtcagttgctgatt

SEQ ID NO: 139850 - DNA, 75 bp, synthetic construct
  source 1..75: mol_type = other DNA
agcggtgacaaccatgaaaggcaaagtaaaaccgggggataatccgttgttactaaaacgactggtaatgactcc

SEQ ID NO: 139851 - DNA, 75 bp, synthetic construct
  source 1..75: mol_type = other DNA
cagattatttcggtcatcccaaccacagccgattattatgaattcaattttggttttgctacggggtatattgat

SEQ ID NO: 139852 - DNA, 75 bp, synthetic construct
  source 1..75: mol_type = other DNA
ggatatggaagatgcaccgcatcactggcatttcattaatatgcgtatctggccgcgagtggttgatggggtagg

SEQ ID NO: 139853 - DNA, 75 bp, synthetic construct
  source 1..75: mol_type = other DNA
atggcgcttttgctacaatacaagcgttgtttcaccctcggttattttttcatgtataaacaagctgttattctc

SEQ ID NO: 139854 - DNA, 75 bp, synthetic construct
  source 1..75: mol_type = other DNA
gtatctttcttatccgtttggcggatttaatgacaaagcggttaaagcggcaaatgatgccgggtttcatctggc

SEQ ID NO: 139855 - DNA, 75 bp, synthetic construct
  source 1..75: mol_type = other DNA
acccattttttacatcgggttgatggttatcgccgacccatattacttagccgcagtgagcataatattttgttt

SEQ ID NO: 139856 - DNA, 75 bp, synthetic construct
  source 1..75: mol_type = other DNA
cgcgcgagtgaaaaaactggtccatcaactggcggacaccacctgttcggtgctgctgatccccgatgtttttac

SEQ ID NO: 139857 - DNA, 75 bp, synthetic construct
  source 1..75: mol_type = other DNA
ttatacattgttgctcacggcaatacatctgtcattggcactggctcaagaacaggccccacgttaactccggtg

SEQ ID NO: 139858 - DNA, 75 bp, synthetic construct
  source 1..75: mol_type = other DNA
atatggaggagaatgattcatttctcaaaaatgaggttgaataccaaaataaaaaaaatataaaatgttttggtg

SEQ ID NO: 139859 - DNA, 75 bp, synthetic construct
  source 1..75: mol_type = other DNA
ggggagtgaggataactgccgtgcggttgctgctgctgtacgcgatgccggggggtgggtggcattaggatcgga

SEQ ID NO: 139860 - DNA, 75 bp, synthetic construct
  source 1..75: mol_type = other DNA
cgtggattcgtcatacacagactcagcgcttaccgatccgtaggaagtaagccaaatacacggaaaacggaaaca

SEQ ID NO: 139861 - DNA, 75 bp, synthetic construct
  source 1..75: mol_type = other DNA
gcggaagatattgtgctggcgacgcttattctgctgctgatctccccggtgctgtgctgtattgctctggcggta

SEQ ID NO: 139862 - DNA, 75 bp, synthetic construct
  source 1..75: mol_type = other DNA
ggttgccctgaacaagacccgcccttacaccgccagcgagacgctgctgctggatgtgtcccgtgccatctaccc

SEQ ID NO: 139863 - DNA, 75 bp, synthetic construct
  source 1..75: mol_type = other DNA
tcttccgtcagacgcgctacggcatggacggtaagccgattatggtgtggaaattccgctccatgaaggtgatgg

SEQ ID NO: 139864 - DNA, 75 bp, synthetic construct
  source 1..75: mol_type = other DNA
tatcaatgtgttgaccggcggcatgtcgatcgtcggcccacgtcctcatgcggtggcgcacaacgaacagtatcg

SEQ ID NO: 139865 - DNA, 75 bp, synthetic construct
  source 1..75: mol_type = other DNA
gcgtgccccagtaccggttgttgtggttggtaatctcaccgcaggtggcaacggaaaaactccggtcgtagtctg

SEQ ID NO: 139866 - DNA, 75 bp, synthetic construct
  source 1..75: mol_type = other DNA
gttgcacaacttgaacatgtggtggcaatggcggggattggtcatccgccgcgcttttttgccacgctgaagatg

SEQ ID NO: 139867 - DNA, 75 bp, synthetic construct
  source 1..75: mol_type = other DNA
aatctcctctgtggcggctgttgctgccactctcctggctgtatggcctggtgagtggcgctatccgcctttgct

SEQ ID NO: 139868 - DNA, 75 bp, synthetic construct
  source 1..75: mol_type = other DNA
agcttgatggccgtctttacgggagtacctccacagtacctgtcgtactttgtagtggatcggtaattcaggaca

SEQ ID NO: 139869 - DNA, 75 bp, synthetic construct
  source 1..75: mol_type = other DNA
aagaagaagtgctcaaaggcatgaccgataacctgctgctggcgggccgctgccgctatccgcgtaaactggaag

SEQ ID NO: 139870 - DNA, 75 bp, synthetic construct
  source 1..75: mol_type = other DNA
ccaggcaatggcctgccgtacttcgctggaagtggaacacctgctggcgcaattccgcatgacccaacaggacgc

SEQ ID NO: 139871 - DNA, 75 bp, synthetic construct
  source 1..75: mol_type = other DNA
ccaggcaacactttcacggaaaaaaagagattacataagataaaagaatctttatctaaaaataattatattttt

SEQ ID NO: 139872 - DNA, 75 bp, synthetic construct
  source 1..75: mol_type = other DNA
caggatattcttcacaacaatcatttagtcgtgcattcaaaaaagagtttttgttatcccctatgaaatacagga

SEQ ID NO: 139873 - DNA, 75 bp, synthetic construct
  source 1..75: mol_type = other DNA
cctgccaatgtatggcgtattactcaatatgctgttgaaaagactggcagataaatccgaaatcaacgctttgca

SEQ ID NO: 139874 - DNA, 75 bp, synthetic construct
  source 1..75: mol_type = other DNA
cgcgaactggattatctggctgaccgtaaaatggttgatctggagaaaaaaccttctggcgactggtttgctgac

SEQ ID NO: 139875 - DNA, 75 bp, synthetic construct
  source 1..75: mol_type = other DNA
atgtttggctatcgcagtaacgtgccaaaagtgcgcatacccacagcccgactggtcgtgcgtctggtgcatgat

SEQ ID NO: 139876 - DNA, 75 bp, synthetic construct
  source 1..75: mol_type = other DNA
ggcaggccaggttaagcatgattaatgaatttcataaacaaggttctgcattctattttgggttgttcgacccgg

SEQ ID NO: 139877 - DNA, 75 bp, synthetic construct
  source 1..75: mol_type = other DNA
ctgctcgcgctgacctgtgcgcccgtttttcactgaaagatacgccagcggctctgcgctggctggaagaaaacc

SEQ ID NO: 139878 - DNA, 75 bp, synthetic construct
  source 1..75: mol_type = other DNA
cttgctgtttacctggattgtcctgctcggtgccgccgttgccgccctgtttgccaatgatggcgcggcgcttat

SEQ ID NO: 139879 - DNA, 75 bp, synthetic construct
  source 1..75: mol_type = other DNA
cgcgagctggattatctgtctgaccgtaagatggttgatctggagaagaaaccctccggtgactggtttgcggat

SEQ ID NO: 139880 - DNA, 75 bp, synthetic construct
  source 1..75: mol_type = other DNA
aatcgcctttgtggcggctgttgctgccactctcctggctgtatggcttggtgagtggtgcaatccgtctttgct

SEQ ID NO: 139881 - DNA, 75 bp, synthetic construct
  source 1..75: mol_type = other DNA
gtccgtactgatgcggttaaagccattctggcgcactatcccgatgtacagattatcgtgactgatgacggttta

SEQ ID NO: 139882 - DNA, 75 bp, synthetic construct
  source 1..75: mol_type = other DNA
gcgcagggcgtttaaaatcggttgatgcggtaatcgtcaatggcggcgtaccgcgtgatggtgaaattccgatga

SEQ ID NO: 139883 - DNA, 75 bp, synthetic construct
  source 1..75: mol_type = other DNA
tcttttcacgcctgctatctcggttattcgatcgggcaaaaatggcagggtaaagggctaatgtttgaagccctc

SEQ ID NO: 139884 - DNA, 75 bp, synthetic construct
  source 1..75: mol_type = other DNA
ttctggcgcagcatcctgatgtacaactcatcgtgactgacgacggtctacagcattatcgcctggcgcgagatg

SEQ ID NO: 139885 - DNA, 75 bp, synthetic construct
  source 1..75: mol_type = other DNA
gttgacgcacagcttttaggtgatgaaccagcgaaactgcttgcgcaactaacctcgctggcttctggcaactag

SEQ ID NO: 139886 - DNA, 75 bp, synthetic construct
  source 1..75: mol_type = other DNA
aaagtcaccacctttaccgagctggcgcaactgcctgcgctctggaaggcacgcggctgggatatagcgcgttaa

SEQ ID NO: 139887 - DNA, 75 bp, synthetic construct
  source 1..75: mol_type = other DNA
ttaccgaaacgcaagcagatgagctgatttttccgtcccttcgcagggcaaacctggcgctgcgcagggcgaaaa

SEQ ID NO: 139888 - DNA, 75 bp, synthetic construct
  source 1..75: mol_type = other DNA
gggttaacaaccagtcgcattggcgtagtccaccacgcgcctattcgcctgagaattaaagctaaaagtagctgg

SEQ ID NO: 139889 - DNA, 75 bp, synthetic construct
  source 1..75: mol_type = other DNA
ttcttacgttggtagtatcattaaccagcgtgcttacgcgtctgtctcctgttcagataccacttcctttaatcc

SEQ ID NO: 139890 - DNA, 75 bp, synthetic construct
  source 1..75: mol_type = other DNA
atggaagcatggaataaccaacaaggtggtaataaatatcaggttattttcgatggcaaaatttatgaaaatgcc

SEQ ID NO: 139891 - DNA, 75 bp, synthetic construct
  source 1..75: mol_type = other DNA
ttggctttggtaaaagttatcttctgcgccgtgaaagcgtggcgaatcatcggcatcaatatagtcagcgattga

SEQ ID NO: 139892 - DNA, 75 bp, synthetic construct
  source 1..75: mol_type = other DNA
actgtccgggtgatgcgaaaggcaatgatgccagcaacccatggcgttatgttcgtgccgctacggcaacggaaa

SEQ ID NO: 139893 - DNA, 75 bp, synthetic construct
  source 1..75: mol_type = other DNA
aaattatgcaggaaggtacatggaagaagcccgaaacactgatgcgttatcttcgccgtggcggtgtgacagtag

SEQ ID NO: 139894 - DNA, 75 bp, synthetic construct
  source 1..75: mol_type = other DNA
gcgagcaccggcggctgcttgagcgctgtgacggcaggcagctggcggcgtggatgcggcagacctgcctggacg

SEQ ID NO: 139895 - DNA, 75 bp, synthetic construct
  source 1..75: mol_type = other DNA
accggacgtggacaggccatagtgcgcgtgttggtgcggcaattgatatggctgagaaacaggtgtcaatggtcg

SEQ ID NO: 139896 - DNA, 75 bp, synthetic construct
  source 1..75: mol_type = other DNA
ccggaaacacttatgcggtatctgcgccgtggcggcgtgtctgtgggggctaatagccgcctgatggattcataa

SEQ ID NO: 139897 - DNA, 75 bp, synthetic construct
  source 1..75: mol_type = other DNA
tgacctgaaacttctcgacgtgctgctctcccgctctgacaggctggtggatctgcgcaaccgggcttttctgtt

SEQ ID NO: 139898 - DNA, 75 bp, synthetic construct
  source 1..75: mol_type = other DNA
atgtggaaccttttgcggcgaacccgaaaaaaccagaaatcaggacgtgacgtaagagaagtgggctggcggtcc

SEQ ID NO: 139899 - DNA, 75 bp, synthetic construct
  source 1..75: mol_type = other DNA
tggcatcgtgcggcctgacggtggcgcagatgcaaagccagatggacccggtatacacgccggcgcgaaaaattc

SEQ ID NO: 139900 - DNA, 75 bp, synthetic construct
  source 1..75: mol_type = other DNA
cgacaggccgtggcgatgttggaaacattacgcgaagagcaaggcagcgttctggtccattgcgcattgggatta

SEQ ID NO: 139901 - DNA, 75 bp, synthetic construct
  source 1..75: mol_type = other DNA
ccagcgtacggaaaaaacattttccctgccggtgatgctctaccgcggtgtgttcagagccggtgaaacctacca

SEQ ID NO: 139902 - DNA, 75 bp, synthetic construct
  source 1..75: mol_type = other DNA
gcgatgatgtgcgtccgatgcttgagcagatggtgaaggaggcggtaagccatatccctgttccgcgcgacggtc

SEQ ID NO: 139903 - DNA, 75 bp, synthetic construct
  source 1..75: mol_type = other DNA
tggcagtttatatcagctttattttactgatcgccttcgcgcccggttggctgggcaccccgctgaatccgaaca

SEQ ID NO: 139904 - DNA, 75 bp, synthetic construct
  source 1..75: mol_type = other DNA
cggtaacaccagatactccggttaccccaactccggataacaacgagccatcaacaccagcggatagcagtaacg

SEQ ID NO: 139905 - DNA, 75 bp, synthetic construct
  source 1..75: mol_type = other DNA
atcataacgtcaaccacttcacgctggcgtttgtggtgagtaaagatgcgaacacctgtctgccgacatggggta

SEQ ID NO: 139906 - DNA, 75 bp, synthetic construct
  source 1..75: mol_type = other DNA
ccaataacccatggcgtctcgtgcgtacagctaccgctgcggaattgagtcagtacggtaacccgactacctgtg

SEQ ID NO: 139907 - DNA, 75 bp, synthetic construct
  source 1..75: mol_type = other DNA
aaaaattgccagaaacgcgataaaagctccgattcctaagcatgttactcaagatgtggatttcattgcgttcag

SEQ ID NO: 139908 - DNA, 75 bp, synthetic construct
  source 1..75: mol_type = other DNA
gtaacgccactggagtggcatgtgcaatattattgggtgaaatgttcttatcaatattgttacttaagcgatata

SEQ ID NO: 139909 - DNA, 75 bp, synthetic construct
  source 1..75: mol_type = other DNA
aatacatatccgaagtaattcctgaacaatttcctactaccattatgttagaaatcgatcttgcgggtggaagcg

SEQ ID NO: 139910 - DNA, 75 bp, synthetic construct
  source 1..75: mol_type = other DNA
atgtttgattttgcttcttaccatcgcgcagcaacccttgccgatgccatcaacctgctgactgacaacccgcag

SEQ ID NO: 139911 - DNA, 75 bp, synthetic construct
  source 1..75: mol_type = other DNA
atgtttgattttgcttcttaccatcgcgcaaccacccttgccgatgccatcactctgctggctgacaatccgcag

SEQ ID NO: 139912 - DNA, 75 bp, synthetic construct
  source 1..75: mol_type = other DNA
gatatttgccgaccgttgcatcgatttctggtggcaaagcggcggcgttcaggagaccgtcgacccgcgtcagca

SEQ ID NO: 139913 - DNA, 75 bp, synthetic construct
  source 1..75: mol_type = other DNA
cgctgccaacatgctgaacaggctgcacaaaacgcgccattaactcagcaaacgctggaagctattagcgaatca

SEQ ID NO: 139914 - DNA, 75 bp, synthetic construct
  source 1..75: mol_type = other DNA
aaagaacatgcaggtagcgcgcattttaaatatgccatgcgcgacgcgatggatatttcaaccatcggttgcgct

SEQ ID NO: 139915 - DNA, 75 bp, synthetic construct
  source 1..75: mol_type = other DNA
gcgcaaccacccttgccgatgccatcaacctgctgactcacaatccgcaggccaaactgctcgccggtggcactg

SEQ ID NO: 139916 - DNA, 75 bp, synthetic construct
  source 1..75: mol_type = other DNA
gtatctcggtcagagcggcgacaacgaaatccgcggcttcccgctggcgagcttgtattactttggtcgcccggt

SEQ ID NO: 139917 - DNA, 75 bp, synthetic construct
  source 1..75: mol_type = other DNA
cagtctctactccatcggacgtgcggtgctggcaaacctgaccgccggacgcacggtgcagggggcgagtacgct

SEQ ID NO: 139918 - DNA, 75 bp, synthetic construct
  source 1..75: mol_type = other DNA
cgtggactacgacggcaactttgtttgcagcggtggcatgcgtatcttgccggtctggaccagcgatccgcaatc

SEQ ID NO: 139919 - DNA, 75 bp, synthetic construct
  source 1..75: mol_type = other DNA
atgtccagaacactggatttaatattacagtgtcgcccggttcaggatatggttcatctgctgatgcgtattaca

SEQ ID NO: 139920 - DNA, 75 bp, synthetic construct
  source 1..75: mol_type = other DNA
tctgacggccttaagccagccgaaaatctatcgtttgaatacgtggattgccgatgcgccaatcgcgctgcgtca

SEQ ID NO: 139921 - DNA, 75 bp, synthetic construct
  source 1..75: mol_type = other DNA
ggtacgggtcgtcagcttggggcgaaatatccaaatctgcatctggcagggaaaacagggactaccaacaacaac

SEQ ID NO: 139922 - DNA, 75 bp, synthetic construct
  source 1..75: mol_type = other DNA
tcccatggagtattgtgacggaacaaaatattcccacaactgcccgaaaaaatcttgaatggttgagccctttta

SEQ ID NO: 139923 - DNA, 75 bp, synthetic construct
  source 1..75: mol_type = other DNA
gattgttcatcggacaaaagccttgaaataattaagagcatagcttattctgattcaagagtgaaagtatatagc

SEQ ID NO: 139924 - DNA, 75 bp, synthetic construct
  source 1..75: mol_type = other DNA
cgccagcttgccggcatgggcaataacctgaaccagatagcccgccgtgttaacgccggcggcggcaccggccat

SEQ ID NO: 139925 - DNA, 75 bp, synthetic construct
  source 1..75: mol_type = other DNA
ggccgcactgatggccatcgagagagagttgcgcagcttacggcaggtcgtcagggagcagggagcgcgggatga

SEQ ID NO: 139926 - DNA, 75 bp, synthetic construct
  source 1..75: mol_type = other DNA
ttccatatggcggcctatcaaagcagaccggatgccaacgcggttgttcacaatcatgccgttcattgtacggca

SEQ ID NO: 139927 - DNA, 75 bp, synthetic construct
  source 1..75: mol_type = other DNA
tgagaaaggcgatctgaaaggtttcgagttcggcgtgtttgactggcacgctaatggcacggcgaccgatgcgaa

SEQ ID NO: 139928 - DNA, 75 bp, synthetic construct
  source 1..75: mol_type = other DNA
tatcaatggcacggcgccgggaggttttaacctgaacgggcttaaaattctttcagacggacgcctgcaactggt

SEQ ID NO: 139929 - DNA, 75 bp, synthetic construct
  source 1..75: mol_type = other DNA
tcggcagtaaagagcaggcagacgcacaactggcgcaggcgatcatgtctgcaatgcgcgtctccatgcctggca

SEQ ID NO: 139930 - DNA, 75 bp, synthetic construct
  source 1..75: mol_type = other DNA
cccaagcggcgcgttcgtctggaccacctacgccgcgctgcaatctttgcaagcgggcctgaatcagtctgacga

SEQ ID NO: 139931 - DNA, 75 bp, synthetic construct
  source 1..75: mol_type = other DNA
ctgacatctacgaagacgaaggcattttaatgatcaccccagcggcaaccgcgccggagctgaccgcccgtggct

SEQ ID NO: 139932 - DNA, 75 bp, synthetic construct
  source 1..75: mol_type = other DNA
aaatatattcttgagaaagtgaaaccgcagcgtattgctatcgtccacgacaaacagcagtacggcgaaggtctg

SEQ ID NO: 139933 - DNA, 75 bp, synthetic construct
  source 1..75: mol_type = other DNA
ttcttgtgcatggcctgtgttagcggtcgatgatgatggcgaaacgatggttgtcactgcatcttccgttgaaca

SEQ ID NO: 139934 - DNA, 75 bp, synthetic construct
  source 1..75: mol_type = other DNA
cggcaaccctgcaggtgagcgtggaagaccttgtcagaaccggggcgtttctggtggcgatgtccctgtggcata

SEQ ID NO: 139935 - DNA, 75 bp, synthetic construct
  source 1..75: mol_type = other DNA
atcggcaggcgaagggatcactggcgcggtaactcactactatggcaagaagatcggtaatctgattaccactct

SEQ ID NO: 139936 - DNA, 75 bp, synthetic construct
  source 1..75: mol_type = other DNA
tcttccgttgaacaaaaccttaaagatgcacccgccagtatcagcgtcattacccaggaagacctgcagcgaaaa

SEQ ID NO: 139937 - DNA, 75 bp, synthetic construct
  source 1..75: mol_type = other DNA
acgctggactggaaaccgctggcgctggaagactggtcattctatgtttctggtcactataccggacagaaacgt

SEQ ID NO: 139938 - DNA, 75 bp, synthetic construct
  source 1..75: mol_type = other DNA
ttgtcacagcatcttctgttgaacaaaaccttaaagatgcacctgcaagtatcagcgtcattacccaggaagacc

SEQ ID NO: 139939 - DNA, 75 bp, synthetic construct
  source 1..75: mol_type = other DNA
caataaacacaatatggcgctcgtgactattgaagatctggtggcttatcgtcaggcgcatgaacgcaaagccag

SEQ ID NO: 139940 - DNA, 75 bp, synthetic construct
  source 1..75: mol_type = other DNA
cctgtgcattactgacgatcgccgtaaacaactcgatctgccaatgatggtagaaaataacaccagcgcctatgg

SEQ ID NO: 139941 - DNA, 75 bp, synthetic construct
  source 1..75: mol_type = other DNA
tggcgttgccgcaccaacgccgattcgttgccagcatgcagaacaggctgcgcaaaatgcaccattaaaccaaca

SEQ ID NO: 139942 - DNA, 75 bp, synthetic construct
  source 1..75: mol_type = other DNA
gtgagcaagattgactatcaggcactgcgtgccaaggcagaaaaagcaacgtgtggtgtatggtcgctcgaatat

SEQ ID NO: 139943 - DNA, 75 bp, synthetic construct
  source 1..75: mol_type = other DNA
gctggctgctggtgggcgatgcgttgcgcagttgcgtcaataccggaatttccgtgcgcggcatggatatggcgc

SEQ ID NO: 139944 - DNA, 75 bp, synthetic construct
  source 1..75: mol_type = other DNA
ctggaaagtctgtttactgccggttcgttaggtgatgaagaaagccgcgcagttttctattatgctgtgcgggat

SEQ ID NO: 139945 - DNA, 75 bp, synthetic construct
  source 1..75: mol_type = other DNA
cgcctggcatctgtgcttgaacatcggtcatcagaaggacatccggtcattgtttctaacagtgacacatccctg

SEQ ID NO: 139946 - DNA, 75 bp, synthetic construct
  source 1..75: mol_type = other DNA
caccactatatcaaggtaaaacgcagcatcggtgtggcagctggcgagggtaaatcagcaacagaaatcattgct

SEQ ID NO: 139947 - DNA, 75 bp, synthetic construct
  source 1..75: mol_type = other DNA
agcgtgccctgttgcagttgctgcctgacggactggcctgggacaagcggccgtcatccgtactggctgcgttat

SEQ ID NO: 139948 - DNA, 75 bp, synthetic construct
  source 1..75: mol_type = other DNA
gaataataccacaatcgcatacgggagtattataaaaatcaacgaagatttttattttactattagcgtagtatg

SEQ ID NO: 139949 - DNA, 75 bp, synthetic construct
  source 1..75: mol_type = other DNA
cgttttctattacgcagtgcgtgatgctttcaatctttctggtggtaaggccggttctgaatctgttgaaaatgc

SEQ ID NO: 139950 - DNA, 75 bp, synthetic construct
  source 1..75: mol_type = other DNA
atgtaagattgtgggtagcccggatctgaaaccagaaaccagcgaaagttgggagctggggctttactacatggg

SEQ ID NO: 139951 - DNA, 75 bp, synthetic construct
  source 1..75: mol_type = other DNA
atttaaagcaccttctctgttgcaacttagccctgactggacgagaattcctgccgtggcgcatgtaagattgtg

SEQ ID NO: 139952 - DNA, 75 bp, synthetic construct
  source 1..75: mol_type = other DNA
caccgtaacggtgaaagggggctgggcgacggcatttaaagcaccttctctgttgcaacttagccctgactggac

SEQ ID NO: 139953 - DNA, 75 bp, synthetic construct
  source 1..75: mol_type = other DNA
gtttcactgaagatgaccagtatcacctagcatccgttcttgaacatcggtcatcagaaggacatccggtcattg

SEQ ID NO: 139954 - DNA, 75 bp, synthetic construct
  source 1..75: mol_type = other DNA
ccgttccataccgctaacggtacgctggactggaaaccgctggcgctggaagactggtcattctatgtttctggt

SEQ ID NO: 139955 - DNA, 75 bp, synthetic construct
  source 1..75: mol_type = other DNA
cctgtcgattccatcgaacgtattgaagtggtccgtggcccgatgtcgtcgctgtacggttccgatgcgctcggc

SEQ ID NO: 139956 - DNA, 75 bp, synthetic construct
  source 1..75: mol_type = other DNA
gcagacgcggcgtgagcgcaaccatgcggagatggagcgggcgctggtcagcaggaagcgcagccggagacgctg

SEQ ID NO: 139957 - DNA, 75 bp, synthetic construct
  source 1..75: mol_type = other DNA
aggcgcgcgggctgctgtatgcgccacagataagcctggcggtgctggaagcgtaccagcgccacttacgcagct

SEQ ID NO: 139958 - DNA, 75 bp, synthetic construct
  source 1..75: mol_type = other DNA
gacatcatgattgctgttgggttaattgaagatggcgctttccattatccttgtgctgaatcaatggcttgtggt

SEQ ID NO: 139959 - DNA, 75 bp, synthetic construct
  source 1..75: mol_type = other DNA
ccggtgaaaattcactgttctattctggcagaagacgcgatcaaagccgccattgcggactataaaagcaaacgt

SEQ ID NO: 139960 - DNA, 75 bp, synthetic construct
  source 1..75: mol_type = other DNA
aagcacaggcgatcaaaaacaccgatattgcagaagaacttgaactgccaccggtgaaaattcactgttctattc

SEQ ID NO: 139961 - DNA, 75 bp, synthetic construct
  source 1..75: mol_type = other DNA
ggcgatcctcggccatgagaagctggagacgacgcagatctacacgcgggtagccatcggtcacttacaggaagt

SEQ ID NO: 139962 - DNA, 75 bp, synthetic construct
  source 1..75: mol_type = other DNA
gatgttctgcagaaggctgttctggatgcggtgagagccctgccggctccgcaggacgggcgtgatgccacggca

SEQ ID NO: 139963 - DNA, 75 bp, synthetic construct
  source 1..75: mol_type = other DNA
tgactacgatccggatgttctggcaggaagggccggttctgggaggccggtggagtgcccctgccgggctccgca

SEQ ID NO: 139964 - DNA, 75 bp, synthetic construct
  source 1..75: mol_type = other DNA
gaaaaatacgcttctcacgcccaatgaggcccgtaaacgtgagaacctgccgcccctggccggcggtgatgcact

SEQ ID NO: 139965 - DNA, 75 bp, synthetic construct
  source 1..75: mol_type = other DNA
atgagcgttaccgttatcaatgaaatgcttgggtgtaaattcgataaggtgtttacgaatcaaagcgccgaactt

SEQ ID NO: 139966 - DNA, 75 bp, synthetic construct
  source 1..75: mol_type = other DNA
aacagtatgaccgaagataaacccggagaagctcattcatcagcctggaccctggctgcaaaacgtgggcgggat

SEQ ID NO: 139967 - DNA, 75 bp, synthetic construct
  source 1..75: mol_type = other DNA
gtgatgcccgtgaggatccgttcgcgtcttccgggaaaacagtcgtcatcacagctgcctgacggcgcatctgac

SEQ ID NO: 139968 - DNA, 75 bp, synthetic construct
  source 1..75: mol_type = other DNA
ggacgcggtgtaatggtgcttgatgatgaagaccgtgaaaatgaaggcgatatgatcttcccggcagaaacgatg

SEQ ID NO: 139969 - DNA, 75 bp, synthetic construct
  source 1..75: mol_type = other DNA
caaccgcgcttattctcttttccgcgcagggatttgcggaacaaactacgcagccggtcgttactccctgcggcg

SEQ ID NO: 139970 - DNA, 75 bp, synthetic construct
  source 1..75: mol_type = other DNA
tgctgtgcgcgctttccggctgcgcccggaacacgcctccctctgccttcagcggtaagggagaacccgtaaaca

SEQ ID NO: 139971 - DNA, 75 bp, synthetic construct
  source 1..75: mol_type = other DNA
acgtactgattcagctccaccatcacaatgaccgttatcgccatattgttgatatccacaatctggcggagctgc

SEQ ID NO: 139972 - DNA, 75 bp, synthetic construct
  source 1..75: mol_type = other DNA
gcgcgatctcaattgccgatgccatcaacctgctggctgacaatccacaggccaggctgctcgctggcggcactg

SEQ ID NO: 139973 - DNA, 75 bp, synthetic construct
  source 1..75: mol_type = other DNA
ggtgggctgattatcttgatgagttaaataataattacattactccatttgatttcgctaaaatacaaaaaaatt

SEQ ID NO: 139974 - DNA, 75 bp, synthetic construct
  source 1..75: mol_type = other DNA
aggcggtggctgagcccttttccggcgcctggcagcagggcgtgaaagccgatcctgaagccgtcctctcctttc

SEQ ID NO: 139975 - DNA, 75 bp, synthetic construct
  source 1..75: mol_type = other DNA
ggctggaaagcctggaagccgcaggctacagcgcgcgcagcgtggaaggctaccgcgaacggctgttaccgttca

SEQ ID NO: 139976 - DNA, 75 bp, synthetic construct
  source 1..75: mol_type = other DNA
ccccgcaagttggggcagcacgaaaacccctgttccaccctctgttcttatccccatcgtaccgtaatctcaatc

SEQ ID NO: 139977 - DNA, 75 bp, synthetic construct
  source 1..75: mol_type = other DNA
ggatgatgtgcgtccgatgcttgaacagatggtgaaggaggcggtaagccatatccctgttccgcgtgatggtcg

SEQ ID NO: 139978 - DNA, 75 bp, synthetic construct
  source 1..75: mol_type = other DNA
aaatagccgcgcaggcacaaacgtttgaagaaaaactggcttccctgtctgtggtattacagaagtgcgtgacgg

SEQ ID NO: 139979 - DNA, 75 bp, synthetic construct
  source 1..75: mol_type = other DNA
cgcccctggccggcggtgatgcactgtatcttcagcagcagaactacagtctggaagcgttgtcccgccgtgatg

SEQ ID NO: 139980 - DNA, 75 bp, synthetic construct
  source 1..75: mol_type = other DNA
gaacgttcatcttcagagcagcaagccgccggacgagatcgatacatcgaggcaatgttgattgaggtgttattg

SEQ ID NO: 139981 - DNA, 75 bp, synthetic construct
  source 1..75: mol_type = other DNA
ggagaaaaaatctatctgagttataccgttgagccaaagcagacacggaacgttatagttcagtacacaacatcc

SEQ ID NO: 139982 - DNA, 75 bp, synthetic construct
  source 1..75: mol_type = other DNA
atagagatcaacggcaattcacgtttggctacaccatgttcacgaagcaacaatttgaatttctggacatgatgc

SEQ ID NO: 139983 - DNA, 75 bp, synthetic construct
  source 1..75: mol_type = other DNA
ctgtgctgacatcatcgcccgtgtgcgagacataaaaccggtatgggcgctggccaacgacatgaactgcagtgc

SEQ ID NO: 139984 - DNA, 75 bp, synthetic construct
  source 1..75: mol_type = other DNA
gcaacgtggcggcggtcgtggacaaggcggtggtcgcggtcaacagcaaccacgccgtggagaaggtggcgcgaa

SEQ ID NO: 139985 - DNA, 75 bp, synthetic construct
  source 1..75: mol_type = other DNA
tgtttaaaacaacagacgcgctccttatcacgaatttttttatctgggttgttatatcggtttttttgtttgcgt

SEQ ID NO: 139986 - DNA, 75 bp, synthetic construct
  source 1..75: mol_type = other DNA
gaaaaacttattaaagattatcagatagttatggggcagttacaaacattgatttctgctaataaacatcgcggg

SEQ ID NO: 139987 - DNA, 75 bp, synthetic construct
  source 1..75: mol_type = other DNA
ctgatcggtgtcgatgctattcgtggggctgcaatgagagtaatcggtaacaagtttggtagctcgaaggagtaa

SEQ ID NO: 139988 - DNA, 75 bp, synthetic construct
  source 1..75: mol_type = other DNA
atgcctcataacccaaatacctggctggagttgttccagagctggtggcgtggagatacgcctcttggcgcagtg

SEQ ID NO: 139989 - DNA, 75 bp, synthetic construct
  source 1..75: mol_type = other DNA
caggcgctaaggcagaactggcactggcggagaaactgggacatgcggttattttccaggaggcaaccagtgaga

SEQ ID NO: 139990 - DNA, 75 bp, synthetic construct
  source 1..75: mol_type = other DNA
gctcaaccgactgatataaaggaaataaatacggagcagccgaactatgcatcactgctgacgatatatttacgc

SEQ ID NO: 139991 - DNA, 75 bp, synthetic construct
  source 1..75: mol_type = other DNA
ggtactcagcgaccgccagcaggatacctctgcggatatctcgccggatacgctgcgtaaccgtctcacctcacg

SEQ ID NO: 139992 - DNA, 75 bp, synthetic construct
  source 1..75: mol_type = other DNA
gaacaactggtggcgctgcataccctgcagggcgaactggagcgcctgcaatatcgtatccgcgaaggtgcgccg

SEQ ID NO: 139993 - DNA, 75 bp, synthetic construct
  source 1..75: mol_type = other DNA
gcaactcagcctgcaaacgtatctgacccgcgtcacccgcgtgcgcctcaaactgcaacaggtgaccaacgcccc

SEQ ID NO: 139994 - DNA, 75 bp, synthetic construct
  source 1..75: mol_type = other DNA
gcagtggaaaacctcgccgccaccggaactgaccggcgcggtgcgtaaaatcctgctgcgccagattggtgtgcg

SEQ ID NO: 139995 - DNA, 75 bp, synthetic construct
  source 1..75: mol_type = other DNA
tgcggcagagcgtgttgccgtcactgctgaccttctggatggcgaacctgccggaacacccgcagtggaaaacct

SEQ ID NO: 139996 - DNA, 75 bp, synthetic construct
  source 1..75: mol_type = other DNA
ttgattttcgtcaggcagcctggttgtacacggggtttgatgtgtctcatgccagtattggaacatttccccgta

SEQ ID NO: 139997 - DNA, 75 bp, synthetic construct
  source 1..75: mol_type = other DNA
tcaggagaaaatggattactgaaacagttttcgcttgatggggcaatttctggttcagtattgccgttaattgat

SEQ ID NO: 139998 - DNA, 75 bp, synthetic construct
  source 1..75: mol_type = other DNA
tatcagaaaggaattgttctgatgaaagagttcagtactggcagagatgctattgattttcgtcaggcagcctgg

SEQ ID NO: 139999 - DNA, 75 bp, synthetic construct
  source 1..75: mol_type = other DNA
cattggtaactcattaggaatgctgattgttcaatcttatgttgtactttccggtttgttgctcccagctgctga

SEQ ID NO: 140000 - DNA, 75 bp, synthetic construct
  source 1..75: mol_type = other DNA
atgcctacaaccgccttgttcgccgcgatcgcaaaacgggcgcgttaagtctgcgtatgcggatcagccgccacc

SEQ ID NO: 140001 - DNA, 75 bp, synthetic construct
  source 1..75: mol_type = other DNA
tgaaaaagaaaaagcagctatccaggcacaacgtgaagctgtgttggcgcggattaaagaagtacagaacggatg

SEQ ID NO: 140002 - DNA, 75 bp, synthetic construct
  source 1..75: mol_type = other DNA
tacattctggcagatgtgctggcaacgttgcgctcggctggcgttcctgcattaaccgatgacaactatgcggtg

SEQ ID NO: 140003 - DNA, 75 bp, synthetic construct
  source 1..75: mol_type = other DNA
ggtgcagagtcgaaatatgaaatcccgccgctcttttatcgcctttccggaacgtttcgccaggcgaatccacaa

SEQ ID NO: 140004 - DNA, 75 bp, synthetic construct
  source 1..75: mol_type = other DNA
gagggtgttggtgcagtggtcggcgatgctgatgttatcaaccgtattcgcgccacgctttactccggcggtagc

SEQ ID NO: 140005 - DNA, 75 bp, synthetic construct
  source 1..75: mol_type = other DNA
cagatccagggctcacaggcgctggaagtgttgcgtgggctggtgttcgcgccagtgatgcacgcggtgcaggca

SEQ ID NO: 140006 - DNA, 75 bp, synthetic construct
  source 1..75: mol_type = other DNA
tgactcttgctgaagcacagcaaaagcagtttgcgctggtggacacgatttgccgctatttccctggcggtgagt

SEQ ID NO: 140007 - DNA, 75 bp, synthetic construct
  source 1..75: mol_type = other DNA
aatgcggggcaaatgtctcgactttttcctgcttcaagctgtttgggccggagggggttggcgcggtggtaggcg

SEQ ID NO: 140008 - DNA, 75 bp, synthetic construct
  source 1..75: mol_type = other DNA
gctaccgggaaaacgggaacggaatttgttcagcgagcgacgacgttttttgggccggaccggaattttgaaaac

SEQ ID NO: 140009 - DNA, 75 bp, synthetic construct
  source 1..75: mol_type = other DNA
tctctacctgacgctggggatctccgggcagatccagcatatggttggcggcaacggcgcaaaagtgattgtcgc

SEQ ID NO: 140010 - DNA, 75 bp, synthetic construct
  source 1..75: mol_type = other DNA
gggcgggtacttgatggtgatttaatcactggatgggaaaaacgccaggtgctgaaagaggacaacggcaatatt

SEQ ID NO: 140011 - DNA, 75 bp, synthetic construct
  source 1..75: mol_type = other DNA
aaccggatgcggcgctggtgcagcatacgcgccagcagccgcaggacagctacgtgctggcagatgtgctggcaa

SEQ ID NO: 140012 - DNA, 75 bp, synthetic construct
  source 1..75: mol_type = other DNA
gagtcacgacagataaagatacagataaagatacagatcaagaagatcaaaacactatggtccatggcgtaaaaa

SEQ ID NO: 140013 - DNA, 75 bp, synthetic construct
  source 1..75: mol_type = other DNA
agcgtgttgcatgacagctacgacaacggcaaatccggggaaaaatttttacaggagctttgcagtgttgatttg

SEQ ID NO: 140014 - DNA, 75 bp, synthetic construct
  source 1..75: mol_type = other DNA
ggcactgtgcaatgacacggcctgttctgcagccatgctgctggcgtcggcctgctcccgacggctggttaccca

SEQ ID NO: 140015 - DNA, 75 bp, synthetic construct
  source 1..75: mol_type = other DNA
tggccgcggcggcaccgcagcagccggtggcatccacgcagagtgaagccgatcgcattatggcgtgtgaagaag

SEQ ID NO: 140016 - DNA, 75 bp, synthetic construct
  source 1..75: mol_type = other DNA
catagaaatatggaacaaaatacgacgaatgtgattgatatgttcagtaagactggtgaaaagattaaccatcaa

SEQ ID NO: 140017 - DNA, 75 bp, synthetic construct
  source 1..75: mol_type = other DNA
atcgtgagttaaaagagcaaaaccaaacactggataaattagtctcaggaattaatggggatggtgaaggttctc

SEQ ID NO: 140018 - DNA, 75 bp, synthetic construct
  source 1..75: mol_type = other DNA
ttcagtgcctggaaggccagattgcgcgagggggtgccaccagagaccatgctggatggtgtgaggcgttacgcg

SEQ ID NO: 140019 - DNA, 75 bp, synthetic construct
  source 1..75: mol_type = other DNA
agcagatggggctaacgctcattacggctgatttcaatgatctgtcggcactgaagcaggttgttgacgagcaac

SEQ ID NO: 140020 - DNA, 75 bp, synthetic construct
  source 1..75: mol_type = other DNA
aacattgcgcgattcgcattaacccaaatcgcagcggtgaagagacggtattgcggattttgcgcgagagtattg

SEQ ID NO: 140021 - DNA, 75 bp, synthetic construct
  source 1..75: mol_type = other DNA
tggcgtgatgatgagccatgtcagctatgccggtcatctggcgcaggccggtgtggatatcacgctgatttactc

SEQ ID NO: 140022 - DNA, 75 bp, synthetic construct
  source 1..75: mol_type = other DNA
tcctggtcagccagcaggcacgacaccggaagccgattcagcgtatgcgctgaaagccgattcgggcgctgtgca

SEQ ID NO: 140023 - DNA, 75 bp, synthetic construct
  source 1..75: mol_type = other DNA
caccagaggccatgctggatggcgtgaggcgttacgcaagatacctggcggctaccgggaaaacgggaacggaat

SEQ ID NO: 140024 - DNA, 75 bp, synthetic construct
  source 1..75: mol_type = other DNA
cgacctttccatatacaatcgagacaagttatgggcaaaaacaagcaaggcaggcctagagtttcaaacattaat

SEQ ID NO: 140025 - DNA, 75 bp, synthetic construct
  source 1..75: mol_type = other DNA
gaatacgttaacaaacgcagtatgggaccccagaacacctcgcaaatataagcaagatccacttatcaaaagagc

SEQ ID NO: 140026 - DNA, 75 bp, synthetic construct
  source 1..75: mol_type = other DNA
cagaggttacgccacagacggcataaaaaatgttccaaacgggttattatctctcagcatcaatcgctacacccc

SEQ ID NO: 140027 - DNA, 75 bp, synthetic construct
  source 1..75: mol_type = other DNA
aaataattgaaacctgtctggaaatgacgcgccttgggttaaatcaggggacagcggggaatgtcagcacacgtt

SEQ ID NO: 140028 - DNA, 75 bp, synthetic construct
  source 1..75: mol_type = other DNA
tacaccagagtttgacggctggcgatgggtaagttactggtatccggtcagacaggtggtgtcatttaaacgtga

SEQ ID NO: 140029 - DNA, 75 bp, synthetic construct
  source 1..75: mol_type = other DNA
cgctacaaattaccgaaacgtttggtgcgttgggacacgaagccggtttgtatcggccaaaaacaaaaatggttt

SEQ ID NO: 140030 - DNA, 75 bp, synthetic construct
  source 1..75: mol_type = other DNA
caataaagcccgctcagccactgaacgttctgaagcaacaaaacagtcctcacttccccgccttgccgcttccgg

SEQ ID NO: 140031 - DNA, 75 bp, synthetic construct
  source 1..75: mol_type = other DNA
aaaacccggacgctatgccgattatgcagatacagatgcgggaatacagggcgtgctgttcatggtaaccgtgta

SEQ ID NO: 140032 - DNA, 75 bp, synthetic construct
  source 1..75: mol_type = other DNA
aatcgccaaggacactctgcccgtatccatcagaaacagatgcaagtatcaaaaatggaatcacacatattcaac

SEQ ID NO: 140033 - DNA, 75 bp, synthetic construct
  source 1..75: mol_type = other DNA
acgcaacaaaatggttatggtcagagtattactgccagcgaattacgatggatttatcgccacaaagacaacgac

SEQ ID NO: 140034 - DNA, 75 bp, synthetic construct
  source 1..75: mol_type = other DNA
tattttttcctttagcgataatcatgggcgttttattacccctgtccccggcaaatgctgatgagtggtccaaaa

SEQ ID NO: 140035 - DNA, 75 bp, synthetic construct
  source 1..75: mol_type = other DNA
tgaacaggatgtatggcatcagccgtcactggttgcctttgaggtcacaccgtcgcgctggttacatcagcaggg

SEQ ID NO: 140036 - DNA, 75 bp, synthetic construct
  source 1..75: mol_type = other DNA
ctgcaccgcgatagtcggagcagggctgggcttcctgtggtttaacacctatccggcacaggtctttatgggcga

SEQ ID NO: 140037 - DNA, 75 bp, synthetic construct
  source 1..75: mol_type = other DNA
caagcgcggtacgccgaccatgggcgggattatgatcctgacggcgattgtgatctccgtgctgctgtgggctta

SEQ ID NO: 140038 - DNA, 75 bp, synthetic construct
  source 1..75: mol_type = other DNA
gctcctttaaactgcgcggacaacgtattttccgcatggcaccgattcatcaccactatgaactgaaaggctggc

SEQ ID NO: 140039 - DNA, 75 bp, synthetic construct
  source 1..75: mol_type = other DNA
gcgatgcaggcgcgtcgttcgattggttcccttgcaaaaccagcgacttatctgacggccttaagccagccgaaa

SEQ ID NO: 140040 - DNA, 75 bp, synthetic construct
  source 1..75: mol_type = other DNA
caattgcctgctgcggtttatggccggatggtcaaccttgagccagatatgaccatcagcaagaatgagatggtg

SEQ ID NO: 140041 - DNA, 75 bp, synthetic construct
  source 1..75: mol_type = other DNA
cgctatcgttattccgccgattggtctgggtctggcgaccattatcgatcgtcgcttaactggcaaacgcttgtt

SEQ ID NO: 140042 - DNA, 75 bp, synthetic construct
  source 1..75: mol_type = other DNA
atgacaaaatctgtatcaaccagcaaaaaagcacataaacagcattcgcctgaatttcgcagtgaagccctgaaa

SEQ ID NO: 140043 - DNA, 75 bp, synthetic construct
  source 1..75: mol_type = other DNA
attctggttgaagaagttgcgtcaatgctgcaaaaaactgggttcgtcacaatggacggtttaacccaaatgatc

SEQ ID NO: 140044 - DNA, 75 bp, synthetic construct
  source 1..75: mol_type = other DNA
cagtcatatattggaagaaaaggacagaatatcagtatcgatatgtacgatccccgtgctaacgctcataacttt

SEQ ID NO: 140045 - DNA, 75 bp, synthetic construct
  source 1..75: mol_type = other DNA
gccatcgtcagcttgctgaccgcgctgttcatctcattgtggatgggcccgcgtatgattgctcatttgcaaaaa

SEQ ID NO: 140046 - DNA, 75 bp, synthetic construct
  source 1..75: mol_type = other DNA
tatgggcggtgtatttgtggtagaaacgctgtccgtcatcctgcaggtcggctctttcaaactgcgcggacaacg

SEQ ID NO: 140047 - DNA, 75 bp, synthetic construct
  source 1..75: mol_type = other DNA
tttcacaccgggccgggcaaagtgtctcttgagcatgacgaaatccttgtcgcctttcattttccgccacagccg

SEQ ID NO: 140048 - DNA, 75 bp, synthetic construct
  source 1..75: mol_type = other DNA
ccaaagtcaacgcagatggtgaaatcaggaacatacagcacaccctatctgagttatatcaatgactatggtgga

SEQ ID NO: 140049 - DNA, 75 bp, synthetic construct
  source 1..75: mol_type = other DNA
gggttacgtcgttctccgaagattatgggggttggtgagctccttaaccgcctgtcatttgaagctgctgtgctg

SEQ ID NO: 140050 - DNA, 75 bp, synthetic construct
  source 1..75: mol_type = other DNA
cggtcaggagatcaaagggacgctgaaaagtgctgcggtcgttaataccgctatccagctaagaggtgatgaagc

SEQ ID NO: 140051 - DNA, 75 bp, synthetic construct
  source 1..75: mol_type = other DNA
aattatcggttcgatgaaagaagcgctgcatccggaaatcgatggctgcgaaggtattctcaacgcgatggcgcg

SEQ ID NO: 140052 - DNA, 75 bp, synthetic construct
  source 1..75: mol_type = other DNA
gtgcgatttttaacggtggtgagaaatcgatgacactgaatatcgccaatgataacaaacagctcccctacctgg

SEQ ID NO: 140053 - DNA, 75 bp, synthetic construct
  source 1..75: mol_type = other DNA
tggcagtgagaagcaggcgaaagaggggacatttgaagcagtgatgctggcaccaaaatcatctcagacggtgaa

SEQ ID NO: 140054 - DNA, 75 bp, synthetic construct
  source 1..75: mol_type = other DNA
gcgacatgaatgcaccggaacttagcgagcaggatgtctggggtaaatccacccctgcgggtgacgaaatatggt

SEQ ID NO: 140055 - DNA, 75 bp, synthetic construct
  source 1..75: mol_type = other DNA
gttctgttcaggaaagaaaggaggatattgagcaacaggatgcgcgatttcgcgagggttccggcgcgttaattg

SEQ ID NO: 140056 - DNA, 75 bp, synthetic construct
  source 1..75: mol_type = other DNA
atggtgactgacatgaagtgtaatcgtaagcgctggtcaggcgaagaccgggagtttatcgaagccaacgttggg

SEQ ID NO: 140057 - DNA, 75 bp, synthetic construct
  source 1..75: mol_type = other DNA
atctaagaatattgtaaatgcggctaaggttgtgaaaactaggtttcacggccgagttcctaggagtgtagaaaa

SEQ ID NO: 140058 - DNA, 75 bp, synthetic construct
  source 1..75: mol_type = other DNA
ttgatatacaggaagaatggcgtcatgaatggatctctattaactatcctgaagcggaagaagagacactagagt

SEQ ID NO: 140059 - DNA, 75 bp, synthetic construct
  source 1..75: mol_type = other DNA
gacaaactgatctttttgcgtaatggcatgcgcgaagctctcgtggcgccactggatttcacctctctgcgtaat

SEQ ID NO: 140060 - DNA, 75 bp, synthetic construct
  source 1..75: mol_type = other DNA
tgggtgattatcgcattctgtgtgaaatcagggatgacgaactgattattcttgtggccaccatcggccatcgac

SEQ ID NO: 140061 - DNA, 75 bp, synthetic construct
  source 1..75: mol_type = other DNA
ccgcaggtgttatcagccttgctgacgacggtactgggggctggtgcaatgtttaccctctacacctatatctct

SEQ ID NO: 140062 - DNA, 75 bp, synthetic construct
  source 1..75: mol_type = other DNA
tagctcagctatagcttcatatgaacgcaattatccagaggaaggcggctttgctcaggggatgcttgagatcct

SEQ ID NO: 140063 - DNA, 75 bp, synthetic construct
  source 1..75: mol_type = other DNA
atgctggcggagttccagaagatcaacgcgcagtatcagggcgcagaccgtgtgaaagcgctgctgggcctgagc

SEQ ID NO: 140064 - DNA, 75 bp, synthetic construct
  source 1..75: mol_type = other DNA
gaagttccggcagagaaaattttaggcatgccagaatggaaagattatcatccgaaacgttctggattgatatct

SEQ ID NO: 140065 - DNA, 75 bp, synthetic construct
  source 1..75: mol_type = other DNA
gattataaatctcctcggaaatataagaaagacgctcttatcaagagagcattaagtgagtctgatagaggaatt

SEQ ID NO: 140066 - DNA, 75 bp, synthetic construct
  source 1..75: mol_type = other DNA
ttatgaaaaacaatggcgaaatgccgcttgatgctgatctgaatacatttggtcccgttaaggcttatctgggga

SEQ ID NO: 140067 - DNA, 75 bp, synthetic construct
  source 1..75: mol_type = other DNA
gtgttattccagatatgcgcggctggacaatcaagggcaaacccgccagtgggcgagccgtattgtcacaggagc

SEQ ID NO: 140068 - DNA, 75 bp, synthetic construct
  source 1..75: mol_type = other DNA
ctgatgcggcaagcggtcaactggatctcaataacccgctgatcaagcacgatctggaaaacccgactgcgccga

SEQ ID NO: 140069 - DNA, 75 bp, synthetic construct
  source 1..75: mol_type = other DNA
gcacaccatcacggtaaatgctacgggtaataccgaaaacaccgtcaaaaacatcgcatttaactatattgtgag

SEQ ID NO: 140070 - DNA, 75 bp, synthetic construct
  source 1..75: mol_type = other DNA
ccgggaggacgttttccggcgatagaagaagatgaaccggtgaaatggttattgtgtagtgagtatgctgttttg

SEQ ID NO: 140071 - DNA, 75 bp, synthetic construct
  source 1..75: mol_type = other DNA
tgttttgggtgataatgacacgggctttaaacaaaatggcgatggtaatctggatgtttatgctaataacgtcca

SEQ ID NO: 140072 - DNA, 75 bp, synthetic construct
  source 1..75: mol_type = other DNA
gtgctttcccggatattggaggtatcgttcatacccattcccgacacgccacaatatgggctcaggccggaaaag

SEQ ID NO: 140073 - DNA, 75 bp, synthetic construct
  source 1..75: mol_type = other DNA
ttcaggaaaccagagctggttgacaggcttaatgatattattgctaagcactatcccggagcgttagcgatataa

SEQ ID NO: 140074 - DNA, 75 bp, synthetic construct
  source 1..75: mol_type = other DNA
ccgggaaaacatcaccattcatctggatgaccacatccagtctgttcaaggtaaagaggactatgaagatgagat

SEQ ID NO: 140075 - DNA, 75 bp, synthetic construct
  source 1..75: mol_type = other DNA
gaataaggatgaggtgtttgagcgaggggggatcaacgtcttcagagggctgagctggaattacaaaaccaattg

SEQ ID NO: 140076 - DNA, 75 bp, synthetic construct
  source 1..75: mol_type = other DNA
tgagcacatttgaacaactgcaccagaataacgatgacgtgtttgaccggggggtgatcaacgtcttcaaagggc

SEQ ID NO: 140077 - DNA, 75 bp, synthetic construct
  source 1..75: mol_type = other DNA
tgagcacatttgaacaactgcaccagaataacgatgaagtgtttgaccggggggtgatcaacgtcttcacagggc

SEQ ID NO: 140078 - DNA, 75 bp, synthetic construct
  source 1..75: mol_type = other DNA
ggattttcgctgcggctgctggctgatggagaaacctgaaacggcaatgaaagccattacccggaatcttgaccg

SEQ ID NO: 140079 - DNA, 75 bp, synthetic construct
  source 1..75: mol_type = other DNA
gaggcgaatatcctgagtacgtttgaacaactgcaccagaataaggacgaagtatttgagcgaggtgtgatcaac

SEQ ID NO: 140080 - DNA, 75 bp, synthetic construct
  source 1..75: mol_type = other DNA
tgagctggaattataaaaccaattctccctgtaaatttggaagtaaaatcattatcaacaatctggtgagatggg

SEQ ID NO: 140081 - DNA, 75 bp, synthetic construct
  source 1..75: mol_type = other DNA
tccgcgcacatcacattcaggaagccagaactggttgacaggctgaatgacattattgcaaaacgttatgcggga

SEQ ID NO: 140082 - DNA, 75 bp, synthetic construct
  source 1..75: mol_type = other DNA
cgaaatctggcgtgacctgatgcaacattccgggatgctgtcattaatggatacgcaggcccgtgatacatggta

SEQ ID NO: 140083 - DNA, 75 bp, synthetic construct
  source 1..75: mol_type = other DNA
agcaggctgaccgggttgctgacctggaaaggatgctgcacctgttcagcggctggcccatccccgacaaccggg

SEQ ID NO: 140084 - DNA, 75 bp, synthetic construct
  source 1..75: mol_type = other DNA
gggctccgcgcatatcacgttcagaaaaccagaactggttgatcggctaaatgacatcattgcgaagtattatcc

SEQ ID NO: 140085 - DNA, 75 bp, synthetic construct
  source 1..75: mol_type = other DNA
caactctgccgtttactgcgcctggcaatcatttttgccagccgtcgccgtgatgatttagtgccggagattaca

SEQ ID NO: 140086 - DNA, 75 bp, synthetic construct
  source 1..75: mol_type = other DNA
atgggttccacctcgtcgctgtatgcagctattgatctcggttcgaatagttttcatatgctggttgtgcgcgag

SEQ ID NO: 140087 - DNA, 75 bp, synthetic construct
  source 1..75: mol_type = other DNA
gttacgtccggttgccgatgaattacggtatcacggctggaaagtgtgcgttggcgcttccggcaccgtgcaggc

SEQ ID NO: 140088 - DNA, 75 bp, synthetic construct
  source 1..75: mol_type = other DNA
gaacatagatgaagtgtttgagcgaggggtgatcaacgtcttcaggggactgaactggaattacaaaactaattg

SEQ ID NO: 140089 - DNA, 75 bp, synthetic construct
  source 1..75: mol_type = other DNA
tgggcacatttgaacaactgcaccagaataaagatgaggtgtttgagcgaggggtgatcaacgtcttcagagggc

SEQ ID NO: 140090 - DNA, 75 bp, synthetic construct
  source 1..75: mol_type = other DNA
cagaacaaagatgaagtgtttgaacggggagtgatcaacgtcttcaaagggctgagctgggattacagaaccaac

SEQ ID NO: 140091 - DNA, 75 bp, synthetic construct
  source 1..75: mol_type = other DNA
tgagctggaattacaaaaccaattcaccctgcaaatttggcagtaaaattatcgtcaacaacctggtgaggtggg

SEQ ID NO: 140092 - DNA, 75 bp, synthetic construct
  source 1..75: mol_type = other DNA
ccctgtaaatttggcagtaaaattatcgtcaacaatctggtgagatgggaccggtggggatttcatcttatcacc

SEQ ID NO: 140093 - DNA, 75 bp, synthetic construct
  source 1..75: mol_type = other DNA
tgagcacatttgaacaactgcaccagaataacgatgaggtgtttgaccggggagtgatcaacgtcttcagagggc

SEQ ID NO: 140094 - DNA, 75 bp, synthetic construct
  source 1..75: mol_type = other DNA
cggcatcacggctggaaagtgtgcgttggcgcttccggcaccgtgcaggccttgcaagaaatcatgatggcgcag

SEQ ID NO: 140095 - DNA, 75 bp, synthetic construct
  source 1..75: mol_type = other DNA
actttaagaagggctccgcacacatcacgttcaggaagccacaactggttgacaggcttaatgatattattgcca

SEQ ID NO: 140096 - DNA, 75 bp, synthetic construct
  source 1..75: mol_type = other DNA
cgcatatcacgttcagaaaaccagaactggttgacagactgaatgatattatcgcaaaacactatcctgatatgc

SEQ ID NO: 140097 - DNA, 75 bp, synthetic construct
  source 1..75: mol_type = other DNA
gaacagcgcgctggaaaagctgcgtaaaggttcgcgacaaaatctcaccgcgccagcaacgatgatcgactggcg

SEQ ID NO: 140098 - DNA, 75 bp, synthetic construct
  source 1..75: mol_type = other DNA
cattgtgctggagtctctcgaaaccagcctgcgtctgtatcgtccgggaacctccattcaggaagtcaccggtga

SEQ ID NO: 140099 - DNA, 75 bp, synthetic construct
  source 1..75: mol_type = other DNA
gaacagcgcgctggaaaaactgcgtaaaggttcgcggcaaaatctcaccgcaccggcaacgatgatcgactggcg

SEQ ID NO: 140100 - DNA, 75 bp, synthetic construct
  source 1..75: mol_type = other DNA
aaacatcaggacaaaattgagcgcgcacaaaagctgatccagcgccatccttatctgtttgtcatcggcacgcgt

SEQ ID NO: 140101 - DNA, 75 bp, synthetic construct
  source 1..75: mol_type = other DNA
agcctgcgcctgtatcgtccgggaacttccattcaggaagtcactggtgaagtggtgcgcatcatggttagcggc

SEQ ID NO: 140102 - DNA, 75 bp, synthetic construct
  source 1..75: mol_type = other DNA
cgccagcaacgatgatcgactggcgtcccatggtccatgaaatgcgcctgttcaaatcgccagaagagattgccg

SEQ ID NO: 140103 - DNA, 75 bp, synthetic construct
  source 1..75: mol_type = other DNA
aagcttatgaagaatttagcgagttcgacaccgctgaaatcggactgattgaacctttacgcgccatgcgtttgg

SEQ ID NO: 140104 - DNA, 75 bp, synthetic construct
  source 1..75: mol_type = other DNA
gcgacaaagatccgattaccattgatatcagcgcggctaactcgtcgttaagcgggatccgtgatgccatcaaca

SEQ ID NO: 140105 - DNA, 75 bp, synthetic construct
  source 1..75: mol_type = other DNA
gatctgcacacatcactttcaaaaggctggagctgattgacagaattaacgatataatagccagacactttcctt

SEQ ID NO: 140106 - DNA, 75 bp, synthetic construct
  source 1..75: mol_type = other DNA
gaaaaatgccgtccgggaatgttcgagtaccatctggaaggcgaaattcaccacgaatttaaccgccacggtgcg

SEQ ID NO: 140107 - DNA, 75 bp, synthetic construct
  source 1..75: mol_type = other DNA
gaacgcccatcgtcctttctttatgcatggccttagccactggttaggactggatgtccatgacgttggcgttta

SEQ ID NO: 140108 - DNA, 75 bp, synthetic construct
  source 1..75: mol_type = other DNA
ccatcgcccgactatcggcctgaatgagtatcttattgagccacgcaagctgtttgaggacgctacactgatccc

SEQ ID NO: 140109 - DNA, 75 bp, synthetic construct
  source 1..75: mol_type = other DNA
atgagcgaacccctgttaattgcccgcacgccagacacagaactgtttttactacccgctatggctaaccgtcat

SEQ ID NO: 140110 - DNA, 75 bp, synthetic construct
  source 1..75: mol_type = other DNA
attgccgggaatggctaaccgtcacgggctgattactggcgcaacggggacgggtaaaactgtcacgttgcaaaa

SEQ ID NO: 140111 - DNA, 75 bp, synthetic construct
  source 1..75: mol_type = other DNA
agtaacgcatctgttggtgcaatccagcgcggattactgtcgctggagcagcaaggagcgacgcatttctttggc

SEQ ID NO: 140112 - DNA, 75 bp, synthetic construct
  source 1..75: mol_type = other DNA
cggaagtggtcaccgggcatacggacgttatttgctcaacctcagtcagccacattctggctgtgcgaaagacca

SEQ ID NO: 140113 - DNA, 75 bp, synthetic construct
  source 1..75: mol_type = other DNA
gaacaaagatgaagtgtttgagcgaggggagatcaacgtcttcaggggactgagctggaattacaaaactaattg

SEQ ID NO: 140114 - DNA, 75 bp, synthetic construct
  source 1..75: mol_type = other DNA
gggctgattactggcgcaacggggacgggtaaaaccgttacgctgcaaaaactggcggagtcattgtcggaaatc

SEQ ID NO: 140115 - DNA, 75 bp, synthetic construct
  source 1..75: mol_type = other DNA
cgttcagggatgctttccttaatggatgcacaggcccgtgatacatggtaccggtcactggagtacgataatttt

SEQ ID NO: 140116 - DNA, 75 bp, synthetic construct
  source 1..75: mol_type = other DNA
aatatggttatgcggcgctggttattggcagtctggcagagggtgaaaccgtcaccttgttggggggcgtcgctg

SEQ ID NO: 140117 - DNA, 75 bp, synthetic construct
  source 1..75: mol_type = other DNA
gctcccaccgaaaatctttctgccactgaatattctcggcgcgctggcctgggcgctgatttttaccgctattgg

SEQ ID NO: 140118 - DNA, 75 bp, synthetic construct
  source 1..75: mol_type = other DNA
ctgctcgctcggttgaaaggtatcggcgtcaacgactggcaaccgcattcgaatccagcggtggtgtgggatatt

SEQ ID NO: 140119 - DNA, 75 bp, synthetic construct
  source 1..75: mol_type = other DNA
tttactgccgggaatggctaaccgtcacgggctgattaccggcgcaacggggacgggtaaaaccgttacgctgca

SEQ ID NO: 140120 - DNA, 75 bp, synthetic construct
  source 1..75: mol_type = other DNA
caaaactggtgtttttcttcgacgaggcacatctgctgtttaacgatgcaccgcaggtactgctggataagattg

SEQ ID NO: 140121 - DNA, 75 bp, synthetic construct
  source 1..75: mol_type = other DNA
tatgacgggctgatctactcgttgggcttcctggtaggctggccaatcattctgttcctgattgccgaacgtctg

SEQ ID NO: 140122 - DNA, 75 bp, synthetic construct
  source 1..75: mol_type = other DNA
atgatcctcggcccgacgatttgggtacagatcctcggtcacgaaaaagccatcttcccgtatgaatacccggcg

SEQ ID NO: 140123 - DNA, 75 bp, synthetic construct
  source 1..75: mol_type = other DNA
gggctggcgattgccggggactatatgtccgccgcctcattcttggggatctccgcgctggtgtttacctccggc

SEQ ID NO: 140124 - DNA, 75 bp, synthetic construct
  source 1..75: mol_type = other DNA
agccgattaagattggaataagagcctgtgcctttgttgaaagtgagattgatgaatggattgaacaactgatct

SEQ ID NO: 140125 - DNA, 75 bp, synthetic construct
  source 1..75: mol_type = other DNA
gcctgtggttctctggtggtcgtggcactttaccttatcgctcagatggtaggcgcaggtaaactcatcgaactg

SEQ ID NO: 140126 - DNA, 75 bp, synthetic construct
  source 1..75: mol_type = other DNA
gcttcctggtgggctggccgatcattctgttcctgattgccgaacgtctgcgtaacctcggtcgctatacctttg

SEQ ID NO: 140127 - DNA, 75 bp, synthetic construct
  source 1..75: mol_type = other DNA
gagccgatgctggacatcaaagactggatacgtaccgatgccaacggaaaaggggtcatcaatatcctcagcgca

SEQ ID NO: 140128 - DNA, 75 bp, synthetic construct
  source 1..75: mol_type = other DNA
agtacatcggcgataacgccaaatccttccagaatcagtatgggaatatcagtagcgcatcgattggcgcaatcc

SEQ ID NO: 140129 - DNA, 75 bp, synthetic construct
  source 1..75: mol_type = other DNA
ctgctcgcaaggcttaaaaatatcggcgtaaatgactggcaaccgcatgctaatccggtggtggtgtgggatatc

SEQ ID NO: 140130 - DNA, 75 bp, synthetic construct
  source 1..75: mol_type = other DNA
catttggttgatggcttctcaaaacgagagtcttgtgaaagacatgatgtatcattaagttatttttctcttagt

SEQ ID NO: 140131 - DNA, 75 bp, synthetic construct
  source 1..75: mol_type = other DNA
attccagaatcagtacggtaatattagtagcgcatcggttggtgccatccagcgcggattactgacgctggaaca

SEQ ID NO: 140132 - DNA, 75 bp, synthetic construct
  source 1..75: mol_type = other DNA
tcgcgttcagcacgctctgcgcgcctttacaccgaaagatcagaaagcagtaaaagctgcggcgcaaaccatgcg

SEQ ID NO: 140133 - DNA, 75 bp, synthetic construct
  source 1..75: mol_type = other DNA
gcgaagcatattgaggcgtatattcagatgcgactggcgcagggtattcagaaacagacgctgcataacgaaacg

SEQ ID NO: 140134 - DNA, 75 bp, synthetic construct
  source 1..75: mol_type = other DNA
ttgcggcagccctgacgctggcgcggctgatggggctacgctcgcaggaagcggtacagtgtgcacagtcgctta

SEQ ID NO: 140135 - DNA, 75 bp, synthetic construct
  source 1..75: mol_type = other DNA
atgaacagaaaactgttggccttattcatggcagccataacgctaccagtcgcagcagcgcagtacgtaaaaccc

SEQ ID NO: 140136 - DNA, 75 bp, synthetic construct
  source 1..75: mol_type = other DNA
cgcgcagaagtcacccgcctgtttgatagcgaactagaggtcatcgcgggagcgaacgaattgctggcgagcgtt

SEQ ID NO: 140137 - DNA, 75 bp, synthetic construct
  source 1..75: mol_type = other DNA
gcagagtgagcgactgaataaccgctcgctgggcctgtctggcgcatcccgtaacggtacgaagcgggccatcac

SEQ ID NO: 140138 - DNA, 75 bp, synthetic construct
  source 1..75: mol_type = other DNA
ggtgcagggcatcacaaagcgttccctgcaaaatgagatggcggcggtgcgctgcattctgaaacaggccgggcg

SEQ ID NO: 140139 - DNA, 75 bp, synthetic construct
  source 1..75: mol_type = other DNA
atttactttcctcgtttggcaactcttagtatcaactttctttggattatattatctcggaaacagaattcatat

SEQ ID NO: 140140 - DNA, 75 bp, synthetic construct
  source 1..75: mol_type = other DNA
ccctcagcatatgcatagtgattttcaacgcttttatcacaccactaataaacatactgaataatgatatagcaa

SEQ ID NO: 140141 - DNA, 75 bp, synthetic construct
  source 1..75: mol_type = other DNA
ttagaccgtttggttaccttttcattaagggaattagtggtaagtgcgcatacgatttttatgcacctgccgggc

SEQ ID NO: 140142 - DNA, 75 bp, synthetic construct
  source 1..75: mol_type = other DNA
atgatttacatcggtctaccgcaatggtcgcatcctaaatgggtgcggttggggatcaccagccttgaagagtat

SEQ ID NO: 140143 - DNA, 75 bp, synthetic construct
  source 1..75: mol_type = other DNA
cggcatgagcgccacctggtgtgcgctgttgctgatggtgctggcgaatctttggtatatgccctgggagttggt

SEQ ID NO: 140144 - DNA, 75 bp, synthetic construct
  source 1..75: mol_type = other DNA
gcccgccactttaactgcgtggagggtaacaccacgctttatgccctgccgaaacccgaggttgtcctgcgctgg

SEQ ID NO: 140145 - DNA, 75 bp, synthetic construct
  source 1..75: mol_type = other DNA
tgccttatgcccgcgaattatttagtcgcctgggggaagtgaaagcagttcctggacgcccgattccggttgtac

SEQ ID NO: 140146 - DNA, 75 bp, synthetic construct
  source 1..75: mol_type = other DNA
ggtgcgttcggtcacgaaagtgaacgcgtcgctgctgacggggaaatcagtaaaatttgttggcaccgccactgc

SEQ ID NO: 140147 - DNA, 75 bp, synthetic construct
  source 1..75: mol_type = other DNA
atgacaactgttaaccagatctctgatgcaaacattacccccaccctcccgccgaaaattcgcgaagcggtggaa

SEQ ID NO: 140148 - DNA, 75 bp, synthetic construct
  source 1..75: mol_type = other DNA
ccatacaccacaaggcaatatcgttatttccgcatttgaacagacgttatggcgaagcgagcagaaacgccgtta

SEQ ID NO: 140149 - DNA, 75 bp, synthetic construct
  source 1..75: mol_type = other DNA
ggtgcgttcggtcacgaaggtgaacgaatctttgctggccggaaaacccattaaatttgtcggtactgctactgc

SEQ ID NO: 140150 - DNA, 75 bp, synthetic construct
  source 1..75: mol_type = other DNA
tcgtcgttgctaatgcttgccgaacgcgatggattttcactgcatgaccgtaccgtggggatcgtgggagttggt

SEQ ID NO: 140151 - DNA, 75 bp, synthetic construct
  source 1..75: mol_type = other DNA
tatgagcgctctgacaccctgagagggttaattaccggagcctggtacagtgccttagggttagaactggaagat

SEQ ID NO: 140152 - DNA, 75 bp, synthetic construct
  source 1..75: mol_type = other DNA
cacattctggctgtacgaaagagtacgctgctgcaaatcgacacacttacccggcaactggcagaaatctcagca

SEQ ID NO: 140153 - DNA, 75 bp, synthetic construct
  source 1..75: mol_type = other DNA
ttcgtctggatgatcacattcagtctgttcagggtaaagagagctatgaagatgagatgttcagcatcagatact

SEQ ID NO: 140154 - DNA, 75 bp, synthetic construct
  source 1..75: mol_type = other DNA
aatgacccggacacagtgctgaaagactttattcataaacatatcaccagaccggctctggctaacgatgcgatg

SEQ ID NO: 140155 - DNA, 75 bp, synthetic construct
  source 1..75: mol_type = other DNA
gcgcaaaacaaatctgggaagattttatgcagtcgcatggaaaagcgcttattcagacgctgagcctgcttaaat

SEQ ID NO: 140156 - DNA, 75 bp, synthetic construct
  source 1..75: mol_type = other DNA
cgtcgcgctgaaatggaagccacgacgaacacactgaatgaggagtggcgcacgctgtttcgtgaaagtcagggc

SEQ ID NO: 140157 - DNA, 75 bp, synthetic construct
  source 1..75: mol_type = other DNA
tcgccgcagccaactactgaaaaccactgtacgccatcggcgctacaaactttgctggggcgcgagttctgtcat

SEQ ID NO: 140158 - DNA, 75 bp, synthetic construct
  source 1..75: mol_type = other DNA
ggcgcacggcagcaatccactggcggcgacattgcgcggacggcgggtcagccggatagcagttcatccggctcg

SEQ ID NO: 140159 - DNA, 75 bp, synthetic construct
  source 1..75: mol_type = other DNA
tgggcaggttttcgtcgcccgcggggtaatctggtagcccagtcgctggcggcgcacggcagcaatccactggca

SEQ ID NO: 140160 - DNA, 75 bp, synthetic construct
  source 1..75: mol_type = other DNA
atggggttgactccccggcattctggttggccgtgctgatgtggtgcgtgttctttgttgtgatgagactcctgg

SEQ ID NO: 140161 - DNA, 75 bp, synthetic construct
  source 1..75: mol_type = other DNA
gtacacgacgaatatgacccgcagccatgaatatgctgaaatggcatcccgtactgaaagcatgagtgggcagat

SEQ ID NO: 140162 - DNA, 75 bp, synthetic construct
  source 1..75: mol_type = other DNA
gcacaataatattatgctatggaattaactttatactacctattcttttctttaaagaaataagtttaatattat

SEQ ID NO: 140163 - DNA, 75 bp, synthetic construct
  source 1..75: mol_type = other DNA
tggtttttgacgatgaaaacttcacccatacaccacaaggcaatatcgtcatttccgcatttgaacagacgttat

SEQ ID NO: 140164 - DNA, 75 bp, synthetic construct
  source 1..75: mol_type = other DNA
ctggaaaaagtggttagcgaggcactggtttttgacgatgaaaccttcacgcgcgtaccccaaggcaacatcgtc

SEQ ID NO: 140165 - DNA, 75 bp, synthetic construct
  source 1..75: mol_type = other DNA
tgggcaggttttcgtcgcccgcggggtaatctggtggcccagtcgctggcggcgcacggcagcaatccactggcg

SEQ ID NO: 140166 - DNA, 75 bp, synthetic construct
  source 1..75: mol_type = other DNA
ctggaaaaaatggttagtgaggctctggtttttgacgacgaaaacttcactcattcgccacaaggcaagatcacc

SEQ ID NO: 140167 - DNA, 75 bp, synthetic construct
  source 1..75: mol_type = other DNA
gacgactggcttgaactggccggttttgcttttgctcatcgtccgctattaacgtcgttaggttgcttattgcgt

SEQ ID NO: 140168 - DNA, 75 bp, synthetic construct
  source 1..75: mol_type = other DNA
cgtgggcgcggtaaatcggcgctggcagggcaactcatttctcgtattgcgggtagtgcgattgtcactgcgccc

SEQ ID NO: 140169 - DNA, 75 bp, synthetic construct
  source 1..75: mol_type = other DNA
tgaattgatgtgggtgtggttgccggggatgctactgatggggatgctactgatgggaatgttgtggtggcgcag

SEQ ID NO: 140170 - DNA, 75 bp, synthetic construct
  source 1..75: mol_type = other DNA
ccgttcccctatgcattggtttagggttgggttcgaaagccatccctccgcgtctgttatttgccggaatcatcc

SEQ ID NO: 140171 - DNA, 75 bp, synthetic construct
  source 1..75: mol_type = other DNA
cggtccgcagcctgcgtaccagtctgcactttgccatgatgcaggcgcgtaacaacgtattgatgctgaccggcg

SEQ ID NO: 140172 - DNA, 75 bp, synthetic construct
  source 1..75: mol_type = other DNA
cggaattcaccgctcgtcttgttgaccgttggcgagagcttgaagaaactgcggttaatatccccaaaacgctac

SEQ ID NO: 140173 - DNA, 75 bp, synthetic construct
  source 1..75: mol_type = other DNA
atcgtccagctcctttataagtcaattgccaactaaaaaattcatatatattatgcaaatgctatggcgaaattt

SEQ ID NO: 140174 - DNA, 75 bp, synthetic construct
  source 1..75: mol_type = other DNA
atgaatgagttaataaatggcaacgccatcaaaatgacaagcattgaaatcgctgagttggtagaaagccgccat

SEQ ID NO: 140175 - DNA, 75 bp, synthetic construct
  source 1..75: mol_type = other DNA
gggctggctcaggcgcgtgacccgcaactggcggcatggattgaagagaacgtcaccttcccgtgcaccatggtt

SEQ ID NO: 140176 - DNA, 75 bp, synthetic construct
  source 1..75: mol_type = other DNA
aaaatgccgactttgttggcgcggtgacgacggcatatcagcagttgtgcgaacgtggcgcgcgcgagtgtgtgg

SEQ ID NO: 140177 - DNA, 75 bp, synthetic construct
  source 1..75: mol_type = other DNA
caacgccatcgacgtagttgacccgatgctggctgaattccagaagatcaacgcgcaatatcagggagcagaacg

SEQ ID NO: 140178 - DNA, 75 bp, synthetic construct
  source 1..75: mol_type = other DNA
tgctagtattccgctatctgaatggcaaaaagcgcgtgataacgttcagaccattaaaggtgtgaaacgctacaa

SEQ ID NO: 140179 - DNA, 75 bp, synthetic construct
  source 1..75: mol_type = other DNA
ctgattattctcggcagtatcattctttgtttgatgctttctgtggtgggcgtactgctgcgttctctgtttaat

SEQ ID NO: 140180 - DNA, 75 bp, synthetic construct
  source 1..75: mol_type = other DNA
cgcgcaaatcggaagaagccgcgaaaagcctcgagttcctcgaagtgcagctgccacaggtgcgcagccagttgg

SEQ ID NO: 140181 - DNA, 75 bp, synthetic construct
  source 1..75: mol_type = other DNA
gggcgtggtcaacagtggctgaccagaaagctgctagataacggaatgcttaaagtaacaggggaggctgcttaa

SEQ ID NO: 140182 - DNA, 75 bp, synthetic construct
  source 1..75: mol_type = other DNA
atgaacgagctgataaatagcaacgtcatcaaaattaccagcattgaaatctctgagcttacaggtaagcgtcat

SEQ ID NO: 140183 - DNA, 75 bp, synthetic construct
  source 1..75: mol_type = other DNA
ttgctgggctgggagcgattgatgatagcgtgaccgaagttgccaaaggtatgggaatgagccgtagtcagcgac

SEQ ID NO: 140184 - DNA, 75 bp, synthetic construct
  source 1..75: mol_type = other DNA
ggcggggaatacggatgatggtattgccatgcaactgggaacacccgtcagtggtctgccgtccacagggtacgc

SEQ ID NO: 140185 - DNA, 75 bp, synthetic construct
  source 1..75: mol_type = other DNA
aggcgaacaaggtaagcgagatagtattgttgttgtagcccagttgtcgccggaattcaccgctcgccttgttga

SEQ ID NO: 140186 - DNA, 75 bp, synthetic construct
  source 1..75: mol_type = other DNA
gcacctaaagttgagtttgccgatcgcgttggcgaggccagcggaattttgattggaaactttgcaaaggttgtt

SEQ ID NO: 140187 - DNA, 75 bp, synthetic construct
  source 1..75: mol_type = other DNA
acactcaacctgaatgacgtcaccaccggtaatcagacactgaccatcagtaaagacacatccaaagctgaaaat

SEQ ID NO: 140188 - DNA, 75 bp, synthetic construct
  source 1..75: mol_type = other DNA
tagcagcaacctgaccagttggctctcctccaccgggataatccaggccgcaaaagatggcgtcagcaaaacgct

SEQ ID NO: 140189 - DNA, 75 bp, synthetic construct
  source 1..75: mol_type = other DNA
ccgttggcgagagcttgaagaagctgcggttaatatccccaaaacgctaccagaagcgttgcgccttgctgctga

SEQ ID NO: 140190 - DNA, 75 bp, synthetic construct
  source 1..75: mol_type = other DNA
tagcgtgacagacgttgccaaaggtatgggaatgagccggagtcagcgattgcgtaaagtggagttaccgttggc

SEQ ID NO: 140191 - DNA, 75 bp, synthetic construct
  source 1..75: mol_type = other DNA
tttgcagctctggcactggctcatttctggctggtgggaatttcgagtttgtttgcggtgatcattggcactggt

SEQ ID NO: 140192 - DNA, 75 bp, synthetic construct
  source 1..75: mol_type = other DNA
tccaaagctgaaaatgcggttaaagcgtgggtggatgcctataactcattgcaggatacgttcagcagcttaacc

SEQ ID NO: 140193 - DNA, 75 bp, synthetic construct
  source 1..75: mol_type = other DNA
atatcgtcgttggtctttttcagttggcagcaattatggctgggcttgaatcatggtggggattgcactggataa

SEQ ID NO: 140194 - DNA, 75 bp, synthetic construct
  source 1..75: mol_type = other DNA
gtcatcactggccgagcaccacaagaaatcattccggtttttggtgtgtttgatacagaaggaaatgatatatgt

SEQ ID NO: 140195 - DNA, 75 bp, synthetic construct
  source 1..75: mol_type = other DNA
taataaaccgcgagcgtgttcaggagatgcttggtggtatctccagaactactttttaccggaagcgtaaacagt

SEQ ID NO: 140196 - DNA, 75 bp, synthetic construct
  source 1..75: mol_type = other DNA
tgtccggtccggtggcccagtatggcgaccaggagtttactggcgcagagcaggcagttgcggatattaacgcta

SEQ ID NO: 140197 - DNA, 75 bp, synthetic construct
  source 1..75: mol_type = other DNA
tgagaaaggcgatctaaagggctttgagttcggcgtatttgactggcacgccaacggcacggcgaccgatgcgaa

SEQ ID NO: 140198 - DNA, 75 bp, synthetic construct
  source 1..75: mol_type = other DNA
caggctggccttctcttctttggtgggatcatctttgctattgtctgcggtggaatgtcatcatttttcgaatgg

SEQ ID NO: 140199 - DNA, 75 bp, synthetic construct
  source 1..75: mol_type = other DNA
ggggagctgttaaatcatgggcgcataaagtgccaaccgcatggcctcatgacggaaaccagcacgagaagggcg

SEQ ID NO: 140200 - DNA, 75 bp, synthetic construct
  source 1..75: mol_type = other DNA
tggaatgtattctgaaccgttataagcccgcgtggcagacgtttatttacgtctatgcaaacagccatgaagagg

SEQ ID NO: 140201 - DNA, 75 bp, synthetic construct
  source 1..75: mol_type = other DNA
cggcagagtttggttatgaaatagatattcagccatcaccggattcacagtgggtcagtattgtcacgataaaca

SEQ ID NO: 140202 - DNA, 75 bp, synthetic construct
  source 1..75: mol_type = other DNA
ttgataggaatcaagttccagaagacaggatcgcattgttgatgggacatgagcgcgggaaaacagagactttca

SEQ ID NO: 140203 - DNA, 75 bp, synthetic construct
  source 1..75: mol_type = other DNA
aaacaactcgatctgccaatgatggtagaaaataacaccagcgcctatggcaccggttttaccgtgaccattgaa

SEQ ID NO: 140204 - DNA, 75 bp, synthetic construct
  source 1..75: mol_type = other DNA
tgcgtggaagtatgagcgcaaaaggttgctgctacgataatgcctgcgtggaaagcttctttcattcgctgaaag

SEQ ID NO: 140205 - DNA, 75 bp, synthetic construct
  source 1..75: mol_type = other DNA
gatgacgcaggataaattcgacgaattccctgactacttcaaacagacattaatgctggccgtggttaatgaagc

SEQ ID NO: 140206 - DNA, 75 bp, synthetic construct
  source 1..75: mol_type = other DNA
tgcatttaacgttctggatattgagtcggcaacgtataccgtcagagatggcgcgggttcgatcatcgttgataa

SEQ ID NO: 140207 - DNA, 75 bp, synthetic construct
  source 1..75: mol_type = other DNA
gacgctgacagagtggaaacagctgtgggttaagctggaaggaaagccgcttccggcgcaggcaccgcccctgaa

SEQ ID NO: 140208 - DNA, 75 bp, synthetic construct
  source 1..75: mol_type = other DNA
gatctgccgcagaatgccgactttgttggcgcggtgacggcggcatatcagcagctgtgcgaacgcggtgcgcgc

SEQ ID NO: 140209 - DNA, 75 bp, synthetic construct
  source 1..75: mol_type = other DNA
gatcttcagtcgatagccaatcagataaaatcgatttaggcaaactttttggcattctgctggatgccaaatgga

SEQ ID NO: 140210 - DNA, 75 bp, synthetic construct
  source 1..75: mol_type = other DNA
gtgtgagatagcaaatggcaatgatatcgtcgcagcacgagaggatggcattttgtcagaatctatcggtgaaac

SEQ ID NO: 140211 - DNA, 75 bp, synthetic construct
  source 1..75: mol_type = other DNA
ccgtatataccgaactgcttcacaagatgcagccagtacagcgcccggaaaaaggatggatgcttgccactggtg

SEQ ID NO: 140212 - DNA, 75 bp, synthetic construct
  source 1..75: mol_type = other DNA
atgagtaagatcgcgagattcagctacaaagcgttggccaccatttacccagtgacgcgtgacgactggacaaac

SEQ ID NO: 140213 - DNA, 75 bp, synthetic construct
  source 1..75: mol_type = other DNA
gtggctaacgtctcgctgtctaacattgcgggcgaatcagcggaagggctgctggtgaccaagccgaagaactac

SEQ ID NO: 140214 - DNA, 75 bp, synthetic construct
  source 1..75: mol_type = other DNA
tgtttatggggttaaccctggcaaatatcggtggcgtgccggcggcgacctggttgggtgaaaccatcggctggc

SEQ ID NO: 140215 - DNA, 75 bp, synthetic construct
  source 1..75: mol_type = other DNA
atgaaaattaactatccgttgctggcgctggcaattggcgcatttggtatcgggacaacggaattctcgccaatg

SEQ ID NO: 140216 - DNA, 75 bp, synthetic construct
  source 1..75: mol_type = other DNA
ggcggctggggccaactttataaccgggatcgttgaatgggacatgagcatgtttaatgacgcgccggattataa

SEQ ID NO: 140217 - DNA, 75 bp, synthetic construct
  source 1..75: mol_type = other DNA
cctgccgggtaagagtatcaagaacgcccacagtgaccgctgtgtcccgttggtagatggtgcttatggttttgt

SEQ ID NO: 140218 - DNA, 75 bp, synthetic construct
  source 1..75: mol_type = other DNA
gcgcatgcccgggacacatggtaccggtcactggaatacgataactttccggaaatcagcaaggcgaatatcctg

SEQ ID NO: 140219 - DNA, 75 bp, synthetic construct
  source 1..75: mol_type = other DNA
aaatactttaagaagggctctgcgcacatcacgttcaggaagccagaactggttgacagactgaatgatattatc

SEQ ID NO: 140220 - DNA, 75 bp, synthetic construct
  source 1..75: mol_type = other DNA
cagctcactggagtacgataattttccggaaatcagtgaagcgaacattctgatcacatttgaacaactacacca

SEQ ID NO: 140221 - DNA, 75 bp, synthetic construct
  source 1..75: mol_type = other DNA
aaagaatgctgcacctgttcagcggcaaaccgatccccgacagccgggaaaatattattattcggctggatgatc

SEQ ID NO: 140222 - DNA, 75 bp, synthetic construct
  source 1..75: mol_type = other DNA
aagggatctgcacacatcactttcaaaaggctggagctgattgacagaattaacgatataatagccaggcacttt

SEQ ID NO: 140223 - DNA, 75 bp, synthetic construct
  source 1..75: mol_type = other DNA
atggagaaacccgaaacagcaatgaaagccattacccggaatcttgatcgcgaaatctggcgtgatctgatgcaa

SEQ ID NO: 140224 - DNA, 75 bp, synthetic construct
  source 1..75: mol_type = other DNA
agaggccggttcagagatgcagatgcgtaccacctggaccaggcctttccgctgctgatgaaacaactggaactc

SEQ ID NO: 140225 - DNA, 75 bp, synthetic construct
  source 1..75: mol_type = other DNA
tgaaatctggcgtgacctgatacaacgttccgggatgctttccttaatggatgcacaggcccgtgatacatggta

SEQ ID NO: 140226 - DNA, 75 bp, synthetic construct
  source 1..75: mol_type = other DNA
acgttcaggaaaccagaactggttgacaggcttaatgatattattgcgaaacactatccgggagtgttaccttca

SEQ ID NO: 140227 - DNA, 75 bp, synthetic construct
  source 1..75: mol_type = other DNA
aaacaggattttcgctgtggttgctggctgactgagaaaccggaaaccgcaatgaaagccattacccgcaacctt

SEQ ID NO: 140228 - DNA, 75 bp, synthetic construct
  source 1..75: mol_type = other DNA
atcactacggactaaggacagacgtaccgctatggctcactcacggcacatcaagtcagcacttaaagcaataca

SEQ ID NO: 140229 - DNA, 75 bp, synthetic construct
  source 1..75: mol_type = other DNA
tctgagcacatttgaacaactgcaccagaataaagatgaggtgtttgaacggggcgtgatcaacgtcttcatagg

SEQ ID NO: 140230 - DNA, 75 bp, synthetic construct
  source 1..75: mol_type = other DNA
cgaccattatccgcgaacgtttgcaaaacggtgaatcgtgtgaggatttgttgccggaatcagtattgacctaca

SEQ ID NO: 140231 - DNA, 75 bp, synthetic construct
  source 1..75: mol_type = other DNA
ctgtaaatttggcagtaaaattatcgtcaacaatctggtgaggggggaccggtggggattgcatcttatcaccgg

SEQ ID NO: 140232 - DNA, 75 bp, synthetic construct
  source 1..75: mol_type = other DNA
tctgagcacatttgaacaactgcaccagaataaggatgaggtgtttgagcggggcgtgatcaacgtcttcatagg

SEQ ID NO: 140233 - DNA, 75 bp, synthetic construct
  source 1..75: mol_type = other DNA
tctgagcacatttgaacaactgcaccagaataacgatgaggtgtttgaccggggcgtgatcaacgtcttcatagg

SEQ ID NO: 140234 - DNA, 75 bp, synthetic construct
  source 1..75: mol_type = other DNA
tctgagcacatttgaacaactgcaccagaataatgatgaggtgtttgatcggggcgtgatcaacgtcttcatagg

SEQ ID NO: 140235 - DNA, 75 bp, synthetic construct
  source 1..75: mol_type = other DNA
cgaaatctggcgtgacctgatgcaacgctccgggatgctttccttaatggatgcacaggcccgtgatacatggta

SEQ ID NO: 140236 - DNA, 75 bp, synthetic construct
  source 1..75: mol_type = other DNA
ccgccccggactgggcgatgaaacaggattttcgctgcggctgctggctgatggagaaaccggaaaccgcaatga

SEQ ID NO: 140237 - DNA, 75 bp, synthetic construct
  source 1..75: mol_type = other DNA
ggatctgcacacatcactttcaaaaggctggaactgattgacagaattaacgatataatagccaggcaatttctt

SEQ ID NO: 140238 - DNA, 75 bp, synthetic construct
  source 1..75: mol_type = other DNA
tgagcacatttgaacaactgcaccagaacatagatgaagtgtttgagcgaggggtgatcaacgtcttcaggggac

SEQ ID NO: 140239 - DNA, 75 bp, synthetic construct
  source 1..75: mol_type = other DNA
tgaaagccatcacccgcaacctcgactgcgaaatctggcgtgacctgatgcaacgctccgggatgctgagtctga

SEQ ID NO: 140240 - DNA, 75 bp, synthetic construct
  source 1..75: mol_type = other DNA
ctgacagaaagtattggaggtaaaaccgccctggactgggcgatgaaacaggattttcgctgcggctgctggctg

SEQ ID NO: 140241 - DNA, 75 bp, synthetic construct
  source 1..75: mol_type = other DNA
attatttctgaattgatgtgggtgtggttgccggggatgctactgatgggaatgttgtggtggcgcagacgataa

SEQ ID NO: 140242 - DNA, 75 bp, synthetic construct
  source 1..75: mol_type = other DNA
cacgccgtacgggcatcaggtgattatttctgaattgatgtgggtgtggttgccggggatggtgctgatgggaat

SEQ ID NO: 140243 - DNA, 75 bp, synthetic construct
  source 1..75: mol_type = other DNA
aatccaaccgatctggcgattgaagccatccgtagtctgcgtaccagtctgcacttcgcgatgatgcaggcgcag

SEQ ID NO: 140244 - DNA, 75 bp, synthetic construct
  source 1..75: mol_type = other DNA
tacgtcactgctctggcggcaatcactggagcaagacttaatgaggtcgctcagctacaggtcaaagacgtcagg

SEQ ID NO: 140245 - DNA, 75 bp, synthetic construct
  source 1..75: mol_type = other DNA
gcggtaaaggcgttggctggctgtggccgtggtcagatgaacgctttttcgctccctggcaggtgattaaagtcg

SEQ ID NO: 140246 - DNA, 75 bp, synthetic construct
  source 1..75: mol_type = other DNA
gcggcaaaggtgttggctggttgtggccgtggtcagaggaacgatttttcgcctcctggcaggtgattaaagtcg

SEQ ID NO: 140247 - DNA, 75 bp, synthetic construct
  source 1..75: mol_type = other DNA
ccggcaactggctgaaatctcagttctgacggaaagcattggaggtaaaaccacccgggactgggccatgaaaca

SEQ ID NO: 140248 - DNA, 75 bp, synthetic construct
  source 1..75: mol_type = other DNA
gattatgttatctgggcgaaagaagttcagggtattaaccgtgcatggactttcagacactggaaaggcattgga

SEQ ID NO: 140249 - DNA, 75 bp, synthetic construct
  source 1..75: mol_type = other DNA
cgcggcatcgaaagcccgcaggtgctggaagaacacggtatcagcgtctatgccagcatcccgctgtcggaatgg

SEQ ID NO: 140250 - DNA, 75 bp, synthetic construct
  source 1..75: mol_type = other DNA
accgtccgtctccctatctgtatcatcggagcctgaagtccctgaacctctcgtgactctggaacgagtaactaa

SEQ ID NO: 140251 - DNA, 75 bp, synthetic construct
  source 1..75: mol_type = other DNA
cggaagtggtcaccgggcatacggacgttatctgctcaaccaatatccgccacattctggctgtacgaaagagta

SEQ ID NO: 140252 - DNA, 75 bp, synthetic construct
  source 1..75: mol_type = other DNA
tgatggtcttgtttatgttgatgctgggcgcgcagctgaccactatctttttcaaaggtatgctcgggctgccgt

SEQ ID NO: 140253 - DNA, 75 bp, synthetic construct
  source 1..75: mol_type = other DNA
gggcgcgcagctgaccactatctttttcaaaggtatgctcgggctgccgtttggcatagccgacccaaattttaa

SEQ ID NO: 140254 - DNA, 75 bp, synthetic construct
  source 1..75: mol_type = other DNA
accagcctggcggtggggattgcgctctccggcgtgctgacgatgttgattggttttagcggattaggccatcgc

SEQ ID NO: 140255 - DNA, 75 bp, synthetic construct
  source 1..75: mol_type = other DNA
accgtccgtctccctatctgtatcatcggagcctgaagtccctgaacctaaagcactgaccctcgcgtctctcat

SEQ ID NO: 140256 - DNA, 75 bp, synthetic construct
  source 1..75: mol_type = other DNA
cggcactcacgcgactgttttgtagtattccattaccggtgagtagcgcggtaatgctggtttcttatctacctt

SEQ ID NO: 140257 - DNA, 75 bp, synthetic construct
  source 1..75: mol_type = other DNA
accgcctgtgtatctgcaagaccttccattaacgcttcgtcctctgctcagtaacggcttactggtcggaatttt

SEQ ID NO: 140258 - DNA, 75 bp, synthetic construct
  source 1..75: mol_type = other DNA
gccgaaacatttaaccgatctttctgcattgccgtgcctggtcattaaagagcgcgatcatccttttggtgtctg

SEQ ID NO: 140259 - DNA, 75 bp, synthetic construct
  source 1..75: mol_type = other DNA
tgaaatctggcgaaacttgatgcaacgttcagggatgctttccttaatggatgcacaggcccgtgatacatggta

SEQ ID NO: 140260 - DNA, 75 bp, synthetic construct
  source 1..75: mol_type = other DNA
tcaatgacgttatcggtgtgcttaaggcctgtcaggatagactcaagggtgatagctctggcctgttgtcttacc

SEQ ID NO: 140261 - DNA, 75 bp, synthetic construct
  source 1..75: mol_type = other DNA
gtctcgatgggcaggggattgctctgcgttcctggtgggatgttagcgaaaacattgccagtggtcatttagtgc

SEQ ID NO: 140262 - DNA, 75 bp, synthetic construct
  source 1..75: mol_type = other DNA
caggggatgctgcgtattatcagcagctttggttttggacgacaggtggtggctccggcgttatcagcgctggcg

SEQ ID NO: 140263 - DNA, 75 bp, synthetic construct
  source 1..75: mol_type = other DNA
catggagaaattgtccatcagtggtgtctcgatgggcaggggattgctctgcgctcctggtgggatgttagcgaa

SEQ ID NO: 140264 - DNA, 75 bp, synthetic construct
  source 1..75: mol_type = other DNA
aaacgccaaagcagaaagccttaaaaaagatcccgttgtctgggagtgggatccgcagcaaaagaaaatggttaa

SEQ ID NO: 140265 - DNA, 75 bp, synthetic construct
  source 1..75: mol_type = other DNA
gtggagtcggttacattttctcttccggatattctcagtgatctggctgttccccgtctggaatcccttactgtg

SEQ ID NO: 140266 - DNA, 75 bp, synthetic construct
  source 1..75: mol_type = other DNA
attacgagcgcattctggctgataatggcatgccggtaaccgaagaacaggcacgcgctgaatttgaagccattg

SEQ ID NO: 140267 - DNA, 75 bp, synthetic construct
  source 1..75: mol_type = other DNA
aaagatcagatcaagactgaactagccttcaaaccggctggaaatattgtgactcgttccctgaaggccactaaa

SEQ ID NO: 140268 - DNA, 75 bp, synthetic construct
  source 1..75: mol_type = other DNA
gatgctggttccgggaaagatgctgttttgcagcttttgcgtgttgattatgaaaacattgcgttggttgaagaa

SEQ ID NO: 140269 - DNA, 75 bp, synthetic construct
  source 1..75: mol_type = other DNA
atgtcatcacccgctatattgcagggcggctatgtgctgcctctctcccggtcgttcacccaactgcttctggat

SEQ ID NO: 140270 - DNA, 75 bp, synthetic construct
  source 1..75: mol_type = other DNA
ccggcgttgagaacgatgaaaactggctgaccacaccgggtgccaacgaagaaagcgatgacgagctgcgtgatc

SEQ ID NO: 140271 - DNA, 75 bp, synthetic construct
  source 1..75: mol_type = other DNA
ccctttacaatcgtggtgaccgccgccgctggtactggccatgtccgcactgcggtgaatattttcagccagcca

SEQ ID NO: 140272 - DNA, 75 bp, synthetic construct
  source 1..75: mol_type = other DNA
gcgttatggcgtgactcgccaggtccaggctatgtgcatttccctgactggctggggagctggttttacgacgaa

SEQ ID NO: 140273 - DNA, 75 bp, synthetic construct
  source 1..75: mol_type = other DNA
gatttccggggcggttcaagcagcctcatagcaggggggctgatatcggttactgcctggcagtatgtaaactca

SEQ ID NO: 140274 - DNA, 75 bp, synthetic construct
  source 1..75: mol_type = other DNA
tttgatattgtggtgagcgattgttgcccggaagatgagtatgtgaagtacgcgcagacgcagcgtattaagttg

SEQ ID NO: 140275 - DNA, 75 bp, synthetic construct
  source 1..75: mol_type = other DNA
aggtggagtttattaccgagctgttcccaagctctggcaccggtcaggttaacgctgttttcccgcttcccgcgt

SEQ ID NO: 140276 - DNA, 75 bp, synthetic construct
  source 1..75: mol_type = other DNA
cacggttgccgccagggcgcgatcgacgggcataaagagatcagcaagcgttgccgggaaatgggcgtcgatacc

SEQ ID NO: 140277 - DNA, 75 bp, synthetic construct
  source 1..75: mol_type = other DNA
tggtgaatcgtattttgttgaatcgtattttgtccaacaaccacagccatcgtcgcgatatggatgtaacaatcg

SEQ ID NO: 140278 - DNA, 75 bp, synthetic construct
  source 1..75: mol_type = other DNA
tgaagcaagtacgcaaaattgcgtcggttggcgaacccttcttctttagagtcatagtgccctttaagattaaga

SEQ ID NO: 140279 - DNA, 75 bp, synthetic construct
  source 1..75: mol_type = other DNA
caacgattcgctttgtctgttggtgcaggtggaaagtaaaacagcactggataacctggacgaaatcctcgacgt

SEQ ID NO: 140280 - DNA, 75 bp, synthetic construct
  source 1..75: mol_type = other DNA
ggctggcaactgttgcaactggacggcagtcacgccactttccgtaaaggcgggcagcggctgacgctgaacgcc

SEQ ID NO: 140281 - DNA, 75 bp, synthetic construct
  source 1..75: mol_type = other DNA
aacacctgcaacaacagaccgccacgcgcagccgtgcaaaggcaaaacgccccgtcccatctccgctttgggccg

SEQ ID NO: 140282 - DNA, 75 bp, synthetic construct
  source 1..75: mol_type = other DNA
tgaaaagtcgcggcattaaggctgttttccagaccatcccggaagataaaccgcagtcgctggacgatatcctga

SEQ ID NO: 140283 - DNA, 75 bp, synthetic construct
  source 1..75: mol_type = other DNA
tgtccgccactcaggattgccagcaggcgacgcgcgcgtttgccgaaaaaagtagcgtgagcttccacaatcaat

SEQ ID NO: 140284 - DNA, 75 bp, synthetic construct
  source 1..75: mol_type = other DNA
gcagagcggcagcttcctgccgcctgacattgaaccgtgaagataaatgtcatgctattaacgaagagatgatcg

SEQ ID NO: 140285 - DNA, 75 bp, synthetic construct
  source 1..75: mol_type = other DNA
tagaaaaagaacaggtggaaagctggatggcgaatcagttagcgcagctggaaaaatgcggtccggtggcactgg

SEQ ID NO: 140286 - DNA, 75 bp, synthetic construct
  source 1..75: mol_type = other DNA
tgaacaaaaacgcgagctgaacggacgtggggtctggttgcgggatggtgaatccatcaatgcggatggcagtcg

SEQ ID NO: 140287 - DNA, 75 bp, synthetic construct
  source 1..75: mol_type = other DNA
gtcccggctatgtgcatttccctgactggctggggagctggttttacgacgaactgacgtatgaagagcggagca

SEQ ID NO: 140288 - DNA, 75 bp, synthetic construct
  source 1..75: mol_type = other DNA
atgaaattttctaaattttctgagttggtgaatcgtattttgttgaatcgtattttgtccaacaaccacagccat

SEQ ID NO: 140289 - DNA, 75 bp, synthetic construct
  source 1..75: mol_type = other DNA
tcaccgccgacgaactggcgttctccagttcgccggacgaaagcggcaacagcgacaacctgcaggcgctgatca

SEQ ID NO: 140290 - DNA, 75 bp, synthetic construct
  source 1..75: mol_type = other DNA
gatgccgcgtccaatgtctattccgcagcgcaaaaccagcagagcagcgtcagcggcgtcagcatggacgaagag

SEQ ID NO: 140291 - DNA, 75 bp, synthetic construct
  source 1..75: mol_type = other DNA
ctccgcgctgtatgacgcccgcgaccagatggtggaagaactcagcgggatgatggatgtgcaggtcaatatcga

SEQ ID NO: 140292 - DNA, 75 bp, synthetic construct
  source 1..75: mol_type = other DNA
aagagaaacaacatcagcagtttgccgaccaggaaagtgtccgcgtactggattatcagcagtgtctgcgcgcaa

SEQ ID NO: 140293 - DNA, 75 bp, synthetic construct
  source 1..75: mol_type = other DNA
tgatggatgtgcaggtcaatatcgacgatcagggcaactacaacgtcaccctgaaaaacggtcagccactggtga

SEQ ID NO: 140294 - DNA, 75 bp, synthetic construct
  source 1..75: mol_type = other DNA
gcgggcagcaaagctcgaccattgcgctggaaaccaacgccgatggcacgccaacgatgacactgacctttgccg

SEQ ID NO: 140295 - DNA, 75 bp, synthetic construct
  source 1..75: mol_type = other DNA
cacatcctttaaaccgcatggctctgacagtttcgcgggagccatctgcaaaaattgtggtcaccttgtaactga

SEQ ID NO: 140296 - DNA, 75 bp, synthetic construct
  source 1..75: mol_type = other DNA
tttctccccgagcaatagttcccttagcgcaacaaggctttttacagcccaaaattccaccctggtatcaggctc

SEQ ID NO: 140297 - DNA, 75 bp, synthetic construct
  source 1..75: mol_type = other DNA
catttttacaaaatgaaacacgacgctgaagagcgtgcattcgttgagttatgcgacctatctattcgtatgggg

SEQ ID NO: 140298 - DNA, 75 bp, synthetic construct
  source 1..75: mol_type = other DNA
cttaatgatacaagtctacatacaaaaactggcgtcagacgtattactacaggaaaagatcgattagcattagtt

SEQ ID NO: 140299 - DNA, 75 bp, synthetic construct
  source 1..75: mol_type = other DNA
taaaaaagtgttcaagatactttatcttgctatcagagataataaagatacagacacgatattaatgtcatttga

SEQ ID NO: 140300 - DNA, 75 bp, synthetic construct
  source 1..75: mol_type = other DNA
ctgaggttaaggctaaagccttacagaaccctgatgtaatggccgcttatcttgcagagaagaaagaggaagaat

SEQ ID NO: 140301 - DNA, 75 bp, synthetic construct
  source 1..75: mol_type = other DNA
cgttacttcgaacaacgtgttgctacacataaagaagctcactggcaggcttattatcaagctcgccaccgcctg

SEQ ID NO: 140302 - DNA, 75 bp, synthetic construct
  source 1..75: mol_type = other DNA
tggcccacgcggtgggcgtccgcgcctggtttttagcgaatcgcgcaggtgagccggccgatctggtggactgta

SEQ ID NO: 140303 - DNA, 75 bp, synthetic construct
  source 1..75: mol_type = other DNA
tagaaaaagaacaggtggaaagctggatggcgaaccagttagcgcagctggaaaaatgtggtccggtggcactgg

SEQ ID NO: 140304 - DNA, 75 bp, synthetic construct
  source 1..75: mol_type = other DNA
ctgcaataattatcagcagcctcatagcaggggggctgatatcggttactgcctggcagtatgtaaactcagcac

SEQ ID NO: 140305 - DNA, 75 bp, synthetic construct
  source 1..75: mol_type = other DNA
tgaatcacagcaacagtccggcattggctccggcctgaatgaaggtgataccgtggtggtcagtggcctgttcct

SEQ ID NO: 140306 - DNA, 75 bp, synthetic construct
  source 1..75: mol_type = other DNA
ctgcaataattatcagcagcctcatagcaggggggctgatatcggttactgcctggcagtatttaaactcatcac

SEQ ID NO: 140307 - DNA, 75 bp, synthetic construct
  source 1..75: mol_type = other DNA
cccgccttatccgctggccgctgatgagtcaggaagaatttgaccggcgcgaactgaacagcctgctggacgata

SEQ ID NO: 140308 - DNA, 75 bp, synthetic construct
  source 1..75: mol_type = other DNA
atgacagagctccggatgcgccgcccttcaccgctgcagcggcgggtactgattgtgctggccgccctcggtgcg

SEQ ID NO: 140309 - DNA, 75 bp, synthetic construct
  source 1..75: mol_type = other DNA
tttcatgaaaacttattacttgaaggacaaaaaaactaaaactaaagagaacaaaattaattgccaaggcaaaac

SEQ ID NO: 140310 - DNA, 75 bp, synthetic construct
  source 1..75: mol_type = other DNA
tgcactaggcgtttggccacatcaggtagaggccgatgtaaagcgtttttttctatacttgactgagtataagat

SEQ ID NO: 140311 - DNA, 75 bp, synthetic construct
  source 1..75: mol_type = other DNA
ttgatggtgacgacccagcaagattgaggcctttacagtattgcattaatggcacctggtatacagcagccacag

SEQ ID NO: 140312 - DNA, 75 bp, synthetic construct
  source 1..75: mol_type = other DNA
ttcagaggaatggcagaagagtttacgactctgcgaaaactgctggccaccaatacggacataccggtagcaaat

SEQ ID NO: 140313 - DNA, 75 bp, synthetic construct
  source 1..75: mol_type = other DNA
agatggtgagagaacgttcacatttatggttcgtccctccgcagatctcttccttacccctgcagagttaccggt

SEQ ID NO: 140314 - DNA, 75 bp, synthetic construct
  source 1..75: mol_type = other DNA
cgtgtgggcgatgatcctttcgggcgttttatgtacaaaaccatgataaatgaaggtgtcgatgttacatatatg

SEQ ID NO: 140315 - DNA, 75 bp, synthetic construct
  source 1..75: mol_type = other DNA
gtggcgctttggccacaacagcaaaaggagcgatgacagcactaccccgacgacataatatactcaattgcatat

SEQ ID NO: 140316 - DNA, 75 bp, synthetic construct
  source 1..75: mol_type = other DNA
actggcgctggatctggcggagtacggcattacggtgcattcgctgatgctcggtaacctgctgaaatcgccgat

SEQ ID NO: 140317 - DNA, 75 bp, synthetic construct
  source 1..75: mol_type = other DNA
cctgtgcgcgcgtgaattttcgcgtttgatgatccgcgacggcattcagggacgcattattcagatcaactcgaa

SEQ ID NO: 140318 - DNA, 75 bp, synthetic construct
  source 1..75: mol_type = other DNA
tcggtaacctgctgaaatcgccgatgttccagtcactgttgccacaatacgcgaccaagctgggtatcaaaccgg

SEQ ID NO: 140319 - DNA, 75 bp, synthetic construct
  source 1..75: mol_type = other DNA
gctaaagattatacttggtgcggaagtagctaaagctatgcattgcgatatcgaacaggtggataaagagcttgt

SEQ ID NO: 140320 - DNA, 75 bp, synthetic construct
  source 1..75: mol_type = other DNA
gccgactattctcgtcacgctgatgttgctgtctcaccagtacccaaatcagatgggacatctggtgattgctct

SEQ ID NO: 140321 - DNA, 75 bp, synthetic construct
  source 1..75: mol_type = other DNA
tttttaagaacggaagatattgatttaattaatgtaattaatgaagaaacattattgcaacaacctgaagaacgt

SEQ ID NO: 140322 - DNA, 75 bp, synthetic construct
  source 1..75: mol_type = other DNA
gacctgaatgatattgaaaaaataacgtttataaaagcaggcaggaattttctcgctcaaatggatggaagacaa

SEQ ID NO: 140323 - DNA, 75 bp, synthetic construct
  source 1..75: mol_type = other DNA
gctaaagattatacttggtgcggaagtagctaaagctatgcattgcgatatcgaacaggtggataaggaacttgt

SEQ ID NO: 140324 - DNA, 75 bp, synthetic construct
  source 1..75: mol_type = other DNA
gaacaaggcttccaggttcgaagcgtcgctaatgcagaacagatggatcgcctgctgactcgtgaatctttccat

SEQ ID NO: 140325 - DNA, 75 bp, synthetic construct
  source 1..75: mol_type = other DNA
tttaaggtatcaaagagccattaaaacacttatcattaatgagggtgaaaaagggcacttagatactctattggt

SEQ ID NO: 140326 - DNA, 75 bp, synthetic construct
  source 1..75: mol_type = other DNA
gggagattatgctggtgaaaattcaggccagcggctatggacgtgacgaagtgaaacgcaatacggaaatatttc

SEQ ID NO: 140327 - DNA, 75 bp, synthetic construct
  source 1..75: mol_type = other DNA
ctatttcaggccaccgctccctgaacatgttaaaacggtacacgcatctccgggcatatcagctggtcagcaaac

SEQ ID NO: 140328 - DNA, 75 bp, synthetic construct
  source 1..75: mol_type = other DNA
gcaaaatgactctctcccgcgccctggacaaatacctgaaaaccgtctccgtacacaaaaaagggcaccttcagg

SEQ ID NO: 140329 - DNA, 75 bp, synthetic construct
  source 1..75: mol_type = other DNA
ccgcgtgagccgctctcccgcgataagctgatgaaccttgcccgtggccgtgaatactccgcaatggaacgctcc

SEQ ID NO: 140330 - DNA, 75 bp, synthetic construct
  source 1..75: mol_type = other DNA
ggaaattatggaagatctctatgatgtcgataacgtgattgtgccaattggtggtggcggtttaattgctggtat

SEQ ID NO: 140331 - DNA, 75 bp, synthetic construct
  source 1..75: mol_type = other DNA
taccgctcaaacgcggctgcgattatcaggatgtgctgaatatgctgctgttctacgccagtcctaaggcgtcgt

SEQ ID NO: 140332 - DNA, 75 bp, synthetic construct
  source 1..75: mol_type = other DNA
cctgtgccacggtctggctgccgaggggtatcgcgtggcggttgtcgatattcagagcgacaaagccgcaaatgt

SEQ ID NO: 140333 - DNA, 75 bp, synthetic construct
  source 1..75: mol_type = other DNA
aagcattatcgcaaggtcgccccgctaatcagtattgagcgttttgtgtggttggtgggatatctgaataaccgc

SEQ ID NO: 140334 - DNA, 75 bp, synthetic construct
  source 1..75: mol_type = other DNA
ctttttcgctgattctactgatgatttataaaatggctttatttaacctgtcagagccgcaatttaacgccgtaa

SEQ ID NO: 140335 - DNA, 75 bp, synthetic construct
  source 1..75: mol_type = other DNA
agctgttgagtagcctggaacaaattgtttttaaagatgaaacgcaaaagattaccctgacgcacagaacaacgc

SEQ ID NO: 140336 - DNA, 75 bp, synthetic construct
  source 1..75: mol_type = other DNA
agctgcatcggcgttccatcggcagtgccgtcaggcatccgcgcagtgctggcggaaaacttaatttgttcatca

SEQ ID NO: 140337 - DNA, 75 bp, synthetic construct
  source 1..75: mol_type = other DNA
aggatttctcgcgtcatcttatgcttctcgcggcttaaaaatgcgctttacttccggctccggctctgaagtgca

SEQ ID NO: 140338 - DNA, 75 bp, synthetic construct
  source 1..75: mol_type = other DNA
atcttgatggtacgctggttgactccctgcctgcggtagagcgggcgtggagcaactgggcgagacgccatggat

SEQ ID NO: 140339 - DNA, 75 bp, synthetic construct
  source 1..75: mol_type = other DNA
ggtccggcaacaggttatcgcctgcaaggcgaacgctgggaagagattaaaaacatccctggcgcgctcgatccc

SEQ ID NO: 140340 - DNA, 75 bp, synthetic construct
  source 1..75: mol_type = other DNA
tcggtgacgggaaagtactctctgctgttaacgacgtcaacgattatgccggtccggcaacaggttatcgcctgc

SEQ ID NO: 140341 - DNA, 75 bp, synthetic construct
  source 1..75: mol_type = other DNA
cgaacaggaaaccaccgtcgccgttgctcgctatgcgccgttcaacgccatcgctctgctggtgggttcgcaggt

SEQ ID NO: 140342 - DNA, 75 bp, synthetic construct
  source 1..75: mol_type = other DNA
cagaatttctggcagttagatgttgataacagaagacaattatttgaaaaggtaaaatcaccagggcttctggcg

SEQ ID NO: 140343 - DNA, 75 bp, synthetic construct
  source 1..75: mol_type = other DNA
cgggatggtgaatccatcaatgcggatggcagtcgttatggtgatccccgacgctcacgtattgcgtcattctgg

SEQ ID NO: 140344 - DNA, 75 bp, synthetic construct
  source 1..75: mol_type = other DNA
atgcttaagcgcctggcttatctgactaccgccagtattctcctcctgctggcagcgacaatgttctggtgcgtc

SEQ ID NO: 140345 - DNA, 75 bp, synthetic construct
  source 1..75: mol_type = other DNA
cggcagacaccccgcgtctgaatgaggtagatttggtccttcatagtctggagcaaattaccgtgaccaaacagc

SEQ ID NO: 140346 - DNA, 75 bp, synthetic construct
  source 1..75: mol_type = other DNA
ggagaactccgatgaagaaatcacttgttcacacacattgcaggcgctgcggttgcagtctcattatgtcagaac

SEQ ID NO: 140347 - DNA, 75 bp, synthetic construct
  source 1..75: mol_type = other DNA
acttcagataactcgttcagcaattttttcgtttgcttttatggtgaggcaagaggggatgaaagaaaagaagga

SEQ ID NO: 140348 - DNA, 75 bp, synthetic construct
  source 1..75: mol_type = other DNA
gcgtacaagcattataatgtcaaagttgtttctctatcaggcatcgataaatgtgacaataatttagtaatattg

SEQ ID NO: 140349 - DNA, 75 bp, synthetic construct
  source 1..75: mol_type = other DNA
cgccatattgatgtttctggccagcacgctcaacatccgtttccggcgctctgattatgtcgggctggcagtgat

SEQ ID NO: 140350 - DNA, 75 bp, synthetic construct
  source 1..75: mol_type = other DNA
gtttccgtgcagactggcaaagtgattatcagcacacccgcagcaacgatgacgacgatgacagcagtaacagca

SEQ ID NO: 140351 - DNA, 75 bp, synthetic construct
  source 1..75: mol_type = other DNA
gtgtccatcaatatagatggacgcgattgttgccagacaggacaaccatcacaagacgtcacagacggagcactt

SEQ ID NO: 140352 - DNA, 75 bp, synthetic construct
  source 1..75: mol_type = other DNA
atgtcagattcgatgattgtgaatggctcaggtagtgtacctgcttttcttttctcaggtagcacgttgagtagt

SEQ ID NO: 140353 - DNA, 75 bp, synthetic construct
  source 1..75: mol_type = other DNA
caccgaacctgacctttatctacgatcctgatatcacccctgatgacctgctgctggaagtggcgaaaaacatct

SEQ ID NO: 140354 - DNA, 75 bp, synthetic construct
  source 1..75: mol_type = other DNA
tgaaatattcctgaaatttgaaaacatgcagcgtactggctcttttaaaattcgtggcgcatttaacaaattaag

SEQ ID NO: 140355 - DNA, 75 bp, synthetic construct
  source 1..75: mol_type = other DNA
cactctgcgatccataatctcgagatacttaaagcagaactcttgcgccaggttgctgaatctacgccagacatc

SEQ ID NO: 140356 - DNA, 75 bp, synthetic construct
  source 1..75: mol_type = other DNA
tcgatgacggacaagtgctctctgcggtcaatgacgtcaatgattacgccggaccggctacaggttaccgcctgc

SEQ ID NO: 140357 - DNA, 75 bp, synthetic construct
  source 1..75: mol_type = other DNA
gctggcagataaacactatcagtcggcggcgatgggggtggggcgcgacctcgcacagtttggcgcgctggcgtt

SEQ ID NO: 140358 - DNA, 75 bp, synthetic construct
  source 1..75: mol_type = other DNA
ggaaccacgcgcaaggggtttcgctctcctgtgcgatgttggggattgatggtaaagttgtaatgccgaaaggcg

SEQ ID NO: 140359 - DNA, 75 bp, synthetic construct
  source 1..75: mol_type = other DNA
cgccaaaatctaaagtcgcggcaacgtgcgattactctgctgaagtggtgctgcacggcgacaacttcaacgaca

SEQ ID NO: 140360 - DNA, 75 bp, synthetic construct
  source 1..75: mol_type = other DNA
accgccagagattccgaaacaggatgataaaaccaaaccgagcacagattatacagcggttcccgttgcgccggt

SEQ ID NO: 140361 - DNA, 75 bp, synthetic construct
  source 1..75: mol_type = other DNA
gaaaagaagcgagaagctgaaaaagtacgttgagaaggaattatccggcataagggtgtccggaagggcagaaga

SEQ ID NO: 140362 - DNA, 75 bp, synthetic construct
  source 1..75: mol_type = other DNA
gtaaggtgtatgacgcgccgcaggccgtaatggcgctcctttgccacggaaaaaatctcggctgggacaaatcgc

SEQ ID NO: 140363 - DNA, 75 bp, synthetic construct
  source 1..75: mol_type = other DNA
cagattatcggccaggtttcacaggatgtttatgactcagctacgggcaaatacctgcttattcctcatggtacg

SEQ ID NO: 140364 - DNA, 75 bp, synthetic construct
  source 1..75: mol_type = other DNA
ctgggtcaggtgtttggtcaggcgattgcgcaggttgttcagaaaaacctgaatatcgcacctacgctcgaaatt

SEQ ID NO: 140365 - DNA, 75 bp, synthetic construct
  source 1..75: mol_type = other DNA
tcaccgcgacaattgcttattctcaggatcgcgaccagaacaataacaactcgaatcaggctccgaacatgagca

SEQ ID NO: 140366 - DNA, 75 bp, synthetic construct
  source 1..75: mol_type = other DNA
gaacctattctggccgcggcggaatcgtcgttcaggaagtggctgtctgagcaggggcttatcggtcaggatgtg

SEQ ID NO: 140367 - DNA, 75 bp, synthetic construct
  source 1..75: mol_type = other DNA
atgccgattatcgacctgaaccagctacccgcaccggatgtggtcgaggagctggattttgaaagcattctcgct

SEQ ID NO: 140368 - DNA, 75 bp, synthetic construct
  source 1..75: mol_type = other DNA
cggtgcaaatttcagcgtcgggcgtcttgttatcacgcctgccgatgagaccacactgccgcccacacctgccgt

SEQ ID NO: 140369 - DNA, 75 bp, synthetic construct
  source 1..75: mol_type = other DNA
aatggcgaggacgtcaggccggtggccgaccgcgtgaccgtgcagtctgccgccatcgttgaataccagataaac

SEQ ID NO: 140370 - DNA, 75 bp, synthetic construct
  source 1..75: mol_type = other DNA
ccgctggcggatgtggtcctgaacaaaacgcaggcggcatcatgtacgcagtggagcgtgaccaacgggggaacg

SEQ ID NO: 140371 - DNA, 75 bp, synthetic construct
  source 1..75: mol_type = other DNA
ggtggtgcttacggttctaagccgtgaaggcgacggaacagcagaaaaagacttgctggatgtggtggagaaagc

SEQ ID NO: 140372 - DNA, 75 bp, synthetic construct
  source 1..75: mol_type = other DNA
aaccaacaaaagaaaatgctcaaagtctttcaatcaattgaagagactataaggcagtgttggcgtttaattaat

SEQ ID NO: 140373 - DNA, 75 bp, synthetic construct
  source 1..75: mol_type = other DNA
gctggcagatggtgaagtttggtgatatcgcaaaacatatctccaaacgtgtagaaccgagcgaaacagaccttg

SEQ ID NO: 140374 - DNA, 75 bp, synthetic construct
  source 1..75: mol_type = other DNA
aatattgcatatattattcagggcgcaacagagaaattcgatgcgaacaaccaaaagctaatattgaatatacca

SEQ ID NO: 140375 - DNA, 75 bp, synthetic construct
  source 1..75: mol_type = other DNA
tggtaaccggcaggtcagagcagaagtggcagtggtggtttgatgaacagacgtatgtgaccgcgcatcggacgc

SEQ ID NO: 140376 - DNA, 75 bp, synthetic construct
  source 1..75: mol_type = other DNA
gggctcgaaatttggcacaaaatgcgcggccaaatttattggtggcgaaattaccgggatggccgtttccgaggt

SEQ ID NO: 140377 - DNA, 75 bp, synthetic construct
  source 1..75: mol_type = other DNA
aatggcgagttaagcgatactgctgctggagctcgccgtgctgtagcagatagtgactcttccgagcgtgcccgt

SEQ ID NO: 140378 - DNA, 75 bp, synthetic construct
  source 1..75: mol_type = other DNA
ctcacctacgctcgaaattcgaccgggttatcgcttcaatataatggttactaaagacttagcattcacaaagcc

SEQ ID NO: 140379 - DNA, 75 bp, synthetic construct
  source 1..75: mol_type = other DNA
gcggtggatgatatctacccgatgtatggcgatctgcaaactaatccccctggcctgaaaccgcaggcgggcagc

SEQ ID NO: 140380 - DNA, 75 bp, synthetic construct
  source 1..75: mol_type = other DNA
aggtagtggtttttctaaaagtctttctgacagtcagattgagatgcatattctgaggaatgttaattcgctaaa

SEQ ID NO: 140381 - DNA, 75 bp, synthetic construct
  source 1..75: mol_type = other DNA
atgaatggggaattagttgaccgtcagattaagatagattttttcgcgcaggacaacaagctgaacgccagactg

SEQ ID NO: 140382 - DNA, 75 bp, synthetic construct
  source 1..75: mol_type = other DNA
tggcgtggaatgtgccaccaaaaaacactgtcccgcctggctgccttctctccgctgctgttactggggatgggg

SEQ ID NO: 140383 - DNA, 75 bp, synthetic construct
  source 1..75: mol_type = other DNA
gccaaccaaggcatgtcaaatacggcagaaacaactattcagcgtgggagcagccgagatacctcggcaatggca

SEQ ID NO: 140384 - DNA, 75 bp, synthetic construct
  source 1..75: mol_type = other DNA
ccgcaggccgacatcgtgctgagtaaatcgcaggcgtcgaactgcaccgagtaccggataaatatcgggggctcg

SEQ ID NO: 140385 - DNA, 75 bp, synthetic construct
  source 1..75: mol_type = other DNA
tgatgcgacgctctacgtttatcctggccccgaatctgaacccatcagacaggcatccgagcagaaactgcagag

SEQ ID NO: 140386 - DNA, 75 bp, synthetic construct
  source 1..75: mol_type = other DNA
tacccgttcccgatgtggttgaggaactggactatgaaactatccttgcggaacgcattgcgacgctgatttcgc

SEQ ID NO: 140387 - DNA, 75 bp, synthetic construct
  source 1..75: mol_type = other DNA
gacatcgtgctcaacaatacgcaggcgtctttctgtaccgaataccgcgtcgtgaccggaggctcggatgagtga

SEQ ID NO: 140388 - DNA, 75 bp, synthetic construct
  source 1..75: mol_type = other DNA
gagggcgacggcaccgccagcgaggagttactgacaatagttgataaggcgctgaatgccgaagatgttcgcccg

SEQ ID NO: 140389 - DNA, 75 bp, synthetic construct
  source 1..75: mol_type = other DNA
ctggcgtcagcgggtaaacgaagccgcgcaggcggtgacgctggcctattccgccggtaacgacctcgacgtcgt

SEQ ID NO: 140390 - DNA, 75 bp, synthetic construct
  source 1..75: mol_type = other DNA
tgctggcgaccacaatggccgttgccctgcatacaccaattacttttgctgccgaagcggcgaaacctgctacaa

SEQ ID NO: 140391 - DNA, 75 bp, synthetic construct
  source 1..75: mol_type = other DNA
ggttatataggcactaacggaaaaacattaatgcctggggcagacagcattatggtagcaccgtttgcaacagcg

SEQ ID NO: 140392 - DNA, 75 bp, synthetic construct
  source 1..75: mol_type = other DNA
tgactatggtggactggagatgtttaaagtcgaatgtaattccgtccaatccctctgccaaagctctcctgctaa

SEQ ID NO: 140393 - DNA, 75 bp, synthetic construct
  source 1..75: mol_type = other DNA
gttaaaggttcgggttgccagagaagaagagaaagaaaatgctaaaattgatgctgatattaaagcggaagtaga

SEQ ID NO: 140394 - DNA, 75 bp, synthetic construct
  source 1..75: mol_type = other DNA
tcagcaggacctggtgaactggttcgatgaaggcaccgtgaaggggtataaaatcaaatatccgaatggtgttgt

SEQ ID NO: 140395 - DNA, 75 bp, synthetic construct
  source 1..75: mol_type = other DNA
taaaaaacttgagcaatgcacgtcaggtgcaattacgaaatctgacttaagaccggatatcccacagccagtatc

SEQ ID NO: 140396 - DNA, 75 bp, synthetic construct
  source 1..75: mol_type = other DNA
agtgatccgcacgctggagctggaatctgaacccgtcaccaaattgctgcaggagaacgcttaccgtgagttgct

SEQ ID NO: 140397 - DNA, 75 bp, synthetic construct
  source 1..75: mol_type = other DNA
atggctattgttgacctgagccagctcgccgcacctgatgttgtggaagagttggattatgaaaccatcctgaca

SEQ ID NO: 140398 - DNA, 75 bp, synthetic construct
  source 1..75: mol_type = other DNA
ggagataatcgaacccacacagaatatgaccatcagcgacatacaggcggcgcgctgtgagtcattcaccatcag

SEQ ID NO: 140399 - DNA, 75 bp, synthetic construct
  source 1..75: mol_type = other DNA
tacccgttcccgacgtagttgaggaactggactatgaaaccatccttgcggaacgcattgcaacgctgatttcgc

SEQ ID NO: 140400 - DNA, 75 bp, synthetic construct
  source 1..75: mol_type = other DNA
tcagaacccctgaacgttatcgctcaaaccatgtcgtttcgtgaaatgctgttacgccagcgggttaacgagggc

SEQ ID NO: 140401 - DNA, 75 bp, synthetic construct
  source 1..75: mol_type = other DNA
gatggaaagcgatgaagcgttgcgcctgcgtgtgcctgcagcctttgaagggctttctgttgcggggccaactgc

SEQ ID NO: 140402 - DNA, 75 bp, synthetic construct
  source 1..75: mol_type = other DNA
tctgcgccagcgcattaacgaagccgcgcaggcggtaatggtggcttacgcgatgggcggcgatcttgaccagat

SEQ ID NO: 140403 - DNA, 75 bp, synthetic construct
  source 1..75: mol_type = other DNA
agtgcagcgtgtggaactggcttccccgctggcggatgtggtcctgaacaaaacgcaggcggcatcatgtacgca

SEQ ID NO: 140404 - DNA, 75 bp, synthetic construct
  source 1..75: mol_type = other DNA
ttttgcacgcagcgccagcggtctggtacgcgacgcgcgggccatcagcccgtctccggccaacgtgacggtttc

SEQ ID NO: 140405 - DNA, 75 bp, synthetic construct
  source 1..75: mol_type = other DNA
cagcggcaaaagccagcctgcagaagtacatcgccagtcagacgcggcttggtcgggatattcgccgtagtgcca

SEQ ID NO: 140406 - DNA, 75 bp, synthetic construct
  source 1..75: mol_type = other DNA
ggaagccaccatttttctttatccgggaccggaagcagagccggtaatggcagcggcaaaagccagcctgcagaa

SEQ ID NO: 140407 - DNA, 75 bp, synthetic construct
  source 1..75: mol_type = other DNA
cgaccatcccgccgacaccggcagtgatggaatctgacaccgattatcgtctgcgtattcagcaggcgtttgagg

SEQ ID NO: 140408 - DNA, 75 bp, synthetic construct
  source 1..75: mol_type = other DNA
acgattaaagcaattagcaacaaccacacgaatgttataaaaagtaatatggaggtaatcaagagtcataatgaa

SEQ ID NO: 140409 - DNA, 75 bp, synthetic construct
  source 1..75: mol_type = other DNA
aaattgctgctgtagttttatttcttaaagaaggtattcctatatttgatgatgatccagggggggctaaactta

SEQ ID NO: 140410 - DNA, 75 bp, synthetic construct
  source 1..75: mol_type = other DNA
ctcgttttcctttttgtgactatagaaattgctgctgtagttttatttcttaaagaaggtattcctatatttgat

SEQ ID NO: 140411 - DNA, 75 bp, synthetic construct
  source 1..75: mol_type = other DNA
agcgaacgcggatacatggaaggactcggacaacagattggcgtcgcggcactttctgcacagcttgacgcccgc

SEQ ID NO: 140412 - DNA, 75 bp, synthetic construct
  source 1..75: mol_type = other DNA
gttgcagcagctttatcccatgctggaaaaagctgaatcaccgctggcagtaagtctgtatgaccgaattaacga

SEQ ID NO: 140413 - DNA, 75 bp, synthetic construct
  source 1..75: mol_type = other DNA
tgaattcgaagcattttgtgaagacaacggagacaacccggacgacatcattgatgttcttgaaaagaatcaata

SEQ ID NO: 140414 - DNA, 75 bp, synthetic construct
  source 1..75: mol_type = other DNA
gcgtttacctgccgacggtaaactactctcaccatttgccagttttgatgaaagcgcccttaccggcgaatccat

SEQ ID NO: 140415 - DNA, 75 bp, synthetic construct
  source 1..75: mol_type = other DNA
agcccggaggtaatcgccgcaggcgtggagataactaacgcacacgggcagccaatcagcagcagcgtcagccct

SEQ ID NO: 140416 - DNA, 75 bp, synthetic construct
  source 1..75: mol_type = other DNA
tggccgtcgccctgctggtaacgctggtgccgccgctgctgtttgccgccagctggcaagagtggatttataaag

SEQ ID NO: 140417 - DNA, 75 bp, synthetic construct
  source 1..75: mol_type = other DNA
tttaaagccggattactaccggaagataaagtcaaagcggtgacggagttgaaccaacatgcgccgctggcgatg

SEQ ID NO: 140418 - DNA, 75 bp, synthetic construct
  source 1..75: mol_type = other DNA
ctggcggtgctggcagatacgggtgcgacggtgctggtgacggcgaatgcgttaaggttgttgcgcaggaagtaa

SEQ ID NO: 140419 - DNA, 75 bp, synthetic construct
  source 1..75: mol_type = other DNA
atgcgccgcagggaaacatcctgccgaagcattcgccggtttgattaacgaactggaaagcgccggacaaacggt

SEQ ID NO: 140420 - DNA, 75 bp, synthetic construct
  source 1..75: mol_type = other DNA
cacttgcgcgaatgcaatgttctgactcaggtcggaaatgactacgtcatctcgcgtaaacccgaccacaatgac

SEQ ID NO: 140421 - DNA, 75 bp, synthetic construct
  source 1..75: mol_type = other DNA
aacgcctggcgtaatgcgatggaagcggcgaactacacgtttgagcacaatgggcgtaaatgggactacgggaag

SEQ ID NO: 140422 - DNA, 75 bp, synthetic construct
  source 1..75: mol_type = other DNA
aatgggcagataaagatcacactgctgtgaattgcatggtgaagtttgagcacattgagcaggcggttcctttca

SEQ ID NO: 140423 - DNA, 75 bp, synthetic construct
  source 1..75: mol_type = other DNA
agataaaaaaattaagggcagaactcgccgaaacacaaaaactggcttcacatttttacaaaatgaaatacgacg

SEQ ID NO: 140424 - DNA, 75 bp, synthetic construct
  source 1..75: mol_type = other DNA
tcagcgcggatatgtttgctatgatgttaaaagtacctgtcggggagctggtttttgccgcccgacacaaccagc

SEQ ID NO: 140425 - DNA, 75 bp, synthetic construct
  source 1..75: mol_type = other DNA
tcgatgagcatatgactattctcagcgctttgatttgccgtagcgatctggatgcgactctggcactacgtaacc

SEQ ID NO: 140426 - DNA, 75 bp, synthetic construct
  source 1..75: mol_type = other DNA
aagacccggtcactggtcagaacacactcagaatgcacatgtcgttgcatccattttatgtactgaaacgtcaga

SEQ ID NO: 140427 - DNA, 75 bp, synthetic construct
  source 1..75: mol_type = other DNA
ctgcgctgggtgcgctgtccattgacgatgacggctggtgccagctattgcctgccggtcatttcagtgcccgtg

SEQ ID NO: 140428 - DNA, 75 bp, synthetic construct
  source 1..75: mol_type = other DNA
atgaagacgaaaaacgcgccccaaattgcttatgccatcctgaatgccatcagcctgtccactgacgggggcagt

SEQ ID NO: 140429 - DNA, 75 bp, synthetic construct
  source 1..75: mol_type = other DNA
ggcggaacagaatggaatcagccagttatattttcagctttaatggccgtaactgggattatggaaaggaaacac

SEQ ID NO: 140430 - DNA, 75 bp, synthetic construct
  source 1..75: mol_type = other DNA
acagtaagggaaacgttattcctgaaaccgcagtcacagtatcgcgcctttcccgtctgctggcagagcaggttt

SEQ ID NO: 140431 - DNA, 75 bp, synthetic construct
  source 1..75: mol_type = other DNA
ccgaaactggctggaaaatgctgggagttgatctggtgaaacttcaggaacagcaacgtaaacgccttgcagaaa

SEQ ID NO: 140432 - DNA, 75 bp, synthetic construct
  source 1..75: mol_type = other DNA
ccatttatgccgcgctgcacgttgaaggagtccagcgggtggagctggcccagccggtggcggatatggtgcttg

SEQ ID NO: 140433 - DNA, 75 bp, synthetic construct
  source 1..75: mol_type = other DNA
cgcgagggtgacggtaccgccagccaggagttgatcgatatcgttgccagcgcgctgaatggcgaagaggtgcgc

SEQ ID NO: 140434 - DNA, 75 bp, synthetic construct
  source 1..75: mol_type = other DNA
gaatctgagccgatcaccaagcagctggaagaaaactgttatcgcgaattgttgctacgccagcgcgtgaacgaa

SEQ ID NO: 140435 - DNA, 75 bp, synthetic construct
  source 1..75: mol_type = other DNA
ctgcgtcaccatttcggtgctgtcgcgcgaaggtgacggaacggccagcgatgatctgctttccgtggtcgctgc

SEQ ID NO: 140436 - DNA, 75 bp, synthetic construct
  source 1..75: mol_type = other DNA
tgacgccacgctgtatttttatccggggccggaggccgagccaatccgtcaggccgcagaggaaaaactgaaggc

SEQ ID NO: 140437 - DNA, 75 bp, synthetic construct
  source 1..75: mol_type = other DNA
tccccgcgcctgacgtggtagaaacgctggattttgaaactattctcgcggaacgcaaagcgacgctggtctcgc

SEQ ID NO: 140438 - DNA, 75 bp, synthetic construct
  source 1..75: mol_type = other DNA
gggttcgaaattcggcaccaaatgtgcggcaaaatttattggcgggcaactggtcgggatgggcgtatccgaggc

SEQ ID NO: 140439 - DNA, 75 bp, synthetic construct
  source 1..75: mol_type = other DNA
aacggatgttgaaaataaaaatccttatggcgcttaccgacctgctcggcaattacctcgtgataaaaatgggaa

SEQ ID NO: 140440 - DNA, 75 bp, synthetic construct
  source 1..75: mol_type = other DNA
aggtattatgcgccggagtgcgggaggtttatcagtcaggacccgatagggctaagaggcgggctgaacctgtat

SEQ ID NO: 140441 - DNA, 75 bp, synthetic construct
  source 1..75: mol_type = other DNA
ttgcacgatattttggctgatacggatattgtttgccgaggtgggacgtgttcagcagataactttaaaaatgga

SEQ ID NO: 140442 - DNA, 75 bp, synthetic construct
  source 1..75: mol_type = other DNA
cccgcgtggtggaacacacgaccagcgacggcgagcattaccgctttcagtacgattttgcgggcgggcagacgg

SEQ ID NO: 140443 - DNA, 75 bp, synthetic construct
  source 1..75: mol_type = other DNA
gcccggaaggatgaccacactgaatgtgatgcagtgattgaggacggttctcccaatgtctttctcggcggcggt

SEQ ID NO: 140444 - DNA, 75 bp, synthetic construct
  source 1..75: mol_type = other DNA
gcgattaacagcctgcggcctggcgatgtgattgaagtcgccgcaggtgggcgtttgcctgccgacggtaaactg

SEQ ID NO: 140445 - DNA, 75 bp, synthetic construct
  source 1..75: mol_type = other DNA
gcttgatgaaaaacgtatgggaagcattgcgctgtattctatgcgtggcatgatgaaaaaactctttgaagttaa

SEQ ID NO: 140446 - DNA, 75 bp, synthetic construct
  source 1..75: mol_type = other DNA
gtgccggaagaggttgatccgctcgcgttcggaagtgctgttattttcccgttgaacaaggatcagcttggtagt

SEQ ID NO: 140447 - DNA, 75 bp, synthetic construct
  source 1..75: mol_type = other DNA
gtgctgggtgtcattgcgttgcaggataccctgcgcgccgatgctgcaactgctatcagtgaactgaacgcgctg

SEQ ID NO: 140448 - DNA, 75 bp, synthetic construct
  source 1..75: mol_type = other DNA
gaatcaacatgcgccgctggcgatggtcggtgacggtattaacgacgcgccagcgatgaaagctgccgccatcgg

SEQ ID NO: 140449 - DNA, 75 bp, synthetic construct
  source 1..75: mol_type = other DNA
caaggggtcagcgcgttaatggcgctgaaaccggaaaccgccacgcgcctgcgtaatggcaagcgtgaagaggta

SEQ ID NO: 140450 - DNA, 75 bp, synthetic construct
  source 1..75: mol_type = other DNA
cacggatccgacaagccggtttccccgttccgccggtgctggtgaccagcgaagatattcatcatggcaagccgc

SEQ ID NO: 140451 - DNA, 75 bp, synthetic construct
  source 1..75: mol_type = other DNA
ccccctttcctctttgttttccgaccacattcaccggataaattttattctccagtgttatatactatagggggg

SEQ ID NO: 140452 - DNA, 75 bp, synthetic construct
  source 1..75: mol_type = other DNA
ggcaggcatcggaacagcagttacaggcgtatattgccgcgcagaatcgcttagggcgcgatatccgtctttcag

SEQ ID NO: 140453 - DNA, 75 bp, synthetic construct
  source 1..75: mol_type = other DNA
agtgatttaggtgtgcaggcggctatcgctgtgcttaatgatgcacggaaaaacgcacagacgatgcctgaacag

SEQ ID NO: 140454 - DNA, 75 bp, synthetic construct
  source 1..75: mol_type = other DNA
aatctggcgttacaggttgctgatattgtgatggaagcgtcgatgcgcgactatgtgtcttttgataatgaagaa

SEQ ID NO: 140455 - DNA, 75 bp, synthetic construct
  source 1..75: mol_type = other DNA
tttgatattgtggtgagtgattgttgcccggaagatgagtatgtgaagtacgcgcagacgcagcgcattaagttg

SEQ ID NO: 140456 - DNA, 75 bp, synthetic construct
  source 1..75: mol_type = other DNA
ttacgcatcacgccttcagtagcggaacaggagggacagcagacggagactgaagccacgggagcacctcaaaaa

SEQ ID NO: 140457 - DNA, 75 bp, synthetic construct
  source 1..75: mol_type = other DNA
caaaggcgttattggtttgccggccaacctgttttacggcaccggcatcccggcgtgcattattgtgattgataa

SEQ ID NO: 140458 - DNA, 75 bp, synthetic construct
  source 1..75: mol_type = other DNA
gtggcgctctctgatgaagtgaatcagtcagagcagaccaccaacttccacaatcgcgcaattgcctggctactg

SEQ ID NO: 140459 - DNA, 75 bp, synthetic construct
  source 1..75: mol_type = other DNA
cacccgtcagtgctccacgctcctcaatactgttgaactggcaacacttggcgcgacgctggcggcgggggggtg

SEQ ID NO: 140460 - DNA, 75 bp, synthetic construct
  source 1..75: mol_type = other DNA
atttaagcgcccatctgcaaggcggtattccaaaccgcgatattgatgcgttagaacgttactggcaggtgttcc

SEQ ID NO: 140461 - DNA, 75 bp, synthetic construct
  source 1..75: mol_type = other DNA
ccagttttgacgatatggttgccttgaaaggcgacaaagaaatcggcgataaaatcaataaaatcatcagcgcgc

SEQ ID NO: 140462 - DNA, 75 bp, synthetic construct
  source 1..75: mol_type = other DNA
gaaaacccctgccgacccagatgagctggcagtgctgaaccgctgtctggcgctgattaaggccgaggccagtgc

SEQ ID NO: 140463 - DNA, 75 bp, synthetic construct
  source 1..75: mol_type = other DNA
ttctgaatcattgccgcacaattttaatatggctgctgtcggtgtgatgaaggagggaatgtcgatgcgtttatt

SEQ ID NO: 140464 - DNA, 75 bp, synthetic construct
  source 1..75: mol_type = other DNA
atgcttatttccctgataacagaacaaacagaaacaacggagataaaaatgaacatgcgtaatattcatgttatt

SEQ ID NO: 140465 - DNA, 75 bp, synthetic construct
  source 1..75: mol_type = other DNA
ttacggccctctctgtaccggataaacgcatatcagatgattttatgcatgctgttctcagtaactgcaccacag

SEQ ID NO: 140466 - DNA, 75 bp, synthetic construct
  source 1..75: mol_type = other DNA
aagaactggaagagcgctatagtgtcactctactaaatctctcacaaagcattgatggattggaggcgaaagttg

SEQ ID NO: 140467 - DNA, 75 bp, synthetic construct
  source 1..75: mol_type = other DNA
atttatcagttactgatggattactggatggatgtgatgcaagacgacgtttatgtcctgagccaagatggttgg

SEQ ID NO: 140468 - DNA, 75 bp, synthetic construct
  source 1..75: mol_type = other DNA
gatccggaagatctgcacgacctttctggtcatttggctggtggcattcccaatcgcgatattgatgcccttagc

SEQ ID NO: 140469 - DNA, 75 bp, synthetic construct
  source 1..75: mol_type = other DNA
ttcatgctcgatgccagcggcaaaccggggctgaattatttgtgtgccggatatcagcgttatttccgccatcta

SEQ ID NO: 140470 - DNA, 75 bp, synthetic construct
  source 1..75: mol_type = other DNA
agagaagtcagaatccttaggcttaggaatcgcaaccggtgtattaggtgccacagctgctgttggtagtggatt

SEQ ID NO: 140471 - DNA, 75 bp, synthetic construct
  source 1..75: mol_type = other DNA
atgactgaaattatatatggcggtatcggtgttatcgccttaatttgtggtgggctttggagacttcaccgaaat

SEQ ID NO: 140472 - DNA, 75 bp, synthetic construct
  source 1..75: mol_type = other DNA
tgctctcaggtaaaaaagaagcagccgtttccagagagcagaaagtaaaactgataaattttaattgcgagagac

SEQ ID NO: 140473 - DNA, 75 bp, synthetic construct
  source 1..75: mol_type = other DNA
tgtgggcgctcggtgattgttgaacacaacggcgatgtttacgcctgcgatcactatgtttatccgcagtatcga

SEQ ID NO: 140474 - DNA, 75 bp, synthetic construct
  source 1..75: mol_type = other DNA
atgtataaaattactgccactattgaaaaggaaggtggcactcctactaactggacaaggtactcaaaaacaaaa

SEQ ID NO: 140475 - DNA, 75 bp, synthetic construct
  source 1..75: mol_type = other DNA
atcatcttgggcagttaaatcctccggcgcttagcggcagcgacattctgaaagtggtctacggcgcaaccttcc

SEQ ID NO: 140476 - DNA, 75 bp, synthetic construct
  source 1..75: mol_type = other DNA
atgacaaataaaatgacagtcatcatcctggcggcaataattaccggatgttcatcgccgccgcctcccgttcct

SEQ ID NO: 140477 - DNA, 75 bp, synthetic construct
  source 1..75: mol_type = other DNA
attgccgacctgcaagcacgtatccagacgtcacaaggcgctatacagggtgagcaggcgaagctgaatttgatg

SEQ ID NO: 140478 - DNA, 75 bp, synthetic construct
  source 1..75: mol_type = other DNA
gaacaattagtaaataaatttgaagctgtgacatttttagattccagaaaacagttagaaagagtgcaaattatc

SEQ ID NO: 140479 - DNA, 75 bp, synthetic construct
  source 1..75: mol_type = other DNA
tatgccgcaagagatcccaatggcagccggtgcggttgtggtttcactctgttccacctctgatgaaaccattga

SEQ ID NO: 140480 - DNA, 75 bp, synthetic construct
  source 1..75: mol_type = other DNA
tcgccagaaaggctttctcaccgtcatggatctcaaggagcgcggcattccgctggttggcacctactgcacctt

SEQ ID NO: 140481 - DNA, 75 bp, synthetic construct
  source 1..75: mol_type = other DNA
aactggcaaaggatatctggagcagaccatggagcgaggaaagacgcaacgactggcagagatggctgtcgctgg

SEQ ID NO: 140482 - DNA, 75 bp, synthetic construct
  source 1..75: mol_type = other DNA
tttaataacggaactcgtattgagatagacagagaatctaatttactccttgttgatgctgtcggagatgtaacc

SEQ ID NO: 140483 - DNA, 75 bp, synthetic construct
  source 1..75: mol_type = other DNA
atcgtgataaaggcactcagggcgcgcagcttggcggagtcggggtccgctggaatatctggaccggcgagacgc

SEQ ID NO: 140484 - DNA, 75 bp, synthetic construct
  source 1..75: mol_type = other DNA
aaatcgggatgcgcctcaaactggaagtgatgaagtcagcccgcggcttttacattggtacgcaaactgatgaag

SEQ ID NO: 140485 - DNA, 75 bp, synthetic construct
  source 1..75: mol_type = other DNA
aatggggatcctcaacgttacgccagattctttctctgatggcggtacgcataactcactgactgatgcagtgaa

SEQ ID NO: 140486 - DNA, 75 bp, synthetic construct
  source 1..75: mol_type = other DNA
atgcaacaactaaatggcattctggccgcacaggccggctatacgttatcccttcaggttctcagcagcgtgcgt

SEQ ID NO: 140487 - DNA, 75 bp, synthetic construct
  source 1..75: mol_type = other DNA
gttggggcggttacagggtctttactccccggcgtaacaacgtttcacatggtgatacccgtttaatttcccagc

SEQ ID NO: 140488 - DNA, 75 bp, synthetic construct
  source 1..75: mol_type = other DNA
tgtgctacttcatcattcgggtggtgcgaaatccgttttatttacgtagctattattcgcaattaaaacagcagg

SEQ ID NO: 140489 - DNA, 75 bp, synthetic construct
  source 1..75: mol_type = other DNA
gattgcgattgatgatttcggcaccggctacgccagctatgcgcggcttaaaaatgtgaatgccgatctgcttaa

SEQ ID NO: 140490 - DNA, 75 bp, synthetic construct
  source 1..75: mol_type = other DNA
actctccatcgtgaccaacgctccagaaaatatgcagcgccgcggggctatgtatttacaacgtgaattgaaaga

SEQ ID NO: 140491 - DNA, 75 bp, synthetic construct
  source 1..75: mol_type = other DNA
gctctgggggggcatactcacagcgttgttaatgttgttgtgtatgccattgaatgaaaaaagtacaatctttag

SEQ ID NO: 140492 - DNA, 75 bp, synthetic construct
  source 1..75: mol_type = other DNA
tttggcttatcgtccagcatcgacatgtgggttatcgagcatacactgcaatttatggcggaaaatagagaaaaa

SEQ ID NO: 140493 - DNA, 75 bp, synthetic construct
  source 1..75: mol_type = other DNA
ggtctgtcgacgcgttttgcgtttaagatcctctcccgcgtgttcaacttcgatcatgtagaagtggcggcaaac

SEQ ID NO: 140494 - DNA, 75 bp, synthetic construct
  source 1..75: mol_type = other DNA
tacaagaaatgattgttggcagatcacaatgtcattttgatgagaaaaatcaacacttctgcattatggagacta

SEQ ID NO: 140495 - DNA, 75 bp, synthetic construct
  source 1..75: mol_type = other DNA
cactggccaggcacgccggcgcagcgtattaatgcgctgactgatcataccgatctgatgacgacgctgatgcaa

SEQ ID NO: 140496 - DNA, 75 bp, synthetic construct
  source 1..75: mol_type = other DNA
tattttcttctccgggaaatacagtagtctccggacaaccctgtgcaggaaaaacaaatctgacagcagagttaa

SEQ ID NO: 140497 - DNA, 75 bp, synthetic construct
  source 1..75: mol_type = other DNA
tcagttctgaatcattgccgcacaattttaatatggctgctgtcggtgtgatgaagaagggtatgtcgatgagct

SEQ ID NO: 140498 - DNA, 75 bp, synthetic construct
  source 1..75: mol_type = other DNA
gtagtctccggacaaccctgtgcaggaaaaataaatctgacagcagagttaatttctgctgttgtggggagtaat

SEQ ID NO: 140499 - DNA, 75 bp, synthetic construct
  source 1..75: mol_type = other DNA
gtaaagccgagaatcaaacagtacacggcaaccaggctgccgaatccaatcgcggtaatgagtggaccggcaatc

SEQ ID NO: 140500 - DNA, 75 bp, synthetic construct
  source 1..75: mol_type = other DNA
cctccaactctacctacaaacccttgccacaagcgggtgcgtttggtgaagaggtgatcgtcaattcagaatact

SEQ ID NO: 140501 - DNA, 75 bp, synthetic construct
  source 1..75: mol_type = other DNA
atgcgcaagatcacacaggcattgagtgccgtttgcttattgttcgctctaaacagttccgctgttgccctggcc

SEQ ID NO: 140502 - DNA, 75 bp, synthetic construct
  source 1..75: mol_type = other DNA
tctggcaacggcgggaatgacgctattactgatcgacagcgaagtctttactcgtttccatctccatcttaatcc

SEQ ID NO: 140503 - DNA, 75 bp, synthetic construct
  source 1..75: mol_type = other DNA
acgcctgcggcgttaattactgcgcttaatcagcaaggctatcagctggggttattctcatcagatggctttacc

SEQ ID NO: 140504 - DNA, 75 bp, synthetic construct
  source 1..75: mol_type = other DNA
tcatcatgcttgaccgcatagatacggcggaaagttacgatgatgaccgtattgaggctgttaaggctgttttgc

SEQ ID NO: 140505 - DNA, 75 bp, synthetic construct
  source 1..75: mol_type = other DNA
ctggaagatctgcctccgggttggttctatagccgcattgttgcgacctctgtgcttggcgaagtgttgcactgt

SEQ ID NO: 140506 - DNA, 75 bp, synthetic construct
  source 1..75: mol_type = other DNA
aatccaccgcgccgccgcagaaagctggatggcgcaaggttttcccagcgaagccattcatcatgcgctggcggc

SEQ ID NO: 140507 - DNA, 75 bp, synthetic construct
  source 1..75: mol_type = other DNA
cgtgcgcagctgttatgggcctgggcgcggctggatgaagccgaagcgtcggcgcgtagcgctgatgaatcccct

SEQ ID NO: 140508 - DNA, 75 bp, synthetic construct
  source 1..75: mol_type = other DNA
gataacgcccgtagccagctgaaccgtctggaaagaaaacctgctggggaatggcaaatatcacagcgactggat

SEQ ID NO: 140509 - DNA, 75 bp, synthetic construct
  source 1..75: mol_type = other DNA
cagaaactcggcgttgcccaccgtcaggctgcggtacagcacgcacagaaactgctgaagatgatgggatatggg

SEQ ID NO: 140510 - DNA, 75 bp, synthetic construct
  source 1..75: mol_type = other DNA
caaatatcacagcgactggatctctaacgccaacaaagttcgcgttatttactggcagatgaccggcgataaagc

SEQ ID NO: 140511 - DNA, 75 bp, synthetic construct
  source 1..75: mol_type = other DNA
gtgctgaacatgaaatcaaggacatcagagaaggcaccatgcacgcagaatttaacgctctgcgcgcccaggtag

SEQ ID NO: 140512 - DNA, 75 bp, synthetic construct
  source 1..75: mol_type = other DNA
ttgctggacgcattaaaactggcgaatcgcaccggatttatcagccattttgtcatcgaaggcgaagcgatggcg

SEQ ID NO: 140513 - DNA, 75 bp, synthetic construct
  source 1..75: mol_type = other DNA
gatgcgggcgtggcaattgcgactggtgtgctgacttttgtcgtactggtttttgccgaagtgttgccgaaaact

SEQ ID NO: 140514 - DNA, 75 bp, synthetic construct
  source 1..75: mol_type = other DNA
gcgcttcttcattcgccatcaaccagaaaatctcactctggtggtgctgtcacgcaaccttccgcagttgggcat

SEQ ID NO: 140515 - DNA, 75 bp, synthetic construct
  source 1..75: mol_type = other DNA
ggcagtcagcaactggcatttacccatcaggaagcgaagcagttttttgattgccgtctgtcatcgccgattgaa

SEQ ID NO: 140516 - DNA, 75 bp, synthetic construct
  source 1..75: mol_type = other DNA
tacagcaacgaacaaattgccggtgaactggaagtggcggcaaccaccatcaaaacgcatatccgtaatttgtac

SEQ ID NO: 140517 - DNA, 75 bp, synthetic construct
  source 1..75: mol_type = other DNA
ccctgcgccgcggcgaagtgctgggcattgctggcctgctgggggctgggcgcagtgaattgctgaaagcgatcg

SEQ ID NO: 140518 - DNA, 75 bp, synthetic construct
  source 1..75: mol_type = other DNA
ttgttacagcacggcacgttctcgcaggagtttcactcgccggtcaatgtggacgagctgatgtccgccattctg

SEQ ID NO: 140519 - DNA, 75 bp, synthetic construct
  source 1..75: mol_type = other DNA
ttgttgctcgacgagccaacgcgcggcgtcgatatcgaagccaaacagcagatttaccgtattgtccgcgagctg

SEQ ID NO: 140520 - DNA, 75 bp, synthetic construct
  source 1..75: mol_type = other DNA
ttgacggagaaagctggtcagcgattgttgattcactgccttcaattgcgcgacatgcccagcaaaaacgcacca

SEQ ID NO: 140521 - DNA, 75 bp, synthetic construct
  source 1..75: mol_type = other DNA
atcgcatgggcgatttctcgtgccattgacggagaaagctggtcagcgattgttgattcactgccttcaattgcg

SEQ ID NO: 140522 - DNA, 75 bp, synthetic construct
  source 1..75: mol_type = other DNA
cgaaattgttatcaacggcgagaaaatcacgcgccccgattacggcgacatgctgaaacgcggcattggctatac

SEQ ID NO: 140523 - DNA, 75 bp, synthetic construct
  source 1..75: mol_type = other DNA
gtttccggcatgttgtctctggcagggggcggaagagagcataacggtatcattttcaccacgcaggggggattt

SEQ ID NO: 140524 - DNA, 75 bp, synthetic construct
  source 1..75: mol_type = other DNA
gtatcagggaagcttaccggtaaaacagatttttatcgttcaggtactattaaagaaagagctcaagaatttaat

SEQ ID NO: 140525 - DNA, 75 bp, synthetic construct
  source 1..75: mol_type = other DNA
tggccgctcccctggcagtaggagatacaataggtttcttttcatcatctgctccggcaacagttactgcaaaaa

SEQ ID NO: 140526 - DNA, 75 bp, synthetic construct
  source 1..75: mol_type = other DNA
tcctgaacaacttgtttcaacactaagcccggcgcaaaagcaactggtggaaattgcgcgggtgatgaagggcga

SEQ ID NO: 140527 - DNA, 75 bp, synthetic construct
  source 1..75: mol_type = other DNA
attggtggaggcagtagcgcaatcgttgatttggcaaggaacggcatactattttgttcaaaacgttcccgagca

SEQ ID NO: 140528 - DNA, 75 bp, synthetic construct
  source 1..75: mol_type = other DNA
tgacggaccgctgatcttactggataaccgctctccggatgaacgcgaagcccatcttaatgaccatcccttttt

SEQ ID NO: 140529 - DNA, 75 bp, synthetic construct
  source 1..75: mol_type = other DNA
agcgacgattcccgccagggcagcgcgcagctcatcgagcaactgttatcagagatgaaatctggccagcaagct

SEQ ID NO: 140530 - DNA, 75 bp, synthetic construct
  source 1..75: mol_type = other DNA
gattctttgctttatcgccgtagctattttgttatcaatgaaaattgataataaaaaagataacgcccagaaaga

SEQ ID NO: 140531 - DNA, 75 bp, synthetic construct
  source 1..75: mol_type = other DNA
acacgttaacctctgttaatccagaaaatgtgccgatttatgtcgctattgtggttggggttttgttgttgggtt

SEQ ID NO: 140532 - DNA, 75 bp, synthetic construct
  source 1..75: mol_type = other DNA
caactcttcattaaataaagaaataatacctactaattatatctacagtgggtttaaatatgtaagggatttttt

SEQ ID NO: 140533 - DNA, 75 bp, synthetic construct
  source 1..75: mol_type = other DNA
gctcatgatggcgccgggtcatctgctgctgctgcagattctccagtgtctggtcattgtccagtccatttcgct

SEQ ID NO: 140534 - DNA, 75 bp, synthetic construct
  source 1..75: mol_type = other DNA
tgataagggtcagcaacagatttcagcaaatcagcaagcgaatcagcagtccctgcacgaacagactcagcgggt

SEQ ID NO: 140535 - DNA, 75 bp, synthetic construct
  source 1..75: mol_type = other DNA
tatctgtgaacgttttaaccgggcattaagagagcaattcattgaatttaatgaaattttactctttgaggatct

SEQ ID NO: 140536 - DNA, 75 bp, synthetic construct
  source 1..75: mol_type = other DNA
aaaaggaaggtggcactcctaccagctggacaaggtactcaaaaacaaagttaaccaaatcggaatgcgaaaaaa

SEQ ID NO: 140537 - DNA, 75 bp, synthetic construct
  source 1..75: mol_type = other DNA
atggaggtgttcatatataaaattaccgccactattgaaaaggaaggaggcactcctactaactggacaagatat

SEQ ID NO: 140538 - DNA, 75 bp, synthetic construct
  source 1..75: mol_type = other DNA
tgaaaccatggagaaaatggcagcttccgtggatacgcttggcagccatatggcgacgctctttgcacaactgga

SEQ ID NO: 140539 - DNA, 75 bp, synthetic construct
  source 1..75: mol_type = other DNA
acaactggaagatggccagcagcaacttaatcagcagcaaaatcaggcgcaaaatctgctgataggcaatatgag

SEQ ID NO: 140540 - DNA, 75 bp, synthetic construct
  source 1..75: mol_type = other DNA
taatcggacattaagagaacaatttattgaatttaatgaaattttactctttgaggatctggcgttgtttaacca

SEQ ID NO: 140541 - DNA, 75 bp, synthetic construct
  source 1..75: mol_type = other DNA
gatatgatatacacggggtttctctctggcgatgaaaacatctctcttgaaggtttttttaaatttgaacaggtt

SEQ ID NO: 140542 - DNA, 75 bp, synthetic construct
  source 1..75: mol_type = other DNA
ccctgatggatggaacagctattgagtacactgccgagctacaaggtttaatggggcagtttcaccagtccatag

SEQ ID NO: 140543 - DNA, 75 bp, synthetic construct
  source 1..75: mol_type = other DNA
cagcaatgtgcaaaataacagaaacaatcaagaagtggcgtatacatcgctcaacagctgagagtttgctggatt

SEQ ID NO: 140544 - DNA, 75 bp, synthetic construct
  source 1..75: mol_type = other DNA
gcacggttaatggcgtcattctggaagcactggaagagattcctgtcgcaggcactcgcgtgcgtattggcgagt

SEQ ID NO: 140545 - DNA, 75 bp, synthetic construct
  source 1..75: mol_type = other DNA
ttttgccgaagtattgccgaaaaccattgccgcgctgtacccggaaaaagtcgcctatccgagtagttttctgtt

SEQ ID NO: 140546 - DNA, 75 bp, synthetic construct
  source 1..75: mol_type = other DNA
ccgctggtctggttgctgaatgctatcacccgtatgctgatgcgcatgatgggtatcaaaaccgatatcgtggtt

SEQ ID NO: 140547 - DNA, 75 bp, synthetic construct
  source 1..75: mol_type = other DNA
actggaaacagttcaaaggtaaagtgaaagagcaatggggcaaactgaccgatgatgatatgacggtcattgaag

SEQ ID NO: 140548 - DNA, 75 bp, synthetic construct
  source 1..75: mol_type = other DNA
gatggactgccggatatcatccagcccccggacgatttcgccgggagcctgcagagctggttgccagaatactga

SEQ ID NO: 140549 - DNA, 75 bp, synthetic construct
  source 1..75: mol_type = other DNA
cgccgaacaacggagggcgattcttgaaatgggccgattgctcacgcaggcccgacccgataaacaagccggata

SEQ ID NO: 140550 - DNA, 75 bp, synthetic construct
  source 1..75: mol_type = other DNA
ggcgtatacatcgctcaacagctgagagtttgctagattttgcgaggcgctacaatgcgatagtgagaggctgga

SEQ ID NO: 140551 - DNA, 75 bp, synthetic construct
  source 1..75: mol_type = other DNA
tgtagtacattgttcacgaatgagtgatgcaacaaggctgaagaacaggttatcggagcgcttctcggaagtcgg

SEQ ID NO: 140552 - DNA, 75 bp, synthetic construct
  source 1..75: mol_type = other DNA
aatccaggaacgctacggttaccagaaagatcaggcagagaaagaggtcgtggactgggaaacccgcaatgaata

SEQ ID NO: 140553 - DNA, 75 bp, synthetic construct
  source 1..75: mol_type = other DNA
tcacggttcggtgaagaatggcagacacccttatgtcccgttcaccagcttccggcaccggggcggtatgatgcg

SEQ ID NO: 140554 - DNA, 75 bp, synthetic construct
  source 1..75: mol_type = other DNA
tatatatatgtttttgaatagagtaacacttagtggacagagttcaattactaataagttaggtcaagtaagtaa

SEQ ID NO: 140555 - DNA, 75 bp, synthetic construct
  source 1..75: mol_type = other DNA
ctacttgcagacgtcgatgagcgtactaaaaaacagctaaaaaccgtcctgagcgtggacagcaattacttctgg

SEQ ID NO: 140556 - DNA, 75 bp, synthetic construct
  source 1..75: mol_type = other DNA
gacttgtcttagcaacagcgactggataacgctgaaaaagcaaattgaacaacatgaattgcgaattgtcagtct

SEQ ID NO: 140557 - DNA, 75 bp, synthetic construct
  source 1..75: mol_type = other DNA
ccgatccactcatcatcaatgggctggagagcgaatacctgctgcgcccgaagcgtctgcaggatgggtatacgg

SEQ ID NO: 140558 - DNA, 75 bp, synthetic construct
  source 1..75: mol_type = other DNA
cgccggcttgaagccatcgttgccgtgaagcacaccctgatccgccgttttgaaaagggctttatgctccgtggc

SEQ ID NO: 140559 - DNA, 75 bp, synthetic construct
  source 1..75: mol_type = other DNA
ctcaccttgaagagcactacgagggtattgttcgagccgcaaacgtcacattccaggttattcagaatgaaagtg

SEQ ID NO: 140560 - DNA, 75 bp, synthetic construct
  source 1..75: mol_type = other DNA
atgatgttaacgccagtgatgatgctattaacgttacgcataaccgccctgatttgacatggttaacgattaccg

SEQ ID NO: 140561 - DNA, 75 bp, synthetic construct
  source 1..75: mol_type = other DNA
acgccagggttttaagattgcctgcctggaagagattgcctggcgcaacggctggctcgatgacgaaggtgtgaa

SEQ ID NO: 140562 - DNA, 75 bp, synthetic construct
  source 1..75: mol_type = other DNA
atccgttacacctttcgccgctggaaaacgaatttctgctgcgcccgatgcgcattcaggacgggcataccgaga

SEQ ID NO: 140563 - DNA, 75 bp, synthetic construct
  source 1..75: mol_type = other DNA
ttgccggagaaggtgatatcacgctgtttggtgaactgctgcaccgcttcttcgcactgtatgccgatatccact

SEQ ID NO: 140564 - DNA, 75 bp, synthetic construct
  source 1..75: mol_type = other DNA
atttacgctgtcgatgttgatgaatcagctgtacatgtgatgcatgatcggcctgatttgagctggttaacaatt

SEQ ID NO: 140565 - DNA, 75 bp, synthetic construct
  source 1..75: mol_type = other DNA
aacaggctacagcacttcacaggtttgccgaatccaggcatattatcgagataattcagctaataaaatcaataa

SEQ ID NO: 140566 - DNA, 75 bp, synthetic construct
  source 1..75: mol_type = other DNA
ctgtactaccggcaggtcaagaaactgagcatccgtgaaacggcagaagcaacaggctacagcacttcacaggtt

SEQ ID NO: 140567 - DNA, 75 bp, synthetic construct
  source 1..75: mol_type = other DNA
aacagtatgctcgcgctaaagtcgtgcgccggttaagcgacagcccagagcgtgaaacgccgcgctgtcctcatt

SEQ ID NO: 140568 - DNA, 75 bp, synthetic construct
  source 1..75: mol_type = other DNA
gatgcaccgggcaatacgggactgcaaaacaatctggcgctattgctgtttagtagcgatcgccgtgacgaaggt

SEQ ID NO: 140569 - DNA, 75 bp, synthetic construct
  source 1..75: mol_type = other DNA
gatacgccgggcaatacgggcctgcaaaacaatctggcgctattactgtttagtagcgatcgccgtgacgaaggt

SEQ ID NO: 140570 - DNA, 75 bp, synthetic construct
  source 1..75: mol_type = other DNA
gcgaatatttaccgccagcagtcgccagaaaaagccgaagcgtatatcgcctcgctctctgccagccagcggcgc

SEQ ID NO: 140571 - DNA, 75 bp, synthetic construct
  source 1..75: mol_type = other DNA
tgagcagatagaccgcctgacccgtcttagcaacagcgactggataacgctgaaaaagcaaattgaacaacatga

SEQ ID NO: 140572 - DNA, 75 bp, synthetic construct
  source 1..75: mol_type = other DNA
tcgggcaaaagagatgctggagcagttcgtccaggaacgggggcataaaatcgccagctactaccgggaaaatat

SEQ ID NO: 140573 - DNA, 75 bp, synthetic construct
  source 1..75: mol_type = other DNA
ataaataatatgcttatagacctgatggccgcgatgtcgcataaagactggttaagtcgtcgccaacgtcaaaaa

SEQ ID NO: 140574 - DNA, 75 bp, synthetic construct
  source 1..75: mol_type = other DNA
gtccgcgtgattttattcagatcaatgcgggtgtgaaccagaagatggtggcgcgagcgctggagtggctggatg

SEQ ID NO: 140575 - DNA, 75 bp, synthetic construct
  source 1..75: mol_type = other DNA
aaaagcaggatataccattgcgcgactggcgatgctggatatgttcccacacacgggacatctggaatcgatggt

SEQ ID NO: 140576 - DNA, 75 bp, synthetic construct
  source 1..75: mol_type = other DNA
ggaaaacaagccgatcaggaacggcatcagaaaggtaagcgtcaacggaacaccgtattgacgcttatttattgg

SEQ ID NO: 140577 - DNA, 75 bp, synthetic construct
  source 1..75: mol_type = other DNA
catagctgggagaaaagtggctggatttccagattgcctggcaaaataacaatatgtccagcagtacaggagtga

SEQ ID NO: 140578 - DNA, 75 bp, synthetic construct
  source 1..75: mol_type = other DNA
tctgtatgggatatttatgaacgtcagatttttcaacttctcgaccacgctgtcatttatacaagttgttgggtt

SEQ ID NO: 140579 - DNA, 75 bp, synthetic construct
  source 1..75: mol_type = other DNA
gatatactgcagtttcctgatagattgaaaggtctaaagtattcacttgacatatttatttccacattctgtatt

SEQ ID NO: 140580 - DNA, 75 bp, synthetic construct
  source 1..75: mol_type = other DNA
ttctctggatttttgtttctgctttcgttttatctgtttgctatgtcatcggcgtgcttagaaactggacagata

SEQ ID NO: 140581 - DNA, 75 bp, synthetic construct
  source 1..75: mol_type = other DNA
acaaaaaacgcgtcaaaaaaatgataaatggcatccgatattctgggcaaccaataaatcagaaataaatgcatc

SEQ ID NO: 140582 - DNA, 75 bp, synthetic construct
  source 1..75: mol_type = other DNA
tcatctgaacataaattttttcagtttatagatgatgagttacgtaatataccagcaagttcggcacaggactgg

SEQ ID NO: 140583 - DNA, 75 bp, synthetic construct
  source 1..75: mol_type = other DNA
tttttagggggcctgtctttctggattggccctttaattgttgagttgattgcaggtaacaattacctaagagca

SEQ ID NO: 140584 - DNA, 75 bp, synthetic construct
  source 1..75: mol_type = other DNA
aaagcacaattatattgctgatataattacttgctaccgttgtaaaaaaaacacacctgtattcatccataacaa

SEQ ID NO: 140585 - DNA, 75 bp, synthetic construct
  source 1..75: mol_type = other DNA
ttttcacacagaagtgacacacaatgtgatcctgagtctgtatatcacaaactagcaaaaatactcatctgttat

SEQ ID NO: 140586 - DNA, 75 bp, synthetic construct
  source 1..75: mol_type = other DNA
tttcctgacggagttgattaaaagtgatccgtcttattcatggtttgtctctgaatatgtaaatattcctgcagt

SEQ ID NO: 140587 - DNA, 75 bp, synthetic construct
  source 1..75: mol_type = other DNA
gtctaatttactgtattttccttttgagttcgtattatatgatagatatttgtctttcaaaagggaacttgataa

SEQ ID NO: 140588 - DNA, 75 bp, synthetic construct
  source 1..75: mol_type = other DNA
ccttatggttacaaattatttattttatgcaaaatgtacgggaaggttatcaattgtaaccattttcagtggggg

SEQ ID NO: 140589 - DNA, 75 bp, synthetic construct
  source 1..75: mol_type = other DNA
aaacaccatcatacactaaatcagtaagttggcagcatcaccaaaaagtggttacgttgatagacgataatattc

SEQ ID NO: 140590 - DNA, 75 bp, synthetic construct
  source 1..75: mol_type = other DNA
tcgccgccacgctggaagtgactaacgccaccatcgccatctacgatgaagataacggcgagcattcggtggagc

SEQ ID NO: 140591 - DNA, 75 bp, synthetic construct
  source 1..75: mol_type = other DNA
gcgttaattgtcgccaccttccaggccaccattgtgctggcgattgggatctgggcgtatcaaatccccttcgcc

SEQ ID NO: 140592 - DNA, 75 bp, synthetic construct
  source 1..75: mol_type = other DNA
gttatttccagcgcctgctgggtgacggcagtgagttcggtatccagctggaatatgccgaacagcccagcccgg

SEQ ID NO: 140593 - DNA, 75 bp, synthetic construct
  source 1..75: mol_type = other DNA
ctgggcggtgaccgggctttatggaagaaaaaccaaaacagccgaaatcaaactgggcggtgaccgggctttatt

SEQ ID NO: 140594 - DNA, 75 bp, synthetic construct
  source 1..75: mol_type = other DNA
atgaaaggtattatcctggcgggcggttccggcacccgattgcatccgattacgcgcggcgtatcgaagcaactg

SEQ ID NO: 140595 - DNA, 75 bp, synthetic construct
  source 1..75: mol_type = other DNA
aactctgtgataggttttttatcagcacgtaaatctaaaaaacaaccacctcatggcattgttctggttattcct

SEQ ID NO: 140596 - DNA, 75 bp, synthetic construct
  source 1..75: mol_type = other DNA
tatgaattttgccgattcaggtctttttacttggtatccaggaagctgtcattctgtcagtattgatattgcgtt

SEQ ID NO: 140597 - DNA, 75 bp, synthetic construct
  source 1..75: mol_type = other DNA
actaaatcagaccctgcaaaaggttgaatcacagccttacaatatgacgataagtagtgcaccagcaacaatttc

SEQ ID NO: 140598 - DNA, 75 bp, synthetic construct
  source 1..75: mol_type = other DNA
atgtttcatcgcttatggacgttaatccgcaaagaattgcagtcgctgctgcgcgaaccgcagacgcgggcgatt

SEQ ID NO: 140599 - DNA, 75 bp, synthetic construct
  source 1..75: mol_type = other DNA
gctggaagtgaccaacgccaccatcgccatttacgacgaagataacggtgcacattcagttgaactgactcagcg

SEQ ID NO: 140600 - DNA, 75 bp, synthetic construct
  source 1..75: mol_type = other DNA
tcagtcattaacagcaataatacagaaccagtgattgattctgtatgggatatttatgaacggcaaaattatcag

SEQ ID NO: 140601 - DNA, 75 bp, synthetic construct
  source 1..75: mol_type = other DNA
cgtcttgagtccaacccggaaagacacgtaaaaacgccactggcagcagccattggtaaccgtttagaggagtta

SEQ ID NO: 140602 - DNA, 75 bp, synthetic construct
  source 1..75: mol_type = other DNA
tgattacagcaaactgctttccccggagtttaaacagttctttagccaatacagtattgctgtgggatcaaccgg

SEQ ID NO: 140603 - DNA, 75 bp, synthetic construct
  source 1..75: mol_type = other DNA
acgctaaaatgaattcgctcatcgcccagtatccgttggtagaggatctggttgctcttaaagaaaccacctggt

SEQ ID NO: 140604 - DNA, 75 bp, synthetic construct
  source 1..75: mol_type = other DNA
atggtccgtctgccccctgtggtgatgtcagcaaaatcagccactgcgcgaaccacaatagcccgggaagatgct

SEQ ID NO: 140605 - DNA, 75 bp, synthetic construct
  source 1..75: mol_type = other DNA
ggtattttccgctgccctgatccgccgtgcgctgattgttgcggcagtctgcctgtctgtggcaacggggctgtg

SEQ ID NO: 140606 - DNA, 75 bp, synthetic construct
  source 1..75: mol_type = other DNA
aaactactggggctattgaacgtggagacacagctgttgcaaaacgtcttgcaaaagatgcggcagaatcacaga

SEQ ID NO: 140607 - DNA, 75 bp, synthetic construct
  source 1..75: mol_type = other DNA
taggagaagccacgaaggagacgtccagttcggtaactggattggggcaaacgacacagcagaccaccagcgcaa

SEQ ID NO: 140608 - DNA, 75 bp, synthetic construct
  source 1..75: mol_type = other DNA
ttccggctctggtaataagtggttgaatttcggcgcgacagttgcatctggtttggtttcagtatgggctggtgg

SEQ ID NO: 140609 - DNA, 75 bp, synthetic construct
  source 1..75: mol_type = other DNA
atactatacgacagcgacatttatcgcttcagtcatcgctctggcgggcacattcctgctgtcatttatcatcta

SEQ ID NO: 140610 - DNA, 75 bp, synthetic construct
  source 1..75: mol_type = other DNA
cgggcaatggagcgtctgctggatggcttctatacccttagcgatcaaaccatgtatgacatgcttggctggctg

SEQ ID NO: 140611 - DNA, 75 bp, synthetic construct
  source 1..75: mol_type = other DNA
gccagctctctggagaaaatgagcgatgaagagcgtgccgcagccattgccgcactgactaaagctcgtgaacag

SEQ ID NO: 140612 - DNA, 75 bp, synthetic construct
  source 1..75: mol_type = other DNA
agatatggcggcgcaggcgggtaaattgctcgattactcggctcacgcctgggagtcgtttaccgccattacgct

SEQ ID NO: 140613 - DNA, 75 bp, synthetic construct
  source 1..75: mol_type = other DNA
ccatcgcctcaaccattggtctggtagatatggcagcacaggccggaaaattgctcgattactccgcccacgcct

SEQ ID NO: 140614 - DNA, 75 bp, synthetic construct
  source 1..75: mol_type = other DNA
atgggcctgacgctaccgcaggcttatcgatacgtactgctgcctaatgcttatcgcgttatcgtcccgccgatg

SEQ ID NO: 140615 - DNA, 75 bp, synthetic construct
  source 1..75: mol_type = other DNA
ggctacgccagctatgcacggcttaaaaatgtgaatgccgatctgcttaaaattgacggcagttttatccgcaat

SEQ ID NO: 140616 - DNA, 75 bp, synthetic construct
  source 1..75: mol_type = other DNA
tgcggcgtttgtaggattactggcgagcaaagaaaatctggtaggcgtcatgccttttaaccttggaaccttaat

SEQ ID NO: 140617 - DNA, 75 bp, synthetic construct
  source 1..75: mol_type = other DNA
ggcggttacagggtctttactccccggcgtaacaacgtttcacatggcgatacccgcttaatttcccagcgaatt

SEQ ID NO: 140618 - DNA, 75 bp, synthetic construct
  source 1..75: mol_type = other DNA
aaatgccgcgctggcgatgggcctgacgctaccgcaggcttatcgatacgtactgctgcctaatgcttatcgcgt

SEQ ID NO: 140619 - DNA, 75 bp, synthetic construct
  source 1..75: mol_type = other DNA
ccgtttaatttcggcgatggtggcgttttcgatgtttgaagcggcctactattcagagattatccgtgccggtat

SEQ ID NO: 140620 - DNA, 75 bp, synthetic construct
  source 1..75: mol_type = other DNA
atcaatacgatatttatcatatgcaaatcatggaagggaatattgctacaacaatcaaaaacaacctgaataaca

SEQ ID NO: 140621 - DNA, 75 bp, synthetic construct
  source 1..75: mol_type = other DNA
tatcgtcccgccgatgacctccgagatgatgaacctggtgaaaaactccgccatcgcctcgaccatcggtctggt

SEQ ID NO: 140622 - DNA, 75 bp, synthetic construct
  source 1..75: mol_type = other DNA
gggagtcgtttaccgccattacgctggcgtatgtattgattaacgcttttatcatgctggtgatgacgctggttg

SEQ ID NO: 140623 - DNA, 75 bp, synthetic construct
  source 1..75: mol_type = other DNA
aaatcggcatgtggtttaaggccgagctggatcccaatattcagtttttcctttcatccatgctctgcctggggc

SEQ ID NO: 140624 - DNA, 75 bp, synthetic construct
  source 1..75: mol_type = other DNA
ttgctgaaaccgcaacggacagacggcggtcatcggctgttcaacgatgccgatattgaccggatccgcgagatc

SEQ ID NO: 140625 - DNA, 75 bp, synthetic construct
  source 1..75: mol_type = other DNA
aagccggtgataaatacgccacgatacgtacgatgctgacagatatatttaacagtaattaccagtgttatggct

SEQ ID NO: 140626 - DNA, 75 bp, synthetic construct
  source 1..75: mol_type = other DNA
agacgctgctgacagaaagggaagtcagttttatgaaaggactgttcagaattgtggatatgaagcggtgggtaa

SEQ ID NO: 140627 - DNA, 75 bp, synthetic construct
  source 1..75: mol_type = other DNA
ggttggctggaatattcatgataccacccgtctgtggctggagggctggattgccagtcaacaaggatggcgcat

SEQ ID NO: 140628 - DNA, 75 bp, synthetic construct
  source 1..75: mol_type = other DNA
cagtaccaacaaccgactctccaggcgctgctggcgatcctcgacggcgtactgatcaactacatcgccatttgt

SEQ ID NO: 140629 - DNA, 75 bp, synthetic construct
  source 1..75: mol_type = other DNA
tgatgttctcgctcactcgctcaatcagctacgcccggaactgttcgaaggccgaacattattggtatggtgcgg

SEQ ID NO: 140630 - DNA, 75 bp, synthetic construct
  source 1..75: mol_type = other DNA
gtcattttcgcacgttcaatgttattgatgactttaatcgtgaggcgttatcgattgaaatcgatctgaatctgc

SEQ ID NO: 140631 - DNA, 75 bp, synthetic construct
  source 1..75: mol_type = other DNA
aatcgaacgccgggcgcgaaggggcctctaaaatctggtacgggcagattaaagacatgcccgtcagtgatgcca

SEQ ID NO: 140632 - DNA, 75 bp, synthetic construct
  source 1..75: mol_type = other DNA
gccgagttcaaatgcgtataaatcatcgcgtaccacaatgctgctttccacgccggatggtcgccaggcactgca

SEQ ID NO: 140633 - DNA, 75 bp, synthetic construct
  source 1..75: mol_type = other DNA
ctattgaaacagactactccacctcagatgtcgggcagctcagtacccgtgtcgcggcctttattgagatgctgt

SEQ ID NO: 140634 - DNA, 75 bp, synthetic construct
  source 1..75: mol_type = other DNA
gccgcatccggcaatcaatgcctgatgcgacgctgtcgcgtcttatcaggcctacaactgttgccgacccgtagg

SEQ ID NO: 140635 - DNA, 75 bp, synthetic construct
  source 1..75: mol_type = other DNA
cgcccgaagcgttaaaccagagctggtccgttgatttcattcatgacgctctgatttgcggtcgtcgctttcgca

SEQ ID NO: 140636 - DNA, 75 bp, synthetic construct
  source 1..75: mol_type = other DNA
gtcgcccgtatcattggcgttctggaaagcaagctcgattctacggcagataaactacaggatgtagctgccggt

SEQ ID NO: 140637 - DNA, 75 bp, synthetic construct
  source 1..75: mol_type = other DNA
aggacgatgcctcgcgtgcattatggaaagctgagatgctgcgcttacaaaaagcggtagaggaacgttttggac

SEQ ID NO: 140638 - DNA, 75 bp, synthetic construct
  source 1..75: mol_type = other DNA
acattagaacatcttgtctggaggatggtttctttagagcaacgcaaccaaagtatcttaatgatccgtcgagtg

SEQ ID NO: 140639 - DNA, 75 bp, synthetic construct
  source 1..75: mol_type = other DNA
cgactcttaatgatcagcttgaaaaagccaaaaaggatggaaataccgagcagatccagaaactgcaaggcagta

SEQ ID NO: 140640 - DNA, 75 bp, synthetic construct
  source 1..75: mol_type = other DNA
cgcagcgaaacttcaaaggtcgttgacgagattaggaaaataccagaggcgatgacggcggccaaacgtgcacaa

SEQ ID NO: 140641 - DNA, 75 bp, synthetic construct
  source 1..75: mol_type = other DNA
gaagccgttcctaacgcgatgcaggcaatggcagacgccgcaggcatcactatgggggaactgactaaagccgtt

SEQ ID NO: 140642 - DNA, 75 bp, synthetic construct
  source 1..75: mol_type = other DNA
tattttaagatggacaatcttaatgatataagatggggaattcatatagtatctaacagtgaaagagtttgtcag

SEQ ID NO: 140643 - DNA, 75 bp, synthetic construct
  source 1..75: mol_type = other DNA
gctggtgaggaagcaataacccgtgattatttccgcatcctggttatttcggcgcgtaatgatgcaaatatcagt

SEQ ID NO: 140644 - DNA, 75 bp, synthetic construct
  source 1..75: mol_type = other DNA
agacagcagtcgcaaaagactttaatgagtcattggctattcgtaatcatgaaaataaaaaaagtgacaacagca

SEQ ID NO: 140645 - DNA, 75 bp, synthetic construct
  source 1..75: mol_type = other DNA
attattgaatcagaactggttgctattcctgctatgcaaaaacggctggaaaaggaatatcaccagccgatcgcc

SEQ ID NO: 140646 - DNA, 75 bp, synthetic construct
  source 1..75: mol_type = other DNA
gcttcagtcatcgctctggcgggcacattcctgctgtcatttatcatctaagcgcaaagagacgtactatggaaa

SEQ ID NO: 140647 - DNA, 75 bp, synthetic construct
  source 1..75: mol_type = other DNA
tgaagatgactacagcaaactgctttccccggagtttaaacagttctttagccaatacagtattgctgtgggatc

SEQ ID NO: 140648 - DNA, 75 bp, synthetic construct
  source 1..75: mol_type = other DNA
accgaaccctatcttgcgcaatcctggattgaagatgccagcggtaaaaaaacgcgtgattatatttcgacacta

SEQ ID NO: 140649 - DNA, 75 bp, synthetic construct
  source 1..75: mol_type = other DNA
atgaagggactcaataaaatcacctgctgcttgctggcagcactactcatgccttgtgcaggacacgctgagaac

SEQ ID NO: 140650 - DNA, 75 bp, synthetic construct
  source 1..75: mol_type = other DNA
ttggcatcaacctgatgagctggccggttctgctggttatcggggcgattgctctgctggcagccgggtgttatc

SEQ ID NO: 140651 - DNA, 75 bp, synthetic construct
  source 1..75: mol_type = other DNA
gtgattggttatgcgtcgatggcactactgagctttgccgccgtgggggcggtggccaatatcgtgatgggagta

SEQ ID NO: 140652 - DNA, 75 bp, synthetic construct
  source 1..75: mol_type = other DNA
cccgcaaaggtaagggccaagcggcgcgagatgccttgaagtgtttcttcttcccggggatcgacttggtaacgg

SEQ ID NO: 140653 - DNA, 75 bp, synthetic construct
  source 1..75: mol_type = other DNA
gacctacggtgccagcgcactggattttgttaagtccactgaggagattaacaccgccattgccgggctgaccgg

SEQ ID NO: 140654 - DNA, 75 bp, synthetic construct
  source 1..75: mol_type = other DNA
atcacctcgttactgaaaacacttgatgttgaagagagcgaggaaggaaatacccgagtctattacctgaaatat

SEQ ID NO: 140655 - DNA, 75 bp, synthetic construct
  source 1..75: mol_type = other DNA
cagaacggacggcggcagtcaggccggcagcggacagaatgcccgcaataacggcgggtcgctcggctggatctc

SEQ ID NO: 140656 - DNA, 75 bp, synthetic construct
  source 1..75: mol_type = other DNA
ggtacggggcaggtcactgccgtggtaccccatgctttgtaccggttgttctgcggtaatcagcctccggtcatc

SEQ ID NO: 140657 - DNA, 75 bp, synthetic construct
  source 1..75: mol_type = other DNA
cggcgaaaatccaggagttgactgacaaacttaaaaagtctgacagcgagaaaaaaacggcggacagcgatatcc

SEQ ID NO: 140658 - DNA, 75 bp, synthetic construct
  source 1..75: mol_type = other DNA
ggatatcgctaaaaatgaagcggcagtatttccagtgccggaattgaagcaatcagcgaaagctgacggtgctct

SEQ ID NO: 140659 - DNA, 75 bp, synthetic construct
  source 1..75: mol_type = other DNA
gtcaggcgatgacggcattgctgggccgggtgcccattgacggtaaagtgaccgatccgtatccgttcaaggtgg

SEQ ID NO: 140660 - DNA, 75 bp, synthetic construct
  source 1..75: mol_type = other DNA
gctggaagagaatgcgcagttgcgcagccggcagcagaatgtgtcggggcagatccagtctgcggtggcctctgt

SEQ ID NO: 140661 - DNA, 75 bp, synthetic construct
  source 1..75: mol_type = other DNA
caccatcgccggtaagttgttggcgcataagttgtatcacttccgtctggaatggagccacttggagctggatgc

SEQ ID NO: 140662 - DNA, 75 bp, synthetic construct
  source 1..75: mol_type = other DNA
cggcgatgtgttgcagcaccggcgtctgcggtacagatgttgatcaggctctggtcgatttttctgcagatgtgc

SEQ ID NO: 140663 - DNA, 75 bp, synthetic construct
  source 1..75: mol_type = other DNA
tgaactggctcgctggttaggtattccgctggagaaagtgggcgtggctccgacaagctgctgtggtggtaacac

SEQ ID NO: 140664 - DNA, 75 bp, synthetic construct
  source 1..75: mol_type = other DNA
ctggcaattcgtggtccggaaaagttccagaaacgagtgttctggaaaggcctcgaaattcttgaggaaattcga

SEQ ID NO: 140665 - DNA, 75 bp, synthetic construct
  source 1..75: mol_type = other DNA
tggttccccatggctggagcgtggatattcctgcaatgttgctggcagctcagggaaaaaaaatggccgccatgt

SEQ ID NO: 140666 - DNA, 75 bp, synthetic construct
  source 1..75: mol_type = other DNA
gggcatgttccgccagtggcatcagcccggtctgcgaggcctgttggactttaccaaactgaaaggtgtggtggt

SEQ ID NO: 140667 - DNA, 75 bp, synthetic construct
  source 1..75: mol_type = other DNA
ggcgtggaagtgctgtatcaggaattcagctttggccgctatttcaaccaaatcgccgccggggtattacgcggc

SEQ ID NO: 140668 - DNA, 75 bp, synthetic construct
  source 1..75: mol_type = other DNA
cggtgaatttgccgctgccgttgtctgcggacactatacgattgaacaggtcatgccactggtttgtcggcgcgg

SEQ ID NO: 140669 - DNA, 75 bp, synthetic construct
  source 1..75: mol_type = other DNA
cggcgggcgttttgtgacccacgaggttcgcatcgaagaattgttagcctttttaaggaaccgctacggtcttta

SEQ ID NO: 140670 - DNA, 75 bp, synthetic construct
  source 1..75: mol_type = other DNA
cagcccatgagctttgttcacaatgagaaagcgaaagcattcctcgaagtatctggagcagaagggcttccgcta

SEQ ID NO: 140671 - DNA, 75 bp, synthetic construct
  source 1..75: mol_type = other DNA
tacggaacgcatgctgaaaaaatatcagctccgcgccatcaccgacacggagaagaagcatgtacgtattgagcg

SEQ ID NO: 140672 - DNA, 75 bp, synthetic construct
  source 1..75: mol_type = other DNA
gttttcggcccgctggttcttccgctacaggatctcgacgcccgcgaaggtgagttattcctcaccaccgcttag

SEQ ID NO: 140673 - DNA, 75 bp, synthetic construct
  source 1..75: mol_type = other DNA
cgttgccgggttaaatagctggaaaatcccggaactgaacaaagaaacgctggcggcagtcgctgaacccgataa

SEQ ID NO: 140674 - DNA, 75 bp, synthetic construct
  source 1..75: mol_type = other DNA
catcgtatgcaaatcgagtcgctcaagggcggctttttttgtgcctgaaatccagtatccgcaaggctttcctcg

SEQ ID NO: 140675 - DNA, 75 bp, synthetic construct
  source 1..75: mol_type = other DNA
gattccgaagaatatcatacagatgaaaatgggcgtgtaaaaatcagctttctctggggtgaacagtcaacgtca

SEQ ID NO: 140676 - DNA, 75 bp, synthetic construct
  source 1..75: mol_type = other DNA
accccgcgtacggccattaacgctgatggtgcacagacaccactggcgacgatggtgctggtttaccagctcagg

SEQ ID NO: 140677 - DNA, 75 bp, synthetic construct
  source 1..75: mol_type = other DNA
accccgcgtacggccattaacgctgatggcgcacagacaccactggcgacgatggtgcggatttaccagctcagg

SEQ ID NO: 140678 - DNA, 75 bp, synthetic construct
  source 1..75: mol_type = other DNA
ctattgaaaagattgcggagttcagagcagcatctgctgcgatggctgatgctcacatggttcttattacagatc

SEQ ID NO: 140679 - DNA, 75 bp, synthetic construct
  source 1..75: mol_type = other DNA
tgtaaatgagataactatatccacatcagggataagtgtaaaagccgctaaaattgccatagaagggcaggcctc

SEQ ID NO: 140680 - DNA, 75 bp, synthetic construct
  source 1..75: mol_type = other DNA
attaactgttggtgaaggccgtaattatgaaataaaaaaagggaatgacaagcttattcttaaagaaggtgacct

SEQ ID NO: 140681 - DNA, 75 bp, synthetic construct
  source 1..75: mol_type = other DNA
cctgttattgtgatttgtatgcttcagataataaaagcccacttaatgtcacaggtgaatttaattatcccgtta

SEQ ID NO: 140682 - DNA, 75 bp, synthetic construct
  source 1..75: mol_type = other DNA
gcgaacattataaattccaggataaacattttattcggttgcatggttgtagtttatcattattcccacttgaaa

SEQ ID NO: 140683 - DNA, 75 bp, synthetic construct
  source 1..75: mol_type = other DNA
aagagtcatctataattgtgataacagtatgcagcatacctgcattattgtgttacagccagaaatcgctgagct

SEQ ID NO: 140684 - DNA, 75 bp, synthetic construct
  source 1..75: mol_type = other DNA
catggcgtggtcacaaaagttatctataattgtgataacagcatgcagcatacctgcattattgtgttacagcca

SEQ ID NO: 140685 - DNA, 75 bp, synthetic construct
  source 1..75: mol_type = other DNA
acctttgtttttacggacggcacggtacgcacggtgccgaagccggctgacagaacggacggcggcagtcaggcc

SEQ ID NO: 140686 - DNA, 75 bp, synthetic construct
  source 1..75: mol_type = other DNA
ccaccggtgactggacattgtcctgtgtgcgcggggatatcacctcgatcacctttgtttttacggacggcacga

SEQ ID NO: 140687 - DNA, 75 bp, synthetic construct
  source 1..75: mol_type = other DNA
ggtcagccggctcagggcagcggacaaggcgatattccgctgggactggggctggataccgggggcagcggactg

SEQ ID NO: 140688 - DNA, 75 bp, synthetic construct
  source 1..75: mol_type = other DNA
agaaaacgagcggttgcgccgacgcaatcaggacgtttcaggacaggtgaatgaggccgttaatgatctgcgtga

SEQ ID NO: 140689 - DNA, 75 bp, synthetic construct
  source 1..75: mol_type = other DNA
attgtttccgggacggcaagcggtgactggacgctgtcctgcgtgcgcgggcaggttaacagcgtcacctttgtc

SEQ ID NO: 140690 - DNA, 75 bp, synthetic construct
  source 1..75: mol_type = other DNA
cgtcagaaagccgaactggatcgtaatgcgaaaaatcagcaggccattgaggaaaccgatctgccggtttatacc

SEQ ID NO: 140691 - DNA, 75 bp, synthetic construct
  source 1..75: mol_type = other DNA
tactggctccccgccgctggcaggatgaatccggtgatctgtggacgacctaccagcgaattcaggagaacctga

SEQ ID NO: 140692 - DNA, 75 bp, synthetic construct
  source 1..75: mol_type = other DNA
ctgaacagcgcattcagctagctgaagcccaggcgaaggcaattgctactcaggatggtccgcagatcgactttt

SEQ ID NO: 140693 - DNA, 75 bp, synthetic construct
  source 1..75: mol_type = other DNA
gttacggtctgattattgcgttgttttccctgtcgttatcagggtgtggcctgacgcaaagagtggcagacggta

SEQ ID NO: 140694 - DNA, 75 bp, synthetic construct
  source 1..75: mol_type = other DNA
agggtgacacgccggaagataccctgcgcacgcttatcgggcgtctcaatcaggtacgtgaacgtcagcagacgc

SEQ ID NO: 140695 - DNA, 75 bp, synthetic construct
  source 1..75: mol_type = other DNA
cgcgccattcaaggcatcgacggcgatatcaaactcaaccgcgccctgtgggtgatggctgaaaacatgttgcaa

SEQ ID NO: 140696 - DNA, 75 bp, synthetic construct
  source 1..75: mol_type = other DNA
tgaatccggtgatctgtggacgacctaccagcgaattcaggagaacctgatcaaaggcggtttaaacgggcggac

SEQ ID NO: 140697 - DNA, 75 bp, synthetic construct
  source 1..75: mol_type = other DNA
tgtacaggtggcctgatttgcggcgctcagcgtaaagagtcgctgaaacattttgtttcccgtcgggcgatggac

SEQ ID NO: 140698 - DNA, 75 bp, synthetic construct
  source 1..75: mol_type = other DNA
acgaccacttactttcttctgttatggcgttggcgtgctggagggcggtgaattgccggatacccatcttgggcg

SEQ ID NO: 140699 - DNA, 75 bp, synthetic construct
  source 1..75: mol_type = other DNA
cgacccgtggcgatggcaccaccggggaagacattacgtctaacgtgcgtactattcgcgccatcccgttgaaac

SEQ ID NO: 140700 - DNA, 75 bp, synthetic construct
  source 1..75: mol_type = other DNA
ttttttgccggattacatggtccgtgaggcgatggcgcaatccctgctggttacccgacaaatccataatccgcg

SEQ ID NO: 140701 - DNA, 75 bp, synthetic construct
  source 1..75: mol_type = other DNA
gtgagaacgaggatttacgccgctgggctgatactcctttgcctgctgacattatccggctgcgggaacgtccga

SEQ ID NO: 140702 - DNA, 75 bp, synthetic construct
  source 1..75: mol_type = other DNA
tggtcttgccgtcagcattctgtatgaaaatggcgttttagtcagtgcagcgacccgtggcgatggcactaccgg

SEQ ID NO: 140703 - DNA, 75 bp, synthetic construct
  source 1..75: mol_type = other DNA
tttactgcaatttaaaaagtgggggttgccggtcagcgatcgggtaacgctttgtgaatcggcggaagaagtgct

SEQ ID NO: 140704 - DNA, 75 bp, synthetic construct
  source 1..75: mol_type = other DNA
aatgcggcagctggttcactgcgtcagcttgatccgcgtattacagcgaagcgaccgctcacttttttctgctat

SEQ ID NO: 140705 - DNA, 75 bp, synthetic construct
  source 1..75: mol_type = other DNA
cagaactgcgaacgacgcttcgccatcatgaatatctttatcatgtgatggatgcgccggaaattcccgacgctg

SEQ ID NO: 140706 - DNA, 75 bp, synthetic construct
  source 1..75: mol_type = other DNA
gaccgcccgacgctgggctttgatatcgacggtgtggtgattaaagtcaactcactggcgcagcaggaacagctt

SEQ ID NO: 140707 - DNA, 75 bp, synthetic construct
  source 1..75: mol_type = other DNA
ctgttggcggaaggtgttcactggcctgcgccggtggtgattaacgctgaagaaatcgacagcccgtttgccggt

SEQ ID NO: 140708 - DNA, 75 bp, synthetic construct
  source 1..75: mol_type = other DNA
cccaacgtgtaggtgctgcgccgctggcggctttcagccagatccgccatgaagtgccaatgctgtcgctggata

SEQ ID NO: 140709 - DNA, 75 bp, synthetic construct
  source 1..75: mol_type = other DNA
gatgccgtctacaccgatgccccgcctcctgcgggcgtgatgcaggtgctgacggaccaccatattcaactggag

SEQ ID NO: 140710 - DNA, 75 bp, synthetic construct
  source 1..75: mol_type = other DNA
ctttccgcaacagaaagcgattgattcaccggaagcgaaaagcaagtcggaagagctggaagatgaacccagcgc

SEQ ID NO: 140711 - DNA, 75 bp, synthetic construct
  source 1..75: mol_type = other DNA
ttcgctgattgggtactgatggttgcgccgccgctgatctttttcctggtggcggttattttgtggggaagtcta

SEQ ID NO: 140712 - DNA, 75 bp, synthetic construct
  source 1..75: mol_type = other DNA
cacgttatgctggttgtcgatcactcgaaatttggccgtaacgcgatggtcaatatgatcttacccagcaatagt

SEQ ID NO: 140713 - DNA, 75 bp, synthetic construct
  source 1..75: mol_type = other DNA
gggttatgtcagtaccgaggagctggtggagcacttctccgtcagcccgcagactattcgccgcgacctcaatga

SEQ ID NO: 140714 - DNA, 75 bp, synthetic construct
  source 1..75: mol_type = other DNA
atgttgcgttacggcgtcaccgacctgcgttcattcttcgaaaatgatctgcgtttcctcaaacagtttaaataa

SEQ ID NO: 140715 - DNA, 75 bp, synthetic construct
  source 1..75: mol_type = other DNA
cccttaccgacgttgttatcaaaagcgtgagttaccaactggacgccccgcgcacaccagaaggctatttcactc

SEQ ID NO: 140716 - DNA, 75 bp, synthetic construct
  source 1..75: mol_type = other DNA
agtcagaaggcgggagaacgagtactgcgttggatgcgcaagatgtatgagcagttgcatctgcgcgtgaacgag

SEQ ID NO: 140717 - DNA, 75 bp, synthetic construct
  source 1..75: mol_type = other DNA
atgaactcaatttttaccgaagagaatctgttggcatttactaccgctgcgcgatttggcagcttcagtaaagcc

SEQ ID NO: 140718 - DNA, 75 bp, synthetic construct
  source 1..75: mol_type = other DNA
gatctcccgtctgatgggattcctgctggtatgtatgggtgtgcagtttattattaacggcatcctggaaatcat

SEQ ID NO: 140719 - DNA, 75 bp, synthetic construct
  source 1..75: mol_type = other DNA
aatcattgttggtttacagtatattgctgagataccacgacaacaggcattgttgcaaatcctgtatcataaatg

SEQ ID NO: 140720 - DNA, 75 bp, synthetic construct
  source 1..75: mol_type = other DNA
atccgatcttaaccgtgcgtcatctcatcgatgacaagcgtccggtgccagaactgccggaaaaatatcgtccga

SEQ ID NO: 140721 - DNA, 75 bp, synthetic construct
  source 1..75: mol_type = other DNA
gtagacgaatctttcaatgatagtactgataacatacaaacagtaaaagatttgttaacgcaattaactgatggc

SEQ ID NO: 140722 - DNA, 75 bp, synthetic construct
  source 1..75: mol_type = other DNA
tttaacggatgaaagcaataaagagcaagcggacgttattcctgtttatgctgccgcgcctgcgtcggttgtgcc

SEQ ID NO: 140723 - DNA, 75 bp, synthetic construct
  source 1..75: mol_type = other DNA
ccaggtgacaatcagccgcctgttaaacaatgaggtcagcgtttccatttccaccctggagaatgttgcatccgc

SEQ ID NO: 140724 - DNA, 75 bp, synthetic construct
  source 1..75: mol_type = other DNA
gtgattccgaaaaagcgttgctggaccatcctggccgatgaaaaagagaacggtccggaagataccacgcaagat

SEQ ID NO: 140725 - DNA, 75 bp, synthetic construct
  source 1..75: mol_type = other DNA
attattgatgctatttcaaagttagttattgaaatttctgatatttcttctaactattggctcagtcagacaact

SEQ ID NO: 140726 - DNA, 75 bp, synthetic construct
  source 1..75: mol_type = other DNA
gccggaaaccgcgcggcacagataatgagccttctggaaacagcaaaacgtaatggtctggagtcacatgcctgg

SEQ ID NO: 140727 - DNA, 75 bp, synthetic construct
  source 1..75: mol_type = other DNA
atatgagtttgaaaatgatctgaccgtgttcgaatggatgagtcagtggaagcaggaaggcgatgacgagcaggc

SEQ ID NO: 140728 - DNA, 75 bp, synthetic construct
  source 1..75: mol_type = other DNA
tgcagttcggcagtaagccgttgtttgaaaacatttccgtcaaattcggcggcggcaaccgttacggcctgattg

SEQ ID NO: 140729 - DNA, 75 bp, synthetic construct
  source 1..75: mol_type = other DNA
cgccgccgctgatctttttcttggtggcggttattttgtggggaagtctacgcagctctggcgcaattatgcggc

SEQ ID NO: 140730 - DNA, 75 bp, synthetic construct
  source 1..75: mol_type = other DNA
tccgcaacgacgatttcgaagatctgaccagcaccgaagtggcggaacctttaccgctgcctgctttcgagcgtg

SEQ ID NO: 140731 - DNA, 75 bp, synthetic construct
  source 1..75: mol_type = other DNA
gaggacgaattcctcgctgacaagaccggtaaccgccggtggttgcctgtggaggtgtcgaaagtcgacgtgaaa

SEQ ID NO: 140732 - DNA, 75 bp, synthetic construct
  source 1..75: mol_type = other DNA
aaacgcgaagaaatgcgaattagtaatgttttgcaaaattgcgggtataagcgtgcccaaaggcgaattgggggg

SEQ ID NO: 140733 - DNA, 75 bp, synthetic construct
  source 1..75: mol_type = other DNA
cttcagttaatcagtgctgacggccgtaagcgcaccctgaaaggcggacaggtcaggggcacctgtcacaccttg

SEQ ID NO: 140734 - DNA, 75 bp, synthetic construct
  source 1..75: mol_type = other DNA
gaatgggacggcggtttgccggatgaacctccggctattactggtgagcagcttgaaacgctgtggcagcgcctg

SEQ ID NO: 140735 - DNA, 75 bp, synthetic construct
  source 1..75: mol_type = other DNA
cgacgcctgatgaatggttccacttcgatctggtgctggggcgtactgaccagctgctgccggtcgtgtgcaacc

SEQ ID NO: 140736 - DNA, 75 bp, synthetic construct
  source 1..75: mol_type = other DNA
atgaatattcatcgcaaaggcgcaacaccggcacgagtgggcaatctggcgttaatccctggttcaatgggcgat

SEQ ID NO: 140737 - DNA, 75 bp, synthetic construct
  source 1..75: mol_type = other DNA
aagcgatgggaatggcggcgcgttacgcatggttaaatcgcgtgaccattgcggaaatggttcgcgtatgttttg

SEQ ID NO: 140738 - DNA, 75 bp, synthetic construct
  source 1..75: mol_type = other DNA
gaagcggcaacactggaagatgtaggtcgtgaaattggcctcacccgtgaacgtgttcgccagattcaggttgaa

SEQ ID NO: 140739 - DNA, 75 bp, synthetic construct
  source 1..75: mol_type = other DNA
aaaacggctggataaatgtgtgttcggcgaagacaaacccgcctgtaagcagtgtccggtgcactgttaccagtc

SEQ ID NO: 140740 - DNA, 75 bp, synthetic construct
  source 1..75: mol_type = other DNA
acacaacttcttgattttgcagaagtgaagctaccagatcatccaggttatgtacgccagacctgtgcgacgcca

SEQ ID NO: 140741 - DNA, 75 bp, synthetic construct
  source 1..75: mol_type = other DNA
cagtcacggagcaggacgcagccagcgtcggcaggccatgcgctcacgcgcgactgaagagtcaacgctgccgtg

SEQ ID NO: 140742 - DNA, 75 bp, synthetic construct
  source 1..75: mol_type = other DNA
ttcgcagcggtaacccgctcgacagcgtgacgcaaatgggggcgcaggtttctcacgggcaactggaaaccatcc

SEQ ID NO: 140743 - DNA, 75 bp, synthetic construct
  source 1..75: mol_type = other DNA
ggtggcaaaccgttcaggatccctgtttctgatacccagtcttatcgtcagtttgggaactctgtcgttgttcct

SEQ ID NO: 140744 - DNA, 75 bp, synthetic construct
  source 1..75: mol_type = other DNA
gatggatttacccttcgcaacattcataaattctacccacaaaatcgtccaacatttggagagttactggatcct

SEQ ID NO: 140745 - DNA, 75 bp, synthetic construct
  source 1..75: mol_type = other DNA
cctgggataacggcaaacccatccgcgaaaccagcgccgccgacgtgccattggcgattgaccatttccgctatt

SEQ ID NO: 140746 - DNA, 75 bp, synthetic construct
  source 1..75: mol_type = other DNA
gcgtgtggaccaactgttatcacgcttacccggcacatgcggcgtttggtggctacaaacaatcaggtatcggtc

SEQ ID NO: 140747 - DNA, 75 bp, synthetic construct
  source 1..75: mol_type = other DNA
accgacgattctgtttggtcagaacaatatgcgggtgttccaggaggagatttttggcccggtgctggcggtgac

SEQ ID NO: 140748 - DNA, 75 bp, synthetic construct
  source 1..75: mol_type = other DNA
gcgcttaatggggtttgaaaaaacggatggcagaccttttcgtattcctgtatcagacactcagtcatacagaca

SEQ ID NO: 140749 - DNA, 75 bp, synthetic construct
  source 1..75: mol_type = other DNA
ttattgatcgtggttgggatatggcaacgggagaggctgactttatgaatgagagtaatcaggctcgtcgaccac

SEQ ID NO: 140750 - DNA, 75 bp, synthetic construct
  source 1..75: mol_type = other DNA
gtggaccctgtaatcgctgaaatgaatgctcgcctggaggctgaatttgcagctgagaatgaacataccacccag

SEQ ID NO: 140751 - DNA, 75 bp, synthetic construct
  source 1..75: mol_type = other DNA
aggagctgctcgaaaaagcagaagctgaagaaaaacaacaacaagagcgcgacaggaagctgattgatcgggtac

SEQ ID NO: 140752 - DNA, 75 bp, synthetic construct
  source 1..75: mol_type = other DNA
ttccagaacctcccgaacatcatcctaactatacatttcgttttattgatttattcgcagggattggtggtattc

SEQ ID NO: 140753 - DNA, 75 bp, synthetic construct
  source 1..75: mol_type = other DNA
attcggtaactccgtcgtagtgcctgtttttgaagctgtagccagactgcttgagccttatatcctgaaagcagt

SEQ ID NO: 140754 - DNA, 75 bp, synthetic construct
  source 1..75: mol_type = other DNA
tggcgacatgcggaaaacagccgggtaaaccgtcgtccgtccacgcaatttctgggaccggacaacgacatgctg

SEQ ID NO: 140755 - DNA, 75 bp, synthetic construct
  source 1..75: mol_type = other DNA
acactgtccggggttctgctgccggaagtgaccggaggcaggctgtcattgctggcgctggagttgatggcagag

SEQ ID NO: 140756 - DNA, 75 bp, synthetic construct
  source 1..75: mol_type = other DNA
ctggaagcggggcttgccagcacttaccagtggttccttgagaatcaagaccgctttcggggtaatgatgttttt

SEQ ID NO: 140757 - DNA, 75 bp, synthetic construct
  source 1..75: mol_type = other DNA
gtatgccgcgccggattgagttcactctgtcgctcaaacgggtggatgaatccctgtccgagatgttcggtgatc

SEQ ID NO: 140758 - DNA, 75 bp, synthetic construct
  source 1..75: mol_type = other DNA
actaaaacggagtttttccgcgacggtatgccgcgccggattgagttcactctgtcgctcaaacgggtggatgaa

SEQ ID NO: 140759 - DNA, 75 bp, synthetic construct
  source 1..75: mol_type = other DNA
actaaaacggagtttttccgcgatggtatgccgcgccggattgagttcaccctgtcgctaaaacgggtggatgaa

SEQ ID NO: 140760 - DNA, 75 bp, synthetic construct
  source 1..75: mol_type = other DNA
cgatctgaaagctgacaatgcagctcagttagtcaagttaacggcatcggatgtattgggtataaatgacaattc

SEQ ID NO: 140761 - DNA, 75 bp, synthetic construct
  source 1..75: mol_type = other DNA
agattaagcccggcgagtatggtttccccctcaagttaaaaacccgctatgacaactttattggcggcgaatggg

SEQ ID NO: 140762 - DNA, 75 bp, synthetic construct
  source 1..75: mol_type = other DNA
gctggatgctgcgcacaaagtgaaagataaatgggcgcatacctcggtgcaggatcgcgcggcgattctgtttaa

SEQ ID NO: 140763 - DNA, 75 bp, synthetic construct
  source 1..75: mol_type = other DNA
tcagtgcgcaactgaataatctgcaggaaacggcaacgtctgccttaagcgatatcagtaaaacggtgggagggc

SEQ ID NO: 140764 - DNA, 75 bp, synthetic construct
  source 1..75: mol_type = other DNA
attggccttcatggtgatactggaaaagtaacctatgatggtgcaacaaccgtaacaattgttattcctgccggt

SEQ ID NO: 140765 - DNA, 75 bp, synthetic construct
  source 1..75: mol_type = other DNA
acggagcgggaagtctgggtacatttacggcaacggcaacaactgttaaagcaactgcgttagatggtattgagc

SEQ ID NO: 140766 - DNA, 75 bp, synthetic construct
  source 1..75: mol_type = other DNA
cctgatgaacttattgatttcacgtttgaatggaaagggctgaagaaattatgcgtggcagtctcctttcggtca

SEQ ID NO: 140767 - DNA, 75 bp, synthetic construct
  source 1..75: mol_type = other DNA
atggtattcctgttcacgataccattaccagagttgtatcctgtatcagtcctgcgaaatttcacgagtgcttta

SEQ ID NO: 140768 - DNA, 75 bp, synthetic construct
  source 1..75: mol_type = other DNA
taaggtattcaaggcagggttaagacgtaagatgcgaaaagcagccatggacagaaactacctggcgtcagtcct

SEQ ID NO: 140769 - DNA, 75 bp, synthetic construct
  source 1..75: mol_type = other DNA
atgaacaggcttttttcaggtcgttccgatatgccctttgcgctgctgcttctcgcgcccagcttattactgctg

SEQ ID NO: 140770 - DNA, 75 bp, synthetic construct
  source 1..75: mol_type = other DNA
aaccgatgctggtggtgatcccggataccgaaaccgatgcgaagggcattattcccgaagatttcgtgcctcagg

SEQ ID NO: 140771 - DNA, 75 bp, synthetic construct
  source 1..75: mol_type = other DNA
tctggaaagctttggctggccacattcagtggtgttaccacgacaaccgtaccggatgaaggtgtcgcggcccgg

SEQ ID NO: 140772 - DNA, 75 bp, synthetic construct
  source 1..75: mol_type = other DNA
tggttcaatcatgaaagtcaccgcagccataggcgcgttgctggttgtcgtgggtggcctgatgctgtccatcgg

SEQ ID NO: 140773 - DNA, 75 bp, synthetic construct
  source 1..75: mol_type = other DNA
aaccgatccagttttccagcgaagcgctggcatcctgtaccagtgcaggggaaacattcggcaaggtggtagggg

SEQ ID NO: 140774 - DNA, 75 bp, synthetic construct
  source 1..75: mol_type = other DNA
ataaactacctggacgataacgcgaagtcgaaaggctccgatattatcgacgtgctccagcgcgttggcgggctt

SEQ ID NO: 140775 - DNA, 75 bp, synthetic construct
  source 1..75: mol_type = other DNA
cgatgtccctgatgaacttattgatttcacgtttgaatggaaaggactgaagaaattatgcgtggcagtctcctt

SEQ ID NO: 140776 - DNA, 75 bp, synthetic construct
  source 1..75: mol_type = other DNA
caccactggccccgatttttgacagtatcggcaacgcgatcagtggggtctgggaatggtttaccaaactgctgg

SEQ ID NO: 140777 - DNA, 75 bp, synthetic construct
  source 1..75: mol_type = other DNA
ctttgctgcggcagcagtggccgtcattaaattctggcaacccatacaggcgtttttcagcggcttctttaccgg

SEQ ID NO: 140778 - DNA, 75 bp, synthetic construct
  source 1..75: mol_type = other DNA
tcagtttctgttgaactgccgggtgatgcaaataaaggcgatactgttgaaatcacctttgaagatgaaaatggt

SEQ ID NO: 140779 - DNA, 75 bp, synthetic construct
  source 1..75: mol_type = other DNA
ttatgccactgtcgttaatggtgaagacggcaatgatacctttaaattaggcacaattgccaaaaacctgaccat

SEQ ID NO: 140780 - DNA, 75 bp, synthetic construct
  source 1..75: mol_type = other DNA
gacagcactggcgataaagcgaccattccggcagataacgtgaaggataacagtgaagttaccggggttgccaaa

SEQ ID NO: 140781 - DNA, 75 bp, synthetic construct
  source 1..75: mol_type = other DNA
ggcaccggtattaaaagcagaggatgatggttctgtttctgttgatctgccgggtgatgccaataaaggcgatac

SEQ ID NO: 140782 - DNA, 75 bp, synthetic construct
  source 1..75: mol_type = other DNA
ccggacggcacgacggacgcagtggagcacacgctgaccgcagatgaagtgactgcaggtaaagcggctgtgacc

SEQ ID NO: 140783 - DNA, 75 bp, synthetic construct
  source 1..75: mol_type = other DNA
agtcacagcagttgctaaagatccgagtggtaatgaaagtgctccggtcagtgtgacgtcaaaaactgatgatgt

SEQ ID NO: 140784 - DNA, 75 bp, synthetic construct
  source 1..75: mol_type = other DNA
tggtcaggttactgaagctgtcctgacccaggatggtcctgtactggagaatttcactgcaggacaatccgggac

SEQ ID NO: 140785 - DNA, 75 bp, synthetic construct
  source 1..75: mol_type = other DNA
aaggtattcaaggcagggttaagacgtaagatgcgaaaagcagccatggacagaaactacctggcgtcagtcctt

SEQ ID NO: 140786 - DNA, 75 bp, synthetic construct
  source 1..75: mol_type = other DNA
atgaacaggcttttttcaggtcgttccgatatgccctttgcgctgttgcttctcccgccccccctttttcttctt

SEQ ID NO: 140787 - DNA, 75 bp, synthetic construct
  source 1..75: mol_type = other DNA
aaggatggtatgggatatgctgatgtatccgattactccgttgtggatggtgctcagtatagcggaaaaatttct

SEQ ID NO: 140788 - DNA, 75 bp, synthetic construct
  source 1..75: mol_type = other DNA
taccgtggagattgtggtcgacggtcaggttccgggtgacaccaacggtgacggagtggcggatacgacaccggt

SEQ ID NO: 140789 - DNA, 75 bp, synthetic construct
  source 1..75: mol_type = other DNA
gatacggtcgtgattgagagaactggtaatcagaattcaggccaaatatatcttgggtcaggaagtgataaatat

SEQ ID NO: 140790 - DNA, 75 bp, synthetic construct
  source 1..75: mol_type = other DNA
ggcagaattatccaaaaacacccccagtgcagccaacatcgtccgctatgcagaaattgtggtggagcgcagccg

SEQ ID NO: 140791 - DNA, 75 bp, synthetic construct
  source 1..75: mol_type = other DNA
agagttaagtctgggtcaatggaccatcaaacggacggattccttttatctcaaagatgatccaacgttgcctcg

SEQ ID NO: 140792 - DNA, 75 bp, synthetic construct
  source 1..75: mol_type = other DNA
tcaacgctcaggggattaacgacaaagagataaacctcggtcagtggaccagtaaacgaacggattccttttatc

SEQ ID NO: 140793 - DNA, 75 bp, synthetic construct
  source 1..75: mol_type = other DNA
atgaatttgttggctagtgcaggcaaggttagtattgtaacttcagcttcagtaaccacaatgtcaggtcaacca

SEQ ID NO: 140794 - DNA, 75 bp, synthetic construct
  source 1..75: mol_type = other DNA
cagcgcattggcgcgcctggtcgctgccgcctgctgctgagttccatcactccgatagcaaagaaaggggcgtga

SEQ ID NO: 140795 - DNA, 75 bp, synthetic construct
  source 1..75: mol_type = other DNA
actcactctgtgtcttaatgccctgcgtgagcggaccgatgcaacggtatttttgttcagcatagaaatgtccag

SEQ ID NO: 140796 - DNA, 75 bp, synthetic construct
  source 1..75: mol_type = other DNA
ttcttcaaatattttggtgctgtaagtttcctgatcgtattgtcattatttggtatctttggcttaaaagttttt

SEQ ID NO: 140797 - DNA, 75 bp, synthetic construct
  source 1..75: mol_type = other DNA
actaaatcaaagtatttggaggaagatgatcttcttgatgttgaggacgtgggcccaaaacttttttatgctgaa

SEQ ID NO: 140798 - DNA, 75 bp, synthetic construct
  source 1..75: mol_type = other DNA
tgaatccgggattgatattgaagcggtgctgtcaatggcgctgctgccgtcagtgtcaccgcagaacgggagcgg

SEQ ID NO: 140799 - DNA, 75 bp, synthetic construct
  source 1..75: mol_type = other DNA
attgtgtaaaggtggctgcgaccatagctaagatcctcaaagacactgaaagtgaaagcaaaggtaaggagtcag

SEQ ID NO: 140800 - DNA, 75 bp, synthetic construct
  source 1..75: mol_type = other DNA
agacgctgaccagacggatgcctctggagaaaacaatgaagacaacgaagatcatgagacaccctcagcgttaga

SEQ ID NO: 140801 - DNA, 75 bp, synthetic construct
  source 1..75: mol_type = other DNA
tttagatatagagaataaaaataatgaatcaataagctatctctttacgtatattataccatttgtgtttcaaga

SEQ ID NO: 140802 - DNA, 75 bp, synthetic construct
  source 1..75: mol_type = other DNA
atttatcacccgtagtgttaagaatgggaaaaagggagaaggtcatcaacttatttttgatgataaaataaatga

SEQ ID NO: 140803 - DNA, 75 bp, synthetic construct
  source 1..75: mol_type = other DNA
tttagcaaaaatgacaataaatctctgactaagttacatgggactacactgagttgtgaaattggagaacaatac

SEQ ID NO: 140804 - DNA, 75 bp, synthetic construct
  source 1..75: mol_type = other DNA
aaaacgccccttgtgttggcgcttgtcccgtgggggcgctgacgatgggcgagcaggtggtgcaggccaattctg

SEQ ID NO: 140805 - DNA, 75 bp, synthetic construct
  source 1..75: mol_type = other DNA
cctcgcattggcagtgaggttctggttagttttatacagggtaatcctgactatccagttatcgttggtacagtg

SEQ ID NO: 140806 - DNA, 75 bp, synthetic construct
  source 1..75: mol_type = other DNA
tagggaaggtaacttacagaatgatgtaaatggtaatattgatataaatgtttcagatggaaattataatctcaa

SEQ ID NO: 140807 - DNA, 75 bp, synthetic construct
  source 1..75: mol_type = other DNA
cgtaaatgaaataactatatcaaaaacagggataagtataaaaggtactaaaattaatgtagaagggcaaggtgc

SEQ ID NO: 140808 - DNA, 75 bp, synthetic construct
  source 1..75: mol_type = other DNA
cacaaaacggtaataattaatcctgacgtgcagggaaccatcactgtacgcagctacgatatgctgaacgaggaa

SEQ ID NO: 140809 - DNA, 75 bp, synthetic construct
  source 1..75: mol_type = other DNA
atctgaatatggatttctggagtgacctccaaaagaacctgaagatcattattggcagtaatggggaatttaata

SEQ ID NO: 140810 - DNA, 75 bp, synthetic construct
  source 1..75: mol_type = other DNA
tcaaaacggctcgtctgataaggaccagaacacagcgataagtagtttcaatggtattgctgccggattttatca

SEQ ID NO: 140811 - DNA, 75 bp, synthetic construct
  source 1..75: mol_type = other DNA
aaactgactgcattggttgccgcacttgtgaagtcgcttgtgtggttgctcactcgtcagaacaagagttgaatg

SEQ ID NO: 140812 - DNA, 75 bp, synthetic construct
  source 1..75: mol_type = other DNA
tacgcagcctgaagcgctatatctcacacgaagtttatacattactgcgtaatcaaaacaggcagatcaacagca

SEQ ID NO: 140813 - DNA, 75 bp, synthetic construct
  source 1..75: mol_type = other DNA
acctcatttgaagatttctctcacatgatggtatcaatggcacaaaaagcaacggtgccggtaataactcattga

SEQ ID NO: 140814 - DNA, 75 bp, synthetic construct
  source 1..75: mol_type = other DNA
caatatggcccattgtccccaggactgctttttatgattggttatatttgagtgcgctcaatcaaaacaaaaatc

SEQ ID NO: 140815 - DNA, 75 bp, synthetic construct
  source 1..75: mol_type = other DNA
taggactggtcaaacaaaaccgtgagagtcggacgctgatgtgtgtttcgcaatacgcaatgctggaagcgataa

SEQ ID NO: 140816 - DNA, 75 bp, synthetic construct
  source 1..75: mol_type = other DNA
gataaaaacgttgcttgctaaaatagaatcaaccagacaagaactaagaaatattatggatagaatcttgaataa

SEQ ID NO: 140817 - DNA, 75 bp, synthetic construct
  source 1..75: mol_type = other DNA
ctgtttgatgacgtggttaagttgtttgagtttgatacaaccactcagaagttagaaggcccagcaaaggagaca

SEQ ID NO: 140818 - DNA, 75 bp, synthetic construct
  source 1..75: mol_type = other DNA
tttgatgacgtggttaagttgtttgagtttgatacattcgaaagcccagcaagggagacaaccagtgagcaagat

SEQ ID NO: 140819 - DNA, 75 bp, synthetic construct
  source 1..75: mol_type = other DNA
tggcgctgaatttatcaaatatcgcaaacctgaagcgatacgagcttgatatggatggttgtgactcgttcggtc

SEQ ID NO: 140820 - DNA, 75 bp, synthetic construct
  source 1..75: mol_type = other DNA
cgatatgaaaatcttgaggctctgattgccttcctgacagaagaatgctgctcaggaactgacgactgcctcacc

SEQ ID NO: 140821 - DNA, 75 bp, synthetic construct
  source 1..75: mol_type = other DNA
catcatctctcatcgctgatatcagtttctctggtacgccaggaacgtcagggcagaacgctcttttgccatgct

SEQ ID NO: 140822 - DNA, 75 bp, synthetic construct
  source 1..75: mol_type = other DNA
tcaaacacaaagtcggtctgctcaacctcgccgaagaactcggtaacgtatcaaaagcctgtaaaatcatggggg

SEQ ID NO: 140823 - DNA, 75 bp, synthetic construct
  source 1..75: mol_type = other DNA
tacggcaactggagggcaggacatgtaaagtgggcccaccgctacggtgttccaactttaccactccctattcgc

SEQ ID NO: 140824 - DNA, 75 bp, synthetic construct
  source 1..75: mol_type = other DNA
tcagttcgcagctgaataatctgcaggacacggcaacatctgcattaagcgatatcagtaaaactgtgggagggc

SEQ ID NO: 140825 - DNA, 75 bp, synthetic construct
  source 1..75: mol_type = other DNA
atgcagttggaagaagtcgctaaagcgctgaaagagctaggtcacccgacccgtttgttcatatttaaacatctt

SEQ ID NO: 140826 - DNA, 75 bp, synthetic construct
  source 1..75: mol_type = other DNA
aaaaagaagagattcgacaccctgattcacctgaaggattagtgaatacagctgccaataaccgggcgttcgcag

SEQ ID NO: 140827 - DNA, 75 bp, synthetic construct
  source 1..75: mol_type = other DNA
gcttcattgtctctgctatgggacgagaagggcttgaacttcttctggatgaaatgattcacgatctgaatactc

SEQ ID NO: 140828 - DNA, 75 bp, synthetic construct
  source 1..75: mol_type = other DNA
cctgaatgaacacggaacaattgaacacgccgtggtatataacgggatgtatgggtttatgacgatatatcccgg

SEQ ID NO: 140829 - DNA, 75 bp, synthetic construct
  source 1..75: mol_type = other DNA
agcatttacgaaccgtcaccaaagaaattgagaccttgagcgacatcgaactgatggctatcggcattctgaccg

SEQ ID NO: 140830 - DNA, 75 bp, synthetic construct
  source 1..75: mol_type = other DNA
acagtgagtctggctttgttcctgcgccggatgaaatgactctggaggaggcgctaaaggcgctcgacgagatgg

SEQ ID NO: 140831 - DNA, 75 bp, synthetic construct
  source 1..75: mol_type = other DNA
aacagggcgttcgcagagcgccttgttggtgtttacagactagccaaagcaggagtgaaacatgggcgtcgttaa

SEQ ID NO: 140832 - DNA, 75 bp, synthetic construct
  source 1..75: mol_type = other DNA
aagaacagcaatgctggattattataaccaggacactacgggaacctcggggatagtcggcatgggattcaacaa

SEQ ID NO: 140833 - DNA, 75 bp, synthetic construct
  source 1..75: mol_type = other DNA
gattaccttggtttgggggaaggctctgcgctgcctgttggtgtggccgttccatggccctcagccacgctgcca

SEQ ID NO: 140834 - DNA, 75 bp, synthetic construct
  source 1..75: mol_type = other DNA
ccaccacaatcatacgcccgacagccagcaggatggttaaaattacaggatattcaccgtcacaacctgaaggga

SEQ ID NO: 140835 - DNA, 75 bp, synthetic construct
  source 1..75: mol_type = other DNA
ccttttcgttggtactaaacgtgctgcaagcgaagcggtgaaagacgctgctctgagctgcgaccagttcttcgt

SEQ ID NO: 140836 - DNA, 75 bp, synthetic construct
  source 1..75: mol_type = other DNA
gaacgggaaaaactttaacagcatcagcattagctggtgaacttggtattcctttgtttcaggttcgttttgatg

SEQ ID NO: 140837 - DNA, 75 bp, synthetic construct
  source 1..75: mol_type = other DNA
cggcggtcatgacgataacgattctgcgcttgatatctcgtacatgagtaacggaaataatattgactatggcgg

SEQ ID NO: 140838 - DNA, 75 bp, synthetic construct
  source 1..75: mol_type = other DNA
tatcacccgtcgctgccagaaaatcaggggcatgaaattgccgcgcgccagcaaaaaggctttggcgcaatgttg

SEQ ID NO: 140839 - DNA, 75 bp, synthetic construct
  source 1..75: mol_type = other DNA
cgtctctggcaggagagacaagatgaagcagaagagagcgaaacccgtcagcgcgaacaggatgccattcggaag

SEQ ID NO: 140840 - DNA, 75 bp, synthetic construct
  source 1..75: mol_type = other DNA
tatatgcctgactgaagacgtaccagatgcgagacaggaactgcttaaccgtctgttgtccgggaaaaaactgac

SEQ ID NO: 140841 - DNA, 75 bp, synthetic construct
  source 1..75: mol_type = other DNA
tgcaggagtctgccacccgtcagcgtgaacaggataccatccggatggatttgcccctatatttccagacatctg

SEQ ID NO: 140842 - DNA, 75 bp, synthetic construct
  source 1..75: mol_type = other DNA
gggcgtgggcgaaaacgggcagcgggaccatgaataccgcgcgctgtaccggcgcatgctacctgaactggacct

SEQ ID NO: 140843 - DNA, 75 bp, synthetic construct
  source 1..75: mol_type = other DNA
gctatatgaccatcgtggacctgcccggtgtgggcgaaagcggcgcacgtgataccgaatatgctgcactttacc

SEQ ID NO: 140844 - DNA, 75 bp, synthetic construct
  source 1..75: mol_type = other DNA
gtgaacaacttccccggctcgacctggtgctgtggttgatcaaggccgatgatcgagcgctggcggtggatgaac

SEQ ID NO: 140845 - DNA, 75 bp, synthetic construct
  source 1..75: mol_type = other DNA
aagcggtaaactggagcttttgagtagtgaaattgagcaacaacgaattatgttgagccatggaaaaaacctgat

SEQ ID NO: 140846 - DNA, 75 bp, synthetic construct
  source 1..75: mol_type = other DNA
ctctttacacgatcttgatatcactattcctctgattgagctcggtgtacctcctgtcgccagccacgggcgaac

SEQ ID NO: 140847 - DNA, 75 bp, synthetic construct
  source 1..75: mol_type = other DNA
ttagtcttatgtagctccagacagccttatgaagcacgagtcttcaaaagcatagatggtgcggcggcagaacta

SEQ ID NO: 140848 - DNA, 75 bp, synthetic construct
  source 1..75: mol_type = other DNA
tgcactctcaaccttgggctttcctaaaggtgttctgaatacactgatcaacctcgggtgtgcaggacagggact

SEQ ID NO: 140849 - DNA, 75 bp, synthetic construct
  source 1..75: mol_type = other DNA
tgcgtttagtgacttttccaaattggttcgcggctatccaaacagtcagtacaccaccgatgccaccaaacgtct

SEQ ID NO: 140850 - DNA, 75 bp, synthetic construct
  source 1..75: mol_type = other DNA
acaccaccgatgccaccaaacgtctggtattcctgaaagatcgtctggcgaaatatgaatactctgttgccgagt

SEQ ID NO: 140851 - DNA, 75 bp, synthetic construct
  source 1..75: mol_type = other DNA
ggtaatgacggagatcagacttacgctcgtctcggctttaaaggcgaaacgcagattaatgatcaactgaccgga

SEQ ID NO: 140852 - DNA, 75 bp, synthetic construct
  source 1..75: mol_type = other DNA
tgccaaattcccttagtgcagaacaagctgtacttggtggcttaatgcttgataactgccgctgggatgaagttg

SEQ ID NO: 140853 - DNA, 75 bp, synthetic construct
  source 1..75: mol_type = other DNA
aatttggtggcgatggctggacgcagactgataacttcatgactgctcgtacttccggagtgctgacttaccgca

SEQ ID NO: 140854 - DNA, 75 bp, synthetic construct
  source 1..75: mol_type = other DNA
acattttgattgttcaggcaatggttcgatgattttcttaatttgctattttaccactttcagtatgctaatact

SEQ ID NO: 140855 - DNA, 75 bp, synthetic construct
  source 1..75: mol_type = other DNA
ttactccattatctcgtcatcaacatgagttgccaacgactccgtgatagtgggttcacgtatataaaaacttat

SEQ ID NO: 140856 - DNA, 75 bp, synthetic construct
  source 1..75: mol_type = other DNA
tggtttcatatatataaaaacttatgtttttggtacattagcagtatatatcatctctatcatcacaatgatagc

SEQ ID NO: 140857 - DNA, 75 bp, synthetic construct
  source 1..75: mol_type = other DNA
gggtaaaaccggtgttgggaagagcagtctgtgcaatgccctgtttgccggagatatatcaccggtcagcgatgt

SEQ ID NO: 140858 - DNA, 75 bp, synthetic construct
  source 1..75: mol_type = other DNA
gtgtgccgtgtcggtccgtcttcagtggggactgcgggtgatggccgagcgaatgattaagtgcctgccacgtga

SEQ ID NO: 140859 - DNA, 75 bp, synthetic construct
  source 1..75: mol_type = other DNA
catttcagcaatcgctttctggtctgccacaatgggcatcagagcggattctacagcaaataaaccagttaacag

SEQ ID NO: 140860 - DNA, 75 bp, synthetic construct
  source 1..75: mol_type = other DNA
atgatcgatctggaaaaccaggagcgggagattatcaatataatgttaagccagcgtatttcctggctagccgcc

SEQ ID NO: 140861 - DNA, 75 bp, synthetic construct
  source 1..75: mol_type = other DNA
atgaataactttaaaaatttcgcaccatatacgcctggtgaagataaaagagagcttgttgatgcaggagtttta

SEQ ID NO: 140862 - DNA, 75 bp, synthetic construct
  source 1..75: mol_type = other DNA
cggtgtgggcgaaagtggcgctcgcgataacgaatatgctgcgctgtatcgcgaacagcttccccggcttgacct

SEQ ID NO: 140863 - DNA, 75 bp, synthetic construct
  source 1..75: mol_type = other DNA
cgcctgtaactgatgacatcagcagagcgctggcctttgctattaagtgggtggctgttggcatcgctgtgtctc

SEQ ID NO: 140864 - DNA, 75 bp, synthetic construct
  source 1..75: mol_type = other DNA
agcgctggcttttgctattaagtgggtggcggttggtatcgctgtgtctccgatgctgtatgggctggcaaaact

SEQ ID NO: 140865 - DNA, 75 bp, synthetic construct
  source 1..75: mol_type = other DNA
gtccggtcagtggcgtgatatcgccaataccggattacgtccggtcagtggcgtgatatcgccaataccggatta

SEQ ID NO: 140866 - DNA, 75 bp, synthetic construct
  source 1..75: mol_type = other DNA
aatcgcgccagtagcgatcttcagcaagctccgggagatgcgcaaaaattacaagcctggcaacaagcccaggcg

SEQ ID NO: 140867 - DNA, 75 bp, synthetic construct
  source 1..75: mol_type = other DNA
gggggttctggatgttgacggtaatgtcgatatgccacgaatggaaaaaataatggcggctgccggttcgctggc

SEQ ID NO: 140868 - DNA, 75 bp, synthetic construct
  source 1..75: mol_type = other DNA
actatccctgtgcatccgattatccgtcctcgcggtggcgatttttgctacagcgacggcgagtttgccgccatt

SEQ ID NO: 140869 - DNA, 75 bp, synthetic construct
  source 1..75: mol_type = other DNA
atggcagcgcttgtggtaacctggtttaatccggtgataaaggcattttacatgcatctgtcagcagccggaaaa

SEQ ID NO: 140870 - DNA, 75 bp, synthetic construct
  source 1..75: mol_type = other DNA
caatatagatatgaataaattacgtgacagggttcataatactattgtgcaggaggttcagagaaatttaaaata

SEQ ID NO: 140871 - DNA, 75 bp, synthetic construct
  source 1..75: mol_type = other DNA
gttatagatggtttcttttttggctcgaggagaatctcattctcttatcctcgactggaaagtgagttaatacag

SEQ ID NO: 140872 - DNA, 75 bp, synthetic construct
  source 1..75: mol_type = other DNA
caccttgcccgcaggcggggattggtacgccggtcgaactgtggggcaaagagattaaaatcgatgatgtttccg

SEQ ID NO: 140873 - DNA, 75 bp, synthetic construct
  source 1..75: mol_type = other DNA
tttccgaaacactgaaactgttgaatgacgtcagacggcgagcctatgacacaggagtttttactgcgcttaact

SEQ ID NO: 140874 - DNA, 75 bp, synthetic construct
  source 1..75: mol_type = other DNA
gcaggacgttatcaggacctccaggactatggctctgcattgatgatcaaccaagccattcagcaacggaacacg

SEQ ID NO: 140875 - DNA, 75 bp, synthetic construct
  source 1..75: mol_type = other DNA
gtgaaaaatattcccggtattaccataaaaagtgatattgaggatttttcaataattccttttgagcagaatgtg

SEQ ID NO: 140876 - DNA, 75 bp, synthetic construct
  source 1..75: mol_type = other DNA
acaagcctggcaacaagctcaggcgcaggtgactcgcactctcggacagttaacgattattagtgaacgttatcc

SEQ ID NO: 140877 - DNA, 75 bp, synthetic construct
  source 1..75: mol_type = other DNA
aattatttaccggatgatgtcgccgctgttagcaaagcgccgacaattgattttagccagagtgctaatgctcat

SEQ ID NO: 140878 - DNA, 75 bp, synthetic construct
  source 1..75: mol_type = other DNA
cgtataccgcgacgttcctgatgtttgttgaatacgcccgtaacgccgcgcggatggcggcactgatgaaagcgc

SEQ ID NO: 140879 - DNA, 75 bp, synthetic construct
  source 1..75: mol_type = other DNA
aaactcttggagcacatttgtctcactgaaaatgtagatattaaagatgcggtatatgttggtgactctattact

SEQ ID NO: 140880 - DNA, 75 bp, synthetic construct
  source 1..75: mol_type = other DNA
tgacacatggcgaagctggaaatgctctattatccagtagtgagatgattgttggtaaaacaccaaattctacgg

SEQ ID NO: 140881 - DNA, 75 bp, synthetic construct
  source 1..75: mol_type = other DNA
aacgtatcaagtccgcagcggcactctgggtaccggggacacgcgaagaggtcattgagggaatcagactgctcg

SEQ ID NO: 140882 - DNA, 75 bp, synthetic construct
  source 1..75: mol_type = other DNA
aatattcccggtattaccataaaaagtgatattgaggatttttcaataattccttttgagcagaatgtgcagtaa

SEQ ID NO: 140883 - DNA, 75 bp, synthetic construct
  source 1..75: mol_type = other DNA
catgaccgaagcagttaatacagactctatagccgttgcggaaattatacggggatcaggcgtctgtatgcccgt

SEQ ID NO: 140884 - DNA, 75 bp, synthetic construct
  source 1..75: mol_type = other DNA
gaagtgaaaatcgaatagctgtcgcacgaggaagatatattaaagccattgagcaatataatgtcacgatccgca

SEQ ID NO: 140885 - DNA, 75 bp, synthetic construct
  source 1..75: mol_type = other DNA
aagccagtgcggctgtgtggacggcacagacaaaagatgaagtcatcgccgcaatcaaacaacttggtgatttac

SEQ ID NO: 140886 - DNA, 75 bp, synthetic construct
  source 1..75: mol_type = other DNA
gtgtaaaggaggaaataaataaagacgccatcctgaatgaaaaggacgccgtgaaaaatattcccggtattacca

SEQ ID NO: 140887 - DNA, 75 bp, synthetic construct
  source 1..75: mol_type = other DNA
atgcgcccgacgctgaccatgcctgcgctaactaaatttgtcgatggcactggcccggtatggaccggtaacctg

SEQ ID NO: 140888 - DNA, 75 bp, synthetic construct
  source 1..75: mol_type = other DNA
caagcagaactttttggacaaccagatgacaaatctctttatgatagaattgatcgttatggtgagtatcggatt

SEQ ID NO: 140889 - DNA, 75 bp, synthetic construct
  source 1..75: mol_type = other DNA
acgtattcaaccgctgactgagcaacttaatctcgggctgacggcaggtaaagtttggtataaaacaccgaacca

SEQ ID NO: 140890 - DNA, 75 bp, synthetic construct
  source 1..75: mol_type = other DNA
ttgataaagaagggcttgtaaaaatatatgattttggcttgtcaagaaaaatagataatgcaaaaacaattgggt

SEQ ID NO: 140891 - DNA, 75 bp, synthetic construct
  source 1..75: mol_type = other DNA
ggttgaacagcatcagtcctaacaaagtccgccctgaaatccgcgacaaggtaatccagtatcaggaagagtgtg

SEQ ID NO: 140892 - DNA, 75 bp, synthetic construct
  source 1..75: mol_type = other DNA
cgctaactaaatttgtcgatggcactggcccggtatggaccggtaacctgttcccgttcctgtttatcaccatcg

SEQ ID NO: 140893 - DNA, 75 bp, synthetic construct
  source 1..75: mol_type = other DNA
aaggtagcagcttcaccttatctgtggttcatctgcatgaggcagaacctaaggttattcatcaggcgctggaag

SEQ ID NO: 140894 - DNA, 75 bp, synthetic construct
  source 1..75: mol_type = other DNA
tttgtgccgttatttctggtgcagaaagttgggaagatatagaggattttcgggggaaacacatctcgatttctt

SEQ ID NO: 140895 - DNA, 75 bp, synthetic construct
  source 1..75: mol_type = other DNA
cacgataccattgccagagttgtatcctgtatcagtcctgcaaaatttcacgagtgctttattaactggatgcgt

SEQ ID NO: 140896 - DNA, 75 bp, synthetic construct
  source 1..75: mol_type = other DNA
ttcgtcaggatattaacctggccctgttgccaaaaacgcttttcacgaccggttatcgctacactaaatattacg

SEQ ID NO: 140897 - DNA, 75 bp, synthetic construct
  source 1..75: mol_type = other DNA
atgatgtcgaagtcaatgcctggcaaggcggcgtatcactctatactggcccggtgatcaccagttaccgctata

SEQ ID NO: 140898 - DNA, 75 bp, synthetic construct
  source 1..75: mol_type = other DNA
cgtttttttttagtgcattgcccgcttatgccgggttaacttccattaccacgggctacgattttaccgattatt

SEQ ID NO: 140899 - DNA, 75 bp, synthetic construct
  source 1..75: mol_type = other DNA
tgcgaacggttccacaggacgatattgcaggaattttatcaggtcgcgttccgcaaaaagctgtatggcgaactc

SEQ ID NO: 140900 - DNA, 75 bp, synthetic construct
  source 1..75: mol_type = other DNA
aataaaaaaataataagtaaactaaaaaggccttgtatcaaatttaatagagaggggaagatgaatgttttcaat

SEQ ID NO: 140901 - DNA, 75 bp, synthetic construct
  source 1..75: mol_type = other DNA
tttatctcgataatcagcatcgtttactggagagtgaaacgctatttgccggttcgattaaccatgtgcaggtcc

SEQ ID NO: 140902 - DNA, 75 bp, synthetic construct
  source 1..75: mol_type = other DNA
caggcgttaatctcaatgcttgagccagaggttaagaaaaagactatctggaataattactctatttatccatct

SEQ ID NO: 140903 - DNA, 75 bp, synthetic construct
  source 1..75: mol_type = other DNA
tttacgtcaccaaaacaccgattaccgcggctgacttactgaatgatcgtgtactgccgttttatgcgtctcaga

SEQ ID NO: 140904 - DNA, 75 bp, synthetic construct
  source 1..75: mol_type = other DNA
tgagaatactgaccgacagaggcacggagtactgtggcaaagtagagcagcatgattatcagctttatctggcaa

SEQ ID NO: 140905 - DNA, 75 bp, synthetic construct
  source 1..75: mol_type = other DNA
actggagagtgaaacgctatttgccggttcgattaaccatgtccaggtccatcctcgagaggtagtgaagtcagc

SEQ ID NO: 140906 - DNA, 75 bp, synthetic construct
  source 1..75: mol_type = other DNA
atgagccggctccattcacaaccggtctgaagcgtgtgccatatcaggagttgtcgacggtcaacaaaacgtctc

SEQ ID NO: 140907 - DNA, 75 bp, synthetic construct
  source 1..75: mol_type = other DNA
agcattcaactggccgtggccggatcacttccgcattgtcacgctaccacgtgttgatgatatcgagctgtcttt

SEQ ID NO: 140908 - DNA, 75 bp, synthetic construct
  source 1..75: mol_type = other DNA
aggcggcgtatcactctatactggcccggtgatcaccagttaccgctatacccactatgactccagcgatgcagg

SEQ ID NO: 140909 - DNA, 75 bp, synthetic construct
  source 1..75: mol_type = other DNA
aggcggcttatcactctatactggcccggtgatcaccaggtaccgctatacccactatgactccagcgatgcagg

SEQ ID NO: 140910 - DNA, 75 bp, synthetic construct
  source 1..75: mol_type = other DNA
atccccgcgaagtagtgaagtcagcgcttcgcttaaatgctgcagctgccgtgctggcgcataaccatccatccg

SEQ ID NO: 140911 - DNA, 75 bp, synthetic construct
  source 1..75: mol_type = other DNA
cagcgaacgcccatcgtttatcgaactggaagaacatgtccgggcggtgaagaatccgcaacagccgacggcgac

SEQ ID NO: 140912 - DNA, 75 bp, synthetic construct
  source 1..75: mol_type = other DNA
gttttacgtcagaaaagcgccgaaaccagcaaaatgatgcagtgcgtcaaagtcactctgctttctaatctgaac

SEQ ID NO: 140913 - DNA, 75 bp, synthetic construct
  source 1..75: mol_type = other DNA
ggaaaagcgatcaagggcacgctgaaggcgttgccgttgctgtttcgtcgctccaaatacaccaaagcgatgtat

SEQ ID NO: 140914 - DNA, 75 bp, synthetic construct
  source 1..75: mol_type = other DNA
tattactggggattgtatttggctttttactttcgtggatgatgaatgaagtcaatttatccgggctacatgatg

SEQ ID NO: 140915 - DNA, 75 bp, synthetic construct
  source 1..75: mol_type = other DNA
aatttgtgctgggcggcgcggggctggtgatgttcggcatggtgctggcgacagggattcgaattctgtcgcgct

SEQ ID NO: 140916 - DNA, 75 bp, synthetic construct
  source 1..75: mol_type = other DNA
actggagcacctcaaaaacaccatcatacactaaatcagtaagttggcagcatcaccgtattgactgggccgccg

SEQ ID NO: 140917 - DNA, 75 bp, synthetic construct
  source 1..75: mol_type = other DNA
atattctgacagcctctttgattataaaaaatgaggggggctacgctatcaattggcaagattttgatcttaaga

SEQ ID NO: 140918 - DNA, 75 bp, synthetic construct
  source 1..75: mol_type = other DNA
gctaaagcaatagagttattgacatcgcatggtgataatattctcgtttttacacctgtctataatgcatttttt

SEQ ID NO: 140919 - DNA, 75 bp, synthetic construct
  source 1..75: mol_type = other DNA
ctatagcatcacgattgatagatcttgaacatgatgttgagaagttgaaatgcatgtatagcaacaataaagacg

SEQ ID NO: 140920 - DNA, 75 bp, synthetic construct
  source 1..75: mol_type = other DNA
aaaaaacgtctggaacacccgattttagggtacagccgttggcagcatgatgactatctgaatgcgatagtcaat

SEQ ID NO: 140921 - DNA, 75 bp, synthetic construct
  source 1..75: mol_type = other DNA
attgttgcttataacgaatgtgaagaatggttaaagtcgttaaaggatcatattgcctctaacattcaatttacc

SEQ ID NO: 140922 - DNA, 75 bp, synthetic construct
  source 1..75: mol_type = other DNA
ttcgtctgaacctggcctgcggtcgagaaaaattatatatggggcttacgcgtcttgcgagtgtaattaaaaata

SEQ ID NO: 140923 - DNA, 75 bp, synthetic construct
  source 1..75: mol_type = other DNA
caggggcgtagggcagtgatgcaggtgcctaatacgaatggtcgttgtgttcatgattatgttcctttttatttt

SEQ ID NO: 140924 - DNA, 75 bp, synthetic construct
  source 1..75: mol_type = other DNA
atattgcagattctaaaggaacagctattcaaatcggcgatacagtagaaattaatgcaacgacagacggtgaaa

SEQ ID NO: 140925 - DNA, 75 bp, synthetic construct
  source 1..75: mol_type = other DNA
aacacctccgatctgacaaaaacaatatctttgggtgaggcatctgcagcagctttagctgctggaggacagtct

SEQ ID NO: 140926 - DNA, 75 bp, synthetic construct
  source 1..75: mol_type = other DNA
ttatcggatattctactgttgactatttgcgccgttatttctggtgcagaaagttgggaagatatagaggatttc

SEQ ID NO: 140927 - DNA, 75 bp, synthetic construct
  source 1..75: mol_type = other DNA
atgtaatcctcataacccgacaggaacagtctggtcggaagaagaactgcataaaatcgctgcaagctgtacaag

SEQ ID NO: 140928 - DNA, 75 bp, synthetic construct
  source 1..75: mol_type = other DNA
agatggagagcatcctaggaagtcacttgcgatgctacaacgaattttgacagaagatctgccagtcatacaaac

SEQ ID NO: 140929 - DNA, 75 bp, synthetic construct
  source 1..75: mol_type = other DNA
tggctttttactttcgtggatgatgaatgaagtcaatttatccgggctgcatgatgcttcgtggtttgcgattgt

SEQ ID NO: 140930 - DNA, 75 bp, synthetic construct
  source 1..75: mol_type = other DNA
tattagcgccgcttattggtcgcttaatgcctttgttcccaccgctggttaccggtgtggttattacctctatcg

SEQ ID NO: 140931 - DNA, 75 bp, synthetic construct
  source 1..75: mol_type = other DNA
cctcatcttcagggcaagaacgccctactgatgaagttgaccgcatattatcacctggaaagctgatcatactcg

SEQ ID NO: 140932 - DNA, 75 bp, synthetic construct
  source 1..75: mol_type = other DNA
accactaaggatattgctcttggtgaagtatctaaagccgcattagatgccacaggaaaatctcctgcacagtcg

SEQ ID NO: 140933 - DNA, 75 bp, synthetic construct
  source 1..75: mol_type = other DNA
cgtacttgcagatgcgaatggcaatggcaatggtgccaatggtgcctctacctatctggttcctaaatcgggtga

SEQ ID NO: 140934 - DNA, 75 bp, synthetic construct
  source 1..75: mol_type = other DNA
ctggtgaaggaatccgtctctgataaagtaaaagtcaggacagtacgtatgtggcttctgatgcgcaagctgaag

SEQ ID NO: 140935 - DNA, 75 bp, synthetic construct
  source 1..75: mol_type = other DNA
atggttcaaatcaaaacagataaacatcccaagctcattcgtttacctgaggtaatgaacagaactggattcggg

SEQ ID NO: 140936 - DNA, 75 bp, synthetic construct
  source 1..75: mol_type = other DNA
tgcagatgagatagaaacggtgtttccgaccgagggcttctacatccaccgcaacagtaataacgtggcctggct

SEQ ID NO: 140937 - DNA, 75 bp, synthetic construct
  source 1..75: mol_type = other DNA
accttgacgacacgctctttcagacccgtcgtaaaatggtggacgagctggccctggagccattccgtaccggtg

SEQ ID NO: 140938 - DNA, 75 bp, synthetic construct
  source 1..75: mol_type = other DNA
aagccgctgatgcagatcgtcaacgagcacaacgaaaacgttgagtggtataaaaataacactgacgcgattgat

SEQ ID NO: 140939 - DNA, 75 bp, synthetic construct
  source 1..75: mol_type = other DNA
taacggtgattatacaattcgtttaacaacgtcacataaagctgattacggtggagtgacaaacgcaatcctcgt

SEQ ID NO: 140940 - DNA, 75 bp, synthetic construct
  source 1..75: mol_type = other DNA
tttagcaaaagatattggattggctttggcgatgctatgggattcaatgctggcagtatcaacaatataacggga

SEQ ID NO: 140941 - DNA, 75 bp, synthetic construct
  source 1..75: mol_type = other DNA
ttgcctgcgggaagtctcggcgcggcggtgaccttgttaatcattatgatcgctgccggtcgcggtggattttcc

SEQ ID NO: 140942 - DNA, 75 bp, synthetic construct
  source 1..75: mol_type = other DNA
tcaaatcatcctctggctgactcgcgtgtggatggaagtttctaccggttcggtcactgcgttgatcggtgcgcc

SEQ ID NO: 140943 - DNA, 75 bp, synthetic construct
  source 1..75: mol_type = other DNA
gaatggcgctgacgccgacgcgaattgcgctgctgctgttagcggcttgcctgacggcgaccgcgacgatgacta

SEQ ID NO: 140944 - DNA, 75 bp, synthetic construct
  source 1..75: mol_type = other DNA
ttatggcattcatgaatcgaatggctcgtacagaagattttaatttagatgatttttctcaatttattaccgcct

SEQ ID NO: 140945 - DNA, 75 bp, synthetic construct
  source 1..75: mol_type = other DNA
gagtatgatctttataaatattatatacttcaggattctaaagattataaacctgaaaaaccatcggatactgag

SEQ ID NO: 140946 - DNA, 75 bp, synthetic construct
  source 1..75: mol_type = other DNA
gccctcgctggcggcgtgctgctgctgattgccgtagtggtggcgctgtcgtttggtcgtgactcgcaaggctgg

SEQ ID NO: 140947 - DNA, 75 bp, synthetic construct
  source 1..75: mol_type = other DNA
acgttgaaattggcaattatgcgacgagtgtaaatatccattgggattgtactgcaaatgcgtcagtttctattt

SEQ ID NO: 140948 - DNA, 75 bp, synthetic construct
  source 1..75: mol_type = other DNA
atgggcaagaacaatcaccctgaaaataaatacaggaaatggttttccacagcaataacatatcttattgcaggt

SEQ ID NO: 140949 - DNA, 75 bp, synthetic construct
  source 1..75: mol_type = other DNA
tatacgatccgcataacaacggccacaacgacaagtgtttccggtgctctcactaatgcggagtttatctatgta

SEQ ID NO: 140950 - DNA, 75 bp, synthetic construct
  source 1..75: mol_type = other DNA
cgggacgagctattcaccaggatggcgcagagcgtataacactaaaaacaagcctactgcggctgatgtcggagc

SEQ ID NO: 140951 - DNA, 75 bp, synthetic construct
  source 1..75: mol_type = other DNA
ttatgatggcggtgggttcacttatgtccaggattcacagtatcaagtaagcccggggacttcttccagtagatc

SEQ ID NO: 140952 - DNA, 75 bp, synthetic construct
  source 1..75: mol_type = other DNA
aaaccaacaggcctgacagatggaactgtatatgtaatttacagttcgcacattaaaccgactgctgctgatgtt

SEQ ID NO: 140953 - DNA, 75 bp, synthetic construct
  source 1..75: mol_type = other DNA
ggcggcaggcagtgcgacggcagcatctcagagcaaaactgctgctgaatccgctgcgacccgtgcggaagctgc

SEQ ID NO: 140954 - DNA, 75 bp, synthetic construct
  source 1..75: mol_type = other DNA
ataataccaacaattacaccattcgaataacaacggccactacgacaaatgtctctggtgcactcactaatgcgg

SEQ ID NO: 140955 - DNA, 75 bp, synthetic construct
  source 1..75: mol_type = other DNA
agcacaacgaaaacgttgagtggtataaaaataacactgacgcgattgatgccgctggtgacaaagctcgtgagg

SEQ ID NO: 140956 - DNA, 75 bp, synthetic construct
  source 1..75: mol_type = other DNA
ctcgtttatcactaccgcagtaatagaaacccggcaggtcaatggcttaaatttgccggtactcttggggctaca

SEQ ID NO: 140957 - DNA, 75 bp, synthetic construct
  source 1..75: mol_type = other DNA
aggaaatgctgctacagcaacgaaattgcagactgcaagaactatcggcggcgtggccttcgatggatctgcgaa

SEQ ID NO: 140958 - DNA, 75 bp, synthetic construct
  source 1..75: mol_type = other DNA
tacaaaacttcagacggcacgcacaattggcggggtagcatttgatggcagtgtcaatatcgacctgccgggcgt

SEQ ID NO: 140959 - DNA, 75 bp, synthetic construct
  source 1..75: mol_type = other DNA
gacatgaacgagtacatcgcgttgcttatacgccaggatgatgcgcgggttcgtgggcgcatcaagtcaatcagc

SEQ ID NO: 140960 - DNA, 75 bp, synthetic construct
  source 1..75: mol_type = other DNA
aaaaagcgcagcggacccgccaggcagaagccggtaaccgcaagctggaactggtgctcgacgagcaggaaatgg

SEQ ID NO: 140961 - DNA, 75 bp, synthetic construct
  source 1..75: mol_type = other DNA
tttgcacaaatggctataacgtcagatacaacaaggcgcagcaactggttgaaagctgcgaaaaaatagctgaag

SEQ ID NO: 140962 - DNA, 75 bp, synthetic construct
  source 1..75: mol_type = other DNA
ttgtcagtcttggtataaaaaaaatagcgttattagacaataaagaacattcggcagaaaaacatgtgccggaca

SEQ ID NO: 140963 - DNA, 75 bp, synthetic construct
  source 1..75: mol_type = other DNA
ttatcagactactgttccacccggcccttttactattgatgatatcaactctgcggccaatggtggtgatctgca

SEQ ID NO: 140964 - DNA, 75 bp, synthetic construct
  source 1..75: mol_type = other DNA
gatatgagcgagtacatcgcgttgcttatccgtcaggataatgcccgcgttcgtgttcgtatcaagtcaatcagt

SEQ ID NO: 140965 - DNA, 75 bp, synthetic construct
  source 1..75: mol_type = other DNA
aaaaacagtaatcgatgtcacgaacggtgcaatagtgatccacacccaacgcctgaaatcagatccagggggtaa

SEQ ID NO: 140966 - DNA, 75 bp, synthetic construct
  source 1..75: mol_type = other DNA
gattataaagaacgtctttacctgtacattagaacacctggtaataacctaatgcaatattctggttgcagagaa

SEQ ID NO: 140967 - DNA, 75 bp, synthetic construct
  source 1..75: mol_type = other DNA
gatgaacaggcattacgggcagcgctggcagaaaaccccaaactggtactggtagaaagcccaagtaatccattg

SEQ ID NO: 140968 - DNA, 75 bp, synthetic construct
  source 1..75: mol_type = other DNA
tgtcgccgcaggatacgccgacggttatccgcgccatgcgcctaccggtacccctgttttagtggacggcgtgcg

SEQ ID NO: 140969 - DNA, 75 bp, synthetic construct
  source 1..75: mol_type = other DNA
atgttcacccttcacccattattcaccacctatcaaactgaaataaaaggagaaaacagaaaggtgaacagtgtg

SEQ ID NO: 140970 - DNA, 75 bp, synthetic construct
  source 1..75: mol_type = other DNA
accctaatgttatagatttctgggggactacgctttatcatctttgccaatttaccttgttagatcttaataaat

SEQ ID NO: 140971 - DNA, 75 bp, synthetic construct
  source 1..75: mol_type = other DNA
tgatggggcttgatgatggcgtggcgcgcaatctcgggctggccttgtcgctcgcgcgtctggcggcgctgtcgc

SEQ ID NO: 140972 - DNA, 75 bp, synthetic construct
  source 1..75: mol_type = other DNA
ggcggtggcgggctgtattattcagcggctgaccggaaacccgatggcaagcccggaagtgctggggattagctc

SEQ ID NO: 140973 - DNA, 75 bp, synthetic construct
  source 1..75: mol_type = other DNA
cattccagatcccagcggggctgctgtcgacctttatcggcgcgccatattttatctatttgttgagaaagcaga

SEQ ID NO: 140974 - DNA, 75 bp, synthetic construct
  source 1..75: mol_type = other DNA
tttctgtggagcactggaacgctgacgcaaaccgactggggcggcgttgagcgtttatggccgcagctgctgggc

SEQ ID NO: 140975 - DNA, 75 bp, synthetic construct
  source 1..75: mol_type = other DNA
atcccggcggggctgctgtcgacctttatcggcgcgccatattttatctatttgttgagaaagcagagccgttaa

SEQ ID NO: 140976 - DNA, 75 bp, synthetic construct
  source 1..75: mol_type = other DNA
ggtgacccgcgaatggcgcaagtgctgacctggatctctggttcgacctacaacgccaccgatgcgcaggtctgg

SEQ ID NO: 140977 - DNA, 75 bp, synthetic construct
  source 1..75: mol_type = other DNA
ctgatgcatatgccgctgccgaacgaaccattatctgttacggaatggggatcactcagcacgaacatggtaccc

SEQ ID NO: 140978 - DNA, 75 bp, synthetic construct
  source 1..75: mol_type = other DNA
tggtgacagcagccagatttattacggaatgagtggtgggattattgctcatgctgatggcatcacctttggaca

SEQ ID NO: 140979 - DNA, 75 bp, synthetic construct
  source 1..75: mol_type = other DNA
tattaataatcgtagtaaccataatgcaggaaaatccaactatgcatatttgaatttacagagtggcatcaacat

SEQ ID NO: 140980 - DNA, 75 bp, synthetic construct
  source 1..75: mol_type = other DNA
gctttgcacggcttaccattgcccttggcttagcaactgcggtatttcccgttgacgcagagtattattttaatc

SEQ ID NO: 140981 - DNA, 75 bp, synthetic construct
  source 1..75: mol_type = other DNA
gtggccttaaaataaactcaacggaagcgatgttgcccgatagccaacatggttttgctccggtgattcatggta

SEQ ID NO: 140982 - DNA, 75 bp, synthetic construct
  source 1..75: mol_type = other DNA
ttatggcactctgctgccggataataacctgaattatagtgttcaggtcggtaacacccacgggggtaatacatc

SEQ ID NO: 140983 - DNA, 75 bp, synthetic construct
  source 1..75: mol_type = other DNA
attaacaaatacattcgggaaagaaaggacggcgaaatctattgagacattgatggcagcaaggggtcgtttgcg

SEQ ID NO: 140984 - DNA, 75 bp, synthetic construct
  source 1..75: mol_type = other DNA
gtcaagggctcgcggcagttccgcgacttcgacgactacctgctgccggccgagaagttcgccgcactcaagcgc

SEQ ID NO: 140985 - DNA, 75 bp, synthetic construct
  source 1..75: mol_type = other DNA
aagcgcagattgccgagttgcagtcctttgtaagccgctttagcgccaacgcgtcgaaatctcgtcaggcgactt

SEQ ID NO: 140986 - DNA, 75 bp, synthetic construct
  source 1..75: mol_type = other DNA
ttaatccgcagactctccgcgaagtattgcaggcgtgtcagcaacaaggttgtatagcaaataatctcgatttag

SEQ ID NO: 140987 - DNA, 75 bp, synthetic construct
  source 1..75: mol_type = other DNA
gattatatcgacgaacgttatgcctccgcgctgactcgtgaatctgtcgcgcaggcgttctacatttcaccaaac

SEQ ID NO: 140988 - DNA, 75 bp, synthetic construct
  source 1..75: mol_type = other DNA
tctcccgcctgataaacggcccgctgccgctccgtcagatttactttgccagcactaatggtccggtccccgatc

SEQ ID NO: 140989 - DNA, 75 bp, synthetic construct
  source 1..75: mol_type = other DNA
ggtgtcattcaggtcagtgccgaagctgaagacctcgaaagtgctctgctgcgttgccgccagtatctgaaccgt

SEQ ID NO: 140990 - DNA, 75 bp, synthetic construct
  source 1..75: mol_type = other DNA
tgtggaccaatggccaggaagagttcctgttccaggtcgaacgcactaggtttgaggttcgcgctaaaccgttag

SEQ ID NO: 140991 - DNA, 75 bp, synthetic construct
  source 1..75: mol_type = other DNA
gtacaaagttttcatggctgtagtggatagagccggagttgatgcccggggcaatctcctattccagcgcgcccc

SEQ ID NO: 140992 - DNA, 75 bp, synthetic construct
  source 1..75: mol_type = other DNA
cgcacgaccgtcacttcctcaatatggtctgtacgcacatggcggatttggattacggtgagctgcgcgtctatc

SEQ ID NO: 140993 - DNA, 75 bp, synthetic construct
  source 1..75: mol_type = other DNA
gcctcgaaatctcgccaggcgacttcgcgcgcgcgccagattgataaaatcaaactggaagaggtgaaagcctcc

SEQ ID NO: 140994 - DNA, 75 bp, synthetic construct
  source 1..75: mol_type = other DNA
gatgctcgtacctttccagacggcgatctggatggcatcgaagccgccagtccagctatgtcacttggcagtatg

SEQ ID NO: 140995 - DNA, 75 bp, synthetic construct
  source 1..75: mol_type = other DNA
tttttacgctgtttgtggatggtgaaaacgaagtgggtaaagtgacctccgtcactctgcccaaactgacgcgca

SEQ ID NO: 140996 - DNA, 75 bp, synthetic construct
  source 1..75: mol_type = other DNA
tttttacgttgtttgtggatggtgaaaacgaagtgggtaacgtgacctccgtcactcggcccaaactgacgcgca

SEQ ID NO: 140997 - DNA, 75 bp, synthetic construct
  source 1..75: mol_type = other DNA
tttttacgatgtttgtggatggtgaaaacgaagtgggtaacgtgacctccgtcactctgcccaaactgacgcgca

SEQ ID NO: 140998 - DNA, 75 bp, synthetic construct
  source 1..75: mol_type = other DNA
ccgcgaatggagcgtctggttcgatatcaaaatcgttttcctgacggtattcaaaggcttcgttaacaaagcggc

SEQ ID NO: 140999 - DNA, 75 bp, synthetic construct
  source 1..75: mol_type = other DNA
atggctgtaccaaaacatcttcgcttttttacgttgtttgtggatggtgaaaacgaagtgggtaaggtgacgtcc

SEQ ID NO: 141000 - DNA, 75 bp, synthetic construct
  source 1..75: mol_type = other DNA
tttttacgctgtttgtggatggtgaaaacgaagtgggtaatgtgacctccgtcactcggcccaaactgacgcgca

SEQ ID NO: 141001 - DNA, 75 bp, synthetic construct
  source 1..75: mol_type = other DNA
ttactacttatctgcagatactgtggcgcggattcgccgcggtgatgaggccacttacacgtctgaagatgtgag

SEQ ID NO: 141002 - DNA, 75 bp, synthetic construct
  source 1..75: mol_type = other DNA
ttcattgcgggagttaatccaggatcacttgacggctgggttagagcatgacccgtttcaacaattgcgtgaaaa

SEQ ID NO: 141003 - DNA, 75 bp, synthetic construct
  source 1..75: mol_type = other DNA
gcggtaagtattgatctcggtctggacgactccgcgcttgatgcgagctttgtcatggggggcgcagttcgtgag

SEQ ID NO: 141004 - DNA, 75 bp, synthetic construct
  source 1..75: mol_type = other DNA
atggctcgcgtaaaacgtggtgttattgcacgtgcacgtcacaagaaaattttgaaacaagctaaaggctactac

SEQ ID NO: 141005 - DNA, 75 bp, synthetic construct
  source 1..75: mol_type = other DNA
gcgttgaaacggatgatcaggtttttgctgaaattcttgtgacaagcaccgaggtcggactaaaaacagtttcag

SEQ ID NO: 141006 - DNA, 75 bp, synthetic construct
  source 1..75: mol_type = other DNA
cggtagacactgggttaagtcatttaactgcagcactggatcgaccgaatatcacggtttatggaccaaccgatc

SEQ ID NO: 141007 - DNA, 75 bp, synthetic construct
  source 1..75: mol_type = other DNA
aaccgctcgcgaacctttagccagcctgttttacaatcgtaagcatcatattgcaaaacagcagcacgccgtaga

SEQ ID NO: 141008 - DNA, 75 bp, synthetic construct
  source 1..75: mol_type = other DNA
gcgaaaaggctggcggaaggatttgattatgtcgacgtattgccgaagatgagtctggaaggtgttgccagcgtg

SEQ ID NO: 141009 - DNA, 75 bp, synthetic construct
  source 1..75: mol_type = other DNA
gaagtttgtttgagcgtattggtgaggcggtaaatccctcttcgcgtcaacgtccaaaggtggcgttgttgcatt

SEQ ID NO: 141010 - DNA, 75 bp, synthetic construct
  source 1..75: mol_type = other DNA
tgttatggctcaccagagctggggatcggcgatctggataatgtggcctccatctccatgaatctcagggattca

SEQ ID NO: 141011 - DNA, 75 bp, synthetic construct
  source 1..75: mol_type = other DNA
gaatcaggtggtttgtagggcaccagataaagatcttgctcatctgactgcagaaacggtatttaataaaatcaa

SEQ ID NO: 141012 - DNA, 75 bp, synthetic construct
  source 1..75: mol_type = other DNA
tgcgaatagcagggtgccatctaaccgaaaagttaacggtaaagcactgactgcggatatcaaattaacgccgaa

SEQ ID NO: 141013 - DNA, 75 bp, synthetic construct
  source 1..75: mol_type = other DNA
ccggcatttattcgttcacgacgggatacgaccgacgcaaactggtcgccgtgggcgcagctttacacctcggct

SEQ ID NO: 141014 - DNA, 75 bp, synthetic construct
  source 1..75: mol_type = other DNA
tggtaatggactaaatgttactggtggcgtaaatggtagtttgaacggtaatgcttcaacagctacgaagttgca

SEQ ID NO: 141015 - DNA, 75 bp, synthetic construct
  source 1..75: mol_type = other DNA
cactggcattaggtgccgatctggtgttgcattcatgtacgaaatatctgaacggtcactcagacgtggtggcgg

SEQ ID NO: 141016 - DNA, 75 bp, synthetic construct
  source 1..75: mol_type = other DNA
cgtagcgggttaaatgacgacgaacagtatggttgcgttgtccctcccatccatctttccagcacctataacttt

SEQ ID NO: 141017 - DNA, 75 bp, synthetic construct
  source 1..75: mol_type = other DNA
acagcaacgaaattgcagacggcaagatctatcggtggagttggtttcgacggttctgcaaatatcaaccttcca

SEQ ID NO: 141018 - DNA, 75 bp, synthetic construct
  source 1..75: mol_type = other DNA
caaccaatgtttctacggattatcgttatagcgatcaggatggcgatcaaacgtcatggcagttatcccatactt

SEQ ID NO: 141019 - DNA, 75 bp, synthetic construct
  source 1..75: mol_type = other DNA
aaacaggtgactttgattgccgatgctggtaccgcaaaactagcctccttaacctctgtatactcattcgtcgtc

SEQ ID NO: 141020 - DNA, 75 bp, synthetic construct
  source 1..75: mol_type = other DNA
ccgaggacaattatatcgctaataacgtcgggatgaccaggctgcaggcaacagtgactgatggaaacggcaacc

SEQ ID NO: 141021 - DNA, 75 bp, synthetic construct
  source 1..75: mol_type = other DNA
attgatgaaaaactgacactcacggcgtccagcccgcttatcggtgtcaattccccaacaggtgcaactctgacg

SEQ ID NO: 141022 - DNA, 75 bp, synthetic construct
  source 1..75: mol_type = other DNA
tgtgtacttcgccttaaaaagcggctctgctacattaacgtcattaacagcggtgaccgatcaaaacggaatcgc

SEQ ID NO: 141023 - DNA, 75 bp, synthetic construct
  source 1..75: mol_type = other DNA
taagagtgagcagttggtggtgaactttactgcggatacgctcactacgcaggttaatcttaacgttaccgagga

SEQ ID NO: 141024 - DNA, 75 bp, synthetic construct
  source 1..75: mol_type = other DNA
atcgcaacgctgatccctgtattgaatggtgttcatcaagctggtctgagtaccacaatacaattcactcgcgca

SEQ ID NO: 141025 - DNA, 75 bp, synthetic construct
  source 1..75: mol_type = other DNA
agcgcgcaccccggatcagccgtatcgacgcgctcatggtttgcaataggcgggaaaggagttgtttgtgtggga

SEQ ID NO: 141026 - DNA, 75 bp, synthetic construct
  source 1..75: mol_type = other DNA
gttttcatattgtagcgtacatagatttcagtgaccgacaggatgttctggaatttgatattttgctggataacc

SEQ ID NO: 141027 - DNA, 75 bp, synthetic construct
  source 1..75: mol_type = other DNA
atcgccccggatcatccgctggcctttatgccagaaccaataaccgaaagccagttgcgcctttatcccaacatc

SEQ ID NO: 141028 - DNA, 75 bp, synthetic construct
  source 1..75: mol_type = other DNA
ccagatttcaacaccaaatgtcagtgtcagattctgggcgaagggattggttttttgccagattacatggttcgt

SEQ ID NO: 141029 - DNA, 75 bp, synthetic construct
  source 1..75: mol_type = other DNA
tgtgaagagttggtgggtgaacgccggcgaggctttcatgatatacagccttgctgaaaatttttgcagcagcaa

SEQ ID NO: 141030 - DNA, 75 bp, synthetic construct
  source 1..75: mol_type = other DNA
taaaaattcgaaaggaactattttgttcaagaaataaacttgttgttataaatgatgctgatactttggaattcg

SEQ ID NO: 141031 - DNA, 75 bp, synthetic construct
  source 1..75: mol_type = other DNA
tggcttaagcaagatcaccctaaattacatattgtaaagcactccgactatataccccaaaaatacctaccaaca

SEQ ID NO: 141032 - DNA, 75 bp, synthetic construct
  source 1..75: mol_type = other DNA
gtggtgaccactgcaacgggcatcccggcctggcgcatccatcacagccgcctgattcgcttcgacggggtgacg

SEQ ID NO: 141033 - DNA, 75 bp, synthetic construct
  source 1..75: mol_type = other DNA
gttgaagaattgcgccgtcagatcctttgggtattcagcaaagaggggcaggagtatttcctttctgaacatcca

SEQ ID NO: 141034 - DNA, 75 bp, synthetic construct
  source 1..75: mol_type = other DNA
ttcaggcaacaaatacagaacgcctgactttaatccgacacaggaagatcgggaccgtgccgaaatgatgtgcag

SEQ ID NO: 141035 - DNA, 75 bp, synthetic construct
  source 1..75: mol_type = other DNA
cgaatcaatcacagcacgccaggcggcagatctcgtttatggcggcaacgttacccgcgtacaggtcgatgcagc

SEQ ID NO: 141036 - DNA, 75 bp, synthetic construct
  source 1..75: mol_type = other DNA
ctgaccgcatttgatttttattttgaagataacgagcttatccctttaccttcgccattaaatagtcacgatcac

SEQ ID NO: 141037 - DNA, 75 bp, synthetic construct
  source 1..75: mol_type = other DNA
gtcggtgaacaacgtggaacatatatactcaaaccactgagtatgaaaggtaatctcaccgccgaaaaaattgaa

SEQ ID NO: 141038 - DNA, 75 bp, synthetic construct
  source 1..75: mol_type = other DNA
tgacgatacaggagtcaggaaccagcatattaaaaaatgagttagaaaacagtgaggacggtgcgggtcaagtag

SEQ ID NO: 141039 - DNA, 75 bp, synthetic construct
  source 1..75: mol_type = other DNA
tccgctggtgcgccttttcgggcagtccccgaagggattttctaccggcgatgcagaccttgccaactattacga

SEQ ID NO: 141040 - DNA, 75 bp, synthetic construct
  source 1..75: mol_type = other DNA
atggcacgaaacaaacaagccctgcggcgaactgtgcaggccacagctgatggttatgagaattttattgcccga

SEQ ID NO: 141041 - DNA, 75 bp, synthetic construct
  source 1..75: mol_type = other DNA
ttccccgtagataaatggtacggactgatggaaaacccgacgacagcgatgcaatcttggacaggctggtacata

SEQ ID NO: 141042 - DNA, 75 bp, synthetic construct
  source 1..75: mol_type = other DNA
atgcacagatggttagtattttttttgataatcctttcttttcacaacgcctctgcgtcgaaatcagtgcagaaa

SEQ ID NO: 141043 - DNA, 75 bp, synthetic construct
  source 1..75: mol_type = other DNA
accgtgacggctaccgcccggaaacagagcggttccggtgggacagccgggaccagctgaccgggtattgcagcg

SEQ ID NO: 141044 - DNA, 75 bp, synthetic construct
  source 1..75: mol_type = other DNA
cgggcatatggcacttgaggcaatgcgtcagggtgtgaagacgtgcatcgcgtcacttgagctgaagcctggtat

SEQ ID NO: 141045 - DNA, 75 bp, synthetic construct
  source 1..75: mol_type = other DNA
ttgatattaccgtggtgacggataaaaactgcaatatagcgcatgtcgatgatgataagcgtcaggagaaacaac

SEQ ID NO: 141046 - DNA, 75 bp, synthetic construct
  source 1..75: mol_type = other DNA
ggcagcactgaaatgggggaagtctgcgagagtttttcgcgtgacctgactcactgcaagccgtgcaacggtgcg

SEQ ID NO: 141047 - DNA, 75 bp, synthetic construct
  source 1..75: mol_type = other DNA
cagtcacctggctgaagggcgggcgcgtatacccgcaacttgactgtttcggcattgtgaacgagatacgccgcg

SEQ ID NO: 141048 - DNA, 75 bp, synthetic construct
  source 1..75: mol_type = other DNA
aatttcgaatcccaacgtaagcaactgagtaatgaacttgctctggaaaaattacgtattgaattaaataagctc

SEQ ID NO: 141049 - DNA, 75 bp, synthetic construct
  source 1..75: mol_type = other DNA
gctttcgtagctgaaaggcatatcaatcacgcatatagccatgaggttgaagagctacgccgtcagatcctttgg

SEQ ID NO: 141050 - DNA, 75 bp, synthetic construct
  source 1..75: mol_type = other DNA
gactttaatccgacacaggaagatcgggaccgtgccgaaatgatgtgcagggaacaggagaaaagaattatggat

SEQ ID NO: 141051 - DNA, 75 bp, synthetic construct
  source 1..75: mol_type = other DNA
cgttaccagaacagaatcccatcttgagtacctgcaatcgcgtggcatatcgccagaaatcgtaaagcgctacga

SEQ ID NO: 141052 - DNA, 75 bp, synthetic construct
  source 1..75: mol_type = other DNA
ctgaccgcaagaaaatcgcccgctacgttaccagaacagaatcccatcttgagtacctgcaatcgcgtggcatat

SEQ ID NO: 141053 - DNA, 75 bp, synthetic construct
  source 1..75: mol_type = other DNA
gtcggatgcgacgccatccgtcttatccgacctacagttcagtgcacctcgtaggcctgataagtcgcgtcagcg

SEQ ID NO: 141054 - DNA, 75 bp, synthetic construct
  source 1..75: mol_type = other DNA
acgatgccgatagtggaatttccgctagtatcgttaaagtcaaagatggtaactatcaattggtattgaccgcca

SEQ ID NO: 141055 - DNA, 75 bp, synthetic construct
  source 1..75: mol_type = other DNA
ttacgttggcattgtgcgcacaacgaagcgcctggaacgcgccctgcggcggataaccatgctccaacaagaaat

SEQ ID NO: 141056 - DNA, 75 bp, synthetic construct
  source 1..75: mol_type = other DNA
gcaccggttttggccacctggcgataccgcgtgtgggtcaggaggtgattgtagacttcctcaacggcgatccgg

SEQ ID NO: 141057 - DNA, 75 bp, synthetic construct
  source 1..75: mol_type = other DNA
tagcggaaatgggcgtgaaagaagacgttgacggcaagatcatggccgtagcaaaagcgacctgtgcagaaggtg

SEQ ID NO: 141058 - DNA, 75 bp, synthetic construct
  source 1..75: mol_type = other DNA
gatttaatcattatggatatagacttgcccggtacagacggttttaccttcctgaaaaggatcaaacaaatccag

SEQ ID NO: 141059 - DNA, 75 bp, synthetic construct
  source 1..75: mol_type = other DNA
cattgaaaaccgcttatttattaacggtgaatatactgctgcggcggaaaatgaaacctttgaaaccgttgatcc

SEQ ID NO: 141060 - DNA, 75 bp, synthetic construct
  source 1..75: mol_type = other DNA
attatcaaggaaccgctgtaattaactattgtgatgatagtgagaaatttactcgtattactgaacacaaatatt

SEQ ID NO: 141061 - DNA, 75 bp, synthetic construct
  source 1..75: mol_type = other DNA
atttatccagacacacttcctttcgatatagctatcatcgactggcttgtcgtagcttcaggttcaggtgctgcc

SEQ ID NO: 141062 - DNA, 75 bp, synthetic construct
  source 1..75: mol_type = other DNA
aatgtccacgtttatggaccgcatattttccatacggataatgaagatgtatggaattttgtgaataaatatggg

SEQ ID NO: 141063 - DNA, 75 bp, synthetic construct
  source 1..75: mol_type = other DNA
taacttttcaatcagacgatgatttatcatggaaaactgctttttctttatgtcttcgctatgatataccacttg

SEQ ID NO: 141064 - DNA, 75 bp, synthetic construct
  source 1..75: mol_type = other DNA
agtaccgaccagagcctggtctgtgcgaacgtcgatctgccgatctttgaatccctggaaccgaacacccgtacc

SEQ ID NO: 141065 - DNA, 75 bp, synthetic construct
  source 1..75: mol_type = other DNA
atgaccgaatctaggcaggaaaagctgatatggctgcgtgcgcagatgaagctgacaagccagtgctgggcgctg

SEQ ID NO: 141066 - DNA, 75 bp, synthetic construct
  source 1..75: mol_type = other DNA
gaaacaagcagccgctcatctggctggattatgttgttaaccaagatggatctgtgttggtgaaaacgtttcacc

SEQ ID NO: 141067 - DNA, 75 bp, synthetic construct
  source 1..75: mol_type = other DNA
atttgcggaatacagatgcaggtagatatgtgacatatcttgaacaggatatgccactgtttgaaggtgggccat

SEQ ID NO: 141068 - DNA, 75 bp, synthetic construct
  source 1..75: mol_type = other DNA
tccgctatccaatgcctcctcacagttatttaaccctcgcggaagggtgattaacgctggccgtcaccctgtgaa

SEQ ID NO: 141069 - DNA, 75 bp, synthetic construct
  source 1..75: mol_type = other DNA
gagtttattatgccatggacaaggtaaccggtgctgtagcgagcagtgttttcaatgttacggtgataacgccaa

SEQ ID NO: 141070 - DNA, 75 bp, synthetic construct
  source 1..75: mol_type = other DNA
caacgttaagtgcaagtattctaatattcaaaacgattaatgttgaaaatccatacattagtatgctggattcgt

SEQ ID NO: 141071 - DNA, 75 bp, synthetic construct
  source 1..75: mol_type = other DNA
tcgaacggtgacccgatcgacattcctgctaatcaattcgtttctgtgcgagtacagatgcctgaggattctgca

SEQ ID NO: 141072 - DNA, 75 bp, synthetic construct
  source 1..75: mol_type = other DNA
ttgcgggttatttcctggtctgggtcgggttcagctccaactttggtactgactgactttgatacaattaataac

SEQ ID NO: 141073 - DNA, 75 bp, synthetic construct
  source 1..75: mol_type = other DNA
cctgtggcagtacagcgataaatggatgaccgaatccaggcaggaaaagctgatatggctgcgtgcgcagatgaa

SEQ ID NO: 141074 - DNA, 75 bp, synthetic construct
  source 1..75: mol_type = other DNA
aggcgaaaccatccacaatatgccgttcccggtcaccgcggatagcgtctacgccgccatccttaccgcggacct

SEQ ID NO: 141075 - DNA, 75 bp, synthetic construct
  source 1..75: mol_type = other DNA
atattccgctttttacggctctggtattgaatccggtggaaatatcaatattactctcaatgaggcagcatctgg

SEQ ID NO: 141076 - DNA, 75 bp, synthetic construct
  source 1..75: mol_type = other DNA
tacaatcaagtaaaatagttaaagactatagcaaaaaaattgtcggcaacccggtaattagtctaccaatgggcg

SEQ ID NO: 141077 - DNA, 75 bp, synthetic construct
  source 1..75: mol_type = other DNA
tgcaggttaagccgtggcgcgagaagcgcagcctgtcgcagaacgcgctcagccacatgtggtacacggaaatca

SEQ ID NO: 141078 - DNA, 75 bp, synthetic construct
  source 1..75: mol_type = other DNA
acgagacggcagttaaaagaaaatgacatggttagctatatagtgcttgatgaaagagtttactattctggagat

SEQ ID NO: 141079 - DNA, 75 bp, synthetic construct
  source 1..75: mol_type = other DNA
atgggccgcaatgtgcgcccgggtcagtggcataaaaagcggtggaatttacgcaggtcatgacaatcaatttta

SEQ ID NO: 141080 - DNA, 75 bp, synthetic construct
  source 1..75: mol_type = other DNA
ctggtatgctaaacaccagtctctatctaaccctttgtataacctgatgtaccaggctggcgtccctctgcgtct

SEQ ID NO: 141081 - DNA, 75 bp, synthetic construct
  source 1..75: mol_type = other DNA
ttaatcattgatgaagcacaggcgttacattcttcgtggctggagactttatcttgttggttcgaaaataaaagg

SEQ ID NO: 141082 - DNA, 75 bp, synthetic construct
  source 1..75: mol_type = other DNA
gtgcacccaccgtccgcgatcgtctgttacatcgccggagtaccaagccggaagcagaagccgatctggatatga

SEQ ID NO: 141083 - DNA, 75 bp, synthetic construct
  source 1..75: mol_type = other DNA
atattaaaacagatcttttttatgctaatccttcattagcgttgatggggtttcatatctataaacttgatggtg

SEQ ID NO: 141084 - DNA, 75 bp, synthetic construct
  source 1..75: mol_type = other DNA
gaagaactatcagcgttataacgaacggataaaaggaaaacgtcaggaatgggggatactatgcaacaacgatta

SEQ ID NO: 141085 - DNA, 75 bp, synthetic construct
  source 1..75: mol_type = other DNA
gcatacccggagagcctgcccggtgcgccactggcgcggtacacgtatacggaagccggtgaactgctggcggta

SEQ ID NO: 141086 - DNA, 75 bp, synthetic construct
  source 1..75: mol_type = other DNA
acagattatttgatagatttgattatacaattgagctttctaacattaaccaaggtttggcaattattgctgctc

SEQ ID NO: 141087 - DNA, 75 bp, synthetic construct
  source 1..75: mol_type = other DNA
actggccatcaatttacgaaagaagaaagaaaattgagttaaagatcagttatgacaccaatggaagaacggtgc

SEQ ID NO: 141088 - DNA, 75 bp, synthetic construct
  source 1..75: mol_type = other DNA
gtcgccatcgccagtttaaataaacagcgttttgccgacgataagccctggactactgctgcgccaggcggacac

SEQ ID NO: 141089 - DNA, 75 bp, synthetic construct
  source 1..75: mol_type = other DNA
tatgcgaatttgcgaaccttttggcccggagcaacgacaaggattatggctctatcacgttatcgaaccggatcg

SEQ ID NO: 141090 - DNA, 75 bp, synthetic construct
  source 1..75: mol_type = other DNA
atgaacaaaaagctacttgccatcgtattagcagtatcttccctttcagccggttcagtaatggctgatgttgac

SEQ ID NO: 141091 - DNA, 75 bp, synthetic construct
  source 1..75: mol_type = other DNA
acgctggaatttccgctgctcattcgtagttactggatgccagaggacgcagatcctgacgtgatcagggtgatg

SEQ ID NO: 141092 - DNA, 75 bp, synthetic construct
  source 1..75: mol_type = other DNA
aactggaacaacccgaggttgttgatacatcaatatctttaaaaataaaagaaaatatcgattttaattatgtcg

SEQ ID NO: 141093 - DNA, 75 bp, synthetic construct
  source 1..75: mol_type = other DNA
ggggctggtgacgtcattcagctatgcaggagacaggaatcgcctgcttacccgttacagttatacccgctggca

SEQ ID NO: 141094 - DNA, 75 bp, synthetic construct
  source 1..75: mol_type = other DNA
tgaactggcgatcatttttgataaattatctattgatactctagaagtgcttgaggctgcaggtactaaatggaa

SEQ ID NO: 141095 - DNA, 75 bp, synthetic construct
  source 1..75: mol_type = other DNA
cactggttaaagtaaacgatccttcaagcaaaatttcttctcctatcgattcaaccagccatatcgccaccttca

SEQ ID NO: 141096 - DNA, 75 bp, synthetic construct
  source 1..75: mol_type = other DNA
agcgggaaagattacagcgtcacatcgttgaccttgtacgtaaaaacgggcgtatgaaaatgccacaactggcat

SEQ ID NO: 141097 - DNA, 75 bp, synthetic construct
  source 1..75: mol_type = other DNA
actcagaactggcgaaagcgttcgcatacgccctgaaccagtggccggcgctgacgtactatgcagatgatgacc

SEQ ID NO: 141098 - DNA, 75 bp, synthetic construct
  source 1..75: mol_type = other DNA
caattgaaagaaagttctgtactgcctgatgagattactgtccttgttcctacggatttagtgaaaaattcctag

SEQ ID NO: 141099 - DNA, 75 bp, synthetic construct
  source 1..75: mol_type = other DNA
aaggtgctcagcttgatggaggatgtagttaaacaccacgctgtaaagcgtggtatacgcagcaaagtcgattac

SEQ ID NO: 141100 - DNA, 75 bp, synthetic construct
  source 1..75: mol_type = other DNA
cggttggatttgcccctatatttccagacatctgttatcacttaacccattacaagcccgctgccgcagatattc

SEQ ID NO: 141101 - DNA, 75 bp, synthetic construct
  source 1..75: mol_type = other DNA
tcagcggaaaaggggtattcctttcagagagggtttaccgtgaatggctggcaagttcggcaagaaaagcaaggg

SEQ ID NO: 141102 - DNA, 75 bp, synthetic construct
  source 1..75: mol_type = other DNA
cgctactgtattaatttttattattgctttttacgcatttaatgctgttctccgcggtacggatttctatgcgaa

SEQ ID NO: 141103 - DNA, 75 bp, synthetic construct
  source 1..75: mol_type = other DNA
tgacggcagaggattttgtcctcggctggcagcgcgcggttgacccgaaaacggcaagcccttttgctggctatc

SEQ ID NO: 141104 - DNA, 75 bp, synthetic construct
  source 1..75: mol_type = other DNA
taatctgctagaacctgataatagaaatagtcaaattggtttaaaaaatcatagcttatctattgataagaatat

SEQ ID NO: 141105 - DNA, 75 bp, synthetic construct
  source 1..75: mol_type = other DNA
ctcccgtggcgacattgacattgccgatgcgctgccggtggatcaactcaacgccctgaagcaggaaaacaaagt

SEQ ID NO: 141106 - DNA, 75 bp, synthetic construct
  source 1..75: mol_type = other DNA
atgcgttttgacttggctcatgaatgtggtcatttaataatgcatgatggtattgagactggatgtaaaaaaaca

SEQ ID NO: 141107 - DNA, 75 bp, synthetic construct
  source 1..75: mol_type = other DNA
ggaaaaaagtataccacctaaaattaaggtggaaaatgagtgcaagagcgatcatatatcgtgctcatttcttag

SEQ ID NO: 141108 - DNA, 75 bp, synthetic construct
  source 1..75: mol_type = other DNA
gctccagcgacagttcaatccggatgctccggataagcgttgggtaacggacataacctacatcaggacccacga

SEQ ID NO: 141109 - DNA, 75 bp, synthetic construct
  source 1..75: mol_type = other DNA
tgtgcgaaatgtttgcgtgatgcggatgaatgcccctccgggcgtttgaacggattggtcgcgatatcagccttg

SEQ ID NO: 141110 - DNA, 75 bp, synthetic construct
  source 1..75: mol_type = other DNA
cgcccggcaatgcccgtgccgcagcagttctcactcaaccagaacggcctggttaacgcagcagataactaccag

SEQ ID NO: 141111 - DNA, 75 bp, synthetic construct
  source 1..75: mol_type = other DNA
tattttactattgataagcactttgaacataagcatgataaaggagaaatttatagtggcattaaaaatgcgttc

SEQ ID NO: 141112 - DNA, 75 bp, synthetic construct
  source 1..75: mol_type = other DNA
gtatgagcaggaccgcatcaccgtcacggacagcctgaaccggcgtgaggtgctgcatacagaaggcggggccgg

SEQ ID NO: 141113 - DNA, 75 bp, synthetic construct
  source 1..75: mol_type = other DNA
agaaaatcgtgatgtagctaaaggtgttttagtttataagaaaataaccactcttgaacgactggatgatatgta

SEQ ID NO: 141114 - DNA, 75 bp, synthetic construct
  source 1..75: mol_type = other DNA
caacctctctcctgaagaattggcagaaatgatatcaacattccaacaaaataaaaaagatagtgaatctgagtg

SEQ ID NO: 141115 - DNA, 75 bp, synthetic construct
  source 1..75: mol_type = other DNA
ctttatgtcaccctggccgctcgggagaacagctatacgtctggtcaggtctggtgttctgatggggggaccgga

SEQ ID NO: 141116 - DNA, 75 bp, synthetic construct
  source 1..75: mol_type = other DNA
ccacattgctcgcgctcgtccttgccacaactttcccggttgcgcacgccgccgtaccgaaagatatgctggtga

SEQ ID NO: 141117 - DNA, 75 bp, synthetic construct
  source 1..75: mol_type = other DNA
aactcactcaccgatattaataggggaagattattgggataatgtagttgaattggctgatcaatacaatcctat

SEQ ID NO: 141118 - DNA, 75 bp, synthetic construct
  source 1..75: mol_type = other DNA
gaaataaaatatcatggttggagtctgttatttcttcattagctgtattcactatttctactaataggttatcaa

SEQ ID NO: 141119 - DNA, 75 bp, synthetic construct
  source 1..75: mol_type = other DNA
ggctgccttatgctgccgggcataaatgtacggcgcaacatacccctcgcggcacacatccagataatccgacca

SEQ ID NO: 141120 - DNA, 75 bp, synthetic construct
  source 1..75: mol_type = other DNA
ggtaaccgctcgttctatgaaaacagtgaggtcgataagttactgcgcaatgcgcttgcgaccaccgaccagacg

SEQ ID NO: 141121 - DNA, 75 bp, synthetic construct
  source 1..75: mol_type = other DNA
gtgggtaaaggtgattacgacattgcgattggcaactggagtccggattttgccgacccgtatatgtttatgaat

SEQ ID NO: 141122 - DNA, 75 bp, synthetic construct
  source 1..75: mol_type = other DNA
acccttagccagccattcgcaccgttcctctacacgctggcgaatgacggtgcatccattatcaatccggcggtc

SEQ ID NO: 141123 - DNA, 75 bp, synthetic construct
  source 1..75: mol_type = other DNA
aaactatcgtatcttctcgttactagaaaacgccgaagaagaaaaagaacggcaaatagcctcaatactttcatg

SEQ ID NO: 141124 - DNA, 75 bp, synthetic construct
  source 1..75: mol_type = other DNA
accgacgttgaaggcgatctggcgagtagctggaaagcgtctgacgatcaaaaagagtggacattcaccctgaag

SEQ ID NO: 141125 - DNA, 75 bp, synthetic construct
  source 1..75: mol_type = other DNA
ggcatgtggggctacgatgcgacggcaatgcaatacaaccatgacgaaaggaagccaaagccgaatgggataaag

SEQ ID NO: 141126 - DNA, 75 bp, synthetic construct
  source 1..75: mol_type = other DNA
aagtggtgtttttggcgctctggaatttttgtccgattgtcaggaagagtatgcggggaaattaaacttgcttgt

SEQ ID NO: 141127 - DNA, 75 bp, synthetic construct
  source 1..75: mol_type = other DNA
ggcggcaaagtcacaggactgggatcagacgctccctgttgcccttattaccggcggtgttcatgggttcgaaac

SEQ ID NO: 141128 - DNA, 75 bp, synthetic construct
  source 1..75: mol_type = other DNA
tcggtaccccaggcaagcccaggaccaggacagaaaagcagatatggcaacaaagacagacgcgtgtcagaagct

SEQ ID NO: 141129 - DNA, 75 bp, synthetic construct
  source 1..75: mol_type = other DNA
gatatatacgatatatgtgaaaaaacaatttcttcgtcctaccatgatcttgattttatacgactttcgaagatg

SEQ ID NO: 141130 - DNA, 75 bp, synthetic construct
  source 1..75: mol_type = other DNA
agcgtatatttagatgaattgaaaaaatttcgccctgatattttagcagcgtgtaaagagtcgctttccagtgct

SEQ ID NO: 141131 - DNA, 75 bp, synthetic construct
  source 1..75: mol_type = other DNA
gcttccattgtcttttaaattaaataatgaatatgggaaatggaaggagaaatattatgatatagttaagatggg

SEQ ID NO: 141132 - DNA, 75 bp, synthetic construct
  source 1..75: mol_type = other DNA
atggctggcaaacggaacaacaatcatgggcggcattgtgccgattttgcggtgatttacattgcaaaacgcaga

SEQ ID NO: 141133 - DNA, 75 bp, synthetic construct
  source 1..75: mol_type = other DNA
ggcggcagcgacaccattgtccccattgatgtttggatccccggctgcccgccaacaccggccgccaccattcac

SEQ ID NO: 141134 - DNA, 75 bp, synthetic construct
  source 1..75: mol_type = other DNA
atgtggaacagtcgcatttcatccttgagtcttacggaatggattgcttcattgccgacattgaagcctgtcgcc

SEQ ID NO: 141135 - DNA, 75 bp, synthetic construct
  source 1..75: mol_type = other DNA
gccatactcactgaactgccaacaaagtctttgttacttgacatgaaagacgcaaccgcatacatctttgagcta

SEQ ID NO: 141136 - DNA, 75 bp, synthetic construct
  source 1..75: mol_type = other DNA
aaatatcagacgcgcaatcagagggggccttaaacgccatgtcaagtgataagactacatcattacaattatata

SEQ ID NO: 141137 - DNA, 75 bp, synthetic construct
  source 1..75: mol_type = other DNA
ctggagatcaaccatgtgctggaagccgccagtgcgcaaagccagcgtaactatcagatttcggcactggtgttt

SEQ ID NO: 141138 - DNA, 75 bp, synthetic construct
  source 1..75: mol_type = other DNA
tggtgtttaaaacgcttcagaccatcaaccgcttcattgtccgcccggtcacgccggacgaactggcagaaagcc

SEQ ID NO: 141139 - DNA, 75 bp, synthetic construct
  source 1..75: mol_type = other DNA
tgatgttgcccgagcaggcgagtaatatccggctacaaagtagtgaaacgccgcaggagattttccgcaacaatc

SEQ ID NO: 141140 - DNA, 75 bp, synthetic construct
  source 1..75: mol_type = other DNA
catatgcaaacaaaggaaaattaatcacatttggtatagtgcctaatagtcccgaaacaggctatggatatataa

SEQ ID NO: 141141 - DNA, 75 bp, synthetic construct
  source 1..75: mol_type = other DNA
cttgaccaagcacagatggccgatgcattcgagcaattttcccgaacggttcggacttctaaactggcttttgtg

SEQ ID NO: 141142 - DNA, 75 bp, synthetic construct
  source 1..75: mol_type = other DNA
cagcaaaagcttctgcaggaagtgtacagggggcacactctggcagaaatgacgggtattctgagcacagacatg

SEQ ID NO: 141143 - DNA, 75 bp, synthetic construct
  source 1..75: mol_type = other DNA
tattactgggcgctgctgtgtattgtgttcaaccgtatggccgacttgctggatggtgctgtagcccggttggat

SEQ ID NO: 141144 - DNA, 75 bp, synthetic construct
  source 1..75: mol_type = other DNA
gcattgttgattgctgatcgtgctgatgctcaaaacataaaggacataatcaaaaaactcaaaactgttgagcgg

SEQ ID NO: 141145 - DNA, 75 bp, synthetic construct
  source 1..75: mol_type = other DNA
tgaaacgcatcaccgtgaaaccgggcgaaggcttgtcggtacagatgcaccatcaccgcgcggaacactgggtgg

SEQ ID NO: 141146 - DNA, 75 bp, synthetic construct
  source 1..75: mol_type = other DNA
attaatcacaaaactgaaaacagctatgtgtatgccgaatctggcctcgtaaccaccgtcggggtgaaagatctg

SEQ ID NO: 141147 - DNA, 75 bp, synthetic construct
  source 1..75: mol_type = other DNA
agaggggatttcattgcaaatgcatcaccatcgttctgaacattggataatagtttcgggtactgcaaaagtaac

SEQ ID NO: 141148 - DNA, 75 bp, synthetic construct
  source 1..75: mol_type = other DNA
agagttggaaaaatttcgcccggatatcatgcaggtctgcctggatgctataaacaacgctgaactcgataacga

SEQ ID NO: 141149 - DNA, 75 bp, synthetic construct
  source 1..75: mol_type = other DNA
aaaaaattgaaaaaaatggttttttcgttaagagttttacggaaaagccagattatcaaagagcccattcctaca

SEQ ID NO: 141150 - DNA, 75 bp, synthetic construct
  source 1..75: mol_type = other DNA
gcaacgcgctgttgctgtctgtcaaggttaagacgttggacgatgccaacttactgaacgtgtcagcgcttgcca

SEQ ID NO: 141151 - DNA, 75 bp, synthetic construct
  source 1..75: mol_type = other DNA
tattattggatgaaatgaaagatatctttcctgaagaagatatctttctatttaataatgttttggatttcattc

SEQ ID NO: 141152 - DNA, 75 bp, synthetic construct
  source 1..75: mol_type = other DNA
ccaaatatcgtgctaccgggcgtcgggttactggcggcatcgccaatgcccaggcctggttctctttaacctatc

SEQ ID NO: 141153 - DNA, 75 bp, synthetic construct
  source 1..75: mol_type = other DNA
aagcgctttggcgtggagaacgatatttatgcgccagaacggatccgtaatccacaatatatgccttaccttgag

SEQ ID NO: 141154 - DNA, 75 bp, synthetic construct
  source 1..75: mol_type = other DNA
tgcgtgaggcggcagagaaggcaatgtatgacgactggggatttgactcggaccttttccatgagctggtaaaac

SEQ ID NO: 141155 - DNA, 75 bp, synthetic construct
  source 1..75: mol_type = other DNA
tttcaggaatagattacgaaataaacaatatcttcaggttaaaccctaaaaaacttaaaattactgatatatatg

SEQ ID NO: 141156 - DNA, 75 bp, synthetic construct
  source 1..75: mol_type = other DNA
gcgaggcgctggacgacacgttgctgcaatatctgtccccgctggggtgggagcatatcaacctgaccggcgatt

SEQ ID NO: 141157 - DNA, 75 bp, synthetic construct
  source 1..75: mol_type = other DNA
gaacaaacagtccggcatatttatcagaactataaatcagatgccactgccggtgatgctgccaacttactgatt

SEQ ID NO: 141158 - DNA, 75 bp, synthetic construct
  source 1..75: mol_type = other DNA
agaacaagcatcagcagcagttccaggcatccggcaaggcgatcaatgccaaggtgcggctgttcgggcgcatcg

SEQ ID NO: 141159 - DNA, 75 bp, synthetic construct
  source 1..75: mol_type = other DNA
cggacaggaatggcatttactcattaattctgttgaatggcagtcagatgatgagactgatgatgaggcagaaga

SEQ ID NO: 141160 - DNA, 75 bp, synthetic construct
  source 1..75: mol_type = other DNA
gttttggccatgaattattccccgtgacaaacaaatataatgcatggagatggaaaaataaaaaaataatagata

SEQ ID NO: 141161 - DNA, 75 bp, synthetic construct
  source 1..75: mol_type = other DNA
ttgctcaagatcgcccgcgaaggcggccagatgacgcccgccgacctggccaagttcgagtcgcagcggcgttac

SEQ ID NO: 141162 - DNA, 75 bp, synthetic construct
  source 1..75: mol_type = other DNA
acggtaacgcagttgcaagaacagacgttgccatttggcgtgaaattattgtgcgtaagtatttgttttttttaa

SEQ ID NO: 141163 - DNA, 75 bp, synthetic construct
  source 1..75: mol_type = other DNA
ccggtggtgtatctctttttcgaccgtctgcggctgcgtttttcgcgtaaacccaaacaaacggtaaccgagtaa

SEQ ID NO: 141164 - DNA, 75 bp, synthetic construct
  source 1..75: mol_type = other DNA
ttagagcggcgtaggcgaattctttatactccggatggaagtaattgggttggaaaactagatttgatcttgaaa

SEQ ID NO: 141165 - DNA, 75 bp, synthetic construct
  source 1..75: mol_type = other DNA
ctcgcgtgattccggtatctgggacgatgataagggagttcgtaatacgctggtgaacgaaataattcgcctggc

SEQ ID NO: 141166 - DNA, 75 bp, synthetic construct
  source 1..75: mol_type = other DNA
aaaccttgtttacccagtggagggtaaaggctacgacacaatccctctcgatatggcgctggagcgtgaaatcat

SEQ ID NO: 141167 - DNA, 75 bp, synthetic construct
  source 1..75: mol_type = other DNA
ttatcgtgattctggtgtaatatttcgtattaagccagttgtgacagaagagaatatttccctgcatgtcaatca

SEQ ID NO: 141168 - DNA, 75 bp, synthetic construct
  source 1..75: mol_type = other DNA
tggtcagagagaggacctttttacatacaaatatgttttagatggctctttttcaaatttacagcatttacttcc

SEQ ID NO: 141169 - DNA, 75 bp, synthetic construct
  source 1..75: mol_type = other DNA
atatttatagtgtaaggcaagagtttctggattttcttaataatgatttatataaaaatgatggcgagattcttt

SEQ ID NO: 141170 - DNA, 75 bp, synthetic construct
  source 1..75: mol_type = other DNA
acaacagcgcaactaattaagacaccaacaaagtggacgaataatattctaaaatattggttctccagttgtaat

SEQ ID NO: 141171 - DNA, 75 bp, synthetic construct
  source 1..75: mol_type = other DNA
atgtccacaccgaatccactggagaaaacgaaaggcgccgggacaacgttctggatgtacaccggggctggggat

SEQ ID NO: 141172 - DNA, 75 bp, synthetic construct
  source 1..75: mol_type = other DNA
ccgtttgcgtctgcattgtcagacacggactggctgcgactggcaatggtgaaggatttgcagccgggcgaaatg

SEQ ID NO: 141173 - DNA, 75 bp, synthetic construct
  source 1..75: mol_type = other DNA
atggactaacaattatggaatcaataaaacctgtgcttttgattttaaaaacaattcattttctaactccaggtt

SEQ ID NO: 141174 - DNA, 75 bp, synthetic construct
  source 1..75: mol_type = other DNA
atatccgcatcccgtatgccacggacccggcaggcaaccgcctgcccgacccggagctgcacccggacagcaccc

SEQ ID NO: 141175 - DNA, 75 bp, synthetic construct
  source 1..75: mol_type = other DNA
gaactcgatgctgatatccctgtctccggcaacgatgaacttgggagaattgccaacctgctccgccagaccatt

SEQ ID NO: 141176 - DNA, 75 bp, synthetic construct
  source 1..75: mol_type = other DNA
cgaaaatgtgagatcgttatcgtcttattccagtaccatcacattacatcagacggtttattccttgtgggagct

SEQ ID NO: 141177 - DNA, 75 bp, synthetic construct
  source 1..75: mol_type = other DNA
tcagccaggaaatatacccacagctatatattcctgagatattttatgaggcctgcaaacatctccagtcatttt

SEQ ID NO: 141178 - DNA, 75 bp, synthetic construct
  source 1..75: mol_type = other DNA
ttatcatcaggagacgtcacaaaatgcaaaatatagtgaaacagacaagaaaaaaagtcaccttaaccaggaaat

SEQ ID NO: 141179 - DNA, 75 bp, synthetic construct
  source 1..75: mol_type = other DNA
atgatccgcctcattaaagaacgcttctggctgtatgacgggcatgattaccggaaagtgagggagatttatatt

SEQ ID NO: 141180 - DNA, 75 bp, synthetic construct
  source 1..75: mol_type = other DNA
atttaatgagctacaacagacaaccaataccgctagtcgtcttcaggtgaggaagcaaattgaacaacggctaca

SEQ ID NO: 141181 - DNA, 75 bp, synthetic construct
  source 1..75: mol_type = other DNA
gtgcgggctgacggtggagcaactggccagacaggtggagccggaatacacaccggcgcgaaaagttcattttta

SEQ ID NO: 141182 - DNA, 75 bp, synthetic construct
  source 1..75: mol_type = other DNA
ttgacgggcggacgcaacgttatcattatgacctgaccggaaaactcacgcagagtgaagatgaggggcttgtca

SEQ ID NO: 141183 - DNA, 75 bp, synthetic construct
  source 1..75: mol_type = other DNA
gagaaaattaatcaacagcaacgtcaactgggacaggaaatatgcgagcgtatcgcgacagaaaaaaatcttcgt

SEQ ID NO: 141184 - DNA, 75 bp, synthetic construct
  source 1..75: mol_type = other DNA
cttttaccactgacaaagctgtaggtttgggtattggcctttcgattagtcattctattatgcgtcagtgccagg

SEQ ID NO: 141185 - DNA, 75 bp, synthetic construct
  source 1..75: mol_type = other DNA
ttaaccaacaggtcgccagtagtgacagactgcttaacaagctcgataacgcattgaacaacaacaatcaggaaa

SEQ ID NO: 141186 - DNA, 75 bp, synthetic construct
  source 1..75: mol_type = other DNA
cagcgcgatatcctgggagaaatggagatctctgcccgcatgatgatcaccgggggggatccgaaggaagaggcg

SEQ ID NO: 141187 - DNA, 75 bp, synthetic construct
  source 1..75: mol_type = other DNA
tttaaggcactgacagaggaacagaaagcggtgctgctgtcagccggcaaactgtcggggtgttacacggaaggg

SEQ ID NO: 141188 - DNA, 75 bp, synthetic construct
  source 1..75: mol_type = other DNA
cagaagctgtagagtgggttggtaaagatgtattctatataggaagtgagaaaaacagcacagcctggatggtaa

SEQ ID NO: 141189 - DNA, 75 bp, synthetic construct
  source 1..75: mol_type = other DNA
accaatatttcaggcagtaatttttataatcaatataccagtgcttatgatgctgaactttttcgcctatttgag

SEQ ID NO: 141190 - DNA, 75 bp, synthetic construct
  source 1..75: mol_type = other DNA
acaggcgcaacataaacctcgtctggtggtgtttcacgggctggaaggcagtctcaacagcctcagcgttacttg

SEQ ID NO: 141191 - DNA, 75 bp, synthetic construct
  source 1..75: mol_type = other DNA
gtgtcccactgctttgatttgtcagaagtgacgctgcaaaactggcagcgtcgcaaggtggatattgaaccggat

SEQ ID NO: 141192 - DNA, 75 bp, synthetic construct
  source 1..75: mol_type = other DNA
tggtggcgctggggacactgttttccacgttctggatcctgtcatccaatagctggatgcagactccacagggtt

SEQ ID NO: 141193 - DNA, 75 bp, synthetic construct
  source 1..75: mol_type = other DNA
aaggagctctatcacttctggtcaaaaatttttgcagtaaactttggtatgggtgttgtttccggtctggttatg

SEQ ID NO: 141194 - DNA, 75 bp, synthetic construct
  source 1..75: mol_type = other DNA
tgcgctctggctgcgctacaggcagcgcgtctacacctcgcgcccgttcctgcgctttgcgctatggatgggacc

SEQ ID NO: 141195 - DNA, 75 bp, synthetic construct
  source 1..75: mol_type = other DNA
gggcgttaatgaaagcgcatcagtgcagcgaactggaagccgcatttcatgtggcccggaagctggacaggctgc

SEQ ID NO: 141196 - DNA, 75 bp, synthetic construct
  source 1..75: mol_type = other DNA
cacccgccgcgactgcagcgaggtgcgaagcttcctgaaggacggccataaactctaccgcagcacgctggcgtt

SEQ ID NO: 141197 - DNA, 75 bp, synthetic construct
  source 1..75: mol_type = other DNA
gcctcattccgatccggagaacggggtgtggtggattgatgatctgccacattgtgccgtggtggtggagaagct

SEQ ID NO: 141198 - DNA, 75 bp, synthetic construct
  source 1..75: mol_type = other DNA
taagaaagggattgttcttgacgccggtgatgcaaataactttaccaatgtaacttttggtttgcttgatgtgtg

SEQ ID NO: 141199 - DNA, 75 bp, synthetic construct
  source 1..75: mol_type = other DNA
tttattcaccgcgcagcaaaaggttacgatcatggtctggaatgggttggtcttaagcttagtcgtgctcgcgtg

SEQ ID NO: 141200 - DNA, 75 bp, synthetic construct
  source 1..75: mol_type = other DNA
gggacatgagtttgctcatgcgcagtattaccttcttgataaggaaaatttcatggctcttttaagccgaacaga

SEQ ID NO: 141201 - DNA, 72 bp, synthetic construct
  source 1..72: mol_type = other DNA
atgcgatacagcaagagcgacaacttaaaagcgataactgctgacgtaaaatcggctatttgcattctaggg

SEQ ID NO: 141202 - DNA, 75 bp, synthetic construct
  source 1..75: mol_type = other DNA
tgtgttacaggatttgtttcaggttgcagccagggcgggcattagtgttgatttaaatactgacagcactgaagc

SEQ ID NO: 141203 - DNA, 75 bp, synthetic construct
  source 1..75: mol_type = other DNA
ttaaggactcgcagtacagcaggtgcatatacatatattaatacacctgaaactcatttttctggccttataaaa

SEQ ID NO: 141204 - DNA, 75 bp, synthetic construct
  source 1..75: mol_type = other DNA
atgccatgccgtatgccgaagcgggcaagctggtgaccttcggcattgtgccggatctacctgaaaccggttatg

SEQ ID NO: 141205 - DNA, 75 bp, synthetic construct
  source 1..75: mol_type = other DNA
gaaattatctttaacggtcagagaatcgataccttgtcacccggcaaacttcaggcattgcgccgggatattcag

SEQ ID NO: 141206 - DNA, 75 bp, synthetic construct
  source 1..75: mol_type = other DNA
cattcgagcaattttcccgaacggttcggacttctaaactggcttttgtgaaggaaaacaagggctttgttgaat

SEQ ID NO: 141207 - DNA, 75 bp, synthetic construct
  source 1..75: mol_type = other DNA
gcgcactatgtctaccgctacgatgaatacggcaggctggcggagaagacggaccgcatcccggaaggggtgata

SEQ ID NO: 141208 - DNA, 75 bp, synthetic construct
  source 1..75: mol_type = other DNA
tcccacaggcagaaggaattactattgacgattacgacaacctatacatcgtaagtgaacctaatttattctatc

SEQ ID NO: 141209 - DNA, 75 bp, synthetic construct
  source 1..75: mol_type = other DNA
gcggcaaaacgtcatagcccggagagcgacccgttaatgctggtattggcggcggatcatgtgattgccgatgaa

SEQ ID NO: 141210 - DNA, 75 bp, synthetic construct
  source 1..75: mol_type = other DNA
cgaagccagcgggaagacgtttaccatcaactgcacagggaacccggaccagaatggtttctatcagcattctgt

SEQ ID NO: 141211 - DNA, 75 bp, synthetic construct
  source 1..75: mol_type = other DNA
ccagtatttggatttatgatttttgtaagatctcatggttacttcataggcctctgttatctaatggcattaaac

SEQ ID NO: 141212 - DNA, 75 bp, synthetic construct
  source 1..75: mol_type = other DNA
taagccactgcattcaatgggcggaactggtgaaagaagcggtccagatatatgggggaatccgttctatcatca

SEQ ID NO: 141213 - DNA, 75 bp, synthetic construct
  source 1..75: mol_type = other DNA
ggccgctgggttgggcttgagtacatcaagcgcaacggcaaagccattctcaacgcacagtggttgcaagccagc

SEQ ID NO: 141214 - DNA, 75 bp, synthetic construct
  source 1..75: mol_type = other DNA
attgaccgcacatattgctgatgcgatccatcagcgggcaatggagcggaaaatacaggtgacggaactcgattg

SEQ ID NO: 141215 - DNA, 75 bp, synthetic construct
  source 1..75: mol_type = other DNA
ccgcagcaaccttaagcgccctgagctttgcctcctgggctgatactctgaccgttggcgcgtctaacgtgccgc

SEQ ID NO: 141216 - DNA, 75 bp, synthetic construct
  source 1..75: mol_type = other DNA
aaagagaaaaaaccgttaattataagtaaagcaaaaaacatacgtgagaaaataaccattaatacacttaaatca

SEQ ID NO: 141217 - DNA, 75 bp, synthetic construct
  source 1..75: mol_type = other DNA
aaaatgaagggatcacccaagcggaaatgattgaaaggcttatcgaaatggaatcagccaagcttggaataggcg

SEQ ID NO: 141218 - DNA, 75 bp, synthetic construct
  source 1..75: mol_type = other DNA
gagagcgcgcctgacgccaccgccgacaacggcgccgcgccggtgcgttttctggtgatggccaaccaggaaagc

SEQ ID NO: 141219 - DNA, 75 bp, synthetic construct
  source 1..75: mol_type = other DNA
cgatggcgctcgataaaaacggcgcggcgaagcaggtggtcgccgaccagatggcgcgccagtacgccattcaac

SEQ ID NO: 141220 - DNA, 75 bp, synthetic construct
  source 1..75: mol_type = other DNA
gttgcagttcctgggctttttacagcagcaacagctgctgcgccgcggcgcgttcaaagcgcgcggctcgctctg

SEQ ID NO: 141221 - DNA, 75 bp, synthetic construct
  source 1..75: mol_type = other DNA
atgcgctttgacggctactttattctcagcgatacgctggactaccctggcctgcacgaacgggcgggcaactgg

SEQ ID NO: 141222 - DNA, 75 bp, synthetic construct
  source 1..75: mol_type = other DNA
gccagcaaaccagttcacctggcaccctgtgtcgcgcacggtgggtaatgtcaaaaaccagggcgcggagttaat

SEQ ID NO: 141223 - DNA, 75 bp, synthetic construct
  source 1..75: mol_type = other DNA
cggcactgcggcggccatgtcgtccacggcgctggtcagccgacaactggccgaccaaggtgagctcaccacccg

SEQ ID NO: 141224 - DNA, 75 bp, synthetic construct
  source 1..75: mol_type = other DNA
ccttattacaggcggttcgcgctgaatttccggagatcgttatctatcttcatgaaaatagtggtgcagtgctta

SEQ ID NO: 141225 - DNA, 75 bp, synthetic construct
  source 1..75: mol_type = other DNA
tgcgtcacggggaactggtttccctggcctgggaagatatcgacctgaaggcgggaacaattaccgtcaggcgta

SEQ ID NO: 141226 - DNA, 75 bp, synthetic construct
  source 1..75: mol_type = other DNA
agctgcaacctggactcagcaggaactggagaagatcgcacgtctgaacatcaacctgcagaccaaaaagcagga

SEQ ID NO: 141227 - DNA, 75 bp, synthetic construct
  source 1..75: mol_type = other DNA
gcttcaaattcggaccgctttgaacggttatggaagccgtcaaaaagggcgaaaaagcaactttttgaccgattt

SEQ ID NO: 141228 - DNA, 75 bp, synthetic construct
  source 1..75: mol_type = other DNA
aaggcattccgccgaaggaggatgacaggtgggcggaagggaaggacggggagaagaaggctgacaaagtctccc

SEQ ID NO: 141229 - DNA, 75 bp, synthetic construct
  source 1..75: mol_type = other DNA
acggtattggcgggacagggaaatacaataaggcgtcatcaggcccagcgacaggaaataatggaaatcagggat

SEQ ID NO: 141230 - DNA, 75 bp, synthetic construct
  source 1..75: mol_type = other DNA
ggccatctttcctgttattcgggcgcttgaattgcataaaattaagcatctattaattgttacgtcgacaattaa

SEQ ID NO: 141231 - DNA, 75 bp, synthetic construct
  source 1..75: mol_type = other DNA
tttcactctgtttcacgatcaaatttatgtgggacacttggacttggtgatgatcaggcgattggcattgaaagc

SEQ ID NO: 141232 - DNA, 75 bp, synthetic construct
  source 1..75: mol_type = other DNA
gttcacgccactgaaaccggtgtttgactggctgggcgaaaagttacaggccgcgtggcagtggtttaaaaacct

SEQ ID NO: 141233 - DNA, 75 bp, synthetic construct
  source 1..75: mol_type = other DNA
tgtgttttatcccatatttagggagagctgattgttgggataaggctggtgaaaggtacaacattccatcgagtt

SEQ ID NO: 141234 - DNA, 75 bp, synthetic construct
  source 1..75: mol_type = other DNA
aacgccaccggatgccgggacgaatatcatcagcggcgataagttcagttatttttatatcgcgtcggatggcgt

SEQ ID NO: 141235 - DNA, 75 bp, synthetic construct
  source 1..75: mol_type = other DNA
tgtggttatgacagtgtttcatattttatttcctgttttaaaaaacagttcaatattacaccttcggcttttatt

SEQ ID NO: 141236 - DNA, 75 bp, synthetic construct
  source 1..75: mol_type = other DNA
cgtgaggcgatggcgcaatccctgctggttacccgacaaatccataacccgcgccaggattcacgcatgttactg

SEQ ID NO: 141237 - DNA, 75 bp, synthetic construct
  source 1..75: mol_type = other DNA
acaacatccttgacaacaataagaaaaaaactggcattctgttgctggcgctgattccttttttagttttcccct

SEQ ID NO: 141238 - DNA, 75 bp, synthetic construct
  source 1..75: mol_type = other DNA
ctcaacggcaaagcgattttccacgctgccccatcgtgcgcaaaaacggcgacaaatgggagatggtctccgtcg

SEQ ID NO: 141239 - DNA, 75 bp, synthetic construct
  source 1..75: mol_type = other DNA
tgggggtgaaccttacgaatataatgcggaaaaattcctgatcacctctcttgacctgccagccagttcggaagt

SEQ ID NO: 141240 - DNA, 75 bp, synthetic construct
  source 1..75: mol_type = other DNA
aaaaaacgagatgcgggaacgggtgtcggtataggaactattactgatgttttgctggagcctttctgccgtctg

SEQ ID NO: 141241 - DNA, 75 bp, synthetic construct
  source 1..75: mol_type = other DNA
ggggttgagtcgccttttccggaactgatttttaccgatattgttatgcgtcatatggccgatatcggcatgaca

SEQ ID NO: 141242 - DNA, 75 bp, synthetic construct
  source 1..75: mol_type = other DNA
tttaaagattttattgaaaatgaagcaaacccagccattgagtcgtttaacactaattacgatcccgtcaaagcg

SEQ ID NO: 141243 - DNA, 75 bp, synthetic construct
  source 1..75: mol_type = other DNA
gatttcggcgtatctaaagttgtcggctctgtaaaagacggcattatcggtaataaaaccaacagcctgaaaact

SEQ ID NO: 141244 - DNA, 75 bp, synthetic construct
  source 1..75: mol_type = other DNA
ggttgcttctacagcctgaacgagaagatgtatgtccgcattgtggaagagatagaagcccgtaaacgcacggcg

SEQ ID NO: 141245 - DNA, 75 bp, synthetic construct
  source 1..75: mol_type = other DNA
atgggctgtattttcatcggcgtattcctgatgcctgcctcagtcagacgttttggcaagaagaaagtttatatc

SEQ ID NO: 141246 - DNA, 75 bp, synthetic construct
  source 1..75: mol_type = other DNA
gcttataacaacggcattgtgattgttgccgatcaggtcaggcttggcgaagcgccgggaggcggtcctggtatt

SEQ ID NO: 141247 - DNA, 75 bp, synthetic construct
  source 1..75: mol_type = other DNA
acaacccaagaattacagtgcggttagatgggcggaaagccggtcaagagtgtttggggaggtggggaaggcggt

SEQ ID NO: 141248 - DNA, 75 bp, synthetic construct
  source 1..75: mol_type = other DNA
caacttcactggtgttgcgttgtagtgataacaaaacagatgtctatttatcattcaatgattatatgggttcgg

SEQ ID NO: 141249 - DNA, 75 bp, synthetic construct
  source 1..75: mol_type = other DNA
atgagaaaatttattttagcctttgttataagtgcctcgtttacagcaaatgctggtgtagagaagttagggccg

SEQ ID NO: 141250 - DNA, 75 bp, synthetic construct
  source 1..75: mol_type = other DNA
attatacggaagatgaatttatcgaacttctaaataatttttttgaaccacctgaggaattgcatggcgataaat

SEQ ID NO: 141251 - DNA, 75 bp, synthetic construct
  source 1..75: mol_type = other DNA
gatggcatattatgtgcttattggtggctcaagaaatgtaatgttttccgcaatgtttattgttgctcttatttg

SEQ ID NO: 141252 - DNA, 75 bp, synthetic construct
  source 1..75: mol_type = other DNA
ttatttattttcttgaaaaatataataactgtatcatttgtctatttttcatataaggtaatatactatatatta

SEQ ID NO: 141253 - DNA, 75 bp, synthetic construct
  source 1..75: mol_type = other DNA
gttgtactggcagatccttgcagaagcagccagcatcgcccagggtaaagagcagcagaagcaggatacgataaa

SEQ ID NO: 141254 - DNA, 75 bp, synthetic construct
  source 1..75: mol_type = other DNA
tcgttgagctgttacagaaagcggcgaatggcatcgatgctgcggtgtcatttagccaggcgcagattccggaag

SEQ ID NO: 141255 - DNA, 75 bp, synthetic construct
  source 1..75: mol_type = other DNA
gtggaggtggtgaaccggaaggcgagctacgtggccacggcgatgacgggcatgcgccgcctgcgatctttatcc

SEQ ID NO: 141256 - DNA, 75 bp, synthetic construct
  source 1..75: mol_type = other DNA
ctttagatatgcctctagctcaaggagagggtgcttcaattttaacaatgcatcaaatcctacgtgtattatatg

SEQ ID NO: 141257 - DNA, 75 bp, synthetic construct
  source 1..75: mol_type = other DNA
gttgtgatgcctattataactgtaatcgcactgctagtttatttttcgcgggatgttttaatttccattctcttt

SEQ ID NO: 141258 - DNA, 75 bp, synthetic construct
  source 1..75: mol_type = other DNA
aagagggtttagtaagagccaggaaggaagggaagaagttaggccgtccggttgcggcagatacccttcagcgtg

SEQ ID NO: 141259 - DNA, 75 bp, synthetic construct
  source 1..75: mol_type = other DNA
tgatgccgtatgccacggtttatcggtataaccgtatcgcgcttgataccaatacgatggggaattccatcgatg

SEQ ID NO: 141260 - DNA, 75 bp, synthetic construct
  source 1..75: mol_type = other DNA
caggaacacatcaaaaatactggaatacctctgatgcggatacctggtatcagattgggtataccagtagttggt

SEQ ID NO: 141261 - DNA, 75 bp, synthetic construct
  source 1..75: mol_type = other DNA
cacgtctgatattacgccgaccaccagcccggtacaagtacctaagcgaaccccaaagaaacaccgcgcccgcgt

SEQ ID NO: 141262 - DNA, 75 bp, synthetic construct
  source 1..75: mol_type = other DNA
gcattgatgaaaaacagggtaaaaaccagaacttaactgcgttatcatctctttctggatttccggatgggctgg

SEQ ID NO: 141263 - DNA, 75 bp, synthetic construct
  source 1..75: mol_type = other DNA
ggtcagtccctgacgctcagaattaacgggcagacggtcatcagtggctggctggatcaggtcagtcagcggatc

SEQ ID NO: 141264 - DNA, 75 bp, synthetic construct
  source 1..75: mol_type = other DNA
acaaccgtaaacccgcaaatcactgggggtatattcatcatgctagtgaagattttttagtcttcgcacctgtat

SEQ ID NO: 141265 - DNA, 75 bp, synthetic construct
  source 1..75: mol_type = other DNA
acaaggatgccaaagacttattcgcacagagagagctattagagcgccacataaactggctttaattatttctga

SEQ ID NO: 141266 - DNA, 75 bp, synthetic construct
  source 1..75: mol_type = other DNA
tacaactggcgtgataatggcaccccaccctctttccatgagcagagatctttatcagagcgattgttcagagag

SEQ ID NO: 141267 - DNA, 75 bp, synthetic construct
  source 1..75: mol_type = other DNA
gctcaggacggcaaacttctggccagcatcgagaccaaagatgtaccgatttccctgctgctggatgaagatagc

SEQ ID NO: 141268 - DNA, 75 bp, synthetic construct
  source 1..75: mol_type = other DNA
cgattgaggaagatctggcctggcactatattttgactgcctcgaaaaaagcctatgaactctttgagagcgaag

SEQ ID NO: 141269 - DNA, 75 bp, synthetic construct
  source 1..75: mol_type = other DNA
cgccgataactgtgagatcattcctacaaatcacactttccaacaataattacaaatcattagagcatctgcaaa

SEQ ID NO: 141270 - DNA, 75 bp, synthetic construct
  source 1..75: mol_type = other DNA
tgccgggatgccaggagcgcaggccacggcgcgacagaggcggcgcgaccgttccggtcgctgcaagccgggggt

SEQ ID NO: 141271 - DNA, 75 bp, synthetic construct
  source 1..75: mol_type = other DNA
tatcacctgggttaatagcttgagcaaaaagaacatttaccacatagctgatacttttgatgaatcgattgtgag

SEQ ID NO: 141272 - DNA, 75 bp, synthetic construct
  source 1..75: mol_type = other DNA
cttaccgcctgctgagttacctggtgagcagtctgcttgcgacgcagcctgtgctgcccgccgttgccgccacgc

SEQ ID NO: 141273 - DNA, 75 bp, synthetic construct
  source 1..75: mol_type = other DNA
ttcgatctcaacactgcgcgtagcgagtcgcaaggtaatatgattgcggctgatcttcagcgtcgctcatccaga

SEQ ID NO: 141274 - DNA, 75 bp, synthetic construct
  source 1..75: mol_type = other DNA
tcagcaggaagagtttcgttctgaggttgaacgttcatccaagatattcattattggacttaaaataaatccaaa

SEQ ID NO: 141275 - DNA, 75 bp, synthetic construct
  source 1..75: mol_type = other DNA
ttcattgcagatcctgaacaaggaatgattaattttttcaatgaacgaaattgcgagacaactcacctcctaaag

SEQ ID NO: 141276 - DNA, 75 bp, synthetic construct
  source 1..75: mol_type = other DNA
caggtgcgagttttggcagcggtccatgtagtccatccaatccacctcttggtaaagatctgcttatccgcatgc

SEQ ID NO: 141277 - DNA, 75 bp, synthetic construct
  source 1..75: mol_type = other DNA
cagtagtaccacaacaacccctgccgttatcacgacaaccatgctgaaaaataccggctttttgtccagcggctt

SEQ ID NO: 141278 - DNA, 75 bp, synthetic construct
  source 1..75: mol_type = other DNA
tatccccgcaacaaaaaatctgactgagccatctgcgccatccccatcagcgaaagatatcctggatttgttgaa

SEQ ID NO: 141279 - DNA, 75 bp, synthetic construct
  source 1..75: mol_type = other DNA
cgcatgggatacaatttttttacaaaaaattgcgtaccaacgcttattctaagtaacacaatatcagaacaacgt

SEQ ID NO: 141280 - DNA, 75 bp, synthetic construct
  source 1..75: mol_type = other DNA
attgatactcgagaacatactgtccgtattttcaataaagataaagacagcacatatacttttgatgaaattcgg

SEQ ID NO: 141281 - DNA, 75 bp, synthetic construct
  source 1..75: mol_type = other DNA
tcagcggcaatgtgaatggtgtaaatggcactttcagcggtcaggtaaaaggcaatagcggaaactttgacgtaa

SEQ ID NO: 141282 - DNA, 75 bp, synthetic construct
  source 1..75: mol_type = other DNA
ttaggttcacatagaggttcattctcagggcggaattcagggggcagtacattgtttatttatgcatctggaggt

SEQ ID NO: 141283 - DNA, 75 bp, synthetic construct
  source 1..75: mol_type = other DNA
atgagtactttagatgcaaaaatcgcgggcttagggattcttcagtctattatatccagaatggcatctaattct

SEQ ID NO: 141284 - DNA, 75 bp, synthetic construct
  source 1..75: mol_type = other DNA
atccacttttttgcccgtccatattcaacggcttctttgaggagttcattttccatcgttttcttgccgagcagg

SEQ ID NO: 141285 - DNA, 75 bp, synthetic construct
  source 1..75: mol_type = other DNA
atgacgacatctgcaaagacctctgccaaaaaaatgttaatgagcgatctgatgcaaacggtcggcattttgccg

SEQ ID NO: 141286 - DNA, 75 bp, synthetic construct
  source 1..75: mol_type = other DNA
ctgctgccgggggaggcggtgtacagccgcagcgagtccctgtggctggtgcgtggcggtaaggcaacgcagccg

SEQ ID NO: 141287 - DNA, 75 bp, synthetic construct
  source 1..75: mol_type = other DNA
gtagtaaagagtttacccctaaacacgcccaatggcttcatcgtcagttcaaagatattccatctatatgtttaa

SEQ ID NO: 141288 - DNA, 75 bp, synthetic construct
  source 1..75: mol_type = other DNA
tcgatgagtggaaacccaaacggttcagtctcccaataacaaacactaccctagtgaaatacggaaaacttggat

SEQ ID NO: 141289 - DNA, 75 bp, synthetic construct
  source 1..75: mol_type = other DNA
attctgccctggactgccgcgggtgcctacatggcaggtacacttggcgttgctacattaagctatcttccgtgg

SEQ ID NO: 141290 - DNA, 75 bp, synthetic construct
  source 1..75: mol_type = other DNA
ctttttattctttcattgcaaaggctacggtatttctatgtggacctttaacattacttctgatctctcataaat

SEQ ID NO: 141291 - DNA, 75 bp, synthetic construct
  source 1..75: mol_type = other DNA
aatggtggtctgactttgttaaagctgctgataatggaagtatgattgggggtagcatgaaaggaatgcgactaa

SEQ ID NO: 141292 - DNA, 75 bp, synthetic construct
  source 1..75: mol_type = other DNA
gggcgtctcttacttctggcaactggtgatcaaaggggcgatgatcatcattgcggtgctgatcgacaaataccg

SEQ ID NO: 141293 - DNA, 75 bp, synthetic construct
  source 1..75: mol_type = other DNA
cgctcaacaatggcatgaccttaatgggcgtctcttacttctggcagctggtgatcaaaggggcggtgatcatca

SEQ ID NO: 141294 - DNA, 75 bp, synthetic construct
  source 1..75: mol_type = other DNA
ggtggacgtcctgacatggcgcaagccggtggtacggatgctgcggccttacctgcagcgttagccagtgtgaaa

SEQ ID NO: 141295 - DNA, 75 bp, synthetic construct
  source 1..75: mol_type = other DNA
cggcaaccgcccgacctatgaagccaaccgcagcgaagaagccagccatgccgatctggcctgggcaacaatgca

SEQ ID NO: 141296 - DNA, 75 bp, synthetic construct
  source 1..75: mol_type = other DNA
tccaggagctgcgcaaagtagcttccggtatggctatccacaaaaaatggcggcagacctatttttccacgccat

SEQ ID NO: 141297 - DNA, 75 bp, synthetic construct
  source 1..75: mol_type = other DNA
acgccattcttacaggatatggagaagaagctgggcgtgaaggtgaacgccttctttgccccagactacgcaggc

SEQ ID NO: 141298 - DNA, 75 bp, synthetic construct
  source 1..75: mol_type = other DNA
atgcctgatgcgacgcttaacgcgtcttatcatgcctacaggtttgtgccgaaccgtaggccggataaggcgttc

SEQ ID NO: 141299 - DNA, 75 bp, synthetic construct
  source 1..75: mol_type = other DNA
gcgtagcccatttattaatgacatcaccaaatgttctacgctacaagaatccattttgtcatagttcaatgttaa

SEQ ID NO: 141300 - DNA, 75 bp, synthetic construct
  source 1..75: mol_type = other DNA
gaccgactttcatgcactggcccttcgcccgtttggctggcgcgaagtgtggatcggttatgacccggcaaaagg

SEQ ID NO: 141301 - DNA, 75 bp, synthetic construct
  source 1..75: mol_type = other DNA
tcagagccggaatatgcaaaacaactactaagtcggaaagcacctttatctatgtggcttaagtattgggtaatt

SEQ ID NO: 141302 - DNA, 75 bp, synthetic construct
  source 1..75: mol_type = other DNA
tgaagtttgacgatgcgacagggaaagaacaggtctacatccacgcgcagaagaacatgaacaccgaggtgctga

SEQ ID NO: 141303 - DNA, 75 bp, synthetic construct
  source 1..75: mol_type = other DNA
gaatagctccagtgatctcatggggttgagaaggcagccccagaacttctggcggctatatcgcggaaaagacat

SEQ ID NO: 141304 - DNA, 75 bp, synthetic construct
  source 1..75: mol_type = other DNA
catacttcagatgataaagacgtcatcgcaattgatggaaaaacactccggcattcttatgacaagagtcgccgc

SEQ ID NO: 141305 - DNA, 75 bp, synthetic construct
  source 1..75: mol_type = other DNA
taaatgtattgatgataggttgctgaaggagttattcggactacatgtttcaggtataaaagattcagggcagcg

SEQ ID NO: 141306 - DNA, 75 bp, synthetic construct
  source 1..75: mol_type = other DNA
cagcactggctatggccttcacgctcaacgttaacgcagcaccagatccgaagtattgccagatggcagcagacg

SEQ ID NO: 141307 - DNA, 75 bp, synthetic construct
  source 1..75: mol_type = other DNA
tgcggatgctgcaacggcggaaaaagcggagctgaagttgattgcggagaaggtgaagaaggggtatgtaaaatc

SEQ ID NO: 141308 - DNA, 75 bp, synthetic construct
  source 1..75: mol_type = other DNA
tgatgaatccttaaaaccgtttgtgcgtgatgcttccggcagccgcttgaaagatctgcccaaaccgaacaaaag

SEQ ID NO: 141309 - DNA, 75 bp, synthetic construct
  source 1..75: mol_type = other DNA
tattttgggcaacgcaccagccttgcattctacgttcacttggctaaatggagatcaacagcatattttatttag

SEQ ID NO: 141310 - DNA, 75 bp, synthetic construct
  source 1..75: mol_type = other DNA
cgcaacagcatggggtagaatacgcgaccgaattagtcttgctattacagcaaattcagatatcagatgatcaaa

SEQ ID NO: 141311 - DNA, 75 bp, synthetic construct
  source 1..75: mol_type = other DNA
gacgccgcgcaaatcggtttatcccttctccgtgctcgacgacatcaccgccagcgagctgattaacgatattga

SEQ ID NO: 141312 - DNA, 75 bp, synthetic construct
  source 1..75: mol_type = other DNA
ttgagcacattcagttgtgcaaactgacgccgcgcaaatcggtttatcccttctccgtgctcgacgacatcaccg

SEQ ID NO: 141313 - DNA, 75 bp, synthetic construct
  source 1..75: mol_type = other DNA
tctggctaaagataacgactgagaaagaaatcgctggatacctcgtagatcagataatccaacgaacagatctag

SEQ ID NO: 141314 - DNA, 75 bp, synthetic construct
  source 1..75: mol_type = other DNA
gctgaacaacatgaagctctcgaggctacggtacataatgaattgaatgattttcgagttaatgtggcacgcgag

SEQ ID NO: 141315 - DNA, 75 bp, synthetic construct
  source 1..75: mol_type = other DNA
cttatcaggcctacaggtttgtgccgaaccgtaggccggataaggcgttcacgccgcatccggcagtcgtgcgca

SEQ ID NO: 141316 - DNA, 75 bp, synthetic construct
  source 1..75: mol_type = other DNA
aaacagaaaaaagcagtgacgatttgcaacgctgggctgaccgccagacaccgagcgggcgcgttgccgggctga

SEQ ID NO: 141317 - DNA, 75 bp, synthetic construct
  source 1..75: mol_type = other DNA
gcggagctgaagctgattgcggagaaagtgaagaaggggtatgagcaatccaatggcgaaacaaatgaagttgct

SEQ ID NO: 141318 - DNA, 75 bp, synthetic construct
  source 1..75: mol_type = other DNA
catgactacggacctctttcatgattacgcctgccaacaaataacacgcgcgcatcatgcccagagaaatttcgt

SEQ ID NO: 141319 - DNA, 75 bp, synthetic construct
  source 1..75: mol_type = other DNA
tcctgtgccacatgccctacacctacggcagtaatgatggcaacagcaccacggatattgaaaacagcaagctgg

SEQ ID NO: 141320 - DNA, 75 bp, synthetic construct
  source 1..75: mol_type = other DNA
tagaacatttcaatgtaatcgaagatatactcccgggccatatcacatgttatatatatgtgtttcctgaaccgt

SEQ ID NO: 141321 - DNA, 75 bp, synthetic construct
  source 1..75: mol_type = other DNA
gagctacgactcacagtatggcggcttctccgcttctgcctcagcagataccgacaatagccgacaatattcact

SEQ ID NO: 141322 - DNA, 75 bp, synthetic construct
  source 1..75: mol_type = other DNA
aaatatgcttgggagctttaacgagtattatatttatgtcattgcaccagcgcctaatttatttgatgtgaacgg

SEQ ID NO: 141323 - DNA, 75 bp, synthetic construct
  source 1..75: mol_type = other DNA
gatggctatcaacttgcagggttttcgagcaatttcccagcctggagagaaatgccatggagtacatttgctcct

SEQ ID NO: 141324 - DNA, 75 bp, synthetic construct
  source 1..75: mol_type = other DNA
gtggtctggggtgcctgttccgtcaactgtggtagccgctgtgcacttcgtctacatgttaaagataatgaagtc

SEQ ID NO: 141325 - DNA, 75 bp, synthetic construct
  source 1..75: mol_type = other DNA
gcaacgccaggaagcacgattaatgcaggaacggtatctggtagcaatatcaacgttcaaagcggtacgctcgaa

SEQ ID NO: 141326 - DNA, 75 bp, synthetic construct
  source 1..75: mol_type = other DNA
ttggcagcggcagtcacaggcgtcgcagtatatgcactccacgataataataatcatcatgacgatccgtctccg

SEQ ID NO: 141327 - DNA, 75 bp, synthetic construct
  source 1..75: mol_type = other DNA
ttttgccgctgaagtttatcaggatgaaattatgatcggcagtatgggtcagggtggtcaggcatttgtacgcgg

SEQ ID NO: 141328 - DNA, 75 bp, synthetic construct
  source 1..75: mol_type = other DNA
tatgggagactctccgacaatatctggggatagtttaactgggttatccgttggcggtgataacaatacggtcga

SEQ ID NO: 141329 - DNA, 75 bp, synthetic construct
  source 1..75: mol_type = other DNA
acgttgttgcgaaaggcgatccgcgcgcggagctggggaacaataccgagtacgacatgctggcattgcgtaaaa

SEQ ID NO: 141330 - DNA, 75 bp, synthetic construct
  source 1..75: mol_type = other DNA
gccactattaccgaccatggcggcaacatcgccctgaatggcggcgttgtgataaacgttgacggtaacgacatc

SEQ ID NO: 141331 - DNA, 75 bp, synthetic construct
  source 1..75: mol_type = other DNA
acttgcaggccataacagtatctacgcagtccttgcaatatattgaatttggacgattttgtaggcctggtaagg

SEQ ID NO: 141332 - DNA, 75 bp, synthetic construct
  source 1..75: mol_type = other DNA
aactcaggtctgcccttaacaatagctgcgtatgagaagttgttcgagcgaataaaagggattgatagcttacca

SEQ ID NO: 141333 - DNA, 75 bp, synthetic construct
  source 1..75: mol_type = other DNA
aaaataaccaaattgtggttaataacgactccgcttataacctgacctttaatcagttttccattaatggacaaa

SEQ ID NO: 141334 - DNA, 75 bp, synthetic construct
  source 1..75: mol_type = other DNA
atataaataaaaatcatgttgcaaaagatatttttaccacaaagaatacattacttatagtgtgcttttttgcgg

SEQ ID NO: 141335 - DNA, 75 bp, synthetic construct
  source 1..75: mol_type = other DNA
tctcgtgcctgttcgccgcagagcaactgctgatctggtccgccagcgcctttatcaccaaagtgctgctggtac

SEQ ID NO: 141336 - DNA, 75 bp, synthetic construct
  source 1..75: mol_type = other DNA
tatcttcaatagcgatacgcctatcgacctgatattgctcgatatctatatgcgagaacgggctcgatttactgc

SEQ ID NO: 141337 - DNA, 75 bp, synthetic construct
  source 1..75: mol_type = other DNA
ttctggcccgaatggaaccatcagccattgtgccaggcgtgtcataaccagaaaacgaagtggcttgatccggca

SEQ ID NO: 141338 - DNA, 75 bp, synthetic construct
  source 1..75: mol_type = other DNA
caataatgcctttccttcaatgatccaggcgttcactgccagcaacccattcagccgcatactgacagtgagaaa

SEQ ID NO: 141339 - DNA, 75 bp, synthetic construct
  source 1..75: mol_type = other DNA
actggctacagttgctggtgctggcgttaatcggcgtgctggcgttcttcgttaaccactaccgcgacaacgcca

SEQ ID NO: 141340 - DNA, 75 bp, synthetic construct
  source 1..75: mol_type = other DNA
tatacgctgggtggcggctcggtgatctcacagttggccacgcgcagcaacatgcagaagctgggtatggacctg

SEQ ID NO: 141341 - DNA, 75 bp, synthetic construct
  source 1..75: mol_type = other DNA
cgaatggtgtgaatctggatttcaacctgcctgaatctggcaaaaatatggatctgacctgtttatatttgctgg

SEQ ID NO: 141342 - DNA, 75 bp, synthetic construct
  source 1..75: mol_type = other DNA
tcaataacagcaaagaaaatatcagaaacacacaactgaatgctgagattcaagatttcaatagcataaagaata

SEQ ID NO: 141343 - DNA, 75 bp, synthetic construct
  source 1..75: mol_type = other DNA
acaatacagctcataataagaatctcgacaaaacaacattcgatgaacaacctggttatgaaacaagagtatcac

SEQ ID NO: 141344 - DNA, 75 bp, synthetic construct
  source 1..75: mol_type = other DNA
actggatttcacctctctgcgtaatgccgtaaccgagttcgaacagcatcgcgacgagcacacctggcaaatcga

SEQ ID NO: 141345 - DNA, 75 bp, synthetic construct
  source 1..75: mol_type = other DNA
gtcgccaggctgcctactcgagcgaaaaaccgctgtaccgccatcgaaacgggcacatactggcaaagtggccgt

SEQ ID NO: 141346 - DNA, 75 bp, synthetic construct
  source 1..75: mol_type = other DNA
ctaaaaaagggtgaaacggttggcattatcggccgtaatggctcgggcaaatctactttgttgcaaatgatttgc

SEQ ID NO: 141347 - DNA, 75 bp, synthetic construct
  source 1..75: mol_type = other DNA
taacgggtttaagtaaatgttatcaaatttatgactcaccaaaagatcgtttgatgcagatgttctttcgatctc

SEQ ID NO: 141348 - DNA, 75 bp, synthetic construct
  source 1..75: mol_type = other DNA
taagatatggcattaccagttctattactcataccaacaattttatccagtctcttggaaatttatctcaatacg

SEQ ID NO: 141349 - DNA, 75 bp, synthetic construct
  source 1..75: mol_type = other DNA
ggtataattcttaccaccgggattctgtctctgcggatgcatttgcattgcctgaagggtaacgatgagatgatg

SEQ ID NO: 141350 - DNA, 75 bp, synthetic construct
  source 1..75: mol_type = other DNA
catactgtctggcccgggagaaatgaatgcattaatagcaataatattacacaactggttttcaaattgagatca

SEQ ID NO: 141351 - DNA, 75 bp, synthetic construct
  source 1..75: mol_type = other DNA
atgtgggggaataagctgcccctgccgtgcctgcccaggctggagaagacgcgccagcgtcgcacccggcatttt

SEQ ID NO: 141352 - DNA, 75 bp, synthetic construct
  source 1..75: mol_type = other DNA
accagagctggttgaaaaaactcgcacgccgcctggggcctggtcatatcgttaatctctgctttatagtggtat

SEQ ID NO: 141353 - DNA, 75 bp, synthetic construct
  source 1..75: mol_type = other DNA
tccgttccgcacttgccctggcggtctgcatcggactgagtggaccggttttggcccaatcggcggcaagtccaa

SEQ ID NO: 141354 - DNA, 75 bp, synthetic construct
  source 1..75: mol_type = other DNA
ctggcccaatcggcggcaggttctagcccaggtgctgcagcaccctctgccgcatccaaagcggcgctgccacag

SEQ ID NO: 141355 - DNA, 75 bp, synthetic construct
  source 1..75: mol_type = other DNA
tggatacagagcaatatacaggtctggcgaatatgactgagaacggttgtttttatttaaacagaaaactcccta

SEQ ID NO: 141356 - DNA, 75 bp, synthetic construct
  source 1..75: mol_type = other DNA
aggaaacctgataatcgatggcgatgtgaatgttacgtcttatcgtgataatccgatgtcatggattaatgatca

SEQ ID NO: 141357 - DNA, 75 bp, synthetic construct
  source 1..75: mol_type = other DNA
gattcgtttgcattcagtgtgctgggtacagaaggtcacgtggtcaacaacggcacggtggtgattgccgatggg

SEQ ID NO: 141358 - DNA, 75 bp, synthetic construct
  source 1..75: mol_type = other DNA
attcagcatcctgatgtttaccacgccagaatggagctatagcagcaaggttatctatgcctttgttacctattt

SEQ ID NO: 141359 - DNA, 75 bp, synthetic construct
  source 1..75: mol_type = other DNA
ctgctctctgtacgggttatcgatgccgtcactgaccctattatgggggccattgccgaccgcacccaaagcaaa

SEQ ID NO: 141360 - DNA, 75 bp, synthetic construct
  source 1..75: mol_type = other DNA
atgggtaaaaacaatgatctgtcgttgtccaccaatatgatggatgtcaccgggaaacagtccatcggggtgacc

SEQ ID NO: 141361 - DNA, 75 bp, synthetic construct
  source 1..75: mol_type = other DNA
cgctgggtgcgctgcgtgaaatctgggagcatcgtgcagatgccgcttctggtttaccgctgctgcaacttggcg

SEQ ID NO: 141362 - DNA, 75 bp, synthetic construct
  source 1..75: mol_type = other DNA
tgcattgttggagcttggtgcggggtttaaccctgagtttaccggtcatgaaaacatttttatggcggcctcttt

SEQ ID NO: 141363 - DNA, 75 bp, synthetic construct
  source 1..75: mol_type = other DNA
gatgtcattattacagaccagggcggtaataccgcgctgaatggcggcacggtcatgaccgttgatggtgacaat

SEQ ID NO: 141364 - DNA, 75 bp, synthetic construct
  source 1..75: mol_type = other DNA
tgcagcgataagtggtactgcggtaacgaacaacgagggcacatggattgtcggaagtagcgctgaaggcaataa

SEQ ID NO: 141365 - DNA, 75 bp, synthetic construct
  source 1..75: mol_type = other DNA
tcgattgcatttagcaacacaaacaaaacggctgataccgacgtgaagcagcagtacatggagttccgcagcgaa

SEQ ID NO: 141366 - DNA, 75 bp, synthetic construct
  source 1..75: mol_type = other DNA
atgaaatagttctaacagtagcttcacttgaatatatttgggcattttccaatttcttttgggtttttacacaag

SEQ ID NO: 141367 - DNA, 75 bp, synthetic construct
  source 1..75: mol_type = other DNA
acggtttataggtgaacctagaagtactgataaagatagattatacaatgatgagttaatgtcttttattaaaaa

SEQ ID NO: 141368 - DNA, 75 bp, synthetic construct
  source 1..75: mol_type = other DNA
atgagtatgtccacatttattaaccacctgaggtcaaatggtgcgttcagcaaaaagtactggattggttttggc

SEQ ID NO: 141369 - DNA, 75 bp, synthetic construct
  source 1..75: mol_type = other DNA
atgtacggtaagccggtgagtgaactgagcgagacagagaagcagacggtctcgacactggcaacggttgctgct

SEQ ID NO: 141370 - DNA, 75 bp, synthetic construct
  source 1..75: mol_type = other DNA
tgctggtggtacctctcaatttcgaagctgcaggagcatgcagcactggtctacaaaatcttttgtgtttcagaa

SEQ ID NO: 141371 - DNA, 75 bp, synthetic construct
  source 1..75: mol_type = other DNA
gaaggctgggatgatatgcgggccgcacatcgtgcgcatgaaaatctgatgcgtaaacaggccagggaacaaaaa

SEQ ID NO: 141372 - DNA, 75 bp, synthetic construct
  source 1..75: mol_type = other DNA
cgtctgcttcaaaagatgaggcgaccagacaggcgtcagcagcaaagggcagcgccacgacggcatccacgaagg

SEQ ID NO: 141373 - DNA, 75 bp, synthetic construct
  source 1..75: mol_type = other DNA
ttggtgctcatacgcactccgttgcgattggctcacatggacacaccatcaccgttaacgctgcgggtaacgcgg

SEQ ID NO: 141374 - DNA, 75 bp, synthetic construct
  source 1..75: mol_type = other DNA
agaaagctacccagtcggcgcaccaatcccgtggccatcagataccgttccgtctggttatgccctgatgcaggg

SEQ ID NO: 141375 - DNA, 75 bp, synthetic construct
  source 1..75: mol_type = other DNA
taattccagcacttccgaaagaacagctattgatattaaaaggatctgtgggtgatgctgccaacttactgattt

SEQ ID NO: 141376 - DNA, 75 bp, synthetic construct
  source 1..75: mol_type = other DNA
attgctgcacaatatattaatgatatttatcagaatgttgattacaaaccccatcaagatgattattcttcagct

SEQ ID NO: 141377 - DNA, 75 bp, synthetic construct
  source 1..75: mol_type = other DNA
aattggtaacattagtgaaaaaaaaactaaccacttcgtcatcttcacagattttagtaagcaaagacactttaa

SEQ ID NO: 141378 - DNA, 75 bp, synthetic construct
  source 1..75: mol_type = other DNA
agtgacgggctgtaccggcggatctgtcaggtacgcggcatggagtggtcaccggaggccgaggcggaatggaaa

SEQ ID NO: 141379 - DNA, 75 bp, synthetic construct
  source 1..75: mol_type = other DNA
actgaagattgccgagaagtcgcgtcgtaccggtctgacctgggcggaagcggctgacgcggccctgaatggctc

SEQ ID NO: 141380 - DNA, 75 bp, synthetic construct
  source 1..75: mol_type = other DNA
cgtctatatcgcacgttccctgcgcgaacgcgcggccagaggtccgaccgttgtcctgcgcttcaccggtacggc

SEQ ID NO: 141381 - DNA, 75 bp, synthetic construct
  source 1..75: mol_type = other DNA
ctaaggccgcgccggaagtgattgagcgcgcgctgaatggtttgcttattcatcgggaaaagttaacctcggagc

SEQ ID NO: 141382 - DNA, 75 bp, synthetic construct
  source 1..75: mol_type = other DNA
cgacccatgatgaccccggtatccgcacggtcgtatttcttaaaggctgttcgctgggctgccgctggtgtcaga

SEQ ID NO: 141383 - DNA, 75 bp, synthetic construct
  source 1..75: mol_type = other DNA
gacaaggacattctgacgttcgtcgtgtacttcgccagcggttttaaggtcaaggcactgtccagcaacccgagc

SEQ ID NO: 141384 - DNA, 75 bp, synthetic construct
  source 1..75: mol_type = other DNA
atagtattgctcggaaaaagccagcgaagtgtaggcagaagaggcgatggctttggggaagctatgattatgact

SEQ ID NO: 141385 - DNA, 75 bp, synthetic construct
  source 1..75: mol_type = other DNA
tacgggggctgtctcaggagaagttactggcaaccaagtaaaagataaactggacaaggtagggaataaaaatgg

SEQ ID NO: 141386 - DNA, 75 bp, synthetic construct
  source 1..75: mol_type = other DNA
agtgaaaggtatggcgactaatgcagcaattggtatcagcgtaaactcagctgctcagcttgctggaaaagatcc

SEQ ID NO: 141387 - DNA, 75 bp, synthetic construct
  source 1..75: mol_type = other DNA
tgatggtcataaacgtcacggtgacagcgcctatgccatcttcctggcgtttcttgccagtaaagaagactgccg

SEQ ID NO: 141388 - DNA, 75 bp, synthetic construct
  source 1..75: mol_type = other DNA
atctgaaactggcaccgcaggagtcgcccttttatgcgaacaacggaataccggccgccgggtcggtgatccagc

SEQ ID NO: 141389 - DNA, 75 bp, synthetic construct
  source 1..75: mol_type = other DNA
caggggtgacgcagttttcccgtgaaacattctccagtgcgttagagctggggcgcaagacgctggtcacgcttg

SEQ ID NO: 141390 - DNA, 75 bp, synthetic construct
  source 1..75: mol_type = other DNA
agtaaattcatctgtactaagcgataaagcaaaagatttgggtcgttattgggttgacagacttaaattaggtag

SEQ ID NO: 141391 - DNA, 75 bp, synthetic construct
  source 1..75: mol_type = other DNA
gaaaatattttgcatctaaggcagaaactgataatttaagaaaggagtcatatcctctgaaaagaaaatgtccca

SEQ ID NO: 141392 - DNA, 75 bp, synthetic construct
  source 1..75: mol_type = other DNA
ccagcaaaccctgcgaagcggagttgacgcgcgcattgctttttaccgtattgtctaactttcttgagcaatcgc

SEQ ID NO: 141393 - DNA, 75 bp, synthetic construct
  source 1..75: mol_type = other DNA
ctcatgatgctcgtttggctcgttctgttgtgctttaaatggcctgcggcattggccttgggcatttcggttact

SEQ ID NO: 141394 - DNA, 75 bp, synthetic construct
  source 1..75: mol_type = other DNA
tgaataccactaccccgatgaacacaccgtcatccgctgtatcctgccaccggaagatgaacgcgacagacaccc

SEQ ID NO: 141395 - DNA, 75 bp, synthetic construct
  source 1..75: mol_type = other DNA
gtttgagcgcgacagccagtaccggatcacgggtgtcagtcacaccgacgggatccggcttaaactgacgtacca

SEQ ID NO: 141396 - DNA, 75 bp, synthetic construct
  source 1..75: mol_type = other DNA
aaaacgaaaataccagctatagccagattgtgttttacggcctgacaccgttgaattatctcgccaaacagcgac

SEQ ID NO: 141397 - DNA, 75 bp, synthetic construct
  source 1..75: mol_type = other DNA
atttatggaggagataccgctgtaatacatgcactggttgaaaaaggaatagttaactggcagcaccttatgaac

SEQ ID NO: 141398 - DNA, 75 bp, synthetic construct
  source 1..75: mol_type = other DNA
atggatggcatgggatggatgattattttggtacttccctttctttggatgggctatggactggcgttgttaatc

SEQ ID NO: 141399 - DNA, 75 bp, synthetic construct
  source 1..75: mol_type = other DNA
ggatgccgttattgcgaaatgcgctgcccgtatggcgcgccacaatttgatgctcaggccaaagtgatgcgtaag

SEQ ID NO: 141400 - DNA, 75 bp, synthetic construct
  source 1..75: mol_type = other DNA
aacctgccaggtcagttgcaaggataataaagatctggacgtggggccgaaattccgtcgggtatatgaatatgg

SEQ ID NO: 141401 - DNA, 75 bp, synthetic construct
  source 1..75: mol_type = other DNA
ttaataacttctgctgttaatctgccgaaatatagtgctccattttatttgaccatttgtagaattgaacctgag

SEQ ID NO: 141402 - DNA, 75 bp, synthetic construct
  source 1..75: mol_type = other DNA
cgcaccagtaacaccgggtgagatccaccgcgagcttaaacgccgtattgaaaacgccattgattacaccctgaa

SEQ ID NO: 141403 - DNA, 75 bp, synthetic construct
  source 1..75: mol_type = other DNA
tattcaacaaaaaaatgtttgtactcattataataccaggcattctgggggtgttactatcgtttgctatgtcaa

SEQ ID NO: 141404 - DNA, 75 bp, synthetic construct
  source 1..75: mol_type = other DNA
tatttcaaatgaatcgagatacgacaattaccgccggtattctgttaaaacagcttgataatgttacgcaaattg

SEQ ID NO: 141405 - DNA, 75 bp, synthetic construct
  source 1..75: mol_type = other DNA
cggtagtggccagactcgtaatgcagggaagacatcatcagatggtgctcatacccactcgctgtccggcactgc

SEQ ID NO: 141406 - DNA, 75 bp, synthetic construct
  source 1..75: mol_type = other DNA
ccgtgaggttgcggtaattaaagaactggaacgggccggtgtcatcgtgccgaagatcgtttttggtgaagggtg

SEQ ID NO: 141407 - DNA, 75 bp, synthetic construct
  source 1..75: mol_type = other DNA
aatattgctgaatatcggcgtagtgtggcaattgatctgatcaacacgctaaaccctacggaggaacagctgttg

SEQ ID NO: 141408 - DNA, 75 bp, synthetic construct
  source 1..75: mol_type = other DNA
tgtgggggctggcactcagcctgcccgcagacaccggctacccggacccgcgcggggaactggacccggaagccg

SEQ ID NO: 141409 - DNA, 75 bp, synthetic construct
  source 1..75: mol_type = other DNA
ggtcagttaagccgttacacggcggcagacggcgcggagtggctgtaccgctatgatgagcgcggcctgctcagc

SEQ ID NO: 141410 - DNA, 75 bp, synthetic construct
  source 1..75: mol_type = other DNA
gtttccacagttctgtactgccgctgcatggcctgacgggcgtgggctggagcgactcctggagcgaatacgcct

SEQ ID NO: 141411 - DNA, 75 bp, synthetic construct
  source 1..75: mol_type = other DNA
tcaccactcagggccgacgggccattgaataccactaccccgatgaacacaccgtcatccgctgtatcctgccac

SEQ ID NO: 141412 - DNA, 75 bp, synthetic construct
  source 1..75: mol_type = other DNA
cttcttttatgacgcctttccgggaatgcgcctgcgccacccggtgactgacgataccagcgatgaccgcctggc

SEQ ID NO: 141413 - DNA, 75 bp, synthetic construct
  source 1..75: mol_type = other DNA
tgctataaccggttccggtattacgagccggagagcgggatgtacctggtgagtgatccgctggggttgcagggg

SEQ ID NO: 141414 - DNA, 75 bp, synthetic construct
  source 1..75: mol_type = other DNA
cagaagcggtactccacggattacgcccaattggtatggcttttttagggggtatgttttcgcgccactgcgggc

SEQ ID NO: 141415 - DNA, 75 bp, synthetic construct
  source 1..75: mol_type = other DNA
gtcgcgccgtacaaaatcggcttcggcccgttccctggttcggtgtatcacgtaccttatccgtcagatttacac

SEQ ID NO: 141416 - DNA, 75 bp, synthetic construct
  source 1..75: mol_type = other DNA
agcggcgattgcacagaaaatccagcaacgcgcgctggcgcaggggctgctcctgctgacctgtggcgcatacgg

SEQ ID NO: 141417 - DNA, 75 bp, synthetic construct
  source 1..75: mol_type = other DNA
ctgtgctcaacattatcgacaaagaatcactctgcgaacgcgcgaataaactgggccagcgtctgacaaacacgc

SEQ ID NO: 141418 - DNA, 75 bp, synthetic construct
  source 1..75: mol_type = other DNA
aaggggggatggaatttttatcagtatccgctgaatccggttcagtatatagattcaatgggactggcatcaaaa

SEQ ID NO: 141419 - DNA, 75 bp, synthetic construct
  source 1..75: mol_type = other DNA
tggcggatatggagcgagacccaacaaaccgcctacgcccgatccaagtaaattgccggacatagcgaaacaatt

SEQ ID NO: 141420 - DNA, 75 bp, synthetic construct
  source 1..75: mol_type = other DNA
cagcccctgcgaaatggtggggtgaatttttcgggctgagtctttcagccgatgacatcgacgaactcaaggaga

SEQ ID NO: 141421 - DNA, 75 bp, synthetic construct
  source 1..75: mol_type = other DNA
aggagggataggttcaataaccgcttcagccgttacatgtggcggaggaggtggtgggggcggagttgctgaggg

SEQ ID NO: 141422 - DNA, 75 bp, synthetic construct
  source 1..75: mol_type = other DNA
attaccgcaaagatttaatgtgaatcattgcatccaaaataacgaattcattttaaatattgagataaagaaatg

SEQ ID NO: 141423 - DNA, 75 bp, synthetic construct
  source 1..75: mol_type = other DNA
cccggctcgttccggggcgtgccttttgctgtggtgaatgaggaaggcagtcatggccggcggcaggcggttcat

SEQ ID NO: 141424 - DNA, 75 bp, synthetic construct
  source 1..75: mol_type = other DNA
gtcgtctttctgccactccgcgcggggttggcgtaatgtgtaacttcttcgcccagtcggctgaaaacgccacgc

SEQ ID NO: 141425 - DNA, 75 bp, synthetic construct
  source 1..75: mol_type = other DNA
cagagagtcgcctggttaacgcttacgcttcccaggtggttaacgcgatccgggatgacgccagcgcccccgggc

SEQ ID NO: 141426 - DNA, 75 bp, synthetic construct
  source 1..75: mol_type = other DNA
cgcttgggccaggttctccaggttccattgcgtctgccgcatcgggagctggtaatggtggttctggtggtggcc

SEQ ID NO: 141427 - DNA, 75 bp, synthetic construct
  source 1..75: mol_type = other DNA
gaagggcaatcacttgtcgttactggtttcgatcagaacaatacgacgacaagtaaagccggtacgtttacgcca

SEQ ID NO: 141428 - DNA, 75 bp, synthetic construct
  source 1..75: mol_type = other DNA
tgtattgtgtctggtggcaagtttttttaataatagcatatatttatatgcagtagtttgcgcatttttacaagg

SEQ ID NO: 141429 - DNA, 75 bp, synthetic construct
  source 1..75: mol_type = other DNA
ttaaagcgcgtttctgaaaaatatggaaatgaagcaatctattttaattatcaatctggcgcgtattatcataac

SEQ ID NO: 141430 - DNA, 75 bp, synthetic construct
  source 1..75: mol_type = other DNA
gagcgtctaaaattaataaggaccagttcgattttattgctgtaatagacccatctacttttcaagcagaattta

SEQ ID NO: 141431 - DNA, 75 bp, synthetic construct
  source 1..75: mol_type = other DNA
acggagtgcagagcgaaatgctgtccattgaaagtggtacggatgcagccagcgggctggcaattgcgattctgg

SEQ ID NO: 141432 - DNA, 75 bp, synthetic construct
  source 1..75: mol_type = other DNA
tcaatctgaaagaagggcaatcacttgtcgttactggtttcgatcagaacaatacgacgacaagtaaagccggta

SEQ ID NO: 141433 - DNA, 75 bp, synthetic construct
  source 1..75: mol_type = other DNA
ttgttgccatgcctcagggagcgtggacgcgtctggacagcaatggtgttgatgttggtggctgtattaacacgc

SEQ ID NO: 141434 - DNA, 75 bp, synthetic construct
  source 1..75: mol_type = other DNA
actgattgttaaccaggcgggtaacgctctgttaaaccagcatggagcaaccaatcgtacccgtaagattctcgc

SEQ ID NO: 141435 - DNA, 75 bp, synthetic construct
  source 1..75: mol_type = other DNA
acggtgaacaaactgttcgtgcaatccagactttgccagtactaaccggtcatttcggcttacctggtacgaaca

SEQ ID NO: 141436 - DNA, 75 bp, synthetic construct
  source 1..75: mol_type = other DNA
tgcgtttttttattgccgaaaaaccgggtgcagagcccgtctgggtggtttggcggcggcttcgatttaacccct

SEQ ID NO: 141437 - DNA, 75 bp, synthetic construct
  source 1..75: mol_type = other DNA
gggtggtgattatcgatccgcgctataccgactcagtggtcaccgagcatgccgaatggttgccgatccgcccta

SEQ ID NO: 141438 - DNA, 75 bp, synthetic construct
  source 1..75: mol_type = other DNA
tattatttgattcagcggcgtgatagtcgccagacaccactgaccgcgtcattaatcacgcaatttcggcgagaa

SEQ ID NO: 141439 - DNA, 75 bp, synthetic construct
  source 1..75: mol_type = other DNA
ggttgtgctattgcgattattgcaagctgctttatgtggatgcttcacgtgattcctgccagtttcatgccgcgc

SEQ ID NO: 141440 - DNA, 75 bp, synthetic construct
  source 1..75: mol_type = other DNA
gtgttctgctttcgggaactagtgctgtggtactttcccaatcgactattgatgctgcgttgcaatgcgcttggt

SEQ ID NO: 141441 - DNA, 75 bp, synthetic construct
  source 1..75: mol_type = other DNA
tcttcgtaagaaaactaatggccatcctcttcacgttatttatgctacatcagaattgaaacattcgggtcgcag

SEQ ID NO: 141442 - DNA, 75 bp, synthetic construct
  source 1..75: mol_type = other DNA
gcgtaccgaatattggcgatatccgcatcactggtggaaatggaggcgacggtcagtccgggaatatcagcgtca

SEQ ID NO: 141443 - DNA, 75 bp, synthetic construct
  source 1..75: mol_type = other DNA
ctgcaaggctacatccaataatgaaacgtttttcggcgctggcggtggggccggtggaacaataatttcaataat

SEQ ID NO: 141444 - DNA, 75 bp, synthetic construct
  source 1..75: mol_type = other DNA
actaatattgaaactggcgtttgctgtgacttggttgttataaaccaagaggtttcttctttgcctcgctttatt

SEQ ID NO: 141445 - DNA, 75 bp, synthetic construct
  source 1..75: mol_type = other DNA
atggcatatttgcgatcccggcggtgtactgaccccagaaagttggacagttaaacacgaggcatataggtctga

SEQ ID NO: 141446 - DNA, 75 bp, synthetic construct
  source 1..75: mol_type = other DNA
gaaaacttgtgcactggtgctatggtgtgctgaaaacgcagttaccattcgacgctgaacacaaccaacaaagtt

SEQ ID NO: 141447 - DNA, 75 bp, synthetic construct
  source 1..75: mol_type = other DNA
cttacatacacaattggaggcatgtgctgcccactacaaagtactgggaaagccatttgtgctcattcttgatgg

SEQ ID NO: 141448 - DNA, 75 bp, synthetic construct
  source 1..75: mol_type = other DNA
tggaacgagaccggattgatccttctaagatcccagaacctcagcgcaccttggtagaagttgaactcggcggcg

SEQ ID NO: 141449 - DNA, 75 bp, synthetic construct
  source 1..75: mol_type = other DNA
acgtgggcacaggggggggatacccgatggcatatttgcgaccctggcggtcaacgtttaggtgggcagggggca

SEQ ID NO: 141450 - DNA, 75 bp, synthetic construct
  source 1..75: mol_type = other DNA
accgtgcactggtacctgaacaaccagacctggtggcaacgcgtgctggacggctcctatgccggcgagcgtctg

SEQ ID NO: 141451 - DNA, 75 bp, synthetic construct
  source 1..75: mol_type = other DNA
gatgaagtccgcgtggtggactgcctgacctatgccggcaacctcgaatccctggagccggtggctgggagcgaa

SEQ ID NO: 141452 - DNA, 75 bp, synthetic construct
  source 1..75: mol_type = other DNA
atgaaaattcttgttactggtggtgcaggctttatcggttctgctgtggttcgtcatatcattgaaaatacccgg

SEQ ID NO: 141453 - DNA, 75 bp, synthetic construct
  source 1..75: mol_type = other DNA
ctggcaggccggacaacgcagccaggccgatacgttaatgcgcaatctggcgcagcagaagccgaacaacccgga

SEQ ID NO: 141454 - DNA, 75 bp, synthetic construct
  source 1..75: mol_type = other DNA
gcgccagtcactgattgaagcctgtgaacaaaaaggtagcggtacgcttgtccatccgacactgggcgaattaac

SEQ ID NO: 141455 - DNA, 75 bp, synthetic construct
  source 1..75: mol_type = other DNA
tgcgattggttaaatgtacttgagtataacgaggagaaaatatataaaatatcatccgtgatgcaggcatgtagg

SEQ ID NO: 141456 - DNA, 75 bp, synthetic construct
  source 1..75: mol_type = other DNA
atatcaccctgaaaatcgaccctgctgtcgtgctggcaacccgtcattatgtagatcaacaaatagagattcatg

SEQ ID NO: 141457 - DNA, 75 bp, synthetic construct
  source 1..75: mol_type = other DNA
cggtcgctttcccacaccgaacacgccaccgtccacgtccacacaccacctccacccacgtcaccacagtagccg

SEQ ID NO: 141458 - DNA, 75 bp, synthetic construct
  source 1..75: mol_type = other DNA
gtccggaaatatcggcgtcagcggtgaaggcggaacatcgcactggggcggcggtggacgcgcaggcgctggcgg

SEQ ID NO: 141459 - DNA, 75 bp, synthetic construct
  source 1..75: mol_type = other DNA
caggctttatcggctctgctgtagttcgtcatatcattgaaagtactctggatgaagtccgcgtgatggactgcc

SEQ ID NO: 141460 - DNA, 75 bp, synthetic construct
  source 1..75: mol_type = other DNA
accgtgcactggtatctgaacaaccagacctggtggcagcgcgtgctggacggctcctatgccggtgagcgtctg

SEQ ID NO: 141461 - DNA, 75 bp, synthetic construct
  source 1..75: mol_type = other DNA
tttttgcttatagtacagctgtcggctatccagaagtgccaacacatggtgctggtttccaggcctgttacaacg

SEQ ID NO: 141462 - DNA, 75 bp, synthetic construct
  source 1..75: mol_type = other DNA
aaactgaaatcggcggcgccactggcgttggcgtacgtattctggacagccagagcggcgaagtaactttaggta

SEQ ID NO: 141463 - DNA, 75 bp, synthetic construct
  source 1..75: mol_type = other DNA
ctttgcaggaagctagatattccttcattgaaaatctaaacaaagccctgcaatcagcacagagaaattacgggg

SEQ ID NO: 141464 - DNA, 75 bp, synthetic construct
  source 1..75: mol_type = other DNA
atgttgagtgtaaaaactatacgtcagaaattgcaaatcctgagttagatcagttatctggtaggttctcaagga

SEQ ID NO: 141465 - DNA, 75 bp, synthetic construct
  source 1..75: mol_type = other DNA
actgtttgccgagcttgcggtgaccaacaagcgtaagtcccaggacgaggataacgaaacgtgggcactgtttac

SEQ ID NO: 141466 - DNA, 75 bp, synthetic construct
  source 1..75: mol_type = other DNA
tattttaaagatgagaagccaacttatgctcgaatgacagcacatctcccgaacaaagatgagtcttacgaatgt

SEQ ID NO: 141467 - DNA, 75 bp, synthetic construct
  source 1..75: mol_type = other DNA
attacagatttgcacccgacatcttcaaatggcgatctggacgtcaccatcgacgagcgcgatggtaatcagtag

SEQ ID NO: 141468 - DNA, 75 bp, synthetic construct
  source 1..75: mol_type = other DNA
gaacttaatcactggttatattatatattcccagtaagccgcttggtagaatttatttgcggcatgattatttac

SEQ ID NO: 141469 - DNA, 75 bp, synthetic construct
  source 1..75: mol_type = other DNA
agctgtttttttatttaatgtttattccgttgatttatacatcaattacaaagaaagtaatcactgcaatatcaa

SEQ ID NO: 141470 - DNA, 75 bp, synthetic construct
  source 1..75: mol_type = other DNA
ttaacgctagcgcatttttgggtagtggaagttataatgaaaataaatcttctaaacacatggagctactagctc

SEQ ID NO: 141471 - DNA, 75 bp, synthetic construct
  source 1..75: mol_type = other DNA
ttaagaaaatcggtgattcagcttctcttctaagtaaacctaaatctattctaaaacgtaaagactttaaagagc

SEQ ID NO: 141472 - DNA, 75 bp, synthetic construct
  source 1..75: mol_type = other DNA
tcggttatctcgccaccaatggcctaaataacttagtcccagaattccaaattctatgtaatgctgatcactatg

SEQ ID NO: 141473 - DNA, 75 bp, synthetic construct
  source 1..75: mol_type = other DNA
accaacagctatcaggaactgaatttcaaagctcgtatggaatccccaagcaaagatgccaccccgggcaacgtt

SEQ ID NO: 141474 - DNA, 75 bp, synthetic construct
  source 1..75: mol_type = other DNA
caaacggctataccggtgatttcataatggttcacgggaattgtgtttcggcgggctgctatgccatgaccgatg

SEQ ID NO: 141475 - DNA, 75 bp, synthetic construct
  source 1..75: mol_type = other DNA
atctttggctgagcctttcactattcacctgcaagactgcatgttgagccagggtggaaccacttattcaaaagc

SEQ ID NO: 141476 - DNA, 75 bp, synthetic construct
  source 1..75: mol_type = other DNA
atttaaaggtgaagttatctctgctccatgttcaattaaaccaggtgacgaagacttaactgtaaatctgggtga

SEQ ID NO: 141477 - DNA, 75 bp, synthetic construct
  source 1..75: mol_type = other DNA
ttaatctcatctatagatatcgaatggcgtcaccagtacgccctttacccagcacctttttcatgggttaacagc

SEQ ID NO: 141478 - DNA, 75 bp, synthetic construct
  source 1..75: mol_type = other DNA
caattgctgcaactcttttcgcagtcgctggttctagcgtggctgcaagcaatattgcaactgatactgctactg

SEQ ID NO: 141479 - DNA, 75 bp, synthetic construct
  source 1..75: mol_type = other DNA
cgtcttttctactgcaacaggtaatggcagcgtaagcccaggtgattataatatgcctgttactctgtctttcaa

SEQ ID NO: 141480 - DNA, 75 bp, synthetic construct
  source 1..75: mol_type = other DNA
catcgacggcgggcaatttaatgctctgcctggttgacccgcacactgaggcaacgaagattgagttgacctcta

SEQ ID NO: 141481 - DNA, 75 bp, synthetic construct
  source 1..75: mol_type = other DNA
agttggtgctcacgcccagtaactttgatcaaagtataaatgccgcgaaggcagaggtcggtgacagcactacga

SEQ ID NO: 141482 - DNA, 75 bp, synthetic construct
  source 1..75: mol_type = other DNA
gtcctttaacatcaacaatgaagactgggcgcgaccagatgcaacgaacaaagcgaacagttcgatctcaggctg

SEQ ID NO: 141483 - DNA, 75 bp, synthetic construct
  source 1..75: mol_type = other DNA
gtccggggccaatcccgtatcctcaccgattattaactacgaaaactgggcttctgcgcatattactgatgccag

SEQ ID NO: 141484 - DNA, 75 bp, synthetic construct
  source 1..75: mol_type = other DNA
aacgcattcatcggtaaacctcggaacagggaacgtcgacagttatagcggtattaaacaaaactatctctcgtg

SEQ ID NO: 141485 - DNA, 75 bp, synthetic construct
  source 1..75: mol_type = other DNA
cacaagtgcgcactacgagtgatttcaaaagctcgacagcagatgatctgctgctacagttcctgacgccggttg

SEQ ID NO: 141486 - DNA, 75 bp, synthetic construct
  source 1..75: mol_type = other DNA
caatcaacgctcgtcgtgcccgggctaaaggtgggttgtgttttagcgtcgatttagatccgcgttgggtcaaga

SEQ ID NO: 141487 - DNA, 75 bp, synthetic construct
  source 1..75: mol_type = other DNA
tttcagacatcggaccgtagcggcagcccgaaaccgcgccagcgggttcggcggagactggcgggtgcgccagca

SEQ ID NO: 141488 - DNA, 75 bp, synthetic construct
  source 1..75: mol_type = other DNA
tatcgactgcaccaacggtaaggtcaactggggcatcgggatcggcctggccggcagcacctacgataatggcta

SEQ ID NO: 141489 - DNA, 75 bp, synthetic construct
  source 1..75: mol_type = other DNA
cggcgctcgcaatatattaacagcaggttttgaagtcatggcggcaggacaaatattgccgtcagtccgtaaagg

SEQ ID NO: 141490 - DNA, 75 bp, synthetic construct
  source 1..75: mol_type = other DNA
gagcttctagtctcaaaaaactggaacaatgttggtgatattcgcaaccataatgagaatataataagcataaaa

SEQ ID NO: 141491 - DNA, 75 bp, synthetic construct
  source 1..75: mol_type = other DNA
agatggttaccattatattagctgtgctggcaattgtagcaacgattgtagcaggcatacccgcatacctcttgt

SEQ ID NO: 141492 - DNA, 75 bp, synthetic construct
  source 1..75: mol_type = other DNA
atgaaaaaacgcatcactttcagcgtaaacaatagttctactattgatgcaattgacgactatagcaatgcaaaa

SEQ ID NO: 141493 - DNA, 75 bp, synthetic construct
  source 1..75: mol_type = other DNA
cgcgacctgaaagcgatttatcaggttcccacggaagaggcaggccagcaggcactggaagcgtttgctgcggct

SEQ ID NO: 141494 - DNA, 75 bp, synthetic construct
  source 1..75: mol_type = other DNA
ctgtagatgttgtcatttcaaagtcgatcattgaactcctcagcgcaggtgagcgcctatatgttaacccagtta

SEQ ID NO: 141495 - DNA, 75 bp, synthetic construct
  source 1..75: mol_type = other DNA
ataacgccgtcgatatccgcaactatctggtcggtaatgactggatccgcgcatttcgtcaggcgtttgacgacg

SEQ ID NO: 141496 - DNA, 75 bp, synthetic construct
  source 1..75: mol_type = other DNA
atgaaaacggccagcaatcggtggatattgaccgtattgatcagcacgttgtcaatgttgatgcgctgaatttca

SEQ ID NO: 141497 - DNA, 75 bp, synthetic construct
  source 1..75: mol_type = other DNA
atgatgccgttgatatccgcaactatctggtcggtaatgactggatccgtgcatttcgtcaggcgtttgacgatg

SEQ ID NO: 141498 - DNA, 75 bp, synthetic construct
  source 1..75: mol_type = other DNA
tcagcaaaaagtggaacaggtcagttccataaaataataagcgccctacctgagtcggaacgcgcgccagcaatt

SEQ ID NO: 141499 - DNA, 75 bp, synthetic construct
  source 1..75: mol_type = other DNA
aggtcttaatggtcctgctggattccattctatgatccgcgcgctgccagaatcagagcgtgttcctgctatatc

SEQ ID NO: 141500 - DNA, 75 bp, synthetic construct
  source 1..75: mol_type = other DNA
gaaaatactacggcagggatatttaaggtcggtgcttatgctgctgcgttgggggctattcagcctgattttgtt

SEQ ID NO: 141501 - DNA, 75 bp, synthetic construct
  source 1..75: mol_type = other DNA
tcaacatgtgcacgccgggacgtgaagatgcggaagtgaaactctactcaaaagccgaatacaaagcctcgcgag

SEQ ID NO: 141502 - DNA, 75 bp, synthetic construct
  source 1..75: mol_type = other DNA
tgaagaggctggaattaagcatatcgcgactattcttaccccacaaaacgtgaaggcaattagtcgatattctcc

SEQ ID NO: 141503 - DNA, 75 bp, synthetic construct
  source 1..75: mol_type = other DNA
atggctctaaggcgttacagggctcagcaaaaagtggaacaggtcagttccataaaataataagcgccctacctg

SEQ ID NO: 141504 - DNA, 75 bp, synthetic construct
  source 1..75: mol_type = other DNA
caaggttgtaaagaatggaaggagcgttattcttataaaagtggtgcgtcagaagtcagaggcatgctctttgta

SEQ ID NO: 141505 - DNA, 75 bp, synthetic construct
  source 1..75: mol_type = other DNA
ttgataataccaacaaagatagacttatttataaacttcaacaaactgacagctctaatcgctacaccaatggca

SEQ ID NO: 141506 - DNA, 75 bp, synthetic construct
  source 1..75: mol_type = other DNA
gtaggcgtaagtgaagcctgcatagccacccatccgagcgatatggcggtcgcaatgcggttgctggatgcggtg

SEQ ID NO: 141507 - DNA, 75 bp, synthetic construct
  source 1..75: mol_type = other DNA
ttgaaatcataagcgtgagtcgtggcgagattgtgccgtattggttggttgaggcgaaagtaacagcttatggaa

SEQ ID NO: 141508 - DNA, 75 bp, synthetic construct
  source 1..75: mol_type = other DNA
tgtatatttgatatggtaaagaacagtccttttgcaattctaataattgcgctgtcctattgggttggtaatatt

SEQ ID NO: 141509 - DNA, 75 bp, synthetic construct
  source 1..75: mol_type = other DNA
atctgtattttccattgttgctatatactcttttcttttccaaaaaggagatttgggggtaaagataagttttct

SEQ ID NO: 141510 - DNA, 75 bp, synthetic construct
  source 1..75: mol_type = other DNA
taagctataatatacaaaaacaacgtaatcatggatttctttttaatattagtaatagagcaattatgtactgtg

SEQ ID NO: 141511 - DNA, 75 bp, synthetic construct
  source 1..75: mol_type = other DNA
cagagcgtgagctggccctgtccagactgaaaggggaagaaaaagagcgtgtccgactggggtatgcggcggatg

SEQ ID NO: 141512 - DNA, 75 bp, synthetic construct
  source 1..75: mol_type = other DNA
cgctgaacggtgtggccggaaatattgataccgtggcaacagctgcgggtgtgctggttgctgtcggggtggccc

SEQ ID NO: 141513 - DNA, 75 bp, synthetic construct
  source 1..75: mol_type = other DNA
tcggcgatcttttcagccgaatggagggttacggatttgagattacccatccgctgaatatctttggtaacgatc

SEQ ID NO: 141514 - DNA, 75 bp, synthetic construct
  source 1..75: mol_type = other DNA
ttcccgggtaactggtggattatcgagacaaaacacaacgtggcggacgttctggccgtcatccaacaatacgca

SEQ ID NO: 141515 - DNA, 75 bp, synthetic construct
  source 1..75: mol_type = other DNA
tatcaaatggatgcggtgaagttgccatcagcctatggtcaactcagctatcgcatgacctacaacctggtatca

SEQ ID NO: 141516 - DNA, 75 bp, synthetic construct
  source 1..75: mol_type = other DNA
ctgacggcggataaagtcgtgcccgcgttaatcagccagctggggacattgcgtgatgaatatgccgccatgcca

SEQ ID NO: 141517 - DNA, 75 bp, synthetic construct
  source 1..75: mol_type = other DNA
acaggccactctggatgataaacagcagagtgccctgacaaaaacagagcgtgagctggccctgtccagactgaa

SEQ ID NO: 141518 - DNA, 75 bp, synthetic construct
  source 1..75: mol_type = other DNA
aaagcggaatccattcaggatgtgcttgccgggctggaggagcgacgggtggcgttgatccgtcaacaggcagcg

SEQ ID NO: 141519 - DNA, 75 bp, synthetic construct
  source 1..75: mol_type = other DNA
ggaccctgcagaatggcggacgtcaggctgctgcggcagccagggagcagcgccgggctctggctgagctgaaca

SEQ ID NO: 141520 - DNA, 75 bp, synthetic construct
  source 1..75: mol_type = other DNA
acgccttaaggaccaggcagccttttatgccgaatcggatgcgcagcgtgcggactggcagaaaggcttgcagga

SEQ ID NO: 141521 - DNA, 75 bp, synthetic construct
  source 1..75: mol_type = other DNA
gctctggcagagcagaaccggctgattgatgaacaggccagccgggtgaaatccctgcaggaaaaaatcgctgga

SEQ ID NO: 141522 - DNA, 75 bp, synthetic construct
  source 1..75: mol_type = other DNA
ctcagggacgtcaatctgacagagggctatatagacctgcgcctggaaggaagtaaaacgcacagggaatggcgc

SEQ ID NO: 141523 - DNA, 75 bp, synthetic construct
  source 1..75: mol_type = other DNA
gaagagccgctggtcgaaagtcgctatctttacgacccgctgggccgcagggtggcaaaacgggtgtggcggcgt

SEQ ID NO: 141524 - DNA, 75 bp, synthetic construct
  source 1..75: mol_type = other DNA
gcgcaggacttcttgtcggcattatttacagcctgctgaatgtccgctcccccgcacctccactgattgcgcttc

SEQ ID NO: 141525 - DNA, 75 bp, synthetic construct
  source 1..75: mol_type = other DNA
ccccatcacctatgacgccgactctgccccggtgccgtccggtgtacctgatgagctggcagcgttgtaccgcgc

SEQ ID NO: 141526 - DNA, 75 bp, synthetic construct
  source 1..75: mol_type = other DNA
caaaaaccaacactgcggtaagtaagctggcggcacaacaacagatagatagcgttcattacggtgaacaaattc

SEQ ID NO: 141527 - DNA, 75 bp, synthetic construct
  source 1..75: mol_type = other DNA
aaagcgtcgaatgtattttatgtcaaaatggatcaagcgtggaggctattatccaacttggttacttagaatttg

SEQ ID NO: 141528 - DNA, 75 bp, synthetic construct
  source 1..75: mol_type = other DNA
tactccctaatgtaaacctgcctggctattcatccaatatacctaacgggaaatttaaaatttctctgaatggga

SEQ ID NO: 141529 - DNA, 75 bp, synthetic construct
  source 1..75: mol_type = other DNA
gaaagaaaatcttctctaaaaacagctagagaaaaaatatatactgctacccttgattttagttttaatgctgca

SEQ ID NO: 141530 - DNA, 75 bp, synthetic construct
  source 1..75: mol_type = other DNA
ttaccagctattccttaacctgctggaagcacaggggtatgccgtcgtaccaatggaaaacgacgtgctgaaggt

SEQ ID NO: 141531 - DNA, 75 bp, synthetic construct
  source 1..75: mol_type = other DNA
taggtattgatcagtctgaatttgaaatagaatcttccatcattaactccattgctaatgaggtattgaacccaa

SEQ ID NO: 141532 - DNA, 75 bp, synthetic construct
  source 1..75: mol_type = other DNA
gtgctggaaagcctgacgaaaaacagcggcgagaaccagccagcgacgctgaaatctcaaattatcgggccgaac

SEQ ID NO: 141533 - DNA, 75 bp, synthetic construct
  source 1..75: mol_type = other DNA
agacagcgttaccaagccctgatgaatttcgggcagatttagaacttattttagatttagcaaaaaagcagcagc

SEQ ID NO: 141534 - DNA, 75 bp, synthetic construct
  source 1..75: mol_type = other DNA
gttcggtgaatattttccgcccgagtccagttcactgccgtacaggcagcttagaaatggggatatgcgcgggat

SEQ ID NO: 141535 - DNA, 75 bp, synthetic construct
  source 1..75: mol_type = other DNA
tgccgtacaggcagcttagaaaagttcgcggcagacatacacgccgggagttttgttcactgccgtacaggcagc

SEQ ID NO: 141536 - DNA, 75 bp, synthetic construct
  source 1..75: mol_type = other DNA
ggcctgctgacgtatctgacaaacctttatttcaagattaaagaagataagcgcaaggctgcgagaggtgaataa

SEQ ID NO: 141537 - DNA, 75 bp, synthetic construct
  source 1..75: mol_type = other DNA
aaaacagtacggctttgagcgagcgttaaaaattatgttggagaaaaagaaactccggcagattattgggaagta

SEQ ID NO: 141538 - DNA, 75 bp, synthetic construct
  source 1..75: mol_type = other DNA
gcgttatctttctttgctgttgcgcccgagcaccgatcacaggagtcaaaattgccatataaccatttgattcaa

SEQ ID NO: 141539 - DNA, 75 bp, synthetic construct
  source 1..75: mol_type = other DNA
tacaggcagcttagaaagcgcgcagtgcctgataatcaattttgctcatgttcactgccgtacaggcagcttaga

SEQ ID NO: 141540 - DNA, 75 bp, synthetic construct
  source 1..75: mol_type = other DNA
tcgctgtcgtttcgcctgagcatctggtgccgggtagtcaggtgctggcggcgctgatggccgctggtgtggaca

SEQ ID NO: 141541 - DNA, 75 bp, synthetic construct
  source 1..75: mol_type = other DNA
tatgattttacttgtagttaatttaaaattgcataccttcaaatatatatttgggtttgaatatgaaccgagata

SEQ ID NO: 141542 - DNA, 75 bp, synthetic construct
  source 1..75: mol_type = other DNA
gtcatttcagcgatgaaacaggttctccccagtaacatgtcatttgccatgtcgccggaaattcatctgcaaatc

SEQ ID NO: 141543 - DNA, 75 bp, synthetic construct
  source 1..75: mol_type = other DNA
catcgccatgagcaagggtaataaagacgtcgtgttatcttatatatcaacactgagtacttttgcaaaaaaata

SEQ ID NO: 141544 - DNA, 75 bp, synthetic construct
  source 1..75: mol_type = other DNA
gctttccctgcaatgaaacacaccctgaaaaatgccttcccggatgcgcagcggtgcgcgtttacggcgaccctg

SEQ ID NO: 141545 - DNA, 75 bp, synthetic construct
  source 1..75: mol_type = other DNA
tggttatggtggacagtatcaagatgctttacgcgtacctcgacgagctgggaagccgcgcccggccttatcatt

SEQ ID NO: 141546 - DNA, 75 bp, synthetic construct
  source 1..75: mol_type = other DNA
gaaattctatacacggatgcaaaaaatcaaccctgtattaaatgtcatgcccggccaaatcataagccatgtatt

SEQ ID NO: 141547 - DNA, 75 bp, synthetic construct
  source 1..75: mol_type = other DNA
gagtccacaatagacattggtaatgatcttgttctgcttacacccagtatgtctttaaaagatctttacgccagt

SEQ ID NO: 141548 - DNA, 75 bp, synthetic construct
  source 1..75: mol_type = other DNA
aaggtcagcgaatgggggctgacgccttcgccggatctgccaccgggtgatcaccgacaaatccgaactggatat

SEQ ID NO: 141549 - DNA, 75 bp, synthetic construct
  source 1..75: mol_type = other DNA
ggtcatcgctggcgctggatgctgcgcctgatgagcttgcttacttctaccgccctgaaaactgcaactggcagt

SEQ ID NO: 141550 - DNA, 75 bp, synthetic construct
  source 1..75: mol_type = other DNA
gtggcaattttatacacgaatgcaaaaaattgatccgttacttcccgttggtgcaggatttgtcaccagcaatgt

SEQ ID NO: 141551 - DNA, 75 bp, synthetic construct
  source 1..75: mol_type = other DNA
agtgaatgtgctgtcaccaacagggcagtttcgcacagtctggccagttgcctctgcaaacatgaataattcatc

SEQ ID NO: 141552 - DNA, 75 bp, synthetic construct
  source 1..75: mol_type = other DNA
gagttatattatcacgtttaaccagtatcttgaatcattaatggatttgcccctatatttccagacacctgttat

SEQ ID NO: 141553 - DNA, 75 bp, synthetic construct
  source 1..75: mol_type = other DNA
attaaaaaacgtctccacttctctaacatttagccgaataaactgggaagaagacaaccaggatcaactgtacct

SEQ ID NO: 141554 - DNA, 75 bp, synthetic construct
  source 1..75: mol_type = other DNA
atgcaacgaaatcaggataacaagatttcgcatactgcttcgtggtatgactcttccgatcgaaataattcctag

SEQ ID NO: 141555 - DNA, 75 bp, synthetic construct
  source 1..75: mol_type = other DNA
tattcacaatgcaggccttgcaaccgggaccatcattagtggcggggagcagctagtttccagcggtggtagtgc

SEQ ID NO: 141556 - DNA, 75 bp, synthetic construct
  source 1..75: mol_type = other DNA
acaggaggcgttacgtaatgtagcaagaagcaatcagagtgatgtgctttttgttggaagccggagttttcgact

SEQ ID NO: 141557 - DNA, 75 bp, synthetic construct
  source 1..75: mol_type = other DNA
attaaaaaacgtctccacttctctaacatttagccgaataaactggaagaagacaaccaggatcaactgtaccta

SEQ ID NO: 141558 - DNA, 75 bp, synthetic construct
  source 1..75: mol_type = other DNA
cgaaacagagaatggtgaacaggcgaaggcgcggcaccgtagcctggcggaggtgttgcaggaggacacgggtgt

SEQ ID NO: 141559 - DNA, 75 bp, synthetic construct
  source 1..75: mol_type = other DNA
tatgaatgtgaactcagggacaacgtgtttgtcggccccttcgttgagagtaagcgtcaacggagcaccgtattg

SEQ ID NO: 141560 - DNA, 75 bp, synthetic construct
  source 1..75: mol_type = other DNA
ctggcgaaaaccgatcccctggcggagttccggcccccggccgacggcggcgggccgaaagcggatgatgatttt

SEQ ID NO: 141561 - DNA, 75 bp, synthetic construct
  source 1..75: mol_type = other DNA
tggtctcatcggcggttaaagcggtgttagccgctagctctgtcgccagccgttggctgaacttaagcaagcgtg

SEQ ID NO: 141562 - DNA, 75 bp, synthetic construct
  source 1..75: mol_type = other DNA
gtatatgttagtatatgctaaagattttaatgctgctaactttaactctgtagctatcgatgaggatgtgctttt

SEQ ID NO: 141563 - DNA, 75 bp, synthetic construct
  source 1..75: mol_type = other DNA
cggcgttacctatgaaaacatcaatggccgggctgtagcgattgaatgctatctggatctaagattttctgatta

SEQ ID NO: 141564 - DNA, 75 bp, synthetic construct
  source 1..75: mol_type = other DNA
catatgttgtttgtttatttggttgtagccctgttaatgcagcagataatgttagtcaacataaatttgaagcag

SEQ ID NO: 141565 - DNA, 75 bp, synthetic construct
  source 1..75: mol_type = other DNA
caattgccagtaaccacgaatgtgctggaaataacgattatggcaaataatatgccatatgtcggacgtggttaa

SEQ ID NO: 141566 - DNA, 75 bp, synthetic construct
  source 1..75: mol_type = other DNA
tgttggctgggaggttgagtggccagaggtggaaggagatcctgacgacgaagacgatactggcgaatcatatca

SEQ ID NO: 141567 - DNA, 75 bp, synthetic construct
  source 1..75: mol_type = other DNA
gttaaatgcgactggaggcaatgtaagtgtttatgatatagataaagtcgaagttagtgtaagcaaacaagattg

SEQ ID NO: 141568 - DNA, 75 bp, synthetic construct
  source 1..75: mol_type = other DNA
aactgctgtcatttattctcttttcctaacatcatcaaattttaatgtaagcatcttaattctaagtgcatatgc

SEQ ID NO: 141569 - DNA, 75 bp, synthetic construct
  source 1..75: mol_type = other DNA
gttagtcaacataaatttgaagcagtcttgggtgccacaatattaatctacgatttaagtgggaattgggagagt

SEQ ID NO: 141570 - DNA, 75 bp, synthetic construct
  source 1..75: mol_type = other DNA
atgatccccggaatttttcgttttgtctgcacaaatgacctggtgcacgggaataattttggcgaaatccgtgtt

SEQ ID NO: 141571 - DNA, 75 bp, synthetic construct
  source 1..75: mol_type = other DNA
aacaacttactaatatactgacatctcaccgtgacaacggtcattacactctgatccattctacaacgtatatcc

SEQ ID NO: 141572 - DNA, 75 bp, synthetic construct
  source 1..75: mol_type = other DNA
gattgataccggcaacgaacagcgggtgattaccgttgatgccgacgggcgctttgtaccgaaacgcgttgctgt

SEQ ID NO: 141573 - DNA, 75 bp, synthetic construct
  source 1..75: mol_type = other DNA
cgatcccggagtccatcgcctggctggtgaaagatgcctcgcagtttaccctcaccgttccggcgcgaccggata

SEQ ID NO: 141574 - DNA, 75 bp, synthetic construct
  source 1..75: mol_type = other DNA
tgagaaatcggcctccgagttcgatgccattgttgcgcaaacggagcagttccttgccgacaatggtcgtcgccc

SEQ ID NO: 141575 - DNA, 75 bp, synthetic construct
  source 1..75: mol_type = other DNA
taatgggctattggtcaactctgaaaattatcaagccctaaaaatccttgagactaagtttgataaaagtacaag

SEQ ID NO: 141576 - DNA, 75 bp, synthetic construct
  source 1..75: mol_type = other DNA
aagttcaaagagaaatttatcaacaatatcgctgatgttgacacaaatgtttccgcttatttatatagtggagat

SEQ ID NO: 141577 - DNA, 75 bp, synthetic construct
  source 1..75: mol_type = other DNA
atgagcagcctgtttccaaaggaggcaggtgttggagtggtaaaagtcaatccgcaaagtagaaaaacaaagggg

SEQ ID NO: 141578 - DNA, 75 bp, synthetic construct
  source 1..75: mol_type = other DNA
cccaatccatcaatttactgacatctcaccgtgataacggtcattacactctggtccattcctcaacctatcttc

SEQ ID NO: 141579 - DNA, 75 bp, synthetic construct
  source 1..75: mol_type = other DNA
ctcaagccaaattatgcgctggcgactcaggtagagtttaccgacccggagattgttgctgagtacatcacgtat

SEQ ID NO: 141580 - DNA, 75 bp, synthetic construct
  source 1..75: mol_type = other DNA
acagaaagcatatttatatgctgacgctaaaaagcaaataacatcaataattcaggatgctaaaaaaggaaaaac

SEQ ID NO: 141581 - DNA, 75 bp, synthetic construct
  source 1..75: mol_type = other DNA
tagtcaaaatcaaggtgataaatgatggtgattttggaaaacccatattaaataattatggagatgtaaatatca

SEQ ID NO: 141582 - DNA, 75 bp, synthetic construct
  source 1..75: mol_type = other DNA
agtgagttaaaattaaaatttaataatcggaacaaaataaaaatactttttcttagtaatttgttgccaggaaaa

SEQ ID NO: 141583 - DNA, 75 bp, synthetic construct
  source 1..75: mol_type = other DNA
tcagggacgccaggaatgagcgaatgcttgaggatgatgtacaacgtgagcaactgaaggcattgcaacaggaat

SEQ ID NO: 141584 - DNA, 75 bp, synthetic construct
  source 1..75: mol_type = other DNA
gaataccatggtcgagtgccgacaggagaacgagttcgccaaatttaccttgcaactggggttactcctcatgag

SEQ ID NO: 141585 - DNA, 75 bp, synthetic construct
  source 1..75: mol_type = other DNA
ttttcgctttcgaaggatgttcagagtccgaagttactgaactattaggaaaaaaccaacaggttataatgattg

SEQ ID NO: 141586 - DNA, 75 bp, synthetic construct
  source 1..75: mol_type = other DNA
aaaattcacatgcgaaaagagaaaagagcttcattccatcaacagaagcagaatggttttttgactcatggtatg

SEQ ID NO: 141587 - DNA, 75 bp, synthetic construct
  source 1..75: mol_type = other DNA
cacatcgttattactcacatttcggaaccagggccgggtgacatcaggacacgtaatcggtttgaaagaaaaggt

SEQ ID NO: 141588 - DNA, 75 bp, synthetic construct
  source 1..75: mol_type = other DNA
ggacaaccgtaaagaagccaatgcgggaactgcatcagccatcgctatcgcctcacaaccacaggtgaaagccgg

SEQ ID NO: 141589 - DNA, 75 bp, synthetic construct
  source 1..75: mol_type = other DNA
cagataacagccagcaaatcaattcgctcaataacaacttcagttcgttgaaacacgaagtggaagataaccgta

SEQ ID NO: 141590 - DNA, 75 bp, synthetic construct
  source 1..75: mol_type = other DNA
tgcaaaatgccttccccgctgcgcagcgttgtgcgttcactgccactttgcgaaaaggtgatgaggctgccttga

SEQ ID NO: 141591 - DNA, 75 bp, synthetic construct
  source 1..75: mol_type = other DNA
cagattcacaacctggcaccggagccataaaaatgagaacccatcacaccccagcagaagactcggccaattttg

SEQ ID NO: 141592 - DNA, 75 bp, synthetic construct
  source 1..75: mol_type = other DNA
caccttgtcattactcatatttcagagcccggccaggatgatgtcaggaaccgtactggattagaaagaaagggc

SEQ ID NO: 141593 - DNA, 75 bp, synthetic construct
  source 1..75: mol_type = other DNA
tgaaggcgcgataggttacaaatcactggcttcccgttccggtaaagacgttaacgtcatcattcgcaacgccag

SEQ ID NO: 141594 - DNA, 75 bp, synthetic construct
  source 1..75: mol_type = other DNA
ggttcagggcaatctcgactacaccaaccattttggcattgcggtggtgccgttgatttccagttatcagccttc

SEQ ID NO: 141595 - DNA, 75 bp, synthetic construct
  source 1..75: mol_type = other DNA
aacaaatccaaatttaagtttattgtgtggtagcatctatttatcagaaattgaaacacagattggagttgcgct

SEQ ID NO: 141596 - DNA, 75 bp, synthetic construct
  source 1..75: mol_type = other DNA
agatctattcaatatgctttacgagactcttttagaggattcgaatcagtccccatttatcgtataactgaagag

SEQ ID NO: 141597 - DNA, 75 bp, synthetic construct
  source 1..75: mol_type = other DNA
tttgatcgtgttggtcaactcggtcgggtaggtgtattctcacttcgtgcacttgatgcagaatttgttggtaat

SEQ ID NO: 141598 - DNA, 75 bp, synthetic construct
  source 1..75: mol_type = other DNA
ttagcgtggggatggttggcgaggaaggacatgcctggttaagcggagtcgctgaaaatcaaaagtttaccgtgg

SEQ ID NO: 141599 - DNA, 75 bp, synthetic construct
  source 1..75: mol_type = other DNA
ctggcagttcggcgcgtatgagcaacaacaaagatcactcggtgattgacgctgccgtggtgggtatcgtcgact

SEQ ID NO: 141600 - DNA, 75 bp, synthetic construct
  source 1..75: mol_type = other DNA
tggggagtaactccgcatgaattgcgccctgataaataccctaacccaaccgatggcttgccttgtggacgtaag

SEQ ID NO: 141601 - DNA, 75 bp, synthetic construct
  source 1..75: mol_type = other DNA
agatctaatatcattaggtggtcatgcaggacttggcgttgcgtttgctaaaaagaaaggtgaaatgttatctga

SEQ ID NO: 141602 - DNA, 75 bp, synthetic construct
  source 1..75: mol_type = other DNA
gatagctccatttggacacaacatggagttatataaatacatgaggaaaaagtatccttatgagttattcagagc

SEQ ID NO: 141603 - DNA, 75 bp, synthetic construct
  source 1..75: mol_type = other DNA
tttctggtgtccgtggttctggtcatgcccggctttatattaaagcttcagactcaggaccccaaacggtggtaa

SEQ ID NO: 141604 - DNA, 75 bp, synthetic construct
  source 1..75: mol_type = other DNA
atgggagcaggcgaaggagagctggttctggtcagccgtggctcttcagccagaaagatctttccggaaccaaat

SEQ ID NO: 141605 - DNA, 75 bp, synthetic construct
  source 1..75: mol_type = other DNA
agaggggcagtggttaacatttaaatcgataattgcattgctcattctttgtggcgtagtgttggcgattaatct

SEQ ID NO: 141606 - DNA, 75 bp, synthetic construct
  source 1..75: mol_type = other DNA
tcggattgctcattttcatactatctgttgtttttttaagcgatcagataaaagggcgctgaaaaaaacattatc

SEQ ID NO: 141607 - DNA, 75 bp, synthetic construct
  source 1..75: mol_type = other DNA
tagtggcagacggcgtactgatccgctggcagggcaaaggcacctttgtacaaagccagaaggtcgaaaacgccc

SEQ ID NO: 141608 - DNA, 75 bp, synthetic construct
  source 1..75: mol_type = other DNA
atgaaagttgaattaaccattgatcgcatgaaagaacttcctaaaggcgcagtaccagcactggagaaagaactg

SEQ ID NO: 141609 - DNA, 75 bp, synthetic construct
  source 1..75: mol_type = other DNA
ataaaaccataaatattacggggcgtgttaatcccacagattacggtaactttgattcccgctatgtccgggata

SEQ ID NO: 141610 - DNA, 75 bp, synthetic construct
  source 1..75: mol_type = other DNA
ggacctcggttggatttactaattttgcatgggtgaatacatccggtgatacctatgacatttatgtagaaatag

SEQ ID NO: 141611 - DNA, 75 bp, synthetic construct
  source 1..75: mol_type = other DNA
atcgatacaaaaacattactaggacataaagtccaggcaaccaccgatcgctataacgatactcgaggtcaggaa

SEQ ID NO: 141612 - DNA, 75 bp, synthetic construct
  source 1..75: mol_type = other DNA
ccggagatgcgctaccgctacgacgatgcggggcgggtggtggagcaacttaacccggcaggcctgagttaccgc

SEQ ID NO: 141613 - DNA, 75 bp, synthetic construct
  source 1..75: mol_type = other DNA
gtatccgcctttcggcggtgtggctgatgcacgacccggaatacccggaaaatttacctgccgcgccactggtgt

SEQ ID NO: 141614 - DNA, 75 bp, synthetic construct
  source 1..75: mol_type = other DNA
taaaaaataatgccagttatcaatttaataacgcattacctaacaaagaaaccatctccagcaatttttgtgaac

SEQ ID NO: 141615 - DNA, 75 bp, synthetic construct
  source 1..75: mol_type = other DNA
tggtcgtcttgatttaaatgaagttggtaacattagaactattaaggatgaattttctcctgaagaacaggcgtg

SEQ ID NO: 141616 - DNA, 75 bp, synthetic construct
  source 1..75: mol_type = other DNA
ttgattaatcgcaccctgacgcgccacagtgagttaagtttcagcaccttttttgtctcttcgatgagcgagctt

SEQ ID NO: 141617 - DNA, 75 bp, synthetic construct
  source 1..75: mol_type = other DNA
aaacgcgcccggtagatttaatcctgccgctgcaaaatcagcttccacaactacaacaaattgtggtgatgctgc

SEQ ID NO: 141618 - DNA, 75 bp, synthetic construct
  source 1..75: mol_type = other DNA
ttgactcagtatctctatttttgaatggctcatattcaaaatatgcatattcagataaagatgattattcgacat

SEQ ID NO: 141619 - DNA, 75 bp, synthetic construct
  source 1..75: mol_type = other DNA
gggcagtctattttacagcggcatattgcctcgttctcgcatcatggtttgcctcaaggcagtgacgacgcgcta

SEQ ID NO: 141620 - DNA, 75 bp, synthetic construct
  source 1..75: mol_type = other DNA
tgcattggcgggaacatacagtcagcgcagcagcgccgtgaacgaccaagggatctggggacgtattcagggcgg

SEQ ID NO: 141621 - DNA, 75 bp, synthetic construct
  source 1..75: mol_type = other DNA
ctggatgccaccatcaacctggggcgctgggtgctttccagcaacatgaacgtgtctcatgtccgtgataaaacc

SEQ ID NO: 141622 - DNA, 75 bp, synthetic construct
  source 1..75: mol_type = other DNA
gccaagagctttacagaccggaccgacctacagttactgacgtaccgttaccagagtaaagggtatgtggaattt

SEQ ID NO: 141623 - DNA, 75 bp, synthetic construct
  source 1..75: mol_type = other DNA
taacagcaacgagctggacaaagcgtttcattctgacaccggtctgttctggttgggcagcctggactatggttt

SEQ ID NO: 141624 - DNA, 75 bp, synthetic construct
  source 1..75: mol_type = other DNA
gctaccggctggtatggaacgaagttttgggagcatttgttgttgtctcagaattggcaaaagcaaaaggaaagc

SEQ ID NO: 141625 - DNA, 75 bp, synthetic construct
  source 1..75: mol_type = other DNA
tggccctgatggcaacggatactacaacaacaacactgttggttcgctcgtatggacgggcgtgaccgtaacaaa

SEQ ID NO: 141626 - DNA, 75 bp, synthetic construct
  source 1..75: mol_type = other DNA
tcagacggcccgcacaataggcggcgtgtcattcgatggtagtgccaatatcgacctgccaggtgtgaataaaac

SEQ ID NO: 141627 - DNA, 75 bp, synthetic construct
  source 1..75: mol_type = other DNA
caacggtaacgcagccatcagcggttcggtaagtggtgacgggcaattactcaaagagggtaacggtaccctgac

SEQ ID NO: 141628 - DNA, 75 bp, synthetic construct
  source 1..75: mol_type = other DNA
caacggtcagcggtacgaacaccaccggcgcattcggcattgacggcgcaaccggtaaggccagcaacctgcgtc

SEQ ID NO: 141629 - DNA, 75 bp, synthetic construct
  source 1..75: mol_type = other DNA
actaggcaatggcatcgccgataccactacggttaatcagggcagtattctggccgtcgcgaccggtggtaaggc

SEQ ID NO: 141630 - DNA, 75 bp, synthetic construct
  source 1..75: mol_type = other DNA
cagcgcacagatggtcataaaacctaatgatgccaactcggtgtataaagatattatgaacgatccttataatga

SEQ ID NO: 141631 - DNA, 75 bp, synthetic construct
  source 1..75: mol_type = other DNA
agggaatttatattatcgaagatttacattgtagctactggcaaaactttgaagggggactctatgacccatttt

SEQ ID NO: 141632 - DNA, 75 bp, synthetic construct
  source 1..75: mol_type = other DNA
aatccaccttatatcgtttacgagacagaaggaaaaatatcgtcactcctgacagaatatagtaatgatatatgt

SEQ ID NO: 141633 - DNA, 75 bp, synthetic construct
  source 1..75: mol_type = other DNA
cgttcttctctgttggtcgtttttacccggcactggtcggcaatgatatcggctgcggcatggcgctatggcaaa

SEQ ID NO: 141634 - DNA, 75 bp, synthetic construct
  source 1..75: mol_type = other DNA
caacggtctggtgattattcccggctcacgcggtgattactcctggcttgtacagcctgttgcgaacgaaaaaac

SEQ ID NO: 141635 - DNA, 75 bp, synthetic construct
  source 1..75: mol_type = other DNA
tctgcgctggatgacgttgctgaagaaagctggctggaggaaaacctgccgtcagcatttgcacagcacccgtgg

SEQ ID NO: 141636 - DNA, 75 bp, synthetic construct
  source 1..75: mol_type = other DNA
gtagaatattcacaacgtgaatattggcaaaaattgctagagcacgttgataagaagagaatggaagacaaagag

SEQ ID NO: 141637 - DNA, 75 bp, synthetic construct
  source 1..75: mol_type = other DNA
cattcaaaaaggtaaagcaaaatctaatcttctcggtattcggcatattgtcggagacgaagaaagcgttgtcca

SEQ ID NO: 141638 - DNA, 75 bp, synthetic construct
  source 1..75: mol_type = other DNA
aaggtatttcgggcgcattacagcgaatcaggcatgttgcggcattccagagtatgcaagcagtacgcgttcaga

SEQ ID NO: 141639 - DNA, 75 bp, synthetic construct
  source 1..75: mol_type = other DNA
actgttctcaatcccgctcattatccggcgtatttcacttctggaattacaactttggttatcggctgaatatgc

SEQ ID NO: 141640 - DNA, 75 bp, synthetic construct
  source 1..75: mol_type = other DNA
cccggaatgggggcatgggtagtgacatcaatacaggcgctcgacttccctgcggtgatgggatttgccgtcgtg

SEQ ID NO: 141641 - DNA, 75 bp, synthetic construct
  source 1..75: mol_type = other DNA
ggtcacctgatgtatgggctggtggaggtattggacttattgcaggtctgctacttcgctacgtcctcgtcagag

SEQ ID NO: 141642 - DNA, 75 bp, synthetic construct
  source 1..75: mol_type = other DNA
tctatataaaactattttcaatccaagattaagtggtttaaaacttatcaatactgttctacattttagagttat

SEQ ID NO: 141643 - DNA, 75 bp, synthetic construct
  source 1..75: mol_type = other DNA
gatataagggaagactcacagggcatggtttcagacacaccatgagtacaattctgcatgaacaaggctttaact

SEQ ID NO: 141644 - DNA, 75 bp, synthetic construct
  source 1..75: mol_type = other DNA
cgccagccaatcccccggcggaaagtgccgcatgggcggaaggtttcctcaacgacagcgcgatggtgctactgc

SEQ ID NO: 141645 - DNA, 75 bp, synthetic construct
  source 1..75: mol_type = other DNA
ctttatcgcatcggaaaaataatccgaaagcagattcagctgcgtatgaaaccagcgctgatatgattttgtctg

SEQ ID NO: 141646 - DNA, 75 bp, synthetic construct
  source 1..75: mol_type = other DNA
ggatttatgggccagagattgtcgcgttatctttctttgctgttgcgcccgagcacaacgatggcggaacaccat

SEQ ID NO: 141647 - DNA, 75 bp, synthetic construct
  source 1..75: mol_type = other DNA
aggcagaacatcagctcttattaaacgcccaagaccagggataaagccagttattagctttccggaagctgattc

SEQ ID NO: 141648 - DNA, 75 bp, synthetic construct
  source 1..75: mol_type = other DNA
cttcaagttaaatgaagttgagatagaaacattaaacaacgcacaaggaatagaacaaataattgatttacttca

SEQ ID NO: 141649 - DNA, 75 bp, synthetic construct
  source 1..75: mol_type = other DNA
tcgacgttcggcgctcagtgggggccaaaactcgcaaccttgctggcgaggttataggtactctgtgtgtctgcg

SEQ ID NO: 141650 - DNA, 75 bp, synthetic construct
  source 1..75: mol_type = other DNA
ctgaatcatgccgcaatgagcacgcttcttggtgagaggattatggaccgcatgaccatgaacggtggtcggtgg

SEQ ID NO: 141651 - DNA, 75 bp, synthetic construct
  source 1..75: mol_type = other DNA
gttgatggtgctggcagagggcagtaccgcacacgcgctgcttcgcggaacggcgacgcgcctgttgtttgatct

SEQ ID NO: 141652 - DNA, 75 bp, synthetic construct
  source 1..75: mol_type = other DNA
cacattatcgaagcggcgcggctggcgcagacgctggcgattatgcgccatcacccgcagccggggcttgacgaa

SEQ ID NO: 141653 - DNA, 75 bp, synthetic construct
  source 1..75: mol_type = other DNA
agaatatctctcatatccgcactgctatatccgaaaataaactcgatgacaaagtaaaggtgtgggagcacaaat

SEQ ID NO: 141654 - DNA, 75 bp, synthetic construct
  source 1..75: mol_type = other DNA
ctaaaatcaccatcaagggcatcccggaagcagcatgggaatatgtggtcaacggtaaggctgcgctagactggg

SEQ ID NO: 141655 - DNA, 75 bp, synthetic construct
  source 1..75: mol_type = other DNA
caaaatagccaaaaaagacattgatagctttttggctgcctctgacaaaacctattttacgctccggtatattgt

SEQ ID NO: 141656 - DNA, 75 bp, synthetic construct
  source 1..75: mol_type = other DNA
gttgaatgcgctcagggcgcatgatgaccgctttgatgctatgatcaataaactggagtttaatggtaaagatac

SEQ ID NO: 141657 - DNA, 75 bp, synthetic construct
  source 1..75: mol_type = other DNA
atggcagcaagaaggggcaaatttatgggcgttgagcgccggaacatgggatcgctggtcgtgatagacgtactg

SEQ ID NO: 141658 - DNA, 75 bp, synthetic construct
  source 1..75: mol_type = other DNA
tgggtgttaatattcatgctgatattaatgccattaatgattcttttttcacatgatttatcattgtggttattt

SEQ ID NO: 141659 - DNA, 75 bp, synthetic construct
  source 1..75: mol_type = other DNA
tccactggggctttgagggtgtcgcgcgtaaaggttatatcgctaacactctgacgccgaatgtcggtgatgcaa

SEQ ID NO: 141660 - DNA, 75 bp, synthetic construct
  source 1..75: mol_type = other DNA
tccggcctgatgcccttcgacaaactcgccaattctgaaacgccgatttccgacgccctgacctggatccccgca

SEQ ID NO: 141661 - DNA, 75 bp, synthetic construct
  source 1..75: mol_type = other DNA
ttgccatcacggcgatgatcgtcattctcggatcgctttccagctgcgtgatgtaccagccgcggctggaatacg

SEQ ID NO: 141662 - DNA, 75 bp, synthetic construct
  source 1..75: mol_type = other DNA
ataaaacataccaggggcaaagttatcgtgtttcctggaacaagttattcgaagaaacaagtacttcactgaata

SEQ ID NO: 141663 - DNA, 75 bp, synthetic construct
  source 1..75: mol_type = other DNA
cgcaaattgaacttgcctccccaacacaacgtgataaagggacgacttttgaaaatctttgtattcagtattttc

SEQ ID NO: 141664 - DNA, 75 bp, synthetic construct
  source 1..75: mol_type = other DNA
cacggcgatgatcgtcattcttggttcgctttccagctgcgtgatgtaccagccgcggctggaatacgcgatggc

SEQ ID NO: 141665 - DNA, 75 bp, synthetic construct
  source 1..75: mol_type = other DNA
aaatacaacacgccggatgtctccatcatcctgcaaggggcgctggggatcttcttcatcttcgtttccgatctc

SEQ ID NO: 141666 - DNA, 75 bp, synthetic construct
  source 1..75: mol_type = other DNA
tgggtgtagagagggaggtgtatatttaacagatgataaaaattcgcctgataattccttggttgagaatattgt

SEQ ID NO: 141667 - DNA, 75 bp, synthetic construct
  source 1..75: mol_type = other DNA
gcaatatctggacattgatctgctgtttattattctcgggacaaatgacttcagactgagccagggtgtcgctga

SEQ ID NO: 141668 - DNA, 75 bp, synthetic construct
  source 1..75: mol_type = other DNA
cgggtaggggagaaggcgacatttacctgttcgcctcatcgtgtggccgggcataactgcctggctgtgcaggtg

SEQ ID NO: 141669 - DNA, 75 bp, synthetic construct
  source 1..75: mol_type = other DNA
cggaagcggtactccacggattacgcccaattggtatggcttttggagggggtatgtttcgcgccaccgcgcgcg

SEQ ID NO: 141670 - DNA, 75 bp, synthetic construct
  source 1..75: mol_type = other DNA
cggaagcggtactccacggattacgcccaattggtatggcttttgtaggggatatgtttctcgcccccgccggcg

SEQ ID NO: 141671 - DNA, 75 bp, synthetic construct
  source 1..75: mol_type = other DNA
agtggataatgcccgtattgatttacgctcaaaatactatgttaaacctaaagctgaccatccctggcttacgcg

SEQ ID NO: 141672 - DNA, 75 bp, synthetic construct
  source 1..75: mol_type = other DNA
ttcagccatgcttctgccgttcaggtattaggggcgaaagatgatggcagcgataagcgcctcggtgatggacaa

SEQ ID NO: 141673 - DNA, 75 bp, synthetic construct
  source 1..75: mol_type = other DNA
gtgtctggaaatggggcttggtcaggaaaagcgtcgcgacgacggcattcctggcattactaactatatcttttc

SEQ ID NO: 141674 - DNA, 75 bp, synthetic construct
  source 1..75: mol_type = other DNA
agtcaaaagctgatcggtggtcattacgctatcgtgatgaaatcattgatacctttgaaaaggcactgttgcaaa

SEQ ID NO: 141675 - DNA, 75 bp, synthetic construct
  source 1..75: mol_type = other DNA
ccgcgccgggcctgcgtgattacctgggtgacattgcctggtatctggatggcatgctggatcgtcgcgaaggcg

SEQ ID NO: 141676 - DNA, 75 bp, synthetic construct
  source 1..75: mol_type = other DNA
caacgctgggccgatctcctgagtagcgaaagctggcaggaagtgctcgataaaaccgccgcttaccagcaggag

SEQ ID NO: 141677 - DNA, 75 bp, synthetic construct
  source 1..75: mol_type = other DNA
tattccccacgctttcatggctcaacggcactgccacactccgcgtctggcatccgcgcggccctgatcaagttg

SEQ ID NO: 141678 - DNA, 75 bp, synthetic construct
  source 1..75: mol_type = other DNA
cgacgaacagcagaggtaatacagtagtgtggttatctgaatactcagagaacagtatcaatatcaacatggata

SEQ ID NO: 141679 - DNA, 75 bp, synthetic construct
  source 1..75: mol_type = other DNA
ataccttgatatagacctcctttttattattcttggaacgaatgacttccggatgagtcaggggctagctgagta

SEQ ID NO: 141680 - DNA, 75 bp, synthetic construct
  source 1..75: mol_type = other DNA
aaaacggtccggggacacagtgtcagtgcgaagtacgcgaaaagtttcacggacaccaccaacctgcagctgatg

SEQ ID NO: 141681 - DNA, 75 bp, synthetic construct
  source 1..75: mol_type = other DNA
tgttgaacatacccttggactcgtggttgcagacgtatgctttaaagaagatgagtgttctcaggtaagagagtt

SEQ ID NO: 141682 - DNA, 75 bp, synthetic construct
  source 1..75: mol_type = other DNA
cgttattttactaccggtagggtcgacgaacaaaactccaaaatcgataaagacgcctttacatttttcggtgcc

SEQ ID NO: 141683 - DNA, 75 bp, synthetic construct
  source 1..75: mol_type = other DNA
cgttattttactaccggtagggtcgacgaacaaaactctaaaatcgataaagtcgcttttacattttccgctacc

SEQ ID NO: 141684 - DNA, 75 bp, synthetic construct
  source 1..75: mol_type = other DNA
tacgccaagagctttacggataaaactgacctacaattgttaacataccgctaccagagtaaagggtatgtggag

SEQ ID NO: 141685 - DNA, 75 bp, synthetic construct
  source 1..75: mol_type = other DNA
ttgattcgatgtccctgttcctgaacgggtcttactcaaagtatgcctggtcggataaggcggattactccattt

SEQ ID NO: 141686 - DNA, 75 bp, synthetic construct
  source 1..75: mol_type = other DNA
caggggctgaatgcagggtttatttcaaacaatggtgttctgctgatgaacatgctggctgagccgaaatctgtc

SEQ ID NO: 141687 - DNA, 75 bp, synthetic construct
  source 1..75: mol_type = other DNA
gagctggatgatgtccggccggtagggaacggtgaccttgaggtgacggtggaggatgccggcggccggaagaca

SEQ ID NO: 141688 - DNA, 75 bp, synthetic construct
  source 1..75: mol_type = other DNA
gcaaaaagtatttcccggcgctccgaactgcagcttctgacttatcgctatcagagtaagggatatgtggagttt

SEQ ID NO: 141689 - DNA, 75 bp, synthetic construct
  source 1..75: mol_type = other DNA
ctggatgcagccatcaacttggggcgctgggtattatccagcaatatgaacgtgtcccataaccatgataaaacg

SEQ ID NO: 141690 - DNA, 75 bp, synthetic construct
  source 1..75: mol_type = other DNA
ttaaataattatctcaaaattcttcagcttggtgatctgtacgaaccatttgtcactgcgtcacaaagtttttct

SEQ ID NO: 141691 - DNA, 75 bp, synthetic construct
  source 1..75: mol_type = other DNA
gcacgatagtcttgatatttctgatgccacacaagatgttattccttcgaaaggtgctgttgtcggtgtcgattt

SEQ ID NO: 141692 - DNA, 75 bp, synthetic construct
  source 1..75: mol_type = other DNA
aaaacgacggttcggtgattattgatggcactgccaacgtgcgggaaatcaacaaagcctttaactggcatctac

SEQ ID NO: 141693 - DNA, 75 bp, synthetic construct
  source 1..75: mol_type = other DNA
tgccgccaggcgctttcgtcattgatgatctgagtccgtcagggtacggcagcgatcttattgttaccatcgaag

SEQ ID NO: 141694 - DNA, 75 bp, synthetic construct
  source 1..75: mol_type = other DNA
tggttccccatggctggagcgtggatattcctgcaatgttgctggcagctcagggaaaaaaatggccgccatgtt

SEQ ID NO: 141695 - DNA, 75 bp, synthetic construct
  source 1..75: mol_type = other DNA
aaatggttgaacgtatcgatcagcgtgatttgagtcgttcaactcttcagggacaacgtagccgattcaaagccg

SEQ ID NO: 141696 - DNA, 75 bp, synthetic construct
  source 1..75: mol_type = other DNA
ccttatattctgaagctaatacgttatcttttgaaactatagcatatggtccgtcatcccctggaagagtattta

SEQ ID NO: 141697 - DNA, 75 bp, synthetic construct
  source 1..75: mol_type = other DNA
gtttgatctcgcctcgcatggctgtaacgataaattgcgcagtgctctcgcctgtttcttttacttgctccatag

SEQ ID NO: 141698 - DNA, 75 bp, synthetic construct
  source 1..75: mol_type = other DNA
accggtagggtcgacaaagaaaactccaaaatagataaagtcgcttttacattcttcggtgccgcaacaactgct

SEQ ID NO: 141699 - DNA, 75 bp, synthetic construct
  source 1..75: mol_type = other DNA
tgctattactggaactggcggcaatgccggttcgcgagttcgacattccgcttccccgacatccggctctgctgg

SEQ ID NO: 141700 - DNA, 75 bp, synthetic construct
  source 1..75: mol_type = other DNA
attcttggtatgtatggtaaaaataactcaatatcatcaggggtgactgtatccaggatgggtaatggaggagca

SEQ ID NO: 141701 - DNA, 75 bp, synthetic construct
  source 1..75: mol_type = other DNA
attcgttcctattgtccaaaatcagataacaacatagaagaaaacgcagaaccactattagcagagttgggttta

SEQ ID NO: 141702 - DNA, 75 bp, synthetic construct
  source 1..75: mol_type = other DNA
cggctgaccacgatacagaacgacaggagccgcatccagacgatttatcagccggggagcttcacgccactcatc

SEQ ID NO: 141703 - DNA, 75 bp, synthetic construct
  source 1..75: mol_type = other DNA
ggtgaaaaggcttatacgtcgattaccggcggtaatgaaggcggttatccggtattccagcatatccgccggctt

SEQ ID NO: 141704 - DNA, 75 bp, synthetic construct
  source 1..75: mol_type = other DNA
agctccaacatcagccggaaaatcgttcttagttgtggaaatgctcgccaacggaataattagcggcgaattaaa

SEQ ID NO: 141705 - DNA, 75 bp, synthetic construct
  source 1..75: mol_type = other DNA
cctggtgagtgatcccctggggttgctggggggtgagcagacttaccggtatgtgcctaatcctagtgggtatgt

SEQ ID NO: 141706 - DNA, 75 bp, synthetic construct
  source 1..75: mol_type = other DNA
ctgaatacccggcagaaatatcaccattagctcgtcgtaatgataaaaatccattatatacagatcgatttgaat

SEQ ID NO: 141707 - DNA, 75 bp, synthetic construct
  source 1..75: mol_type = other DNA
gagtgcttctctgacagcaagaaaattgggaattactgtggaaccatcatggggggtgggccgtctgcagtcaga

SEQ ID NO: 141708 - DNA, 75 bp, synthetic construct
  source 1..75: mol_type = other DNA
tgctgaaaagatcgcaactggcggcgtagtaccaggattcaaactttcaagaaaaacatttgatgcgaaaattaa

SEQ ID NO: 141709 - DNA, 75 bp, synthetic construct
  source 1..75: mol_type = other DNA
gtaaggacgggcaaggcaacttaccgaaccgcatcaaactgaactttaagccgtggaagaaaggaggtgagcaat

SEQ ID NO: 141710 - DNA, 75 bp, synthetic construct
  source 1..75: mol_type = other DNA
ttcagggagaagccgaccagtttcagagagatgcagcaggatttggcagggccaaagctttgcagaataaaaacg

SEQ ID NO: 141711 - DNA, 75 bp, synthetic construct
  source 1..75: mol_type = other DNA
ttacaaaaattatgttggtgtttttagcagaataaataaatacatccttaaccataacacatctaaattttctaa

SEQ ID NO: 141712 - DNA, 75 bp, synthetic construct
  source 1..75: mol_type = other DNA
ctacaccgccccgccagcgccggtatctgtgcccgctgcgatggaaattgatgatgactttgacagcgcgtttga

SEQ ID NO: 141713 - DNA, 75 bp, synthetic construct
  source 1..75: mol_type = other DNA
cactcctgagctcgccgcatgacacctctagttatcagattgccgttcggctggaagaaaactcgcgcggcggtt

SEQ ID NO: 141714 - DNA, 75 bp, synthetic construct
  source 1..75: mol_type = other DNA
gtcactcccctgccgggcgggtggagaaatttgaatacaacgccgcacacggtcagttaagccgttacacggcgg

SEQ ID NO: 141715 - DNA, 75 bp, synthetic construct
  source 1..75: mol_type = other DNA
tgtgtaccgccagggttaacggcctggaggaaactatcctctacagccgggacgccgcaggccgcctggcagaag

SEQ ID NO: 141716 - DNA, 75 bp, synthetic construct
  source 1..75: mol_type = other DNA
gttcccgccgtggcagagaatgatcctggggggaataacgatagccagctatcttctgccgccagcgggactgct

SEQ ID NO: 141717 - DNA, 75 bp, synthetic construct
  source 1..75: mol_type = other DNA
gtttgatttgccggtggcgcgaacggacggtgaaggccaccgctggcagtaccgctacgataaagacacgctgca

SEQ ID NO: 141718 - DNA, 75 bp, synthetic construct
  source 1..75: mol_type = other DNA
ttatggctatgacagctgcggctacctgaaggcgcagtctgcgggcaggcaccggataagtgaagagactgacca

SEQ ID NO: 141719 - DNA, 75 bp, synthetic construct
  source 1..75: mol_type = other DNA
ctatgatgagcgcggcctgctcagcaacatcaccgaccctgccgggcagacgtggacacagcagtgtgatgaacg

SEQ ID NO: 141720 - DNA, 75 bp, synthetic construct
  source 1..75: mol_type = other DNA
gagacgctgacgttcagccgtgatgaggcgggacgtgaagtgctccggcacagtaaccggggttttgcctgtgaa

SEQ ID NO: 141721 - DNA, 75 bp, synthetic construct
  source 1..75: mol_type = other DNA
acgtacctgtgggacggcgacagtattgcggaaatccgggaataccgcgatgataaactgtacagcgtacggcac

SEQ ID NO: 141722 - DNA, 75 bp, synthetic construct
  source 1..75: mol_type = other DNA
ggcaggctgacgggtatcttcagcccggacggcatatcacagcgcaccggctatgacgaacgcgggcgggtgaat

SEQ ID NO: 141723 - DNA, 75 bp, synthetic construct
  source 1..75: mol_type = other DNA
gcggaaatccgggaataccgcgatgataaactgtacagcgtacggcacctggtgtttaacggctttgagctgata

SEQ ID NO: 141724 - DNA, 75 bp, synthetic construct
  source 1..75: mol_type = other DNA
ctgggaggaataacgatagccagctatcttctgccgccagcaggactgctgggaaaactggggaatctggcgaaa

SEQ ID NO: 141725 - DNA, 75 bp, synthetic construct
  source 1..75: mol_type = other DNA
agtcctatggctatgacagctgcggctacctgaaggcgcagtctgcgggcaggcaccggataagtgaagagactg

SEQ ID NO: 141726 - DNA, 75 bp, synthetic construct
  source 1..75: mol_type = other DNA
cgttcgtggagcgcagcgaaaacgtgatcctgctgggacctcctggtgtcggaaaaacgcatctggccatagctc

SEQ ID NO: 141727 - DNA, 75 bp, synthetic construct
  source 1..75: mol_type = other DNA
ctgcgtaaacttcctcaagcaaaacgccgccgatgcgccggacgcatctttcaacaacgtgttcccggaggacga

SEQ ID NO: 141728 - DNA, 75 bp, synthetic construct
  source 1..75: mol_type = other DNA
gggatacttacatcaatcagtaacaaatcttcatatatatgatgatagagtaggacaagccaatgaaatatacga

SEQ ID NO: 141729 - DNA, 75 bp, synthetic construct
  source 1..75: mol_type = other DNA
ttcgttttagtgaagaagagatcgcccgccacattgttgccgctcgcgagataagcctcaccttgctgcccctga

SEQ ID NO: 141730 - DNA, 75 bp, synthetic construct
  source 1..75: mol_type = other DNA
gagcatgggaactaaaaaccctgctgctgggtgcgttgacgcgcaggcttaaggaggacgaggcgggagagtcac

SEQ ID NO: 141731 - DNA, 75 bp, synthetic construct
  source 1..75: mol_type = other DNA
gacagactgatcgcgacactgatgaaagcgaaacaggaaaaccggctggagcgtcagctacagcaactgagttat

SEQ ID NO: 141732 - DNA, 75 bp, synthetic construct
  source 1..75: mol_type = other DNA
atcttgatggctgaaggtaaatattacgaagccaatctcgctctgaaaggtgctgaagatggcataattatggat

SEQ ID NO: 141733 - DNA, 75 bp, synthetic construct
  source 1..75: mol_type = other DNA
aggtgcaattgaaaaactgcagttggcaggaattaatatatctgaaacacagtggcttatgcctttaaaacagac

SEQ ID NO: 141734 - DNA, 75 bp, synthetic construct
  source 1..75: mol_type = other DNA
ggaaacccggggcggttcaagatgcaactttcgccagatacgacggcgctctttgccgtgctttctgactttcca

SEQ ID NO: 141735 - DNA, 75 bp, synthetic construct
  source 1..75: mol_type = other DNA
gcatgaaggactgtccccgcgggtgacttacggaaagggcgctgaggcgttctccctggtatggacagagaaggg

SEQ ID NO: 141736 - DNA, 75 bp, synthetic construct
  source 1..75: mol_type = other DNA
gagtatgtctatgatctgaaagtatatctgcaagaaaaaaacaaagatatatgtcagtatatttatatctatcgt

SEQ ID NO: 141737 - DNA, 75 bp, synthetic construct
  source 1..75: mol_type = other DNA
aatatgtatcctgatagccagcaagggtttgccccaacggtacgtgggattgcccgtacggcggcccagctaacg

SEQ ID NO: 141738 - DNA, 75 bp, synthetic construct
  source 1..75: mol_type = other DNA
atgacactaacgaggctgagcaaagaacatattattgacgttcacctcagagagttcggcagaacagaaaaacaa

SEQ ID NO: 141739 - DNA, 75 bp, synthetic construct
  source 1..75: mol_type = other DNA
cgagacatacttatgcctgctggtcgctgacagctggtgctaacccggcatttatagcaaaccagatgggccatg

SEQ ID NO: 141740 - DNA, 75 bp, synthetic construct
  source 1..75: mol_type = other DNA
aaggggggatggaatttttatcagtatccgttgaatccgataactgatattgacccgttgggattagcgacctgt

SEQ ID NO: 141741 - DNA, 75 bp, synthetic construct
  source 1..75: mol_type = other DNA
aagccggccaaattggttctatttgaactgtctgaatatgccctctacgctattgagaaagagctctcggcgctg

SEQ ID NO: 141742 - DNA, 75 bp, synthetic construct
  source 1..75: mol_type = other DNA
taatttacccatgattgccaatgcctgtcttgagcgtgatgctacaaatctagatgaacttacatcactcattgt

SEQ ID NO: 141743 - DNA, 75 bp, synthetic construct
  source 1..75: mol_type = other DNA
tgggtcagtctgtcaaataataggctcataaagattggttttgtgaattctttggttatcatagcaaattctggt

SEQ ID NO: 141744 - DNA, 75 bp, synthetic construct
  source 1..75: mol_type = other DNA
ccgatcttaccgatgtctggagaagcagtgaatttgagtttatgtgtaataaagaaaatagccaggtctgtatgt

SEQ ID NO: 141745 - DNA, 75 bp, synthetic construct
  source 1..75: mol_type = other DNA
caccatcaccgagtgatgtccttttgattgccctgagtgcggagccgatgctgaattgggggcgttttttatcgg

SEQ ID NO: 141746 - DNA, 75 bp, synthetic construct
  source 1..75: mol_type = other DNA
acgcagctcgcatgggccaaactgcgtaccaccgttggttgggatcatattagtgattatacccgtcacgatcat

SEQ ID NO: 141747 - DNA, 75 bp, synthetic construct
  source 1..75: mol_type = other DNA
ttccgcaatgctgatggttcagtgcttaaggggcgtgtgaatccagctaactattcgggggttagttatggtcag

SEQ ID NO: 141748 - DNA, 75 bp, synthetic construct
  source 1..75: mol_type = other DNA
tggcgttaggtatcggtacgatgattggctggcgccgtgtggcaacgactatcggtgagaaaatcggtaagaaag

SEQ ID NO: 141749 - DNA, 75 bp, synthetic construct
  source 1..75: mol_type = other DNA
tgcgggaggtggaagacgcgggcgggcagcggatactctgccactacgatggtgccgcaaggctgacgcagctta

SEQ ID NO: 141750 - DNA, 75 bp, synthetic construct
  source 1..75: mol_type = other DNA
cgagattgattgtaatgaggaggcggtgctggagattattctgcaggaactgaaccgccgatcaccctcaccctg

SEQ ID NO: 141751 - DNA, 75 bp, synthetic construct
  source 1..75: mol_type = other DNA
tgttgctctgcacgtttagcggtagagcttgatggtgggcaacatgattcagctatcgcgtatgataccaggcgc

SEQ ID NO: 141752 - DNA, 75 bp, synthetic construct
  source 1..75: mol_type = other DNA
cggtatacatagaaagagccattgaatccctgaaacgaaaaaagctcccgattaatgaccaactgctctctcacc

SEQ ID NO: 141753 - DNA, 75 bp, synthetic construct
  source 1..75: mol_type = other DNA
aatattgaagtaaaactcacttcggcaaaagtaggcgttaataataaacaacttctgggcaatctggaaagttcc

SEQ ID NO: 141754 - DNA, 75 bp, synthetic construct
  source 1..75: mol_type = other DNA
gactatgggaccaaaactaccagtaacgccgggagtcacacgcattcaataccaacatcagatggtgcaaaccag

SEQ ID NO: 141755 - DNA, 75 bp, synthetic construct
  source 1..75: mol_type = other DNA
gcttcattgaaatggtgtaactttactggcagtcttttccaatcctctttattaagaggagtcctttttagaggc

SEQ ID NO: 141756 - DNA, 75 bp, synthetic construct
  source 1..75: mol_type = other DNA
ccagcctgtgggggctggcactcagcctgcccgcagacaccggctacccggacccgcggggggaactggacccgg

SEQ ID NO: 141757 - DNA, 75 bp, synthetic construct
  source 1..75: mol_type = other DNA
gaacgtcagcaaatcagcatgctggccaccattgcctcaggtattgcgggcggacttgccggcaacagtacggcg

SEQ ID NO: 141758 - DNA, 75 bp, synthetic construct
  source 1..75: mol_type = other DNA
ttgccgcacaactgggcggaaacaatgcggcttccggtgctgcaggggcattcagtggtgaacttgcagcccggt

SEQ ID NO: 141759 - DNA, 75 bp, synthetic construct
  source 1..75: mol_type = other DNA
acgggtgaatattctgaagggggagcagcgtcgtgtcagtggcagtgcacgtgtttccctcaagcgtcatatctg

SEQ ID NO: 141760 - DNA, 75 bp, synthetic construct
  source 1..75: mol_type = other DNA
ctcgtgagttgtggtcttattttggttatggggtaggtcagtgttttagctttggcttagtgggttcgtttatta

SEQ ID NO: 141761 - DNA, 75 bp, synthetic construct
  source 1..75: mol_type = other DNA
aagtagcagtgaatttattactcaaagcgacttcgctgcaccttctctaatttggcttgactatgccataccaag

SEQ ID NO: 141762 - DNA, 75 bp, synthetic construct
  source 1..75: mol_type = other DNA
ggacccacctgttgaagacgtcgatgcgaaagcagctgagcttagaaaacaactcacgccggaagtcgtgatgat

SEQ ID NO: 141763 - DNA, 75 bp, synthetic construct
  source 1..75: mol_type = other DNA
ccgttggaaaactatgtatttaatgattcgaaaagtaatattaaatacattgaggcttccattttaggtattcca

SEQ ID NO: 141764 - DNA, 75 bp, synthetic construct
  source 1..75: mol_type = other DNA
ttaacccggacaccaacggcgatctctccacgcttgcccagctactttccggctttagcggtacggcggttggcg

SEQ ID NO: 141765 - DNA, 75 bp, synthetic construct
  source 1..75: mol_type = other DNA
atcgcatcgacgcctcatcttgcagaagaaatggtcgctgccggtgtgaaatatgcgtttgttgttgaaaatgcg

SEQ ID NO: 141766 - DNA, 75 bp, synthetic construct
  source 1..75: mol_type = other DNA
aagaaaactaatgcaaaattaattctggatggtagtgtcaacacaaaaaatgatgttgaagtcagtaatgccagt

SEQ ID NO: 141767 - DNA, 75 bp, synthetic construct
  source 1..75: mol_type = other DNA
tacggcaatgtttttggtcatcgcggtttacccattcgctggtgtttgcgtttgttgtcccgctgttatgtgtgc

SEQ ID NO: 141768 - DNA, 75 bp, synthetic construct
  source 1..75: mol_type = other DNA
gggcagacaacatttactccgccagcctcgacgggctgggtgtcaccatgtgggcggtgacgtgggagcaggaat

SEQ ID NO: 141769 - DNA, 75 bp, synthetic construct
  source 1..75: mol_type = other DNA
tgatgtcacatttaatacgggcgacagcgaacaagggattgttccctgcctgacacgcgcgcaacttgccagtat

SEQ ID NO: 141770 - DNA, 75 bp, synthetic construct
  source 1..75: mol_type = other DNA
cgcgttacattgcacctgatgggcaggttacggcaggtacagccaacgccgacgccacctttaaagttcagtacc

SEQ ID NO: 141771 - DNA, 75 bp, synthetic construct
  source 1..75: mol_type = other DNA
ctgaagcgataaagattgttgactttcctgcttatttggatgagcggcatgttaattatcaaattgtttttgaaa

SEQ ID NO: 141772 - DNA, 75 bp, synthetic construct
  source 1..75: mol_type = other DNA
ccgcatcgccagctggcagcacgctgtgagcaaacctcgagtgatgaagacgcgtggcgggaatcagtataagca

SEQ ID NO: 141773 - DNA, 75 bp, synthetic construct
  source 1..75: mol_type = other DNA
aaggatcgcctcatggcagcatgctgtgagcaagcctcgcctgatgaagacgcgcgccggaaaccagtataagca

SEQ ID NO: 141774 - DNA, 75 bp, synthetic construct
  source 1..75: mol_type = other DNA
gaaaaattaggacgttatggactagggagtgcagaaacgcacgttaaggatttcatgataagacacaaaaaaatg

SEQ ID NO: 141775 - DNA, 75 bp, synthetic construct
  source 1..75: mol_type = other DNA
agccgcttcttttatgacgcctttccgggaatgcgcctgcgccacccggtgactgacgataccgacgatgaccgt

SEQ ID NO: 141776 - DNA, 75 bp, synthetic construct
  source 1..75: mol_type = other DNA
cgtgacggacggcaagggcattcaccgttattactatgatcctgacggcaatattctgcgggaagaagcgccgga

SEQ ID NO: 141777 - DNA, 75 bp, synthetic construct
  source 1..75: mol_type = other DNA
atggcttcattcgcatatgaaaataaaaaattgaaaaaactcttcactttattagataagagagacatgatcttg

SEQ ID NO: 141778 - DNA, 75 bp, synthetic construct
  source 1..75: mol_type = other DNA
aaatccgggaataccgcgatgataaactgtacagcgtaaggcacctggtgtttaacggctttgagctgataagcc

SEQ ID NO: 141779 - DNA, 75 bp, synthetic construct
  source 1..75: mol_type = other DNA
caacatgtcccataatcagacaacgggtgctggctaaccttgaagccagtcgggcagcaagggctgcatctaatt

SEQ ID NO: 141780 - DNA, 75 bp, synthetic construct
  source 1..75: mol_type = other DNA
gctggaccggaacggccaggtcacggcggtgacagcctcaggcaccgggctgggctatggcgaaggcgacgagac

SEQ ID NO: 141781 - DNA, 75 bp, synthetic construct
  source 1..75: mol_type = other DNA
catccgctgtatcctgccaccggaagatgaacgcgacagacaccccggtgaatccctgctgaaaaccacctaccg

SEQ ID NO: 141782 - DNA, 75 bp, synthetic construct
  source 1..75: mol_type = other DNA
ttacaacgccacgctggactatggtgacggctgcaccaccgtgacggacggcaagggcattcaccgttattacta

SEQ ID NO: 141783 - DNA, 75 bp, synthetic construct
  source 1..75: mol_type = other DNA
gtatgcctatgacaaatccggcaggctgacgggtatcttcagcccggacggcacatcacagcgcaccggctatga

SEQ ID NO: 141784 - DNA, 75 bp, synthetic construct
  source 1..75: mol_type = other DNA
ttgtttctgtgtgtgttggtggcatcggtggatttgtttgtgggtatgactattccgatactcaacatcaagaga

SEQ ID NO: 141785 - DNA, 75 bp, synthetic construct
  source 1..75: mol_type = other DNA
aaaccctactgctccagcagggagtaattctgccaatggccccatatataggattggtagaagccaaagtggaac

SEQ ID NO: 141786 - DNA, 75 bp, synthetic construct
  source 1..75: mol_type = other DNA
gaaacgacgggatgaaacgcgcccaggaaatggccgcacgaatggccgagccgtgggagcgtatcaaagcgacat

SEQ ID NO: 141787 - DNA, 75 bp, synthetic construct
  source 1..75: mol_type = other DNA
gagctttgtcgatgccaccggaaaaatgctgccgatgggcgacattctgcaaaaactccagaacaaatacgggca

SEQ ID NO: 141788 - DNA, 75 bp, synthetic construct
  source 1..75: mol_type = other DNA
tgaccgttcattttcaggctgcgatggagcggcaaattgcccgtaaacgtgtattactggtctgttcaaccggaa

SEQ ID NO: 141789 - DNA, 75 bp, synthetic construct
  source 1..75: mol_type = other DNA
cgccggtcgcaactccaaattttgggcaagaagctttgaggctggggttgataagggatggaaacgactattaac

SEQ ID NO: 141790 - DNA, 75 bp, synthetic construct
  source 1..75: mol_type = other DNA
tcgctttatacttatcgctggaatccgacaataggcccgcagtggacgcgtcacgcaagaaaagatgaagtggac

SEQ ID NO: 141791 - DNA, 75 bp, synthetic construct
  source 1..75: mol_type = other DNA
cggatggattccgctttcgatcgcggccggaggtactggtgcggcaactattgatggtgccagaactaatcttgg

SEQ ID NO: 141792 - DNA, 75 bp, synthetic construct
  source 1..75: mol_type = other DNA
ttgttaaaattcctcagcaattagaaagaagaaaaaaaccgggatatggttcagctccaaaacgtaactctcagg

SEQ ID NO: 141793 - DNA, 75 bp, synthetic construct
  source 1..75: mol_type = other DNA
cataatcttcgacatactgtctgaagaaatagaaaaaaaggctagagaagaaataaaaaaatcagcccagcaatg

SEQ ID NO: 141794 - DNA, 75 bp, synthetic construct
  source 1..75: mol_type = other DNA
gtcatcacggaataataagggatgaagaaaataaatgttattgtctcggtgctttgcaggttccatttaatcaga

SEQ ID NO: 141795 - DNA, 75 bp, synthetic construct
  source 1..75: mol_type = other DNA
ggcaaagctgttcgccgcagaacaatttgaccgcgtgatccacctagccgcccaggccggcgtgcgctactcgct

SEQ ID NO: 141796 - DNA, 75 bp, synthetic construct
  source 1..75: mol_type = other DNA
tcacgcatactgagaatgtaaatatttaccagaccattcagcaaagagttcagccaagagtacaaaacagaaatc

SEQ ID NO: 141797 - DNA, 75 bp, synthetic construct
  source 1..75: mol_type = other DNA
ccctaccgcaagaatggatgagccttcgatttttaccagatctgggccggggattttaggaatgtgtaaacccga

SEQ ID NO: 141798 - DNA, 75 bp, synthetic construct
  source 1..75: mol_type = other DNA
tggtactacgatgaatcggaccgtatcactcaccgcacggtgaacggtgaacggcgaaccggcagagcagtggca

SEQ ID NO: 141799 - DNA, 75 bp, synthetic construct
  source 1..75: mol_type = other DNA
cacactaacagccgccgtcgcgtattttaccgatctcggttgccgcattttcaatctgtcgctggggaatgctaa

SEQ ID NO: 141800 - DNA, 75 bp, synthetic construct
  source 1..75: mol_type = other DNA
tctactggcgcgggcgcgtatgggtggatcagttctggtttggtctgaaagggatggagcgttacggttatcgcg

SEQ ID NO: 141801 - DNA, 75 bp, synthetic construct
  source 1..75: mol_type = other DNA
tctgaaagggatggagcgttacggttatcgcgatgatgccctgaagctggcggatacgttcttccggcacgccaa

SEQ ID NO: 141802 - DNA, 75 bp, synthetic construct
  source 1..75: mol_type = other DNA
tggacatggtactgctgttgcaggtattgccctatatggtgatgttgaggcttgcgatgctagcaatttctggca

SEQ ID NO: 141803 - DNA, 75 bp, synthetic construct
  source 1..75: mol_type = other DNA
atctgcggagaatttgaaaactggctccgtgaaaatatgattcatcgcttggatagaattaatcttgatagtttg

SEQ ID NO: 141804 - DNA, 75 bp, synthetic construct
  source 1..75: mol_type = other DNA
agggctggtcggcggaagatcgcaaaagctgggctcttcggcgttatggttttcctgtaacggaacgctttaaac

SEQ ID NO: 141805 - DNA, 75 bp, synthetic construct
  source 1..75: mol_type = other DNA
tttcatcaggattgctcctgagcgtgttatggcgcctccaaaaacatacgtatacgtttaccaaccttttcaccg

SEQ ID NO: 141806 - DNA, 75 bp, synthetic construct
  source 1..75: mol_type = other DNA
aaaacgcacaattcaaagcgttgtaactgtagacaatggctcgatcattgttgttggtgggttagcttcaagaaa

SEQ ID NO: 141807 - DNA, 75 bp, synthetic construct
  source 1..75: mol_type = other DNA
atttgccattatgtttctgttctcagctttttggagtaatgtttcaatgtatctgacaacggctttccatttcag

SEQ ID NO: 141808 - DNA, 75 bp, synthetic construct
  source 1..75: mol_type = other DNA
agtcggtggatcaggccagctatatgtacagcgataaccattatctggcggagatggcgacgattctcggtaaac

SEQ ID NO: 141809 - DNA, 75 bp, synthetic construct
  source 1..75: mol_type = other DNA
tttcaactgtaaccgggattggtgatgggaacatgtcgcccggaactgtaacaccggatagcgccgggcagctgc

SEQ ID NO: 141810 - DNA, 75 bp, synthetic construct
  source 1..75: mol_type = other DNA
agttttttgcctgatatttttgcgcaaaattcagactctgatgagcatactgatttgatagctgtcattcaggta

SEQ ID NO: 141811 - DNA, 75 bp, synthetic construct
  source 1..75: mol_type = other DNA
tgctgcgcagacctgaatattccgttctttgtggatacgggaaacaaaaagctggtcttctggtttgtacgtgtt

SEQ ID NO: 141812 - DNA, 75 bp, synthetic construct
  source 1..75: mol_type = other DNA
caaagcgagcgatggcgttgtgaacatgaaagacagtgccgtcgatgccgtacagaatttcgacctgaacgaaac

SEQ ID NO: 141813 - DNA, 75 bp, synthetic construct
  source 1..75: mol_type = other DNA
tttattcaacaaagccgtttaggttgtaaagctattcgggtcttcaaaccggaagatattgcgccagcctttgaa

SEQ ID NO: 141814 - DNA, 75 bp, synthetic construct
  source 1..75: mol_type = other DNA
cgaccacagcaagctgatgctggtagacggagcgtggtgctgcctgggttcggccaattgggacgcgcgcagttt

SEQ ID NO: 141815 - DNA, 75 bp, synthetic construct
  source 1..75: mol_type = other DNA
ggcgtgcgtatcgacgtgctgacgcccgcaaacggcgaccatcccacggtgcaatgggccgcgcgcgcccactac

SEQ ID NO: 141816 - DNA, 75 bp, synthetic construct
  source 1..75: mol_type = other DNA
tttggcaccctgaccaacggtgcgttggaagcgtccaacgtcgatctcagtaaagaactggtcaatatgatcgtt

SEQ ID NO: 141817 - DNA, 75 bp, synthetic construct
  source 1..75: mol_type = other DNA
gacaatgcatccttcacgaactaggatctgtcgagagtttgaagattggcttcatgaaaatgcgattcatcgttt

SEQ ID NO: 141818 - DNA, 75 bp, synthetic construct
  source 1..75: mol_type = other DNA
aaccttatgcattagttgttactgcaacggacagagaaaacgctgaagctaatctttatgccgaaattgaggcac

SEQ ID NO: 141819 - DNA, 75 bp, synthetic construct
  source 1..75: mol_type = other DNA
aacggatagagaaaacgctgaagccaatctttacagcgaaatagaggcacgaattcgtgagcaggagcgctccag

SEQ ID NO: 141820 - DNA, 75 bp, synthetic construct
  source 1..75: mol_type = other DNA
tttgagtcgtatggtgatagattcacaccatataattggttatcaaaaaaagaatggtaccaaaaaggagctaat

SEQ ID NO: 141821 - DNA, 75 bp, synthetic construct
  source 1..75: mol_type = other DNA
ttttagatgcagtaaaaattttgaaaaataaaggagttgaacctgaaatttttatggcaggtgatggtggttttg

SEQ ID NO: 141822 - DNA, 75 bp, synthetic construct
  source 1..75: mol_type = other DNA
cctgcgtgcattaagaaaactatctgatgaagataaagagagcatttctggagtaaccttcctcggaaaaaatgt

SEQ ID NO: 141823 - DNA, 75 bp, synthetic construct
  source 1..75: mol_type = other DNA
gaggatattgaagaaatagctaaccacgattttgttttttttggggttgaaatttccaatcatcaagaaacactc

SEQ ID NO: 141824 - DNA, 75 bp, synthetic construct
  source 1..75: mol_type = other DNA
aggggaaagaccgcgccgcagtgaaaaaccaaccttcagaacgattaattatgaaagcgctgctgctttatgtcc

SEQ ID NO: 141825 - DNA, 75 bp, synthetic construct
  source 1..75: mol_type = other DNA
tgcatatataaaaaaacttcgttacagtagcagcaatctactcatgtgctttctatttatgtgtagcctttacca

SEQ ID NO: 141826 - DNA, 75 bp, synthetic construct
  source 1..75: mol_type = other DNA
cactaggtgaaatattagaaacttttttacaatctgataaacgagtcctaaggttatgcctaagtgatgttagct

SEQ ID NO: 141827 - DNA, 75 bp, synthetic construct
  source 1..75: mol_type = other DNA
agttgatgcaattggaactatacaacttcttggcacaattgatgcctcgagttttcgtgtcgactcggggataaa

SEQ ID NO: 141828 - DNA, 75 bp, synthetic construct
  source 1..75: mol_type = other DNA
agtagatttccccatccctatgacaattcaaatagcacagccgacttatccaccagagtccgattctccaggtta

SEQ ID NO: 141829 - DNA, 75 bp, synthetic construct
  source 1..75: mol_type = other DNA
gtgcttcttaattcatacttctggcggagagatattcaggtggcgggtatgcctgagagacgcagacgaataaag

SEQ ID NO: 141830 - DNA, 75 bp, synthetic construct
  source 1..75: mol_type = other DNA
atttggtgaagttcgtcagcgggcctggaaaatcatgccccgggaagcactgaaaagtacggcacagcgcatgag

SEQ ID NO: 141831 - DNA, 75 bp, synthetic construct
  source 1..75: mol_type = other DNA
tactgacgaaaaaccattgttccctgcggaaagtaaccataacgtgcaccatagagctatcgttgaaactatgga

SEQ ID NO: 141832 - DNA, 75 bp, synthetic construct
  source 1..75: mol_type = other DNA
tattgtaacagtaacgtgcttatatgctttttatttttatgtggcctctaccacatatctgtatttacaggaaaa

SEQ ID NO: 141833 - DNA, 75 bp, synthetic construct
  source 1..75: mol_type = other DNA
atgggtaaaataattggtatcgacctgggtactaccaactcttgtgtagcgattatggatggcaccactcctcgc

SEQ ID NO: 141834 - DNA, 75 bp, synthetic construct
  source 1..75: mol_type = other DNA
aacactatcaataagttggagtcattaccaagtaatggttccgttaacctcggcaatattacctatgtgctgatg

SEQ ID NO: 141835 - DNA, 75 bp, synthetic construct
  source 1..75: mol_type = other DNA
cggtgctgtgtggaaatccgcccatcttgccgggcgccggtgtcgtgtgggaatccgcccaccttaccgggcgcc

SEQ ID NO: 141836 - DNA, 75 bp, synthetic construct
  source 1..75: mol_type = other DNA
atgcatagcgtaacgggctgccagttccaggataacggtaaccgccgaatctggttcttccgcgataacagccag

SEQ ID NO: 141837 - DNA, 75 bp, synthetic construct
  source 1..75: mol_type = other DNA
atgcatagcgtaacgggttgccagtttcaggacaacggaaaccgccgaatctggttcttccgcgataacagccag

SEQ ID NO: 141838 - DNA, 75 bp, synthetic construct
  source 1..75: mol_type = other DNA
ctttatcacatttatttataaactatgacaataagttaaaagaaatactagagaaagtgaattattgcatagcat

SEQ ID NO: 141839 - DNA, 75 bp, synthetic construct
  source 1..75: mol_type = other DNA
taacaacggcttaggttggcgtcatttcactcccacatggatgtcgggcatcaacttctttttcgaccacgatct

SEQ ID NO: 141840 - DNA, 75 bp, synthetic construct
  source 1..75: mol_type = other DNA
gatttggtttggaaaattgatgggcagaaattagttgcggagaacctgacaccgttttatatgaatttaggaaaa

SEQ ID NO: 141841 - DNA, 75 bp, synthetic construct
  source 1..75: mol_type = other DNA
cctgattatcaacatcccccctggcggtacgaaaacagagttcttctccattcacttcccggcgtatgtcaacgc

SEQ ID NO: 141842 - DNA, 75 bp, synthetic construct
  source 1..75: mol_type = other DNA
tttacgccgcatccggcaggtaacccccaatcttaccgacgacgccccagcttcactgctttcagcaccacaaat

SEQ ID NO: 141843 - DNA, 75 bp, synthetic construct
  source 1..75: mol_type = other DNA
gcaggatgatgagcgtcgcgaagatgtaatacgcgcactgacagcgcgtgttcctgcatttactttcgcacagga

SEQ ID NO: 141844 - DNA, 75 bp, synthetic construct
  source 1..75: mol_type = other DNA
ggccgggaaatattcgtgaactggaaaacgcggtggaacgggcggtggtgctgctgaccggggaatatatttccg

SEQ ID NO: 141845 - DNA, 75 bp, synthetic construct
  source 1..75: mol_type = other DNA
agataagtccaaagagcacccaacgccgtttgtgagcattcagcagcgccttcacaccgacgatgcaacaggatt

SEQ ID NO: 141846 - DNA, 75 bp, synthetic construct
  source 1..75: mol_type = other DNA
cggtatcgcgctcaagcaacgggcaaatcaccggtggtcgtggtggatactacggacctgagttctccggcatgg

SEQ ID NO: 141847 - DNA, 75 bp, synthetic construct
  source 1..75: mol_type = other DNA
cgcctgtcccagacagcataatcgccggtaccccgcagaacagctccagcagcgtcatcaccgccacagtcgttg

SEQ ID NO: 141848 - DNA, 75 bp, synthetic construct
  source 1..75: mol_type = other DNA
aagcaacttataactttaaataacatgccagcatggggtgatattcctccacttacacgagaagaattaattgtc

SEQ ID NO: 141849 - DNA, 75 bp, synthetic construct
  source 1..75: mol_type = other DNA
ccagggggatttatgccatgaccaacagccagatcgacctcacgagcgatctggtcattgatatgagtacacccg

SEQ ID NO: 141850 - DNA, 75 bp, synthetic construct
  source 1..75: mol_type = other DNA
cattagcgttggcaattgggtttttatcaggttgtacaatcatccctggccagggattaaacagtctgcgtaaga

SEQ ID NO: 141851 - DNA, 75 bp, synthetic construct
  source 1..75: mol_type = other DNA
cagatgggaaaagcgactcgttgctggggatggggctgggcagcagccttatcaggcggtttgagggagtggtaa

SEQ ID NO: 141852 - DNA, 75 bp, synthetic construct
  source 1..75: mol_type = other DNA
ccggataccgttgaggccagtctggaaaatggtagctccacgcttagcacatcaattaatgtcaacgctgatgcg

SEQ ID NO: 141853 - DNA, 75 bp, synthetic construct
  source 1..75: mol_type = other DNA
tagccaagctctacctggacggacctgattctgtggcgcccattatggcgatggttacaacgatgctgggtggtg

SEQ ID NO: 141854 - DNA, 75 bp, synthetic construct
  source 1..75: mol_type = other DNA
ggcctaccgggcgaacgtcgagcagctggcgccggtaataatttcggttctgccgctggcgtaccgggatcgcgt

SEQ ID NO: 141855 - DNA, 75 bp, synthetic construct
  source 1..75: mol_type = other DNA
atcaattagctgctatcagaacctttatcagcaccgtaaaatgccggagtttcagttccgccgctaaattgctga

SEQ ID NO: 141856 - DNA, 75 bp, synthetic construct
  source 1..75: mol_type = other DNA
gtattaaaaatatatgcagtccacgtgggatgataattcacaggatacggaaacgtcctgtagtggctgtaagcg

SEQ ID NO: 141857 - DNA, 75 bp, synthetic construct
  source 1..75: mol_type = other DNA
catgaaaatgaaaagaatctgataagcgtcgtcaacaattatgcagattctgttttagcgggggtaactacatgt

SEQ ID NO: 141858 - DNA, 75 bp, synthetic construct
  source 1..75: mol_type = other DNA
gtcgggaactttgcatgaagcgccaagccctatcattccgctaaattggtcgaaagcttcaatgactctcatgtt

SEQ ID NO: 141859 - DNA, 75 bp, synthetic construct
  source 1..75: mol_type = other DNA
ttcaagtagcaggtaaaacacttagccaagtacggcaagatatagcagcccgtttgaccacatatattgaaagtc

SEQ ID NO: 141860 - DNA, 75 bp, synthetic construct
  source 1..75: mol_type = other DNA
tacttgtagccgggaaaacacttagtcaagtacgccaggatatagcaaatcgtcttacaacttatattgagagcc

SEQ ID NO: 141861 - DNA, 75 bp, synthetic construct
  source 1..75: mol_type = other DNA
actgatggttactgtatgggaccatccggaattaactactcctgctggccagtataggagtgcaagtgataccgg

SEQ ID NO: 141862 - DNA, 75 bp, synthetic construct
  source 1..75: mol_type = other DNA
cggcattagcgttgacaattagttttttatcgggttgtacaattatccctggccagggattaaacagtctacgta

SEQ ID NO: 141863 - DNA, 75 bp, synthetic construct
  source 1..75: mol_type = other DNA
aaatccggtcaacaggcgatcaccaacgtaccactgaccattctcgacgccatcaacgccgcaggtggcctgacc

SEQ ID NO: 141864 - DNA, 75 bp, synthetic construct
  source 1..75: mol_type = other DNA
ctgggatcacccagaactcaccacgccagccggtcagtaccgcagttccagcgacaccggcaactgggtacagcc

SEQ ID NO: 141865 - DNA, 75 bp, synthetic construct
  source 1..75: mol_type = other DNA
taactgggttaattcagatggtactattttctatccttatattggtaaggtgcaggtagcagggaaaactctcgc

SEQ ID NO: 141866 - DNA, 75 bp, synthetic construct
  source 1..75: mol_type = other DNA
tgcaggtggcgggcaaaaccttgagccaggtacgccaggatatcgcaagccgtttaaccacctatatcgaaagcc

SEQ ID NO: 141867 - DNA, 75 bp, synthetic construct
  source 1..75: mol_type = other DNA
tagtgatgcaactggcgtgttcgtgattcgccaattaaaagatagtaaagaaggtaaaattgcgaatatatatca

SEQ ID NO: 141868 - DNA, 75 bp, synthetic construct
  source 1..75: mol_type = other DNA
actggcgaagtgatgaagtcaggacagcaaccaattacaaacataccacttacggtcatggatgcaataaatgct

SEQ ID NO: 141869 - DNA, 75 bp, synthetic construct
  source 1..75: mol_type = other DNA
cggcattagcattggcaatcgggtttctaacaggttgtactattgttccaggccaagggttaaatagtctacgta

SEQ ID NO: 141870 - DNA, 75 bp, synthetic construct
  source 1..75: mol_type = other DNA
cgcaggtagatgtcagtattgcagcatttaggtctcaaaaaacatacgtcacaggtgaagtgattaagtcaggtc

SEQ ID NO: 141871 - DNA, 75 bp, synthetic construct
  source 1..75: mol_type = other DNA
tagcggcaattagtagcatcattggttctatgattcttgcctatcgagttacagggattcttgcagcactttctc

SEQ ID NO: 141872 - DNA, 75 bp, synthetic construct
  source 1..75: mol_type = other DNA
atgaacaaaattttaaaactgtgtgactggctgatttgttcccgactgatgagaacgccatggccgctggccgga

SEQ ID NO: 141873 - DNA, 75 bp, synthetic construct
  source 1..75: mol_type = other DNA
atcagaactataaatgttggtaatgctgaaatatctaaccttagtgtatctttgaatgtcatggtatgtgttcat

SEQ ID NO: 141874 - DNA, 75 bp, synthetic construct
  source 1..75: mol_type = other DNA
ttcgcgcactaaaaccgacaaagcggactcaaaacttattgcccggttctgtaaagcagcagtgcctgacggatg

SEQ ID NO: 141875 - DNA, 75 bp, synthetic construct
  source 1..75: mol_type = other DNA
ccattacgctggcggcggcgaaaaaaatggcgcaggccgtcgaggctaaagcgcttgagatcaacgtgccggtgg

SEQ ID NO: 141876 - DNA, 75 bp, synthetic construct
  source 1..75: mol_type = other DNA
ttcaccgggtaggtattctgttggccattctggtgttcatctttagtcttttattttcaacaacggatacgcaag

SEQ ID NO: 141877 - DNA, 75 bp, synthetic construct
  source 1..75: mol_type = other DNA
ccgctggctgttagcttgtatgactatattaatgatgcttcggcactggcctgcctcataaatttgtcgctgaac

SEQ ID NO: 141878 - DNA, 75 bp, synthetic construct
  source 1..75: mol_type = other DNA
aatagcttattcccattttcgaaaactcaagatattgaagaaacattacgcaaacaatggtctttcttatttcaa

SEQ ID NO: 141879 - DNA, 75 bp, synthetic construct
  source 1..75: mol_type = other DNA
gatgcgtcgggcgagatatcggcgaaggcgttgcgcgcccgcccgctggccatccgcttgcgcgacggggtggcc

SEQ ID NO: 141880 - DNA, 75 bp, synthetic construct
  source 1..75: mol_type = other DNA
ggagaaaacaggaaagataataatacgggggacggagtttctatttgaggctaccggtcctgtagatattaaagg

SEQ ID NO: 141881 - DNA, 75 bp, synthetic construct
  source 1..75: mol_type = other DNA
acaaccagacaagcaaggtgacgggaactgataccgaagaagtcgtcaaaaaacagagtattaaaataggtgata

SEQ ID NO: 141882 - DNA, 75 bp, synthetic construct
  source 1..75: mol_type = other DNA
gacgccacgggcggtgaacaggtctatatccacgcgcagaagaacatggatacggaggtgctgaataatcggacg

SEQ ID NO: 141883 - DNA, 75 bp, synthetic construct
  source 1..75: mol_type = other DNA
catggttaccccaaaataataatcgaattaatataaaactcacgaccgtcgtatctcagtctaacattaatcatc

SEQ ID NO: 141884 - DNA, 75 bp, synthetic construct
  source 1..75: mol_type = other DNA
gaatgtgatgctcaaaattccaggcgctggctggcggcgaaagagcagaggtggctgagtatgaaggcccggtag

SEQ ID NO: 141885 - DNA, 75 bp, synthetic construct
  source 1..75: mol_type = other DNA
aacgtcgtactttttcgttaccttccttatccgaaaagacagatactatagaatctgcatttactgaacaggcag

SEQ ID NO: 141886 - DNA, 75 bp, synthetic construct
  source 1..75: mol_type = other DNA
tataaagatcttgtcagagaaaacagcaataaagatggtattgtagaccttccaaaagtagcaacgcaattagag

SEQ ID NO: 141887 - DNA, 75 bp, synthetic construct
  source 1..75: mol_type = other DNA
ccgcctttgttgcggtcatacagctcaatcccaagggctaccgctatctgagcacagacagctttatcgagaagc

SEQ ID NO: 141888 - DNA, 75 bp, synthetic construct
  source 1..75: mol_type = other DNA
gtgtcaccaatgttttggcatccaatcctgacgcctatatctgggctggtcgtgacttccaccagcgcccgcaac

SEQ ID NO: 141889 - DNA, 75 bp, synthetic construct
  source 1..75: mol_type = other DNA
ggcccggcaggcccacagggaccgaaaggagataccggagccactggtccggcaggcccacagggaccgaaagga

SEQ ID NO: 141890 - DNA, 75 bp, synthetic construct
  source 1..75: mol_type = other DNA
ccacaggtcctgcaggtccgcagggtccggcgggaagttctgacagcgggttgtttggcgtcggttcttttgttc

SEQ ID NO: 141891 - DNA, 75 bp, synthetic construct
  source 1..75: mol_type = other DNA
ttctcactccgccgccatctcaacattaactttagccgggacttgaacggaagcggaacacagggtttattcatc

SEQ ID NO: 141892 - DNA, 75 bp, synthetic construct
  source 1..75: mol_type = other DNA
attcagggggccagtctattagcgtgggaggtgctcctgttcttggtactgatggcactccagttaatggccaaa

SEQ ID NO: 141893 - DNA, 75 bp, synthetic construct
  source 1..75: mol_type = other DNA
aattccaagaaaataacttaactaatcagcgttataatataaccgtcatggagccgcatgaagtttgtgccagaa

SEQ ID NO: 141894 - DNA, 75 bp, synthetic construct
  source 1..75: mol_type = other DNA
aagctatctcgataatccactgcaaccggcgaaaggtcgaggcgaagatacctatgtacaggtgagctgggaaca

SEQ ID NO: 141895 - DNA, 75 bp, synthetic construct
  source 1..75: mol_type = other DNA
agtgttatgacagcataaagaaaataccacctagccttggccctgctttcttcagcttttcattgtttattgcat

SEQ ID NO: 141896 - DNA, 75 bp, synthetic construct
  source 1..75: mol_type = other DNA
agtttacaagtccgtatccggagatacctctatttctaagctgctcaaggcagtttgggtatgttagtgcttcaa

SEQ ID NO: 141897 - DNA, 75 bp, synthetic construct
  source 1..75: mol_type = other DNA
gcgcccacagaaacatcgtcagtggccggtgtggcggtagctgtcgccacagcgacaccgccggatgcgacagcc

SEQ ID NO: 141898 - DNA, 75 bp, synthetic construct
  source 1..75: mol_type = other DNA
ttacggagcagcaattcgccgcgatcactggaaaaacaccttctgaagttttaacgggggaccaaacatcggctc

SEQ ID NO: 141899 - DNA, 75 bp, synthetic construct
  source 1..75: mol_type = other DNA
tagagccttggggaggattttatgatgcaaacaatcaattgcaaatggacacgaatcagcctggacatgagttta

SEQ ID NO: 141900 - DNA, 75 bp, synthetic construct
  source 1..75: mol_type = other DNA
aagaccttcaggttgcagcaaaaaatgaaagagtacacttctcatgctgttcccgctgatcgtgatgcctggctg

SEQ ID NO: 141901 - DNA, 75 bp, synthetic construct
  source 1..75: mol_type = other DNA
aggcttttcgaatttggtcggtgatagaggattactcgccacttcgtggctcgccctgcgggccgttgctggcgc

SEQ ID NO: 141902 - DNA, 75 bp, synthetic construct
  source 1..75: mol_type = other DNA
tattgagcaatgtttaggtgaggagttatcccgttttggcaacaaggcaatgattctggaagatccggtggttaa

SEQ ID NO: 141903 - DNA, 75 bp, synthetic construct
  source 1..75: mol_type = other DNA
ctatttttgacagaacagttgaggttctaaatattcatccaggatatacattaggccagaaggttgacattctta

SEQ ID NO: 141904 - DNA, 75 bp, synthetic construct
  source 1..75: mol_type = other DNA
cgtaacagtaaagaatacgtcgaaaatagcgattttgagcagagtgatgataataaaactattaccactcaaatt

SEQ ID NO: 141905 - DNA, 75 bp, synthetic construct
  source 1..75: mol_type = other DNA
atagcagaggcagataaccagaactggcgaacggacgaactacaaataattagcgatttcgcctatttatatatg

SEQ ID NO: 141906 - DNA, 75 bp, synthetic construct
  source 1..75: mol_type = other DNA
atgcaatgcagccccgccatgcaggcattaattgagcagatttatcatatttttcgtcgttatccggtgccgtcg

SEQ ID NO: 141907 - DNA, 75 bp, synthetic construct
  source 1..75: mol_type = other DNA
ttatattcgtgattttattatttgcgtcattgtttatgctatatcactttgccagcttaaacatattcccaccaa

SEQ ID NO: 141908 - DNA, 75 bp, synthetic construct
  source 1..75: mol_type = other DNA
ccgattacagacaagcctggaacgtggaacataaattatcggatattctactgttgactatttgtgccgttattt

SEQ ID NO: 141909 - DNA, 75 bp, synthetic construct
  source 1..75: mol_type = other DNA
aagaagtttttcctgtatttctcaatcaatataaaaataatggggagtggctaccattaacaccatttacactat

SEQ ID NO: 141910 - DNA, 75 bp, synthetic construct
  source 1..75: mol_type = other DNA
tatgattccctcaactgatataaaaaaatatattgagatgattcctcaaagcataaaagaatatattatcataaa

SEQ ID NO: 141911 - DNA, 75 bp, synthetic construct
  source 1..75: mol_type = other DNA
ggccaccatcagggggctcagtacggctgcggcagtcaccctgcgtatcatcaataaccatattcccgacctgtc

SEQ ID NO: 141912 - DNA, 75 bp, synthetic construct
  source 1..75: mol_type = other DNA
gatgaatctgtccgcagtcagttacgtcagcatgcctggaaccagtggccgtccgtacttaacgacatgctgacc

SEQ ID NO: 141913 - DNA, 75 bp, synthetic construct
  source 1..75: mol_type = other DNA
cagaagcaaaaaaagcgtattatgcttccatcggaaacaatgatctggcagcctgagttcacagataaaacactc

SEQ ID NO: 141914 - DNA, 75 bp, synthetic construct
  source 1..75: mol_type = other DNA
gtcaatccgctgctcggtgcaaaggtccttcccggtgaaaccgacatcgccctgcccggcccgctgccgttcatc

SEQ ID NO: 141915 - DNA, 75 bp, synthetic construct
  source 1..75: mol_type = other DNA
aaaataagatgcttcaggagcacgggcttaaccaggatgatatcttaatcacacctgtaacaagagaagaaatcg

SEQ ID NO: 141916 - DNA, 75 bp, synthetic construct
  source 1..75: mol_type = other DNA
tcgataattgcattgctcattctttgtggcgtagtgttggcgattaatctgttttttctgcgcttctccaggcgg

SEQ ID NO: 141917 - DNA, 75 bp, synthetic construct
  source 1..75: mol_type = other DNA
ttcgctttcaggataaacgaagtctgatatacatttatgctattggacttattctgataggcttttattggaaaa

SEQ ID NO: 141918 - DNA, 75 bp, synthetic construct
  source 1..75: mol_type = other DNA
gatgcggggtttgagctggaggatttcagaaagccggtgcgggttaattaccctgtggtgaacgaactcccggca

SEQ ID NO: 141919 - DNA, 75 bp, synthetic construct
  source 1..75: mol_type = other DNA
actggaaactcagggcagaagcatgcagaaaaaaagggaaacctgttccagaatacacgccaaagccagcgtctg

SEQ ID NO: 141920 - DNA, 75 bp, synthetic construct
  source 1..75: mol_type = other DNA
gcattgataacgggaataagctgaacagggaagagcgccggcagcttatggatcgcgcgattgttctgacagtga

SEQ ID NO: 141921 - DNA, 75 bp, synthetic construct
  source 1..75: mol_type = other DNA
gatcgagcgttgtgttctttgtggagcatggggaacgcaggtggcacaccggaacgaagggaaaggcatgggatt

SEQ ID NO: 141922 - DNA, 75 bp, synthetic construct
  source 1..75: mol_type = other DNA
ttaatattggcccgtggcgtttacgcaacaatggttcctggaactattttcgcggaaatggatatcattcagaac

SEQ ID NO: 141923 - DNA, 75 bp, synthetic construct
  source 1..75: mol_type = other DNA
atgcggaaagttatttcaacccggcatttttattagagaatggcacatccgttgctgatttatcgcgctttgaga

SEQ ID NO: 141924 - DNA, 75 bp, synthetic construct
  source 1..75: mol_type = other DNA
catacagtgcggtacagcctgctgtcatcggcctgccttcattaccggcacccggcgagaccatcacgctggata

SEQ ID NO: 141925 - DNA, 75 bp, synthetic construct
  source 1..75: mol_type = other DNA
aagatacgtttctaaatgctttcggtcaattaatccaaacttctacgggaagtacttttactggaattgtagaag

SEQ ID NO: 141926 - DNA, 75 bp, synthetic construct
  source 1..75: mol_type = other DNA
ggaaaaaggcattcctttattgttccgtgaagtggatgactttgccgccagcgtcgaaatagttaaacaggtgtg

SEQ ID NO: 141927 - DNA, 75 bp, synthetic construct
  source 1..75: mol_type = other DNA
attcaaaaatcacctggttaaaaatcacccttatctcctccaccagcgcattcaccatgcctatccgagataagt

SEQ ID NO: 141928 - DNA, 75 bp, synthetic construct
  source 1..75: mol_type = other DNA
cttcttaaccattccagtagagttgaggagtatctggaacaaatacaaccctccaagaaaactattcggagaatt

SEQ ID NO: 141929 - DNA, 75 bp, synthetic construct
  source 1..75: mol_type = other DNA
ccttcttgttattcaaagtcacgccaagatatagaaaagatctgtaacgaatttattaacagagtggctcacttg

SEQ ID NO: 141930 - DNA, 75 bp, synthetic construct
  source 1..75: mol_type = other DNA
agaacaattcgaaaaccatactcaatttacaaatttttatttctttgaaaatcaattaacctacgtgcgtgattt

SEQ ID NO: 141931 - DNA, 75 bp, synthetic construct
  source 1..75: mol_type = other DNA
agaaaatgaaatatcagaagaaacactgaaaaacgtgacttctgatttcaggaagatgctcatgaatgcctatca

SEQ ID NO: 141932 - DNA, 75 bp, synthetic construct
  source 1..75: mol_type = other DNA
gaaatcctgctatagcgtatgaaacagataaagtatataaaataaccgttctgcatacaaatgaccaccatggac

SEQ ID NO: 141933 - DNA, 75 bp, synthetic construct
  source 1..75: mol_type = other DNA
ttccacagattggcgaacaggcagcacaggcatacgagagcatgcgtgcagaggcgaaagcgcgtcagcttgtca

SEQ ID NO: 141934 - DNA, 75 bp, synthetic construct
  source 1..75: mol_type = other DNA
gggtccgaacacctctgtttaccggcggggcgtttccgggggccggtacacagaacctgaagttccgtctggatt

SEQ ID NO: 141935 - DNA, 75 bp, synthetic construct
  source 1..75: mol_type = other DNA
tgatgccggaaagacccgacagaaaagtcataccggaacactccggtttgatgcatgggtgtttccttttatgaa

SEQ ID NO: 141936 - DNA, 75 bp, synthetic construct
  source 1..75: mol_type = other DNA
taacttttcatcacatcgtcgaccagatgccagaagaataccatcggagaataacaccatactgacattcagtca

SEQ ID NO: 141937 - DNA, 75 bp, synthetic construct
  source 1..75: mol_type = other DNA
tcgctggatgtaacgcatgcgcgcagtcagttagccgacgacagtcgtcatgaggggattccattcgcttcctct

SEQ ID NO: 141938 - DNA, 75 bp, synthetic construct
  source 1..75: mol_type = other DNA
ttttacaacgcgaagggcgtttcaaatttgacctgacggcgggcgattttcgtagcggtaatagtcagcaatcat

SEQ ID NO: 141939 - DNA, 75 bp, synthetic construct
  source 1..75: mol_type = other DNA
accacaggaatttactgcctacggcgggacgcaattatctgccaattacaccgcctttttattagggctggggcg

SEQ ID NO: 141940 - DNA, 75 bp, synthetic construct
  source 1..75: mol_type = other DNA
gtgcctttcaatgttctgaccaaacgtcgctacacccgggaaaatgcgctcgaccgcgcttatgcctcctttaac

SEQ ID NO: 141941 - DNA, 75 bp, synthetic construct
  source 1..75: mol_type = other DNA
gtcgtgaggtttatcatgagtggcatggacctgaatccgacaagaatcgcattgaaatccagattggtgtgattg

SEQ ID NO: 141942 - DNA, 75 bp, synthetic construct
  source 1..75: mol_type = other DNA
gacggaaacggcctggaagctgtgggaactcatgggggaggtttattcgaaccgctggacccagaagaacggggc

SEQ ID NO: 141943 - DNA, 75 bp, synthetic construct
  source 1..75: mol_type = other DNA
gacaagaccaagcggcaatttctggccagtggctatatgcacctgcccggcaaaaagattgtcagcgttactgca

SEQ ID NO: 141944 - DNA, 75 bp, synthetic construct
  source 1..75: mol_type = other DNA
ttgagttaatagggtggtcatttcaatctgacccacaccagttctgctggcaggtatcagaacagttttatgtat

SEQ ID NO: 141945 - DNA, 75 bp, synthetic construct
  source 1..75: mol_type = other DNA
ctttgtttaaatgaaatggtaataaatataatttttggagaaaaatggcatttatcttcatcaattcttgtatgg

SEQ ID NO: 141946 - DNA, 75 bp, synthetic construct
  source 1..75: mol_type = other DNA
caataatgaatgattatattaaaactcgttttgaagtaagtctgtggtttaggaagcccctatccttgcgttgtg

SEQ ID NO: 141947 - DNA, 75 bp, synthetic construct
  source 1..75: mol_type = other DNA
aatagctaaaacagtaaacattgaaaatagtgagtttttaaaagcagttgcactaatgggtggggggatagcata

SEQ ID NO: 141948 - DNA, 75 bp, synthetic construct
  source 1..75: mol_type = other DNA
gatcgtctgggtgagccgcagtatacagattcactgcgagttcaggattcggcaaccagtatgtggatgcgtcat

SEQ ID NO: 141949 - DNA, 75 bp, synthetic construct
  source 1..75: mol_type = other DNA
aacctggaaagtaatcttaaggcacaaaatttacagcttgatgccgaagataaaaaagcgatcgccgcactggat

SEQ ID NO: 141950 - DNA, 75 bp, synthetic construct
  source 1..75: mol_type = other DNA
cgggctgtatgtggacagctgggcccagtacagctggtttaagaacaccgttaacggcgaaggtctgagcggtga

SEQ ID NO: 141951 - DNA, 75 bp, synthetic construct
  source 1..75: mol_type = other DNA
tattaaaaatgagattaaagatctaggttattatcttttagtatatcgtaaaaaaatgcgcaattttatgcggcg

SEQ ID NO: 141952 - DNA, 75 bp, synthetic construct
  source 1..75: mol_type = other DNA
gtcgaagctggggcttacgtctacacgctggctaaagggaaggggaatgatgagaaaaactggtatctgaccagt

SEQ ID NO: 141953 - DNA, 75 bp, synthetic construct
  source 1..75: mol_type = other DNA
gttacagcgcaggactgtacgcgacctggtatcagaacgctgcgaataagaccggcgcttatgttgacagctggg

SEQ ID NO: 141954 - DNA, 75 bp, synthetic construct
  source 1..75: mol_type = other DNA
tgaagctagtaatggctgcaaaaagagagataaaaaatggtcgtggaatgtcccccgaagatgctatgcggaggt

SEQ ID NO: 141955 - DNA, 75 bp, synthetic construct
  source 1..75: mol_type = other DNA
aactggaaagtaataagacatccagagttaaatgatgatgtcgaggtgaaaataaaacaggctggagtttttcat

SEQ ID NO: 141956 - DNA, 75 bp, synthetic construct
  source 1..75: mol_type = other DNA
ggcatccatcgttttcaacctcgcggtgaagatggtgaacctgaacccggacctgcaggtgttagtgcatataat

SEQ ID NO: 141957 - DNA, 75 bp, synthetic construct
  source 1..75: mol_type = other DNA
ttggggttcgagcggcaccggtggttactccgatctgaaagcgcacactaccatgttgcaggtggatgcgccgta

SEQ ID NO: 141958 - DNA, 75 bp, synthetic construct
  source 1..75: mol_type = other DNA
cagaacacagccgaaaaatcggcgataatctccgtaaacagatatttaaacaggttgagaaagattatcgcattt

SEQ ID NO: 141959 - DNA, 75 bp, synthetic construct
  source 1..75: mol_type = other DNA
atgcttggaacatcttttaataattttggaatcagtttatctcacaaaagatatttttcaggaaaggtggatgag

SEQ ID NO: 141960 - DNA, 75 bp, synthetic construct
  source 1..75: mol_type = other DNA
aacatgctgtaaacgctgttcctgtcagtggcacatctttgatctcctctctgtatggtgattcgctttcccatc

SEQ ID NO: 141961 - DNA, 75 bp, synthetic construct
  source 1..75: mol_type = other DNA
aatgggataaggttattttaaataaccataatggaacttttcctgatctgcaaagtttgagtcaggttcgtcagg

SEQ ID NO: 141962 - DNA, 75 bp, synthetic construct
  source 1..75: mol_type = other DNA
atgtcgacttatgaggcagagttaaaagcagaattcaggaatattcgtcccgagataagaacttcaagctcaaga

SEQ ID NO: 141963 - DNA, 75 bp, synthetic construct
  source 1..75: mol_type = other DNA
cagtgctcctgttcagtctctggagctaagagaacatatttcatcggttctggatacgctgttgccacgcgaaaa

SEQ ID NO: 141964 - DNA, 75 bp, synthetic construct
  source 1..75: mol_type = other DNA
gatctgctcattctgctgagaagtgggaaagctgaagagtaccaggataatcatatccctcgcccggagtaccgt

SEQ ID NO: 141965 - DNA, 75 bp, synthetic construct
  source 1..75: mol_type = other DNA
ttagcgttcgttagtgaaaaaggtgaaacctcggtcggtgaactgcctgcgccgggaaagcctgtattttcaacg

SEQ ID NO: 141966 - DNA, 75 bp, synthetic construct
  source 1..75: mol_type = other DNA
ataaccaggacgatatcgataacgtcattaccacccaaatcaatgcctgggccttcaacaatcaatccatcttga

SEQ ID NO: 141967 - DNA, 75 bp, synthetic construct
  source 1..75: mol_type = other DNA
aagaacgcgcgcggcaggcgattgagaacccgcttaagcagtccgaacagggcacacagtatcaggtctgggaag

SEQ ID NO: 141968 - DNA, 75 bp, synthetic construct
  source 1..75: mol_type = other DNA
gcaaaatagcgatgaggtccgctattttctgccgcgtttactggaatttgttgcacaggggcagtttgacaatat

SEQ ID NO: 141969 - DNA, 75 bp, synthetic construct
  source 1..75: mol_type = other DNA
ggcgtgcggatgaacgggcaattttgcagcgatttgcctgccagtttatggttgattgggtatccggcgatgagg

SEQ ID NO: 141970 - DNA, 75 bp, synthetic construct
  source 1..75: mol_type = other DNA
cattaattgagcagatatatcacacctttcgccgttatccggtgccgcagcaatttgtgatttgttgtaaatatt

SEQ ID NO: 141971 - DNA, 75 bp, synthetic construct
  source 1..75: mol_type = other DNA
ataaccaggacgatatcgataacgtcattaccacccaaatcaatgcctgggctagaaataatcaaagaaagagcg

SEQ ID NO: 141972 - DNA, 75 bp, synthetic construct
  source 1..75: mol_type = other DNA
gtaattacctcgcaagatgagtttgtcggtgcgcccggattctccaccgatcgtaaacgtcaatacggcgttcgc

SEQ ID NO: 141973 - DNA, 75 bp, synthetic construct
  source 1..75: mol_type = other DNA
aatgtatgtgcttattttgaagctgaactggttgaaatggatggcgaaccagatcacgtccatttgttaattaac

SEQ ID NO: 141974 - DNA, 75 bp, synthetic construct
  source 1..75: mol_type = other DNA
cttggcgcatttgaagtggatgtgaatggcaacattgcctcatggatgatccccggcaagatggttaaaggcatg

SEQ ID NO: 141975 - DNA, 75 bp, synthetic construct
  source 1..75: mol_type = other DNA
ccgctgaaaccccgcaaccggttattcctgatccattgacctacggtggaagcttggatttgaatgtgagtctgt

SEQ ID NO: 141976 - DNA, 75 bp, synthetic construct
  source 1..75: mol_type = other DNA
ttaacccgaactacccgtagcgtggcccccacggaagcctgtctcttgatcagatctcctgatcaagagacttca

SEQ ID NO: 141977 - DNA, 75 bp, synthetic construct
  source 1..75: mol_type = other DNA
cagcacaaagttaccgctgacgaggtcaggaaaataatgaaagcggttaaaccctctgttcatgctgacactgaa

SEQ ID NO: 141978 - DNA, 75 bp, synthetic construct
  source 1..75: mol_type = other DNA
atgtaaatggtatggcacgtaagaaaaattgggaatttaataatttgagtttcaaacctgccttcgcacttaccc

SEQ ID NO: 141979 - DNA, 75 bp, synthetic construct
  source 1..75: mol_type = other DNA
gctgcaggtgaaggtcactgatgctaacggtaatgcgcttgccgggcagacggtcagcgtgatggcaggcaacgg

SEQ ID NO: 141980 - DNA, 75 bp, synthetic construct
  source 1..75: mol_type = other DNA
tgagggtcacggatgcattcggtaatacgcttggcggacagacggtcagcgtgacggcagacaacagtgcaatgg

SEQ ID NO: 141981 - DNA, 75 bp, synthetic construct
  source 1..75: mol_type = other DNA
tatcacaaacctgtaatgtaacgacaggatcaaatggtaactttactgttacattaccaacagtatcgaaagcag

SEQ ID NO: 141982 - DNA, 75 bp, synthetic construct
  source 1..75: mol_type = other DNA
catttaacgtctggcgaaaacaaacgcacgttgggatcgctatatggtgagtgggggaacgttggggagttttcc

SEQ ID NO: 141983 - DNA, 75 bp, synthetic construct
  source 1..75: mol_type = other DNA
gacatgcacggtcatgtaacagtcaacaaccataccttcacaacggctacattccccagtgaaggttttataggg

SEQ ID NO: 141984 - DNA, 75 bp, synthetic construct
  source 1..75: mol_type = other DNA
tgtctgcattggcgcagtgtaataccgataaagctgacatcagaaggattgaagttgagcgtggtcacatcatgc

SEQ ID NO: 141985 - DNA, 75 bp, synthetic construct
  source 1..75: mol_type = other DNA
gtcaaccaactatccggtaactccggatggttggataagctgtagtgagcgaatgccggatgatggtcagcacgt

SEQ ID NO: 141986 - DNA, 75 bp, synthetic construct
  source 1..75: mol_type = other DNA
acaggggcagcagaggcgcggagggagtggattgaaaactttcttatagcgcgcggtgttcgtgatccagactgg

SEQ ID NO: 141987 - DNA, 75 bp, synthetic construct
  source 1..75: mol_type = other DNA
atggcgaacacgctgcgggcgagggtgaccgatgcgttcggtaatgcgcttgccggacagacggtcagcgtgatg

SEQ ID NO: 141988 - DNA, 75 bp, synthetic construct
  source 1..75: mol_type = other DNA
tggctgcgcggcgtgcattcagacgtgcccgacgggagcattacagccgcagccgtgcttcgacacccggcttcg

SEQ ID NO: 141989 - DNA, 75 bp, synthetic construct
  source 1..75: mol_type = other DNA
aggagttgatgactcaccgacacgtcagtcgacgcgggttgtttcgtgcatttgtcagtgcagcaaaacacacaa

SEQ ID NO: 141990 - DNA, 75 bp, synthetic construct
  source 1..75: mol_type = other DNA
attcggcagttgaaaggggataagcaaggtaaaattgccaatatttatcagcttaatgcgcaagatgcttccgca

SEQ ID NO: 141991 - DNA, 75 bp, synthetic construct
  source 1..75: mol_type = other DNA
gagatgagtcaactaggggggacgctggctgcatttgccacattcgctattggttttattatctggccagtcggt

SEQ ID NO: 141992 - DNA, 75 bp, synthetic construct
  source 1..75: mol_type = other DNA
caaagcatggtattaaatgtctcttatattatccttatcatatatagcactggaacgacattatattactgcgat

SEQ ID NO: 141993 - DNA, 75 bp, synthetic construct
  source 1..75: mol_type = other DNA
gttccgccgcgaggggctcgataagccgccaatccacatctacaacgacttcgatactgaagagcagcgcgggga

SEQ ID NO: 141994 - DNA, 75 bp, synthetic construct
  source 1..75: mol_type = other DNA
gcagaaaaacctgggattgtggtgttttgcctgggacatggacaatgcaaaagcgcgttgttggtatcaacatcg

SEQ ID NO: 141995 - DNA, 75 bp, synthetic construct
  source 1..75: mol_type = other DNA
aggcgctaacctatgtactgaatacgtttgcgctaagttatatgattaatactttaggcatgccgaaatcagatg

SEQ ID NO: 141996 - DNA, 75 bp, synthetic construct
  source 1..75: mol_type = other DNA
aatcttttgtatttctgttatgggaattgccactgtggggataggtatacttcccacttggcagacaattggaat

SEQ ID NO: 141997 - DNA, 75 bp, synthetic construct
  source 1..75: mol_type = other DNA
actggcgagccgcatcgcccggtctattcgcttcagcccggtggcgagcagaatatcaagcaactcaaatcgaaa

SEQ ID NO: 141998 - DNA, 75 bp, synthetic construct
  source 1..75: mol_type = other DNA
atgagaaaaaacgtggtcgcatcagtatgccgcacaagtccggcgatgcagcgggttctggcgttttacgggaga

SEQ ID NO: 141999 - DNA, 75 bp, synthetic construct
  source 1..75: mol_type = other DNA
actggcgatccgcatcacccggtctacatgcttcagcccggcggggatctgaacatcaagcagctcaaatcgagc

SEQ ID NO: 142000 - DNA, 75 bp, synthetic construct
  source 1..75: mol_type = other DNA
aatacctgctcaacacagagcgtgatcttgccgttcgcgtgcgtgaacgttatgacatgtacctgaaatccctgc

SEQ ID NO: 142001 - DNA, 75 bp, synthetic construct
  source 1..75: mol_type = other DNA
tcattaatattgatgcaaccatacttcttgatatttccacaaaatcggcaaaaaacttaatcaaatgtggatgga

SEQ ID NO: 142002 - DNA, 75 bp, synthetic construct
  source 1..75: mol_type = other DNA
gaatatcaagcaactcaaatcgaaagtgagaaaaaacatggtcacatccgtatgccgcacaagtccggctatgca

SEQ ID NO: 142003 - DNA, 75 bp, synthetic construct
  source 1..75: mol_type = other DNA
aggggattgctgaataatctggatctctcggctaaaacttcacaggtcatgaatactcagccagtcacagcgacc

SEQ ID NO: 142004 - DNA, 75 bp, synthetic construct
  source 1..75: mol_type = other DNA
taatctcaccagatagctcgatacttgaagcactcgaaattatcaataacgaagcattaagagttgcgctggtag

SEQ ID NO: 142005 - DNA, 75 bp, synthetic construct
  source 1..75: mol_type = other DNA
tcatcaacgttgcggctatcggtatttcgctaaacccagctcagaagctggcttacctggttccgcgtaaagggg

SEQ ID NO: 142006 - DNA, 75 bp, synthetic construct
  source 1..75: mol_type = other DNA
cttcgtcgcccgctatgtttccaccggtaccgcggtaaccaccggtaccgctaacggtacctcgcagttcaccat

SEQ ID NO: 142007 - DNA, 75 bp, synthetic construct
  source 1..75: mol_type = other DNA
taaaaatggtgcagtcatccctctgcatacggcatcaatggattaccccctcgcggcaggcagcaatacgctgga

SEQ ID NO: 142008 - DNA, 75 bp, synthetic construct
  source 1..75: mol_type = other DNA
tgcatgaactttactcactatcttacagaccagcaacagcagatcgggcacgccatcaacaacgcaaatacgagc

SEQ ID NO: 142009 - DNA, 75 bp, synthetic construct
  source 1..75: mol_type = other DNA
aactggaggtaaaacatattctcttgagttgagaactaaatcttcggatgtttgctcctatatcgggggaataaa

SEQ ID NO: 142010 - DNA, 75 bp, synthetic construct
  source 1..75: mol_type = other DNA
ggacgctattggctgggcgggttagtcgtcaatgacaaaaccattttcatcgctgaaggctatgccaccgccgcc

SEQ ID NO: 142011 - DNA, 75 bp, synthetic construct
  source 1..75: mol_type = other DNA
gcttacttctgtaacgtccttccgcggatggaagagcgcacgacagattcatggtctcagtttgaacggaattta

SEQ ID NO: 142012 - DNA, 75 bp, synthetic construct
  source 1..75: mol_type = other DNA
gcatcggcagtgtctactgcatccgtagcggcaagtgctggtgccaatacagtctatgcttcctcaggagctgta

SEQ ID NO: 142013 - DNA, 75 bp, synthetic construct
  source 1..75: mol_type = other DNA
actatcgtgttggacgtggaattgtcgcagatttgtggactactcgatacgatgaaatgcggacgattactatat

SEQ ID NO: 142014 - DNA, 75 bp, synthetic construct
  source 1..75: mol_type = other DNA
aagaattagttactttcttagcgatggaaaaggtttcaacagatggatttattgatcaagatacattaatgccta

SEQ ID NO: 142015 - DNA, 75 bp, synthetic construct
  source 1..75: mol_type = other DNA
ggatactttttaattcggcaagagctattacatctcagataaattcggcaatattgcaactaacaaatagtatac

SEQ ID NO: 142016 - DNA, 75 bp, synthetic construct
  source 1..75: mol_type = other DNA
gatgacgatacttttaataaaattaatgtttattgaattgttcattaatagtttttcggcatcactttcatcact

SEQ ID NO: 142017 - DNA, 75 bp, synthetic construct
  source 1..75: mol_type = other DNA
tgattggattgaataatacggaaagatgttttgttttaaagcatagtggaatttttaactggatgaaaaatggct

SEQ ID NO: 142018 - DNA, 75 bp, synthetic construct
  source 1..75: mol_type = other DNA
tacagatactaccagtaccatcaccaacgttaaagacggcgctatttctgataccagtaaggatgcggttaacgg

SEQ ID NO: 142019 - DNA, 75 bp, synthetic construct
  source 1..75: mol_type = other DNA
ctgaatttgaaaattgcatagcagattctgccattgattctgtagcagcgatagaacgaaggtttgctgctgctc

SEQ ID NO: 142020 - DNA, 75 bp, synthetic construct
  source 1..75: mol_type = other DNA
ggcgtttattctgcaaccgttgccggtgggcgctatcgcgttaatagccatcagttttattatgctgaccggtat

SEQ ID NO: 142021 - DNA, 75 bp, synthetic construct
  source 1..75: mol_type = other DNA
ggaaaacattacgttttgtccatacttatatcatgcttatcgaatatatcgatggcgtagagttgtgtgatatcc

SEQ ID NO: 142022 - DNA, 75 bp, synthetic construct
  source 1..75: mol_type = other DNA
acagagatgttcaacgtgattccactggcaccgggccatgcctacgggatgtttatggaacgctttaacgagtta

SEQ ID NO: 142023 - DNA, 75 bp, synthetic construct
  source 1..75: mol_type = other DNA
ttggtggtcaatttggtcaagatgcttttgaactttcatgcgagaaattaacgataaccacacagctcagctctc

SEQ ID NO: 142024 - DNA, 75 bp, synthetic construct
  source 1..75: mol_type = other DNA
acatctgtggccgccctgcggatacctgttttaagcccaatgcgcgaccgatgagccagcttgaacatgttcatt

SEQ ID NO: 142025 - DNA, 75 bp, synthetic construct
  source 1..75: mol_type = other DNA
accatatggataaaaatatcatggtcgtacacgagatttcgccagcctttgtactgcgcctcggtggagaggtga

SEQ ID NO: 142026 - DNA, 75 bp, synthetic construct
  source 1..75: mol_type = other DNA
ccggaaaattaaacctgaagccatctgggataacgggcgtctgacctgtttccgctggcctggcgcggcagacct

SEQ ID NO: 142027 - DNA, 75 bp, synthetic construct
  source 1..75: mol_type = other DNA
cacgccactcatcagagttgaaaccgccaccggtgagctggcgaaaacgcagcgccgcagcctggcggataccct

SEQ ID NO: 142028 - DNA, 75 bp, synthetic construct
  source 1..75: mol_type = other DNA
taactactattaagtcatattcttcagcaatatcttttctggaattcatgagatatgttccagcattttataata

SEQ ID NO: 142029 - DNA, 75 bp, synthetic construct
  source 1..75: mol_type = other DNA
ggggtttaatcacatagctgacaccctttcagagggtaagcaagaggaagtaaaaaaattccttggttatgtaaa

SEQ ID NO: 142030 - DNA, 75 bp, synthetic construct
  source 1..75: mol_type = other DNA
taagccgtttttttgcagccttacttgatggccgagctgcatctgatgagcaaaaggccgctgcgttgagttatg

SEQ ID NO: 142031 - DNA, 75 bp, synthetic construct
  source 1..75: mol_type = other DNA
aatcgagcggctgctctcatcatcgaaaaacagtgagcgaaaccaaaatcccctttcctgttttctctatgccca

SEQ ID NO: 142032 - DNA, 75 bp, synthetic construct
  source 1..75: mol_type = other DNA
gaaacaacacctggcatattatttcaaacgataaaggctatgatggaataattcatactctgcaaaaacggggtt

SEQ ID NO: 142033 - DNA, 75 bp, synthetic construct
  source 1..75: mol_type = other DNA
ttgtggtctgtgaaaacgcaggagggagtgggttatatttatgtagtgatagagcaccaaagtaagccggaataa

SEQ ID NO: 142034 - DNA, 75 bp, synthetic construct
  source 1..75: mol_type = other DNA
cactgacgcggttaacggctctcagctcaaaaccactaacgatgccgtggcagccaacaccaccaatatcgccac

SEQ ID NO: 142035 - DNA, 75 bp, synthetic construct
  source 1..75: mol_type = other DNA
acaatcatcaaggaagcgttagccgcctacttgaaaaaccaccctcttttagtcgcttccgcagaaggaaaacag

SEQ ID NO: 142036 - DNA, 75 bp, synthetic construct
  source 1..75: mol_type = other DNA
ggacatttaaaaaccagactggccacagagatttaaaaatatcattacccgttccacaaattacagccttacccc

SEQ ID NO: 142037 - DNA, 75 bp, synthetic construct
  source 1..75: mol_type = other DNA
cagcatcaaaccccggtggcgctgtattcaattctgacgctggtggccaggcagcacggtgattttgtcgattaa

SEQ ID NO: 142038 - DNA, 75 bp, synthetic construct
  source 1..75: mol_type = other DNA
cgataccatccaggtgcgtctcacctgtaagcgcaagacgctgaaaaaacagcgtagcgcagaagaaaaaccaac

SEQ ID NO: 142039 - DNA, 75 bp, synthetic construct
  source 1..75: mol_type = other DNA
cgcacctacagcagctaccggactacgactcctgccccggtgggcgtcttaggccccggctggaaagcgccttct

SEQ ID NO: 142040 - DNA, 75 bp, synthetic construct
  source 1..75: mol_type = other DNA
cgcacctacagcagctaccggactaagactcctgccccggtgggcgtgttgggccccggctggaaagcgccttct

SEQ ID NO: 142041 - DNA, 75 bp, synthetic construct
  source 1..75: mol_type = other DNA
cgcacctacagcagctaccggactaagactcctgccccggtgggcgtcttcggccccggctggaaagcgccttct

SEQ ID NO: 142042 - DNA, 75 bp, synthetic construct
  source 1..75: mol_type = other DNA
cggcggtggtgtccccggacgggctggagagccgccgggaatatgatgaaccgggcaggctggtatcggagacat

SEQ ID NO: 142043 - DNA, 75 bp, synthetic construct
  source 1..75: mol_type = other DNA
gtctttacctacatcgggagtcagcaattcagtaggtgtaacggttggcggcggagttgggggggcattttgcgt

SEQ ID NO: 142044 - DNA, 75 bp, synthetic construct
  source 1..75: mol_type = other DNA
cgcacctacagcagctaccggactaggactcctgccccggtgggcgtgttaggccccggctggaaagcgccttct

SEQ ID NO: 142045 - DNA, 75 bp, synthetic construct
  source 1..75: mol_type = other DNA
tttacagcaaatgcgtttccgtcctcgtattgcagccgaactgaagttgatggacgccaggctcttttcgccgga

SEQ ID NO: 142046 - DNA, 75 bp, synthetic construct
  source 1..75: mol_type = other DNA
cattgatatcgccttcctgtcagcggcggaaattgacggcggcggtagcgtcaacattagccgtttcgccaacaa

SEQ ID NO: 142047 - DNA, 75 bp, synthetic construct
  source 1..75: mol_type = other DNA
ccgccccgggtttcctggagagtgttttatctgtgaactcaggctgccagatcatcgtttccgatggaagcataa

SEQ ID NO: 142048 - DNA, 75 bp, synthetic construct
  source 1..75: mol_type = other DNA
cgcacctacagcagctaccggactaagactcctgccccggtgggcgtttttggccccggctggaaagcgccttct

SEQ ID NO: 142049 - DNA, 75 bp, synthetic construct
  source 1..75: mol_type = other DNA
cgcacctacagcagctaccggactaagactcctgccccggtgggcgtattaggccccggctggaaagcgccttct

SEQ ID NO: 142050 - DNA, 75 bp, synthetic construct
  source 1..75: mol_type = other DNA
acggcagcgtcaatagctacagcgtaccgttttccagcgtgccattactccagcgtcaggggcgaatcaaatacg

SEQ ID NO: 142051 - DNA, 75 bp, synthetic construct
  source 1..75: mol_type = other DNA
tctgagttcatggcataagaatgcagggaaagcgggtaaatgggagaccgtctatacacgggcagaacgaggact

SEQ ID NO: 142052 - DNA, 75 bp, synthetic construct
  source 1..75: mol_type = other DNA
ttgatagctttggcgtaggggcaatgaaagatgtcacgctggtgcgtccgcaagatgcgggagcgaatacatgtg

SEQ ID NO: 142053 - DNA, 75 bp, synthetic construct
  source 1..75: mol_type = other DNA
gagttgattacaactgatacaatcagtgtttatgattttaaagtgatgttgggattagaaaaatcctatgaagag

SEQ ID NO: 142054 - DNA, 75 bp, synthetic construct
  source 1..75: mol_type = other DNA
gtggatgagtatccctctggggcgctggctgggaagtccggataattatattagtactacaactcaggtacagcg

SEQ ID NO: 142055 - DNA, 75 bp, synthetic construct
  source 1..75: mol_type = other DNA
atgataccttataatcagcgtggatttgctcctgtaattagaggtattgcacgtactcaagcccggattgaaata

SEQ ID NO: 142056 - DNA, 75 bp, synthetic construct
  source 1..75: mol_type = other DNA
gatacaggtgtttacagtaccgttcactattccagcaatagcgctgcgtgaaggttacttgaagtacaatataac

SEQ ID NO: 142057 - DNA, 75 bp, synthetic construct
  source 1..75: mol_type = other DNA
ttttgaaaaacgcatccaaaatatatacgagacttgtcggcaaccggcggaaatagaagcagcttttgatcaatt

SEQ ID NO: 142058 - DNA, 75 bp, synthetic construct
  source 1..75: mol_type = other DNA
gttagctgaaaaccaaggtagtgataaggtgagtggttcaccgcaaattgaccgccgtactgccctaattgatta

SEQ ID NO: 142059 - DNA, 75 bp, synthetic construct
  source 1..75: mol_type = other DNA
ttaccggcgacgacaacggatgcgacgggcagcacccggcagatgacgtggagccgctacgggcagttgctggcg

SEQ ID NO: 142060 - DNA, 75 bp, synthetic construct
  source 1..75: mol_type = other DNA
gagagggggagttagtatttcaatcaaatgctattactgatggtgtttataaaataacacttgatgaatttcgtt

SEQ ID NO: 142061 - DNA, 75 bp, synthetic construct
  source 1..75: mol_type = other DNA
cctgactggcacatggcgcgtagaacgcatctcaaactaccttccatataaccgacagttaaatggagtaatctc

SEQ ID NO: 142062 - DNA, 75 bp, synthetic construct
  source 1..75: mol_type = other DNA
ggtcgggggagcgctttgttgctggattaggattctcatggtttgttacatatctcatctgcatgatgtcgtttc

SEQ ID NO: 142063 - DNA, 75 bp, synthetic construct
  source 1..75: mol_type = other DNA
tatcgctgttaatgctttcaggttgtgcaaccgaagcattgaagaatgaacaagctgaaactgttattattgcgg

SEQ ID NO: 142064 - DNA, 75 bp, synthetic construct
  source 1..75: mol_type = other DNA
ctataatgatggcttcattttccgtaaatgcgtatgtattaccggaaacgccggtgccatttaaaagtggtaccg

SEQ ID NO: 142065 - DNA, 75 bp, synthetic construct
  source 1..75: mol_type = other DNA
ttgaaaaaatttaataaaaaacagcgagtttatctgtatcagttttgttctgatatgcttcactccggactgcct

SEQ ID NO: 142066 - DNA, 75 bp, synthetic construct
  source 1..75: mol_type = other DNA
atcgcttcgcgatagggcgggtagacgatgactatgacgaatcaccttgggtaattagtgcatcgagcggatgga

SEQ ID NO: 142067 - DNA, 75 bp, synthetic construct
  source 1..75: mol_type = other DNA
tttgaaatagtgggaaatcatcttggttataatgtgcctcaaatcaggaaactgatggcaactatttgccaaatg

SEQ ID NO: 142068 - DNA, 75 bp, synthetic construct
  source 1..75: mol_type = other DNA
tcgatgagcaattccaggctggtttaaatactgcattcgaagatatcaactggacgctcagctatagcctgacga

SEQ ID NO: 142069 - DNA, 75 bp, synthetic construct
  source 1..75: mol_type = other DNA
tattcatagggttggattcagtcgcatatataagcggttatttcaaaaatggacaagacttgatcctcttccata

SEQ ID NO: 142070 - DNA, 75 bp, synthetic construct
  source 1..75: mol_type = other DNA
ttgaggcacaaatcgacgcatatgttgatgaagtgctggcccgaatggttggccattctccggctgaaaacagca

SEQ ID NO: 142071 - DNA, 75 bp, synthetic construct
  source 1..75: mol_type = other DNA
taaggcggccactgacgagcggatggtgtgggcgaaggaaagtcagttcgccatccagctatttcagaacaacga

SEQ ID NO: 142072 - DNA, 75 bp, synthetic construct
  source 1..75: mol_type = other DNA
gtgatgcatttaagacaggattacttggcggtgacgagttacttaatatcagtctttatgcgagcttgccttctt

SEQ ID NO: 142073 - DNA, 75 bp, synthetic construct
  source 1..75: mol_type = other DNA
tttaatgataaagaatagaataccattggctaactgtttgattattatagaaaaaaatgccaacaaatggcttaa

SEQ ID NO: 142074 - DNA, 75 bp, synthetic construct
  source 1..75: mol_type = other DNA
tatttaacggggcgaatgaaaaatagtccatctgtttcagcttcgtttgaaacacttattccgacagaggaatta

SEQ ID NO: 142075 - DNA, 75 bp, synthetic construct
  source 1..75: mol_type = other DNA
atgtgcggaagaagagcagcaagcgcgaaatttctattgtaaacgttatcccatcagtcgcgttatggacttgaa

SEQ ID NO: 142076 - DNA, 75 bp, synthetic construct
  source 1..75: mol_type = other DNA
atcatactcatggtgcagatagtcatggagaatattgggacgaaatattttcaggtaaagatgagaaaatagtta

SEQ ID NO: 142077 - DNA, 75 bp, synthetic construct
  source 1..75: mol_type = other DNA
aggaagaaatccgggcagaccgcgtgagcagtgaaagccgggcgtggcttgcgcagtgcgggctgacggtggagc

SEQ ID NO: 142078 - DNA, 75 bp, synthetic construct
  source 1..75: mol_type = other DNA
ttgaacgatattctgcggtgagtgagaaagtggcagcagaaatggcaaccggtgccatagagcgtgcggatgctg

SEQ ID NO: 142079 - DNA, 75 bp, synthetic construct
  source 1..75: mol_type = other DNA
gggacaacgcagagtcagagtgccagcaccatcggctccactgccggtaatgtcagtattaccgcgggcaaacag

SEQ ID NO: 142080 - DNA, 75 bp, synthetic construct
  source 1..75: mol_type = other DNA
cgcccgggccgtactgagtacggtgatatgcgaagaccattccccggaaatccgcattgcccaaggttccggcaa

SEQ ID NO: 142081 - DNA, 75 bp, synthetic construct
  source 1..75: mol_type = other DNA
tgcacaagtatgctaccaacggctaaaggagctaaataacacgcaagtagatatagatttgtttcatgcacgctt

SEQ ID NO: 142082 - DNA, 75 bp, synthetic construct
  source 1..75: mol_type = other DNA
caataataatgaagcccggcaatttacctgtgttctggacacgttactccgaaaaaaaaatgacccaggctgagt

SEQ ID NO: 142083 - DNA, 75 bp, synthetic construct
  source 1..75: mol_type = other DNA
agggaaacggggctgcactacaatctgcacaggtactatgatccggatgtcgggcggttcatggtaacggatccg

SEQ ID NO: 142084 - DNA, 75 bp, synthetic construct
  source 1..75: mol_type = other DNA
tttccctgatttacaatattttaaacttcaactattagatgccagtaatctaagattgacagtgagtaagcaacg

SEQ ID NO: 142085 - DNA, 75 bp, synthetic construct
  source 1..75: mol_type = other DNA
gagcgttgagatatatctttctgaaaaaaatattatttataaaataattaatgaccaaaaaattagtagagggaa

SEQ ID NO: 142086 - DNA, 75 bp, synthetic construct
  source 1..75: mol_type = other DNA
atggtgataatggttatagtagggagggcggaggagaatggattctctgtgataagttagaaaaggaaaaatctc

SEQ ID NO: 142087 - DNA, 75 bp, synthetic construct
  source 1..75: mol_type = other DNA
gatgcggggtttgagccggaggactttaaaaagccagtgcgggtaaatcttcctgtagtgagcgaacttccggcg

SEQ ID NO: 142088 - DNA, 75 bp, synthetic construct
  source 1..75: mol_type = other DNA
cagctcgacccccgttctctattacaacaaagacgccttcaagaaagcaggattagacccggaacaaccgccgaa

SEQ ID NO: 142089 - DNA, 75 bp, synthetic construct
  source 1..75: mol_type = other DNA
aaccagactgttacttaataacgagatagatagcgcaagagttgttcttaaaaaagaggtggatgatattaactt

SEQ ID NO: 142090 - DNA, 75 bp, synthetic construct
  source 1..75: mol_type = other DNA
cccgcgtggaggaacgcaataacgtaatggcagaaattatcgccagagcgcaaaaaaacaaagaacccaccagcc

SEQ ID NO: 142091 - DNA, 75 bp, synthetic construct
  source 1..75: mol_type = other DNA
gctattcatatgctctaaataggtatggaaatcctgggagtaggatttttggcggcggaggattacaacctggag

SEQ ID NO: 142092 - DNA, 75 bp, synthetic construct
  source 1..75: mol_type = other DNA
aaatcctaacatgcaagcaaaaatatcaactggacagcatcattcatgaaattataccaaaagagaatgagagtg

SEQ ID NO: 142093 - DNA, 75 bp, synthetic construct
  source 1..75: mol_type = other DNA
aactggatcactcgcgcaccaaccttgcggcgtaaagccattctgttagccaaagtgcaggatgaagccggtcat

SEQ ID NO: 142094 - DNA, 75 bp, synthetic construct
  source 1..75: mol_type = other DNA
aatccatttgcaacgcaattaaagaaaataacggggattgaaagtaaagatgtgttacttagtggtgcgatctct

SEQ ID NO: 142095 - DNA, 75 bp, synthetic construct
  source 1..75: mol_type = other DNA
ttaataaatagtgtagcaaaaacagctcaatctgagttaagaagcgagggaggggcaactgtcactataaacttc

SEQ ID NO: 142096 - DNA, 75 bp, synthetic construct
  source 1..75: mol_type = other DNA
acatcaaagatgttttttttagaaaaacactttttttgaaggtgggagagaccccctttgcaagtcagctgaaga

SEQ ID NO: 142097 - DNA, 75 bp, synthetic construct
  source 1..75: mol_type = other DNA
aaggggaactgggtaaagaggtgaattctctggtccaacgttttaacgccgaaaacccggattacaaaattatac

SEQ ID NO: 142098 - DNA, 75 bp, synthetic construct
  source 1..75: mol_type = other DNA
gactgctcggggtacacgacgcggtatgagtacgaccggtacggtcaacaaatcgccgttcaccgggaggaaggc

SEQ ID NO: 142099 - DNA, 75 bp, synthetic construct
  source 1..75: mol_type = other DNA
tatttataacctcctccgtgaatacgaaggccgtgtaacggtgaaggtgctgggcattgccgccagtgccgcttc

SEQ ID NO: 142100 - DNA, 75 bp, synthetic construct
  source 1..75: mol_type = other DNA
ggcaaatgtccgcttcttgctcaaagcagactgtcagatttgataacttttgggctatgtaaactgtcagtcgga

SEQ ID NO: 142101 - DNA, 75 bp, synthetic construct
  source 1..75: mol_type = other DNA
atggggtgttttcactttgacgcccagttaatctccatcagcgagcgcaaagtgattgatggcaagaatgaaacc

SEQ ID NO: 142102 - DNA, 75 bp, synthetic construct
  source 1..75: mol_type = other DNA
tcatatgctaaaacaacaacagacattgatagtttacattataacaattatatcactaaatatcggaatgagtta

SEQ ID NO: 142103 - DNA, 75 bp, synthetic construct
  source 1..75: mol_type = other DNA
acctgataggtctggttgtgacatcgactttaatatttatcttctcggaagaaaaagtaacatatcggttgtttg

SEQ ID NO: 142104 - DNA, 75 bp, synthetic construct
  source 1..75: mol_type = other DNA
atgagcaaaaaacaacttccggtagcaccggcgggtcgcccctgcgcgcgcgttacctgtgaaacattaccgtcc

SEQ ID NO: 142105 - DNA, 75 bp, synthetic construct
  source 1..75: mol_type = other DNA
taccaacaacctgattgacgaggtttatcaggatgacccgaaactcgttgccatcgtaggccgtaagctgctggc

SEQ ID NO: 142106 - DNA, 75 bp, synthetic construct
  source 1..75: mol_type = other DNA
ggctttcttactctatgagatgtctaaaaacaccccaggaattgtatgtggcggaacggacgggactcgaacccg

SEQ ID NO: 142107 - DNA, 75 bp, synthetic construct
  source 1..75: mol_type = other DNA
atgggcctacaaatttttcgccacctgcccataggcccaccagtcggcctatttgcatcagattccatgatctgt

SEQ ID NO: 142108 - DNA, 75 bp, synthetic construct
  source 1..75: mol_type = other DNA
aaatgcgagcagaccaactttgacacggtgctgacctacgcgaagctggatctgtgggcgaagtttcaggatttc

SEQ ID NO: 142109 - DNA, 75 bp, synthetic construct
  source 1..75: mol_type = other DNA
tgaatccgttaacgaagcctatgtggttgaggactaccgctgcgccgcactggtggaaaacatccagattggtga

SEQ ID NO: 142110 - DNA, 75 bp, synthetic construct
  source 1..75: mol_type = other DNA
cgccgccgttcagttatcgacaacccgaaacgtgaccggattgaaaactttgaatccgttaacgaagcctatgtg

SEQ ID NO: 142111 - DNA, 75 bp, synthetic construct
  source 1..75: mol_type = other DNA
gacagtgcctccggtaagatgaccgacacgatcaggcgatcggtgaatgcagccttaactcaggttgaaaaagaa

SEQ ID NO: 142112 - DNA, 75 bp, synthetic construct
  source 1..75: mol_type = other DNA
cacaatgaagatggatcgcagtggcatgacgcttgcagaggcactgggtaatgctgaaggtatgtctcaagcctt

SEQ ID NO: 142113 - DNA, 75 bp, synthetic construct
  source 1..75: mol_type = other DNA
atgaagaaaaaacttgttagattttcggcattagcgttggcaattgggtttttatcgggttgtaccattatcccc

SEQ ID NO: 142114 - DNA, 75 bp, synthetic construct
  source 1..75: mol_type = other DNA
cagggatgagagtgaataacatacaaatcaatgcgaatcgacttatttcaggaaataatattaatcaggtgccta

SEQ ID NO: 142115 - DNA, 75 bp, synthetic construct
  source 1..75: mol_type = other DNA
actgctttgcatgacaatcgagttgctctacaaaaaatatttgattattgtttagcaatgagttctttaactaat

SEQ ID NO: 142116 - DNA, 75 bp, synthetic construct
  source 1..75: mol_type = other DNA
gtgtgacggaaaaccttgtgtgaaagtggatacaaggcagtcatatggtgataaaaaagacacctatctgattat

SEQ ID NO: 142117 - DNA, 75 bp, synthetic construct
  source 1..75: mol_type = other DNA
cgactacgatctggacaaactggtgaacgtgtatccgatgactccaggactgatcgatcaactccgtccagaaac

SEQ ID NO: 142118 - DNA, 75 bp, synthetic construct
  source 1..75: mol_type = other DNA
aaggtaagattgctaatatttatcaacttaatgcaaaagatgcttctgctatggtattggggactgagttccaat

SEQ ID NO: 142119 - DNA, 75 bp, synthetic construct
  source 1..75: mol_type = other DNA
aatcgtgtcatatcacagttagtaccgactattagtggcgtgcatgatatgacagaaacagctaagtttatcaag

SEQ ID NO: 142120 - DNA, 75 bp, synthetic construct
  source 1..75: mol_type = other DNA
taacggtaaagatacaaagatttcattatatgcactaatgcagaaaggagatctaacccagaatcatttattata

SEQ ID NO: 142121 - DNA, 75 bp, synthetic construct
  source 1..75: mol_type = other DNA
gctcatggttacggtatgggatcatccggaattaacgacacctgctggtcaatatcgtagtgcaagtgatacggg

SEQ ID NO: 142122 - DNA, 75 bp, synthetic construct
  source 1..75: mol_type = other DNA
actgatggttactgtatgggatcacccggaattgactactcctgctgggcaataccgcagcgccagcgacaccgg

SEQ ID NO: 142123 - DNA, 75 bp, synthetic construct
  source 1..75: mol_type = other DNA
atgcactaaattactggtatgaaaattactgtaaggtgcgtcgtaaaactcatgctgtaacgcttggcagatttc

SEQ ID NO: 142124 - DNA, 75 bp, synthetic construct
  source 1..75: mol_type = other DNA
aaccggtcaaactgtcccccagagtggcggcgttctcaactgcggaaatcaactcatggctggaggcgaaaagtg

SEQ ID NO: 142125 - DNA, 75 bp, synthetic construct
  source 1..75: mol_type = other DNA
gcagttatcgcagcaacgggctgggcggtcacattgaaaccgggatgcgatttaccgatggtaactggaacctga

SEQ ID NO: 142126 - DNA, 75 bp, synthetic construct
  source 1..75: mol_type = other DNA
gggattcaattattactataaattttcatgtacctaaatcacgataccagatggctgctatcttatcgcaaatgg

SEQ ID NO: 142127 - DNA, 75 bp, synthetic construct
  source 1..75: mol_type = other DNA
tgcttttgcggtggtttcctttcatctgaaccagttactctcttcgctcttttccctcgatctctccctggtcag

SEQ ID NO: 142128 - DNA, 75 bp, synthetic construct
  source 1..75: mol_type = other DNA
aaaaactggaacaggatcccgctcgcccccgccatttcattactgaaaccggtattgggtatcggtttatgccat

SEQ ID NO: 142129 - DNA, 75 bp, synthetic construct
  source 1..75: mol_type = other DNA
catggcgggaaaaagaaaaggtctttcagatccacgcggtcaactatcactggcttttgtcgaactggcgaatca

SEQ ID NO: 142130 - DNA, 75 bp, synthetic construct
  source 1..75: mol_type = other DNA
tgtttggatcggttttcatgctggcgatcggtttactaatggcaggggtgatccgcttctggcgcgagatctctc

SEQ ID NO: 142131 - DNA, 75 bp, synthetic construct
  source 1..75: mol_type = other DNA
aataatattcagattaaaaatatcaccagtaagaattgcaatggaaatggcattcttattcgagggacaagacaa

SEQ ID NO: 142132 - DNA, 75 bp, synthetic construct
  source 1..75: mol_type = other DNA
tgtgcgcaaagaatttgtcgatgataaccgggtgaaagtgaataatgacggtaattttgtcaatgatttgtcggg

SEQ ID NO: 142133 - DNA, 75 bp, synthetic construct
  source 1..75: mol_type = other DNA
gggatgcttcgtttacgctgggtaataccggcggtttcgttgatcttgggacctatgagtatgtcctgaaaagcg

SEQ ID NO: 142134 - DNA, 75 bp, synthetic construct
  source 1..75: mol_type = other DNA
ttaatgcatgaattatcccacattgctctgcactatgataaattagatacgccaatcctcgatgatttagacatt

SEQ ID NO: 142135 - DNA, 75 bp, synthetic construct
  source 1..75: mol_type = other DNA
aagcttaaaaattcaaacgttaccattagccaatactccaaccattgctgacttttcgagatatttgaatgatgc

SEQ ID NO: 142136 - DNA, 75 bp, synthetic construct
  source 1..75: mol_type = other DNA
cattaaataaaaaaatagttgaacgggatgcagcgcttgctcgtgttagcctgtatgagcatcaggtatcacagg

SEQ ID NO: 142137 - DNA, 75 bp, synthetic construct
  source 1..75: mol_type = other DNA
aacagaaaaaatcaaaagcagctcacattaaataaaaaaatagttgaacgggatgcagcgcttgctcgtgttagc

SEQ ID NO: 142138 - DNA, 75 bp, synthetic construct
  source 1..75: mol_type = other DNA
gccactttacttacgatgataaataccggggccggatggtggcgcaccgttacgcaggcaggccggagatgcgtt

SEQ ID NO: 142139 - DNA, 75 bp, synthetic construct
  source 1..75: mol_type = other DNA
gtaattccgcatatgaactgaccagcacatacacccccgcaggtcagttacagagtcagcacctgaacagcctgg

SEQ ID NO: 142140 - DNA, 75 bp, synthetic construct
  source 1..75: mol_type = other DNA
gccggtcttggcgtgacggcaaggccggttgaaatgatgagcccggacctgcgtgtgctgagtggagtagatggc

SEQ ID NO: 142141 - DNA, 75 bp, synthetic construct
  source 1..75: mol_type = other DNA
cagagaagcagaattccctaccgggataatgcttgagcagcacgctattgcaataccgcattgtgaggcgggtga

SEQ ID NO: 142142 - DNA, 75 bp, synthetic construct
  source 1..75: mol_type = other DNA
cagagaagcagaattccctaccgggataatgcttgagcagcacgccattgcaataccgcattgtgaggcgattca

SEQ ID NO: 142143 - DNA, 75 bp, synthetic construct
  source 1..75: mol_type = other DNA
accggggaaaggacgcgaacgctggcctgactgtctcggccggcgtcatgggcggcggcacggctgaccagatca

SEQ ID NO: 142144 - DNA, 75 bp, synthetic construct
  source 1..75: mol_type = other DNA
cgcctacaaccccaaagtaggcaaaacgaaaacgttccccgccgcctgcctatgcgtgcggcctccgtgcgtaca

SEQ ID NO: 142145 - DNA, 75 bp, synthetic construct
  source 1..75: mol_type = other DNA
ccttgcctataaacacctcgtttgcactaagcacaattcatccaggtgccgctgcaaatctaataagaacatctg

SEQ ID NO: 142146 - DNA, 75 bp, synthetic construct
  source 1..75: mol_type = other DNA
cgccatttgcgccatttgatcgacaacgaacagtttgccgatgcactcgcgtttgtacgcagtaaaaaagaacca

SEQ ID NO: 142147 - DNA, 75 bp, synthetic construct
  source 1..75: mol_type = other DNA
aaggttgtggactgtctcactcagggcaaggccttaataatgcactctgaaagggaaggagttacacaagatgat

SEQ ID NO: 142148 - DNA, 75 bp, synthetic construct
  source 1..75: mol_type = other DNA
ccaaatcctcgacttcactgatgacagaatcagctaaaaccgccagtggtaattacactgtcacggtatccaatg

SEQ ID NO: 142149 - DNA, 75 bp, synthetic construct
  source 1..75: mol_type = other DNA
ttggtgcattctgaatcagatgagtatggcgattggtacctgcttaaaaatacacactcgagtttttctaggaat

SEQ ID NO: 142150 - DNA, 75 bp, synthetic construct
  source 1..75: mol_type = other DNA
cacttctggcaggtgagaaaaaattggcaaagaaagccagttcgtcattaatagcgtcatggaataaattactct

SEQ ID NO: 142151 - DNA, 75 bp, synthetic construct
  source 1..75: mol_type = other DNA
cttttggatacagcatgttctcatgtttctttatcacaagttcacatacctaaagaaattgaatatattgaagcc

SEQ ID NO: 142152 - DNA, 75 bp, synthetic construct
  source 1..75: mol_type = other DNA
aggtcatttcttcccaagctgactcgctgattaaaatttctcggatctgggccgatttttttcccgcaaacacat

SEQ ID NO: 142153 - DNA, 75 bp, synthetic construct
  source 1..75: mol_type = other DNA
ccggacagcctgccgccggtggagtggctgacctatggcagcggttacctggcgggcatgaagctgggcgggacg

SEQ ID NO: 142154 - DNA, 75 bp, synthetic construct
  source 1..75: mol_type = other DNA
ctgaaagaaatcagccacctgagcgaaggtcaccgtgtggcggtccactacggctatgacgataaaggccgtctg

SEQ ID NO: 142155 - DNA, 75 bp, synthetic construct
  source 1..75: mol_type = other DNA
cggacggcaggaaatcggaattttactataacaaccagaaccagttaacctcagcatccgggcctgacggactgg

SEQ ID NO: 142156 - DNA, 75 bp, synthetic construct
  source 1..75: mol_type = other DNA
tttaatggaatatgctaatagtggttctttagaacaatttttgaaaaatcaaaattgttttttggacgaagatac

SEQ ID NO: 142157 - DNA, 75 bp, synthetic construct
  source 1..75: mol_type = other DNA
atgatgtcaggagaaacgccgataaaatctggcgtcgttcactttttgataagctcattaccgaagtgattcagg

SEQ ID NO: 142158 - DNA, 75 bp, synthetic construct
  source 1..75: mol_type = other DNA
gcgatgcaaatatcaatcattattatagaaacttagaaataaaatattcacccccccaaaataaagcatcaggaa

SEQ ID NO: 142159 - DNA, 75 bp, synthetic construct
  source 1..75: mol_type = other DNA
tatcctgatttatatgaggttgttgggggctataaagatctgaagaaatctatagcggagtgtaacaaatctaca

SEQ ID NO: 142160 - DNA, 75 bp, synthetic construct
  source 1..75: mol_type = other DNA
tcactggcacgtagataataagctgcactggcgtctggacgtggtaatgaatgaagacgactgcaaaataagaag

SEQ ID NO: 142161 - DNA, 75 bp, synthetic construct
  source 1..75: mol_type = other DNA
gaaatataaggtattcaaggcagggttaagacgtaagacgcgaaaagcagccatggacagagactacatcgcacc

SEQ ID NO: 142162 - DNA, 75 bp, synthetic construct
  source 1..75: mol_type = other DNA
caaaaccattgcaaaagagatccagagaatattagatcttccctcggaaagtaaaaaaagatatcttcctgatga

SEQ ID NO: 142163 - DNA, 75 bp, synthetic construct
  source 1..75: mol_type = other DNA
cataaaattgatggtataaatgttttttttattgataatgtaaaaagtggaaaatattcaagaaattggtggaaa

SEQ ID NO: 142164 - DNA, 75 bp, synthetic construct
  source 1..75: mol_type = other DNA
tgggtcccgaatgatgctgttccttatatttcggctggtgacaaagtgaatattcgttatgaagcctttccggca

SEQ ID NO: 142165 - DNA, 75 bp, synthetic construct
  source 1..75: mol_type = other DNA
gataatgagattcgtgacattgccgatcgcgaaggtattaaactggtcgaagtccttgagaacgcgctgaacgcc

SEQ ID NO: 142166 - DNA, 75 bp, synthetic construct
  source 1..75: mol_type = other DNA
atggctgatgcatcaaaacttaaaactaaaagggcccgtcgtggtgggctgggtgtacccccaggccccgacgaa

SEQ ID NO: 142167 - DNA, 75 bp, synthetic construct
  source 1..75: mol_type = other DNA
cttaccgttgatgataaggcataacgcaagtcgtatattcaacaccccaggttttataaaacaaaacatccttct

SEQ ID NO: 142168 - DNA, 75 bp, synthetic construct
  source 1..75: mol_type = other DNA
atgattttatgaataaagccattgctatgctggcaagtgacccgcagcacacgaagtataaatgccttgatcagg

SEQ ID NO: 142169 - DNA, 75 bp, synthetic construct
  source 1..75: mol_type = other DNA
atatttctcaacagcacctaaccgaggagaaagaaaaggatcatatccattcaatagcccttgccctaatggtac

SEQ ID NO: 142170 - DNA, 75 bp, synthetic construct
  source 1..75: mol_type = other DNA
gaaaccgccaccggtgagctggcgaaaacgcagcgccgcagcctggcggatgcgcttcagcagtccggcggcgaa

SEQ ID NO: 142171 - DNA, 75 bp, synthetic construct
  source 1..75: mol_type = other DNA
caattgaattaaataaacttcctgaactgaagcttcctgatgagccttattttcagaatgtatctgaagaggaag

SEQ ID NO: 142172 - DNA, 75 bp, synthetic construct
  source 1..75: mol_type = other DNA
gtgatgtacagactgtgaaaagtcgcagcagcaacgggaaggcggggacggataatggtactcaggcccgtcgca

SEQ ID NO: 142173 - DNA, 75 bp, synthetic construct
  source 1..75: mol_type = other DNA
atttttgccgataaaaacgtgagggtgggctttccgcctgcactgaacggcaggctgcgggtgcagagcaccggc

SEQ ID NO: 142174 - DNA, 75 bp, synthetic construct
  source 1..75: mol_type = other DNA
atttagatgcaatagaagaccagagactgggacttgtttttaatgttattatttctattgaagagaatggtttgt

SEQ ID NO: 142175 - DNA, 75 bp, synthetic construct
  source 1..75: mol_type = other DNA
gaaataaagacaggaatgcgaagcgtaatcagctatcttcttagtcctctggaagagtctgtaacagaaagttta

SEQ ID NO: 142176 - DNA, 75 bp, synthetic construct
  source 1..75: mol_type = other DNA
gagcaaattgagagtgagatattgtctgcaaaagaagaatatcagcttgtcacgcagctttttaaaaatgaaatt

SEQ ID NO: 142177 - DNA, 75 bp, synthetic construct
  source 1..75: mol_type = other DNA
gtgattaatgtagttttctgtataaggaaagactggaaggagcgtcctggaggagatgtgattcaattggttgag

SEQ ID NO: 142178 - DNA, 75 bp, synthetic construct
  source 1..75: mol_type = other DNA
ccacatgagaatgataattcgtcagggagtcagccgaatgttgggaaggatttgacggatgaagagaagaactgc

SEQ ID NO: 142179 - DNA, 75 bp, synthetic construct
  source 1..75: mol_type = other DNA
cgacgtgtaaacgtcacgggagaggtgataacaaatctcaggccgatcacaatttactctggggttcagggattc

SEQ ID NO: 142180 - DNA, 75 bp, synthetic construct
  source 1..75: mol_type = other DNA
gctggctgggtgctgccggtacgccggaagataccacgatgctgtatgtggtgacggcgggcagtccggagaagg

SEQ ID NO: 142181 - DNA, 75 bp, synthetic construct
  source 1..75: mol_type = other DNA
accttaaatgccgtaagtaataatgtttttgttttaattataatgagaatagaaatggcatattatgtgttggaa

SEQ ID NO: 142182 - DNA, 75 bp, synthetic construct
  source 1..75: mol_type = other DNA
acttttaaaaagagtatttcatttaacgtgtaaagtaagtgtttctattattaataagccatattcgcttacaaa

SEQ ID NO: 142183 - DNA, 75 bp, synthetic construct
  source 1..75: mol_type = other DNA
tacttttgcaacactttgctttgaaaatgccgtcttttgttttgaacgtgttctcattacaaacaataaagcctc

SEQ ID NO: 142184 - DNA, 75 bp, synthetic construct
  source 1..75: mol_type = other DNA
ggtggtcgagttgcaaagtaaagccgcgcatgaagtgcgtcgggcgtttgaaggcgagcatccgcttaattgggt

SEQ ID NO: 142185 - DNA, 75 bp, synthetic construct
  source 1..75: mol_type = other DNA
gtgctgaccataacggtgatggtggtgaggctgttacaggagacaatctgtttataataaatggagaaattattt

SEQ ID NO: 142186 - DNA, 75 bp, synthetic construct
  source 1..75: mol_type = other DNA
gaaaacggggtgaccgagtggagcccgctgttcagcgagccacatccttcccgtgagttttgtgtccagtacggt

SEQ ID NO: 142187 - DNA, 75 bp, synthetic construct
  source 1..75: mol_type = other DNA
cagcggtcaggatttacgccccagccataaccccgcgctgccagacgtggcgctgctgcgcaaaccttttacccg

SEQ ID NO: 142188 - DNA, 75 bp, synthetic construct
  source 1..75: mol_type = other DNA
ttaataatctgttggcggtgattattggcagcctggagctggtgaacacggactcgcccgacgcgccgcgaatac

SEQ ID NO: 142189 - DNA, 75 bp, synthetic construct
  source 1..75: mol_type = other DNA
tcgacgtttttgaatccgaacccctcagtgcaaaaagtccattgctgcaaatggataacaccttatgtacggacc

SEQ ID NO: 142190 - DNA, 75 bp, synthetic construct
  source 1..75: mol_type = other DNA
taaaggttatatcgctaacactctgacgccgaatgtcggtgatgcaaactcgcaaacgccggaatataaagcgtt

SEQ ID NO: 142191 - DNA, 75 bp, synthetic construct
  source 1..75: mol_type = other DNA
ttttacacatagcgataatctaacttccattttagataatggccttatgtctcgttcagaacttgataatgaaaa

SEQ ID NO: 142192 - DNA, 75 bp, synthetic construct
  source 1..75: mol_type = other DNA
tttatggattaaatcttgtgctttttatccaactaatgcagcctctggctcagttcggtcaaatgcgatagctga

SEQ ID NO: 142193 - DNA, 75 bp, synthetic construct
  source 1..75: mol_type = other DNA
atggtgttcctcgggcaaccacaaaacgagcatgaacatcttgaacgctgtttgctttccttcaagcaacaaggt

SEQ ID NO: 142194 - DNA, 75 bp, synthetic construct
  source 1..75: mol_type = other DNA
ctaatctgataatccgcaaattaaaatctccggaactgcaaattcaaagaattgcgctttcggggcaactggtag

SEQ ID NO: 142195 - DNA, 75 bp, synthetic construct
  source 1..75: mol_type = other DNA
gcaatattctgctgcaggcggaccgtatcgcgatgattaccccggagaacggcaacaccacgccgctgtttgtgg

SEQ ID NO: 142196 - DNA, 75 bp, synthetic construct
  source 1..75: mol_type = other DNA
cacttcatggaaaatatgaacttgaacttgctgctcaaaaagcattagagcttttagattatgtatcagacataa

SEQ ID NO: 142197 - DNA, 75 bp, synthetic construct
  source 1..75: mol_type = other DNA
agggccatgactatatttgatagattacaaaataaaagtgatatacagacgctaaaaacagaatgttattgcctt

SEQ ID NO: 142198 - DNA, 75 bp, synthetic construct
  source 1..75: mol_type = other DNA
ataaagaaatcccagatccgtatcgaaaaagtgacgaagcttttgcctctgttttccagctaattgatcaagctg

SEQ ID NO: 142199 - DNA, 75 bp, synthetic construct
  source 1..75: mol_type = other DNA
tacatcacaatttattatagataatatccttcaaacggtacataaaccagaacgatctgtaagattagctaagca

SEQ ID NO: 142200 - DNA, 75 bp, synthetic construct
  source 1..75: mol_type = other DNA
tacaaaataaaagtgatatacagacgctaaaaacagaatgttattgtctgctagcggaatgccatatgtctttgg

SEQ ID NO: 142201 - DNA, 75 bp, synthetic construct
  source 1..75: mol_type = other DNA
atcattttcttgagggattaacgctcacggaagatggaattcttactcaaggaaatgagcaaatttatattccac

SEQ ID NO: 142202 - DNA, 75 bp, synthetic construct
  source 1..75: mol_type = other DNA
ctaagctcatttactcgtgatgatgaatatgagacccttcatttatttcttcttggatgtgattttggaaaagga

SEQ ID NO: 142203 - DNA, 75 bp, synthetic construct
  source 1..75: mol_type = other DNA
aaagctctggtggcgatccttaacagcgatataaaccattatgccgaacaggtggcgatgctttccggtcagcgg

SEQ ID NO: 142204 - DNA, 75 bp, synthetic construct
  source 1..75: mol_type = other DNA
gtcgggcaactgacgggcgggctggcccatgattttaataatctgctggcggtgattattggcagcctggagctg

SEQ ID NO: 142205 - DNA, 75 bp, synthetic construct
  source 1..75: mol_type = other DNA
caattagccagacggctacagcacttcatccccaatgctatcctcagggtcagtaaagccgactggctctgcgca

SEQ ID NO: 142206 - DNA, 75 bp, synthetic construct
  source 1..75: mol_type = other DNA
ggttcgggggttgatttaagagagtatccttatcttcctgaaaaagttcacggtaagactgtagtaatggcctcc

SEQ ID NO: 142207 - DNA, 75 bp, synthetic construct
  source 1..75: mol_type = other DNA
gaataggttggagtctaaacaaactcgcactgcatatgagacatcactagcattattgatttcggaaattaatga

SEQ ID NO: 142208 - DNA, 75 bp, synthetic construct
  source 1..75: mol_type = other DNA
atcgaaacagagaatggcgaacaggcgaaggcgcggcaccggagcctggcggaggtgttgcaggaggacacgggt

SEQ ID NO: 142209 - DNA, 75 bp, synthetic construct
  source 1..75: mol_type = other DNA
ctggaagaggcattaagtgcaaaagggataaccggtacgccaacggggttccgtgaactggatgaaaaaacctgt

SEQ ID NO: 142210 - DNA, 75 bp, synthetic construct
  source 1..75: mol_type = other DNA
ggctgaattatccaaaaacacccccagtgcggccaatattgtccgctatgcggaaattgtggtggagcgaagccg

SEQ ID NO: 142211 - DNA, 75 bp, synthetic construct
  source 1..75: mol_type = other DNA
gaaaagacattatttgatgttgcacaaccagattatgtgtattttttaatgggcgcggcatctgtagcaaaatct

SEQ ID NO: 142212 - DNA, 75 bp, synthetic construct
  source 1..75: mol_type = other DNA
ttggttctcatctgtgtaattcatgtatacaaaatggagctacagtttatgcacttgggcgtaacttagataatg

SEQ ID NO: 142213 - DNA, 75 bp, synthetic construct
  source 1..75: mol_type = other DNA
ccagttctcagtatacagacttgcctgttatatttgagctattccttatgagaataattgcaaatggagatgctt

SEQ ID NO: 142214 - DNA, 75 bp, synthetic construct
  source 1..75: mol_type = other DNA
atcgagcatgtgctgctcgaagtattcggtgtgctgctgctgttcgcggcagcggccctcgcctcgcgccgtctg

SEQ ID NO: 142215 - DNA, 75 bp, synthetic construct
  source 1..75: mol_type = other DNA
gggcatcaacgccgaccaagtcgaccaccggatcgaggaattacggcaggcactcagtcagtcaggcggggatag

SEQ ID NO: 142216 - DNA, 75 bp, synthetic construct
  source 1..75: mol_type = other DNA
tcagcgattgtttcgccagtatggtcgccagttaaatatcgtgctggcgctgttgctggtctattgtgcggtacg

SEQ ID NO: 142217 - DNA, 75 bp, synthetic construct
  source 1..75: mol_type = other DNA
atggaaaataaagagaaatatatccagagaattaaaaagctgctcgcgatggcgcgtaataactccagcgccgaa

SEQ ID NO: 142218 - DNA, 75 bp, synthetic construct
  source 1..75: mol_type = other DNA
ccgacgaacgccctcagatagcggcatattcattcgaagttctgggtaagcaactggcgaaagcccgccgtgatt

SEQ ID NO: 142219 - DNA, 75 bp, synthetic construct
  source 1..75: mol_type = other DNA
aatacgggattatcaggaaccgttggaagccgggatcagtttaactatggggtcaacctgagttatcagtatcag

SEQ ID NO: 142220 - DNA, 75 bp, synthetic construct
  source 1..75: mol_type = other DNA
aatattactaattataggattaatacttttcttgtatgtattattcttaacgagtaacacgatgcatatgagatt

SEQ ID NO: 142221 - DNA, 75 bp, synthetic construct
  source 1..75: mol_type = other DNA
tgtgcccttgccgatcaggccagaacacaaccccgtgcacagacagatgcctcggcactgcaactatccaagaaa

SEQ ID NO: 142222 - DNA, 75 bp, synthetic construct
  source 1..75: mol_type = other DNA
gcgagaaataacctcagtgccagaacaaatgagcaaaagcatgcaaatgacgctcttaatgccctgttgaaggaa

SEQ ID NO: 142223 - DNA, 75 bp, synthetic construct
  source 1..75: mol_type = other DNA
tcgcctctggtaataatatgcaatgtaaaaataatcctggttgtacacacttacaaaatagaggtccaatacctc

SEQ ID NO: 142224 - DNA, 69 bp, synthetic construct
  source 1..69: mol_type = other DNA
aaaatgggtgcagtacaggttgatggtaaaatatcactcggggcttttctctatctgccgttcagctaa

SEQ ID NO: 142225 - DNA, 75 bp, synthetic construct
  source 1..75: mol_type = other DNA
attaatggtatagattttccttgggttgcaaatcaatttttatatcatgtatttaagtggatatcatccccgaat

SEQ ID NO: 142226 - DNA, 75 bp, synthetic construct
  source 1..75: mol_type = other DNA
atccagagcgtagatgacaaaggttttgtttcattcataactccaggtggtcatggtggctgggctgtgaagcaa

SEQ ID NO: 142227 - DNA, 75 bp, synthetic construct
  source 1..75: mol_type = other DNA
ataaccatccgccggaattatacaaaactaggcgaattcactccaccaaaaactgatgctggtaccggaagaacg

SEQ ID NO: 142228 - DNA, 75 bp, synthetic construct
  source 1..75: mol_type = other DNA
aaggcgagctttctcgtaccatcgaaactataggcccggtaaaaggggcgcgcgtacatctggcaatgccgaaac

SEQ ID NO: 142229 - DNA, 75 bp, synthetic construct
  source 1..75: mol_type = other DNA
aagctcgtcgcgaggcaaaacgtgtgctgagacgggattcgcgcagccataaacagcgtgaagaagaatcggtca

SEQ ID NO: 142230 - DNA, 75 bp, synthetic construct
  source 1..75: mol_type = other DNA
cagctgctcaatatcggccgcaccaccctgtggcgcaaaatgaagcagtacgatattgacgccagccaattcaag

SEQ ID NO: 142231 - DNA, 75 bp, synthetic construct
  source 1..75: mol_type = other DNA
atgagcactatcacaagagaatggctgcagcaggctatcaacgattatgaaagcgttcgtgatgagcttcctttc

SEQ ID NO: 142232 - DNA, 75 bp, synthetic construct
  source 1..75: mol_type = other DNA
agcatgcacaggcccacagatggatccaggcatgtgcacgtctgaccgattttgtgaacagtggcggcaaaagga

SEQ ID NO: 142233 - DNA, 75 bp, synthetic construct
  source 1..75: mol_type = other DNA
gcggttgacgggatcagcgtaccggaagtaaacgatcagaacagcaacggcaagccggatgcagaggaagcggca

SEQ ID NO: 142234 - DNA, 75 bp, synthetic construct
  source 1..75: mol_type = other DNA
atgactggtgatggcgatgatataattatcactggtcaggattatggtcgtctggcaagtgctggtcagtgggat

SEQ ID NO: 142235 - DNA, 75 bp, synthetic construct
  source 1..75: mol_type = other DNA
gcagaaagtcagggttgtgcttaccggtgcagatttcaaactgcgcccggatctgaagccacagctggcggaaat

SEQ ID NO: 142236 - DNA, 75 bp, synthetic construct
  source 1..75: mol_type = other DNA
tacaccgcgcttatcgactacgacaaggccgagtttgaaaaaatcctgccgctctacctgagcgtttacgatcgc

SEQ ID NO: 142237 - DNA, 75 bp, synthetic construct
  source 1..75: mol_type = other DNA
cagctggccattcagccaacacaggattttgcgcaggccggctttaatatcatgaacggtctgccggcaaccagc

SEQ ID NO: 142238 - DNA, 75 bp, synthetic construct
  source 1..75: mol_type = other DNA
gctggtaatgatgtaatcgatattgtggctaatattgataatgcttcaaatattaaaggtggttctggatttgat

SEQ ID NO: 142239 - DNA, 75 bp, synthetic construct
  source 1..75: mol_type = other DNA
gcggcactaacaacatcacctatcgttacgaaattcataagatggatgatgcttttagtgttcggatttttaatg

SEQ ID NO: 142240 - DNA, 75 bp, synthetic construct
  source 1..75: mol_type = other DNA
tggggcagctgtacgaagacagcaacacccaaatcctgaccaccaacagcggcaccgtgacgggccgtaccggca

SEQ ID NO: 142241 - DNA, 75 bp, synthetic construct
  source 1..75: mol_type = other DNA
ctgacggtctcccggggcgtgattgaagccctgcgccgggatccggataaaacggcgttaacacagcgtctggcc

SEQ ID NO: 142242 - DNA, 75 bp, synthetic construct
  source 1..75: mol_type = other DNA
agtaccaatgatggtgatgttaaatatttaacctatcagtccagtgatattcctggtttaactctttggatacag

SEQ ID NO: 142243 - DNA, 75 bp, synthetic construct
  source 1..75: mol_type = other DNA
ggcagtttgattcagaagggataagttttccatatccacaaatggatatccatcttgttcgctccgggaagcagg

SEQ ID NO: 142244 - DNA, 75 bp, synthetic construct
  source 1..75: mol_type = other DNA
ttgattatgacagtgcacgtaagaatgtaagactaccagcacttgtattaacatctgctcttgcaattagtgaag

SEQ ID NO: 142245 - DNA, 75 bp, synthetic construct
  source 1..75: mol_type = other DNA
ttgtcagcgcatcatcgaagttaaagagcctgccaatctgttccgtttggctgccagcgtcctgctgatggcgat

SEQ ID NO: 142246 - DNA, 75 bp, synthetic construct
  source 1..75: mol_type = other DNA
gtgccgaaagcggtggttgaaggtctggaaggatcgttaaacgtaccggttagcgaaacggtgatgtggactaat

SEQ ID NO: 142247 - DNA, 75 bp, synthetic construct
  source 1..75: mol_type = other DNA
ggctgatggcgggcatggcgcgggataaaataggctctaatctggctaacggactggcaggctctattgacaccc

SEQ ID NO: 142248 - DNA, 75 bp, synthetic construct
  source 1..75: mol_type = other DNA
aatccaatgggtaacgcatttatcaagattgatggtacaaacagtgagaaccccgcaggtgtcgatgtacacggt

SEQ ID NO: 142249 - DNA, 75 bp, synthetic construct
  source 1..75: mol_type = other DNA
tggaaaccgtgtatttgctggtggtcgtactccttcacaaaatggtaatcaatggcaatttcacgaaatgcctgt

SEQ ID NO: 142250 - DNA, 75 bp, synthetic construct
  source 1..75: mol_type = other DNA
aactcgaagaaatgttttccttgatgttcagggtgctcgtatcaatcctgaatggaacctgagaacgggtaataa

SEQ ID NO: 142251 - DNA, 75 bp, synthetic construct
  source 1..75: mol_type = other DNA
tccttaagacattatttggcgttgatctgcaatctgacaacaaaattcagggtgtgggtagtcttatgtcatgga

SEQ ID NO: 142252 - DNA, 75 bp, synthetic construct
  source 1..75: mol_type = other DNA
actaaatcagtaagttggcagcatcaccaaatggttgataaaaaaacgatcgaggctcttgttgatacggcattc

SEQ ID NO: 142253 - DNA, 75 bp, synthetic construct
  source 1..75: mol_type = other DNA
ttccccgataccgccaccactcgcgatatcaacaaagcgcagatttacgcctggcgcaaaggtatcaaaacgctc

SEQ ID NO: 142254 - DNA, 75 bp, synthetic construct
  source 1..75: mol_type = other DNA
aaccggcgcgcactcgaagccttggctgctcgcgccgactaccgtcgcttcgaactgaatgctgcgcgcctggcc

SEQ ID NO: 142255 - DNA, 75 bp, synthetic construct
  source 1..75: mol_type = other DNA
agaaactacctgtagaagagcaacgcgctcgtgttgaagtcacgttaaaaggtgctgcgctcactcactactctc

SEQ ID NO: 142256 - DNA, 75 bp, synthetic construct
  source 1..75: mol_type = other DNA
cctttgcgcttgaacaaatggctcgcctggtggaagcgcgtctggctgatttccgtattaaagccgatgtcgtca

SEQ ID NO: 142257 - DNA, 75 bp, synthetic construct
  source 1..75: mol_type = other DNA
tcaggctggcgcggaatcactgctgggtatgggggatatgctctactctgggccgaactccacgttgccggtacg

SEQ ID NO: 142258 - DNA, 75 bp, synthetic construct
  source 1..75: mol_type = other DNA
gcttagttaatagattagttatagtaattgtttttttgcttttaacattcgctacaatggagtttatttatctct

SEQ ID NO: 142259 - DNA, 75 bp, synthetic construct
  source 1..75: mol_type = other DNA
aaccaaagcgccgctggacagcccggcattcaccggtacgccaaccacaccaaccccaccggatgatgcggtcgg

SEQ ID NO: 142260 - DNA, 75 bp, synthetic construct
  source 1..75: mol_type = other DNA
ccagctaaaggggcacgtaaggccagcaaaagtttgtggatatatgaccgggatacaaagcagaaacgctattcc

SEQ ID NO: 142261 - DNA, 75 bp, synthetic construct
  source 1..75: mol_type = other DNA
atgctcgtcacatatagattgcctcttacggaccgaaaggtcaaggagaagcaggctatgaagcagcaaaaggcg

SEQ ID NO: 142262 - DNA, 75 bp, synthetic construct
  source 1..75: mol_type = other DNA
ctgggtatccccgcgttgcgggatcgtattgttcagcgggccatgctgatggcttccggcctgagcgcagtgtcc

SEQ ID NO: 142263 - DNA, 75 bp, synthetic construct
  source 1..75: mol_type = other DNA
atatgtatgtgcctaacccgctcaaaacaacattaaactctactataaagaaactgagagtgaaagccatcgagt

SEQ ID NO: 142264 - DNA, 75 bp, synthetic construct
  source 1..75: mol_type = other DNA
tacaaaataaaagtgatatacagacgctaaaaacagaatgttattgcctggatttgcccctatatttccagacat

SEQ ID NO: 142265 - DNA, 75 bp, synthetic construct
  source 1..75: mol_type = other DNA
ccggaggatgaagatgtcgatgagccaacacctgaaaaccatgaagaaaaaaatgatgagggtgaaaaaccacag

SEQ ID NO: 142266 - DNA, 75 bp, synthetic construct
  source 1..75: mol_type = other DNA
tcctggcatgaagctgccgggcgcgataaaggccatcagtggatggaagaacaattagtctcaatttgcaaacgc

SEQ ID NO: 142267 - DNA, 75 bp, synthetic construct
  source 1..75: mol_type = other DNA
cgctattgcgccgcgttggctggctgaagagttcgctgaatccttagaattacaggtattaccgctgccgttaaa

SEQ ID NO: 142268 - DNA, 75 bp, synthetic construct
  source 1..75: mol_type = other DNA
ttgtgcattcatgtcctcgctgtaagaatgaataccggatgtatagagcgccagaccctaagcctgtatatgtac

SEQ ID NO: 142269 - DNA, 75 bp, synthetic construct
  source 1..75: mol_type = other DNA
aacaaaacgcccccgaccatcaaggccgagggcagttaagatatcaaaaacccgttatccggtgaaacgcagcac

SEQ ID NO: 142270 - DNA, 75 bp, synthetic construct
  source 1..75: mol_type = other DNA
gtcagcgtcagccatccgttcaccgtcgatttaacagcggtggcaatcagcatcaacaccgttgccagcgacgat

SEQ ID NO: 142271 - DNA, 75 bp, synthetic construct
  source 1..75: mol_type = other DNA
caaattgttcaaatgggtggcgcggcaaaccagactacgctcaataatggtgtgctacaggtttatggcgcagcg

SEQ ID NO: 142272 - DNA, 75 bp, synthetic construct
  source 1..75: mol_type = other DNA
aacggattcaggtagacgagccttacatcctgatcgtgccctcttacggcggcggcggtacggctggcgcggtgc

SEQ ID NO: 142273 - DNA, 75 bp, synthetic construct
  source 1..75: mol_type = other DNA
tctggcctttatcaggccgagaaggagatcgcaatgaagcttcgagatgaaaatagaaaaatcaagatgtttgtt

SEQ ID NO: 142274 - DNA, 75 bp, synthetic construct
  source 1..75: mol_type = other DNA
atatgagatattaggcatccccaactctataactatactgaatcatgtatcacgaattttcgatgagtctgaacc

SEQ ID NO: 142275 - DNA, 75 bp, synthetic construct
  source 1..75: mol_type = other DNA
catggcgttatccggttcgggtggtgccacccgggacaacggaagcagtcttataggtttgtttgtgcgggtatg

SEQ ID NO: 142276 - DNA, 75 bp, synthetic construct
  source 1..75: mol_type = other DNA
ttggctcgtccccggaagccctggacacgctgaacgaactggcagcggcgctgggtaatgacccaaactttgcga

SEQ ID NO: 142277 - DNA, 75 bp, synthetic construct
  source 1..75: mol_type = other DNA
ccgctcaaaccatcagcggggtggtgactcgcgccgccgctggcgatacggtcaccgtgacgcttggcggcaaca

SEQ ID NO: 142278 - DNA, 75 bp, synthetic construct
  source 1..75: mol_type = other DNA
agcgtgatttccgcactggcgcagggcgatgtaaccattaccgccacggtcaccgactccgcaggcaacagtggt

SEQ ID NO: 142279 - DNA, 75 bp, synthetic construct
  source 1..75: mol_type = other DNA
ccatcagcggcaccagcaccgccgaaaccgggcagacggtcaccgtcacccttaacggcgcaacctacagcggta

SEQ ID NO: 142280 - DNA, 75 bp, synthetic construct
  source 1..75: mol_type = other DNA
ctccgccactggagcggcaaccggtagcaccgtgacggtgactatcggcacaaatacctttaccacggtgctgga

SEQ ID NO: 142281 - DNA, 75 bp, synthetic construct
  source 1..75: mol_type = other DNA
cggcggcaacgacacgctcaacataggcaacggcggccatgacaccttgctctataaactgcttaacgccagcga

SEQ ID NO: 142282 - DNA, 75 bp, synthetic construct
  source 1..75: mol_type = other DNA
ggcaacgttggcgcaaccggcagccagtcggcgcagattgacaccgttaacccggcgcaggtgttgaccatcgcc

SEQ ID NO: 142283 - DNA, 75 bp, synthetic construct
  source 1..75: mol_type = other DNA
cccggcagcgccagccataatctggcggtagacaccaccgcgccggttctcaccattaacaccgtggcgggcgat

SEQ ID NO: 142284 - DNA, 75 bp, synthetic construct
  source 1..75: mol_type = other DNA
caccagcaccgccgaaaccgggcagacggtgaccgtcacccttaacggcgcaacctacaccggcactgtgcaggc

SEQ ID NO: 142285 - DNA, 75 bp, synthetic construct
  source 1..75: mol_type = other DNA
tactggtcgacagcggcctgccggacgtcaccatcaacaccgtggcaggcgacgatattatcaacgccgccgaag

SEQ ID NO: 142286 - DNA, 75 bp, synthetic construct
  source 1..75: mol_type = other DNA
gatttaacgaattcttatatgaatggaatgggaaaaaagaatacagtagttacttgggaacaccaaataacacct

SEQ ID NO: 142287 - DNA, 75 bp, synthetic construct
  source 1..75: mol_type = other DNA
agagccggaccgtgacgtttatcgccgatgtcaggacggcgcagatcgcggtgctggaagtgacgcaggattacg

SEQ ID NO: 142288 - DNA, 75 bp, synthetic construct
  source 1..75: mol_type = other DNA
gcgtgttggcaggcaacggtgccacgactgcttcgacggtcaccacgcaaccggacggcacggtggagatctcag

SEQ ID NO: 142289 - DNA, 75 bp, synthetic construct
  source 1..75: mol_type = other DNA
ataatcgttggaaggacagcagttcacagctgaatacgcaaagtaaccgttatgttgtgcaactgggtggcagca

SEQ ID NO: 142290 - DNA, 75 bp, synthetic construct
  source 1..75: mol_type = other DNA
ggcccggtctatatgcgtctgctgcgtggcaaagtgccgctggtgctcgacaaatacgactataaatttgaactg

SEQ ID NO: 142291 - DNA, 75 bp, synthetic construct
  source 1..75: mol_type = other DNA
acaccgttacaggagaatataataacggcggggccatatttgctaaagaaaactcaacgctgaatcttactgatg

SEQ ID NO: 142292 - DNA, 75 bp, synthetic construct
  source 1..75: mol_type = other DNA
ctttcagataacaccctcgagaaagacgaaaattctccggacaatggttttgaggtcggggaatataacacacat

SEQ ID NO: 142293 - DNA, 75 bp, synthetic construct
  source 1..75: mol_type = other DNA
tgtcagcgtgccagcggtgcatattcaggcgctgggcaacggcgacctgacggttaatgcctcggtcaccaatgg

SEQ ID NO: 142294 - DNA, 75 bp, synthetic construct
  source 1..75: mol_type = other DNA
tgtctccggcgatgacattattaatgccgccgaacacggacaggcgctggtgatctccggttccagtactggcgg

SEQ ID NO: 142295 - DNA, 75 bp, synthetic construct
  source 1..75: mol_type = other DNA
cggcaacgctacggtcaccgccagcgtgaacgatgtcgccggtaatccgagcagcgtttcacgctggcgctggtg

SEQ ID NO: 142296 - DNA, 75 bp, synthetic construct
  source 1..75: mol_type = other DNA
gatacggtggcgggcgatgatgtggtcaatatcatcgagcacgggcaggcgctggtggtcaccggcagcagctcg

SEQ ID NO: 142297 - DNA, 75 bp, synthetic construct
  source 1..75: mol_type = other DNA
gaaagtagcgccggaaatccgataagcattacgcatccggtaacggtggatctcactccggcggctattaccatc

SEQ ID NO: 142298 - DNA, 75 bp, synthetic construct
  source 1..75: mol_type = other DNA
tgccggaacaacctccaccattacccatccggttaccgtcgatctggctggggtcgccatcaccattaacactct

SEQ ID NO: 142299 - DNA, 75 bp, synthetic construct
  source 1..75: mol_type = other DNA
agcggcggacaaggataagccctcgtcagcagttccgtcagcactgcgacagcgttgtcctcgcggcttttaccc

SEQ ID NO: 142300 - DNA, 75 bp, synthetic construct
  source 1..75: mol_type = other DNA
gcgcgcaaactatcagcggccaggtaaccggtgcggcggcgggcagcaccgtcaccgttgaactgggcggtaaaa

SEQ ID NO: 142301 - DNA, 75 bp, synthetic construct
  source 1..75: mol_type = other DNA
cgcaaataataccggcaccgcgacgcacgatatcgtgatagatgccaacctgccaggtctgcgcgtcgataccgt

SEQ ID NO: 142302 - DNA, 75 bp, synthetic construct
  source 1..75: mol_type = other DNA
aatagcatcgagcacgctcaggcgctggtgataaccggtagcagcagcgggctggcggcgggcgcggcgctgacg

SEQ ID NO: 142303 - DNA, 75 bp, synthetic construct
  source 1..75: mol_type = other DNA
ctcaatagcccgaccgtgcagacgtatcaggcaacggtacaggccgacggcagctggagcatcaatattccggcg

SEQ ID NO: 142304 - DNA, 75 bp, synthetic construct
  source 1..75: mol_type = other DNA
gcagcagtcagagccgggatgtgacatttatcgccgatgtcagcacggcgcagatcgcgagtctggaggtgacgc

SEQ ID NO: 142305 - DNA, 75 bp, synthetic construct
  source 1..75: mol_type = other DNA
ccaaaacaccgtcttttttatcaattgtaacatttactatatttattcctttaaaatttatatcttatcattatg

SEQ ID NO: 142306 - DNA, 75 bp, synthetic construct
  source 1..75: mol_type = other DNA
tttcttattcagttgccggggcgctctctctttttgttttagtccagcaattactttcaatggcaaacttgattt

SEQ ID NO: 142307 - DNA, 75 bp, synthetic construct
  source 1..75: mol_type = other DNA
attcagatggatgggctgaccataataatggcgaatatactatgatctggactgcgaagttcgctcaggaaaatc

SEQ ID NO: 142308 - DNA, 75 bp, synthetic construct
  source 1..75: mol_type = other DNA
tccgtggtatgaaacgcctgataatctctttttcagccagcataccctccaccgtactgacgaacgtacgcagat

SEQ ID NO: 142309 - DNA, 75 bp, synthetic construct
  source 1..75: mol_type = other DNA
aggataacgcggtcgcagacggttcgacggcgaatacgctgcaggtgaaagtcaccgatgctaacggcaatgcgc

SEQ ID NO: 142310 - DNA, 75 bp, synthetic construct
  source 1..75: mol_type = other DNA
actaccgccagaattacggcggacaatgcacgatatctctccctcggcagggatggttgtccccgtgttgagtga

SEQ ID NO: 142311 - DNA, 75 bp, synthetic construct
  source 1..75: mol_type = other DNA
ccgcgagccggtttatcaggtggtcggcaaatggctcaagggcgtgtttcctatttcaacagggctggtgatttc

SEQ ID NO: 142312 - DNA, 75 bp, synthetic construct
  source 1..75: mol_type = other DNA
ttaagctacaagcgcgtgttgacacgttcctggtgaatgcggcggaatgcgaaccaatgttgaaagtggatcaac

SEQ ID NO: 142313 - DNA, 75 bp, synthetic construct
  source 1..75: mol_type = other DNA
atgcaccggatattattttgtttccttctgtctttaccggcgacggtcgttgccgggactaccctttacaccgac

SEQ ID NO: 142314 - DNA, 75 bp, synthetic construct
  source 1..75: mol_type = other DNA
attcaatcgctcaacatggttgacattcatgaaaaataggcttgaggtggctaaagaaatgctttccgatgatgg

SEQ ID NO: 142315 - DNA, 75 bp, synthetic construct
  source 1..75: mol_type = other DNA
tcactgacaaaacaatacgagaaaaatattatcttaaagaaagaaaagagatcggaaaacaaatagataattttt

SEQ ID NO: 142316 - DNA, 75 bp, synthetic construct
  source 1..75: mol_type = other DNA
aggacgactcagtggcagatggtgtaatggcgaatatgctgcgggcgagggtcaccgatgcgttcgggaatgtac

SEQ ID NO: 142317 - DNA, 75 bp, synthetic construct
  source 1..75: mol_type = other DNA
ggaatacgcttgccgggcagacggtcagcgtgatggcagacaacagcgcaacggtgtctccgacggtcactacag

SEQ ID NO: 142318 - DNA, 75 bp, synthetic construct
  source 1..75: mol_type = other DNA
tactcaacttacttgaggttgcgccccgggctgaacaactgaatatgctcgttggggctgtatgtgtatggcttg

SEQ ID NO: 142319 - DNA, 75 bp, synthetic construct
  source 1..75: mol_type = other DNA
agttagtcgtacagcacataattactctcccagaccagaatttctacgacgtactcgtcgattttttgcgcaact

SEQ ID NO: 142320 - DNA, 75 bp, synthetic construct
  source 1..75: mol_type = other DNA
aaatgtcacagtgctatcccgatcgatgccttagtgtccagtggcacgctgcgaaatctaagcaccgacctcgtc

SEQ ID NO: 142321 - DNA, 75 bp, synthetic construct
  source 1..75: mol_type = other DNA
agccggacgggacgttggagatcagtgtcaccagccagacggcgggcaccagtgccgtcactgcaaccatcaaca

SEQ ID NO: 142322 - DNA, 75 bp, synthetic construct
  source 1..75: mol_type = other DNA
gatgtgtcatacaccgcgggtggcaagataaaagtgacagtcacccttatggatgagcagaaaaaccgggtgaca

SEQ ID NO: 142323 - DNA, 75 bp, synthetic construct
  source 1..75: mol_type = other DNA
cacctttacggtgacgaaaggggcggctgtatttgccaatgcagggcagagcgcagatatcaggacggatgcgca

SEQ ID NO: 142324 - DNA, 75 bp, synthetic construct
  source 1..75: mol_type = other DNA
ctggaccggacggaatatgctgccggagagcccattacggtgacggtgacgctgagggatgcgcaggggaatgcg

SEQ ID NO: 142325 - DNA, 75 bp, synthetic construct
  source 1..75: mol_type = other DNA
ttacctatctcgatcacgtattccttccggtatccccggaccaaggcccatttctcgatttattgattaactcac

SEQ ID NO: 142326 - DNA, 75 bp, synthetic construct
  source 1..75: mol_type = other DNA
tattccatataccctgggtgcgttggaatcgccaccaacggtcgcggcacgctttggtatcaccgttgatgaatt

SEQ ID NO: 142327 - DNA, 75 bp, synthetic construct
  source 1..75: mol_type = other DNA
ggcggacaacggtgcagcggtcgcttcgacgatgaccacaaagccggacggcacggtggagatcagtgtcaccag

SEQ ID NO: 142328 - DNA, 75 bp, synthetic construct
  source 1..75: mol_type = other DNA
cggtcatattcatcacgatctaaaccatgttttcgatctacaccgcaatctgatcgaaaccggctcaatgttggg

SEQ ID NO: 142329 - DNA, 75 bp, synthetic construct
  source 1..75: mol_type = other DNA
ctttatggcaccgtcgatcgccaaagaaggcaagatatcaactatcgtgccaatgtgtagccatgtcgatcacag

SEQ ID NO: 142330 - DNA, 75 bp, synthetic construct
  source 1..75: mol_type = other DNA
caaaatcccatgtgccagcagattgccgataacgtggtcacgttcttgttgcaggaaatggcgcatgggcgtatt

SEQ ID NO: 142331 - DNA, 75 bp, synthetic construct
  source 1..75: mol_type = other DNA
gctgtaatgtttgtattcgcagcgataacatccaacggtttgaatgaaagaggcctgattaccgcgggatgctct

SEQ ID NO: 142332 - DNA, 75 bp, synthetic construct
  source 1..75: mol_type = other DNA
atgctattgggcgttttgccaacgccatgcggctctatggtgaagccttcatcagatatcgagggctggcagcaa

SEQ ID NO: 142333 - DNA, 75 bp, synthetic construct
  source 1..75: mol_type = other DNA
agtgtctaacgtggtggcatataactaccagctttacaaaaaatataatcctgatggcgagggatgccatccgtg

SEQ ID NO: 142334 - DNA, 75 bp, synthetic construct
  source 1..75: mol_type = other DNA
ttcggccaccgcgatggccttcggtctgcctgccctggccactccgggggctgaaggactggctttatccgtttc

SEQ ID NO: 142335 - DNA, 75 bp, synthetic construct
  source 1..75: mol_type = other DNA
cgctgaactgaggcagcacgatatagcctttgtgttgatggaaggccgccataacctgtacgtttcagcccgaag

SEQ ID NO: 142336 - DNA, 75 bp, synthetic construct
  source 1..75: mol_type = other DNA
tgaacgcccagcagcgttatcttgaccgctggctgctgcgcctgcaacgccatctcgacaaccgccgtttcctgt

SEQ ID NO: 142337 - DNA, 75 bp, synthetic construct
  source 1..75: mol_type = other DNA
tgccgctgctattgccattaaaaataacactaccgtttcacaggtagatattcagacggtacaggaacgcttaca

SEQ ID NO: 142338 - DNA, 75 bp, synthetic construct
  source 1..75: mol_type = other DNA
gtttagtggaaaaaacaataccaggaaggaagtctcactgctgttgctgccggagaggatgttgttcctgcctca

SEQ ID NO: 142339 - DNA, 75 bp, synthetic construct
  source 1..75: mol_type = other DNA
tcagcgacagtttcgtgtacgtctgagtggcgcacgtatcaaagaccgctaccgtggggcgtactggacaggaca

SEQ ID NO: 142340 - DNA, 75 bp, synthetic construct
  source 1..75: mol_type = other DNA
cacgattacccgctacaaccacagcacccattacgcgatggcggtatggcagctaggtgaggcagtaggcagggc

SEQ ID NO: 142341 - DNA, 75 bp, synthetic construct
  source 1..75: mol_type = other DNA
gaatttcgttttcactggctgttatcgacccggcagcagtgcatctgttgagttgggcgggagcggcatatattg

SEQ ID NO: 142342 - DNA, 75 bp, synthetic construct
  source 1..75: mol_type = other DNA
aatagaaaaatctaataaatttgatggtcaaccgccacaaatgagattggtcatacgcggtaaaataatccatgt

SEQ ID NO: 142343 - DNA, 75 bp, synthetic construct
  source 1..75: mol_type = other DNA
tggatattagtgagcaatttgataaaggcgtcgatgatctgaatgagcaagttgaaaaagcccttgaagatttag

SEQ ID NO: 142344 - DNA, 75 bp, synthetic construct
  source 1..75: mol_type = other DNA
tgcccgcttgcatgttgagggttgttcctttctggcgcagtggcagccggatagtgcgtactgcgacgacgaagg

SEQ ID NO: 142345 - DNA, 75 bp, synthetic construct
  source 1..75: mol_type = other DNA
cccgcgcaccgactgcggctatctgccgctctccatgcacgatgaagcaccacaagttctggcggcgctggtcgc

SEQ ID NO: 142346 - DNA, 75 bp, synthetic construct
  source 1..75: mol_type = other DNA
tgcaacaggggcaaacctgccaggtggaacaggtggacgttcgcgcccgccagacccagccgccggagcactaca

SEQ ID NO: 142347 - DNA, 75 bp, synthetic construct
  source 1..75: mol_type = other DNA
gcgcgcagcaccttcagcagtcactccgtctgccgggacagcagtatgatgaggagtcggggctgtactacaacc

SEQ ID NO: 142348 - DNA, 75 bp, synthetic construct
  source 1..75: mol_type = other DNA
tataccagccgggaagcttcacgccgctcctgagaatcgaaacagagaatggtgaacaggcgaaggcgcggcacc

SEQ ID NO: 142349 - DNA, 75 bp, synthetic construct
  source 1..75: mol_type = other DNA
ctgatacgctcacagacattgtcaccctgtggatttgggtgggtcaggaggagatgttgctgaactgccagatgg

SEQ ID NO: 142350 - DNA, 75 bp, synthetic construct
  source 1..75: mol_type = other DNA
gggcctgctgtcggcctttgaggtcgtggtatggatgacggatggctggccgctttatgaatcccgcctgaaggg

SEQ ID NO: 142351 - DNA, 75 bp, synthetic construct
  source 1..75: mol_type = other DNA
ccgtttccgttctttgttacgtcagggcgatattgatggcgcgcaaaaacagctcgatcggctgtcgcagttagc

SEQ ID NO: 142352 - DNA, 75 bp, synthetic construct
  source 1..75: mol_type = other DNA
ttaccgtaacgcttggcgggaaaacctacaccgctaccgtgcaggggaatttaagctggagcgtggacgttccgg

SEQ ID NO: 142353 - DNA, 75 bp, synthetic construct
  source 1..75: mol_type = other DNA
agttgaagaaagattatcaaaaggcattcgacatgtatcatatctgtttaatgctatctcccgataacgatttct

SEQ ID NO: 142354 - DNA, 75 bp, synthetic construct
  source 1..75: mol_type = other DNA
acgttcaaaacccatttacttgatgaaggttcgcccgacgacaatgaaactgtttggtttttgctgcgtcggatc

SEQ ID NO: 142355 - DNA, 75 bp, synthetic construct
  source 1..75: mol_type = other DNA
aaagcagtccttgctaggcaggagcgtgttgccgctatacatgcagcactggggcttgggcgctatgtagagatc

SEQ ID NO: 142356 - DNA, 75 bp, synthetic construct
  source 1..75: mol_type = other DNA
agtaatcagccagccaataccgccatcaccgtgacgctgaacgggcaaaattacactgcgacgacggacgccgca

SEQ ID NO: 142357 - DNA, 75 bp, synthetic construct
  source 1..75: mol_type = other DNA
acattattaacgccaccgaacacgggcaggcgctggtgatttccggttccagcactggcggagaagcgggagatg

SEQ ID NO: 142358 - DNA, 75 bp, synthetic construct
  source 1..75: mol_type = other DNA
ggagccgccgttggcgacgcggtaaccgtgacgctgggcggtaatacctacaccaccaccgtgcaggccggctta

SEQ ID NO: 142359 - DNA, 75 bp, synthetic construct
  source 1..75: mol_type = other DNA
aacaccatcgccacggatgacgtgattaacgccgcagaaaaaggcgctgatttaaccctttccggcaccaccact

SEQ ID NO: 142360 - DNA, 75 bp, synthetic construct
  source 1..75: mol_type = other DNA
acatcatcaacgccgccgaaagcgggcaggatttgcaaatcaccggcaccaccgacgctcagccagggcagacgg

SEQ ID NO: 142361 - DNA, 75 bp, synthetic construct
  source 1..75: mol_type = other DNA
gcattacgcatccggtaacggtcgatctcactccggcggcgatcaccatcaataccatcgccacggacgacgtga

SEQ ID NO: 142362 - DNA, 75 bp, synthetic construct
  source 1..75: mol_type = other DNA
cattagaagcgaaatgggggaaaagcgcattagctatgggatggactgccgttccttctgcgttgttctttcttc

SEQ ID NO: 142363 - DNA, 75 bp, synthetic construct
  source 1..75: mol_type = other DNA
taagggcggagttggcgcagtaagtggtgcggatggtggggctacctcgtttgccagcctgttctcagctcctgg

SEQ ID NO: 142364 - DNA, 75 bp, synthetic construct
  source 1..75: mol_type = other DNA
cgcgggcgcgaccattatcgtatgggttgacctgtctgctgccagttcttatgcgattactgtcggcaagggtgg

SEQ ID NO: 142365 - DNA, 75 bp, synthetic construct
  source 1..75: mol_type = other DNA
acgaaaacggatttgccacggaagctggctttattaccgtttacaactacaatggcgaaacgcgggaatatattt

SEQ ID NO: 142366 - DNA, 75 bp, synthetic construct
  source 1..75: mol_type = other DNA
aacttccgtatcttccagaatgaggacatcgaaagcatcctcgctacgatcctgaaggaaaacggtgtgaccgag

SEQ ID NO: 142367 - DNA, 75 bp, synthetic construct
  source 1..75: mol_type = other DNA
tggaagtggacggcctgccgccggatgcttttgcggtggtttcctttcatctgaaccagttactctcttcgctct

SEQ ID NO: 142368 - DNA, 75 bp, synthetic construct
  source 1..75: mol_type = other DNA
catgctttgctgcgctgggaaccgggtgtccagaccgtcgcggtgaaatgcgacctgtgtgatttcttgccagaa

SEQ ID NO: 142369 - DNA, 75 bp, synthetic construct
  source 1..75: mol_type = other DNA
accgtatatgaggactcaaagccgggcacactgaatgatttcctcggtgcaatgacggaggatgatgtccggcca

SEQ ID NO: 142370 - DNA, 75 bp, synthetic construct
  source 1..75: mol_type = other DNA
agctctcaatatttgcttgagcatacggtaggcaatagtgataagccacaagctatgttcctgcttaaaccagat

SEQ ID NO: 142371 - DNA, 75 bp, synthetic construct
  source 1..75: mol_type = other DNA
atggcgctgaagctattagccaataataacgcaaagagtgttctcgctgcgggtattagcgcgtccgctaccgtt

SEQ ID NO: 142372 - DNA, 75 bp, synthetic construct
  source 1..75: mol_type = other DNA
cccgccgtcacacgccgggattatcaccgtatatgaggactcaaagccgggcacactgaatgatttctcggtgca

SEQ ID NO: 142373 - DNA, 75 bp, synthetic construct
  source 1..75: mol_type = other DNA
gttgatagcacattgcacactctggatgcaccaatcaaagagcgtacatctgtagttaaaattcctgtggagcag

SEQ ID NO: 142374 - DNA, 75 bp, synthetic construct
  source 1..75: mol_type = other DNA
aagatgctgagtatgatcggcgacctgcttaacgctatcaaggacggtcgctggtctgatgctgcaagtattggc

SEQ ID NO: 142375 - DNA, 75 bp, synthetic construct
  source 1..75: mol_type = other DNA
ggaatggcatcagccattattcgaaaaagcgagaaagctaggaattaccattttcagcagtccatttgattttac

SEQ ID NO: 142376 - DNA, 75 bp, synthetic construct
  source 1..75: mol_type = other DNA
gctgccgccgggttatttaaaatcgccatgacattcttcgacgccgccggaacgccagcgggtttgctgggtaaa

SEQ ID NO: 142377 - DNA, 75 bp, synthetic construct
  source 1..75: mol_type = other DNA
ttggatgtttttgatgacagaacaagcgaatgtctttctgaagagattaagatataccaagaatgccatgaaaaa

SEQ ID NO: 142378 - DNA, 75 bp, synthetic construct
  source 1..75: mol_type = other DNA
ccggagctggcgaacatcatcggtcatcacgcgggtattgatgacaatacagcggcaaaagccattgcccatgcc

SEQ ID NO: 142379 - DNA, 75 bp, synthetic construct
  source 1..75: mol_type = other DNA
gtgtttttgattgggcaaagcccgcgcgtggcgctttatagcgcgattccagttaaccgtaccttatgtgcgctc

SEQ ID NO: 142380 - DNA, 75 bp, synthetic construct
  source 1..75: mol_type = other DNA
tttatcacttgatagtggtactaggaaacgttgcttgtcaggcaaggctttaacaattcctaatagagacgattt

SEQ ID NO: 142381 - DNA, 75 bp, synthetic construct
  source 1..75: mol_type = other DNA
agaaaacctacctggtttctttcagatactgtgattgcaaatattggcggtgagtcatcttcatccattgacttt

SEQ ID NO: 142382 - DNA, 75 bp, synthetic construct
  source 1..75: mol_type = other DNA
gccaccgtcatcattcggcagaatggctacgtgatttatcagtctgccgttccacaaggtgcttttgagatcacc

SEQ ID NO: 142383 - DNA, 75 bp, synthetic construct
  source 1..75: mol_type = other DNA
ggttctgcagctctgggtgtcggtaaagatcttggcgctttgggcgcaatttctttcgatgtgacacatgctcgt

SEQ ID NO: 142384 - DNA, 75 bp, synthetic construct
  source 1..75: mol_type = other DNA
tttcaggtgtccattaagaaaatgtcgatgaatattattgtggtgataacggaattaggcaaaaatcatcctgca

SEQ ID NO: 142385 - DNA, 75 bp, synthetic construct
  source 1..75: mol_type = other DNA
ccaaaaggaactgaagctgccatcaaaatttctgctagcggcaatcagggcgcggcgacatcattatggaaaaca

SEQ ID NO: 142386 - DNA, 75 bp, synthetic construct
  source 1..75: mol_type = other DNA
ggccagttactacgtctacgatacaaacaaagttaaatctggcgcactacaggcaaccgcattaatcaacgtgaa

SEQ ID NO: 142387 - DNA, 75 bp, synthetic construct
  source 1..75: mol_type = other DNA
gccattgggctgggagcacatcaatcttaccggtgactacatctggcaccagaacaagcaggttgagcaaggcaa

SEQ ID NO: 142388 - DNA, 75 bp, synthetic construct
  source 1..75: mol_type = other DNA
cccggacgatctgtatgaagccgcaacgatggacggcgccagcgcgtttacccgtctgcgcaccatcactctgcc

SEQ ID NO: 142389 - DNA, 75 bp, synthetic construct
  source 1..75: mol_type = other DNA
cgctgctggcgaccactctgcagtgtacggtgggcgtgttgttggcgattctggtcaaccaaaaagatctgcgct

SEQ ID NO: 142390 - DNA, 75 bp, synthetic construct
  source 1..75: mol_type = other DNA
tgtaccaggacaaatatcagctctacaaaaacctgttatctgaaatgcagtccccatggaaaagctgcagtaact

SEQ ID NO: 142391 - DNA, 75 bp, synthetic construct
  source 1..75: mol_type = other DNA
gcgaaattcagtgagggccgcgtatatccataaagcagagcatctggaagaacggcgattgatgctacagtggtg

SEQ ID NO: 142392 - DNA, 75 bp, synthetic construct
  source 1..75: mol_type = other DNA
ctgagcaaagctgagcttactgctgacttaatttggttgtcagctaaccgaacgggtgaagagtctgctgaagaa

SEQ ID NO: 142393 - DNA, 75 bp, synthetic construct
  source 1..75: mol_type = other DNA
gggcacaaatcaatgcctcggcgaccacccgtggtgacggcggtacggtggtgctatggtcggagagcttcacga

SEQ ID NO: 142394 - DNA, 75 bp, synthetic construct
  source 1..75: mol_type = other DNA
gatgatttcatgaaccgtcgctacacgttcagtggcgagggtaaggccggagcggagattgtcagtcagggtaat

SEQ ID NO: 142395 - DNA, 75 bp, synthetic construct
  source 1..75: mol_type = other DNA
ttgacaagcgtcgccgtgaaatggtggtggtgagtgagattacctccggcgtgggaaaggcgcgctcaggcggta

SEQ ID NO: 142396 - DNA, 75 bp, synthetic construct
  source 1..75: mol_type = other DNA
agctttctgggtattttttatgatttcctgcgcgaggggctgtgggggctatataccctgggcgaggaggtaccg

SEQ ID NO: 142397 - DNA, 75 bp, synthetic construct
  source 1..75: mol_type = other DNA
accgggagcagtacgagtgggaatgccatcaaccttaaaggcaacaacacgctgacggccagtaacattactctt

SEQ ID NO: 142398 - DNA, 75 bp, synthetic construct
  source 1..75: mol_type = other DNA
agcacgggcagcaacagtggtgtggacatcaacggtacggtaaccggcggcaccatcacgggtggcaataccgga

SEQ ID NO: 142399 - DNA, 75 bp, synthetic construct
  source 1..75: mol_type = other DNA
gcgtcgcccgcagaggtgttatccgtattgcaggtcatgtaccagaccctggttggtcagcaggcgatgtcaccg

SEQ ID NO: 142400 - DNA, 75 bp, synthetic construct
  source 1..75: mol_type = other DNA
ttccgcacctatagccaaggtgccagtatgaaggagttagcaacctatgttaatttggcaacctacaagaaaatt

SEQ ID NO: 142401 - DNA, 75 bp, synthetic construct
  source 1..75: mol_type = other DNA
caagagctagtatcggctgcgaaaaatgctgcagcagcagcagacgccagcgccagtgcggcgcacacatctgaa

SEQ ID NO: 142402 - DNA, 75 bp, synthetic construct
  source 1..75: mol_type = other DNA
gtggactgtgtgttgtgggtgaaagcgaatgaggtggtggccaacgattacaatcccaatgtcatgtcttccagt

SEQ ID NO: 142403 - DNA, 75 bp, synthetic construct
  source 1..75: mol_type = other DNA
tggcgaaacagcacctgcaaaatatggaacccttcgataattatcccgaattaattgcacaacttcccgacggtc

SEQ ID NO: 142404 - DNA, 75 bp, synthetic construct
  source 1..75: mol_type = other DNA
gcgctggcgaaacagcatctgcaaaatatggaacctttcgataattatcccgaattaattgcacaactccccgac

SEQ ID NO: 142405 - DNA, 75 bp, synthetic construct
  source 1..75: mol_type = other DNA
ttgggccactgaacgcgaatatgcatttcgtcagcttgtcgccgaagaaaagtatcgcggagtggtttatcaggg

SEQ ID NO: 142406 - DNA, 75 bp, synthetic construct
  source 1..75: mol_type = other DNA
ggtaatggtgatggtggtggtaatggtggtgctaatgcgtttcatggatgttgtgtactctgtaatttttatctg

SEQ ID NO: 142407 - DNA, 75 bp, synthetic construct
  source 1..75: mol_type = other DNA
ttcctacaaagggagccgtggttcgggcgaagtttatcactcgagtagggggaagagcactgataactctgtcac

SEQ ID NO: 142408 - DNA, 75 bp, synthetic construct
  source 1..75: mol_type = other DNA
caaatggggtcggcgagcccgttgtcggcgttcagttagtattaacagcacgggtcacgagttcacgcgtagtaa

SEQ ID NO: 142409 - DNA, 75 bp, synthetic construct
  source 1..75: mol_type = other DNA
tatagtatgtgaagaaggtggtggtaaatcggctcgtaaagctggggagttaaatagggattttgttatagataa

SEQ ID NO: 142410 - DNA, 75 bp, synthetic construct
  source 1..75: mol_type = other DNA
cgaacctcccgtatacaattcaagaatgttgtatatgtataacagtataggtaatactacatcaacaaaaaccag

SEQ ID NO: 142411 - DNA, 75 bp, synthetic construct
  source 1..75: mol_type = other DNA
gtcagcgtatttaacccggcgctactggaaatcgaccatcaatccggggtcgacattcgtcagtttaaccgggca

SEQ ID NO: 142412 - DNA, 75 bp, synthetic construct
  source 1..75: mol_type = other DNA
tatcgcaaaacgataattccggtagctcacatcaacttggactcagcggtacggcgctggaaagaaataaccttt

SEQ ID NO: 142413 - DNA, 75 bp, synthetic construct
  source 1..75: mol_type = other DNA
ttcgacagtacgcaaattcgtggcgcacgcttgtataccgataacgatatgttgcctgccagccaaaacggattt

SEQ ID NO: 142414 - DNA, 75 bp, synthetic construct
  source 1..75: mol_type = other DNA
tagggatgggtaaagatcttggttctctgggtgctatctcgttcgatgtgactcatgcgcgtgcaaaatttagtc

SEQ ID NO: 142415 - DNA, 75 bp, synthetic construct
  source 1..75: mol_type = other DNA
actcgtgtaggttatcgtgtgcttttcagggtggcgggtacaaaaggtaaaccagcaccttttggcgctattgct

SEQ ID NO: 142416 - DNA, 75 bp, synthetic construct
  source 1..75: mol_type = other DNA
tttgttcaggataatcccgatgctgatttacacgcctgctttgtcgctataaaaaaaacgctgatctcctttggc

SEQ ID NO: 142417 - DNA, 75 bp, synthetic construct
  source 1..75: mol_type = other DNA
agcgatattaaaacagttctggatagcggagccgtggcgttagtgccaaaaggagatacctctggtgctgaacgt

SEQ ID NO: 142418 - DNA, 75 bp, synthetic construct
  source 1..75: mol_type = other DNA
gcaggcaccaggtgacattactccctgatgcactggatgattttgtcactgaagataaccccgtcagagtcgttg

SEQ ID NO: 142419 - DNA, 75 bp, synthetic construct
  source 1..75: mol_type = other DNA
aagacgtaaaaacgggcaaaattccggcctgtaaacggctgaaacaggccgttaaacggtacttttcggacctta

SEQ ID NO: 142420 - DNA, 75 bp, synthetic construct
  source 1..75: mol_type = other DNA
gtttggagggattcgttaacaagttgattcgcgactctgagcaacctcatccatatttgaaacgcttgagcgatt

SEQ ID NO: 142421 - DNA, 75 bp, synthetic construct
  source 1..75: mol_type = other DNA
acgcacaacattcaggtgtggatcgcaaaacaattggtcggtggattaaagccgggcgcttcattgtgatggacg

SEQ ID NO: 142422 - DNA, 75 bp, synthetic construct
  source 1..75: mol_type = other DNA
atttaacgggaggccacttccgtctgttgccagatggattttggtgccaaaaccgccgcgagagcgacccggccc

SEQ ID NO: 142423 - DNA, 75 bp, synthetic construct
  source 1..75: mol_type = other DNA
ttatcaggtactttcatcaaaaaatgaaactgttaacgccatggataagtttcttatcagtttcagccttaaaga

SEQ ID NO: 142424 - DNA, 75 bp, synthetic construct
  source 1..75: mol_type = other DNA
atgaagccccataaaccagtggcgcctgaacctgaatcacagagcgattctcttgtacgtcagccgcatacactg

SEQ ID NO: 142425 - DNA, 75 bp, synthetic construct
  source 1..75: mol_type = other DNA
cgataaatgtggttctaaacttataaaagcctcacaagatagtttagaagaaggtctgacagtagaagattttga

SEQ ID NO: 142426 - DNA, 75 bp, synthetic construct
  source 1..75: mol_type = other DNA
ctgtcgcgtaaaccggagatgacgtggtacgggtgggacggcgaccggctgacgacggtacagaccgacaccacg

SEQ ID NO: 142427 - DNA, 75 bp, synthetic construct
  source 1..75: mol_type = other DNA
gcacaggcgtgggcaggcaccggattcggtaacctggcgataccgcgtgtgggtcaggaggtgattgtggacttc

SEQ ID NO: 142428 - DNA, 75 bp, synthetic construct
  source 1..75: mol_type = other DNA
gtgaagagcagtaaagaagaagattataactggctaacagagacatttaattttgcaaatccttataaatggtat

SEQ ID NO: 142429 - DNA, 75 bp, synthetic construct
  source 1..75: mol_type = other DNA
agaaattcaaacttcgataattgttatctttacgcttcgcacttcaccagagcagagtttctgtctgccaaagaa

SEQ ID NO: 142430 - DNA, 75 bp, synthetic construct
  source 1..75: mol_type = other DNA
cctacgtcccctttggcatagcctgtaattacattattgataagattccgcttatcaataaaattaattttgttc

SEQ ID NO: 142431 - DNA, 75 bp, synthetic construct
  source 1..75: mol_type = other DNA
gtgatactggttgtctggagattcagggggccagtctactcatcaaattatctgtattcatttaaagcctatggc

SEQ ID NO: 142432 - DNA, 75 bp, synthetic construct
  source 1..75: mol_type = other DNA
ccttgcacagcgatataattcttttgtggattacgaagtaaaaaaaataaaagaattagaaagaaaaatcataca

SEQ ID NO: 142433 - DNA, 75 bp, synthetic construct
  source 1..75: mol_type = other DNA
gtagcaatagaattgatcgtcgttctcaacgtggtgctggtgatccatatacaggtgaagtcgttggttgtgaga

SEQ ID NO: 142434 - DNA, 75 bp, synthetic construct
  source 1..75: mol_type = other DNA
attcaagagggacattcatctaagcatgctgatttgcaggatgattgggcacagcagcttccccaggactttatt

SEQ ID NO: 142435 - DNA, 75 bp, synthetic construct
  source 1..75: mol_type = other DNA
atcatttatgaaatatcactgcgatgataaatacatcaatgtatctcttgcgggattcgatatgacggaaaatga

SEQ ID NO: 142436 - DNA, 75 bp, synthetic construct
  source 1..75: mol_type = other DNA
tgcagcgtgtaagggatgaagtgacaattagatataatatggtgtacataactctcgatacttctatggatatca

SEQ ID NO: 142437 - DNA, 75 bp, synthetic construct
  source 1..75: mol_type = other DNA
ttgacaacataacgcctgaagaggcggaaaggaaaccctggacactcgcctatgaacatgaactcagcacggttt

SEQ ID NO: 142438 - DNA, 75 bp, synthetic construct
  source 1..75: mol_type = other DNA
tgcacgctatgacgagctgttcgaaccaataacgccaacggagcggtattgcctacagtttactgcacaaaacag

SEQ ID NO: 142439 - DNA, 75 bp, synthetic construct
  source 1..75: mol_type = other DNA
aaattctttataaagagaatagagagaagcttcccgactcaaggatagacagaataatcgacaggggccctcact

SEQ ID NO: 142440 - DNA, 75 bp, synthetic construct
  source 1..75: mol_type = other DNA
ttaacagcaccagtaatgaagaattcaaagtcatgctgtttacgcgatttattgtaacaggcctgaataaacatc

SEQ ID NO: 142441 - DNA, 75 bp, synthetic construct
  source 1..75: mol_type = other DNA
atgcccccttcaaccacggatgtgctgaatatggcggcagcacaaccgctggtatttgatgcagaactggacacc

SEQ ID NO: 142442 - DNA, 75 bp, synthetic construct
  source 1..75: mol_type = other DNA
ctttcagtaacaaagttgataataaagaagaatattttgacgtggtcaccaataacacttgcgctaaggtatcac

SEQ ID NO: 142443 - DNA, 75 bp, synthetic construct
  source 1..75: mol_type = other DNA
ctggcgggcatgttcgcttcgctattcagccagtctgatgaacatatccttgctgttttctctgagctttataca

SEQ ID NO: 142444 - DNA, 75 bp, synthetic construct
  source 1..75: mol_type = other DNA
tatggacagcagaaacgcgtttaccttattaaagaggaaaatgtcgctcgatacgcataacgataaatatttgaa

SEQ ID NO: 142445 - DNA, 75 bp, synthetic construct
  source 1..75: mol_type = other DNA
gcagtacgcatcatcagaagtttccaggagcgtgagggtggtaaaatctccgtttttatcgaacccgatctggag

SEQ ID NO: 142446 - DNA, 75 bp, synthetic construct
  source 1..75: mol_type = other DNA
cgccagctaaaccacgtcgaagcggcagaactgctgcgtgtaactgctgaagcaatccagaacgaagcgcaggag

SEQ ID NO: 142447 - DNA, 75 bp, synthetic construct
  source 1..75: mol_type = other DNA
aaaccgcacacataccgggattggcttacagaaacctggcggtgagatgttcaggaactacccgaaaaaaaggga

SEQ ID NO: 142448 - DNA, 75 bp, synthetic construct
  source 1..75: mol_type = other DNA
atgatacatgaccgcatagcggaggaactcgaggcgaaaggattttaccggagggcggcggcgcgatggggtgaa

SEQ ID NO: 142449 - DNA, 75 bp, synthetic construct
  source 1..75: mol_type = other DNA
gttatcacttaccccattacaagcccgctgccgcagatattcccgtggcgagcgataacccagcgcactatgcgg

SEQ ID NO: 142450 - DNA, 75 bp, synthetic construct
  source 1..75: mol_type = other DNA
atactgtcaggctgaataacgagcaacggtcagcagtacgcgaacgtctctctgaacgtggagcaagaagactgg

SEQ ID NO: 142451 - DNA, 75 bp, synthetic construct
  source 1..75: mol_type = other DNA
aaggaaatgaacggggtggaggcagcagagctactgcgccgcgaagctgcgcgctgtgaagcggaatctcggggg

SEQ ID NO: 142452 - DNA, 75 bp, synthetic construct
  source 1..75: mol_type = other DNA
gttcggcgtcgtcatcggcctcatcggcgtctgcttcaaaagatgaggcgaccagacaagcgtcagcagcgaagg

SEQ ID NO: 142453 - DNA, 75 bp, synthetic construct
  source 1..75: mol_type = other DNA
tttgccgatatcttccagtgcacgcttgagattgttgatgtcaaagaacacggcacactcggtaccgcaatgaca

SEQ ID NO: 142454 - DNA, 75 bp, synthetic construct
  source 1..75: mol_type = other DNA
tggcaacccggtccgcaacggcattatctcaaccgacagtcgggcaaaagagtacgtggaaaagtggcaaaactc

SEQ ID NO: 142455 - DNA, 75 bp, synthetic construct
  source 1..75: mol_type = other DNA
ttgttttgtgtttttcgcttatttatgtgattttgtatggacttggtgaatgtttgtttaaaggaataaatacac

SEQ ID NO: 142456 - DNA, 75 bp, synthetic construct
  source 1..75: mol_type = other DNA
ataacatccgtacacttcgcgctcaggcacgagagctaccattagaagtgcttgaagaagtattagaaaagttca

SEQ ID NO: 142457 - DNA, 75 bp, synthetic construct
  source 1..75: mol_type = other DNA
cgcggggagaacccggaagaagtacacctgccgcccccgtccgaccgagtaaacgttatgacagtcagagagcat

SEQ ID NO: 142458 - DNA, 75 bp, synthetic construct
  source 1..75: mol_type = other DNA
tgaagatgatgaaaaattaaagcgcagccgattagtggatggcgacgttttacttacgattactggtgcaaaatt

SEQ ID NO: 142459 - DNA, 75 bp, synthetic construct
  source 1..75: mol_type = other DNA
ggtccaatagatactcataccgaattcaatttcaacggtaaatatctgattattgcgcaagatggctctattggc

SEQ ID NO: 142460 - DNA, 75 bp, synthetic construct
  source 1..75: mol_type = other DNA
gggtgatgccctgcgtgaggagaacaggctggaaaaatacctgtcgacagacacacctgcagatattatcagttc

SEQ ID NO: 142461 - DNA, 75 bp, synthetic construct
  source 1..75: mol_type = other DNA
tttccaggccacgctacaacaggatggaactataccaatagaagctggtgagtttaaagccaccagtactttcca

SEQ ID NO: 142462 - DNA, 75 bp, synthetic construct
  source 1..75: mol_type = other DNA
tggaacttctgtgactggttctacggtaaaaatgggtgaatatagtgcagaacaaatcagaaacggtgccacacc

SEQ ID NO: 142463 - DNA, 75 bp, synthetic construct
  source 1..75: mol_type = other DNA
cgcgaggaggtaagtaatatcgagcggcagataaaagcacatatcaaagccagccctgcactgaggcgtgattat

SEQ ID NO: 142464 - DNA, 75 bp, synthetic construct
  source 1..75: mol_type = other DNA
agaaaattggacactggctgtggcacatttaaagatgaatacttgttagataaaaactttgtagattttgcaaaa

SEQ ID NO: 142465 - DNA, 75 bp, synthetic construct
  source 1..75: mol_type = other DNA
actcgctttgccctgaagtaagtgaagataaaccccttgatgttattcaggtttgccacgcgcttggttatccac

SEQ ID NO: 142466 - DNA, 75 bp, synthetic construct
  source 1..75: mol_type = other DNA
cagccctctcttcccctactatagtaaagatggtcagataaagctttactctgaaataggtagttccccccatgc

SEQ ID NO: 142467 - DNA, 75 bp, synthetic construct
  source 1..75: mol_type = other DNA
cattccttgccgggtatgacgtatcggctgccgtttcgctggcaatcaaggtctccgcggcgatgctgctgttgc

SEQ ID NO: 142468 - DNA, 75 bp, synthetic construct
  source 1..75: mol_type = other DNA
cgcacaattgggtgatttatctcaattaaatatagcaaaatggtcaggaagagttagtgttttacaaaacaaaaa

SEQ ID NO: 142469 - DNA, 75 bp, synthetic construct
  source 1..75: mol_type = other DNA
agcagtagatgatggcttttatggcgcagacaaatgggtttcatttcatgaagacgtattaaataatcttgagaa

SEQ ID NO: 142470 - DNA, 75 bp, synthetic construct
  source 1..75: mol_type = other DNA
ggttaatggtgactcactgttgattaactggaactgtgcagcctcgaaatccccaccgaagacccctgatgaaaa

SEQ ID NO: 142471 - DNA, 75 bp, synthetic construct
  source 1..75: mol_type = other DNA
aatggacgagaggtaaatgtagctataaattgttacagcatatggcctgtggttcattagttgttggatcgccgg

SEQ ID NO: 142472 - DNA, 75 bp, synthetic construct
  source 1..75: mol_type = other DNA
gcttatatgttgggtgcggttatgctaaaaagaatttcagacgcacttttttctctttgattataaatgtagctt

SEQ ID NO: 142473 - DNA, 75 bp, synthetic construct
  source 1..75: mol_type = other DNA
caaaccagcgatatttctgtgtatgcaggcggtgcgttttcggggacataccgggcgttgtcgggctcacggctg

SEQ ID NO: 142474 - DNA, 75 bp, synthetic construct
  source 1..75: mol_type = other DNA
gtgatatcccgttcaattttatccgcaccaaaaatggcaaagcgccatcacatccaattgatatggaagcaagga

SEQ ID NO: 142475 - DNA, 75 bp, synthetic construct
  source 1..75: mol_type = other DNA
ttttggccacctggcgataccgcgtgtgggtcaggaggtgattgtggacttcctcaacggcgatccggaccagcc

SEQ ID NO: 142476 - DNA, 75 bp, synthetic construct
  source 1..75: mol_type = other DNA
ggcaatgtccagccaccggcgcgagaaagaaatccgccaggcattcgcagaagaagcggcaaacgccgtcagtga

SEQ ID NO: 142477 - DNA, 75 bp, synthetic construct
  source 1..75: mol_type = other DNA
gtatatctggaataccccataacaaccagccaacacgcagatgccctgcgccagagacctgaagcttcaagttgg

SEQ ID NO: 142478 - DNA, 75 bp, synthetic construct
  source 1..75: mol_type = other DNA
gtgactaaaaataatgataatagaggcttcctgaaaaaaatatgtaattatgtattaaccttgctgggtgttaat

SEQ ID NO: 142479 - DNA, 75 bp, synthetic construct
  source 1..75: mol_type = other DNA
aaacgggactttcttttctgccggaaattatgggacagaaatcaggggaggagacaaaaacggatttagtggtac

SEQ ID NO: 142480 - DNA, 75 bp, synthetic construct
  source 1..75: mol_type = other DNA
ccgctgggtgcctggctggatgtgtgcaccacgtccacagacggatgccactgaacacaccactaacctggctga

SEQ ID NO: 142481 - DNA, 75 bp, synthetic construct
  source 1..75: mol_type = other DNA
atgattttccctacgccagcggtgagaaagcctgatgatgccgtcaaccgtcgcatcagcctgctggtactgaac

SEQ ID NO: 142482 - DNA, 75 bp, synthetic construct
  source 1..75: mol_type = other DNA
aaaatagtaagggagaattcagcataaagaatggtgagtcaataaattatgaattggataatggctctatgttaa

SEQ ID NO: 142483 - DNA, 75 bp, synthetic construct
  source 1..75: mol_type = other DNA
ctgctcagcgccgccaggagttgcagaccacggcgcagcttaatgttgcattgcagctgagcattaaaaataaca

SEQ ID NO: 142484 - DNA, 75 bp, synthetic construct
  source 1..75: mol_type = other DNA
aaggcgtgaaggtggtgaaggacagcgccagcctgtggccgcagatcattacggcggtttcatctgccggcgccg

SEQ ID NO: 142485 - DNA, 75 bp, synthetic construct
  source 1..75: mol_type = other DNA
acgcggtgaattttttgatccggctgaaagcaaggtctatcgccatccaacgttttacaccatccctgatggcat

SEQ ID NO: 142486 - DNA, 75 bp, synthetic construct
  source 1..75: mol_type = other DNA
tccagatgaacagctctcttcagaagataaattcattgaaggtgaagagaaagaaatcgagaataaagacgataa

SEQ ID NO: 142487 - DNA, 75 bp, synthetic construct
  source 1..75: mol_type = other DNA
gtttctcccgtgaagaaagcagcacgattcgcggcctgttctttggttattctcattctgatgttggttttgatc

SEQ ID NO: 142488 - DNA, 75 bp, synthetic construct
  source 1..75: mol_type = other DNA
gtgatgatgctgagcgctttgcggagaacgccagacaggatgcaacggccacagcctgtgacagaaaggccactg

SEQ ID NO: 142489 - DNA, 75 bp, synthetic construct
  source 1..75: mol_type = other DNA
ggacagatgcaacagggtgtgcagggtgttacagatgcagtaaagcaggctcaacaggcagcagatgattctgca

SEQ ID NO: 142490 - DNA, 75 bp, synthetic construct
  source 1..75: mol_type = other DNA
ctgatgcgcagaagataaaggaagactgtcagacgctggcggataacgtacagctgaacgccaccgcggttgccg

SEQ ID NO: 142491 - DNA, 75 bp, synthetic construct
  source 1..75: mol_type = other DNA
gtgagagttaataaagcatgggagatgttcgatattaatatgtggaatatgtcagaagtaacagatgggaattac

SEQ ID NO: 142492 - DNA, 75 bp, synthetic construct
  source 1..75: mol_type = other DNA
cacagggaaataatacccttaccggtgctgcaggtgttgcctccggcgaggtggtggggaatgataccacagatg

SEQ ID NO: 142493 - DNA, 75 bp, synthetic construct
  source 1..75: mol_type = other DNA
tttaacccatcgcaggggcctttagcaaactatctaattatgggggatagtggctctccactatttgcttatgat

SEQ ID NO: 142494 - DNA, 75 bp, synthetic construct
  source 1..75: mol_type = other DNA
gctcttaatgccctgttgaaggaaaaagagaatatccgtaaccagcttgccggcatcaatcagaagatagcggaa

SEQ ID NO: 142495 - DNA, 75 bp, synthetic construct
  source 1..75: mol_type = other DNA
cgagaaataacctcagtgccagaacaaatgagcaaaagcatgcaaatgacgctcttaatgccctgttgaaggaaa

SEQ ID NO: 142496 - DNA, 75 bp, synthetic construct
  source 1..75: mol_type = other DNA
gcactgattgttttttggtctggttgggggacgctttcctggctgctggggctacaaatcgtaatgtttgtggtt

SEQ ID NO: 142497 - DNA, 75 bp, synthetic construct
  source 1..75: mol_type = other DNA
aattgatacttaatggttatgaaattattgaagccttaaaagaaaaaggagatcgggccgaggatattgtcaatg

SEQ ID NO: 142498 - DNA, 75 bp, synthetic construct
  source 1..75: mol_type = other DNA
ctgtacttatgctgacgcatgacgtggagcctgtgattgacacgctgaagtcagtcagaaggttgttcagtaatc

SEQ ID NO: 142499 - DNA, 75 bp, synthetic construct
  source 1..75: mol_type = other DNA
ataaaaaatttataatagatggaaaacatatagaacataaagatactctaatagaacattgctccttaagaaaaa

SEQ ID NO: 142500 - DNA, 75 bp, synthetic construct
  source 1..75: mol_type = other DNA
ggatgatgcaggagcgaaaaagttcggttctgtcctctccggtacaactgcaaatgtcatcaaaatggggctggc

SEQ ID NO: 142501 - DNA, 75 bp, synthetic construct
  source 1..75: mol_type = other DNA
actggcgaaagcgctggcgaaactgctcaatattgaccccaaatcatggtccctgaagtgggatttcagcaactt

SEQ ID NO: 142502 - DNA, 75 bp, synthetic construct
  source 1..75: mol_type = other DNA
tgccaaatatgcccgtgatgttgctggctggatgggtgtatcgccgacggcagcattaaacctgtccgaccccaa

SEQ ID NO: 142503 - DNA, 75 bp, synthetic construct
  source 1..75: mol_type = other DNA
atccccgtcattatccgccgattactggcgaactttgcagaccctgaaaaggcgcgggctttactactggaacag

SEQ ID NO: 142504 - DNA, 75 bp, synthetic construct
  source 1..75: mol_type = other DNA
gcaacggatccgcgaacaggcagagcgcggggatattctgtcaggaaggactgagaaaaaacacaaaatctctct

SEQ ID NO: 142505 - DNA, 75 bp, synthetic construct
  source 1..75: mol_type = other DNA
ggagctgatgggctacagtgcgctgacggccattgcccgaaactgtgccatacagcgtgccacagatgccctgcg

SEQ ID NO: 142506 - DNA, 75 bp, synthetic construct
  source 1..75: mol_type = other DNA
atattcgacaactatgaaatcacaagtatatatgaatataaaggcaatatagaaattgatgtaaaaaccaaacat

SEQ ID NO: 142507 - DNA, 75 bp, synthetic construct
  source 1..75: mol_type = other DNA
ttcaaatttctgaccggaccagaaaccgtgctggaactgctggatgaacgggaaagaaaccagcagtacatcaaa

SEQ ID NO: 142508 - DNA, 75 bp, synthetic construct
  source 1..75: mol_type = other DNA
agagtttaaaagcgcacttagcaaggtttgtggtttccatgcaacagcagtcacatctctttcatatcttgggcg

SEQ ID NO: 142509 - DNA, 75 bp, synthetic construct
  source 1..75: mol_type = other DNA
catgatatgaatcgactcttccaatttttcagaacatccgatttcgagatgattcttcggctagtttggcaggca

SEQ ID NO: 142510 - DNA, 75 bp, synthetic construct
  source 1..75: mol_type = other DNA
tataaacggcacaataaaaaataatggacataacagttttcttatcagatatgaaccaacatggggagatattga

SEQ ID NO: 142511 - DNA, 75 bp, synthetic construct
  source 1..75: mol_type = other DNA
ttcataggtgcagcgtatatcaaggcaaagttgatattcttcgttttaataggattgaatatgatgagtggacac

SEQ ID NO: 142512 - DNA, 75 bp, synthetic construct
  source 1..75: mol_type = other DNA
atgattccacaggataccaaaatataaaactacgcggtttgttacttggtatgacgaatgcagaaatcgaatcca

SEQ ID NO: 142513 - DNA, 75 bp, synthetic construct
  source 1..75: mol_type = other DNA
acgaaagggtaagatagttcctctgttggacatcgctctagggatggatgatgattccacaggataccaaaatat

SEQ ID NO: 142514 - DNA, 75 bp, synthetic construct
  source 1..75: mol_type = other DNA
gaggcacgcatgattgcgcagctttgcaacctcagtgagcaggatatctggttactgacagcggcggattatgcg

SEQ ID NO: 142515 - DNA, 75 bp, synthetic construct
  source 1..75: mol_type = other DNA
aggccagaaacatcatcaacagcggggatggtgatgcggtggggacaatgaatcaggtggaaaaagagccggacg

SEQ ID NO: 142516 - DNA, 75 bp, synthetic construct
  source 1..75: mol_type = other DNA
tgacgaggctaaattcaacctcgaactgaggaatgcaattaaattgaaaagaaatacaattatggggaagggggc

SEQ ID NO: 142517 - DNA, 75 bp, synthetic construct
  source 1..75: mol_type = other DNA
atttatattgagatcttccgtaatattgcaaatcttcttctggtactttgccgtgttgcgcaatttgcccggacc

SEQ ID NO: 142518 - DNA, 75 bp, synthetic construct
  source 1..75: mol_type = other DNA
gcggtccactacggctatgacgataaaggccgtctgacgggcgaacggcagactgacggagaagacggaccgcat

SEQ ID NO: 142519 - DNA, 75 bp, synthetic construct
  source 1..75: mol_type = other DNA
gtgtcggtccactacggctatgacgataaaggccgcctgacgggcgaacggcagacggtggagaacccggagacg

SEQ ID NO: 142520 - DNA, 75 bp, synthetic construct
  source 1..75: mol_type = other DNA
cggacggcgcgggccgccgttttcacctggcgctgaccacacaggcgcagcgggcggaagccttccgtaaacagc

SEQ ID NO: 142521 - DNA, 75 bp, synthetic construct
  source 1..75: mol_type = other DNA
ctgttcgcgcaaatttggcctcggcgcgcaggccgttcttgatatagcccagtcgctgtacgaaaagcataaggc

SEQ ID NO: 142522 - DNA, 75 bp, synthetic construct
  source 1..75: mol_type = other DNA
aagcgttatttaaaattggcgattccgtatatttgaaatcaggcggtcctgagatgtctgtatacgaaatccacg

SEQ ID NO: 142523 - DNA, 75 bp, synthetic construct
  source 1..75: mol_type = other DNA
tgcgccaacttcatcgaatccgtatattccgaaagaagaactggaggaaacggagaagaaatccgatccgcgcgt

SEQ ID NO: 142524 - DNA, 75 bp, synthetic construct
  source 1..75: mol_type = other DNA
ccacttgtgcagcaacttgaattggttctcaggaattcggttgataaagcagctcgtacaagatttggtgaacgg

SEQ ID NO: 142525 - DNA, 75 bp, synthetic construct
  source 1..75: mol_type = other DNA
tattacgtttcctgtcgcgttctctgcatacccgatgtatgtgggatttggtcctcagcaggtatcgcttcctaa

SEQ ID NO: 142526 - DNA, 75 bp, synthetic construct
  source 1..75: mol_type = other DNA
ttaagacaaatgtgtgccaaccatggaattgcgaccaatagtacaaatgataatgttccaggcttgctttccctg

SEQ ID NO: 142527 - DNA, 75 bp, synthetic construct
  source 1..75: mol_type = other DNA
gttacccagggcggaaaaccggtgccgtttggatcactggtacgggaaaacagtatcggaataaccagtatgtgg

SEQ ID NO: 142528 - DNA, 75 bp, synthetic construct
  source 1..75: mol_type = other DNA
attattattgatgaaggtcattctgaaccatctcctgtatggcgagaaatcgtacgacaatcagatgcaataaaa

SEQ ID NO: 142529 - DNA, 75 bp, synthetic construct
  source 1..75: mol_type = other DNA
gacaggctatatgtcaccatatcaagagaatgtaatcacgatgaatcctttgacattccatgacgatgcagaagt

SEQ ID NO: 142530 - DNA, 75 bp, synthetic construct
  source 1..75: mol_type = other DNA
aaaattagaacctatgccaacatttggtcttactcatacagtatcgcaatatattcctgctgaaactctagacct

SEQ ID NO: 142531 - DNA, 75 bp, synthetic construct
  source 1..75: mol_type = other DNA
gaagccgaggttgaaataaataatcttggttggaaagaaactgatattgttgttcgtgaacaaccaaaaatcagg

SEQ ID NO: 142532 - DNA, 75 bp, synthetic construct
  source 1..75: mol_type = other DNA
ggtatatcaggaggtatgatgctccacaatgaaggtatcactcttggtcagaaaggagaggatacggttgctctg

SEQ ID NO: 142533 - DNA, 75 bp, synthetic construct
  source 1..75: mol_type = other DNA
tcatggaagaatatttcgtggtacgttaattggtcacgtaactatagtacaaatgcatattatcagagagggcat

SEQ ID NO: 142534 - DNA, 75 bp, synthetic construct
  source 1..75: mol_type = other DNA
gcccggacacaggcgcggatagaggtgcgtcagaacgggtatctgatacagagtcagacggtggcgccgggggca

SEQ ID NO: 142535 - DNA, 75 bp, synthetic construct
  source 1..75: mol_type = other DNA
aggccagcgtccgggaggcgctggcaaacattctgcctggtgagcagacggcccgtctgtatgatgccggcctgg

SEQ ID NO: 142536 - DNA, 75 bp, synthetic construct
  source 1..75: mol_type = other DNA
atgcaactttacttgtgtgaaaaaccgtcacaggcgcgggatattgcccgggtgctggggctcagcaggcgggga

SEQ ID NO: 142537 - DNA, 75 bp, synthetic construct
  source 1..75: mol_type = other DNA
tccggactgtgagggaattatcagtacaggtaagaagaaagcagcgaagcgtaaaaaaacatcggttaaggctaa

SEQ ID NO: 142538 - DNA, 75 bp, synthetic construct
  source 1..75: mol_type = other DNA
accgcatcctcggcaaagagggtggatacgttaatcacccgaacgacaagggcggcccgacgaactggggaatca

SEQ ID NO: 142539 - DNA, 75 bp, synthetic construct
  source 1..75: mol_type = other DNA
attacacccaggaaaattataaagacgatgcgtttgcgaaagggaaaacattccactactactctctggcagtca

SEQ ID NO: 142540 - DNA, 75 bp, synthetic construct
  source 1..75: mol_type = other DNA
tgaaggcagtcttattactgcgatgaagaatgcttcgtctggtgtaacggatccggcgctgaaaaagatcctgag

SEQ ID NO: 142541 - DNA, 75 bp, synthetic construct
  source 1..75: mol_type = other DNA
gcgcagcgcatcgcgcgccgctggatgctaactctggagcgcgacactgccggcaatccggcgtttctcacgcgt

SEQ ID NO: 142542 - DNA, 75 bp, synthetic construct
  source 1..75: mol_type = other DNA
aattcttacacagataacatgtttccaatgaagttttttgagtatcttgcagcaggtagaaaagttgtatcagtt

SEQ ID NO: 142543 - DNA, 75 bp, synthetic construct
  source 1..75: mol_type = other DNA
gttagcgaaacagtttacgtatgatacaaggacgagaaaaatgataaatctaataaatcagcctgagctaataaa

SEQ ID NO: 142544 - DNA, 75 bp, synthetic construct
  source 1..75: mol_type = other DNA
ctggtgtttctcctgaaactatgcgtgccattattatgactgaatccggtgggaatccctacgctatagcaaatg

SEQ ID NO: 142545 - DNA, 75 bp, synthetic construct
  source 1..75: mol_type = other DNA
atttagaagaaatgctatctgcgataaatttcaccattccatattctatcgcatctgtatcagatagttccaaca

SEQ ID NO: 142546 - DNA, 75 bp, synthetic construct
  source 1..75: mol_type = other DNA
catcgacgccatctttttcctgatggggcgtgagttcagcggaggccggagcgggcagacaacccggctccgctt

SEQ ID NO: 142547 - DNA, 75 bp, synthetic construct
  source 1..75: mol_type = other DNA
gtcgtctgctgaaaccaacgtcggcacctgcttcagtggagatcgtgttgtttcctccggataacaggatccgcg

SEQ ID NO: 142548 - DNA, 75 bp, synthetic construct
  source 1..75: mol_type = other DNA
agcgtgcctctggcattacatggcggtagcggtacgccgttcgatcagctccagctctgtacgacgctgggggta

SEQ ID NO: 142549 - DNA, 75 bp, synthetic construct
  source 1..75: mol_type = other DNA
ttggctggtggacatcaattgaagatttgcagggcaacgacctgatgccccagctgcggcaatatgtctcgaagc

SEQ ID NO: 142550 - DNA, 75 bp, synthetic construct
  source 1..75: mol_type = other DNA
attaatagttatactgacaatatgtttcctatgaagttttttgaatatttagctgcgggacgtaatgtcgttagt

SEQ ID NO: 142551 - DNA, 75 bp, synthetic construct
  source 1..75: mol_type = other DNA
cagtttcatgaactggtcgatccgaaaggtattgccaaagatgtgacaaatgttgggcgctggggtaatggcgat

SEQ ID NO: 142552 - DNA, 75 bp, synthetic construct
  source 1..75: mol_type = other DNA
aaagaatgctggtggagtggggaccggttatcccggaagggaaggtcgagatcactatcagtaagtacgagaaaa

SEQ ID NO: 142553 - DNA, 75 bp, synthetic construct
  source 1..75: mol_type = other DNA
cggttaataatcttgcttaccctgatgaacatgacaaagataattcatctgaagtgttttttttatatccggcca

SEQ ID NO: 142554 - DNA, 75 bp, synthetic construct
  source 1..75: mol_type = other DNA
tctgtaaatagtaatttcgagcagataatatatctacaccagccgattccctttagcaattttagaataaaaatt

SEQ ID NO: 142555 - DNA, 75 bp, synthetic construct
  source 1..75: mol_type = other DNA
ggctgaccagcgttcacaccaccgcagcgaatctggatatccgcatcccgtatgccacggacccggcgggtaacc

SEQ ID NO: 142556 - DNA, 75 bp, synthetic construct
  source 1..75: mol_type = other DNA
acagttaccgggcgttatacgaatccggcagaataacgaaagccgcgtgtatggctcatgcccggagaaaaatcc

SEQ ID NO: 142557 - DNA, 75 bp, synthetic construct
  source 1..75: mol_type = other DNA
cgcaatatttatcttaggaaaaatgctaccttatatgaggtgtatcatgaagtgattcatgctaagcaatttgcg

SEQ ID NO: 142558 - DNA, 75 bp, synthetic construct
  source 1..75: mol_type = other DNA
gccgttgggttctggcctcgcgtccacatggcgcaccggttccggagaatttccgtcttgaagaagatgatgtcg

SEQ ID NO: 142559 - DNA, 75 bp, synthetic construct
  source 1..75: mol_type = other DNA
cgaccggaagaaaatccgcttcacgtatctgtgggacggcgacagtattgcggaaatccgggaataccgcgatga

SEQ ID NO: 142560 - DNA, 75 bp, synthetic construct
  source 1..75: mol_type = other DNA
tcccggcggaagccacatggggcggactgctcccctcactggtgcgggagtaccgttacgacagcgcgggcaatg

SEQ ID NO: 142561 - DNA, 75 bp, synthetic construct
  source 1..75: mol_type = other DNA
aaaaaaatcgaagatgctattagttatgcaaagaaattagataatgccgggaaaagatatagtgctggcttgatg

SEQ ID NO: 142562 - DNA, 75 bp, synthetic construct
  source 1..75: mol_type = other DNA
acactgtcaccgacgctgccggggaagggtgtaacgaaaaaagcagccttcattactccaggtgtcagaaggctg

SEQ ID NO: 142563 - DNA, 75 bp, synthetic construct
  source 1..75: mol_type = other DNA
gtgagtgatccgctggggttgctggggggtgagcagacttaccggtatgtgccaaatccgtgtgggtatgttgat

SEQ ID NO: 142564 - DNA, 75 bp, synthetic construct
  source 1..75: mol_type = other DNA
ctggtgagtgatccgctggggttgctggggggtgagcagacttaccggtatgtgccgaatccgtgtgggtatgtt

SEQ ID NO: 142565 - DNA, 75 bp, synthetic construct
  source 1..75: mol_type = other DNA
ccacagcccgctatcttggcacggcgctgtactggatagctgccagtatcaatatcaaaccgggccatgattatt

SEQ ID NO: 142566 - DNA, 75 bp, synthetic construct
  source 1..75: mol_type = other DNA
gagtgcagcgatccagcagatacagaaggttcaggttgatacaaataataatctgaacagcatgtgggctgtgaa

SEQ ID NO: 142567 - DNA, 75 bp, synthetic construct
  source 1..75: mol_type = other DNA
gaaaacaaaaaacggtattccctatgtggccgggattggggcggggattgaggatgttgatggtcagacgctgag

SEQ ID NO: 142568 - DNA, 75 bp, synthetic construct
  source 1..75: mol_type = other DNA
gctcaggagttgtggactcagattgataacggtcagcttgcgcctgacctggcggaaatcagaacgtccatcacg

SEQ ID NO: 142569 - DNA, 75 bp, synthetic construct
  source 1..75: mol_type = other DNA
acggcacctttgccatcacggcggtgcagcatgtgccggaaaaagaagccattgtggataacggggcccgctttg

SEQ ID NO: 142570 - DNA, 75 bp, synthetic construct
  source 1..75: mol_type = other DNA
tgccgtcactgcgccgtcgcctgttccgctgtgtctccatccgggaaaacacggacggcacctttgccatcacgg

SEQ ID NO: 142571 - DNA, 75 bp, synthetic construct
  source 1..75: mol_type = other DNA
ttaacgcacctgcaaaacccgccaccattgagctgacgccggggtattttcagataacggcggtcccgcgtcttg

SEQ ID NO: 142572 - DNA, 75 bp, synthetic construct
  source 1..75: mol_type = other DNA
gaaaaacggtgctgaaatttataaccgtaccgcggtggataatacgctgatttacagtggtgttattgatatgcc

SEQ ID NO: 142573 - DNA, 75 bp, synthetic construct
  source 1..75: mol_type = other DNA
atggctgcaaaccaacaaagcgctctgccagtttctcgggtacagtcaggaagagctgcgcggactcacctttca

SEQ ID NO: 142574 - DNA, 75 bp, synthetic construct
  source 1..75: mol_type = other DNA
cggcccccaccattaccagcggtggaaatccaccggcattttccctgacatcagacggaaagctgaccgctaaaa

SEQ ID NO: 142575 - DNA, 75 bp, synthetic construct
  source 1..75: mol_type = other DNA
agcgtcactctggagtttaagattttccagaaaggcaatcagggggcaggcaatatcaccgactgtacggtgatt

SEQ ID NO: 142576 - DNA, 75 bp, synthetic construct
  source 1..75: mol_type = other DNA
tgcgcctgacctggctgaaatcaggacgtccattacggatgtcagcaatgaaatcacacagaccgtcaataagaa

SEQ ID NO: 142577 - DNA, 75 bp, synthetic construct
  source 1..75: mol_type = other DNA
gcattcgtggaggctgtcggtcagccgagtgatgatgcatcaggctatctggattttttcaaaggagaaatcggg

SEQ ID NO: 142578 - DNA, 75 bp, synthetic construct
  source 1..75: mol_type = other DNA
acacgccggttgaggcaacggataatctcaaatccacgcagatgatgagtgtgattgatgcgattggtgagggac

SEQ ID NO: 142579 - DNA, 75 bp, synthetic construct
  source 1..75: mol_type = other DNA
tttcagataacagcggtcccgcgtcttgcggtgtatgacccgacggtacagtttgagttctggttttcggaaacg

SEQ ID NO: 142580 - DNA, 75 bp, synthetic construct
  source 1..75: mol_type = other DNA
tggtcaggagatttttaatcagtccacgacggatgttcagggcgtattttcctcagttatagatatgcctgccgg

SEQ ID NO: 142581 - DNA, 75 bp, synthetic construct
  source 1..75: mol_type = other DNA
tggcaccatcacggtaagaatcagtgatgatcagaaatttgaccggcaggtcatgataccgccagtgttattccg

SEQ ID NO: 142582 - DNA, 75 bp, synthetic construct
  source 1..75: mol_type = other DNA
acgctcaacaatgtcacgattaatgaaaactgtcagattaagggaaaactgtcagccaatcagattgaaggcgat

SEQ ID NO: 142583 - DNA, 75 bp, synthetic construct
  source 1..75: mol_type = other DNA
cgaatggtaatacaacacccttgtttgtggctcagggggatcagctgttcctgaatgaggttttcatgtccaggg

SEQ ID NO: 142584 - DNA, 75 bp, synthetic construct
  source 1..75: mol_type = other DNA
agtcaggtgctgctggcggcggacaggattgcgatgattaatcctgcgaatggcaacacaaagccgatgtttgtt

SEQ ID NO: 142585 - DNA, 75 bp, synthetic construct
  source 1..75: mol_type = other DNA
cggctgacggcgaaaaatgccgatatcagcggtaacgtgaatgcgaactccgggacgctcaaaaaggtcacgatt

SEQ ID NO: 142586 - DNA, 75 bp, synthetic construct
  source 1..75: mol_type = other DNA
tgacggaaatggcaatccggtcagcgtggaggtccagtccgtcaccgacggcgtgaaggtgaaagttagccgtgt

SEQ ID NO: 142587 - DNA, 75 bp, synthetic construct
  source 1..75: mol_type = other DNA
atcagtcattgatatgcctgccggacacggccatgtcaccctgactttcaatgtttcttcatatggtgctaataa

SEQ ID NO: 142588 - DNA, 75 bp, synthetic construct
  source 1..75: mol_type = other DNA
catgagagagagcatactgatatttactcctcatgccgtctgatagtgcggaaaaacggtgctgaaatttataac

SEQ ID NO: 142589 - DNA, 75 bp, synthetic construct
  source 1..75: mol_type = other DNA
taactggtatcccacagcaagtatcagcgatttgctggttgtggtgatgaagaaagccactgcaggcatcacgat

SEQ ID NO: 142590 - DNA, 75 bp, synthetic construct
  source 1..75: mol_type = other DNA
cggctgacggcgaaaaatgccgatatcagcggtaacgtgaatgcgaactccgggacgctcaagaaagtcacgatt

SEQ ID NO: 142591 - DNA, 75 bp, synthetic construct
  source 1..75: mol_type = other DNA
ttcgcaaaaacggtgtattaatcgcatccagagaaactaaaggggccattcccggtagctacagtgcggttattg

SEQ ID NO: 142592 - DNA, 75 bp, synthetic construct
  source 1..75: mol_type = other DNA
ctggtgaataactggtatcccacagcaagtatcagcgatttgctggttgtggtgatgaagaaatccacagcaggc

SEQ ID NO: 142593 - DNA, 75 bp, synthetic construct
  source 1..75: mol_type = other DNA
acggtggatttcacgctcgggtcacaggggctgcgtcacacccccggtgacatcattgaaatctgtgataacgac

SEQ ID NO: 142594 - DNA, 75 bp, synthetic construct
  source 1..75: mol_type = other DNA
tgatgatcagaaatttgaccggcaggtcatgataccgccagtgttattccgcggtggtaagcatgagaatttcaa

SEQ ID NO: 142595 - DNA, 75 bp, synthetic construct
  source 1..75: mol_type = other DNA
atgaaggacggacgcctttatattgcgggtatcggagccggtattgagaatacgccagcaggtatgcagagtcag

SEQ ID NO: 142596 - DNA, 75 bp, synthetic construct
  source 1..75: mol_type = other DNA
accggaaaaagaagccattgtggataacggggctcgctttgagccgctgtccggttcactgaacagcgttatccc

SEQ ID NO: 142597 - DNA, 75 bp, synthetic construct
  source 1..75: mol_type = other DNA
ggcagcggtaagccggtgcgcgtggacatcactgcacaccccgcgccggaccggatacaggtcagcgccctgccg

SEQ ID NO: 142598 - DNA, 75 bp, synthetic construct
  source 1..75: mol_type = other DNA
atgtggccggtattggagcggggattgaggatactgatggccagcccctgagcaacatactgctgctggctgacc

SEQ ID NO: 142599 - DNA, 75 bp, synthetic construct
  source 1..75: mol_type = other DNA
cgactaaaagttcttagtaattctccatcatatgatggtttgattatagttatcgatgaaatgggaaaatttctt

SEQ ID NO: 142600 - DNA, 75 bp, synthetic construct
  source 1..75: mol_type = other DNA
gttagaaagagaagaccttcaatcagtgcacagttagtagagtctttaattaaatgttggccattacatccaaca

SEQ ID NO: 142601 - DNA, 75 bp, synthetic construct
  source 1..75: mol_type = other DNA
ggcttcgaccggcagattatcattccaccggtgctgttccggggggcgagacatgagcaccagtccagcaaagat

SEQ ID NO: 142602 - DNA, 75 bp, synthetic construct
  source 1..75: mol_type = other DNA
gtgtggacatcaccgcacaccccgcgccggaccggatacaggtcagtaccctgcctgatggtgtggagacatacg

SEQ ID NO: 142603 - DNA, 75 bp, synthetic construct
  source 1..75: mol_type = other DNA
cggatatcaggcaggttgaaaccacagcccgctatcttggcacggcgctgtactggatagctgccagtatcaata

SEQ ID NO: 142604 - DNA, 75 bp, synthetic construct
  source 1..75: mol_type = other DNA
aagcggattaccgatatcaggcaggttgaaaccacagcccgctacattggcacgacccggaactggacaaaggca

SEQ ID NO: 142605 - DNA, 75 bp, synthetic construct
  source 1..75: mol_type = other DNA
gcccaccgtgccgggctgtgggtgataaagaccggactgctggaaacgcagacggtggacttcacgctcgggtca

SEQ ID NO: 142606 - DNA, 75 bp, synthetic construct
  source 1..75: mol_type = other DNA
cggggaatacaccctgacagtcagggcgattaacagttatggccagcagggggaaccggccaccaccacgttcag

SEQ ID NO: 142607 - DNA, 75 bp, synthetic construct
  source 1..75: mol_type = other DNA
catcccaccggcagtgcagcacctgacggtggaggtgagcgcagctgacggccagtatctggcacaggcgaaatg

SEQ ID NO: 142608 - DNA, 75 bp, synthetic construct
  source 1..75: mol_type = other DNA
gaactgtcagattaaggggaaactgtcagccaatcagattgaaggcgatattgtcaaaacggtcagcaagtcttt

SEQ ID NO: 142609 - DNA, 75 bp, synthetic construct
  source 1..75: mol_type = other DNA
gggtaaatggctggtatcccacagcaagtatcagcgatttgctggttgtggtgatgaagaaagccaccgcaggca

SEQ ID NO: 142610 - DNA, 75 bp, synthetic construct
  source 1..75: mol_type = other DNA
aactttgaccgccagattattattccgcccattatttttaacggtatagcgtatgacgatccggggagcggaaat

SEQ ID NO: 142611 - DNA, 75 bp, synthetic construct
  source 1..75: mol_type = other DNA
ggcggagatgaagaccaccatcaccgaaacccgcaatgaaatcacgcagacggtcagtaaaactctggaagacca

SEQ ID NO: 142612 - DNA, 75 bp, synthetic construct
  source 1..75: mol_type = other DNA
ctggaagaagacatccgccagcggctggagacggatgttgcggaagtgacccgaaaaatcggggaggcggaaaac

SEQ ID NO: 142613 - DNA, 75 bp, synthetic construct
  source 1..75: mol_type = other DNA
ccatttatgacccgacggtgcagtttgagttctggttttcggaggcaaaaattgcagacgccgcacaggtggaaa

SEQ ID NO: 142614 - DNA, 75 bp, synthetic construct
  source 1..75: mol_type = other DNA
tcccggatggtttcgggggcacagagccgcggatgactttcaatgcgtacctgtcacagcagcgtaaggtgtggg

SEQ ID NO: 142615 - DNA, 75 bp, synthetic construct
  source 1..75: mol_type = other DNA
ttaacccggaggacggcaacaccacgccgttatttgtggcgcaggggaatcagttgttcatgaacgatgtgttcc

SEQ ID NO: 142616 - DNA, 75 bp, synthetic construct
  source 1..75: mol_type = other DNA
catcttggtaaagagctgctggaaaaagtcgacctgacggaggataacgccagcaaactggagcagttttcgaaa

SEQ ID NO: 142617 - DNA, 75 bp, synthetic construct
  source 1..75: mol_type = other DNA
cagggcgatgcggcgtcggtctctttccggattgccgcaccggctgcaccgtcacagattgagctgacgccgggc

SEQ ID NO: 142618 - DNA, 75 bp, synthetic construct
  source 1..75: mol_type = other DNA
agggtttatgacgatcagccgtttgaccggcaaattgttattccggcggtggcattcagtggcgctaagcatgag

SEQ ID NO: 142619 - DNA, 75 bp, synthetic construct
  source 1..75: mol_type = other DNA
gtttcttcatatggtgctaataactggacgccaacgaccagtatcagcgaccttcttgttgtcgtgatgaagaaa

SEQ ID NO: 142620 - DNA, 75 bp, synthetic construct
  source 1..75: mol_type = other DNA
taaatgactggtatcccacagccagtatcagtgatttgctggttgtggtgatgaagaaatccacagcaggtatca

SEQ ID NO: 142621 - DNA, 75 bp, synthetic construct
  source 1..75: mol_type = other DNA
ccgtcgtctgttccgctgtgtctccgtccgggaaaacacggacggcacctttgccatcacggcggtgcagcacgt

SEQ ID NO: 142622 - DNA, 75 bp, synthetic construct
  source 1..75: mol_type = other DNA
ggacgcctttatattgcgggtatcggtgccggtattgagaacaccctgacggcatgcagagtcaggtgctgctgg

SEQ ID NO: 142623 - DNA, 75 bp, synthetic construct
  source 1..75: mol_type = other DNA
acagtttgagttctggttctcggaaacgcggattgcggatatcaggcaggttgaaaccagcgcgcgttatcttgg

SEQ ID NO: 142624 - DNA, 75 bp, synthetic construct
  source 1..75: mol_type = other DNA
gttgttaatcaaagccctttggctgaactggctgccgcacaaaaaattattcctgcattgtattttcttttttca

SEQ ID NO: 142625 - DNA, 75 bp, synthetic construct
  source 1..75: mol_type = other DNA
atgagaactgtcagattaaggggaaactgtcagccaaccagattgaaggtgatattgtcaaaacggtcagcaagt

SEQ ID NO: 142626 - DNA, 75 bp, synthetic construct
  source 1..75: mol_type = other DNA
gattattatttttacgttcgcagtgtgaacaccgttggcacatcggcattcgtggaggctgtcggtcgggcgagc

SEQ ID NO: 142627 - DNA, 75 bp, synthetic construct
  source 1..75: mol_type = other DNA
gttaaaacagtgggcaaagctttcccccgggactcccgtgcaccggagcggtggccatcagggaccattactgtc

SEQ ID NO: 142628 - DNA, 75 bp, synthetic construct
  source 1..75: mol_type = other DNA
aggacacggaggaaggcaaactgagccagttcctggttgccgctaaccgtatcgcgtttattgatccgtctaatg

SEQ ID NO: 142629 - DNA, 75 bp, synthetic construct
  source 1..75: mol_type = other DNA
gattgaggatactgatggccagccactgagcaacatactgctgctggctgaccgtatcgcggtgataaatccgga

SEQ ID NO: 142630 - DNA, 75 bp, synthetic construct
  source 1..75: mol_type = other DNA
ggcctttgtgcaggtggagtcagcgcagtacggcagtcagcaggtgcggattaattatcacatccggggaaagat

SEQ ID NO: 142631 - DNA, 75 bp, synthetic construct
  source 1..75: mol_type = other DNA
cggtgtcagcatggctggtaaatgactggtatcccacagcaagtatcagcgatttgctggttgtggtgatgaaga

SEQ ID NO: 142632 - DNA, 75 bp, synthetic construct
  source 1..75: mol_type = other DNA
tcctgcgaatggtaacacaaaaccgatgtttgttggtcagggcgatcagatattcatgaacgacgtgttcctgaa

SEQ ID NO: 142633 - DNA, 75 bp, synthetic construct
  source 1..75: mol_type = other DNA
aaaaagcgtgctgctgaacagtacaccggtgctggacagtgaggggaatactaacatctctggtgtcacggtggt

SEQ ID NO: 142634 - DNA, 75 bp, synthetic construct
  source 1..75: mol_type = other DNA
cgcagaagggcttcgccatgtgccgggcgatgtcattgaaatctgtgatgatgattatgcaggcgtgagcactgg

SEQ ID NO: 142635 - DNA, 75 bp, synthetic construct
  source 1..75: mol_type = other DNA
aggttgaaaccacagcccgctatcttggcacggcgctgtactggatagctgccagtatcaatattaagccgggcc

SEQ ID NO: 142636 - DNA, 75 bp, synthetic construct
  source 1..75: mol_type = other DNA
ctggaagaccagagcgccaccattcagcagatacagcgcgtgcagaaggacacaaatgatgacctggctgcgctg

SEQ ID NO: 142637 - DNA, 75 bp, synthetic construct
  source 1..75: mol_type = other DNA
acggtacagtttgagttctggttttcggaggcaaaaatcgcagacacatctcaggtggaaacctctgcccgttat

SEQ ID NO: 142638 - DNA, 75 bp, synthetic construct
  source 1..75: mol_type = other DNA
cgcaggggaatcagctgttcatgaacgacgtgttcctgaagcgactgtttgcggtgagtatcacgtcatccggca

SEQ ID NO: 142639 - DNA, 75 bp, synthetic construct
  source 1..75: mol_type = other DNA
gcctgttccgctgtgtctccatccgggaaaacacggacggcacctttgccatcacggcggtgcagcacgtaccgg

SEQ ID NO: 142640 - DNA, 75 bp, synthetic construct
  source 1..75: mol_type = other DNA
tggtcagcacagcccggacggcggaaaccacataccgcttcaggcaactggcgctggggcgttacacgctgacgg

SEQ ID NO: 142641 - DNA, 75 bp, synthetic construct
  source 1..75: mol_type = other DNA
cgtgcaggcactggtggaaaccacctcaaaaggggaccgggatccgtcggaggtccgcctgctggttcagataca

SEQ ID NO: 142642 - DNA, 75 bp, synthetic construct
  source 1..75: mol_type = other DNA
cgtatcgcgtttattgacccggcaaacggcaactccacgccgctgtttgtggcgcaggggaatcagctgttcatg

SEQ ID NO: 142643 - DNA, 75 bp, synthetic construct
  source 1..75: mol_type = other DNA
agcggaagcggtgaaaacagccgtctggtgaccagtgccatcactgccgacacggagcaccgtttcagtggcctg

SEQ ID NO: 142644 - DNA, 75 bp, synthetic construct
  source 1..75: mol_type = other DNA
tcatcccgccggcagtgcagcacctcacggtggaggtgagtgcctcagatggccagtatctggcgctggcgaaat

SEQ ID NO: 142645 - DNA, 75 bp, synthetic construct
  source 1..75: mol_type = other DNA
ctgtttgcggtgagtatcacgtcatccggcaatcccccgacgttttccctgacgccggagggcaggctgacagcc

SEQ ID NO: 142646 - DNA, 75 bp, synthetic construct
  source 1..75: mol_type = other DNA
cgtcaacctggtgggaaaatctgcttttgtggaagccagcgggcagcccagcaatgatggtgaagggtatctgga

SEQ ID NO: 142647 - DNA, 75 bp, synthetic construct
  source 1..75: mol_type = other DNA
tggggaaatctgcgtttgtggaagtcagcgggcagcccagcaatgatggtgaagggtatctggattttttccggg

SEQ ID NO: 142648 - DNA, 75 bp, synthetic construct
  source 1..75: mol_type = other DNA
ggtgaacctgattaacggcagcggtaagccggtgagtgtggacatcaccgaacaccccgcgccggaccggataca

SEQ ID NO: 142649 - DNA, 75 bp, synthetic construct
  source 1..75: mol_type = other DNA
cagcggcggtaatcctccggcattttccctgacaccggacgggcgactgacggcgaaaaatgccgatatcagcgg

SEQ ID NO: 142650 - DNA, 75 bp, synthetic construct
  source 1..75: mol_type = other DNA
atgggtaaaggcagcagtaaggggcatactccgcgcgaagcgaaggacaacctgaaatccacgcagttgctgagc

SEQ ID NO: 142651 - DNA, 75 bp, synthetic construct
  source 1..75: mol_type = other DNA
aaaaaagaatcaaaaatcagttgctcatacaaatgctttatcaggatgaacttgaacaggaggagaaatataatg

SEQ ID NO: 142652 - DNA, 75 bp, synthetic construct
  source 1..75: mol_type = other DNA
gagctttatgcttcgcctgaccgtggcagcggatgacggcagtgagcggctggtcagcacggcccggacgacgga

SEQ ID NO: 142653 - DNA, 75 bp, synthetic construct
  source 1..75: mol_type = other DNA
ctttgccgcggcgcgttgcttgacctcacggatgattaattacctgatgcccgaagcggcagaaaattttattcg

SEQ ID NO: 142654 - DNA, 75 bp, synthetic construct
  source 1..75: mol_type = other DNA
tgcggtggctttcagcggtgccagacatgagcgggagaatagcgatacttattcgtcatgccgcctgatagtgaa

SEQ ID NO: 142655 - DNA, 75 bp, synthetic construct
  source 1..75: mol_type = other DNA
tccgggacgctcaacaacgtcacgattaacgagaactgtcgggttctgggaaaactgtccgccaaccagattgaa

SEQ ID NO: 142656 - DNA, 75 bp, synthetic construct
  source 1..75: mol_type = other DNA
atcattattccgcccattatctttaacggaatagcgtatagctatccgggaagtggtaataacccgggaggtaca

SEQ ID NO: 142657 - DNA, 75 bp, synthetic construct
  source 1..75: mol_type = other DNA
gaggggatttcgttaaagctgtatccaaatcatttccgaaacaggctggtacgtggggtaacacggaaacaccaa

SEQ ID NO: 142658 - DNA, 75 bp, synthetic construct
  source 1..75: mol_type = other DNA
gctccaggctgatggaacgcgcattaacggcatgaatttccctgcgcttctgttagcggacgttaaggtggtgaa

SEQ ID NO: 142659 - DNA, 75 bp, synthetic construct
  source 1..75: mol_type = other DNA
tcggaaaagcggattaccgatatcaggcaggttgaaaccacagcccgctaccttggcacggggctgtactggata

SEQ ID NO: 142660 - DNA, 75 bp, synthetic construct
  source 1..75: mol_type = other DNA
cgtcaaatcattattccgcccattatctttaacggtatagcgtatgacgatccgggaagtggtgataacccggga

SEQ ID NO: 142661 - DNA, 75 bp, synthetic construct
  source 1..75: mol_type = other DNA
gggctgcatgtttgccagttgatgggctacgggcagattaacgatggcctgaatttaatcacccaccacagcgca

SEQ ID NO: 142662 - DNA, 75 bp, synthetic construct
  source 1..75: mol_type = other DNA
ggcgatctcgttaaaacagtgggcaaagctttcccccgggactcccgtgcaccggagcggtggccatcaggaacc

SEQ ID NO: 142663 - DNA, 75 bp, synthetic construct
  source 1..75: mol_type = other DNA
attattacttttatatccgcagcgtgaacaccgttggtaaatcggcatttgtggaggccgttggtcgggcgagcg

SEQ ID NO: 142664 - DNA, 75 bp, synthetic construct
  source 1..75: mol_type = other DNA
ccagattgaaggcgatctcgttaaaacagtgggtaaggctttcccccgtgactcccgtgcaccgaagcgttggcc

SEQ ID NO: 142665 - DNA, 75 bp, synthetic construct
  source 1..75: mol_type = other DNA
gaaggtaaaagtgagccgtgttcctggcggtgttgctgaatacagcgtatgggggctgaagctgccgacgctgcg

SEQ ID NO: 142666 - DNA, 75 bp, synthetic construct
  source 1..75: mol_type = other DNA
accgtcggcaaatcgacattcgtggaggctgtcggtcagccgagtgatgacgcatccggctatctggattttttc

SEQ ID NO: 142667 - DNA, 75 bp, synthetic construct
  source 1..75: mol_type = other DNA
gtatgtcacgggcatacaggaaaagacatcatgctcggtaaaacgtataaaggcagcagtaaggggcataccccg

SEQ ID NO: 142668 - DNA, 75 bp, synthetic construct
  source 1..75: mol_type = other DNA
aatcgcatccagagaaactaaaggggccattcccggtagttacagtgcggttattgatatgccgagtggcagggg

SEQ ID NO: 142669 - DNA, 75 bp, synthetic construct
  source 1..75: mol_type = other DNA
agcgatacttattcgtcatgccgcctgatagtgaagaaaaacggggctgaaatttataaccgaacggctctggat

SEQ ID NO: 142670 - DNA, 75 bp, synthetic construct
  source 1..75: mol_type = other DNA
aaaaccgatgtttgttggtcagggcgatcagatattcatgaatgacgtgttcctgaaacgcctgacggcccccac

SEQ ID NO: 142671 - DNA, 75 bp, synthetic construct
  source 1..75: mol_type = other DNA
acacgcctcgagaggcaaaggacaatcttaagtccacgcagatgatgagcgtgattgatgccattggtgaagggc

SEQ ID NO: 142672 - DNA, 75 bp, synthetic construct
  source 1..75: mol_type = other DNA
gtcaccattaacgagaactgtgtcatcagagggaaactgtctgcaaaccagattgaaggcgatctcgttaaaaca

SEQ ID NO: 142673 - DNA, 75 bp, synthetic construct
  source 1..75: mol_type = other DNA
cggtcagtatctggcacaggcgaaatgggacacgccgcgggtggtgaagggtgtgcgcttcagtctgcgcctgac

SEQ ID NO: 142674 - DNA, 75 bp, synthetic construct
  source 1..75: mol_type = other DNA
gacctggtgaagacggtggggaaagcctttccccggaataacagttatgccagcgggacggtaaccgtcacagtt

SEQ ID NO: 142675 - DNA, 75 bp, synthetic construct
  source 1..75: mol_type = other DNA
gctacgggatgggaaaacgtctgggggcggcggatgtggacaaatgggcgctgtatgccattgcgcagtactgcg

SEQ ID NO: 142676 - DNA, 75 bp, synthetic construct
  source 1..75: mol_type = other DNA
ttttcggtgtcagcatggctggtaaataactggtatcccacagcaagtatcagcgatttgctggttgtggtgatg

SEQ ID NO: 142677 - DNA, 75 bp, synthetic construct
  source 1..75: mol_type = other DNA
agcatggaggacacggaggaaggcaagctgagccagtttctggttgccgctaaccgtatcgcgtttattgacccg

SEQ ID NO: 142678 - DNA, 75 bp, synthetic construct
  source 1..75: mol_type = other DNA
attttccatgaaccggcaacggatgtcagccgggtgttctcatcggtgatagatatgccggcagggcggggtcat

SEQ ID NO: 142679 - DNA, 75 bp, synthetic construct
  source 1..75: mol_type = other DNA
ggatactgatggccagccactgagcaacatactgctgctggctgaccgtatcgcgatgataaatccggagagcgg

SEQ ID NO: 142680 - DNA, 75 bp, synthetic construct
  source 1..75: mol_type = other DNA
cagcccagcaatgatggtgaagggtatctggaatttttccgggaaaaaataggaaaactgcatctggctcagggg

SEQ ID NO: 142681 - DNA, 75 bp, synthetic construct
  source 1..75: mol_type = other DNA
gatcagccttttgacaggcaaattgttattccagcggtggcattctgcggcgctaaacatgagcgggagaataac

SEQ ID NO: 142682 - DNA, 75 bp, synthetic construct
  source 1..75: mol_type = other DNA
aaaaattgtgacgcgttaaacgcactggatcgcatacgcagcgcactgggagggatccagcttcctgattgcgag

SEQ ID NO: 142683 - DNA, 75 bp, synthetic construct
  source 1..75: mol_type = other DNA
tatgacgatcagccgtttaaccggcagattgttattccggcggtggctttcagcggtgccagacatgagcgggag

SEQ ID NO: 142684 - DNA, 75 bp, synthetic construct
  source 1..75: mol_type = other DNA
aacgccgggacgctcaacaatgtcacaattaatgagaactgtcagattaaggggaaactgtcagccaaccagatt

SEQ ID NO: 142685 - DNA, 75 bp, synthetic construct
  source 1..75: mol_type = other DNA
ccacggaactggtggaagacccggaagccatactgcgctacgggcgcaacctgctgaagatggatgcgttcggct

SEQ ID NO: 142686 - DNA, 75 bp, synthetic construct
  source 1..75: mol_type = other DNA
gcccaggagctgtggacgcagattgataacggtcagcttgcgccggacctggctgaaatcaggacgtccattacg

SEQ ID NO: 142687 - DNA, 75 bp, synthetic construct
  source 1..75: mol_type = other DNA
ccgcagtcaggcaccctgaacagcgttatcccaccggcagtgcagcacctgacggtggaggtgagcgcagctgac

SEQ ID NO: 142688 - DNA, 75 bp, synthetic construct
  source 1..75: mol_type = other DNA
cttcatcaggagcgaataactggacaccaacaaccagtatcagcgatctgctggttgtggtgatgaaaaaatcca

SEQ ID NO: 142689 - DNA, 75 bp, synthetic construct
  source 1..75: mol_type = other DNA
ggacaggaaatctttcagcaacccgcgacggatgtcagcagggtattttcatcagtcattgatatgcctgccgga

SEQ ID NO: 142690 - DNA, 75 bp, synthetic construct
  source 1..75: mol_type = other DNA
gacggggtggggcaatacagtatctgggggctggcattaccaggactacgccgccgtctgttccggtgtgtggcg

SEQ ID NO: 142691 - DNA, 75 bp, synthetic construct
  source 1..75: mol_type = other DNA
cattaccgtcagggtttatgacgatcagccgtttgaccggcagattgttattccggcggtggcattcagcggcgc

SEQ ID NO: 142692 - DNA, 75 bp, synthetic construct
  source 1..75: mol_type = other DNA
atgaccttcaatgctgataacctgtcacaacagcgtaaggcgtgggacgttctcagtgatttctgctcggcgatg

SEQ ID NO: 142693 - DNA, 75 bp, synthetic construct
  source 1..75: mol_type = other DNA
accaccatcacggaaacccgcaatgaaatcacacagacggtcagtaaaacgctggagaaccagagcgccactata

SEQ ID NO: 142694 - DNA, 75 bp, synthetic construct
  source 1..75: mol_type = other DNA
gtcagccaatcagattgaaggcgatattgtcaaaacggtcagcaagtctttcccccgcacgagcacttatgccag

SEQ ID NO: 142695 - DNA, 75 bp, synthetic construct
  source 1..75: mol_type = other DNA
ttagtgatgatcagaagtttgaccggcaggtcatgatcccggctctgttgtttaaaggaagcaggaaggaaaatt

SEQ ID NO: 142696 - DNA, 75 bp, synthetic construct
  source 1..75: mol_type = other DNA
aaatgagaactgtcagattaaggggaaactgtccgccaaccagattgaaggcgatattgtcaaaacggtcagcaa

SEQ ID NO: 142697 - DNA, 75 bp, synthetic construct
  source 1..75: mol_type = other DNA
atgtggggcgtcaaaattgagcagaccgaagacggcaggcattatgtcacggggcttggcctcagcatggaggat

SEQ ID NO: 142698 - DNA, 75 bp, synthetic construct
  source 1..75: mol_type = other DNA
tggaagaccagagcgcgaccatacagcagatacagcaggtccagtcagacacgaatgatgagctggcagcgctgt

SEQ ID NO: 142699 - DNA, 75 bp, synthetic construct
  source 1..75: mol_type = other DNA
gacgtgttcctgaaacgcctgacggctcccaccattaccagcggcggtaatcctccggcattttccctgacaccg

SEQ ID NO: 142700 - DNA, 75 bp, synthetic construct
  source 1..75: mol_type = other DNA
caccgcttcagcggcctgccactgggggagtacactctgaccgtcagggcgataaacagctatggtcagcagggg

SEQ ID NO: 142701 - DNA, 75 bp, synthetic construct
  source 1..75: mol_type = other DNA
taatgtcaccattaacgagaactgtgtcatcagagggaaactgtctgcaaaccagattgaaggcgatctcgttaa

SEQ ID NO: 142702 - DNA, 75 bp, synthetic construct
  source 1..75: mol_type = other DNA
agcggaagcggagaagacagccgtctggtgagcaccgccatcaccgcagacacggagcaccgtttcagtggtctg

SEQ ID NO: 142703 - DNA, 75 bp, synthetic construct
  source 1..75: mol_type = other DNA
agaccgtcaataagaaactggaagaccagagtgcagcgatccagcagatacagaaggttcaggttgatacaaata

SEQ ID NO: 142704 - DNA, 75 bp, synthetic construct
  source 1..75: mol_type = other DNA
atgaccaggcttttgaccgtcagatagtagtcccccccgttctgtttcgtgggggtaagcatgaaaacttcaaca

SEQ ID NO: 142705 - DNA, 75 bp, synthetic construct
  source 1..75: mol_type = other DNA
catcaggctatctggattttttcaaaggcgagatagggaaaacccatctggctcaggagctgtggacgcagattg

SEQ ID NO: 142706 - DNA, 75 bp, synthetic construct
  source 1..75: mol_type = other DNA
gtaatcctgtgatacatggtgtgacagcggtctggcgcgccggggagcaggagcagacaccacctgaaggctttg

SEQ ID NO: 142707 - DNA, 75 bp, synthetic construct
  source 1..75: mol_type = other DNA
aaaaagcgtgctgctgaacggtacgccggtcctggatagcgaggggaagacaaacttttccggtgttacggtggt

SEQ ID NO: 142708 - DNA, 75 bp, synthetic construct
  source 1..75: mol_type = other DNA
cctgacctggctgaaatcaggacgtccattaaggatgtcagcaatgaaatcacgcagaccgtcaataagaaactg

SEQ ID NO: 142709 - DNA, 75 bp, synthetic construct
  source 1..75: mol_type = other DNA
tcgtggaggctgttggtcagccgagtgatgatgcatccggctatctggattttttcaaaggcgagatagggaaaa

SEQ ID NO: 142710 - DNA, 75 bp, synthetic construct
  source 1..75: mol_type = other DNA
aattaccgcgaataccggcacgctcaataatgtcaccattaacgagaactgtgtcatcagagggaaactgtctgc

SEQ ID NO: 142711 - DNA, 75 bp, synthetic construct
  source 1..75: mol_type = other DNA
ctgtgatacatggtgtgacagcggtctggcgcgccggggagcaggagcagacaccgccggaaggttttgagtcat

SEQ ID NO: 142712 - DNA, 75 bp, synthetic construct
  source 1..75: mol_type = other DNA
gtggggctgcaggtggatgcggagcagtttggtggccagcagctgacggtgaactaccatatccgtggtcgcatc

SEQ ID NO: 142713 - DNA, 75 bp, synthetic construct
  source 1..75: mol_type = other DNA
ttactcctcatgccgtctgatagtgcggaaaaacggtgctgaaatttataaccgtaccgcgctggataatacgct

SEQ ID NO: 142714 - DNA, 75 bp, synthetic construct
  source 1..75: mol_type = other DNA
ttgtggaggctgttggccagccgagtgatgatgcatccggctatctggattttttcaaaggagagatagggaaaa

SEQ ID NO: 142715 - DNA, 75 bp, synthetic construct
  source 1..75: mol_type = other DNA
actggacgccgacaacgtacatcagtgatttactggttgtggtgatgaaaaaatccacagcaggtatcagtatca

SEQ ID NO: 142716 - DNA, 75 bp, synthetic construct
  source 1..75: mol_type = other DNA
cactctcacgcagctggttgcgaaaaagaatgaggaccaggcactggccatcgcgcaggtgaaccagaaagtgga

SEQ ID NO: 142717 - DNA, 75 bp, synthetic construct
  source 1..75: mol_type = other DNA
ctaaaggggccattcccggtagttacagtgcagttattgatatgccgagtggcaggggaagcgtcactctggagt

SEQ ID NO: 142718 - DNA, 75 bp, synthetic construct
  source 1..75: mol_type = other DNA
ttctcatcggtgatagatatgccggcagggcggggtcatgtcaccctgacgtttaatgtgtcgtcggccggtgcg

SEQ ID NO: 142719 - DNA, 75 bp, synthetic construct
  source 1..75: mol_type = other DNA
ccccggaataacagttatgccagcgggacggtaaccgtcacagtttacgatgaccagggcttcgaccggcagatt

SEQ ID NO: 142720 - DNA, 75 bp, synthetic construct
  source 1..75: mol_type = other DNA
gtgggcaaagctttcccccgggattcccgtgcaccggagcggtggccatcagggaccattaccgtcagggtttat

SEQ ID NO: 142721 - DNA, 75 bp, synthetic construct
  source 1..75: mol_type = other DNA
gatttatgacgatcagccgtttgaccggcagattgttattccggcggtggcattcagcggtgctaaacatgagag

SEQ ID NO: 142722 - DNA, 75 bp, synthetic construct
  source 1..75: mol_type = other DNA
acaccgttggcaaatcggcattcgtggaggctgttggtcagccgagtgatgatgcatccggctatctggattttt

SEQ ID NO: 142723 - DNA, 75 bp, synthetic construct
  source 1..75: mol_type = other DNA
tgtggggctgcaggtggatgcggagcagtttggcggtcagcagatgacggtgaactaccatatccgaggtcgcat

SEQ ID NO: 142724 - DNA, 75 bp, synthetic construct
  source 1..75: mol_type = other DNA
atatttattcgtcatgccgcctgatagtgaagaaaaatggtgctgaaatttataaccgtaccgcgctggataata

SEQ ID NO: 142725 - DNA, 75 bp, synthetic construct
  source 1..75: mol_type = other DNA
gtgctggcgctgggacacgccgaaggtggtgaaggggtgagcttcctgcttcgcctgaccgtggcagcggatgac

SEQ ID NO: 142726 - DNA, 75 bp, synthetic construct
  source 1..75: mol_type = other DNA
tttgttgggcagggcgatcagatattcatgaacgaagtgttcctgaaacgcctgacggctcccaccattaccagc

SEQ ID NO: 142727 - DNA, 75 bp, synthetic construct
  source 1..75: mol_type = other DNA
gacggggtggtggaacacagtatctgggggctggcattgccgggactgcgccgccgtctgttccggtgtgtggcg

SEQ ID NO: 142728 - DNA, 75 bp, synthetic construct
  source 1..75: mol_type = other DNA
gtcagcgggcaggccagcaatgatgcagaagggtatctggactttttcagaggagaaataggaaaaccgcatctg

SEQ ID NO: 142729 - DNA, 75 bp, synthetic construct
  source 1..75: mol_type = other DNA
gcctttatatcgcgggtattggtgccggtattgagaacacccctgacggcatgcagagtcaggtgctgctggcgg

SEQ ID NO: 142730 - DNA, 75 bp, synthetic construct
  source 1..75: mol_type = other DNA
tattcatgaacgaagtgttcctgaaatatctgacggctcccaccattaccagcggtggcaatcccccaacgtttt

SEQ ID NO: 142731 - DNA, 75 bp, synthetic construct
  source 1..75: mol_type = other DNA
accggactgctggaaacgcagacggtggatttcacgctcgggtcacaggggctgcgtcacacccccggtgacatc

SEQ ID NO: 142732 - DNA, 75 bp, synthetic construct
  source 1..75: mol_type = other DNA
atggtgggtaaatggctggtatcccacagcaagtatcagcgatttgctggttgttgtgatgaagaaagccactgc

SEQ ID NO: 142733 - DNA, 75 bp, synthetic construct
  source 1..75: mol_type = other DNA
ggcggagggactgcgtcacacgcccggcgatatcattgaaatcagtgataatgcgtatgccggtaccgttatcgg

SEQ ID NO: 142734 - DNA, 75 bp, synthetic construct
  source 1..75: mol_type = other DNA
gagaaatggcagttatgccagcggtacaataacggtcactgtgtacgatgaccaggcttttgaccgtcagatagt

SEQ ID NO: 142735 - DNA, 75 bp, synthetic construct
  source 1..75: mol_type = other DNA
aacgtgaacgcgaactccgggacgctcaacaacgtcacgattaatcagaactgtcggattctgggaaaactgtca

SEQ ID NO: 142736 - DNA, 75 bp, synthetic construct
  source 1..75: mol_type = other DNA
ggattcccgtgcaccggagcggtggccatcagggaccattaccgtcagggtttatgacgatcagccgtttgaccg

SEQ ID NO: 142737 - DNA, 75 bp, synthetic construct
  source 1..75: mol_type = other DNA
ggcccccaccattaccagtggtggcaatcctccggcattttccctgacaccggacgggcgactgacggcgagaaa

SEQ ID NO: 142738 - DNA, 75 bp, synthetic construct
  source 1..75: mol_type = other DNA
atgtcgcggggcttggcctcagcatggaggatacggaggaaggcaaactgagccagttcctggttgccgctaacc

SEQ ID NO: 142739 - DNA, 75 bp, synthetic construct
  source 1..75: mol_type = other DNA
acacaccgcgtgaggcgaaagacaacctcaaatccacgcagatgatgagcgtgattgatgcgattggtgagggac

SEQ ID NO: 142740 - DNA, 75 bp, synthetic construct
  source 1..75: mol_type = other DNA
cgaactcgggcacgctgaataatgtcgtgatagcggagaactgtaccatcaaaggtactctgagagcggaaaata

SEQ ID NO: 142741 - DNA, 75 bp, synthetic construct
  source 1..75: mol_type = other DNA
ctgatatttactcctcatgccgtctgatagtgcggaaaaacggtgctgaaatttataaccgtactgcgctggata

SEQ ID NO: 142742 - DNA, 75 bp, synthetic construct
  source 1..75: mol_type = other DNA
actatgccgggaccatgaccggcggacgtgtcctgtccatcgatgccgccagccgcaccctgacactggaccgtg

SEQ ID NO: 142743 - DNA, 75 bp, synthetic construct
  source 1..75: mol_type = other DNA
gtgaggtgaccctgccggagacaggtacttcgacggtgaacctgattaacggcagcggtaagccggtgagtgtga

SEQ ID NO: 142744 - DNA, 75 bp, synthetic construct
  source 1..75: mol_type = other DNA
cagtggtctgccgctcggggaatacaccctgacagtcagggcaattaacagttatggccagcagggcgaaccggc

SEQ ID NO: 142745 - DNA, 75 bp, synthetic construct
  source 1..75: mol_type = other DNA
aagggaagctgacagccaggaacgcggatatcagcggagcaattaccgcgaataccggcacgctcaataatgtca

SEQ ID NO: 142746 - DNA, 75 bp, synthetic construct
  source 1..75: mol_type = other DNA
tgtttgcggtgagtatcacctcgtccgccaatcccccgacgttttccctgacgccggagggcaggctgaccgcaa

SEQ ID NO: 142747 - DNA, 75 bp, synthetic construct
  source 1..75: mol_type = other DNA
gcatttgtggaggccgtcggccgggccagcgatgatgccgaaggctacctgaatttttacaaagggctgattaat

SEQ ID NO: 142748 - DNA, 75 bp, synthetic construct
  source 1..75: mol_type = other DNA
cgtattgcgatgattaacccggaggacggcaacaccacgccgttatttgtggcgcaggggaatcagttgttcatg

SEQ ID NO: 142749 - DNA, 75 bp, synthetic construct
  source 1..75: mol_type = other DNA
aattaacagttatggccagcagggcgaaccggccaccaccacgttcaggattaatgcacctgcggtacccgccac

SEQ ID NO: 142750 - DNA, 75 bp, synthetic construct
  source 1..75: mol_type = other DNA
acacacctcgtgaggcgaaggataatctcaaatccacgcagatgatgagcgtgattgatgccagtggtgagggac

SEQ ID NO: 142751 - DNA, 75 bp, synthetic construct
  source 1..75: mol_type = other DNA
tcaggcaggttgaaacctccgcccgctatcttggcacggcgctgtactggacagccgccagtaatatcaggccgg

SEQ ID NO: 142752 - DNA, 75 bp, synthetic construct
  source 1..75: mol_type = other DNA
ccccgcgccggaccggatacaggtcagcaccctgcctgatggtgtggagacatacggtgtatggggactctccct

SEQ ID NO: 142753 - DNA, 75 bp, synthetic construct
  source 1..75: mol_type = other DNA
accttgctgcactttacatgctgaaggtacagaaaacaaaaaatggcattccctatgtggccgggattggtgcag

SEQ ID NO: 142754 - DNA, 75 bp, synthetic construct
  source 1..75: mol_type = other DNA
taaccaacagtcatactggtattcaacctgccggttaagagtgacccgcaatggtcaggagatttttaatcagtc

SEQ ID NO: 142755 - DNA, 75 bp, synthetic construct
  source 1..75: mol_type = other DNA
ttttacgtgcgcagcgtcaacctggtggggaaatctgcttttgtggaagccagtggccgggccagcaatgatgca

SEQ ID NO: 142756 - DNA, 75 bp, synthetic construct
  source 1..75: mol_type = other DNA
tggacaccaacaaccagtatcagcgatctgctggttgtggtgatgaaaaaatccacagcaggtatcagtatcagc

SEQ ID NO: 142757 - DNA, 75 bp, synthetic construct
  source 1..75: mol_type = other DNA
gtgaatgcgaactccgggacgctcaacaacgtcacgattaacgaaaactgtcgggttctgggaaaactgtccgcc

SEQ ID NO: 142758 - DNA, 75 bp, synthetic construct
  source 1..75: mol_type = other DNA
gtgtcagcatggctggtaaatgactggtatcccacagcaagtatcagcgatttgctggttgtggtgatgaagaaa

SEQ ID NO: 142759 - DNA, 75 bp, synthetic construct
  source 1..75: mol_type = other DNA
ggcaacacaaagccgatgtttgttgggcagggcgatcagatattcatgaacgaagtgttcctgaaatatctgacg

SEQ ID NO: 142760 - DNA, 75 bp, synthetic construct
  source 1..75: mol_type = other DNA
tgcaggacggacgcctttatatcgcgggtattggtgccggtattgagaacacccctgacggcatgcagagtcagg

SEQ ID NO: 142761 - DNA, 75 bp, synthetic construct
  source 1..75: mol_type = other DNA
gtatcccacagcaagtatcagcgatctgctggttgtggtgatgaaaaaatccacagcaggtatcagtatcagctg

SEQ ID NO: 142762 - DNA, 75 bp, synthetic construct
  source 1..75: mol_type = other DNA
taactggtatcccacagcaagtatcagcgatttgctggttgtggtgatgaagaaagccaccgcaggcatcagtat

SEQ ID NO: 142763 - DNA, 75 bp, synthetic construct
  source 1..75: mol_type = other DNA
tgtcagcatggctggtaaataactggtatcccacagcaagtatcagcgatttgctggttgtggtgatgaagaaag

SEQ ID NO: 142764 - DNA, 75 bp, synthetic construct
  source 1..75: mol_type = other DNA
acaaagccgatgtttgttggtcagggcgatcagatattcatgaacgaagtgttcctgaaacgcctgacggctccc

SEQ ID NO: 142765 - DNA, 75 bp, synthetic construct
  source 1..75: mol_type = other DNA
taccacgctgataagcctggttgacgggcagggcattccggtcagcgtggaggtacagtccgtcaccgacggcgt

SEQ ID NO: 142766 - DNA, 75 bp, synthetic construct
  source 1..75: mol_type = other DNA
gtacggttacagtcaccatcagcgatgatcataactttgaccgccagattattattccgcccattatttttaacg

SEQ ID NO: 142767 - DNA, 75 bp, synthetic construct
  source 1..75: mol_type = other DNA
agagtcaggtgctgctggcggcggacaggattgcgatgattaatcctgcgaatggcaacacaaagccgatgtttg

SEQ ID NO: 142768 - DNA, 75 bp, synthetic construct
  source 1..75: mol_type = other DNA
actggacaccaacaaccagtatcagcgatttgctggttgtggtgatgaagaaagccacagcaggtatcagtatca

SEQ ID NO: 142769 - DNA, 75 bp, synthetic construct
  source 1..75: mol_type = other DNA
ctgattaaaactgaactgctggagacgcagaccgtggatttcagcgtgggtgcggaagggcttcgccatgtaccg

SEQ ID NO: 142770 - DNA, 75 bp, synthetic construct
  source 1..75: mol_type = other DNA
ctgattaaaactgaactgctggagacgcagaccgtggatttcagcgtcggtgccgaagggcttcgccatgtaccg

SEQ ID NO: 142771 - DNA, 75 bp, synthetic construct
  source 1..75: mol_type = other DNA
ctgattaaaactgaactgctggagacgcagaccgtggatttcagcgttggggcagaagggcttcgccatgtaccg

SEQ ID NO: 142772 - DNA, 75 bp, synthetic construct
  source 1..75: mol_type = other DNA
taccacgctgataagcctggttgacggccagggtaatccggtcagcgtggaggtacagtccgtcaccgacggcgt

SEQ ID NO: 142773 - DNA, 75 bp, synthetic construct
  source 1..75: mol_type = other DNA
taccacgctgataagcctggttgacggtcagggcagtccggtcagcgtggaggtacagtccgtcaccgacggcgt

SEQ ID NO: 142774 - DNA, 75 bp, synthetic construct
  source 1..75: mol_type = other DNA
taccacgctgataagcctggttgacggacagggtactccggtcagcgtggaggtacagtccgtcaccgacggcgt

SEQ ID NO: 142775 - DNA, 75 bp, synthetic construct
  source 1..75: mol_type = other DNA
tttcgaaagagtggaaggacgccaacgataaatggaatgccatgtggggcgtcaaaattgagcagaccgaagacg

SEQ ID NO: 142776 - DNA, 75 bp, synthetic construct
  source 1..75: mol_type = other DNA
aacgacgtgttcctgaaacgactgtttgcggtgagtatcacgtcatccggcaaccccccgacgttttccctgacg

SEQ ID NO: 142777 - DNA, 75 bp, synthetic construct
  source 1..75: mol_type = other DNA
aacggggcgcactttgacggcgaccagagcggcaccctgaacagcgttattccaccggcagtgcagcacctgacg

SEQ ID NO: 142778 - DNA, 75 bp, synthetic construct
  source 1..75: mol_type = other DNA
gcgtgggggcagcagggcgatccggcatcggtatcgttcaggattgccgcaccggcagcgccgtcacagattgag

SEQ ID NO: 142779 - DNA, 75 bp, synthetic construct
  source 1..75: mol_type = other DNA
cggaggaaggcaaactgagccagttcctggttgccgctaaccgtatcgcgtttattgatccgtctaatggcaaca

SEQ ID NO: 142780 - DNA, 75 bp, synthetic construct
  source 1..75: mol_type = other DNA
gaacccgccaccaccacgttccggattaacgcaccggcagcgcctgccggtgttgaactgacgccggggtatttt

SEQ ID NO: 142781 - DNA, 75 bp, synthetic construct
  source 1..75: mol_type = other DNA
ggaggtgacgaaggcaaagccggtgacgcgcaccattacgtccgcgaacattgaccgcctgcgtgtcaccttcgg

SEQ ID NO: 142782 - DNA, 75 bp, synthetic construct
  source 1..75: mol_type = other DNA
aaacctctgcccgttatctggggaccggcagtcagtggagtgtctccggtccgcacattaagcccggaaaggatt

SEQ ID NO: 142783 - DNA, 75 bp, synthetic construct
  source 1..75: mol_type = other DNA
gtatcttcatcaggagcgaataactggactccaacaaccagtatcagcgatctgctggttgtggtgatgaaaaaa

SEQ ID NO: 142784 - DNA, 75 bp, synthetic construct
  source 1..75: mol_type = other DNA
gctacgggatgggaaaacgcctgggggccccggacgtggacaagtgggcactgtatgccatcgggcagtactgtg

SEQ ID NO: 142785 - DNA, 75 bp, synthetic construct
  source 1..75: mol_type = other DNA
agagtcaggtgctgctggcggcagacaggattgcgatgattaatcctgcgaatggcaacacaaaaccgatgtttg

SEQ ID NO: 142786 - DNA, 75 bp, synthetic construct
  source 1..75: mol_type = other DNA
gtcacatgacgctggagttttcggtatcagcatggctggtgaataactggtatcccacagcaagtatcagcgatt

SEQ ID NO: 142787 - DNA, 75 bp, synthetic construct
  source 1..75: mol_type = other DNA
ctgcaggtgctgaagaacggggttgagattttccatgaaccggcaacggatgtcagccgggtgttctcatcggtg

SEQ ID NO: 142788 - DNA, 75 bp, synthetic construct
  source 1..75: mol_type = other DNA
cattcagtggcgctaagcatgagagagagcatactgatatttactcctcatgccgtctgatagtgcggaaaaacg

SEQ ID NO: 142789 - DNA, 75 bp, synthetic construct
  source 1..75: mol_type = other DNA
gcaggccagtaatgatggtgaagggtatctggaaattttccgggaaaaaataggaaaactgcatctggctcagag

SEQ ID NO: 142790 - DNA, 75 bp, synthetic construct
  source 1..75: mol_type = other DNA
gatcataactttgaccgtcaaatcattattccgcccattatctttaacggaatagcgtatagcgatccgggaagt

SEQ ID NO: 142791 - DNA, 75 bp, synthetic construct
  source 1..75: mol_type = other DNA
tatgacgatcagccttttgacaggcaaattgttattccggcggtggcattcagcggcgctaaacatgagcgggag

SEQ ID NO: 142792 - DNA, 75 bp, synthetic construct
  source 1..75: mol_type = other DNA
accgtcaataagaaactggaagaccagagtgcggcaattcagcagatacagaaagttcaggttgatacaaataat

SEQ ID NO: 142793 - DNA, 75 bp, synthetic construct
  source 1..75: mol_type = other DNA
ttgcgccggacctggctgaaatcaggacgtccattacgaatgtcagcaatgaaatcacgcagaccgtcaataaaa

SEQ ID NO: 142794 - DNA, 75 bp, synthetic construct
  source 1..75: mol_type = other DNA
ctgattaaaactgaactgctggagacgcagaccgtggatttcagcgttggagcggaagggcttcgccatgtaccg

SEQ ID NO: 142795 - DNA, 75 bp, synthetic construct
  source 1..75: mol_type = other DNA
ctgattaaaactgaactgctggagacgcagaccgtggatttcagcgtaggtgcagaagggcttcgccatgtaccg

SEQ ID NO: 142796 - DNA, 75 bp, synthetic construct
  source 1..75: mol_type = other DNA
ttataaagggttgatcaataaaacgcatctcggcaaggagctactggaaaactttgagctgacggaagataacgc

SEQ ID NO: 142797 - DNA, 75 bp, synthetic construct
  source 1..75: mol_type = other DNA
atgatgcggaaggttatctgaatttttataaagggttgatcaataaaacgcatctcggcaaggagctactggaaa

SEQ ID NO: 142798 - DNA, 75 bp, synthetic construct
  source 1..75: mol_type = other DNA
gtggaggctgttggccagccgagtgatgatgcatccggctatctggattttttcaaaggagagatagggaaaacc

SEQ ID NO: 142799 - DNA, 75 bp, synthetic construct
  source 1..75: mol_type = other DNA
ctggttgcgaaaaagaatgaggaccagacactggccatcgcgcaggtgagccagaaagtggaccgggtgagcagt

SEQ ID NO: 142800 - DNA, 75 bp, synthetic construct
  source 1..75: mol_type = other DNA
ggttctcggaaaagcggattgcggatatcaggcaggttgaaaccacagcacgctatcttggcacggcgctgtact

SEQ ID NO: 142801 - DNA, 75 bp, synthetic construct
  source 1..75: mol_type = other DNA
aacggggccagctttgagccgcagtcaggcaccctgaacagcgttattccaccggcagtgcagcacctcacggtg

SEQ ID NO: 142802 - DNA, 75 bp, synthetic construct
  source 1..75: mol_type = other DNA
gattattatttttatatccgcagtgtgaatactgttggcaaatcggcattcgtggaggctgtcggtcgggcgagc

SEQ ID NO: 142803 - DNA, 75 bp, synthetic construct
  source 1..75: mol_type = other DNA
acgccggaagggaagctgacagccaggaacgcggatatcagcggagcaattaccgcgaataccggcacgctcaat

SEQ ID NO: 142804 - DNA, 75 bp, synthetic construct
  source 1..75: mol_type = other DNA
tgaactaccatatccgcggtcgcatcatccgtaagcgtcgtctcagcaccgtctggcagatcctgaaattcctga

SEQ ID NO: 142805 - DNA, 75 bp, synthetic construct
  source 1..75: mol_type = other DNA
agacggtcagtaaaaccctggaagaccagagtgccaccatacagcagatacagcgggtgcagacagacacaaata

SEQ ID NO: 142806 - DNA, 75 bp, synthetic construct
  source 1..75: mol_type = other DNA
tcagggtttatgacgatcagccgtttgaccggcagattgttattccggcggtggcattcagcggcgctaaacatg

SEQ ID NO: 142807 - DNA, 75 bp, synthetic construct
  source 1..75: mol_type = other DNA
ttcatgaacgatgtgttcctgaagcggctgtttgcggtgagtatcacctcgtccggcaatcccccgacgttttcc

SEQ ID NO: 142808 - DNA, 75 bp, synthetic construct
  source 1..75: mol_type = other DNA
ggcctgccgctcggggaatacaccctgacggtgcgggcgataaacagctatggccagcagggcgaaccggccacc

SEQ ID NO: 142809 - DNA, 75 bp, synthetic construct
  source 1..75: mol_type = other DNA
tcggggaatacaccctgacggtcagggcgattaacagctatggccagcagggcgaacccgccaccaccacgttcc

SEQ ID NO: 142810 - DNA, 75 bp, synthetic construct
  source 1..75: mol_type = other DNA
gattaacagctatggccagcagggcgaaccggccaccaccaccttccggattaacgcgccagcaaaacccgccac

SEQ ID NO: 142811 - DNA, 75 bp, synthetic construct
  source 1..75: mol_type = other DNA
cattgagctgacgtcggggtattatcagataacagcagtaccggtgctggcggtgtatgacccgacggtacagtt

SEQ ID NO: 142812 - DNA, 75 bp, synthetic construct
  source 1..75: mol_type = other DNA
cgggaaaaaataggaaaactgcatctggctcaggggctgtgggagctgatagacaacagccagcttgcggatgag

SEQ ID NO: 142813 - DNA, 75 bp, synthetic construct
  source 1..75: mol_type = other DNA
aggatatcaccattaacggcaagaccacctcgcagtacctgacgtcggtgattctgaataatctccctgagcgcc

SEQ ID NO: 142814 - DNA, 75 bp, synthetic construct
  source 1..75: mol_type = other DNA
tcaaagggtgaccgtaatccgacgtctgtccgcctgctgattcagcttgagcgtggtggtaaatggatgacggaa

SEQ ID NO: 142815 - DNA, 75 bp, synthetic construct
  source 1..75: mol_type = other DNA
caggcaccctgaacagcgttatcccaccggcagtgcagcacctgacggtggaggtgagcgcagctgacggccagt

SEQ ID NO: 142816 - DNA, 75 bp, synthetic construct
  source 1..75: mol_type = other DNA
agcatggtgggtaaatggctggtatcccacagcaagtatcagcgatttgctggttgtagtgatgaagaaagccac

SEQ ID NO: 142817 - DNA, 75 bp, synthetic construct
  source 1..75: mol_type = other DNA
gctttcccccgggactcccgtgcaccggagcggtggccatcagggactattaccgtcagggtttatgacgatcag

SEQ ID NO: 142818 - DNA, 75 bp, synthetic construct
  source 1..75: mol_type = other DNA
aaatttataaccgtaccgcgctggataatacgctgatttacagtggcgttattgatatgcctgccggtcacggtc

SEQ ID NO: 142819 - DNA, 75 bp, synthetic construct
  source 1..75: mol_type = other DNA
ctggttttacgtgcgcagcgtcaacctggtggggaaatctgcttttgtggaagccagtggccgggccagcaatga

SEQ ID NO: 142820 - DNA, 75 bp, synthetic construct
  source 1..75: mol_type = other DNA
cagcggtacaataacggtcactgtgtacgatgaccaggcttttgaccgtcagatagtcgtcccccccgttctgtt

SEQ ID NO: 142821 - DNA, 75 bp, synthetic construct
  source 1..75: mol_type = other DNA
cgttctccctgacgccggacggcaggctgacggcccgtaatgctgatatcagcggacatatcagtgcgaactcgg

SEQ ID NO: 142822 - DNA, 75 bp, synthetic construct
  source 1..75: mol_type = other DNA
agatgcaggatggtcgtcgctatattgccggtatcggtgccggtattgagaacacccctgacgggatgcagagcc

SEQ ID NO: 142823 - DNA, 75 bp, synthetic construct
  source 1..75: mol_type = other DNA
cagcatgtgggcggtgaagctacagcagatgcaggatggtcgtcgctatattgccggtatcggtgccggtattga

SEQ ID NO: 142824 - DNA, 75 bp, synthetic construct
  source 1..75: mol_type = other DNA
ctaaaaatgcggatatcagtggtagtgtgaatgcgaactcaggaacgctcaacaatgtcacgattaaccagaact

SEQ ID NO: 142825 - DNA, 75 bp, synthetic construct
  source 1..75: mol_type = other DNA
ccagagaaactaaaggggccattcccggtagctacagtgcggttattgatatgccgagtggcaggggaagcgtca

SEQ ID NO: 142826 - DNA, 75 bp, synthetic construct
  source 1..75: mol_type = other DNA
caataagaaactggaagaccagagtgcagcgatccagcagatacagaaggttcaggttgatacaaataataatct

SEQ ID NO: 142827 - DNA, 75 bp, synthetic construct
  source 1..75: mol_type = other DNA
ataactggtatcccacagcaagtatcagcgatctgctggttgtggtgatgaaaaaatccacagcaggtatcagta

SEQ ID NO: 142828 - DNA, 75 bp, synthetic construct
  source 1..75: mol_type = other DNA
tcacggtaaatgaaaactgtacgattaagggcatgctggaggcgacccaagtcagaggggatttcgttaaagctg

SEQ ID NO: 142829 - DNA, 75 bp, synthetic construct
  source 1..75: mol_type = other DNA
gctacgggatggggaaacgcctggggaccgcggacgtggacaaatgggcgctgtatgccatcgggcagtactgtg

SEQ ID NO: 142830 - DNA, 75 bp, synthetic construct
  source 1..75: mol_type = other DNA
gtatctggcgcaggcgaaatgggacacgccgcgggtggtgaagggggtgcgcttcagtctgcgcctgaccagcgg

SEQ ID NO: 142831 - DNA, 75 bp, synthetic construct
  source 1..75: mol_type = other DNA
tttctgtatcggcatggctggtaaatggctggtatcccacagcaagtatcagcgatttgctggttgtggtgatga

SEQ ID NO: 142832 - DNA, 75 bp, synthetic construct
  source 1..75: mol_type = other DNA
gctgcgtcacacacccggtgacattattgaaatctgtgataacgactatgccgggaccatgaccggcggacgtat

SEQ ID NO: 142833 - DNA, 75 bp, synthetic construct
  source 1..75: mol_type = other DNA
atgctgactcacccgcgctacggcatgggaaaacgcctgggggcggcggatgtggacaagtgggcgctgtatgcc

SEQ ID NO: 142834 - DNA, 75 bp, synthetic construct
  source 1..75: mol_type = other DNA
tgaactaccatatccgcggtcgcatcatccaggtgccgtcaaactatgacccggaaaaacgcacgtacagcggca

SEQ ID NO: 142835 - DNA, 75 bp, synthetic construct
  source 1..75: mol_type = other DNA
ggggaatatcaggtgctggcgcgctgggacacgccgaaggtggtgaagggggtgagcttcctgcttcgcctgacc

SEQ ID NO: 142836 - DNA, 75 bp, synthetic construct
  source 1..75: mol_type = other DNA
gcggggaatatcaggtgctggcgcgctgggacacgccgaaggtggtgaagggcgtgagcttcctgcttcgcctga

SEQ ID NO: 142837 - DNA, 75 bp, synthetic construct
  source 1..75: mol_type = other DNA
ggagttttctgtatcagcatggtgggtaaatggttggtatcccacagcaagtatcagcgatttgctggttgttgt

SEQ ID NO: 142838 - DNA, 75 bp, synthetic construct
  source 1..75: mol_type = other DNA
gcggtaacgtgaacgcgaactccgggacgctcaacaacgtcacgattaatcagaactgtcggattctgggaaaat

SEQ ID NO: 142839 - DNA, 75 bp, synthetic construct
  source 1..75: mol_type = other DNA
ggttatgggacttgccggtgttctccggggtaaaaaggtccgcactaccgttgccgcaggtgaccgcgtaaaccg

SEQ ID NO: 142840 - DNA, 75 bp, synthetic construct
  source 1..75: mol_type = other DNA
gaaggctgggtcatatccctccggcagaagcagaaaaagcttattatgcttccatcagaaacgatgatctggcag

SEQ ID NO: 142841 - DNA, 75 bp, synthetic construct
  source 1..75: mol_type = other DNA
atgcactggagcaggcgttgtgggcccgtcggccgtccggcacagtccatcacagtgataaaggttctcagtatg

SEQ ID NO: 142842 - DNA, 75 bp, synthetic construct
  source 1..75: mol_type = other DNA
gttctccggggtaaaaaggtccgtacgaccatcagccggaaagcctttgccgcaggcgaccgcgtaaaccgtcag

SEQ ID NO: 142843 - DNA, 75 bp, synthetic construct
  source 1..75: mol_type = other DNA
tatggaaacgacattcgtgctggatgcgctggagcaggcgtgtgggcccgtcgtccgtctggcaccatccatcac

SEQ ID NO: 142844 - DNA, 75 bp, synthetic construct
  source 1..75: mol_type = other DNA
gcaaaactgctggcatcaacagggagtacaggtgactcgtatgacaacgcgatggcggagagcatcaatggtctt

SEQ ID NO: 142845 - DNA, 75 bp, synthetic construct
  source 1..75: mol_type = other DNA
catattgccccgtcaacgtattaccactgtcagcaacagcgacatcatccggataaacgcagtgcccgtgcgcag

SEQ ID NO: 142846 - DNA, 75 bp, synthetic construct
  source 1..75: mol_type = other DNA
ccgggaccaaaatttggctggttgccggtatcaccgatatgagaaatggcttcaacggcctggctgcgaaagtac

SEQ ID NO: 142847 - DNA, 75 bp, synthetic construct
  source 1..75: mol_type = other DNA
atcgctgacgtcgccgtacgtgacgggcgatttggcgcacctttttcattcaaccgcatgacctggattaaaccc

SEQ ID NO: 142848 - DNA, 75 bp, synthetic construct
  source 1..75: mol_type = other DNA
gactggtataacaatcgacgattgctggaaaggctgggccacatccctccggcagaagcagaaaaagcttattag

SEQ ID NO: 142849 - DNA, 75 bp, synthetic construct
  source 1..75: mol_type = other DNA
agtgcggatatgtgccaccttaatctccagttttagccgctcatcactttgttttctgtctgagggggcatgctg

SEQ ID NO: 142850 - DNA, 75 bp, synthetic construct
  source 1..75: mol_type = other DNA
ggctgggccatatcccaccggcagaagcagaaaaagcttattatgcttccatcggaaatgatgatctggcagcct

SEQ ID NO: 142851 - DNA, 75 bp, synthetic construct
  source 1..75: mol_type = other DNA
attgctggaaaggcagggccatatcccaccggcagaagcagaaaaagcttattatgcttccatcggaaacaatga

SEQ ID NO: 142852 - DNA, 75 bp, synthetic construct
  source 1..75: mol_type = other DNA
aaaccgtcagttcgtggcagaacgtcctgaccagttgtgggtggctgattctacttacgtcagcacatggcaggg

SEQ ID NO: 142853 - DNA, 75 bp, synthetic construct
  source 1..75: mol_type = other DNA
atgaaaatcacaaggtatacggtgtgcgtaaagtctggcgtcagttgtttacgggaaggtatcagagtggccaga

SEQ ID NO: 142854 - DNA, 75 bp, synthetic construct
  source 1..75: mol_type = other DNA
ctcatcgtctatggaaacgacattcgtgctggatgccctggagcaggcgttttgggcccggcggccgtccggcac

SEQ ID NO: 142855 - DNA, 75 bp, synthetic construct
  source 1..75: mol_type = other DNA
ctcatcgtctatggaaacgacattcgtgctggatgctctggagcaggcgttttgggcccgacgtccgtccggcac

SEQ ID NO: 142856 - DNA, 75 bp, synthetic construct
  source 1..75: mol_type = other DNA
ctcatcgtctatggaaacgacattcgtgctggatgcactggagcaggcgttttgggcccgtcgtccgtccggcac

SEQ ID NO: 142857 - DNA, 75 bp, synthetic construct
  source 1..75: mol_type = other DNA
cgggcaccttccagccggtacgcgtcgacacgattgaagatcacatcatgcactcggagtacgccgaagtgccgc

SEQ ID NO: 142858 - DNA, 75 bp, synthetic construct
  source 1..75: mol_type = other DNA
ccgtacatcgaccgtccggacgaagatgcagaccgcgaactttatcaaacggtttatagcgaaaaacccggcgcg

SEQ ID NO: 142859 - DNA, 75 bp, synthetic construct
  source 1..75: mol_type = other DNA
gcaggcgaccgcgtaaaccgtcagttcgtggcagaacgacctgaccagctgtgggtggctgattttactacgtca

SEQ ID NO: 142860 - DNA, 75 bp, synthetic construct
  source 1..75: mol_type = other DNA
atggaaacgacattcgtgctggatgcactggagcaggcgttgtgggcccgccgtccgtccggcaccatccatcac

SEQ ID NO: 142861 - DNA, 75 bp, synthetic construct
  source 1..75: mol_type = other DNA
ccgatttacgggccgtaagtaacgaagttggatgcaaatgtcagatcgtgtgcgcctgttatggctcggctggta

SEQ ID NO: 142862 - DNA, 75 bp, synthetic construct
  source 1..75: mol_type = other DNA
aggaggtggttgatgcggtgctggcagcgaaagcgcgcggaaatcgggtgattgcggttggcaccacctcagtac

SEQ ID NO: 142863 - DNA, 75 bp, synthetic construct
  source 1..75: mol_type = other DNA
caatcgacgattgctgggaaggctgggccatactcctccggcagaagcaagaaaaagcttattatgcttccatcg

SEQ ID NO: 142864 - DNA, 75 bp, synthetic construct
  source 1..75: mol_type = other DNA
gagattggatatcttgattacacggagatccagcgggggcggacaaaactcttctgtattcactaccggcgtccc

SEQ ID NO: 142865 - DNA, 75 bp, synthetic construct
  source 1..75: mol_type = other DNA
gttgagctgccttttgtcgagtttgcaaaactgtgtggtataccttcaagccagtcatcccgcaggctgcgtgag

SEQ ID NO: 142866 - DNA, 75 bp, synthetic construct
  source 1..75: mol_type = other DNA
cagaagtggaactggccacactcacgtgggtggactggtataacaatcgatgattgctggcaaggccgggccata

SEQ ID NO: 142867 - DNA, 75 bp, synthetic construct
  source 1..75: mol_type = other DNA
cagaagtggaactggccacactcacgtgggtggactggtataacaatcgatgattgctggaaaggcagggccata

SEQ ID NO: 142868 - DNA, 75 bp, synthetic construct
  source 1..75: mol_type = other DNA
cagaagtggaactggccacactcacgtgggtggactggtataacaatcgaagattgctggaaaggctgggccata

SEQ ID NO: 142869 - DNA, 75 bp, synthetic construct
  source 1..75: mol_type = other DNA
acgtattaccactgtcagcaacagcgacatcatcctgataaacgccgtgcacatgcgcagcgcgatgactggctg

SEQ ID NO: 142870 - DNA, 75 bp, synthetic construct
  source 1..75: mol_type = other DNA
ccgtcgaccgtccggcacggtccatcacagtgataaaggttctcagtatgtatcgctggcctacacacagcggct

SEQ ID NO: 142871 - DNA, 75 bp, synthetic construct
  source 1..75: mol_type = other DNA
tgcagatgaaacatgcctgaaagcagccagagctgcgattgatgttaacaatgtcgccttccgtaagttcggatt

SEQ ID NO: 142872 - DNA, 75 bp, synthetic construct
  source 1..75: mol_type = other DNA
ccagtcatcccgcaggctgcgtgagcgcatcagcccttccctgaaacgcattgccggtaccgtgatctccttttc

SEQ ID NO: 142873 - DNA, 75 bp, synthetic construct
  source 1..75: mol_type = other DNA
gggtggggatcattcattcctttgcccgccataacgtgactggtgacaaagttgaactgccttttgtcgagtttg

SEQ ID NO: 142874 - DNA, 75 bp, synthetic construct
  source 1..75: mol_type = other DNA
acgtattaccactgtcagcaacagcgacatcatcctgataaacgcggtacacatgcacagcgcgatgactggctg

SEQ ID NO: 142875 - DNA, 75 bp, synthetic construct
  source 1..75: mol_type = other DNA
tcgctgacctacacgcagcggcttaaggaagccggattactggcatcaacagggagcacaggcgactcgtatgac

SEQ ID NO: 142876 - DNA, 75 bp, synthetic construct
  source 1..75: mol_type = other DNA
agctgtacggggtcggaccggtatgcagtgaactacatattgccccgtcaacgtattaccactgtcagcagcagc

SEQ ID NO: 142877 - DNA, 75 bp, synthetic construct
  source 1..75: mol_type = other DNA
aagaaagagatacagcgcgcatacgatgaaaatcaccaggtatacggtgtgcgtaaagtctggcgtcagttgtta

SEQ ID NO: 142878 - DNA, 75 bp, synthetic construct
  source 1..75: mol_type = other DNA
cagctgtggggggctgattttacttacgtcagcacatggcagggcttcgtctatgtggcgttcatcattgatgtg

SEQ ID NO: 142879 - DNA, 75 bp, synthetic construct
  source 1..75: mol_type = other DNA
ggattactggcatcaacagggagtacaggcgactcgtatgacaacgcgatggctgagagcatcaatggtctttac

SEQ ID NO: 142880 - DNA, 75 bp, synthetic construct
  source 1..75: mol_type = other DNA
gtaaaccgtcagttcgtggcagaacgacctgaccagctgtgggtggctgattttacttacgtcagcacatggcgg

SEQ ID NO: 142881 - DNA, 75 bp, synthetic construct
  source 1..75: mol_type = other DNA
cagaagtggaactggccacactcacgtgggtggactggtataacaatcgaggattgctgggaaggctgggccata

SEQ ID NO: 142882 - DNA, 75 bp, synthetic construct
  source 1..75: mol_type = other DNA
cagaagtggaactggccacactcacgtgggtggactggtataacaatcgacgattgctggcaaggctgggccata

SEQ ID NO: 142883 - DNA, 75 bp, synthetic construct
  source 1..75: mol_type = other DNA
cagaagtggaactggccacactcacgtgggtggactggtataacaatcgatgattgctgggaaggcggggccata

SEQ ID NO: 142884 - DNA, 75 bp, synthetic construct
  source 1..75: mol_type = other DNA
tcccgaacgcagtataaatggtaaaaaactggagcaccgatcattacagcttggtatttcccgtaacttgatcag

SEQ ID NO: 142885 - DNA, 75 bp, synthetic construct
  source 1..75: mol_type = other DNA
ggaagctagatattccttcattgaaaatctaaacaaagccctgcaatcagcacagagaaattacggggaaaaata

SEQ ID NO: 142886 - DNA, 75 bp, synthetic construct
  source 1..75: mol_type = other DNA
ccggatacatcgtggggtggcgggtctcatcgtctatggaaacgacattcgtgctggatgctctggagcaggcgt

SEQ ID NO: 142887 - DNA, 75 bp, synthetic construct
  source 1..75: mol_type = other DNA
ctgtgggtggctgattttacttacggtgtgcccggagttcagggcgggcatggatgcttaaatgaaccgcgagtc

SEQ ID NO: 142888 - DNA, 75 bp, synthetic construct
  source 1..75: mol_type = other DNA
cgctctacacactgggcgatgacggtacgctgaccaataaccagagtggcgtcaaatatcgcccgaatgaccaga

SEQ ID NO: 142889 - DNA, 75 bp, synthetic construct
  source 1..75: mol_type = other DNA
cgctcaccgatggcgaaaccggtaagcattatctctccgatgcctttaaatttggcggcgagcaaaagctgcaac

SEQ ID NO: 142890 - DNA, 75 bp, synthetic construct
  source 1..75: mol_type = other DNA
gtggcgcgcctcatggcggttatgggacttgccggtgttctccggggtaaaaaggtccgcactaccatcagccgg

SEQ ID NO: 142891 - DNA, 75 bp, synthetic construct
  source 1..75: mol_type = other DNA
gccggaaagccattaccgcaggcgaccgcgtaaaccgtcagttcggggcagaacgtcctgaccagttgtgggtgg

SEQ ID NO: 142892 - DNA, 75 bp, synthetic construct
  source 1..75: mol_type = other DNA
ggtggactggtataacaatcgacgattgctgggaaggctgggtcatattcctccggcagaagcagaaaaagctta

SEQ ID NO: 142893 - DNA, 75 bp, synthetic construct
  source 1..75: mol_type = other DNA
caataaccgacggttgctggaacgactgggtcatatcccgccggcagaagcggaaaaggcatattacgcttccat

SEQ ID NO: 142894 - DNA, 75 bp, synthetic construct
  source 1..75: mol_type = other DNA
ctcagcggcttaaggatgcagagttgctggcgtcaaccggcagcacaggcgactcatatgacaacgcgatggcgg

SEQ ID NO: 142895 - DNA, 75 bp, synthetic construct
  source 1..75: mol_type = other DNA
ggtaaaaaggtccgtactaccgtcagccggaaagccgtttccgcatgcgaccgcgtaaaccgtcagttcgtggca

SEQ ID NO: 142896 - DNA, 75 bp, synthetic construct
  source 1..75: mol_type = other DNA
gccacgctgatcttcctgctggtgggtgcgctggcgatagtgaacctgaaagccacgcgaatgaagtttgattaa

SEQ ID NO: 142897 - DNA, 75 bp, synthetic construct
  source 1..75: mol_type = other DNA
ccggctggaaaaactttacccgcgtcttcaccgacgaaggcattcagaaaccgttcctcgccattttcgtctgga

SEQ ID NO: 142898 - DNA, 75 bp, synthetic construct
  source 1..75: mol_type = other DNA
ctcatcgtctatggaaacgacattcgtgctggatgcgctggagcaggcgttgtgggcccgtcgtccgtctggcac

SEQ ID NO: 142899 - DNA, 75 bp, synthetic construct
  source 1..75: mol_type = other DNA
gagatacagcgcgtatacgatgaaaatcatcaggtatacggtgtgcgtaaagtctggcgtcagttgttacgggaa

SEQ ID NO: 142900 - DNA, 75 bp, synthetic construct
  source 1..75: mol_type = other DNA
gtgtggatcactattgcaccgttcgtgacattcatcattgatgtgtttgccggatacatcgtggggtggcgggtc

SEQ ID NO: 142901 - DNA, 75 bp, synthetic construct
  source 1..75: mol_type = other DNA
ccgcgtaaaccgtcagttcgtggcagaacgtcctgaccagttgtgggtggctgattttgcttacgtcagcacatg

SEQ ID NO: 142902 - DNA, 75 bp, synthetic construct
  source 1..75: mol_type = other DNA
tttaccgcgtcacgcatattggtgcggatgaaatggggcgcacacgcgtaacgctcgggcgaggacgggggacgt

SEQ ID NO: 142903 - DNA, 75 bp, synthetic construct
  source 1..75: mol_type = other DNA
tcattgctgttgcttattcctcatctgttttttctgccgggattcctgtagttgatactgttggtaacgcacagg

SEQ ID NO: 142904 - DNA, 75 bp, synthetic construct
  source 1..75: mol_type = other DNA
ttacgatgttgggatatctacgctttacaaaaaattccctgcgaccaggaataaggattccggcacgcatggccg

SEQ ID NO: 142905 - DNA, 75 bp, synthetic construct
  source 1..75: mol_type = other DNA
catggaaacaacattcgtgctggatgcactggagcaggcgttgtgggcccgtcggccgtccggcacaaatccatc

SEQ ID NO: 142906 - DNA, 75 bp, synthetic construct
  source 1..75: mol_type = other DNA
cagggagtactggtgactcgtatgacaacgcgatggcggagagcatcaatggcctttacaaagcggaggtaatac

SEQ ID NO: 142907 - DNA, 75 bp, synthetic construct
  source 1..75: mol_type = other DNA
taaaccgtcagttcgtggcagaacgtccagaccagttgtgggtggctgattttacctgggtaagcacatggcagg

SEQ ID NO: 142908 - DNA, 75 bp, synthetic construct
  source 1..75: mol_type = other DNA
atgtatcgctggcctacacacagcggcttaaggaagccggattactggcatcaacaggaagtacaggcgactcgt

SEQ ID NO: 142909 - DNA, 75 bp, synthetic construct
  source 1..75: mol_type = other DNA
ccgtgcgcagcgcgatgactggctgaagagagggatacagcgcgtatacgatgagaatcatcaggtgtacggtgt

SEQ ID NO: 142910 - DNA, 75 bp, synthetic construct
  source 1..75: mol_type = other DNA
aagaagccggattactggcatcaacaggagtacaggcgactcgtatgacaacgcgatggctgagagcatcaatgg

SEQ ID NO: 142911 - DNA, 75 bp, synthetic construct
  source 1..75: mol_type = other DNA
ccgcgtaaaccgtcagttcgtggcagaacgtcctgaccagttgtgggtggctgattttacttacgtcagtacatt

SEQ ID NO: 142912 - DNA, 75 bp, synthetic construct
  source 1..75: mol_type = other DNA
ctgattttacctgggtaagcacatggcggggcttcgtctatgtggcgttcatcattgatgtgttcgccggataca

SEQ ID NO: 142913 - DNA, 75 bp, synthetic construct
  source 1..75: mol_type = other DNA
cgcgatgactggctgaagaaagagatactgcgcgtatacgatgggaatcatcaggtatacggtgtgcgtaaagtc

SEQ ID NO: 142914 - DNA, 75 bp, synthetic construct
  source 1..75: mol_type = other DNA
ctcgtatgacaacgcgatggctgagagcatcaatggtctttacaaagcggaggtaatacaccgtaatagctggaa

SEQ ID NO: 142915 - DNA, 75 bp, synthetic construct
  source 1..75: mol_type = other DNA
ccgtaagagctggaaaaaccgtgcagaagtagaactggccacactcacgtgggtggactggtataacaatcgacg

SEQ ID NO: 142916 - DNA, 75 bp, synthetic construct
  source 1..75: mol_type = other DNA
gcaacagcgacatcatccggagaaacgcagtgcccgtgcgcagcgcgatgactggctgaagaaagagatacagcg

SEQ ID NO: 142917 - DNA, 75 bp, synthetic construct
  source 1..75: mol_type = other DNA
actactggcatcaacaggcagtactggcgactcgtatgacaacgcgatggcggagagcatcaatggcctttacaa

SEQ ID NO: 142918 - DNA, 75 bp, synthetic construct
  source 1..75: mol_type = other DNA
ctcatcgtctatggaaacgacattcgtgctggatgcgctggagcaggcgttttgggcccggcgcccgtccggcac

SEQ ID NO: 142919 - DNA, 75 bp, synthetic construct
  source 1..75: mol_type = other DNA
ctcatcgtctatggaaacgacattcgtgctggatgcgctggagcaggcgttttgggcccgccggccgtccggcac

SEQ ID NO: 142920 - DNA, 75 bp, synthetic construct
  source 1..75: mol_type = other DNA
acgtattaccgctgtcagcaacagcgacatcatcctgataaacgcagtgcccgtgcgcagcgcgatgactggctg

SEQ ID NO: 142921 - DNA, 75 bp, synthetic construct
  source 1..75: mol_type = other DNA
actgctggcatcaacaggtagtacgggcgactcgtatgacaacgcgatggcggagagcatcaatggcctttacaa

SEQ ID NO: 142922 - DNA, 75 bp, synthetic construct
  source 1..75: mol_type = other DNA
acttctggcatcaacaggaagtacgggcgactcgtatgacaacgcgatggcggagagcatcaatggcctttacaa

SEQ ID NO: 142923 - DNA, 75 bp, synthetic construct
  source 1..75: mol_type = other DNA
cagaatgccccaaccagctgtgggtggctgacttcacgtatggtgtgcccggagttcagggcgggcatggatgct

SEQ ID NO: 142924 - DNA, 75 bp, synthetic construct
  source 1..75: mol_type = other DNA
ttcgtggcagaacgtccagaccagttgtgggtggctgattttacctgggtaagcacatggcagggcttcgtttat

SEQ ID NO: 142925 - DNA, 75 bp, synthetic construct
  source 1..75: mol_type = other DNA
cgggaaggtatcagagtggccagatgcactgtggcacgtctcatggcggttatgggacttgccagtgttctccgg

SEQ ID NO: 142926 - DNA, 75 bp, synthetic construct
  source 1..75: mol_type = other DNA
accacattcgcttatttgaatctcaattgttccctgtctgcgccagtgacgaacacggagaagcactttttaacc

SEQ ID NO: 142927 - DNA, 75 bp, synthetic construct
  source 1..75: mol_type = other DNA
caggtgacgccgctgcaactctcggaacaagggaaaatcttccattcgcagatccgccatctgttgcaacagtta

SEQ ID NO: 142928 - DNA, 75 bp, synthetic construct
  source 1..75: mol_type = other DNA
gagaagcactttttaacctcgcgcagccacactttccgttactgaattacagccgcaactcctacatggggcgat

SEQ ID NO: 142929 - DNA, 75 bp, synthetic construct
  source 1..75: mol_type = other DNA
tatcagggaccgtacgaccacgaatttacttttgagaaattactggaaaagcaattcgcgatcttttgccgcccg

SEQ ID NO: 142930 - DNA, 75 bp, synthetic construct
  source 1..75: mol_type = other DNA
gaggatattcgccaacgacaagggcaactggcagggcagattaatatcggcatgggggccagtatttcccgcagt

SEQ ID NO: 142931 - DNA, 75 bp, synthetic construct
  source 1..75: mol_type = other DNA
acgaatttacttttgagaaattactggaaaagcaattcgcgatcttttgccgcccgggacaccccgccattggtg

SEQ ID NO: 142932 - DNA, 75 bp, synthetic construct
  source 1..75: mol_type = other DNA
tgaccagctgtgggtggctgattttacttacgtcagcacatggcagggcttcgtctatagtggcgttcatcattg

SEQ ID NO: 142933 - DNA, 75 bp, synthetic construct
  source 1..75: mol_type = other DNA
ccgcgtaaaccgtcagttcgtggcagaacgacctgaccagctgtgggtggctgattttacttacggtgtgcccgg

SEQ ID NO: 142934 - DNA, 75 bp, synthetic construct
  source 1..75: mol_type = other DNA
gcagttccgtcagcactgcgacagcgttgtccgcaaggcttttacccagtccagcgttacggtgccccacgcctg

SEQ ID NO: 142935 - DNA, 75 bp, synthetic construct
  source 1..75: mol_type = other DNA
aattatgagcatgactatgagggagcagacgatatgccttctcatatcaaatcctcaatgctgggaacatcgctt

SEQ ID NO: 142936 - DNA, 75 bp, synthetic construct
  source 1..75: mol_type = other DNA
atgatattgtctgtttttataacggtaatttcaggccatgacaagccgcagccgccaggctgcctactcgatgat

SEQ ID NO: 142937 - DNA, 75 bp, synthetic construct
  source 1..75: mol_type = other DNA
caagtgcgctcgacgtgacagaagaggtaattgattcaattttgcagacgatgcaggggcgggtacttgatggtg

SEQ ID NO: 142938 - DNA, 75 bp, synthetic construct
  source 1..75: mol_type = other DNA
gcattggtacaacctgagcgacggtgccatggaagatgccctgtacgaaatcacctccatgcgcctgtttgcccg

SEQ ID NO: 142939 - DNA, 75 bp, synthetic construct
  source 1..75: mol_type = other DNA
atagtgaattcagcattaagcgccgtcagacccgaaaagagattttcctctcccgcatggagcagattctgccat

SEQ ID NO: 142940 - DNA, 75 bp, synthetic construct
  source 1..75: mol_type = other DNA
atgtggtatcaaaagacgctcacgcttagcgccaaatctcgtggatttcatctggtaacggatgaaatactgcat

SEQ ID NO: 142941 - DNA, 75 bp, synthetic construct
  source 1..75: mol_type = other DNA
agtcacgacagatacagatacagataaagaattaaaccccacacataacgcgcgcatgcgcgagagtgctccgac

SEQ ID NO: 142942 - DNA, 75 bp, synthetic construct
  source 1..75: mol_type = other DNA
gagcgcagcgggagcgggaaaagctgcggaaacataatgctgattgtcacgatgagtcacgacgtgtcacgcatc

SEQ ID NO: 142943 - DNA, 75 bp, synthetic construct
  source 1..75: mol_type = other DNA
gctattatgacccgctgcaggggcggtatatcactcaggatccgattgggcttaaggggggatggaatttttatc

SEQ ID NO: 142944 - DNA, 75 bp, synthetic construct
  source 1..75: mol_type = other DNA
tgcaggggcgggtacttgatggagatttaatcaccggatgggaaaaacgccaggtactgaaagaggataacggta

SEQ ID NO: 142945 - DNA, 75 bp, synthetic construct
  source 1..75: mol_type = other DNA
atggctaatgcctggctcagattatggcatgacatgccaaatgatcccaagtggcgaacaatttccagggtgtca

SEQ ID NO: 142946 - DNA, 75 bp, synthetic construct
  source 1..75: mol_type = other DNA
ggacagccaatcgcaacagtgatggcagtgtatatccatcttctggtgagtgcgtcacgaaatgtcacgacatgt

SEQ ID NO: 142947 - DNA, 75 bp, synthetic construct
  source 1..75: mol_type = other DNA
atcgcctgacaccgctgctggaagcgccggatgccgacgagctgcttaactggctgcgtcgccagcctctgctgc

SEQ ID NO: 142948 - DNA, 75 bp, synthetic construct
  source 1..75: mol_type = other DNA
attgacagccacattaaaaacctgcgccgcaagctggaatctctcgacgccgaacagtcatttatccgcgccgtt

SEQ ID NO: 142949 - DNA, 75 bp, synthetic construct
  source 1..75: mol_type = other DNA
ctattagtcactggtgaacatcaggcgaaagtggggatggattactttcgtcgtcatctccccgccctgcgtgaa

SEQ ID NO: 142950 - DNA, 75 bp, synthetic construct
  source 1..75: mol_type = other DNA
atgagatgggcgcaaaatctttccgtattacttcagtaaccggcccgaatacccttcatggaacggcagtaattt

SEQ ID NO: 142951 - DNA, 75 bp, synthetic construct
  source 1..75: mol_type = other DNA
atcaccaacgcttttacccgtatgcgtttttgcttcccgaacggtcaactggatatgtacagcaaagaatcgccg

SEQ ID NO: 142952 - DNA, 75 bp, synthetic construct
  source 1..75: mol_type = other DNA
cagcgcgaggagctggccgaggtgtatgtggactggctgatcgccgagcgtcccggcaaggtaaaaaccttgaag

SEQ ID NO: 142953 - DNA, 75 bp, synthetic construct
  source 1..75: mol_type = other DNA
acacaccgcgtattttgatcgtggaagatgaaccgaagctggggcagttgctcattgattatctgcgtgctgcga

SEQ ID NO: 142954 - DNA, 75 bp, synthetic construct
  source 1..75: mol_type = other DNA
tcttggaggacatacttcatctctgacaactgctcgtccgggacttcaaccgtcagtaacattgcttcaggtttc

SEQ ID NO: 142955 - DNA, 75 bp, synthetic construct
  source 1..75: mol_type = other DNA
gctggctactcatgcagccaatgaaggtttaagcgcagcggaaatcgttgagttaatccgcgaagaagccgcagc

SEQ ID NO: 142956 - DNA, 75 bp, synthetic construct
  source 1..75: mol_type = other DNA
ccgcaacgaaatcaggtactgaccttctggccatgctcaccaaagccacacaggaaggtaaagccgctgctgctg

SEQ ID NO: 142957 - DNA, 75 bp, synthetic construct
  source 1..75: mol_type = other DNA
ctcagccgatgccggctaccaaggagcgccacagcgcgaggagctggcagaggtggatgtggactggctgatcgc

SEQ ID NO: 142958 - DNA, 75 bp, synthetic construct
  source 1..75: mol_type = other DNA
gacgtgaagtgtatatcggtctggatactgctgtgacgctggggcatccaaccaccattgctgtcggtctgctac

SEQ ID NO: 142959 - DNA, 75 bp, synthetic construct
  source 1..75: mol_type = other DNA
ctcaatgagaattgtgaccccactattaaatcctcaatgctgggggtatcgctcgtattgccagtacataaaggg

SEQ ID NO: 142960 - DNA, 75 bp, synthetic construct
  source 1..75: mol_type = other DNA
attactttcgtgagggatatgacgtcacacgacagtgctgggtgctgacaaaagcgccgtcagtgaaggtggatt

SEQ ID NO: 142961 - DNA, 75 bp, synthetic construct
  source 1..75: mol_type = other DNA
aacggcgtactgatgattaacacggtggatgcgccgggggatatcactctggggcggtgccggatacctgcggag

SEQ ID NO: 142962 - DNA, 75 bp, synthetic construct
  source 1..75: mol_type = other DNA
agcgagtggctctgtactggcagtgtcggcggcgaaagacatcatgttcagccgtacgactggtgacactgtggc

SEQ ID NO: 142963 - DNA, 75 bp, synthetic construct
  source 1..75: mol_type = other DNA
ctgcggacggtgcttatgccacggcgaaataccgtgacggcagccgcagcgggaacaagatgcagttctcatgga

SEQ ID NO: 142964 - DNA, 75 bp, synthetic construct
  source 1..75: mol_type = other DNA
aatggcaccctgaaccactcacagtctgggggaaccagtggttctgtttctgccagtggctctgtgctggcggtt

SEQ ID NO: 142965 - DNA, 75 bp, synthetic construct
  source 1..75: mol_type = other DNA
acggcgctcatgccacggcgaaataccgtgatggcagccgaagcgggaataaggtgcagttatcctggagtaagc

SEQ ID NO: 142966 - DNA, 75 bp, synthetic construct
  source 1..75: mol_type = other DNA
tcgcctccatgcgtctgtttgcccgcttatccctggatagcgccatgccggatcgcaccaccatcatgaatttcc

SEQ ID NO: 142967 - DNA, 75 bp, synthetic construct
  source 1..75: mol_type = other DNA
tcgcctccatgcgactgtttgcccgcttatccctggatagcgccatgccggaacgcaccaccatcatgaatttcc

SEQ ID NO: 142968 - DNA, 75 bp, synthetic construct
  source 1..75: mol_type = other DNA
cgagcgtcccggcaaggtaaaaaccttgaagcagcatccgcgcaagaacaaaacggtcatcaacatcgaatacat

SEQ ID NO: 142969 - DNA, 75 bp, synthetic construct
  source 1..75: mol_type = other DNA
tcgcctccatgcgcctgtttgcccgcttatccctggatagcgccctgccggaacgcaccaccatcatgaatttcc

SEQ ID NO: 142970 - DNA, 75 bp, synthetic construct
  source 1..75: mol_type = other DNA
tcgcctccatgcgtctgtttgcccgcttatccctggatagcgccttgccggaacgcaccaccatcatgaatttcc

SEQ ID NO: 142971 - DNA, 75 bp, synthetic construct
  source 1..75: mol_type = other DNA
atgattcttacctctactgagtttatggctaatgcgccggaaggcgattttgaccgctcattctctgatggcgtt

SEQ ID NO: 142972 - DNA, 75 bp, synthetic construct
  source 1..75: mol_type = other DNA
agcacgatggtgtttatcgggattcagctgccggaggatgagattcgggcggcgtttgcggggttgaggaagtaa

SEQ ID NO: 142973 - DNA, 75 bp, synthetic construct
  source 1..75: mol_type = other DNA
atcaacgcccgtgcaccggtctacaccgtcacccacggcgacatcgacctgggcctgctgttcaacaccaacggt

SEQ ID NO: 142974 - DNA, 75 bp, synthetic construct
  source 1..75: mol_type = other DNA
atcatgctcaggaccagataatcgcgccaataagcgattcatagcagcagccaatccggctaccgtgctggcact

SEQ ID NO: 142975 - DNA, 75 bp, synthetic construct
  source 1..75: mol_type = other DNA
caacctgacggcctctggcgaagcgtttgatccgacgcaactgacggcggcacatccaacgttgccaatccccag

SEQ ID NO: 142976 - DNA, 75 bp, synthetic construct
  source 1..75: mol_type = other DNA
cgccgttagcgatcaggcgcgcgcgcaacagtatcagcagcagttaggacagaagttcggagtacccgggcgtgt

SEQ ID NO: 142977 - DNA, 75 bp, synthetic construct
  source 1..75: mol_type = other DNA
gtacgcaatctgctcctgtgcagcaatcagcaccgcaaggtggtatgggcggaggctatggtcccgctcctgatg

SEQ ID NO: 142978 - DNA, 75 bp, synthetic construct
  source 1..75: mol_type = other DNA
gatgttaaataagggtctggaaagccttgctgaaggggagaaaccgctgctccacagtgatcaaggatggcatta

SEQ ID NO: 142979 - DNA, 75 bp, synthetic construct
  source 1..75: mol_type = other DNA
cgcaagggcaactgccttgataatgcggtaatggagaacttctttggtcacctgaaagaagaaatgtactatcgc

SEQ ID NO: 142980 - DNA, 75 bp, synthetic construct
  source 1..75: mol_type = other DNA
cgacaccattgaagatcacatcatgcactcggaatacgctgaagtgccgcaggatgtggtagacgcggtactggc

SEQ ID NO: 142981 - DNA, 75 bp, synthetic construct
  source 1..75: mol_type = other DNA
cgacaccattgaagaccacatcatgcactcggaatatgcagaagtgccgcaggatgtggttgacgcggtactggc

SEQ ID NO: 142982 - DNA, 75 bp, synthetic construct
  source 1..75: mol_type = other DNA
agatccgcaaggtttggttgatataaatttataccccgaaagtgatcttatccattctgtagctgatgagattaa

SEQ ID NO: 142983 - DNA, 75 bp, synthetic construct
  source 1..75: mol_type = other DNA
aatgatgacggcgaaattatcgatccgtacaacggtctgggcgatctacaaaatcgcctgttacgtcatgtttcc

SEQ ID NO: 142984 - DNA, 75 bp, synthetic construct
  source 1..75: mol_type = other DNA
gcgtctgcgcgtgccaaatgaaattcgcgatttagccagactggtggctgagtttcacgatctcatccacacctt

SEQ ID NO: 142985 - DNA, 75 bp, synthetic construct
  source 1..75: mol_type = other DNA
tgaaattcgcgatttagccagactggtggctgagtttcacgatctcatccacacctttccaatgctgaacccgaa

SEQ ID NO: 142986 - DNA, 75 bp, synthetic construct
  source 1..75: mol_type = other DNA
cggggaaatcgtggcgtgggaaacggcctgcaggcctacagaggagctggtgaagcgcatgttaaataaggggct

SEQ ID NO: 142987 - DNA, 75 bp, synthetic construct
  source 1..75: mol_type = other DNA
aaatcgtctgttgcgccatgtttcccccgcttttggcgaagatccgttacgcgtattgcgcgtggcgcgttttgc

SEQ ID NO: 142988 - DNA, 75 bp, synthetic construct
  source 1..75: mol_type = other DNA
cgcgaggagctgacccgacggcggattgcggcggtggctggctggaaggaacagcgttgcccaaaacctgagtga

SEQ ID NO: 142989 - DNA, 75 bp, synthetic construct
  source 1..75: mol_type = other DNA
gacaacgcgatggcggagagcatcaatggtctttacaaagcggaggtaatacaccgtaagagctggaaaaaccgt

SEQ ID NO: 142990 - DNA, 75 bp, synthetic construct
  source 1..75: mol_type = other DNA
gcagcctgagttcacagataaaacactctccaggaaacccggggcggttcagtcttttggagggagtagacccac

SEQ ID NO: 142991 - DNA, 75 bp, synthetic construct
  source 1..75: mol_type = other DNA
atggcggagaagcttgccctgcttgaaaaactgggtatcacactggacgatctggaaaaactcttcaaatcccgc

SEQ ID NO: 142992 - DNA, 75 bp, synthetic construct
  source 1..75: mol_type = other DNA
accgggaggcaagttccaaagcatcggatggcgtgtcaaaagcggcctttcccgatccgtgctggacaccacctc

SEQ ID NO: 142993 - DNA, 75 bp, synthetic construct
  source 1..75: mol_type = other DNA
gtgtccgggcaaaacgttgcctactatcacaatatagcaaaacaggaaccaaaggtagtattcgaactggtgagg

SEQ ID NO: 142994 - DNA, 75 bp, synthetic construct
  source 1..75: mol_type = other DNA
tggatgcttattataaaaaatgttcatctgatatgcctgctgttgcaggaaaagcatttactgaagatagtgata

SEQ ID NO: 142995 - DNA, 75 bp, synthetic construct
  source 1..75: mol_type = other DNA
gcaggcgttaaaaaattacctgaccgagcaccccgaagcgaccgatccccgggattatttgcagtcggctaaatc

SEQ ID NO: 142996 - DNA, 75 bp, synthetic construct
  source 1..75: mol_type = other DNA
agctgaaaaatgccttctcgcaggcgttaaaaaattacctgaccgagcaccctgaagcgaccgatccccgggatt

SEQ ID NO: 142997 - DNA, 75 bp, synthetic construct
  source 1..75: mol_type = other DNA
gttgagctgccgtttgtcgagttcgccaaactctgcgggatcccctccagtcagtcatcacgtaagcttcgtgaa

SEQ ID NO: 142998 - DNA, 75 bp, synthetic construct
  source 1..75: mol_type = other DNA
ccgccataaggttatcggcgataaagttgagctgccctttgtcgagttcgctaaactctgtgggatcccctccag

SEQ ID NO: 142999 - DNA, 75 bp, synthetic construct
  source 1..75: mol_type = other DNA
gaatatatcacccatctggtacagtcagcctactacgatactgagcgggatattgtgcagttacaggccgatccc

SEQ ID NO: 143000 - DNA, 75 bp, synthetic construct
  source 1..75: mol_type = other DNA
cgtctgggcgtctttgtaccgacccttaaatcactgaagaacagtaaaaaaaatacactgtcacgtactgatgcc

SEQ ID NO: 143001 - DNA, 75 bp, synthetic construct
  source 1..75: mol_type = other DNA
cggcgatgaagctgccattcctgccgttgttaatggccagactgacgatgtgctgatccttgagtctgaagccat

SEQ ID NO: 143002 - DNA, 75 bp, synthetic construct
  source 1..75: mol_type = other DNA
tcattggcagcatagaaaccagcattaaaacagtgatgatcctgccatcggaaagcgtggaagggctgcgggtgc

SEQ ID NO: 143003 - DNA, 75 bp, synthetic construct
  source 1..75: mol_type = other DNA
acaccttacacaaaggcaccggcaccgcttttcatgccatcatgcaggaaatcagtgttcccctacaccgacacc

SEQ ID NO: 143004 - DNA, 75 bp, synthetic construct
  source 1..75: mol_type = other DNA
tatattttgcgcatggtgcctaaaggtacacatgatgtgaagaagtttattaaaccggcagaattgctgggctgg

SEQ ID NO: 143005 - DNA, 75 bp, synthetic construct
  source 1..75: mol_type = other DNA
accataacgtagaccacgaagagatcgctaaatttgaagccgtcgcctcccgctggtgggatcttgaaggtgagt

SEQ ID NO: 143006 - DNA, 75 bp, synthetic construct
  source 1..75: mol_type = other DNA
tgaatcagctcccccggactcaccacaactggcagcggtgacctcgggccgcgacttactcgaccaggccaggtt

SEQ ID NO: 143007 - DNA, 75 bp, synthetic construct
  source 1..75: mol_type = other DNA
cctgcgtatcaacggcaaaacggctgctgacgtagagcgggcgctaaatgcctcgcaactcacccgcgacgatat

SEQ ID NO: 143008 - DNA, 75 bp, synthetic construct
  source 1..75: mol_type = other DNA
gccgccgcgttaaccgctcagggtttgcagcctgtatggaaagactgggacagctatctgggacgcgactcgcaa

SEQ ID NO: 143009 - DNA, 75 bp, synthetic construct
  source 1..75: mol_type = other DNA
atatcgccagagaaagcgccgctattcgggaaatgggctttgagcatctgttgctggtcactggtgaacatcagg

SEQ ID NO: 143010 - DNA, 75 bp, synthetic construct
  source 1..75: mol_type = other DNA
atgaatgaacctcgttgtattgctcagttactgcgtaacgaaagccccagggcgattgacttcaccatcacccac

SEQ ID NO: 143011 - DNA, 75 bp, synthetic construct
  source 1..75: mol_type = other DNA
ggtcaacgcaacagttatgtgaaaacatggggttgcggaggttttttgaatgagacgaacatttacagcagagga

SEQ ID NO: 143012 - DNA, 75 bp, synthetic construct
  source 1..75: mol_type = other DNA
agtggctatctggaaccactggcccaacgggcgcagcgtctgacccgtcagcgatttggcaacacagttagtttc

SEQ ID NO: 143013 - DNA, 75 bp, synthetic construct
  source 1..75: mol_type = other DNA
agcacaatggtgtttatcgggattcagttgccggaggaagagattcgggcagcgtttgcggggttgaggaagtaa

SEQ ID NO: 143014 - DNA, 75 bp, synthetic construct
  source 1..75: mol_type = other DNA
atgccagcgctacctgctggacggcgtgattgcgctggtggatgcggtacatgccgatgagcagatgaaccagtt

SEQ ID NO: 143015 - DNA, 75 bp, synthetic construct
  source 1..75: mol_type = other DNA
attggataacatatgggccatctgggcaccccatttctaatatgcaaggtacgccagaaaaacccagtgatataa

SEQ ID NO: 143016 - DNA, 75 bp, synthetic construct
  source 1..75: mol_type = other DNA
aaggtgtggagattcgtgaggagctgacccgacggcggattgcggcggtagccagctggaaggaacaacgttgcc

SEQ ID NO: 143017 - DNA, 75 bp, synthetic construct
  source 1..75: mol_type = other DNA
ggaatcaaaaaagaataaaactcagtcttgggggactcagtccggtagaataccggactgagcatcaaaaagccg

SEQ ID NO: 143018 - DNA, 75 bp, synthetic construct
  source 1..75: mol_type = other DNA
cagtggtatctgcatcaggcgctggccaaggcgggcgcaccgtgggacagatggacagcggttatccgtcaggac

SEQ ID NO: 143019 - DNA, 75 bp, synthetic construct
  source 1..75: mol_type = other DNA
ccgctgctccacagtgatcaagggtggcattaccggataaaaagttatcagtctgccctggcagacaaagggtta

SEQ ID NO: 143020 - DNA, 75 bp, synthetic construct
  source 1..75: mol_type = other DNA
gtgacctgcatggagatgctggagcacgttcccgatcctcagtcagtggtcagagcctgtgcgcaactggtgaaa

SEQ ID NO: 143021 - DNA, 75 bp, synthetic construct
  source 1..75: mol_type = other DNA
gtgacctgcatggagatgctggagcacgtccccgatccgcagtcagtagtcagagcctgtgcgcaactggtgaaa

SEQ ID NO: 143022 - DNA, 75 bp, synthetic construct
  source 1..75: mol_type = other DNA
ctcctgtgcgcctgaagaaataccggtcttaccggggaaatatgggactcgctgcagaaaatatccttcagcggc

SEQ ID NO: 143023 - DNA, 75 bp, synthetic construct
  source 1..75: mol_type = other DNA
gtagaagagctggaaaatgccgttaacgaatacataacttactggaatcaaaaaagaataaaactcagtcttggg

SEQ ID NO: 143024 - DNA, 75 bp, synthetic construct
  source 1..75: mol_type = other DNA
cgttaacgaatacataacttactggaatcaaaaaagaataaaactcagtcttggggggactcagcccggtagaat

SEQ ID NO: 143025 - DNA, 75 bp, synthetic construct
  source 1..75: mol_type = other DNA
ctggttgaggaactgcgcgaacgcggcgttaattttcgcagcctgacggatgccattgataccagcacgccgatg

SEQ ID NO: 143026 - DNA, 75 bp, synthetic construct
  source 1..75: mol_type = other DNA
gatatccgcatcccgtatgcgaccgacccggcgggaaaccggctgccggacccggagctacacccggacagcacg

SEQ ID NO: 143027 - DNA, 75 bp, synthetic construct
  source 1..75: mol_type = other DNA
aaagctaagtaatagttttttacaaagtgatcttggtgaagcgataatacaagctagagattacgccaggaaatt

SEQ ID NO: 143028 - DNA, 75 bp, synthetic construct
  source 1..75: mol_type = other DNA
gggggctgaagttgccaacgttgcgccagcgcctgttccgctgtgtgagtatccgtgagaacgatgacggcacgt

SEQ ID NO: 143029 - DNA, 75 bp, synthetic construct
  source 1..75: mol_type = other DNA
caccgtttcagcggcctgccgccgggggaatacaccctgacggtcagggcgataaacagttatggtcagcagggg

SEQ ID NO: 143030 - DNA, 75 bp, synthetic construct
  source 1..75: mol_type = other DNA
acccgctgaagtgcatcctgtgcgggagtcagatgcattttacggggctgaagcggggctatcgttacagatgca

SEQ ID NO: 143031 - DNA, 75 bp, synthetic construct
  source 1..75: mol_type = other DNA
tgcgtgtaagtcgagcaaaaactttctattatcaaatggaaaaacttatttcaccgctttgttccgaagctatta

SEQ ID NO: 143032 - DNA, 75 bp, synthetic construct
  source 1..75: mol_type = other DNA
ggcgttcaagtgtgctgaatggtgaagtactaaaagggcttaatgataaagatacaaaaagaatagttgataagt

SEQ ID NO: 143033 - DNA, 75 bp, synthetic construct
  source 1..75: mol_type = other DNA
gaggtgagcgcagctgacggtcagtatctggcgcaggcgaaatgggacacgccgaaggtggtgaagggcgtgagc

SEQ ID NO: 143034 - DNA, 75 bp, synthetic construct
  source 1..75: mol_type = other DNA
aaagccaaaattattggcaatggcgcgaaactggaagaaattatcgcctgtctggataatttcgatttgtgggtg

SEQ ID NO: 143035 - DNA, 75 bp, synthetic construct
  source 1..75: mol_type = other DNA
gtgcataaattcagccacggcaccaccggttccccggacacccttcgcggaatgtcggtcgaaatgctgttcgac

SEQ ID NO: 143036 - DNA, 75 bp, synthetic construct
  source 1..75: mol_type = other DNA
agtatcaggtactggcccgctgggacacgccgaaggtggtgaagggggtgagctttatgcttcgcctgaccgtgg

SEQ ID NO: 143037 - DNA, 75 bp, synthetic construct
  source 1..75: mol_type = other DNA
gacatcgacggtgaacctgattaacggcagcggtaagccggtgcgcgtggacatcactgcacaccccgccccgga

SEQ ID NO: 143038 - DNA, 75 bp, synthetic construct
  source 1..75: mol_type = other DNA
gagatcccagaacatggatcagtgatttaatggtctcggtaacgaaaaaagccgcatccggtatcagtatcagtt

SEQ ID NO: 143039 - DNA, 75 bp, synthetic construct
  source 1..75: mol_type = other DNA
atcccattcagatatcactcatctgtacgaacggcgatcagccctgtcgcctggcacccggtgatatctgcgttc

SEQ ID NO: 143040 - DNA, 75 bp, synthetic construct
  source 1..75: mol_type = other DNA
aggtccagtccgtcaccgacggcgtgaaggtgaaagtgagccgtgttcctgacggcgttgctgaatacagcgtgt

SEQ ID NO: 143041 - DNA, 75 bp, synthetic construct
  source 1..75: mol_type = other DNA
tcagcagggtattttcatccgtcattgatatgccagcgggacacggccatgtcaccctgactttcaatgtttctt

SEQ ID NO: 143042 - DNA, 75 bp, synthetic construct
  source 1..75: mol_type = other DNA
gaaggtgatattgtcaaaacggtgggaaaagcctttccgagaaatggcagttatgccagcggtacaataacggtc

SEQ ID NO: 143043 - DNA, 75 bp, synthetic construct
  source 1..75: mol_type = other DNA
cgagctgacggaggataacgccagcaaactggaggagttttcgaaagagtggaaagacgccaacgataaatggaa

SEQ ID NO: 143044 - DNA, 75 bp, synthetic construct
  source 1..75: mol_type = other DNA
agcgtgggcgcagaagggcttcgccatgtgccgggcgatgtcattgaaatctgtgatgatgactatgccggtatc

SEQ ID NO: 143045 - DNA, 75 bp, synthetic construct
  source 1..75: mol_type = other DNA
gaacggggttgagattttccatgaaccggcaacggatgtcagccgggtgttctcatcggtgatagatatgccggc

SEQ ID NO: 143046 - DNA, 75 bp, synthetic construct
  source 1..75: mol_type = other DNA
cagttatatccattctggtgaagataacaagttcgatgattttatgcgtcaacatcgattcagcaaggtggattt

SEQ ID NO: 143047 - DNA, 75 bp, synthetic construct
  source 1..75: mol_type = other DNA
cgtggacaagtgggcgctgtatgccatcgggcagtactgtgaccagacggtcccggatggtttcgggggcacaga

SEQ ID NO: 143048 - DNA, 75 bp, synthetic construct
  source 1..75: mol_type = other DNA
gcgaaaaagaatgaggaccagacactggccatcgcgcaggtgagccagaaagtggaccgggtgagcagtgaaatc

SEQ ID NO: 143049 - DNA, 75 bp, synthetic construct
  source 1..75: mol_type = other DNA
atcacgaacacagcacaggtggaaaaatctgcccgttatctggggaccggcagtcagtggactgtccaggggagc

SEQ ID NO: 143050 - DNA, 75 bp, synthetic construct
  source 1..75: mol_type = other DNA
acaccgccggatggttttgaatcctccggctccgagactgtgcttggtactgaagtgaaatatgacacgccgatc

SEQ ID NO: 143051 - DNA, 75 bp, synthetic construct
  source 1..75: mol_type = other DNA
accgacccgcagaacggctggcagacttccacggaactggtggaagacccggacgccatcctgcgctacgggcgc

SEQ ID NO: 143052 - DNA, 75 bp, synthetic construct
  source 1..75: mol_type = other DNA
aaggcaatcagcgggcaggtaatatcaccgactgtacggtgattgtgaccaaaaaagccgcttccggcatcagta

SEQ ID NO: 143053 - DNA, 75 bp, synthetic construct
  source 1..75: mol_type = other DNA
tgaaggcgatctcgttaaaacagtgggcaaagctttcccccgggattcccgtgcaccggagcggtggccatcagg

SEQ ID NO: 143054 - DNA, 75 bp, synthetic construct
  source 1..75: mol_type = other DNA
gaacctgcgaccaccaccttccggattgccgcaccggcagcaccgtcgcggattgagctgacgccggggtatttt

SEQ ID NO: 143055 - DNA, 75 bp, synthetic construct
  source 1..75: mol_type = other DNA
ggtatcccacagccagtatcagtgatttgctggttgtggtgatgaagaaatccacagcaggtatcacgattagct

SEQ ID NO: 143056 - DNA, 75 bp, synthetic construct
  source 1..75: mol_type = other DNA
tgtgaatgcgaacgccgggacgctcaacaatgtcacgataaatgaaaactgtcgggttctgggaaaactgtctgc

SEQ ID NO: 143057 - DNA, 75 bp, synthetic construct
  source 1..75: mol_type = other DNA
aggtgaaagtgaaccgggttcctgacggcgttgcagaatacagtgtgtgggggctgaagctgccgacgctgcgcc

SEQ ID NO: 143058 - DNA, 75 bp, synthetic construct
  source 1..75: mol_type = other DNA
acaccaacaaccagtatcagcgatctgctggttgtggtgatgaagaaatccacagcaggtatcagtatcagctga

SEQ ID NO: 143059 - DNA, 75 bp, synthetic construct
  source 1..75: mol_type = other DNA
gggggctgaagttgccgacgttgcgtcagcgcctgttccgctgtgtgagtatccgtgataacgatgacggcacgt

SEQ ID NO: 143060 - DNA, 75 bp, synthetic construct
  source 1..75: mol_type = other DNA
ttgttattttctctcgaagaaaagaaagaggcggcaggtatgacagtaaataacattaataatttcaacggaaat

SEQ ID NO: 143061 - DNA, 75 bp, synthetic construct
  source 1..75: mol_type = other DNA
gcaaaatcccataacagcaggtgacttcaatactcttgagcgtcaactaaaagaatatggcattgaagacagcga

SEQ ID NO: 143062 - DNA, 75 bp, synthetic construct
  source 1..75: mol_type = other DNA
gggtatcggtgccggtattgagaatacgccagcaggaatgcagagtcaggtgctgctggcggcagacaggattgc

SEQ ID NO: 143063 - DNA, 75 bp, synthetic construct
  source 1..75: mol_type = other DNA
ccgcaatgcggatatcagtggatccatcacggcgaataccggcacgctcaataatgtcaccattaacgagaactg

SEQ ID NO: 143064 - DNA, 75 bp, synthetic construct
  source 1..75: mol_type = other DNA
tcagattaaggggaaactgtcagccaaccagattgaaggcgatattgtcaaaacggtcagcaagtctttcccccg

SEQ ID NO: 143065 - DNA, 75 bp, synthetic construct
  source 1..75: mol_type = other DNA
gcgggacaagatcggctcaaacctcgctggtggcctggctggttcgctggacagcctgcggcggcgcatcctcga

SEQ ID NO: 143066 - DNA, 75 bp, synthetic construct
  source 1..75: mol_type = other DNA
cactcaactggaagagaatatcggacaactggaagaagacatccgtcagcggatggacacggatattgcggaagt

SEQ ID NO: 143067 - DNA, 75 bp, synthetic construct
  source 1..75: mol_type = other DNA
caattatctggctgcgagataagctgttggagctaaaagattctgtcggtgggtggcagaactcactggaaattt

SEQ ID NO: 143068 - DNA, 75 bp, synthetic construct
  source 1..75: mol_type = other DNA
aagacttccttgtttcgctgggattcgatatcgatcaggctggcgctaataagtttgaagccgtgctgaaaggcg

SEQ ID NO: 143069 - DNA, 75 bp, synthetic construct
  source 1..75: mol_type = other DNA
accctgtcggcaagggacggtagtccctggctacatggcgttacagcagcctggcgggcaggcgagcaggagcag

SEQ ID NO: 143070 - DNA, 75 bp, synthetic construct
  source 1..75: mol_type = other DNA
ccgctgacggatatggacggtaatcccgtgatacatggcgtgacagccgtctggcgtgcaggggagcaggagcag

SEQ ID NO: 143071 - DNA, 75 bp, synthetic construct
  source 1..75: mol_type = other DNA
gtaaggctttcccgcgaaatggaagttatgccagtggcactataaccgtcacggtttatgatgatcagggattcg

SEQ ID NO: 143072 - DNA, 75 bp, synthetic construct
  source 1..75: mol_type = other DNA
agtcagatattccaggtgctgagccggaacaatatgcacaggctacgaaacgaggagaacggaataacaatccgg

SEQ ID NO: 143073 - DNA, 75 bp, synthetic construct
  source 1..75: mol_type = other DNA
acggaaacaccaaacgggacggttacagtcaccatcagcgatgatcataactttgaccgtcaaatcattattccg

SEQ ID NO: 143074 - DNA, 75 bp, synthetic construct
  source 1..75: mol_type = other DNA
gcacttatgccagtggcaccatcacggtaagaatcagtgatgatcagaaatttgaccggcaggtcatgataccgc

SEQ ID NO: 143075 - DNA, 75 bp, synthetic construct
  source 1..75: mol_type = other DNA
tggaggacacggaggaaggcaagctgagccagtttctggttgccgctaaccgtatcgcgtttattgacccggcaa

SEQ ID NO: 143076 - DNA, 75 bp, synthetic construct
  source 1..75: mol_type = other DNA
gacgctaaacaacgtcacgataaatgagaactgtacgattaagggcatgctggaggcgaatcaggtcagaggcga

SEQ ID NO: 143077 - DNA, 75 bp, synthetic construct
  source 1..75: mol_type = other DNA
tccgccggtattatttcgtggtacgaaacaccagaatttcaacagtcataaccaacagtcatactggtattcaac

SEQ ID NO: 143078 - DNA, 75 bp, synthetic construct
  source 1..75: mol_type = other DNA
tttcaaaggcctgataaccgaatcccatctcggtaaagagctgctggaaaaagtcgacctgacggaggataacgc

SEQ ID NO: 143079 - DNA, 75 bp, synthetic construct
  source 1..75: mol_type = other DNA
ttatctctacctgggcacctgcgtctgataataacaacacaactgcgtatatcagggctgtatcgcaacgactgg

SEQ ID NO: 143080 - DNA, 75 bp, synthetic construct
  source 1..75: mol_type = other DNA
cggtgtatgacccgacggtgcagtttgagttctggttttcggaaaaacgcatcacgaacacggcacaggtggaaa

SEQ ID NO: 143081 - DNA, 75 bp, synthetic construct
  source 1..75: mol_type = other DNA
catgtgggctgtgaagctgcagcagatgcaggacggacgcctttatatcgcgggtattggtgccggtattgagaa

SEQ ID NO: 143082 - DNA, 75 bp, synthetic construct
  source 1..75: mol_type = other DNA
cgggagaatagcgatacttattcgtcatgccgcctgatagtgaagaaaaacggggctgaaatttataaccgaacg

SEQ ID NO: 143083 - DNA, 75 bp, synthetic construct
  source 1..75: mol_type = other DNA
accgacgatcgccttatcacggggcagaatcccgcttcagcacatggggttggtgtggcgctgttaaatgcactc

SEQ ID NO: 143084 - DNA, 75 bp, synthetic construct
  source 1..75: mol_type = other DNA
tgccggtatcagcgccggcggtatgtactgtccggaatgcggcacggttcactggccggacggagtcaccccgcc

SEQ ID NO: 143085 - DNA, 75 bp, synthetic construct
  source 1..75: mol_type = other DNA
cggctcccaccattaccagcggtggaaatccgccggcattttccctgacaccagacggaaagctgaccgctaaaa

SEQ ID NO: 143086 - DNA, 75 bp, synthetic construct
  source 1..75: mol_type = other DNA
taccccaaagagcagtggatgatttgttcagaataaactctcttattgaattggatcggtgtttgtctcagataa

SEQ ID NO: 143087 - DNA, 75 bp, synthetic construct
  source 1..75: mol_type = other DNA
aaatagcccgctgcacggagcgggaatttgcaaccatttttgccggtatcagcgccggcggcatgtactgcccgg

SEQ ID NO: 143088 - DNA, 75 bp, synthetic construct
  source 1..75: mol_type = other DNA
cggtttacggtccggtggacggcctgaaaagcgtgctgctgaacggtacgccggtgctggacagtgaggggaatg

SEQ ID NO: 143089 - DNA, 75 bp, synthetic construct
  source 1..75: mol_type = other DNA
gggcgataaacagctatgggcagcagggtgaagccgccatcaccacgttccggattaacgcaccggcagcacctg

SEQ ID NO: 143090 - DNA, 75 bp, synthetic construct
  source 1..75: mol_type = other DNA
tctaccggcgcgaacaactggacaccgacgacgtacatcagtgatttactggttgtggtgatgaaaaaatccacg

SEQ ID NO: 143091 - DNA, 75 bp, synthetic construct
  source 1..75: mol_type = other DNA
ggactgtttcagtttatggatggcacggcgcgcgacatgggcctgcgtgggaatgatgtattcgacccggaaaag

SEQ ID NO: 143092 - DNA, 75 bp, synthetic construct
  source 1..75: mol_type = other DNA
gcgaggctgcccgtttgactgttgatcgtcaaaagggcgtgaattcacagttaacccagcaactccccgcaggac

SEQ ID NO: 143093 - DNA, 75 bp, synthetic construct
  source 1..75: mol_type = other DNA
ccgggcggcaaatgcctgggggcaacagggcgatcctgcatcggtatcgttccggatcgccgcaccggcaacgcc

SEQ ID NO: 143094 - DNA, 75 bp, synthetic construct
  source 1..75: mol_type = other DNA
aagagatgaaataaaaaaccgacagcaggctgctaatggttatcttgaaaagatctcagacgggattgccaaaat

SEQ ID NO: 143095 - DNA, 75 bp, synthetic construct
  source 1..75: mol_type = other DNA
aatacggttcttgctgcacgcttaccaacaaatgaccagaacacggaattgcagcgtaacgcgctggagtgcgca

SEQ ID NO: 143096 - DNA, 75 bp, synthetic construct
  source 1..75: mol_type = other DNA
acactatcggcaggagacacgctggttgtctggaagctggacagactggggcgcagtatgcggcatcttgttacg

SEQ ID NO: 143097 - DNA, 75 bp, synthetic construct
  source 1..75: mol_type = other DNA
acattatcggagggggatacactggtggtctggaagctggaccggctggggcgtagtatgcggcatctggtcatt

SEQ ID NO: 143098 - DNA, 75 bp, synthetic construct
  source 1..75: mol_type = other DNA
ggatgtgagcagatttttgaggacaaaatcagtggcactaagtccgacagaccggggctgaaaaaactactcagg

SEQ ID NO: 143099 - DNA, 75 bp, synthetic construct
  source 1..75: mol_type = other DNA
gctgacaaaagaacagcatgagcaaatagcaaggctaatcaaaaacgggcacgacagaaaacaactggcaataat

SEQ ID NO: 143100 - DNA, 75 bp, synthetic construct
  source 1..75: mol_type = other DNA
cggctccgcccgggtgatgtgctggtggtctggaaactggatcggctgggccgcagcgtgcgcgatctgattacg

SEQ ID NO: 143101 - DNA, 75 bp, synthetic construct
  source 1..75: mol_type = other DNA
ccattctgggcgcggaggcgttgtgccgttgggtgtctgcggagcgggggatcatttcaccgctgaagttcatta

SEQ ID NO: 143102 - DNA, 75 bp, synthetic construct
  source 1..75: mol_type = other DNA
ctcaacggatcaaatcgaggctctgaaaattcgtgaaggcgatgcgaaagagattatcagcatcaaaaattcgat

SEQ ID NO: 143103 - DNA, 75 bp, synthetic construct
  source 1..75: mol_type = other DNA
actaaatcagtaagttggcagcatcaccagacatcagcagtgccaaataatgcattgttcgaaatctatttttat

SEQ ID NO: 143104 - DNA, 75 bp, synthetic construct
  source 1..75: mol_type = other DNA
cagcgtattgcactgatttttgacgtgggcgtttctaccatttatagaaaatttccggcgaataagagcaattaa

SEQ ID NO: 143105 - DNA, 75 bp, synthetic construct
  source 1..75: mol_type = other DNA
tgctattgataccagcacgccgatggggcgtttcttttttcacgtcatgggggctttagcagaaatggaacgtga

SEQ ID NO: 143106 - DNA, 75 bp, synthetic construct
  source 1..75: mol_type = other DNA
gccatttttagattcagtgggactggtgctggataataataaatattatctcttttcgcggcgggcgaacgataa

SEQ ID NO: 143107 - DNA, 75 bp, synthetic construct
  source 1..75: mol_type = other DNA
atgaaatggttaaaaagttactggttgccgctttcggttctggcgtttcttgtaatggttgatgtgattttccct

SEQ ID NO: 143108 - DNA, 75 bp, synthetic construct
  source 1..75: mol_type = other DNA
ttcctcgccagaaggtagcgatcatctatgatattggtgtatcgactttgtataagaggtttccagccaggatta

SEQ ID NO: 143109 - DNA, 75 bp, synthetic construct
  source 1..75: mol_type = other DNA
ccaggatggcggcgaaaactgggcgaagatccgcgacgaaatgggcctggctatggaagaaggttgcggtatcta

SEQ ID NO: 143110 - DNA, 75 bp, synthetic construct
  source 1..75: mol_type = other DNA
gctggtggcagcaaataccagcggcggcgtgaccggcaagatgatctccccgcaatctatcgccgtggcctgcgc

SEQ ID NO: 143111 - DNA, 75 bp, synthetic construct
  source 1..75: mol_type = other DNA
cgcaatggcgggacgccagttgccgttcctgtcggtgctggtgccgttctggctggtggcgatgatggacggctg

SEQ ID NO: 143112 - DNA, 75 bp, synthetic construct
  source 1..75: mol_type = other DNA
ttgtcgcggcggtgttcctgtataaattaaccgttgccagcgggcagttcgatattatccgcagctcggttatct

SEQ ID NO: 143113 - DNA, 75 bp, synthetic construct
  source 1..75: mol_type = other DNA
tggcggaactggtggtcttcggtcgtctggccggtgaacaagcgacagagcgtgcagcaactgccggtaatggca

SEQ ID NO: 143114 - DNA, 75 bp, synthetic construct
  source 1..75: mol_type = other DNA
ggatgtgaacagatatttgaagataaattaagcgggacaaagacagaccgaccgggattaaaacgcgctttaaag

SEQ ID NO: 143115 - DNA, 75 bp, synthetic construct
  source 1..75: mol_type = other DNA
gacgaattggtggacgtcgtcccaaacttacaccagaacaatgggcgcaggctgggcgattaattgcatcaggcg

SEQ ID NO: 143116 - DNA, 75 bp, synthetic construct
  source 1..75: mol_type = other DNA
atcatgacagcttcgaatatcactttcacgatacagtagcgggtggcgactggttatgtgagcaggatgtcgtgg

SEQ ID NO: 143117 - DNA, 75 bp, synthetic construct
  source 1..75: mol_type = other DNA
tgcggtatctaccgtacgccggaactgatgcagaaaaccatcgacaagctggcagagctgcaggaacgcttcaag

SEQ ID NO: 143118 - DNA, 75 bp, synthetic construct
  source 1..75: mol_type = other DNA
tcacgatacagtagcgggtggcgactggttatgtgagcaggatgttgtggattatttcgtccaccactgcccaac

SEQ ID NO: 143119 - DNA, 75 bp, synthetic construct
  source 1..75: mol_type = other DNA
gcattaacttccggagtctcactgactccatcgataccagtacaccaatggggcgctttttctttcacgtaatgg

SEQ ID NO: 143120 - DNA, 75 bp, synthetic construct
  source 1..75: mol_type = other DNA
cgtgctggtggaggagttgtgcgaacaaggtgttaattttagtagttatgttattacaggtgggggatttctccc

SEQ ID NO: 143121 - DNA, 75 bp, synthetic construct
  source 1..75: mol_type = other DNA
agatcagcggcactaagtccgaccgaccgggactgaaaaaactgctcagaacattatcagcaggtgacactctgg

SEQ ID NO: 143122 - DNA, 75 bp, synthetic construct
  source 1..75: mol_type = other DNA
atgcttattggctatgtacgcgtgtcaacaagtgaccagaacacggaattgcagcgtaacgcgctggagtgcgca

SEQ ID NO: 143123 - DNA, 75 bp, synthetic construct
  source 1..75: mol_type = other DNA
tggaaggaggtgccagtaaagcgtcagtatgtcgcgcattcagtgtgccacgctcaacgctcaccgatactctac

SEQ ID NO: 143124 - DNA, 75 bp, synthetic construct
  source 1..75: mol_type = other DNA
tcgtatggaagttagatcgtcttgggcgcagcatgcgtcacttggttgtgctggtggaagagctgcgtgacagag

SEQ ID NO: 143125 - DNA, 75 bp, synthetic construct
  source 1..75: mol_type = other DNA
aaggaattgatagaagcggattctacaagctaatgaagaaatacgaaattcaggtaaagattaacgttcaagttt

SEQ ID NO: 143126 - DNA, 75 bp, synthetic construct
  source 1..75: mol_type = other DNA
aaagtgagatgcgcaaccagctgcttgccgaacaacgccgaaaggcgcaggccgagcaaatgcgcacagctccaa

SEQ ID NO: 143127 - DNA, 75 bp, synthetic construct
  source 1..75: mol_type = other DNA
gcaactggccattatctacggtgtagggttatcgacgctgtaccggtattttccggtagatggtcagagggagga

SEQ ID NO: 143128 - DNA, 75 bp, synthetic construct
  source 1..75: mol_type = other DNA
atgccaattatcgactatcccgactggttgccgttggcgcaaaaggccagcaaaaacatgactctcgataccggg

SEQ ID NO: 143129 - DNA, 75 bp, synthetic construct
  source 1..75: mol_type = other DNA
ttgttgaactgccgccgccgtgggattcctggctggatatcgttgtcactggctatccggacggacgcgatccgg

SEQ ID NO: 143130 - DNA, 75 bp, synthetic construct
  source 1..75: mol_type = other DNA
gggccctggctgaaatggaacgtgaactgattgttgaacgaacaaaagcaggactggaagctgctcgcgcacagg

SEQ ID NO: 143131 - DNA, 75 bp, synthetic construct
  source 1..75: mol_type = other DNA
ggtgaattcagacattttagcgagcgtgcggtcctgaaggacggtttcttactgcatattaatgtttcgccctgg

SEQ ID NO: 143132 - DNA, 75 bp, synthetic construct
  source 1..75: mol_type = other DNA
aagaaaatggcctgaaggcgaacagcctctgtgttgagatcactgaaaccgtgatcgagcgaattaatgaacatt

SEQ ID NO: 143133 - DNA, 75 bp, synthetic construct
  source 1..75: mol_type = other DNA
caacaaatgaccagaacaccgatttgcaacgtaatgcactgaattgcgcgggatgtgagcagatttttgaggaca

SEQ ID NO: 143134 - DNA, 75 bp, synthetic construct
  source 1..75: mol_type = other DNA
cgtcggcaattttctgaaatgaccgagctggttaatacgctggcgtttttgcccgactcaacggatcaaatcgag

SEQ ID NO: 143135 - DNA, 75 bp, synthetic construct
  source 1..75: mol_type = other DNA
gtaaatggcccccttgttgatgaggcaggacgcgtcatctttgccgattttaatccgtcgcagcgcccgtggtca

SEQ ID NO: 143136 - DNA, 75 bp, synthetic construct
  source 1..75: mol_type = other DNA
gagttcagagcgtttagtcatcatgtagagcttaagcatgatttcttgctgcatatcaatgtttcgccttggcag

SEQ ID NO: 143137 - DNA, 75 bp, synthetic construct
  source 1..75: mol_type = other DNA
tctgtttctacaggatatacaaaggagtttggtgctaaagctggtgcttcaattggtattgactttggcccatat

SEQ ID NO: 143138 - DNA, 75 bp, synthetic construct
  source 1..75: mol_type = other DNA
ttctcccaaaccaacgtttatgaaaatgcagagataacggctaactggcatcatccccggtttttattcagggga

SEQ ID NO: 143139 - DNA, 75 bp, synthetic construct
  source 1..75: mol_type = other DNA
acaaaatcagtggcacaaagtccgacagaccagggctgaaaaaactgctcaggacactaacggcaggagacactc

SEQ ID NO: 143140 - DNA, 75 bp, synthetic construct
  source 1..75: mol_type = other DNA
gggctttagcggaaatggagcgtgaattaatagttgaacgaacactggccggacttgaagcagcacgtgcacagg

SEQ ID NO: 143141 - DNA, 75 bp, synthetic construct
  source 1..75: mol_type = other DNA
gggctggcagcagcacgcgcacaaggacgcattggcggacgtcgcccgaagttgacaaaagaacaacacgagcaa

SEQ ID NO: 143142 - DNA, 75 bp, synthetic construct
  source 1..75: mol_type = other DNA
tttttgaggataaaatcagtggcactaagtccgacagaccagggttgaaaaaactgctcaggacactatcggcag

SEQ ID NO: 143143 - DNA, 75 bp, synthetic construct
  source 1..75: mol_type = other DNA
gcaggctatgaagcagcaaaaggtgatgttaatcgccctgattgtcatctgtttaaccgtcattgttacggcact

SEQ ID NO: 143144 - DNA, 75 bp, synthetic construct
  source 1..75: mol_type = other DNA
ggtaacgagaaaagacctctgtgaggttcacatccgaactggccagacggaggttgctgttttcactgcttacga

SEQ ID NO: 143145 - DNA, 75 bp, synthetic construct
  source 1..75: mol_type = other DNA
aggaaagacctctgcgaggtaggaatccgaaccggtcagacggaggtcgctgtcttcgtagactacgaatctgag

SEQ ID NO: 143146 - DNA, 75 bp, synthetic construct
  source 1..75: mol_type = other DNA
gggaatacaccctgacagtcagggcaattaacagttatggccagcagggggaaccggccaccaccacgttcagga

SEQ ID NO: 143147 - DNA, 75 bp, synthetic construct
  source 1..75: mol_type = other DNA
ggcagcggtaagccggtgagcgtggccatcactgcacaccccgcgccggaccggatacaggtcagtaccctgcct

SEQ ID NO: 143148 - DNA, 75 bp, synthetic construct
  source 1..75: mol_type = other DNA
tgctggtgatttccagacgttcgcgcttgatatcggctctgtagaatacgacgcttttatcaaagctgacggtaa

SEQ ID NO: 143149 - DNA, 75 bp, synthetic construct
  source 1..75: mol_type = other DNA
ggtaacgaggaaagacctctgtgaggtacgaatccgaaccggtcagacggaggtcgctgtcttcgtagactacga

SEQ ID NO: 143150 - DNA, 75 bp, synthetic construct
  source 1..75: mol_type = other DNA
atgtcacacaaccgtaggttagcctcttacgtgccggaaggcaaggagaagcagtctatgaagcagcaaaaggcg

SEQ ID NO: 143151 - DNA, 75 bp, synthetic construct
  source 1..75: mol_type = other DNA
gcaggctatgaagcagcaaaaggcgatgttaatcgccctgattgaaccgccccgggtttcctggagagtgtttta

SEQ ID NO: 143152 - DNA, 75 bp, synthetic construct
  source 1..75: mol_type = other DNA
atgctagacacatgtaggttagcctcttacgcgccgaaaggcaaggagaagcaggttatgaagcagcaaaaggcg

SEQ ID NO: 143153 - DNA, 75 bp, synthetic construct
  source 1..75: mol_type = other DNA
gcaggctatgaagcagcataaggcgatgttaatcgccctgattgtcatctgtttaactgtcattgtgacggcact

SEQ ID NO: 143154 - DNA, 75 bp, synthetic construct
  source 1..75: mol_type = other DNA
ctggtaacgagaaaagacctctgtgaggttcacatccgaactggccagacggaggttgctgttttcacggcttac

SEQ ID NO: 143155 - DNA, 75 bp, synthetic construct
  source 1..75: mol_type = other DNA
acaggcagtcagtggagtgtctccggcccgcacattaagccggggaaggatttctggttttatgtgcgcagcgtc

SEQ ID NO: 143156 - DNA, 75 bp, synthetic construct
  source 1..75: mol_type = other DNA
atcgcatccagagaaactaaaggggccattcccggtagttacagtgcggttattgatatgccgagtggcagggga

SEQ ID NO: 143157 - DNA, 75 bp, synthetic construct
  source 1..75: mol_type = other DNA
acggcaccagcctggtctgaacctgaaaacaaactaaaggaacttaatgatgacgacaaaactatcactccctga

SEQ ID NO: 143158 - DNA, 75 bp, synthetic construct
  source 1..75: mol_type = other DNA
gaaggaccggcacacggcggtggaggtgaattacaccgacccgcagaacggctggcagacatccacggaactggt

SEQ ID NO: 143159 - DNA, 75 bp, synthetic construct
  source 1..75: mol_type = other DNA
ggcgggcatctgccatcgatgagtggctgatgttacatacggcaccagcctggtctgaacctgaaaacaaactaa

SEQ ID NO: 143160 - DNA, 75 bp, synthetic construct
  source 1..75: mol_type = other DNA
ccggcaaattgtgatcccggcagtggctttcagcggcgctaaacatgagagagagcataacgatatttattcatc

SEQ ID NO: 143161 - DNA, 75 bp, synthetic construct
  source 1..75: mol_type = other DNA
ttagaccattttaaagaaaaaattgagcacatgagggcgtcgctggagtggagtaaaaaagacattgtaaaactg

SEQ ID NO: 143162 - DNA, 75 bp, synthetic construct
  source 1..75: mol_type = other DNA
tctattggtcaggctgttgtaaaagaaatatttaaacgcaatcctcagaaactgcatgttgtcgatattagcgaa

SEQ ID NO: 143163 - DNA, 75 bp, synthetic construct
  source 1..75: mol_type = other DNA
atcagggaccattaccgtcaggatttatgacgatcagccttttgacaggcaaattgttattccggcggtggcatt

SEQ ID NO: 143164 - DNA, 75 bp, synthetic construct
  source 1..75: mol_type = other DNA
acctgccagatcagcagtcaaaggtgttaatgacgaagtgagacatacgctttcttcagatatgaccatgagcag

SEQ ID NO: 143165 - DNA, 75 bp, synthetic construct
  source 1..75: mol_type = other DNA
ggggaaggattactcagcgctgcgcgcttcgcccttcgggtcgttgcctgcggcaacgctctctcgctggcgctc

SEQ ID NO: 143166 - DNA, 75 bp, synthetic construct
  source 1..75: mol_type = other DNA
aatcacgtcaacgcgtggcgctgattcttgatattggcctgtccacgctctataaaaaattcccctcatcagcgg

SEQ ID NO: 143167 - DNA, 75 bp, synthetic construct
  source 1..75: mol_type = other DNA
gggcgttttttctttcatgtgatgggggccctggctgaaatggaacgagaactcattgtcgagcggactcgggcc

SEQ ID NO: 143168 - DNA, 75 bp, synthetic construct
  source 1..75: mol_type = other DNA
cgaactgatagttgaacgtaccagggcggggcttgctgcagctcgcgccaaaggcagagtaggtggacgccgtcc

SEQ ID NO: 143169 - DNA, 75 bp, synthetic construct
  source 1..75: mol_type = other DNA
acactatcggcaggtgacacgctggttgtctggaagctggacaggttgggacgcagtatgcggcatcttgttacg

SEQ ID NO: 143170 - DNA, 75 bp, synthetic construct
  source 1..75: mol_type = other DNA
gccgggcgattaattgcatcaggcgttcctcgccagaaggtggcgatcatttatgatgttggcgtatcgactttg

SEQ ID NO: 143171 - DNA, 75 bp, synthetic construct
  source 1..75: mol_type = other DNA
gcgcagtatgcggcatctcgttacgctgatagaagagttgcgccagcgtggtgtgaatttcagaagcctgactga

SEQ ID NO: 143172 - DNA, 75 bp, synthetic construct
  source 1..75: mol_type = other DNA
attgtcgattggcatggtgctggcatttgccttcgtgaccaactattccggcatgtccaccacgctggcgctggt

SEQ ID NO: 143173 - DNA, 75 bp, synthetic construct
  source 1..75: mol_type = other DNA
ggctggggggattccttaccggctccggacacttcttcaaacgccctgtttggttcactgcaatcgaccacggcg

SEQ ID NO: 143174 - DNA, 75 bp, synthetic construct
  source 1..75: mol_type = other DNA
ggtactactgattggtttctcctttggcgcgctgctggagggggcggctggctttggtgcaccggtggcgattac

SEQ ID NO: 143175 - DNA, 75 bp, synthetic construct
  source 1..75: mol_type = other DNA
gctgatttttgatattggcctgtccacgctctataaaaaatttccctcatcagcgacaaagaataaattgtgtca

SEQ ID NO: 143176 - DNA, 75 bp, synthetic construct
  source 1..75: mol_type = other DNA
atgcttattggctatgtccgcgtgtcaacaaatgaccagaatacggaattgcagcgtaacgcgctggagtgtgca

SEQ ID NO: 143177 - DNA, 75 bp, synthetic construct
  source 1..75: mol_type = other DNA
aatctcgccagcgtgtggcaataatttacgacgtaggggtttcaacactctaccgaaaatttccggtaggtagtg

SEQ ID NO: 143178 - DNA, 75 bp, synthetic construct
  source 1..75: mol_type = other DNA
gacctctgcgaggtacgaatccgaaccggccagacggaggtcgctgtcttcgtagcctacgaatctgagaagtaa

SEQ ID NO: 143179 - DNA, 75 bp, synthetic construct
  source 1..75: mol_type = other DNA
tctggtgtttacctgaaagatgcaagaattacatccaccaatggcagtatcacggctaacggtactgccacagca

SEQ ID NO: 143180 - DNA, 75 bp, synthetic construct
  source 1..75: mol_type = other DNA
aggtaagcggtacaaagtccgaaaggccgggactgaaaaaactgctcaggacattatcggcaggtgacactctgg

SEQ ID NO: 143181 - DNA, 75 bp, synthetic construct
  source 1..75: mol_type = other DNA
atgctagacacatgtaggttagcctcttacgtgccgaaaggcaaggagaagcaggctatgaagcagcaaaaggcg

SEQ ID NO: 143182 - DNA, 75 bp, synthetic construct
  source 1..75: mol_type = other DNA
tcgccctgatcgtcatctgtttaaccgtcatagtgacggtactggtaacgaggaaagacctctgcgaggtacgaa

SEQ ID NO: 143183 - DNA, 75 bp, synthetic construct
  source 1..75: mol_type = other DNA
agaaaagacctctgtgaggttcacatccgaactggccagacggaggttgctgttttcacggcgctccgccccatg

SEQ ID NO: 143184 - DNA, 75 bp, synthetic construct
  source 1..75: mol_type = other DNA
tgccattgataccagtacgccgatggggcgttttttctttcatgtgatgggtgccctggctgaaatggaacgaga

SEQ ID NO: 143185 - DNA, 75 bp, synthetic construct
  source 1..75: mol_type = other DNA
gtcgtattggtggcagacgtcctaaactcaccacgagtgagtgggagcaggtcgggcgtttgctggctgcagggg

SEQ ID NO: 143186 - DNA, 75 bp, synthetic construct
  source 1..75: mol_type = other DNA
actgatagttgaacgaaccagggcagggctggctgcagctcgtgccaaaggcagagtaggtggacgccgtcctaa

SEQ ID NO: 143187 - DNA, 75 bp, synthetic construct
  source 1..75: mol_type = other DNA
ccaaagggcgtattggtggcagacgtccgaagctcaccgcgagtgagtgggaacaggcaggacggttgctggctg

SEQ ID NO: 143188 - DNA, 75 bp, synthetic construct
  source 1..75: mol_type = other DNA
gctgacaaaagaacagcatgagcaaatagcaaggctaatggcactgttgcaaatagtcggtggtgataaacttat

SEQ ID NO: 143189 - DNA, 75 bp, synthetic construct
  source 1..75: mol_type = other DNA
gcaggataggaggacgccgttcaaaactgacaccagagcaatgggagcaggccggacgtttattagcgcaaggag

SEQ ID NO: 143190 - DNA, 75 bp, synthetic construct
  source 1..75: mol_type = other DNA
ccgatgtcgataaaacgctgaaaaatgcgcgggtcgaactcaaaaccagtcccgacgccaaaaacaaacttcgtg

SEQ ID NO: 143191 - DNA, 75 bp, synthetic construct
  source 1..75: mol_type = other DNA
aatcggatctaatgttcgcgaacatgaattaattatgttaagaaaaaatgatgttaatgaaatttatcaagcaga

SEQ ID NO: 143192 - DNA, 75 bp, synthetic construct
  source 1..75: mol_type = other DNA
gaaggtgaaccaaaatcaacagtaagcgtcttttatttgcagccagaagaagtaaatactttatcacaccaggca

SEQ ID NO: 143193 - DNA, 75 bp, synthetic construct
  source 1..75: mol_type = other DNA
gaactgatcaggcttcttggtgatgcggaacctggtgatgtgattctcatagaacaggtcgacaggcttacccgc

SEQ ID NO: 143194 - DNA, 75 bp, synthetic construct
  source 1..75: mol_type = other DNA
tactgagattggcaccaacgaacttggcgagctggaagagcaaaaaatctttaccggcgatctgctgacaccgtg

SEQ ID NO: 143195 - DNA, 75 bp, synthetic construct
  source 1..75: mol_type = other DNA
ccaccgagttagagtttttccagtatcgattttccgattcgtttggggggaacccaccgttatattcgtgcggtc

SEQ ID NO: 143196 - DNA, 75 bp, synthetic construct
  source 1..75: mol_type = other DNA
cgaaaaagatgccgccctgtcgcgccgcttccagttggtgaaggtcagcgaacccaacgctgccgaagccaccat

SEQ ID NO: 143197 - DNA, 75 bp, synthetic construct
  source 1..75: mol_type = other DNA
taatcggtgatggtcctgaaagaaaaaatcttgaacaaatagcctgtgaatataatattcaagacaaagttaatt

SEQ ID NO: 143198 - DNA, 75 bp, synthetic construct
  source 1..75: mol_type = other DNA
taaaatgtttgaacttcggtttggagaacctgcgcctgcccggcgctccgtagagcaactcagaggtatagaagg

SEQ ID NO: 143199 - DNA, 75 bp, synthetic construct
  source 1..75: mol_type = other DNA
gtgaaggtgaaggtgaaggtgaaggtgaaggtgaaggtgaaggtgaaggtgaaggtgaaggtgaaggtgaaggtg

SEQ ID NO: 143200 - DNA, 75 bp, synthetic construct
  source 1..75: mol_type = other DNA
tgaatacggcaggctggcggagaagacggaccgcatcccggaaggggtgatacggatgcacgacgagcggaccca

SEQ ID NO: 143201 - DNA, 75 bp, synthetic construct
  source 1..75: mol_type = other DNA
gtctgccgccggtggagtggctgacgtatggcagcggttatcttgcggggatgaagctgggcggaacgccgctgg

SEQ ID NO: 143202 - DNA, 75 bp, synthetic construct
  source 1..75: mol_type = other DNA
aagcatattgatgccaaagatgcgccccgtaatgctgaagagcgggactttatcaaacgtctgcgcatgattgaa

SEQ ID NO: 143203 - DNA, 75 bp, synthetic construct
  source 1..75: mol_type = other DNA
cggccggaacgattggcgcagacgggacggtaaaaattgagttccagaacctgactaccggtccgatagcttgcc

SEQ ID NO: 143204 - DNA, 75 bp, synthetic construct
  source 1..75: mol_type = other DNA
aggtggaaaacgctggacgcggtgagtgttcatatcaaggtggaatatgaggaaaatgatggccttccgtcagat

SEQ ID NO: 143205 - DNA, 75 bp, synthetic construct
  source 1..75: mol_type = other DNA
tgatatcaatgatgtttttggtggaagttgggctatgtttcgtacatggcgaacagacatagatgcagatgaaga

SEQ ID NO: 143206 - DNA, 75 bp, synthetic construct
  source 1..75: mol_type = other DNA
atcggcaacgggtggcgagtttcaataatgatccgctgatcacacgggcgattgccgtcaatatcttgctcgatc

SEQ ID NO: 143207 - DNA, 75 bp, synthetic construct
  source 1..75: mol_type = other DNA
cgtaaattgaacggaggaccggtcagccatgaagaacgcgaatttttgaaacgcctcacaatgatcgagaaagac

SEQ ID NO: 143208 - DNA, 75 bp, synthetic construct
  source 1..75: mol_type = other DNA
agtcaacacattaatatccataacagcggtgtgatgtcgggaaatgtcaccactgcaggtgatatgaacgttatg

SEQ ID NO: 143209 - DNA, 75 bp, synthetic construct
  source 1..75: mol_type = other DNA
tatttacggtgttactatcctctctatgtgcacacggagctccccagtctattacagaactatgttcggaatatc

SEQ ID NO: 143210 - DNA, 75 bp, synthetic construct
  source 1..75: mol_type = other DNA
tttatcgtgattactaaaggttcggaacgtgtggctgaagttgctgccgcttttcgcttgacggtatgccaggta

SEQ ID NO: 143211 - DNA, 75 bp, synthetic construct
  source 1..75: mol_type = other DNA
caacgtattcgtgagacggtgcggcacgcactgaatgttcatccccgcctgacggcattgcgggttgacctgcgt

SEQ ID NO: 143212 - DNA, 75 bp, synthetic construct
  source 1..75: mol_type = other DNA
atcggtttagaaaagatgaactcagacggtcaatctctaatgttaactggtatacatttaaaccgaagcttaaag

SEQ ID NO: 143213 - DNA, 75 bp, synthetic construct
  source 1..75: mol_type = other DNA
aacaacagcaaagtctacgccgtgaagatgaatggtcaaaccgtaggccgtgaaggtgcgcgtaatctcggtgaa

SEQ ID NO: 143214 - DNA, 75 bp, synthetic construct
  source 1..75: mol_type = other DNA
cgtggggctgtacgttatggcggtggaacgccagaggccgcacaggaaaccattaattcacttttcgcaggtggt

SEQ ID NO: 143215 - DNA, 75 bp, synthetic construct
  source 1..75: mol_type = other DNA
aaagacttcattaaggagcaaatttcaggaacacgtgattctgtcggtgctggtgcagcctcatatgaggttatg

SEQ ID NO: 143216 - DNA, 75 bp, synthetic construct
  source 1..75: mol_type = other DNA
atccgaaactgattcgtttaccggaagtaaaaagaagaacagggtttggtaaaacgtggatatataccttaataa

SEQ ID NO: 143217 - DNA, 75 bp, synthetic construct
  source 1..75: mol_type = other DNA
cggacgatacaggtgaaattcctgtcgacctgattcaaactgaccactggtcagcagcgacccccacatggaaag

SEQ ID NO: 143218 - DNA, 75 bp, synthetic construct
  source 1..75: mol_type = other DNA
attctgataggcttttattggaagaatgcagggtttacttttccatcagaggatattggtgtagttagtgggatt

SEQ ID NO: 143219 - DNA, 75 bp, synthetic construct
  source 1..75: mol_type = other DNA
atgcgtatatgtgtttttggttacaaaacatgtccttcagtacaccggatcatgcatcatgcgacaaatctccgg

SEQ ID NO: 143220 - DNA, 75 bp, synthetic construct
  source 1..75: mol_type = other DNA
tattatgtttcaatatatttgaatggggagtttgtaaaaaaacaatatgtaacatttaatccacaggataatatc

SEQ ID NO: 143221 - DNA, 75 bp, synthetic construct
  source 1..75: mol_type = other DNA
tgaatggtgagtttgtaaaaaagcaatatgtaaaatttaatccgctggacaatattgatgtttgtataacaactg

SEQ ID NO: 143222 - DNA, 75 bp, synthetic construct
  source 1..75: mol_type = other DNA
tatctactacattttctaatttattgaaaaataaaaacgagcttaaaaaagcagtccttgattcatgggattcag

SEQ ID NO: 143223 - DNA, 75 bp, synthetic construct
  source 1..75: mol_type = other DNA
gggagttccgtctgctggcagtactgctctggggcgcacctggtccgctatccggggtggtgcaggtaaagttct

SEQ ID NO: 143224 - DNA, 75 bp, synthetic construct
  source 1..75: mol_type = other DNA
acatcgttatgaatgccgtatcggggattgtatcagcagataaaagagttcaaaaactaagaggcgaggcaaaga

SEQ ID NO: 143225 - DNA, 75 bp, synthetic construct
  source 1..75: mol_type = other DNA
aatcgaacagctatacattaagctacacaagtccattgtttaatggatctgcttatttcaacaccagcattactc

SEQ ID NO: 143226 - DNA, 75 bp, synthetic construct
  source 1..75: mol_type = other DNA
gccaacagcttcattgacagcgaaaggcatcactcagctcagtagtgccactaacagcacgtccgaagtgctggc

SEQ ID NO: 143227 - DNA, 75 bp, synthetic construct
  source 1..75: mol_type = other DNA
aatgttagactaatggatagttctaacttcagtaactataagaatggccgacgacattcctacattggtgggtta

SEQ ID NO: 143228 - DNA, 75 bp, synthetic construct
  source 1..75: mol_type = other DNA
agccgacgttgagcgcacaacatggggcatttcggtcaataaacccaacgccgcgaaacagcaggggcaattgct

SEQ ID NO: 143229 - DNA, 75 bp, synthetic construct
  source 1..75: mol_type = other DNA
agtgggggaaccagcttaatgaggagaacccgcatcacctgtaccagccgtaccggctgccggggcagcagtatg

SEQ ID NO: 143230 - DNA, 75 bp, synthetic construct
  source 1..75: mol_type = other DNA
gtctgggtcggtgaagcgggcgttcgcgtttactcctccggacaacccggaggggcgcgggcagataaattactc

SEQ ID NO: 143231 - DNA, 75 bp, synthetic construct
  source 1..75: mol_type = other DNA
acccgccacaaacagtggagtctggcgaaaaaagtgctggtgggtctggtgatgggtgtggtttttggccttgcc

SEQ ID NO: 143232 - DNA, 75 bp, synthetic construct
  source 1..75: mol_type = other DNA
gctggcttttcagggaaccggatgaagaaactgacggcgatatcatgattgatctggagcaccttcctcaggagc

SEQ ID NO: 143233 - DNA, 75 bp, synthetic construct
  source 1..75: mol_type = other DNA
ttaccggcggggctggaatgtcaacgtatcccgggtgatggataacgccacacatgtggcggtgtacttcggctc

SEQ ID NO: 143234 - DNA, 75 bp, synthetic construct
  source 1..75: mol_type = other DNA
tatcgcacagatgactctaattgtatgcaaggaattcaagaaggaaaagttaaaggagtaatgataaattcaggt

SEQ ID NO: 143235 - DNA, 75 bp, synthetic construct
  source 1..75: mol_type = other DNA
tgcaacaacgacccgtaaagggatcgtacaactgagcagtgcaaccaacagcacctctgaaacgctggccgccac

SEQ ID NO: 143236 - DNA, 75 bp, synthetic construct
  source 1..75: mol_type = other DNA
catgaggcggcaggggatagacaaggtcagccagctaaagaaagaatcatggatcttaaaaataacactgtcggt

SEQ ID NO: 143237 - DNA, 75 bp, synthetic construct
  source 1..75: mol_type = other DNA
tgcaggagggagtggatggaatccagacgaagtcgatccaagtcgttgtgttatggctatgggggcaggctctac

SEQ ID NO: 143238 - DNA, 75 bp, synthetic construct
  source 1..75: mol_type = other DNA
catcccgtcagaaaaataaatgttaatagtttcagtgtgttattccctattttacccaaagataccgtagagaac

SEQ ID NO: 143239 - DNA, 75 bp, synthetic construct
  source 1..75: mol_type = other DNA
cttgcagatggcacccgtcacagtgggcaatcggttaaatccgtctacagcaaatccttctaccagacaggaacc

SEQ ID NO: 143240 - DNA, 75 bp, synthetic construct
  source 1..75: mol_type = other DNA
gatctgtgggaagaaggaataaatgcagggcttctaaactatagttttaatggtaattctattaataatcgtagt

SEQ ID NO: 143241 - DNA, 75 bp, synthetic construct
  source 1..75: mol_type = other DNA
aatagaagtctggcccgttgaactggtgctccgtcccgtcaatatggttatcgacataacaccggatacgtctgc

SEQ ID NO: 143242 - DNA, 75 bp, synthetic construct
  source 1..75: mol_type = other DNA
gagaacattttctgcatatcatttgaggaattcgagtatctgctatcttcttgcaaggaatactcaaaacctgta

SEQ ID NO: 143243 - DNA, 75 bp, synthetic construct
  source 1..75: mol_type = other DNA
atggtttccacggtatgcgctgaggcttatcaggttgtaggagttatggcagatgcgcttggtgtattcggtgat

SEQ ID NO: 143244 - DNA, 75 bp, synthetic construct
  source 1..75: mol_type = other DNA
gcatcttttccggcggttcttatggtgcctcggcccagacggcaacggctgttatcaacatgcaaaataccgata

SEQ ID NO: 143245 - DNA, 75 bp, synthetic construct
  source 1..75: mol_type = other DNA
atggacgaagtcaagaaaattgaacacggtaaaattttaaacacagacacacccgataattctgcttcgaaatta

SEQ ID NO: 143246 - DNA, 75 bp, synthetic construct
  source 1..75: mol_type = other DNA
tttacaggcagcggatatctgttacgtactgatgcgtggtcgtacccggctctgcggcttaaacgcctgggtctg

SEQ ID NO: 143247 - DNA, 75 bp, synthetic construct
  source 1..75: mol_type = other DNA
tccgcgatagcatcgagcgcctatgggcagtatcggtcattgtggagcgtaacgggcagcgtcaggggttccgca

SEQ ID NO: 143248 - DNA, 75 bp, synthetic construct
  source 1..75: mol_type = other DNA
cctacaggtaaggctggtaagccttaccggcggcgcgacgcagggaactgtgcagagtgttattaccgtcaccta

SEQ ID NO: 143249 - DNA, 75 bp, synthetic construct
  source 1..75: mol_type = other DNA
agctgccaaaaagagtgccgactctacctccaccaagacggctaaaaagcctaaaaaggatgaacgtggcgctct

SEQ ID NO: 143250 - DNA, 75 bp, synthetic construct
  source 1..75: mol_type = other DNA
gttattcagtcggcagtgctacgcgccaggggagcagttcgccgacccggtttatcggccagtcggctatgacgt

SEQ ID NO: 143251 - DNA, 75 bp, synthetic construct
  source 1..75: mol_type = other DNA
ccccccaaaaaaaatgctgaatgaaatgattgagcaggcgcaccgggattttgtggcaaatgagcagcataagac

SEQ ID NO: 143252 - DNA, 75 bp, synthetic construct
  source 1..75: mol_type = other DNA
acggcaggaatcagtgcagtcactgccagcatcaacagcagcagtcagagtcagaacgtgacgtttgtcgccgat

SEQ ID NO: 143253 - DNA, 75 bp, synthetic construct
  source 1..75: mol_type = other DNA
acggaaaaatcagatcagcagcaagtttgctgaattgacgttcaccatcaaacgggcttacggagtgtatgcata

SEQ ID NO: 143254 - DNA, 75 bp, synthetic construct
  source 1..75: mol_type = other DNA
gagaagatctccaccgcttgtcattgttggatgcgacgctgccgtgtcgcatcaggcataaagcagattactttt

SEQ ID NO: 143255 - DNA, 75 bp, synthetic construct
  source 1..75: mol_type = other DNA
acgatgaagagctaaacgaaatgttcgttagattgttagcattaactgagaaggttatctcatctattaaaaatg

SEQ ID NO: 143256 - DNA, 75 bp, synthetic construct
  source 1..75: mol_type = other DNA
ctttatatcatataatgatgatggacatcactttacttatatgcgtaaagggtcagcagcaagtcagacaacatt

SEQ ID NO: 143257 - DNA, 75 bp, synthetic construct
  source 1..75: mol_type = other DNA
ctggcaacggtaagaaaggctacagtctggaggatattgtggacggattacgcgataacggtctgattattgctg

SEQ ID NO: 143258 - DNA, 75 bp, synthetic construct
  source 1..75: mol_type = other DNA
aatagaagtctggcccgtggaactggtgctccgtcccgtcaatatgattattggcataacaccggatacaccggc

SEQ ID NO: 143259 - DNA, 75 bp, synthetic construct
  source 1..75: mol_type = other DNA
aattgcgttcgctcgtagttttgatgagttaaatgaagaagacttccgtaatttacgacagattttgaatcgaaa

SEQ ID NO: 143260 - DNA, 75 bp, synthetic construct
  source 1..75: mol_type = other DNA
gtggaggcatccggtgccagcctggagaaggagcggcacgaccagctgcttaccgcgcttcgtgctctgctgtta

SEQ ID NO: 143261 - DNA, 75 bp, synthetic construct
  source 1..75: mol_type = other DNA
tcaaagttattggtggcggtgcgtcaggagggataggttcaacaaccgcttcagccgttacatgtggcggaggag

SEQ ID NO: 143262 - DNA, 75 bp, synthetic construct
  source 1..75: mol_type = other DNA
gcgcgggtggatcggctgatggcggatatcgttaccgcagaacataaacagcgggcgttgggcgcagagttaggg

SEQ ID NO: 143263 - DNA, 75 bp, synthetic construct
  source 1..75: mol_type = other DNA
agcacaacgggtaacaaagattattatcaacgcaccgctggaaacggcattggctgaaactctggttgctgaaaa

SEQ ID NO: 143264 - DNA, 75 bp, synthetic construct
  source 1..75: mol_type = other DNA
atacatttatgctattggacttattctgataggcttttattggaagaatgcagggtttacttttccatcagagga

SEQ ID NO: 143265 - DNA, 75 bp, synthetic construct
  source 1..75: mol_type = other DNA
tttttagtgaaaatggcctctatgctgtgcgcgttgagaatggagcgattgtcagccattgccgcattagatgtt

SEQ ID NO: 143266 - DNA, 75 bp, synthetic construct
  source 1..75: mol_type = other DNA
caggtggcttccgtaattacggttatcactatgtgaatgaacccggaaaagacacagctaaggaaggtgcgaaca

SEQ ID NO: 143267 - DNA, 75 bp, synthetic construct
  source 1..75: mol_type = other DNA
acactgaggctgttcatactggcagtacgccttgcttttgcagtcgcgtctttgagttgcctgaaggtacgcatg

SEQ ID NO: 143268 - DNA, 75 bp, synthetic construct
  source 1..75: mol_type = other DNA
ttgccgatatgctttcagaaggatgatgagaaagccattactcgggctatggaatcccttaaaagccagttaagg

SEQ ID NO: 143269 - DNA, 75 bp, synthetic construct
  source 1..75: mol_type = other DNA
aaatgtgacgctgataaccgatcagcctgattctgaaatcagatctgcttttgtttctgcatgggaagcgttatt

SEQ ID NO: 143270 - DNA, 75 bp, synthetic construct
  source 1..75: mol_type = other DNA
ctcgtgggtacagaggcggttttgaaggtatccgagtagaaggagaattctggcgcgatgaatggatagatcacc

SEQ ID NO: 143271 - DNA, 75 bp, synthetic construct
  source 1..75: mol_type = other DNA
gctcgcttgcggtgatatatgattttcttgagaagaataaccgcatattcgccgtgtttgctgtcctgagatttg

SEQ ID NO: 143272 - DNA, 75 bp, synthetic construct
  source 1..75: mol_type = other DNA
ttgcgcttttcaaaagcaacgctccgtcgagttggagccaatagtgatggttctggtgtcctgtgttttcctgca

SEQ ID NO: 143273 - DNA, 75 bp, synthetic construct
  source 1..75: mol_type = other DNA
gctatatctgggccagagagcgtgttaccggggaacatcctcactaccatctggttctgctgtttgacaaagagg

SEQ ID NO: 143274 - DNA, 75 bp, synthetic construct
  source 1..75: mol_type = other DNA
tgccaatagcggcctgtttgaaaaactcgatatgagcaaaatcccgaacgcgacgaatctggtgcagcaggcgaa

SEQ ID NO: 143275 - DNA, 75 bp, synthetic construct
  source 1..75: mol_type = other DNA
tgcggtgcaggagattgcacatctgactgaagagattgacccatccaccacgatgcaggagcagctccgcccgat

SEQ ID NO: 143276 - DNA, 75 bp, synthetic construct
  source 1..75: mol_type = other DNA
ggtcggtcagtcatcaatgcaaaaatcggtgttaagcacctacggcgatcagggtggctacgtgctggcgccgca

SEQ ID NO: 143277 - DNA, 75 bp, synthetic construct
  source 1..75: mol_type = other DNA
gaagcataacacgcaaatatatgggagtaatgaagtaccgccacccagtggattaggtcgcccaagaaaaaatta

SEQ ID NO: 143278 - DNA, 75 bp, synthetic construct
  source 1..75: mol_type = other DNA
atgaacgataactatccatacattgccaaatataaaatggactggtttttacatagcctgataaatcaccacctg

SEQ ID NO: 143279 - DNA, 75 bp, synthetic construct
  source 1..75: mol_type = other DNA
atgaagaccaacaggagtctggtcgtcatagtgtcactaattaccgccacattactgctgactgcatgcgcccaa

SEQ ID NO: 143280 - DNA, 75 bp, synthetic construct
  source 1..75: mol_type = other DNA
ggtagcggcattcactggggtggtggttccggtcatggtaatggcggggggaatagtaattccggtggtggctcg

SEQ ID NO: 143281 - DNA, 75 bp, synthetic construct
  source 1..75: mol_type = other DNA
acgccacgacagcacaaaaagggattgtccagctcagtagtgccaccaacagcacgtctgaaacactggccgcga

SEQ ID NO: 143282 - DNA, 75 bp, synthetic construct
  source 1..75: mol_type = other DNA
tgaatcttaaatgggatgctttgtatgttcttgtcaatgccattgtaaatggcgaagtcatatcaaaatcagcaa

SEQ ID NO: 143283 - DNA, 75 bp, synthetic construct
  source 1..75: mol_type = other DNA
acggaagaacaatgggacgaactcatcgccagcgaaatggcgtatgtgaatgcggtgcaggagattgcacatctg

SEQ ID NO: 143284 - DNA, 75 bp, synthetic construct
  source 1..75: mol_type = other DNA
ctgcgtctgcttcaaaagatgaggcgaccagacaagcgtcagcagcgaaaggtagtgccacgacagcaacaacga

SEQ ID NO: 143285 - DNA, 75 bp, synthetic construct
  source 1..75: mol_type = other DNA
cggcaactcatgcaaccgatgctgcagcctcagcacgtgccgccagcacgtcagccggacaggccgcgtcgtcgg

SEQ ID NO: 143286 - DNA, 75 bp, synthetic construct
  source 1..75: mol_type = other DNA
tgagcgacataatctgaatctgagacaacatctggcaaggctgggacggaagttactgtcgttctcaaaatcggt

SEQ ID NO: 143287 - DNA, 75 bp, synthetic construct
  source 1..75: mol_type = other DNA
tgatgtgattgtctgcgctgaaatggacgaacagtggggctacgtcggtgctaaatcacgtcagcgctggctgtt

SEQ ID NO: 143288 - DNA, 75 bp, synthetic construct
  source 1..75: mol_type = other DNA
agctgcacgtaatcagcaagcgttacactcagcgcattgagcgacataacctgaatctgagacaacatctggcaa

SEQ ID NO: 143289 - DNA, 75 bp, synthetic construct
  source 1..75: mol_type = other DNA
ttctcaaaatcggtggagctgcatgacaaggtcatcgggcattatctgaaccgccccggaaatcctggagactaa

SEQ ID NO: 143290 - DNA, 75 bp, synthetic construct
  source 1..75: mol_type = other DNA
aggacggttgtggcgcacgtattcggtgaacgcactctggccacactggggtgtcttatgagcctgctgtcaccc

SEQ ID NO: 143291 - DNA, 75 bp, synthetic construct
  source 1..75: mol_type = other DNA
aaagctgcacgtaatcagcaagcgtaacactcagcgcattgagcgacataatctgaatctgagacaacatctggc

SEQ ID NO: 143292 - DNA, 75 bp, synthetic construct
  source 1..75: mol_type = other DNA
agcgacataacctgaatctgagactacatctggcaaggctgggcaggaagtcactgtcgttctcaaaatcggtgg

SEQ ID NO: 143293 - DNA, 75 bp, synthetic construct
  source 1..75: mol_type = other DNA
gtggcgcacgttttcggtgaacgcactctggccacactggcgcgtcttctgagcctgctgtcaccctttgacgtg

SEQ ID NO: 143294 - DNA, 75 bp, synthetic construct
  source 1..75: mol_type = other DNA
gcacgttatcagcaagcgttacactcagcgcattgagcgacataatctgaatctgagacaacatctggcaaggct

SEQ ID NO: 143295 - DNA, 75 bp, synthetic construct
  source 1..75: mol_type = other DNA
cggagagacagcgccgaaaacatcagactctcccgtccgcaaagcatttccggcaacacttccccgtgacaggca

SEQ ID NO: 143296 - DNA, 75 bp, synthetic construct
  source 1..75: mol_type = other DNA
gtgctgccagttaatgactccgctgaatgatgccctgtaccgtgatgtgatgaacacccgcaaggttcacactga

SEQ ID NO: 143297 - DNA, 75 bp, synthetic construct
  source 1..75: mol_type = other DNA
gaacggtaaccgcgctgaaatgagcccggaagccgccggtattgccgcctgtctgatgacgtacagtcatcatgc

SEQ ID NO: 143298 - DNA, 75 bp, synthetic construct
  source 1..75: mol_type = other DNA
tgaacaacggtggggcatttatggcacccgaaccggatgatgatgacgaaacatgggtactgttcaatgccatga

SEQ ID NO: 143299 - DNA, 75 bp, synthetic construct
  source 1..75: mol_type = other DNA
gatgctgggctcatgtgcggcgcaaagtccacgatgtatatatcagtaccaaaagcgcgacagcggaagaagccc

SEQ ID NO: 143300 - DNA, 75 bp, synthetic construct
  source 1..75: mol_type = other DNA
atgcaggagaaagaacacacgttatcgaaaaaatgccgtctgagagatgcgttccggtatatcaggaagcactgg

SEQ ID NO: 143301 - DNA, 75 bp, synthetic construct
  source 1..75: mol_type = other DNA
cgttccggtatatcaggaagcactgggttgcgttgtgcaacttcagtgatgatggtctggcggaggcggataata

SEQ ID NO: 143302 - DNA, 75 bp, synthetic construct
  source 1..75: mol_type = other DNA
atcctttaccgtcaatttcgataaacctggcaactacaatctgacgttacgcgataaagacggcttaattctcgc

SEQ ID NO: 143303 - DNA, 75 bp, synthetic construct
  source 1..75: mol_type = other DNA
accgctgccaccgggagccgacgttgagcgcacaacatggggcatttcggtcaataaacccaacgccgcgaaaca

SEQ ID NO: 143304 - DNA, 75 bp, synthetic construct
  source 1..75: mol_type = other DNA
gcattcatcccccatcgtcagcgccccggcgaagctttcggtgctggacgccaacggcagtctgttgcaaaccgt

SEQ ID NO: 143305 - DNA, 75 bp, synthetic construct
  source 1..75: mol_type = other DNA
cgctgtatgaaacccgcctgaagggaaagctgcacgttatcagcaagcgttacactcagcgcattgagcgacata

SEQ ID NO: 143306 - DNA, 75 bp, synthetic construct
  source 1..75: mol_type = other DNA
atggctggccgctgtatgaatcacgcctgaagggaaagctgcacgttatcagcaagcgatatactcagcgaattg

SEQ ID NO: 143307 - DNA, 75 bp, synthetic construct
  source 1..75: mol_type = other DNA
cgcgtatgacaggatacggaggacagttgtggcgcacgttttcggtgaacgcactctggccacactggcgcgtct

SEQ ID NO: 143308 - DNA, 75 bp, synthetic construct
  source 1..75: mol_type = other DNA
ctctccaggaaacccggggcggttcaggttgttgcgcacgtattcggtgaacgcactatggcgacgctggggcgt

SEQ ID NO: 143309 - DNA, 75 bp, synthetic construct
  source 1..75: mol_type = other DNA
cgcacgttttcggtgaacgcactctggccacactggcgcgtcttctgagcctgctgtcggcctttgaggtcgtgg

SEQ ID NO: 143310 - DNA, 75 bp, synthetic construct
  source 1..75: mol_type = other DNA
gagcgacataatctgaatctgagacaacatctggcaaggctgggacggaggtcactgtcgttctcaaaatcggtg

SEQ ID NO: 143311 - DNA, 75 bp, synthetic construct
  source 1..75: mol_type = other DNA
aacatctggcaaggctgggacggaagtcactgtcgttctcaaaaccggtggagctgcatgacaaggtcatcgggc

SEQ ID NO: 143312 - DNA, 75 bp, synthetic construct
  source 1..75: mol_type = other DNA
aaaagtcagagcactccgtatcatgagttgggacaaatctaaagctcgccacaactggaaagcgattaagttaac

SEQ ID NO: 143313 - DNA, 75 bp, synthetic construct
  source 1..75: mol_type = other DNA
atgactgaattaaccaaagagcaattaatcgaagaagccaaattaaaaatagcgattgcgaaatgccactcaaat

SEQ ID NO: 143314 - DNA, 75 bp, synthetic construct
  source 1..75: mol_type = other DNA
gaaatggatttgcttacctgccatctcgacggtgtaactgaaacatatgctgatggctggaacgcctgccgagtc

SEQ ID NO: 143315 - DNA, 75 bp, synthetic construct
  source 1..75: mol_type = other DNA
ggctacgtcggggctaaatcacgccagcgatggctgttttacgcgtatgacaggatacggaggacagttgtggcg

SEQ ID NO: 143316 - DNA, 75 bp, synthetic construct
  source 1..75: mol_type = other DNA
cgcgcatacaaccgggcagtgatgtgattgtctgcgctgaaatggacgaacagtggggctacgtcggtgctaaat

SEQ ID NO: 143317 - DNA, 75 bp, synthetic construct
  source 1..75: mol_type = other DNA
ttgcgcacgtattcggtgaacgcactctggccacactggagcgtcttctaagcctgctgtcggcctttgaggtcg

SEQ ID NO: 143318 - DNA, 75 bp, synthetic construct
  source 1..75: mol_type = other DNA
gctgaaatgggcgaacagtggggctacgtcggtgctaaatcacgtcatcgctggctgttttacgcgtatgacagg

SEQ ID NO: 143319 - DNA, 75 bp, synthetic construct
  source 1..75: mol_type = other DNA
ctgtatgaatcacgcctgaagggaaagctgcacgttatcagcaagcgttacactcagcgcattgagcgacataat

SEQ ID NO: 143320 - DNA, 75 bp, synthetic construct
  source 1..75: mol_type = other DNA
atgtgattgtctgcgctgaaatggacgaacattggggctacgtcggtgctaaatcacgtcagcgctggctgtttt

SEQ ID NO: 143321 - DNA, 75 bp, synthetic construct
  source 1..75: mol_type = other DNA
cgagcaggcgagcaatatccggctacaaagtagtgaaacgccgcaggagattttccgcaacaatcttgatgcgtt

SEQ ID NO: 143322 - DNA, 75 bp, synthetic construct
  source 1..75: mol_type = other DNA
agcgttacactcagcgcattgagcgacataatctgaatctgagacaacatctggcaaggctgggacggaagtcac

SEQ ID NO: 143323 - DNA, 75 bp, synthetic construct
  source 1..75: mol_type = other DNA
gtcgctgtcgttctcaaaatcggtggagctgcatgacaaagttatcgggcattatcttgccagtcgacgcatcgc

SEQ ID NO: 143324 - DNA, 75 bp, synthetic construct
  source 1..75: mol_type = other DNA
atggccgttgaaacatacaactggcgatctcagctcggggctggcgcgattgaatatagtcaaacggtgcgtgct

SEQ ID NO: 143325 - DNA, 75 bp, synthetic construct
  source 1..75: mol_type = other DNA
ttctccatgcctgggggaaattcgtcttcaccggcatcggtctgggtctgctgatcggcgtcaccctggtcatgg

SEQ ID NO: 143326 - DNA, 75 bp, synthetic construct
  source 1..75: mol_type = other DNA
gcggcagttcccgttacgcgcggcgggcgtcagagcataggcgttttgctggtgctggatgacgaagctcatctg

SEQ ID NO: 143327 - DNA, 75 bp, synthetic construct
  source 1..75: mol_type = other DNA
tagctatgcgcaacgcaaaatttacgcaaggtaggctggccaaagaagtgggtatggctcagtccagtgttaatc

SEQ ID NO: 143328 - DNA, 75 bp, synthetic construct
  source 1..75: mol_type = other DNA
ctcgataggtgtacaccttaacacaagggcactcaaaaaagcaaagcccggctgtgcgcgaacactaaccgggct

SEQ ID NO: 143329 - DNA, 75 bp, synthetic construct
  source 1..75: mol_type = other DNA
ttttttaattacatcatatgatgtaattctcgattatctgggaggatggtgtaattatggactggatatgtcatc

SEQ ID NO: 143330 - DNA, 75 bp, synthetic construct
  source 1..75: mol_type = other DNA
tttggacagttacaacagatggtaaataaattggggttgaatgattatgtgtttattacgggagtaacatttaat

SEQ ID NO: 143331 - DNA, 75 bp, synthetic construct
  source 1..75: mol_type = other DNA
tgactggctggatgatgaggatgctgatgaaattacagaaacctcttttgcggaaagaatgacgctttgtgagct

SEQ ID NO: 143332 - DNA, 75 bp, synthetic construct
  source 1..75: mol_type = other DNA
aaaacatatcatgcgtaacaaactcatcctcttctggcataagtgaaaaacatttagatcactgtgctgatactg

SEQ ID NO: 143333 - DNA, 75 bp, synthetic construct
  source 1..75: mol_type = other DNA
ggtttgtgtatgcttcaatttggctgttcacaattatattatattcgcttggattgactactaatattagcccgc

SEQ ID NO: 143334 - DNA, 75 bp, synthetic construct
  source 1..75: mol_type = other DNA
accccggcagacgacagcactattccgcccatgcctgcggtatatgaagatgatgatgcttttcgcgaacgtatc

SEQ ID NO: 143335 - DNA, 75 bp, synthetic construct
  source 1..75: mol_type = other DNA
aatctgcgctggagctggcacgaaatcacctggggattgtgtttgcgccagacaaaagtgtgcagagcgacctgc

SEQ ID NO: 143336 - DNA, 75 bp, synthetic construct
  source 1..75: mol_type = other DNA
tatgcatacgaagaaagcaaggatggtctttcaactagaatagctaaagatccaatccctcatatttatttaaaa

SEQ ID NO: 143337 - DNA, 75 bp, synthetic construct
  source 1..75: mol_type = other DNA
ccgctggcagtagctgctgcgcatgcggtgctggatatcattgaagaagaacagctctgccagcgtgccgatcaa

SEQ ID NO: 143338 - DNA, 75 bp, synthetic construct
  source 1..75: mol_type = other DNA
tcacccgtatgctgatgcgcatgatgggtatcaaaaccgatatcgtggttagcggctctttgagcaaagaagagt

SEQ ID NO: 143339 - DNA, 75 bp, synthetic construct
  source 1..75: mol_type = other DNA
gaggtgatattaattctgctgattatgcatacagcatcgtggacttttcgattactgcatatggtggatattcag

SEQ ID NO: 143340 - DNA, 75 bp, synthetic construct
  source 1..75: mol_type = other DNA
aagtctaattactaacattgaatcgataagttcggcaccacttacgcggcaggcacaggaaatacttaatcaaac

SEQ ID NO: 143341 - DNA, 75 bp, synthetic construct
  source 1..75: mol_type = other DNA
gatttcttagaggcaaaggtagtgagtctttcatttgatgacatattaaaatataagcaagagttcaaaaaaaat

SEQ ID NO: 143342 - DNA, 75 bp, synthetic construct
  source 1..75: mol_type = other DNA
gtactgaacaccggccatcggcatccaaaaattgtggcggcggtagagcagcagttgcagtcgtttacccatacc

SEQ ID NO: 143343 - DNA, 75 bp, synthetic construct
  source 1..75: mol_type = other DNA
ctgcagtaattacagggttgacctggccgcttagtctcattccttccattataagtctcatgattcgtaaatccg

SEQ ID NO: 143344 - DNA, 75 bp, synthetic construct
  source 1..75: mol_type = other DNA
gtactggccggatcacgatgatttcaacaatatgcttatgaacggcgatcaggttcgtgagctggttttctataa

SEQ ID NO: 143345 - DNA, 75 bp, synthetic construct
  source 1..75: mol_type = other DNA
acattgtgtcttacaccttgttaatgcaaggtacagaaaagacgaaaccccgcagtgctggaacacatacggggc

SEQ ID NO: 143346 - DNA, 75 bp, synthetic construct
  source 1..75: mol_type = other DNA
acacactgggatggacgtcgttcagctatgcaggagacaagaatcgccagctgacccattacagcgatacccgct

SEQ ID NO: 143347 - DNA, 75 bp, synthetic construct
  source 1..75: mol_type = other DNA
ggaacatggatctgtacctgcggcagcggtgacggaatgaagcttgtcactctgacacaagggaagccattcaat

SEQ ID NO: 143348 - DNA, 75 bp, synthetic construct
  source 1..75: mol_type = other DNA
gacttcaacgacatgctcatgaacggcgatcaggttcgtgagttggtattctataaaaagcagcaggtggccgca

SEQ ID NO: 143349 - DNA, 75 bp, synthetic construct
  source 1..75: mol_type = other DNA
aatacaaaagaacaaatcgaacaagaaagattgaagaaactatcagccgaacgccaactggcagaacttgaatta

SEQ ID NO: 143350 - DNA, 75 bp, synthetic construct
  source 1..75: mol_type = other DNA
aaacgaacaagataaaatttacgaggatattacagaaagtactaccgacaatacaaccgccgaaaatccagaaaa

SEQ ID NO: 143351 - DNA, 75 bp, synthetic construct
  source 1..75: mol_type = other DNA
ctggcctataaaccctgcgcggttcactacgacacggtgcagttttatcacggtatggcctgctacatcgtggaa

SEQ ID NO: 143352 - DNA, 75 bp, synthetic construct
  source 1..75: mol_type = other DNA
catccagggtaaaaccagcaaaactgccggactggatagtcagtatcagaaagacatctcggatatccaacaata

SEQ ID NO: 143353 - DNA, 75 bp, synthetic construct
  source 1..75: mol_type = other DNA
caaagcatcacagaccgcggctaacacaaagccgatcgagattaaaacgtccggctcagctgctggcagcaaagc

SEQ ID NO: 143354 - DNA, 75 bp, synthetic construct
  source 1..75: mol_type = other DNA
attacgacatcgaggccgatgtttctggcttgctcaaggcgcagggaaaggctaataagtcgctcgactccatcg

SEQ ID NO: 143355 - DNA, 75 bp, synthetic construct
  source 1..75: mol_type = other DNA
atggtgcacttggcaacacccgggaactgaacatcagcaacgcggccatcgtcgatcttaatggatcgacgcaga

SEQ ID NO: 143356 - DNA, 75 bp, synthetic construct
  source 1..75: mol_type = other DNA
ttattatcagatcacgatcaatttgaaaaagatcaaatctcagaattaacagttgctgcaaatgctcttaagctg

SEQ ID NO: 143357 - DNA, 75 bp, synthetic construct
  source 1..75: mol_type = other DNA
ggaggtgatcccggaggggaatgcggtgatgaagcggattgcagcgcagtggcaacacctgaacgccgaacggca

SEQ ID NO: 143358 - DNA, 75 bp, synthetic construct
  source 1..75: mol_type = other DNA
ggaagaggctaaacaagaaatttatctggtcagccatacaaacgtacacgaacagaacgaaggggtcattttcta

SEQ ID NO: 143359 - DNA, 75 bp, synthetic construct
  source 1..75: mol_type = other DNA
catgatctggataaaagggaagttattgttaaatctgtaaccagagaagaattagggatgatgggagagcaactt

SEQ ID NO: 143360 - DNA, 75 bp, synthetic construct
  source 1..75: mol_type = other DNA
cgcagggcgttaagctcgatcaggaaaacagccgtatttttctgccgaaacttggctggatgcgctaccggaata

SEQ ID NO: 143361 - DNA, 75 bp, synthetic construct
  source 1..75: mol_type = other DNA
ctcatccgcatcgaaacagacaacggcgagcgggagaaagcgcagcgccgcagcctggcggagaagctgcagcag

SEQ ID NO: 143362 - DNA, 75 bp, synthetic construct
  source 1..75: mol_type = other DNA
aattgaatgactgttttcaatttaaatggccagaagatataaaagaaaatgacaaatactacagattaattatta

SEQ ID NO: 143363 - DNA, 75 bp, synthetic construct
  source 1..75: mol_type = other DNA
tatctcttcgcgaatcaagaggagctatagaagacttctcaatgtctttcctactaaattttgcagaaaattgtc

SEQ ID NO: 143364 - DNA, 75 bp, synthetic construct
  source 1..75: mol_type = other DNA
atgacctgcctgatctcgttcagatgattggacgagccgggcgcgatggtcaacctgcccgcgcgtttctgctgt

SEQ ID NO: 143365 - DNA, 75 bp, synthetic construct
  source 1..75: mol_type = other DNA
agggtatcgtgagcgcaaccgccaggacagatgtagagctggatggcgataatagccgctttgtggggcaattca

SEQ ID NO: 143366 - DNA, 75 bp, synthetic construct
  source 1..75: mol_type = other DNA
agtggtaaatacgtactaacatcaaaactccgtacaacttcgacgtctgatggcccattcacatcaacaaaaatc

SEQ ID NO: 143367 - DNA, 75 bp, synthetic construct
  source 1..75: mol_type = other DNA
agcgatgtcgccagcggcaaaggtaagctttccaacgcgctgaccaacaacttcaacaccagtcaacgcctcaca

SEQ ID NO: 143368 - DNA, 75 bp, synthetic construct
  source 1..75: mol_type = other DNA
aaggtgaagccagagccagactgcaggcccaatatgatgcagcagacgctggcatcaccgatcagaaacgcatca

SEQ ID NO: 143369 - DNA, 75 bp, synthetic construct
  source 1..75: mol_type = other DNA
cggcggggtggtaatcaacatccagaactatacgtcatcctctgtcgatgcccaggctggtacagatgcaaacgg

SEQ ID NO: 143370 - DNA, 75 bp, synthetic construct
  source 1..75: mol_type = other DNA
tgaccggatcctgaacgttgtcgggctgcccgtgccggatgcgaccggcgggcgtctggaaattctctgtcggct

SEQ ID NO: 143371 - DNA, 75 bp, synthetic construct
  source 1..75: mol_type = other DNA
caaaccagaaggtgaagatgatgtagctttgcaaggtactgacttgaaagagaaattctatgattatcttgtgaa

SEQ ID NO: 143372 - DNA, 75 bp, synthetic construct
  source 1..75: mol_type = other DNA
ttgcccatagtctgtcgttaaaaatctcctctatattaaaagactggcatttccccggagcatgccaggtatttt

SEQ ID NO: 143373 - DNA, 75 bp, synthetic construct
  source 1..75: mol_type = other DNA
attcaacatcaaccgctgactccgcgctggtcgttaataattactcaacatgcagacaagcaactttttgatctg

SEQ ID NO: 143374 - DNA, 75 bp, synthetic construct
  source 1..75: mol_type = other DNA
atctgtgctgtgtgctctctgtgtcgataccggtaccggtcaaccctgtaaccccggagacacccgacaaattat

SEQ ID NO: 143375 - DNA, 75 bp, synthetic construct
  source 1..75: mol_type = other DNA
gcatataaaaacagcggtcataaaatcagcttcgtttttgagcgtgatcctgacatggggaaagaagaaatcgaa

SEQ ID NO: 143376 - DNA, 75 bp, synthetic construct
  source 1..75: mol_type = other DNA
tggtgtggagagtcgaagcctaccgaagatagatttaatagtacaaatcatcattgtgacccgaacggcttggct

SEQ ID NO: 143377 - DNA, 75 bp, synthetic construct
  source 1..75: mol_type = other DNA
ggactggtacagcttatccgtgacagcctgccggagcagagaaaggacgaagccgtggggatcattctgagcaat

SEQ ID NO: 143378 - DNA, 75 bp, synthetic construct
  source 1..75: mol_type = other DNA
ctcgcccgattattgcggattgcggacacttcggttttgcaggtacataacgtgctatcgcccgaaaaaggcctg

SEQ ID NO: 143379 - DNA, 75 bp, synthetic construct
  source 1..75: mol_type = other DNA
gcgctgatggcttatggcgttgatcgttttattatcgatgaggcacacacggtcaaagactgggatttccgccca

SEQ ID NO: 143380 - DNA, 75 bp, synthetic construct
  source 1..75: mol_type = other DNA
cgcccgatccaagtaaattgccggacatagcgaaacaattaagactgccatatcctattgaccaggccagtagtg

SEQ ID NO: 143381 - DNA, 75 bp, synthetic construct
  source 1..75: mol_type = other DNA
aagcggctccgaagggattccgctgggtcttctgtcgctaccgtaaggttcgcgggaagtccgcaaaagtccttg

SEQ ID NO: 143382 - DNA, 75 bp, synthetic construct
  source 1..75: mol_type = other DNA
tgatacttgcaggttctcaggccatctttcaatccatagcggtactgataatgactatcggtgggcttgcaggtg

SEQ ID NO: 143383 - DNA, 75 bp, synthetic construct
  source 1..75: mol_type = other DNA
tccaaaaagaaaacttaaaggtgtgcaagaaatcattgatgatactaccaataaacctaagaagcttccctgcat

SEQ ID NO: 143384 - DNA, 75 bp, synthetic construct
  source 1..75: mol_type = other DNA
agtgcctgcgatcttgttttctttgataaaatatggaagaagatgcgctttaacaaagaaaaataaaggtaaggg

SEQ ID NO: 143385 - DNA, 75 bp, synthetic construct
  source 1..75: mol_type = other DNA
tacgacccgctgggccgcagggtggcaaaacgggtgtggcgacgtgaacgggacctgacgggctggatgtcgctg

SEQ ID NO: 143386 - DNA, 75 bp, synthetic construct
  source 1..75: mol_type = other DNA
ggatactggggtggtctgagggggtgccgggtgctgaggacgtactgccagcgccgctgccgccgtaccgggtgc

SEQ ID NO: 143387 - DNA, 75 bp, synthetic construct
  source 1..75: mol_type = other DNA
ttaagggaggctggcgttcacgcggtggcctttggcgataaactaccgaagcggcgtaatgcgcagcaacttgcg

SEQ ID NO: 143388 - DNA, 75 bp, synthetic construct
  source 1..75: mol_type = other DNA
gcagcaaaaaaataagctttatgtataaagcgaaaagttacagcgccattgaaccctatcgtctcgtcagtgaca

SEQ ID NO: 143389 - DNA, 75 bp, synthetic construct
  source 1..75: mol_type = other DNA
aagacatacgccttgccctgaaacgatacgagcagaatgaaagtacggaatcaaccggagatacctctaatgaat

SEQ ID NO: 143390 - DNA, 75 bp, synthetic construct
  source 1..75: mol_type = other DNA
agcattcggaacgtggctcgaaaatgacgtactcctcatttagtgccgctttctcgtcaggcactggcaatcctt

SEQ ID NO: 143391 - DNA, 75 bp, synthetic construct
  source 1..75: mol_type = other DNA
aacaatgaatgagtggaaagaggcgggtattaagctggctggcattgaaattgattacgatgcgccaacggcaaa

SEQ ID NO: 143392 - DNA, 75 bp, synthetic construct
  source 1..75: mol_type = other DNA
ggacactttccgccctcaaaatacggcatgacgccttactggacacgctggagcaggccctgacacatgattctg

SEQ ID NO: 143393 - DNA, 75 bp, synthetic construct
  source 1..75: mol_type = other DNA
agcctcatctgcctgaagatgcccgtcctgccggctggcgacagggcggggatacctctgtattccacgcaccgt

SEQ ID NO: 143394 - DNA, 75 bp, synthetic construct
  source 1..75: mol_type = other DNA
cgttcagatggggacattacgtaccgatgcggatggtgcacttggcaacacccgggaactgaacatcagcaacgc

SEQ ID NO: 143395 - DNA, 75 bp, synthetic construct
  source 1..75: mol_type = other DNA
agtcagcctcgataatactcaggggttaggcagaggaaatattgccaatgacggtctgttaacgctaaaaaacgt

SEQ ID NO: 143396 - DNA, 75 bp, synthetic construct
  source 1..75: mol_type = other DNA
gcacgccgtgccggaatcaacaaccggacagaatgcttttctcaaagcctgccgcgagtttctcatttgcgatga

SEQ ID NO: 143397 - DNA, 75 bp, synthetic construct
  source 1..75: mol_type = other DNA
cccggaaagctggttattgaagatccacttccgccagccgtccaccttaccggtatcctgtgcagtaccgcgcat

SEQ ID NO: 143398 - DNA, 75 bp, synthetic construct
  source 1..75: mol_type = other DNA
tgaaacgctacgggatcgacattctgcatctggacagggacggcgatgttctgcccggttttgtcactttcgact

SEQ ID NO: 143399 - DNA, 75 bp, synthetic construct
  source 1..75: mol_type = other DNA
tctgagcataatcggccagcatgcagaggattggctattgctgctctatgttttaggggggactggagcggggag

SEQ ID NO: 143400 - DNA, 75 bp, synthetic construct
  source 1..75: mol_type = other DNA
aagtgctggcaaacgcaaaactgcctgatgcgctacgcttatcaggccttgtattatccctccagtgcagagaaa

SEQ ID NO: 143401 - DNA, 75 bp, synthetic construct
  source 1..75: mol_type = other DNA
cgtgctggcctgcaccctttttgcctggaatcgcaactactttgttttgctattcgttggcgtctttcttagcag

SEQ ID NO: 143402 - DNA, 75 bp, synthetic construct
  source 1..75: mol_type = other DNA
tgccttcacttacccattgatttatgagtcccgtgctggcgttggtctgtctgtaatcgttgttcctactaatac

SEQ ID NO: 143403 - DNA, 75 bp, synthetic construct
  source 1..75: mol_type = other DNA
tttcactgacgcaaatttaggtgacactattttttcacataaagaacaccctaccccaaaattatataaagacga

SEQ ID NO: 143404 - DNA, 75 bp, synthetic construct
  source 1..75: mol_type = other DNA
taattttattgctgaacaacgagctgacttaccaactaatataaaagatattcaaagcctgtatcaaaaaatgac

SEQ ID NO: 143405 - DNA, 75 bp, synthetic construct
  source 1..75: mol_type = other DNA
ctatcacaaaattacataaagatgaacaatatgttgacaaacaaatcaatggtttattttcaacattattaacca

SEQ ID NO: 143406 - DNA, 75 bp, synthetic construct
  source 1..75: mol_type = other DNA
tcatgggctgtagtgagaaataaaagagcattacattattggagtaaaaaatcggttaacatcatcaacaggatg

SEQ ID NO: 143407 - DNA, 75 bp, synthetic construct
  source 1..75: mol_type = other DNA
ttcaaagcttgtacttaaaaatggcgaagctgtatattgagcacagtgaaaatgaaaataggatggaagcccttg

SEQ ID NO: 143408 - DNA, 75 bp, synthetic construct
  source 1..75: mol_type = other DNA
gaaggatacaaccctgaacaatatgatttagcgcggcaacacctcccacaaatttatgcgtgccgcacgaacacc

SEQ ID NO: 143409 - DNA, 75 bp, synthetic construct
  source 1..75: mol_type = other DNA
aacgtgcggaagtacgtatttttgccggtaatgatccggctcataccgccacaggcagcagcgggatttctcagg

SEQ ID NO: 143410 - DNA, 75 bp, synthetic construct
  source 1..75: mol_type = other DNA
gcacaggtgcgcgcattttcgctggcaatgacccggtgcatacagctgtgggtaaaagtggtatcacgtctgcca

SEQ ID NO: 143411 - DNA, 75 bp, synthetic construct
  source 1..75: mol_type = other DNA
ggttttctgccgttaccgcaaggtgcgtgggaaatcaaaaaaagtccttgatgctcatgattacgggtacgaggc

SEQ ID NO: 143412 - DNA, 75 bp, synthetic construct
  source 1..75: mol_type = other DNA
tgttcctgtccgactcaaacttaaatctcaactgagaactggttatgcagaaagatatcaggctatagcgtctca

SEQ ID NO: 143413 - DNA, 75 bp, synthetic construct
  source 1..75: mol_type = other DNA
agcgatatcaggtacaactgagtcttcgccagaaataccagcaacagctggagcagttgaggcgggatagtgagc

SEQ ID NO: 143414 - DNA, 75 bp, synthetic construct
  source 1..75: mol_type = other DNA
cggtaaacgtcgaccaggccagtagaaaagcgaccttcccacttgctgcacggatgtatacacctaccggtacgg

SEQ ID NO: 143415 - DNA, 75 bp, synthetic construct
  source 1..75: mol_type = other DNA
actgtcagctttgagcaggcgcgagccgttaattacgacacggtcggccataccagtgagtggcagaactttagt

SEQ ID NO: 143416 - DNA, 75 bp, synthetic construct
  source 1..75: mol_type = other DNA
acattactcttattttccgaagcccctttcttacgcgaacaggaggttgctgtcataacagcttaccgcaatgtg

SEQ ID NO: 143417 - DNA, 75 bp, synthetic construct
  source 1..75: mol_type = other DNA
tcagattcatcatacctgtctccagattcatttgtaaattctgattggtactatcacttcaaaaaagatcttgaa

SEQ ID NO: 143418 - DNA, 75 bp, synthetic construct
  source 1..75: mol_type = other DNA
tcttgttcgaaaatccagagttacaagaaaaaacttacttcgttgtaagagatggtgccgattttaaagaaatat

SEQ ID NO: 143419 - DNA, 75 bp, synthetic construct
  source 1..75: mol_type = other DNA
gacaatcagaaaaggatgttggtaaagacttaggcgcaggatggagagagcaggttagctataaagatgggaaag

SEQ ID NO: 143420 - DNA, 75 bp, synthetic construct
  source 1..75: mol_type = other DNA
tcagtatcagtcacctaaacaacagagaaaaaacaaatatcgctgatgccctgagacaaacatatcccctgacag

SEQ ID NO: 143421 - DNA, 75 bp, synthetic construct
  source 1..75: mol_type = other DNA
atgaaattgatgctgaaaaaccttagcatggcgatcatgatgagtggaatgatcatgggaagcagtgcaatggcg

SEQ ID NO: 143422 - DNA, 75 bp, synthetic construct
  source 1..75: mol_type = other DNA
aaagtgaatgagtacacctatgaatataaacaaaaatcaaaccgttctcacagaaaaattatgactccctacaat

SEQ ID NO: 143423 - DNA, 75 bp, synthetic construct
  source 1..75: mol_type = other DNA
ttcagtgcaattgaagccgaactcgccgacgtcaaaaaagcgctcgccgaacaggccgacgccacctcgcagcaa

SEQ ID NO: 143424 - DNA, 75 bp, synthetic construct
  source 1..75: mol_type = other DNA
tcggcactcaacggcaagctggcgctgttcggcaaaattgccccgctcgacaacctgctcgcgatgctggcgaaa

SEQ ID NO: 143425 - DNA, 75 bp, synthetic construct
  source 1..75: mol_type = other DNA
aatcaaccaaatgatgttattaatgaaaaaattaataatgaattaaaacttaggtttagaatgatgcaaactatc

SEQ ID NO: 143426 - DNA, 75 bp, synthetic construct
  source 1..75: mol_type = other DNA
tggcctgcctgtgtcagaaaatctgctggagcaggatttttacgccagtggtccgaaccagaagcgggcgggaga

SEQ ID NO: 143427 - DNA, 75 bp, synthetic construct
  source 1..75: mol_type = other DNA
gcggctggtatacgtgttgccaacggcggacaaggataagccctcgtcagcagttccgtcagcactgcgacagcg

SEQ ID NO: 143428 - DNA, 75 bp, synthetic construct
  source 1..75: mol_type = other DNA
gtggtgacctggtttgaactgggggagaacgacaaaaaccagatgctgtacagcatgaaggtgcacccgccgctg

SEQ ID NO: 143429 - DNA, 75 bp, synthetic construct
  source 1..75: mol_type = other DNA
gcacgtaatgtcggctttgcgttagtgaagccaggttcgtctacgcctattaccctgaaccagccttacacgaca

SEQ ID NO: 143430 - DNA, 75 bp, synthetic construct
  source 1..75: mol_type = other DNA
taccagcgcagtggccgcagacaattcggcgggtggtatcattaactttaccggcgctattagcgatacaacctg

SEQ ID NO: 143431 - DNA, 75 bp, synthetic construct
  source 1..75: mol_type = other DNA
ttctccgtgctgcagaacgcgactggaagtggctggaaaaagcgcctgtcatcaagataccagcggtcagaaaca

SEQ ID NO: 143432 - DNA, 75 bp, synthetic construct
  source 1..75: mol_type = other DNA
attatgacccagccgatcccgacaagatgcgattaccggctggcataacatgtggtaattgccaccatatccatc

SEQ ID NO: 143433 - DNA, 75 bp, synthetic construct
  source 1..75: mol_type = other DNA
tgacgagtttgtgcgtttcgccgccgcagatagccaagctgggatgacggatgtggtcgtcgtggcgcaaagcgt

SEQ ID NO: 143434 - DNA, 75 bp, synthetic construct
  source 1..75: mol_type = other DNA
gtgacgccggttttgagaaatgcacgcaactaattgatgaaatgggcatcttcacggtctctatggcagtacgac

SEQ ID NO: 143435 - DNA, 75 bp, synthetic construct
  source 1..75: mol_type = other DNA
caggggagaggtaaatccacatatcaatttaagagccaattatataaaaattgctgatgcaactacacctggaag

SEQ ID NO: 143436 - DNA, 75 bp, synthetic construct
  source 1..75: mol_type = other DNA
ctatgtataaagaaatacaggggggtaaaattgacgtacatctacaatgcccgcctgggattgatgtttatgcta

SEQ ID NO: 143437 - DNA, 75 bp, synthetic construct
  source 1..75: mol_type = other DNA
caagggagaggtaagcccacatatcaatttaagagccaattatataagaatcgctgatacaactacgccaggtaa

SEQ ID NO: 143438 - DNA, 75 bp, synthetic construct
  source 1..75: mol_type = other DNA
ctgctgttaaaactgcttccgtgtctctggttgttgataacgaagttgcaaaaatgactcttcgtgaaattgccg

SEQ ID NO: 143439 - DNA, 75 bp, synthetic construct
  source 1..75: mol_type = other DNA
taccgaatatctaccgatgagtgacagcgaatacgcgcaaaagcgggcgctgaaacctctcttaaccctgcctta

SEQ ID NO: 143440 - DNA, 75 bp, synthetic construct
  source 1..75: mol_type = other DNA
gctgtggctgaccgttatccgcaagatgtctttgccgaacatacacatgatttttgtgagctggtgattgtctgg

SEQ ID NO: 143441 - DNA, 75 bp, synthetic construct
  source 1..75: mol_type = other DNA
tatacttcctgcaactggagaatgacttggaacctgtaggcgctcagagtgttagtcagcttttcaatacaagac

SEQ ID NO: 143442 - DNA, 75 bp, synthetic construct
  source 1..75: mol_type = other DNA
gtttaaagacgaccgaataaaaatagtttcagagaaagatcgtggaatttatgatgcctggaataaagcagttga

SEQ ID NO: 143443 - DNA, 75 bp, synthetic construct
  source 1..75: mol_type = other DNA
atgaatactgctgttaaaactgcttccgtgtctctggttgttgataacaccaaaccactgaccatgtcttctcgt

SEQ ID NO: 143444 - DNA, 75 bp, synthetic construct
  source 1..75: mol_type = other DNA
ccgcagatcttaattgttttttaaattcaatggttgccgtttcgcaaccaactgttgataaaattatttttggtg

SEQ ID NO: 143445 - DNA, 75 bp, synthetic construct
  source 1..75: mol_type = other DNA
gtgtgaatccaccagccgccgcatcactggatcctgaagatgatattttcagggtggtttattccccggtaagct

SEQ ID NO: 143446 - DNA, 75 bp, synthetic construct
  source 1..75: mol_type = other DNA
gattaagtaacgggaatattttcgttacaccggaagcgacgcccatatgtctatacacaaggcaagatatttctt

SEQ ID NO: 143447 - DNA, 75 bp, synthetic construct
  source 1..75: mol_type = other DNA
aaacgaaaaattcaggctggcgtactggcaggacaggatattactgatctgcgaaaacagtacgaaaagctgggc

SEQ ID NO: 143448 - DNA, 75 bp, synthetic construct
  source 1..75: mol_type = other DNA
gacggatgatcttgcggcttggtttaaggagggtggccttgagaagattcaggcatttatccttgatgatgccct

SEQ ID NO: 143449 - DNA, 75 bp, synthetic construct
  source 1..75: mol_type = other DNA
tgaacgggcagagcgcctggaacgctggaaaggacgggcagggacatttcttaaaaccggactcgggctctctgt

SEQ ID NO: 143450 - DNA, 75 bp, synthetic construct
  source 1..75: mol_type = other DNA
cgttgttacaaaggcgaaaggaactgggactaaaacctgttccgggggggaaactacagctgatcgccggttttt

SEQ ID NO: 143451 - DNA, 75 bp, synthetic construct
  source 1..75: mol_type = other DNA
gggtgatgaagcttctttttgttttgctgtctagcccggagaccctgaacgagacttaccgcagtctggccggaa

SEQ ID NO: 143452 - DNA, 75 bp, synthetic construct
  source 1..75: mol_type = other DNA
cgacagccagatcaactttatcgatacggcagggaatgcccgtatccaggttccaggcttgtatgtgcggatcga

SEQ ID NO: 143453 - DNA, 75 bp, synthetic construct
  source 1..75: mol_type = other DNA
ctgctgaaatttcgtcgtgaattcgaccagtacgtcaacctgcgcccggttcgtctctttcctggcgttccctga

SEQ ID NO: 143454 - DNA, 75 bp, synthetic construct
  source 1..75: mol_type = other DNA
tttcttttctgccggatattatgggacagaaatcaggggaggagacaaaaacggatttggtggtactgcttcagg

SEQ ID NO: 143455 - DNA, 75 bp, synthetic construct
  source 1..75: mol_type = other DNA
cactatccaggacatgatcaaactcgagcagaaaatgctgccggagttacaaccgtatacgcaggagcgggcgga

SEQ ID NO: 143456 - DNA, 75 bp, synthetic construct
  source 1..75: mol_type = other DNA
gcaaaacgggtatggcggcgtgaacgggacctgacgggctggatgtcgctgtcacggaaaccgcaagtgacctgg

SEQ ID NO: 143457 - DNA, 75 bp, synthetic construct
  source 1..75: mol_type = other DNA
caccgctggtggatttcacccgcgaccgcctgcaccgggaaacgctgcgcagcttcggccgttatgaactcacca

SEQ ID NO: 143458 - DNA, 75 bp, synthetic construct
  source 1..75: mol_type = other DNA
tggcagctatgatatgcaagcaaagtgatattggttccgtctctgggattgtgattgcaggttatggcgataaag

SEQ ID NO: 143459 - DNA, 75 bp, synthetic construct
  source 1..75: mol_type = other DNA
ccattccccgggggatctccctgactttcgccctgttcgcggagcttgctggccgggacagggcgaccatcgacc

SEQ ID NO: 143460 - DNA, 75 bp, synthetic construct
  source 1..75: mol_type = other DNA
tattgtcaaagtctggagcagactgaagatcgcatacttcaactcggccaggaaatatctcgcctgttacctgag

SEQ ID NO: 143461 - DNA, 75 bp, synthetic construct
  source 1..75: mol_type = other DNA
tgtacggcaagatggttggtgagcgcattctgaccgaccgtgaaaatggtgaaaaaggcgataattctcaagata

SEQ ID NO: 143462 - DNA, 75 bp, synthetic construct
  source 1..75: mol_type = other DNA
agggtgacgaaaaatctgggggatattcattttggtcagcgttcccgtatgaccgatggtgatgcattctggggg

SEQ ID NO: 143463 - DNA, 75 bp, synthetic construct
  source 1..75: mol_type = other DNA
ggagatggcgagagcggtggcgcagaaaaacggtcagggtgaatggtttgaagaactgctcaggcaaaatccgga

SEQ ID NO: 143464 - DNA, 75 bp, synthetic construct
  source 1..75: mol_type = other DNA
tatgaaacctatgcgtcatgggattctctggcccgactgatggggctgaacggtgaaaacatcggtgatctgttt

SEQ ID NO: 143465 - DNA, 75 bp, synthetic construct
  source 1..75: mol_type = other DNA
acaagaccgcagtagctttagccgcagattcagctgtaacgatttctggaggcggcaaacataaaatctataatg

SEQ ID NO: 143466 - DNA, 75 bp, synthetic construct
  source 1..75: mol_type = other DNA
gccgatgttgatcaaggtgacggcctgggcgtggaattttggaaaagtcattgccgggctcactgaaaaggccat

SEQ ID NO: 143467 - DNA, 75 bp, synthetic construct
  source 1..75: mol_type = other DNA
ctatattgacggacttcctgcagcagttcaggggcagggtaattcggatcctctctcggctcttcagtctacccc

SEQ ID NO: 143468 - DNA, 75 bp, synthetic construct
  source 1..75: mol_type = other DNA
tgctgcagggtatgcgcaagccggttaacgacctgtcccgtggcgcactggttgacgatatcgtctacaccatcg

SEQ ID NO: 143469 - DNA, 75 bp, synthetic construct
  source 1..75: mol_type = other DNA
cagctgaacgttccggtgtctggtatcgttatcagtccggaacgatgaaacggtttgatggtttgcctctcgatg

SEQ ID NO: 143470 - DNA, 75 bp, synthetic construct
  source 1..75: mol_type = other DNA
accaaacgttttgccaaaaatttgaaaatatataatcttcctggcattcaattttatggagataaagccagagta

SEQ ID NO: 143471 - DNA, 75 bp, synthetic construct
  source 1..75: mol_type = other DNA
agttattgcgtaacgaaagccccagggtgattgacttcaccattacccacggtaaggggcgtaagggaatcatta

SEQ ID NO: 143472 - DNA, 75 bp, synthetic construct
  source 1..75: mol_type = other DNA
tgctgttacagtcatcgttatattccttattggatggggagcaggtattgttttctttctgggaattaaacaaaa

SEQ ID NO: 143473 - DNA, 75 bp, synthetic construct
  source 1..75: mol_type = other DNA
ttggcaaactcacgggtgaggtaaagtgcagtcgtgaagagttcatcaagcaccttacgcaaaaatatcaagagc

SEQ ID NO: 143474 - DNA, 75 bp, synthetic construct
  source 1..75: mol_type = other DNA
gaaaagcatcagccgaaagtatttctaaaggtctcaatattgatttgaatgacgttattgacactctatggaagt

SEQ ID NO: 143475 - DNA, 75 bp, synthetic construct
  source 1..75: mol_type = other DNA
aaatctggctgactggctgcgtctggcattcggcagcgccattgttccgcctctgttggggggtgcccctattaa

SEQ ID NO: 143476 - DNA, 75 bp, synthetic construct
  source 1..75: mol_type = other DNA
gagataatattcagctcgtctttcttgtggatgctacacactatgtaacattagtgaaaaaacagtatccatttg

SEQ ID NO: 143477 - DNA, 75 bp, synthetic construct
  source 1..75: mol_type = other DNA
gatgctctttatagccccggaatgctgcatgactggcttaagacggtcgtggatttacagacaatacattgcata

SEQ ID NO: 143478 - DNA, 75 bp, synthetic construct
  source 1..75: mol_type = other DNA
tggataaacatgcagactcaatacagtcttaacgcgagcaggaagtcacctaatgtcattaaggaattagatgaa

SEQ ID NO: 143479 - DNA, 75 bp, synthetic construct
  source 1..75: mol_type = other DNA
tgaagtcagttggggggttacacaagaggactcagcaaatcttcgtaatgaacttccatgtatttcaggtatgga

SEQ ID NO: 143480 - DNA, 75 bp, synthetic construct
  source 1..75: mol_type = other DNA
tggatttttgatatttactttaactatgttttgtttcttagctactgttatcaagaaagatagagttaggttttt

SEQ ID NO: 143481 - DNA, 75 bp, synthetic construct
  source 1..75: mol_type = other DNA
acacggagggcgaaggcggcctgaagcgtgtggtgaagaaggagcatgcggacggcagcatcacccgcagcgagt

SEQ ID NO: 143482 - DNA, 75 bp, synthetic construct
  source 1..75: mol_type = other DNA
atcttccccggccagtccccgttctgtttcctcttctcaggttttccccgacacgctgcccgccggtacagagta

SEQ ID NO: 143483 - DNA, 75 bp, synthetic construct
  source 1..75: mol_type = other DNA
cgctaccttaccccagcaagggcgcagccgcgtgccgtccagcccctgagcgccagctaccagcgagagaacccc

SEQ ID NO: 143484 - DNA, 75 bp, synthetic construct
  source 1..75: mol_type = other DNA
gaagcacaaattcaggtgcttcagtatatgcaatgaaaatttatgaagatatagaactatatcttcctatcgttt

SEQ ID NO: 143485 - DNA, 75 bp, synthetic construct
  source 1..75: mol_type = other DNA
ggcactacgatgcgtcggaccgcatcacgcaccggacggtgaacggcgacccggcagagcagtggcagtatgatg

SEQ ID NO: 143486 - DNA, 75 bp, synthetic construct
  source 1..75: mol_type = other DNA
ggaaaagtccatgttgtccgaaacggcgtgaatccggcttctttttataaaaaaaacatggcgcggggtagcgtt

SEQ ID NO: 143487 - DNA, 75 bp, synthetic construct
  source 1..75: mol_type = other DNA
ttaagaaaagctgtttttgaaggtgtcaatatcattattactcatgaacctacattttattcttatgctgatctg

SEQ ID NO: 143488 - DNA, 75 bp, synthetic construct
  source 1..75: mol_type = other DNA
ttttaattatttttataatagaagagtggtcttaaagatgcataaaaaaatgttaaacattaaaaatctgaaata

SEQ ID NO: 143489 - DNA, 75 bp, synthetic construct
  source 1..75: mol_type = other DNA
ggttaaccaccctcagccataccagtgaaggccaccgcgtgtcggtccactacgggtacgacgataagggccgcc

SEQ ID NO: 143490 - DNA, 75 bp, synthetic construct
  source 1..75: mol_type = other DNA
cagcttggatgatgtctgaaaagatagtcactttatttgggttgttttttgttacttcatttgttgctaaataca

SEQ ID NO: 143491 - DNA, 75 bp, synthetic construct
  source 1..75: mol_type = other DNA
cttggcagaagcgtttattttactgcgtcgtcagagaacagatattagtctttctatcatcggggatggaccgga

SEQ ID NO: 143492 - DNA, 75 bp, synthetic construct
  source 1..75: mol_type = other DNA
ctacagacaaaataaggaaatgtcaagaagaagctgtggagaaattttttaaatttaagaaaaaaatattcgtga

SEQ ID NO: 143493 - DNA, 75 bp, synthetic construct
  source 1..75: mol_type = other DNA
aaaagatataaattatggggtggaaatagaaataccatctggtaaaagaattcgcttatcaaatcattaccagaa

SEQ ID NO: 143494 - DNA, 75 bp, synthetic construct
  source 1..75: mol_type = other DNA
atactaattttattgctgaacaacgagctgacttaccaactaatataaaagatattcaaagcctgtatcaaaaaa

SEQ ID NO: 143495 - DNA, 75 bp, synthetic construct
  source 1..75: mol_type = other DNA
ttcagggcacggcactcggcggtttaccacaggaatttactgcctacggcgggacgcaattatctgccaattaca

SEQ ID NO: 143496 - DNA, 75 bp, synthetic construct
  source 1..75: mol_type = other DNA
aatattttatgaatgtcttctgtaataatgcactacccccccatcaccaggagaagaatacccatctgcatgggt

SEQ ID NO: 143497 - DNA, 75 bp, synthetic construct
  source 1..75: mol_type = other DNA
agctacctcattgggcttttctgcttgagtgtccgttctgtggcggcggcgcagaacttttttctgatggtgatg

SEQ ID NO: 143498 - DNA, 75 bp, synthetic construct
  source 1..75: mol_type = other DNA
gtaataaactcaaagtcataggtgatggtagttctcgggttgacctcggtaataacgggagtaacctcagtgaca

SEQ ID NO: 143499 - DNA, 75 bp, synthetic construct
  source 1..75: mol_type = other DNA
tggaaatgagaaaaactgctgtgacgcggcaactgttatggatggaatacaaggcacaggcgggtgataaagcga

SEQ ID NO: 143500 - DNA, 75 bp, synthetic construct
  source 1..75: mol_type = other DNA
gaccctgtgcacgctaatgacagtatcagcccgatatttgacaaggagaaggagcagaggcgtctgcagacagtg

SEQ ID NO: 143501 - DNA, 75 bp, synthetic construct
  source 1..75: mol_type = other DNA
ctttgccggaaccaactttattgatttcaatatgacaggacagaacctgtccgggttcgttctaaccttgtcaag

SEQ ID NO: 143502 - DNA, 75 bp, synthetic construct
  source 1..75: mol_type = other DNA
tatcgctgagcaggacggtgtatttttatcagcctgatacccggcgttatgaacaggtgatccatgcgctgactg

SEQ ID NO: 143503 - DNA, 75 bp, synthetic construct
  source 1..75: mol_type = other DNA
tcaaccagctcagaatgttcattgctgaacaccagctaccggtcacagttcttgtcgcccgaccgtctcttacgc

SEQ ID NO: 143504 - DNA, 75 bp, synthetic construct
  source 1..75: mol_type = other DNA
tggtgcgttttgatccagtgtatgtgacccacttcaagtgtgataagcaccgcatcagcgattacctgaatctgt

SEQ ID NO: 143505 - DNA, 75 bp, synthetic construct
  source 1..75: mol_type = other DNA
cggctgatgccaatattggcgcagcgcgagcggcctttttcccctcaattaccctgaccagtggtctttccgcaa

SEQ ID NO: 143506 - DNA, 75 bp, synthetic construct
  source 1..75: mol_type = other DNA
atctgttgcggtgaaaatcatgtcccaatggaaaggattaacgctgacagaattgttatctgcttttaagcaggt

SEQ ID NO: 143507 - DNA, 75 bp, synthetic construct
  source 1..75: mol_type = other DNA
ccatcatattatcagtggcaagcggttccgtgctggctgacaaccattcgttttctgtcggttatgcacagagta

SEQ ID NO: 143508 - DNA, 75 bp, synthetic construct
  source 1..75: mol_type = other DNA
tttcggaaaaatccacatcttttgcttatagtgccggcgtgatgattaatccgacaaataatattacaattaatg

SEQ ID NO: 143509 - DNA, 75 bp, synthetic construct
  source 1..75: mol_type = other DNA
gccccgaccggagtcactttagttacaacacccaaatacaaccaccggaaaaaccccagtttcgcgcagaactga

SEQ ID NO: 143510 - DNA, 75 bp, synthetic construct
  source 1..75: mol_type = other DNA
atgcaaacatttaatgactttgaaaataaaaggatcgagattccaccaaacataattaatagcttttcaagtatt

SEQ ID NO: 143511 - DNA, 75 bp, synthetic construct
  source 1..75: mol_type = other DNA
acgcagataccgtctggggggaattactcggcgatgcctgcggactggtattcacgcaccacgatgaaaaaacgc

SEQ ID NO: 143512 - DNA, 75 bp, synthetic construct
  source 1..75: mol_type = other DNA
cgggtatgcgacgtcttgcaagctatttagatctccattcaggctatccctgtattcattttacagggggctgtg

SEQ ID NO: 143513 - DNA, 75 bp, synthetic construct
  source 1..75: mol_type = other DNA
gcctgcccgctgcgccactggtgcggtacacatatacggaagccggtgaactgctggcggtatatgaccgcagca

SEQ ID NO: 143514 - DNA, 75 bp, synthetic construct
  source 1..75: mol_type = other DNA
gttgcggctgatattcctgccgccgttaagggcgccgttctgcttgtctttgctgacatgtttgaacaccggacg

SEQ ID NO: 143515 - DNA, 75 bp, synthetic construct
  source 1..75: mol_type = other DNA
ccacaccttctgtttccgtaaccgctgcatcagggaatgaccagcctcagctggttgccaccatagtccctgatg

SEQ ID NO: 143516 - DNA, 75 bp, synthetic construct
  source 1..75: mol_type = other DNA
ggatgggaacaaaggctgatgatttgtttgttattccgctgtgccgtaaatgtcataacgaactgcacgccgggg

SEQ ID NO: 143517 - DNA, 75 bp, synthetic construct
  source 1..75: mol_type = other DNA
aattatcgctggctgaattgtgctgctgggcttctgtaaatgatgtagtggatgccatgaccgaaaatatggcgc

SEQ ID NO: 143518 - DNA, 75 bp, synthetic construct
  source 1..75: mol_type = other DNA
caccacaggaaaagacggtggtcagcattgccgttgatccggagtcaccggctcagtatctccagcgccagaaac

SEQ ID NO: 143519 - DNA, 75 bp, synthetic construct
  source 1..75: mol_type = other DNA
ctgccagtggcctcatggtgattatcaccacagcgaaaccgtcattcaccgttacggtgccggcgcgatggtgtt

SEQ ID NO: 143520 - DNA, 75 bp, synthetic construct
  source 1..75: mol_type = other DNA
gaaaaaggtgctggcgctgaaagtggatccggagtcgccggagtcttttatgttacgaccaaaacgtcgccgctg

SEQ ID NO: 143521 - DNA, 75 bp, synthetic construct
  source 1..75: mol_type = other DNA
tgttacgccccaaacgtcgccgctgggttaatgaaaagtacacgcgctgggttaagacgcagccgtgcgcatgtt

SEQ ID NO: 143522 - DNA, 75 bp, synthetic construct
  source 1..75: mol_type = other DNA
actggctcctgcgtcatgttaaatcctgccagtggcctcatggagactatcaccacagtgaaaccgtcatacatc

SEQ ID NO: 143523 - DNA, 75 bp, synthetic construct
  source 1..75: mol_type = other DNA
ccgcaatgaggcagtgattcgtcgtgctggtggagtggaatgtcttgaaagctggttacttcgtgaaaaaggctg

SEQ ID NO: 143524 - DNA, 75 bp, synthetic construct
  source 1..75: mol_type = other DNA
gggaattgtcgctggctgaattatcctggtgggcggtctgcaatcaggtagcggacgcgctaccggagtcagtat

SEQ ID NO: 143525 - DNA, 75 bp, synthetic construct
  source 1..75: mol_type = other DNA
actgggagggatgggaacaaaggctgatgatttgtttgttattccgctgtgccgtaatggccgggcagtccaatg

SEQ ID NO: 143526 - DNA, 75 bp, synthetic construct
  source 1..75: mol_type = other DNA
agcctggatgattgatgtcatacgtcacgcaatgaatggcacgcaggagcgggagttatcgctggctgaattatc

SEQ ID NO: 143527 - DNA, 75 bp, synthetic construct
  source 1..75: mol_type = other DNA
gcgggcgctgccatccggagcggttcccactgttcgccagccgctggtggaagacaaatcattactgccattttt

SEQ ID NO: 143528 - DNA, 75 bp, synthetic construct
  source 1..75: mol_type = other DNA
ctggtgggcggcctgcaatcaggtggtggatgcactgcctgaggcagtagcgcgtcgttcgctgggattaccagc

SEQ ID NO: 143529 - DNA, 75 bp, synthetic construct
  source 1..75: mol_type = other DNA
ctggtgggcagtctgcaatcaggtggtggacgcattacctgaggcagtatcgcgtcgctctctgggattaccggc

SEQ ID NO: 143530 - DNA, 75 bp, synthetic construct
  source 1..75: mol_type = other DNA
gcggacgcattaccggaggcagtattacgtcgttcgctgggattgcgtgcggataaaatcctctcagtgtaccgc

SEQ ID NO: 143531 - DNA, 75 bp, synthetic construct
  source 1..75: mol_type = other DNA
gtggatgccatgaccgaaaatatggagcgtcgaatcctgaagcttccgggtgaaaaaatccgctccgtataccgt

SEQ ID NO: 143532 - DNA, 75 bp, synthetic construct
  source 1..75: mol_type = other DNA
gtgcggatattacttcgacctgttctggtaccggaactcgggcttgtggtccttaggccgggctgtgaatccatg

SEQ ID NO: 143533 - DNA, 75 bp, synthetic construct
  source 1..75: mol_type = other DNA
cctgacgttcgccagccgctggcggaggataaatcattactgccatttttcagcaacgagcgggttattcgtgct

SEQ ID NO: 143534 - DNA, 75 bp, synthetic construct
  source 1..75: mol_type = other DNA
aagagaagtatggctcccagttggagctgatatttcgttttattgatcgtgcgctggcaattggcgtgctggcgt

SEQ ID NO: 143535 - DNA, 75 bp, synthetic construct
  source 1..75: mol_type = other DNA
aaagtacacgcgctgggttaagacgcagccgtgcgcatgttgcggaaagcctgctgatgatgcccaccacctgat

SEQ ID NO: 143536 - DNA, 75 bp, synthetic construct
  source 1..75: mol_type = other DNA
ttcgaagaaaagcatggttcccaggttgatttaatttttcattttcttgatcacgcctttgcaaccggcgtgctt

SEQ ID NO: 143537 - DNA, 75 bp, synthetic construct
  source 1..75: mol_type = other DNA
caccagcaacagaacccgccacaggaaaagacggtggtcagcattgctgttgatccggagtctccggaatcttta

SEQ ID NO: 143538 - DNA, 75 bp, synthetic construct
  source 1..75: mol_type = other DNA
cctgccgttcgccagccgctggtggaagacaaaacattgctgccgttttttagtaacgaacgggtgattcgtgct

SEQ ID NO: 143539 - DNA, 75 bp, synthetic construct
  source 1..75: mol_type = other DNA
gtggatgctctacctgaggcagtatcacgtcgttcgttgggattaccggtggaaaaaatcctctctgtgtatcgc

SEQ ID NO: 143540 - DNA, 75 bp, synthetic construct
  source 1..75: mol_type = other DNA
gtgccgggaacatcacaacgaacttcatgcagacccgctggagtttgagaaaaagtacggctctcaggttgagtt

SEQ ID NO: 143541 - DNA, 75 bp, synthetic construct
  source 1..75: mol_type = other DNA
ctggtgggcagtccgcaatcaggtggcggacgcgctaccggaagcggtattacgtcgttcgctggggttgcgtgc

SEQ ID NO: 143542 - DNA, 75 bp, synthetic construct
  source 1..75: mol_type = other DNA
ggcactgcgacaaccagctgcgcgaccagacctccgaatcactcgggcaacttgctcaccaaaacctgtctgcat

SEQ ID NO: 143543 - DNA, 75 bp, synthetic construct
  source 1..75: mol_type = other DNA
gctggtggcgctggtgcactgtctgactggttattacgtcacgttaaatcctgccagtggcctcatggtgattat

SEQ ID NO: 143544 - DNA, 75 bp, synthetic construct
  source 1..75: mol_type = other DNA
ctggtgggcggtccgcaatcaggtggcggacgcgcttccggaggcagtattacgtcgttctctggggttacgtgc

SEQ ID NO: 143545 - DNA, 75 bp, synthetic construct
  source 1..75: mol_type = other DNA
catgcagacccgctggagtttgagaaaaagtacggctctcaggttgagttaatttttcgttttcttgatcacgcc

SEQ ID NO: 143546 - DNA, 75 bp, synthetic construct
  source 1..75: mol_type = other DNA
catcacagcgaaaccgtcatacatcgttacggtgctggcgcgatggtgttgtgctggcactgtgacaaccagttg

SEQ ID NO: 143547 - DNA, 75 bp, synthetic construct
  source 1..75: mol_type = other DNA
ggcagcttgctcaacaaaatctgacagcctggatgattgacgtcatacgtcacgcaataagcggtacacaggagc

SEQ ID NO: 143548 - DNA, 75 bp, synthetic construct
  source 1..75: mol_type = other DNA
cctgccgttcgccagccgctggcggaagataaatcattactgccatttttcagcgatgagcgggtgattcgtgct

SEQ ID NO: 143549 - DNA, 75 bp, synthetic construct
  source 1..75: mol_type = other DNA
cggcagccaactgttgttgctgattcgttttttaatgcacgcgagaaattcgggtgttttgaagtggaaagcata

SEQ ID NO: 143550 - DNA, 75 bp, synthetic construct
  source 1..75: mol_type = other DNA
ctggtgggcggtttgcaatcagatggtggatgctctacctgaggcagtatcacgtcgttcgttgggattaccggt

SEQ ID NO: 143551 - DNA, 75 bp, synthetic construct
  source 1..75: mol_type = other DNA
tggtcagggggagtgggaacaaaggcccacgatattttcacgctaccgttgtgccgggagcaccacaacgaactt

SEQ ID NO: 143552 - DNA, 75 bp, synthetic construct
  source 1..75: mol_type = other DNA
gaccagacatccgaatcactcgagcaacttgctcatcaaaacctgacagcctggatgactgacgtcatacgtcac

SEQ ID NO: 143553 - DNA, 75 bp, synthetic construct
  source 1..75: mol_type = other DNA
gagagcgacatcgtaccgggagaacagacagccaccagcatactgaagcagcgcacaaaaaatattgcgctaccg

SEQ ID NO: 143554 - DNA, 75 bp, synthetic construct
  source 1..75: mol_type = other DNA
gaagaaaagcatggttctcaggttgatttaattttcgttttcttgatcacgcctttgcaactggcgtgcttgggt

SEQ ID NO: 143555 - DNA, 75 bp, synthetic construct
  source 1..75: mol_type = other DNA
gcaatgaatggcacgcaggagcgggaattatcgctggctgaattatcctggtgggcggtctgcaatcaggtggcg

SEQ ID NO: 143556 - DNA, 75 bp, synthetic construct
  source 1..75: mol_type = other DNA
tgatccggagtctccggaatctttcatgaggcgacctaaacgtcgccgttgggtaaatgagaaatatacgcgctg

SEQ ID NO: 143557 - DNA, 75 bp, synthetic construct
  source 1..75: mol_type = other DNA
ctgcgacaaccagctgcgtgaccagacatccgaatcactcgagcaacttgctcatcaaaacctgtcagcatggat

SEQ ID NO: 143558 - DNA, 75 bp, synthetic construct
  source 1..75: mol_type = other DNA
tgctggagcctgagccggaacgttattcatcttttgccagtggtgccgttccggcagcatcacaaccgctggcgg

SEQ ID NO: 143559 - DNA, 75 bp, synthetic construct
  source 1..75: mol_type = other DNA
aatgaaaagtacacgcgctgggttaagacacagccgtgtgcatgttgtggaaagccagctgatgatccgcatcat

SEQ ID NO: 143560 - DNA, 75 bp, synthetic construct
  source 1..75: mol_type = other DNA
gttatggtaccggcgcaatggtgttgtgctggcactgcgacaaccagttgcgtgaccagacctccgaatcacttg

SEQ ID NO: 143561 - DNA, 75 bp, synthetic construct
  source 1..75: mol_type = other DNA
agcaacgcatctggaggtaacgtgcgggtattacttcgacctgttctggtaccggaactcgggctggtgatcgtt

SEQ ID NO: 143562 - DNA, 75 bp, synthetic construct
  source 1..75: mol_type = other DNA
atctttcatgaaacgacctaaacgtcgccgctgggttaacgagaaatacacgcgctgggtgaagacacagccgtg

SEQ ID NO: 143563 - DNA, 75 bp, synthetic construct
  source 1..75: mol_type = other DNA
acgatccccatcacctgattggtcatggtcagggcggaatgggaacaaaggcccacgatatttttacactaccgc

SEQ ID NO: 143564 - DNA, 75 bp, synthetic construct
  source 1..75: mol_type = other DNA
gtggtgatgaactcagttctctgggatgtgatgtgtcagagcaactggagcttatcagcagcgcctttaaggtta

SEQ ID NO: 143565 - DNA, 75 bp, synthetic construct
  source 1..75: mol_type = other DNA
atgaaaagagttttgttctttttgctgatgatattcgttagttttggtgttatagctaattgcgaaacacaagct

SEQ ID NO: 143566 - DNA, 75 bp, synthetic construct
  source 1..75: mol_type = other DNA
ttgcccgacagggtgccgaactgagccgtgcattaatctccaactgggttgacgcgtgctgccagttaatgactc

SEQ ID NO: 143567 - DNA, 75 bp, synthetic construct
  source 1..75: mol_type = other DNA
cgttctgaaaaactgcagcgtgaggttgaacaggctgaggccctgctgaaacaacgcgaacaggaaagcgatcgt

SEQ ID NO: 143568 - DNA, 75 bp, synthetic construct
  source 1..75: mol_type = other DNA
gcgcaacggccgatatgtcggcaaaaatcggtggcgaaggggatctggcaatcaatacggtacgacaggtttcgc

SEQ ID NO: 143569 - DNA, 75 bp, synthetic construct
  source 1..75: mol_type = other DNA
tggttgaagagacgaagaccttcctgcgctctgcactggcacgtgccgaagaaaagatcgaagaagatgaacggg

SEQ ID NO: 143570 - DNA, 75 bp, synthetic construct
  source 1..75: mol_type = other DNA
aatccaattctgctgaacgggaaaagaatagaaaacctatttaaacacgtttgcgccgcactgaaccactgccag

SEQ ID NO: 143571 - DNA, 75 bp, synthetic construct
  source 1..75: mol_type = other DNA
ccacatcttctgtttccgtaaccactgcatcagggaatgaccagcctcagttggttgccaccatagtccctgatg

SEQ ID NO: 143572 - DNA, 75 bp, synthetic construct
  source 1..75: mol_type = other DNA
aatcagtatctgaaagattatgtcagcgcggaactgggcgaaccaggtcccttctcccgggctttctggtttcat

SEQ ID NO: 143573 - DNA, 75 bp, synthetic construct
  source 1..75: mol_type = other DNA
tcacgtcatcgtcgtccgttaccagcacatcttccccgtgaaatacaccgcctggagcctgaagaaagttgttgc

SEQ ID NO: 143574 - DNA, 75 bp, synthetic construct
  source 1..75: mol_type = other DNA
ttgaagcaccggcgccgtcccgcccgatagagcgtggtatcgcgggccccggattacttgcccgcgtgttaacgg

SEQ ID NO: 143575 - DNA, 75 bp, synthetic construct
  source 1..75: mol_type = other DNA
aacgatttgaagcctttgagcttttttcctcgttgggccagatctataattacgatattaaaaaccccgagcacc

SEQ ID NO: 143576 - DNA, 75 bp, synthetic construct
  source 1..75: mol_type = other DNA
aaccgcgctgaaatgagcccggaagccgccggtattgccgcctgtctgatggcgtacagccatcacgcctgtcgt

SEQ ID NO: 143577 - DNA, 75 bp, synthetic construct
  source 1..75: mol_type = other DNA
ttttacgtcgttgctcaggcacaccttatttttggtctgtggtggtttcacactggcctgtatcagataatggtg

SEQ ID NO: 143578 - DNA, 75 bp, synthetic construct
  source 1..75: mol_type = other DNA
aacagtgcatcagcttctggccacagcactttggcctcattccacagtgggtgaccctggagccccgtgtcttcg

SEQ ID NO: 143579 - DNA, 75 bp, synthetic construct
  source 1..75: mol_type = other DNA
tggaccgtctgtgcgaagactactgcggaggcatctggaatctgtacaccctgaacaacggcggggcatttatgg

SEQ ID NO: 143580 - DNA, 75 bp, synthetic construct
  source 1..75: mol_type = other DNA
tggaccgtctgtgcgaagactactgcggaggaatctggaatctgtacaccctgaacaacggaggggcatttatgg

SEQ ID NO: 143581 - DNA, 75 bp, synthetic construct
  source 1..75: mol_type = other DNA
tgcatcagggaataaccagtctcaactggttgccaccatagtccctgatgaacagcacatcagcttctggccgca

SEQ ID NO: 143582 - DNA, 75 bp, synthetic construct
  source 1..75: mol_type = other DNA
ccggtccaggagccgggcagcggtaaaacccggacagcccggctgtgggtctacgtccgtgatgaccgtaacgcc

SEQ ID NO: 143583 - DNA, 75 bp, synthetic construct
  source 1..75: mol_type = other DNA
tttcctgattttgttgaccacatacaattgccgttaccacttgcgtctactcttttggagagaattacattttat

SEQ ID NO: 143584 - DNA, 75 bp, synthetic construct
  source 1..75: mol_type = other DNA
tccggggctgttcagcagaacagcgtctggcggcaagaaaagccagagccgcgccactgatgcagtcactgtatg

SEQ ID NO: 143585 - DNA, 75 bp, synthetic construct
  source 1..75: mol_type = other DNA
attgattttgcaagctaaagcatggatttgttcaacaatagaacctccggtaggttgtttcattaagcgaagaca

SEQ ID NO: 143586 - DNA, 75 bp, synthetic construct
  source 1..75: mol_type = other DNA
ccacaccttctgtttccgtgaccgctgcatcagggaataacccgcctcagctggttgccactcccgtccctgatg

SEQ ID NO: 143587 - DNA, 75 bp, synthetic construct
  source 1..75: mol_type = other DNA
ggaatatttatctaattttaatgttaagtctagggggaactgccttgagcattatttaaagatacaagaacttat

SEQ ID NO: 143588 - DNA, 75 bp, synthetic construct
  source 1..75: mol_type = other DNA
cccagtgggtggcaataggtgtgctggggagtctgctgtttggcctgctgacgtacctgacaaacctttatttca

SEQ ID NO: 143589 - DNA, 75 bp, synthetic construct
  source 1..75: mol_type = other DNA
atgaaatcaatggacaaaatctctactggcattgcctacggaacatccgcgggtagtgcgggatactggttttta

SEQ ID NO: 143590 - DNA, 75 bp, synthetic construct
  source 1..75: mol_type = other DNA
atgaaatcaatggacaaaatctcaactggcattgcctacggaacatccgctggtagtgcgggatactggttttta

SEQ ID NO: 143591 - DNA, 75 bp, synthetic construct
  source 1..75: mol_type = other DNA
actaacctgtatttcaaaatcagagaggaccgtcgtaaggcggcgcgggggagtaaagcgatgaagaaaaatacg

SEQ ID NO: 143592 - DNA, 75 bp, synthetic construct
  source 1..75: mol_type = other DNA
tttacctctttctcaggaagtttagtctccaggattcccggggcggttcaggcagcaataggtgtgctgggtagc

SEQ ID NO: 143593 - DNA, 75 bp, synthetic construct
  source 1..75: mol_type = other DNA
cgtgctggggagtctgctgtttgggctgctgacatatctgacgaacctgtatttcaagattaaagaagaccggcg

SEQ ID NO: 143594 - DNA, 75 bp, synthetic construct
  source 1..75: mol_type = other DNA
aattatcctttaaggataggaaagatagaaaaagaaaagtattatacttatggttacaagagtaaatgtgataag

SEQ ID NO: 143595 - DNA, 75 bp, synthetic construct
  source 1..75: mol_type = other DNA
tgggctgcgattggtgttctggggagtctggttctgggcttcctgacttatctgacaaatctgtacttcaaaatc

SEQ ID NO: 143596 - DNA, 75 bp, synthetic construct
  source 1..75: mol_type = other DNA
tgaattatcctggtgggcggtccgcaatcagctggcggacgcgctaccggaagcggtattacgtcgctcgctggg

SEQ ID NO: 143597 - DNA, 75 bp, synthetic construct
  source 1..75: mol_type = other DNA
gggtagtctgatatttggtttgctgacgtacctgacaaacctgtatttcaagataaaagaggaccgtcgcaaggc

SEQ ID NO: 143598 - DNA, 75 bp, synthetic construct
  source 1..75: mol_type = other DNA
gaagcagttatttctttaaaaagactagagtcttctaatagggaatttatacgttacagatttgctcaatgctct

SEQ ID NO: 143599 - DNA, 75 bp, synthetic construct
  source 1..75: mol_type = other DNA
tttggaaatgttagtagaagtgatcatataaatataatcgctgcatcaaacattatactcaacaaatctcattta

SEQ ID NO: 143600 - DNA, 75 bp, synthetic construct
  source 1..75: mol_type = other DNA
cgggtgtcgcctatggcacctcagcaggtagtgccgggtactggtttttacagctgctagataaagtcactccct

SEQ ID NO: 143601 - DNA, 75 bp, synthetic construct
  source 1..75: mol_type = other DNA
tgtttggcctgctgacgtatctgactaacctgtatttcaaaatcagagaggaccgtcgtaaggcggcgcgggggg

SEQ ID NO: 143602 - DNA, 75 bp, synthetic construct
  source 1..75: mol_type = other DNA
ctcagcaggtagtgccggttactggtttttacagctgctcgataaagtcacgccctcacagtgggcagcaatagg

SEQ ID NO: 143603 - DNA, 75 bp, synthetic construct
  source 1..75: mol_type = other DNA
ggggagtctgctgtttggtctgctgacatatctgacgaacctgtatttcaagattaaagaagaccggcgtaaggc

SEQ ID NO: 143604 - DNA, 75 bp, synthetic construct
  source 1..75: mol_type = other DNA
atgtaccagatgcaaaaaattacaacaggtgtgtcacacaccacgtcagcggtggtaacgagctactggttcctg

SEQ ID NO: 143605 - DNA, 75 bp, synthetic construct
  source 1..75: mol_type = other DNA
tgctgtttggcctgctgacgtatctgactaacctgtatttcaaaattaaagaggaccgtcgcaaggctgcccggg

SEQ ID NO: 143606 - DNA, 75 bp, synthetic construct
  source 1..75: mol_type = other DNA
aaatcagagaggaccgtcgtaagggtaagcgtaaactgaccgccgtatgtagccatcagacgagaattggtaact

SEQ ID NO: 143607 - DNA, 75 bp, synthetic construct
  source 1..75: mol_type = other DNA
ttgctggacaaagtctccccatcccagtgggtggcaataggcgtattgggtagcttggtgtttggcttgctgacg

SEQ ID NO: 143608 - DNA, 75 bp, synthetic construct
  source 1..75: mol_type = other DNA
cagtgggcggcaataggcgtgctggggagtctgctgtttgggctgctgacatatctgacgaacctgtatttcaaa

SEQ ID NO: 143609 - DNA, 75 bp, synthetic construct
  source 1..75: mol_type = other DNA
ggggagtctgctgtttggtctgctgacgtatctgacgaacctgtatttcaaaattaaagaagaccggcgtaaggc

SEQ ID NO: 143610 - DNA, 75 bp, synthetic construct
  source 1..75: mol_type = other DNA
tgctgggtagcctggtatttggcctgctgacgtacctgacaaatctttatttcaagattaaagaagacaggcgta

SEQ ID NO: 143611 - DNA, 75 bp, synthetic construct
  source 1..75: mol_type = other DNA
gcatatctgacactttggttcccactacttatttggtggacaccactttgtctaattcgtcagattctgaccaga

SEQ ID NO: 143612 - DNA, 75 bp, synthetic construct
  source 1..75: mol_type = other DNA
taatctgccgtccggggtcgttcctgccgttcgccagccgctgggggatgataaaacatttctgccatttttcag

SEQ ID NO: 143613 - DNA, 75 bp, synthetic construct
  source 1..75: mol_type = other DNA
taatctgccgtccggggtcgttcctgccgttcgccagccgctgggggatgaaaaagcatttctgccttttttcag

SEQ ID NO: 143614 - DNA, 75 bp, synthetic construct
  source 1..75: mol_type = other DNA
taatctgccgtccggggtcgttcctgccgttcgccagccgctgggggatgaaaaatcatttctgccatttttcag

SEQ ID NO: 143615 - DNA, 75 bp, synthetic construct
  source 1..75: mol_type = other DNA
taatctgccgtccggggtcgttcctgccgttcgccagccgctgggggatgataaagcatttctgccgtttttcag

SEQ ID NO: 143616 - DNA, 75 bp, synthetic construct
  source 1..75: mol_type = other DNA
taatctgccgtccggggtcgttcctgccgttcgccagccgctgggggatgataaaccatttctgccctttttcag

SEQ ID NO: 143617 - DNA, 75 bp, synthetic construct
  source 1..75: mol_type = other DNA
taatctgccgtccggggtcgttcctgccgttcgccagccgctgggggatgataaatcatttctgccttttttcag

SEQ ID NO: 143618 - DNA, 75 bp, synthetic construct
  source 1..75: mol_type = other DNA
gatcagttcacggaacggctggaatcaatggcaacggataactgtgcccactgggtgttatctgtcgtgcgtcgg

SEQ ID NO: 143619 - DNA, 75 bp, synthetic construct
  source 1..75: mol_type = other DNA
gagaagtatggctcccagctggagctgatatttcgttttatcgatcgtgcactggcaattggcgtactggcctga

SEQ ID NO: 143620 - DNA, 75 bp, synthetic construct
  source 1..75: mol_type = other DNA
aaaaatcatttggatggggttgaagtttggtactttaaaaaccctagaattaaagatgttggtaaaattaagcga

SEQ ID NO: 143621 - DNA, 75 bp, synthetic construct
  source 1..75: mol_type = other DNA
ctcgtctttggccgacctatcgcatggctcgtgaggtctttaatgggactgttcaccctgccgacaagacgcgcg

SEQ ID NO: 143622 - DNA, 75 bp, synthetic construct
  source 1..75: mol_type = other DNA
cacgtaacgattcactggctgcccggaccggtacccggttgcagtcgttgctggtctggtcacccggacagcggg

SEQ ID NO: 143623 - DNA, 75 bp, synthetic construct
  source 1..75: mol_type = other DNA
gccggggtaaaagattttgaagaaaaacacggcagccaactgttgttgctgattcgttttttaatgcacgcgaga

SEQ ID NO: 143624 - DNA, 75 bp, synthetic construct
  source 1..75: mol_type = other DNA
tgaccgtggcagcggacgatggcagtgagcggctggtcagtacggcaaggacgacggaaaccacataccgcttca

SEQ ID NO: 143625 - DNA, 75 bp, synthetic construct
  source 1..75: mol_type = other DNA
atgtaccgtgaaagcgacatcgtaccgggagagcagaccgccaccagcatactgaagcagcgcacaaaaaatctt

SEQ ID NO: 143626 - DNA, 75 bp, synthetic construct
  source 1..75: mol_type = other DNA
caggagagggagttatcgctggccgaattatcctggtgggcggcctgcaatcaggtggtggatgcactacctgag

SEQ ID NO: 143627 - DNA, 75 bp, synthetic construct
  source 1..75: mol_type = other DNA
gctgactgtccgggcggtaaatgcgtggggacagcagggcgatccggcatcggtatcgttccggattgccgcacc

SEQ ID NO: 143628 - DNA, 75 bp, synthetic construct
  source 1..75: mol_type = other DNA
taatctgccgtccggggtcgttcctgccgttcgccagccgctgggggatgagaaatcatttctgccgtttttcag

SEQ ID NO: 143629 - DNA, 75 bp, synthetic construct
  source 1..75: mol_type = other DNA
taatctgccgtccggggtcgttcctgccgttcgccagccgctgggggatgagaaaacatttctgccttttttcag

SEQ ID NO: 143630 - DNA, 75 bp, synthetic construct
  source 1..75: mol_type = other DNA
taatctgccgtccggggtcgttcctgccgttcgccagccgctgggggatgacaaatcatttctgccctttttcag

SEQ ID NO: 143631 - DNA, 75 bp, synthetic construct
  source 1..75: mol_type = other DNA
gggaattatcgctggctgaattatcctggtgggcggtttgcaatcaggtggtggatgctctacctgaggcagtat

SEQ ID NO: 143632 - DNA, 75 bp, synthetic construct
  source 1..75: mol_type = other DNA
tccacgccgctggagcgatattgccttttgaatgattgcgaaccgtgggagtgtctggccgctgtgctgaaccgc

SEQ ID NO: 143633 - DNA, 75 bp, synthetic construct
  source 1..75: mol_type = other DNA
gtggtcgttaagccgggccgtgaatccatgccggtattccacaatacccgggtactggtggagccggaaccgaaa

SEQ ID NO: 143634 - DNA, 75 bp, synthetic construct
  source 1..75: mol_type = other DNA
gtggaaagcccgctgatgatccccaccacctgataggccacggtcaggggggaatgggtacaaaagcgcatgacc

SEQ ID NO: 143635 - DNA, 75 bp, synthetic construct
  source 1..75: mol_type = other DNA
tgcatgcggataccgtggcatttgaagagaagtatggctcccagctggagctgatatttcgttttatcgatcgcg

SEQ ID NO: 143636 - DNA, 75 bp, synthetic construct
  source 1..75: mol_type = other DNA
ccggtattccacaatacccgggtactggtggagccggaaccgaaaagcatgcgtaatctgccgtccggggttgtt

SEQ ID NO: 143637 - DNA, 75 bp, synthetic construct
  source 1..75: mol_type = other DNA
acagtttgagttctggttttcggaaaagcggattgccgatatccggcaggttgaaaccagcgcgcgctatcttgg

SEQ ID NO: 143638 - DNA, 75 bp, synthetic construct
  source 1..75: mol_type = other DNA
tggtaccggaactcggtctggttatcgttaagccaggccgtgaatcaatgtcagcattccacaatacccgggtac

SEQ ID NO: 143639 - DNA, 75 bp, synthetic construct
  source 1..75: mol_type = other DNA
tatcacacctaactaacttagtttcgttccgttcttctctaagattattaattattgctggctcaatcatcggtt

SEQ ID NO: 143640 - DNA, 75 bp, synthetic construct
  source 1..75: mol_type = other DNA
tcgtaatgacctggcggatgccttaccggaaagtgcagcccgtaaggcactgagattaccgaagcctgttgtgca

SEQ ID NO: 143641 - DNA, 75 bp, synthetic construct
  source 1..75: mol_type = other DNA
taccggaactgtgctggtggctgattcgtaatgacctggcggatgccttaccggaaagtgcagcccgtaaggcac

SEQ ID NO: 143642 - DNA, 75 bp, synthetic construct
  source 1..75: mol_type = other DNA
ctggcactgcgataacctgcttcgcgatcagttcacggaacgtctggagtcaatggcaacggataactgtgcccg

SEQ ID NO: 143643 - DNA, 75 bp, synthetic construct
  source 1..75: mol_type = other DNA
ccggcagcatcacaaccgctggcggatgatcctgccgttcgggtcgtgttccgcaatgaggcagtgatccgtcgt

SEQ ID NO: 143644 - DNA, 75 bp, synthetic construct
  source 1..75: mol_type = other DNA
aagacccggttttgaagccagtcttcgaaaacaaagacgtcattctgcgcgcgggtggtatcagctcgctggagg

SEQ ID NO: 143645 - DNA, 75 bp, synthetic construct
  source 1..75: mol_type = other DNA
tttctgaaacgaagatttcagatgtctcacaggtggacaaatttgcccgctatcttggtacggcaatgtactggg

SEQ ID NO: 143646 - DNA, 75 bp, synthetic construct
  source 1..75: mol_type = other DNA
agagcagcacggtgaatggtgtcacgccgtcagcagtgcagcacctgaccgcagaagtctccgcagacagtgggg

SEQ ID NO: 143647 - DNA, 75 bp, synthetic construct
  source 1..75: mol_type = other DNA
gtgctggcactgcgacaaccagttgcgtgaccagacatccgaatcactcgggcaacttgctcaacaaaatctgac

SEQ ID NO: 143648 - DNA, 75 bp, synthetic construct
  source 1..75: mol_type = other DNA
gtcgccgttgggtaaatgagaaatatacgagctgggtgaagacacagccgtgtgcgtgttgtggtcagccagccg

SEQ ID NO: 143649 - DNA, 75 bp, synthetic construct
  source 1..75: mol_type = other DNA
acagtcaccatcagcgatgatcataactttgaccgtcagattattattccgcccattatttttaacggtatagcg

SEQ ID NO: 143650 - DNA, 75 bp, synthetic construct
  source 1..75: mol_type = other DNA
aatcctccggcattttccctgacaccggacgggcggctgacggcgaaaaatgccgatatcagcggtaacgtgaat

SEQ ID NO: 143651 - DNA, 75 bp, synthetic construct
  source 1..75: mol_type = other DNA
gaaggtgaaagtgagccgtgttcctgacggcgttgctgaatacagcgtatgggggctgaagctgccgacgttgcg

SEQ ID NO: 143652 - DNA, 75 bp, synthetic construct
  source 1..75: mol_type = other DNA
ggcgcagggcaaacagatattaatgaaagacgtgttcctgaaacgcctgacggcccccaccattaccagaggtgg

SEQ ID NO: 143653 - DNA, 75 bp, synthetic construct
  source 1..75: mol_type = other DNA
taatctgccgtccggggtcgttcctgccgttcgccagccgctggaggaggataaagcattgctgccgtttttcag

SEQ ID NO: 143654 - DNA, 75 bp, synthetic construct
  source 1..75: mol_type = other DNA
taatctgccgtccggggtcgttcctgccgttcgccagccgctggaggaggataaagcattcctgccctttttcag

SEQ ID NO: 143655 - DNA, 75 bp, synthetic construct
  source 1..75: mol_type = other DNA
taatctgccgtccggggtcgttcctgccgttcgccagccgctggaggaggataaagcattactgccatttttcag

SEQ ID NO: 143656 - DNA, 75 bp, synthetic construct
  source 1..75: mol_type = other DNA
gctcaatgtaccgtgaaagcgacattgtaccgggagagcagacggccaccagcgtactgaagcagcgtacaaaaa

SEQ ID NO: 143657 - DNA, 75 bp, synthetic construct
  source 1..75: mol_type = other DNA
ctgccagtggccacacggtgattatcatcacagcgaaaccgtcattcaccgttatggtaccggcgcaatggtgtt

SEQ ID NO: 143658 - DNA, 75 bp, synthetic construct
  source 1..75: mol_type = other DNA
gaaagcgacatcgtaccgggggagcagaccgccaccagcatactgaagcagcgcacaaaaaatcttgcgccgctg

SEQ ID NO: 143659 - DNA, 75 bp, synthetic construct
  source 1..75: mol_type = other DNA
cgatcggtttagaagttatataagagcgggtatctatcaaaaaaaagcagtgatccagttcagttgttggcagtc

SEQ ID NO: 143660 - DNA, 75 bp, synthetic construct
  source 1..75: mol_type = other DNA
gctggcggcgctggggcactgtctgactggctgttgcgtcatgtcaaatcctgccagtggcctcatggtgactat

SEQ ID NO: 143661 - DNA, 75 bp, synthetic construct
  source 1..75: mol_type = other DNA
gctggttacttcgtgaaaaaggctgccagtggcctcattccgaatggcacagcgagaacatgacaacaatgcgac

SEQ ID NO: 143662 - DNA, 75 bp, synthetic construct
  source 1..75: mol_type = other DNA
taatctgccgtccggggtcgttcctgccgttcgccagccgctggaggacgataaagcattgctgccctttttcag

SEQ ID NO: 143663 - DNA, 75 bp, synthetic construct
  source 1..75: mol_type = other DNA
taatctgccgtccggggtcgttcctgccgttcgccagccgctggaggatgataaagcatttctgccatttttcag

SEQ ID NO: 143664 - DNA, 75 bp, synthetic construct
  source 1..75: mol_type = other DNA
taatctgccgtccggggtcgttcctgccgttcgccagccgctggaggaagataaagcattgctgccatttttcag

SEQ ID NO: 143665 - DNA, 75 bp, synthetic construct
  source 1..75: mol_type = other DNA
tggtaccggaacttgggctgctggtccttaatccgggccgtgaatccatgccggtattttacaatacccgggtac

SEQ ID NO: 143666 - DNA, 75 bp, synthetic construct
  source 1..75: mol_type = other DNA
ttaacgagaaatacacacgctgggtgaagacacagccgtgtgcgtgttgtggtaagccagccgacgatccccatc

SEQ ID NO: 143667 - DNA, 75 bp, synthetic construct
  source 1..75: mol_type = other DNA
agcattgccgttgatcctgagtctccggaatctttcatgaaacgacctaaacgtcgccgctgggttaacgagaaa

SEQ ID NO: 143668 - DNA, 75 bp, synthetic construct
  source 1..75: mol_type = other DNA
tacgccgctcactgggattaccggcggagaaaatccgctcgctttaccgcgagagcgacatcataccgggagaac

SEQ ID NO: 143669 - DNA, 75 bp, synthetic construct
  source 1..75: mol_type = other DNA
atgattgttttactattttcgctaagggtactatttttttccgcgtttcctgtcttaaataataaagccatgtgg

SEQ ID NO: 143670 - DNA, 75 bp, synthetic construct
  source 1..75: mol_type = other DNA
ctgcctcacgcccaccagcaacagaacccaccacaggaaaagacggtggtcagcattgccgttgatcctgagtct

SEQ ID NO: 143671 - DNA, 75 bp, synthetic construct
  source 1..75: mol_type = other DNA
caggtatttcataatccccgggtgctggtggagccggaaccgaaaagcatgcgcggtctgccgtcaggaactgtt

SEQ ID NO: 143672 - DNA, 75 bp, synthetic construct
  source 1..75: mol_type = other DNA
ataaatcattactgccatttttcagcgatgagcgggtgattcgtgctgctggcggcgctggggcactgtctgact

SEQ ID NO: 143673 - DNA, 75 bp, synthetic construct
  source 1..75: mol_type = other DNA
gagagcgacatcataccgggagagcaggccgccaccagcatactgaagcagcgcacaaaaaatattgcgctgcca

SEQ ID NO: 143674 - DNA, 75 bp, synthetic construct
  source 1..75: mol_type = other DNA
ttcctgccgttcgccagccgctggtggaagacaaaacattgctgccgtttttcagtaacgcacgggtgattcgtg

SEQ ID NO: 143675 - DNA, 75 bp, synthetic construct
  source 1..75: mol_type = other DNA
ccttaagccgggccgtgaatccatacagatatttcataatcctcgagtgctggtggagccggaaccgaaaagcat

SEQ ID NO: 143676 - DNA, 75 bp, synthetic construct
  source 1..75: mol_type = other DNA
tggactggggggaacgggaacaaaggctgacgatttgtttgttattccgttgtgtagaagctgccataacgagct

SEQ ID NO: 143677 - DNA, 75 bp, synthetic construct
  source 1..75: mol_type = other DNA
ccttaagccgggccgtgaatccatgcaggtatttcataaccctcgagtgctggtggagcctgaaccgaaaagcat

SEQ ID NO: 143678 - DNA, 75 bp, synthetic construct
  source 1..75: mol_type = other DNA
tcagcgtggaggtccagtccgtcaccgacggcgtgaaggtgaaagtgagccgtgttcctgacggcgttgctgaat

SEQ ID NO: 143679 - DNA, 75 bp, synthetic construct
  source 1..75: mol_type = other DNA
tgttacgcccaaaacgccgccgctgggttaatgaaaagtacacgcgctgggttaagacacagccgtgtgcatgtt

SEQ ID NO: 143680 - DNA, 75 bp, synthetic construct
  source 1..75: mol_type = other DNA
caccacaggaaaagacggtggtcagcattgccgttgatcccgagcctccggaatctttcatgaaacgacctaaac

SEQ ID NO: 143681 - DNA, 75 bp, synthetic construct
  source 1..75: mol_type = other DNA
aaaagaaaagcttattggccttgctaatgaacttaatgtatccgaacgaattgtatggcatggcgctatttatga

SEQ ID NO: 143682 - DNA, 75 bp, synthetic construct
  source 1..75: mol_type = other DNA
tcctcatgccgtctgatagtacggaaaaacggtgctgaaatttataaccgtaccgcgctggataatacgctgatt

SEQ ID NO: 143683 - DNA, 75 bp, synthetic construct
  source 1..75: mol_type = other DNA
cagggcgatgcggcgtcggtctctttccggattgccgcaccggctgcgccgtcacagattgagctgacgccaggc

SEQ ID NO: 143684 - DNA, 75 bp, synthetic construct
  source 1..75: mol_type = other DNA
tggcaccgatgaccggggtagtgttatttcgcccaggcagtgaactgatgcatctgttcagacgtgggcgtgttc

SEQ ID NO: 143685 - DNA, 75 bp, synthetic construct
  source 1..75: mol_type = other DNA
cgccacaggaaaagacggtagtaagcatcgccgttgatccggagtctccggaatctttcatgaaacggcctaaac

SEQ ID NO: 143686 - DNA, 75 bp, synthetic construct
  source 1..75: mol_type = other DNA
gttcaggcccggttcagagctgatgcccctgtttatgcaggggcgtgtactgctggagcctgagccggagcatta

SEQ ID NO: 143687 - DNA, 75 bp, synthetic construct
  source 1..75: mol_type = other DNA
gctggtggcgtggaatgccttgagagctggttacttcgtgaaaaaggctgccagtggcctcattccggatggcac

SEQ ID NO: 143688 - DNA, 75 bp, synthetic construct
  source 1..75: mol_type = other DNA
tctataataacgttgaggtttcacgtttctctgtggacaaagaaattattatttttaggcatcatattcctgatt

SEQ ID NO: 143689 - DNA, 75 bp, synthetic construct
  source 1..75: mol_type = other DNA
ggaatggctacaaaagcgcatgacctctttgtgttgcctttgtgcagaaagcatcacgacgagctgcatgcggat

SEQ ID NO: 143690 - DNA, 75 bp, synthetic construct
  source 1..75: mol_type = other DNA
tgcatgttgtggaaagcctgctgatgatccccaccacctgataggccacggtcaggggggaatgggtacaaaagc

SEQ ID NO: 143691 - DNA, 75 bp, synthetic construct
  source 1..75: mol_type = other DNA
ttgggttgttgagggagcaaagttaccttatgaagttgcgggtggtgtatttattatagaaattaataagaaaaa

SEQ ID NO: 143692 - DNA, 75 bp, synthetic construct
  source 1..75: mol_type = other DNA
cttgaaagctggttacttcgtgaaaagggctgtcagtggcctcattccgactggcacagcgagaacatgaccaca

SEQ ID NO: 143693 - DNA, 75 bp, synthetic construct
  source 1..75: mol_type = other DNA
tctttgtattgcctttgtgcagaaagcatcacgacgagttgcatgcggacactgtggcatttgaagagaagtatg

SEQ ID NO: 143694 - DNA, 75 bp, synthetic construct
  source 1..75: mol_type = other DNA
ttggcactgcgataaccagttgcgtgatcagttcacggaacggctggaatcaatggcaacggataactgtgccca

SEQ ID NO: 143695 - DNA, 75 bp, synthetic construct
  source 1..75: mol_type = other DNA
gtaccgcgaaagcgacatcataccgggagaacagacagccaccagcatcctgaaacagcgcacaaaaaatcttgc

SEQ ID NO: 143696 - DNA, 75 bp, synthetic construct
  source 1..75: mol_type = other DNA
tggaccgtctgtgcgaagactactgcggagggatctggaatctgtacaccctgaacaacggaggagcatttatgg

SEQ ID NO: 143697 - DNA, 75 bp, synthetic construct
  source 1..75: mol_type = other DNA
tgcatcagggaatgaccagtctcagctggttgccactcccgtccctgatgaacagcgcatcagcttctggccgca

SEQ ID NO: 143698 - DNA, 75 bp, synthetic construct
  source 1..75: mol_type = other DNA
catcgtcgtccgttaccggcacaccttccccgtgaaatacaccgtctggagtctgaagaaagctgttgcccggag

SEQ ID NO: 143699 - DNA, 75 bp, synthetic construct
  source 1..75: mol_type = other DNA
gtccattattaccggctgcgggattacgccctgcagcatccggaatgcagcgccattatgtgcatcatcgactga

SEQ ID NO: 143700 - DNA, 75 bp, synthetic construct
  source 1..75: mol_type = other DNA
cgaaatcaaccggctgaaggcgctggttgcgaaactgcagcgtatgcagttcggtaaaagctcagaaaaacttcg

SEQ ID NO: 143701 - DNA, 75 bp, synthetic construct
  source 1..75: mol_type = other DNA
tgcatcagggaataacccacctcagttggttgccactcccgtccctgatgaacagcgcatcagcttctggccgca

SEQ ID NO: 143702 - DNA, 75 bp, synthetic construct
  source 1..75: mol_type = other DNA
ttatctgggggaagtcagcactgaacagctggaactggtgagcagtgccctgaaagtgatccgcacagaacgggt

SEQ ID NO: 143703 - DNA, 75 bp, synthetic construct
  source 1..75: mol_type = other DNA
ttgttcggtcgcagcagcgagaagatagaaaagaagatcgcacgggcagaaacacgtataaccgagctccagaac

SEQ ID NO: 143704 - DNA, 75 bp, synthetic construct
  source 1..75: mol_type = other DNA
catcatgcctgtcgtacagagaattatgccatgacggtccactattaccgtctgcgggactacgccctgcagcat

SEQ ID NO: 143705 - DNA, 75 bp, synthetic construct
  source 1..75: mol_type = other DNA
gtccactattaccggctgcgggattacgccctgcagcatccggaatgcagcgccattatgcgcatcatcgactga

SEQ ID NO: 143706 - DNA, 75 bp, synthetic construct
  source 1..75: mol_type = other DNA
gccttacggggagtggccgtaggccggaaaaactggatgtcgcgggttccgacagcggtggtgaacatgcggcgg

SEQ ID NO: 143707 - DNA, 75 bp, synthetic construct
  source 1..75: mol_type = other DNA
ttgaacatacccaggacaggccggcaaaccgagtacgcgatctgttgccctggaaagttgatctgacctctcaat

SEQ ID NO: 143708 - DNA, 75 bp, synthetic construct
  source 1..75: mol_type = other DNA
tcctgcaggccgatgcatatgcgggttacaatgctctttacgaaagcggtcaggtaaccgaagcggcttgtatgg

SEQ ID NO: 143709 - DNA, 75 bp, synthetic construct
  source 1..75: mol_type = other DNA
cccgaaccggatgacgatgatgacgaaacatgggtactgttcaatgccatgaacggtaaccgcgctgaaatgagt

SEQ ID NO: 143710 - DNA, 75 bp, synthetic construct
  source 1..75: mol_type = other DNA
tttggcctcattccacagtgggtgaccctggagccccgtgttttcggctggatggaccgtctgtgcgaagactac

SEQ ID NO: 143711 - DNA, 75 bp, synthetic construct
  source 1..75: mol_type = other DNA
cttttggtgacgaattatcgccgcaaaatgtgcaggtccgctggcgtgaaccggcaaaaacggctcaacaaagta

SEQ ID NO: 143712 - DNA, 75 bp, synthetic construct
  source 1..75: mol_type = other DNA
agtgagctggattatctgggtgaagttagtgctgagcagctggaactggtgagtagcgccctgaaagtgatccgc

SEQ ID NO: 143713 - DNA, 75 bp, synthetic construct
  source 1..75: mol_type = other DNA
cccgtccctgatgaacggcgcatcagcttctggccgcagcactttggcctcattccacagtgggtgaccctggag

SEQ ID NO: 143714 - DNA, 75 bp, synthetic construct
  source 1..75: mol_type = other DNA
atggcacccgaaccggatgatgatgacgaaacatgggtactgttcaatgccatgaacggtaaccgcgctgaaatg

SEQ ID NO: 143715 - DNA, 75 bp, synthetic construct
  source 1..75: mol_type = other DNA
gagcgtggtatcgcgggccccggatttacttgcccgcgtgttaacgggaaaatactgcgaacacctgccactgta

SEQ ID NO: 143716 - DNA, 75 bp, synthetic construct
  source 1..75: mol_type = other DNA
ggaggccttcctgcgctctgcactggcacgtgccgaagaaaagatcgaagaagatgagcgagaaatagagcatct

SEQ ID NO: 143717 - DNA, 75 bp, synthetic construct
  source 1..75: mol_type = other DNA
tggctgcgttacgtcattgagcatatccaggactggccggcaaaccgggtacacgatctgttgccctggaaagtt

SEQ ID NO: 143718 - DNA, 75 bp, synthetic construct
  source 1..75: mol_type = other DNA
tgatgacgaaacatgggtactgttcaatgccatgaacggtaaccgcgctgaaatgagtccggaagccgccggcat

SEQ ID NO: 143719 - DNA, 75 bp, synthetic construct
  source 1..75: mol_type = other DNA
atgccatgacggtccattattatcggttgcgggattacgccctgcagcatccggaatgcaacgccattatgcgca

SEQ ID NO: 143720 - DNA, 75 bp, synthetic construct
  source 1..75: mol_type = other DNA
aacggcggggcatttatggcacccgaaccggatgacgatgatgacgaaacatgggcatgggtactgttcaatgcc

SEQ ID NO: 143721 - DNA, 75 bp, synthetic construct
  source 1..75: mol_type = other DNA
actcgctgatcggcacatgccgtctgaacaatgtggagccagaaaaatggctgcgttacgtcattgatcatatcc

SEQ ID NO: 143722 - DNA, 75 bp, synthetic construct
  source 1..75: mol_type = other DNA
aaaaccagagccgcgccactgatgcagtcactgtatgactggatacagcaacagatgaaaacactgtcgcgtcac

SEQ ID NO: 143723 - DNA, 75 bp, synthetic construct
  source 1..75: mol_type = other DNA
cgtacagagaattatgccatgacggtccattattaccggctgcgggattacgccctgcaacatccggaatgcaac

SEQ ID NO: 143724 - DNA, 75 bp, synthetic construct
  source 1..75: mol_type = other DNA
aagcgtatctgcgccatatcctgagcgtactgccggaatggccctccaaccgtgttgacgaactgctgccatgga

SEQ ID NO: 143725 - DNA, 75 bp, synthetic construct
  source 1..75: mol_type = other DNA
agcgcttcgtgccgtctgtctcgggaaaaagaattacatgttcttcggcaacgatcatggaggcgagcgcggagc

SEQ ID NO: 143726 - DNA, 75 bp, synthetic construct
  source 1..75: mol_type = other DNA
aaagcgttcgcatacctgctgaaacagtgggaggccctgaacgtatactgcagtaatggttgggtggaaatcgac

SEQ ID NO: 143727 - DNA, 75 bp, synthetic construct
  source 1..75: mol_type = other DNA
atgaaaatcatcacccgtggcgaagccatgcgtattcaccaacagcatccggcatcccgtctttttccgttctgt

SEQ ID NO: 143728 - DNA, 75 bp, synthetic construct
  source 1..75: mol_type = other DNA
atgaaaatcatcacccgtggcgaagccatgcgtattcaccgtcagcatccggcatcccgtctttttcctttctgt

SEQ ID NO: 143729 - DNA, 75 bp, synthetic construct
  source 1..75: mol_type = other DNA
agtgcaggatattcccagtgtgctggccgtgtttgctgaacgccgtaaggacagttttggcccgtatgtccggtt

SEQ ID NO: 143730 - DNA, 75 bp, synthetic construct
  source 1..75: mol_type = other DNA
aagctgccggcattgctgcctgtctgatggcgtacagtcatcacgcctgtcgtacagagaattatgccatgacgg

SEQ ID NO: 143731 - DNA, 75 bp, synthetic construct
  source 1..75: mol_type = other DNA
ctcatgcccggagaaaaatccacgatgtatacattcagcagcaaaagtgcgacggcagaagaagccctgaagcga

SEQ ID NO: 143732 - DNA, 75 bp, synthetic construct
  source 1..75: mol_type = other DNA
tatgtactgaatcagtgggacgccctctgttattacagtgatgacggtctggcggaggtggacaataacacagcg

SEQ ID NO: 143733 - DNA, 75 bp, synthetic construct
  source 1..75: mol_type = other DNA
tggagctgagccgtgccacactggggcgctggacaggtgctgctgctgaactgctggagccgttgtatgacgtcc

SEQ ID NO: 143734 - DNA, 75 bp, synthetic construct
  source 1..75: mol_type = other DNA
atattcccgttccggtccaggagccgggcagcggtaaaacaaggattgcccgactgtgggtctacgtccgtgatg

SEQ ID NO: 143735 - DNA, 75 bp, synthetic construct
  source 1..75: mol_type = other DNA
gcgtatctgcgccatatcctgagcgtactgccggaatggccttccaaccgagttgacgaactcctgccatggaac

SEQ ID NO: 143736 - DNA, 75 bp, synthetic construct
  source 1..75: mol_type = other DNA
tgaatcagtgggacgccctctgttattaccgtgatgacggtctggcggaggcggacaataacacagcggaaagag

SEQ ID NO: 143737 - DNA, 75 bp, synthetic construct
  source 1..75: mol_type = other DNA
accggtaaataccgctggcacggcagtgctgaagcgtataccggtcgtgaagtgcagaatattcccggtgtgctg

SEQ ID NO: 143738 - DNA, 75 bp, synthetic construct
  source 1..75: mol_type = other DNA
gttccggtccaggagccgggcagtggtaaaacaaggactgcccggctgtgggcctacgtccgtgatgaccgtaat

SEQ ID NO: 143739 - DNA, 75 bp, synthetic construct
  source 1..75: mol_type = other DNA
atgacaaccttttcgcatagctccaccacaccttctgtttccgtaactactgcatcagggaataaccagtctcag

SEQ ID NO: 143740 - DNA, 75 bp, synthetic construct
  source 1..75: mol_type = other DNA
gaagcgaatcagtgaactgtacgccatcgaggatgaaatacggggattaccggagtcagagcgtcttgcagtcag

SEQ ID NO: 143741 - DNA, 75 bp, synthetic construct
  source 1..75: mol_type = other DNA
ggtctggttcgcgtactcgccgaaccggcaggggaaacacccggagcaacacctccgccccttccggggtatcct

SEQ ID NO: 143742 - DNA, 75 bp, synthetic construct
  source 1..75: mol_type = other DNA
aacacctccgccccttccggggtatcctgcaggcggatgcgttcacaggttacgacaggttgttcagtgcagaac

SEQ ID NO: 143743 - DNA, 75 bp, synthetic construct
  source 1..75: mol_type = other DNA
acggggattaccagaatcagagcgtcttgcagccaggcagcagcgaagcaaagcgttactgacgtcgctgcatga

SEQ ID NO: 143744 - DNA, 75 bp, synthetic construct
  source 1..75: mol_type = other DNA
ggcgtgctggctgtgtttgccgaacgccgtaaggacagttttggcctgtatgtccggctgatgagcgtcaccctg

SEQ ID NO: 143745 - DNA, 75 bp, synthetic construct
  source 1..75: mol_type = other DNA
tcaggaagcactgggttgcgttgtgcaacttcagtgatgatggtctggctgaggcggataataatgccgcggaaa

SEQ ID NO: 143746 - DNA, 75 bp, synthetic construct
  source 1..75: mol_type = other DNA
agatggctgggtggaggtggataataacattgccgaaaacgccctacgactggtcagtctggggagaaaaaactg

SEQ ID NO: 143747 - DNA, 75 bp, synthetic construct
  source 1..75: mol_type = other DNA
atgatctggcagcctgagttcacagataaaacactctccaggaaacccggggcggttcaacagtcgcgccatcgt

SEQ ID NO: 143748 - DNA, 75 bp, synthetic construct
  source 1..75: mol_type = other DNA
atcggtgaactgtatgccatcgaggcagaggtccggggctgttcagcagaacagcgtctggcggcaagaaaagcc

SEQ ID NO: 143749 - DNA, 75 bp, synthetic construct
  source 1..75: mol_type = other DNA
catcaccacggaagccctgcagcttatcggtgaactgtatgccatcgaggcagaggtccggggctgttcagcaga

SEQ ID NO: 143750 - DNA, 75 bp, synthetic construct
  source 1..75: mol_type = other DNA
ctgatgcccggtaaagtccatgctgatgatatccccgtcccggtccaggagccgggcagcggtaaaacccggaca

SEQ ID NO: 143751 - DNA, 75 bp, synthetic construct
  source 1..75: mol_type = other DNA
ttcaggcttaatgcggggacacccgtgacggtgtcggtttcaggtaatgcagtgacagttatctggatgtcgaag

SEQ ID NO: 143752 - DNA, 75 bp, synthetic construct
  source 1..75: mol_type = other DNA
gacacaccggtaaaggtactggcaccgggcctgaaaaagacgaaaacagggcgcatctggacgtatgtccgggat

SEQ ID NO: 143753 - DNA, 75 bp, synthetic construct
  source 1..75: mol_type = other DNA
atggacacctcacttgctcatgagaacgcccgcctgctctcacaacgggtggcggcttatgcttccgaaatcaac

SEQ ID NO: 143754 - DNA, 75 bp, synthetic construct
  source 1..75: mol_type = other DNA
gcccatgcccggcgaaaaatccacgatgtatacatcagcagcaaaagtgcgacggcagaagaagccctgaagcga

SEQ ID NO: 143755 - DNA, 75 bp, synthetic construct
  source 1..75: mol_type = other DNA
ttcacactgatgacacaccggtaaaggtactggcaccgggtcagaaaaaggcgaaaacagggcgtatctggacgt

SEQ ID NO: 143756 - DNA, 75 bp, synthetic construct
  source 1..75: mol_type = other DNA
tcgttgaagccccggcaccgtcccgtccgatagaacgtggtatcgcgagccccgggttacttgcccgagtgttaa

SEQ ID NO: 143757 - DNA, 75 bp, synthetic construct
  source 1..75: mol_type = other DNA
ttggttgccaccatagtccctgatgagcagcgcatcagcttctggccgcagcattttggcctcattccacagtgg

SEQ ID NO: 143758 - DNA, 75 bp, synthetic construct
  source 1..75: mol_type = other DNA
tgcactggcacgtgccgaagaaaagatcgaagaagatgaacgggaaatagaacatctgcgggctcagatagaaaa

SEQ ID NO: 143759 - DNA, 75 bp, synthetic construct
  source 1..75: mol_type = other DNA
aaagatcgaagaagatgcacgggaaatagaacatctgcgggctcagatagaaaaactgcgccggatgctgttcgg

SEQ ID NO: 143760 - DNA, 75 bp, synthetic construct
  source 1..75: mol_type = other DNA
cagctggaactggtctccagcgccctgaaagtgatccgcacggtcagggtgaaaaaggcctgcacccgatgtgac

SEQ ID NO: 143761 - DNA, 75 bp, synthetic construct
  source 1..75: mol_type = other DNA
ctgttcaatgccatgaacggtaaccgcgcagaaatgagcccggaagccgccggtattgcgtattaccgtgaagga

SEQ ID NO: 143762 - DNA, 75 bp, synthetic construct
  source 1..75: mol_type = other DNA
gacatcccgtctttttccgttctgtaccggtaagtaccgctggcacggcggtgctgaggcgtataccggtcgtga

SEQ ID NO: 143763 - DNA, 75 bp, synthetic construct
  source 1..75: mol_type = other DNA
ccgtctgagagatgcgttccggtatatctggaagcactgggttgcgttgtgcaacttctgtgatgacggtctggc

SEQ ID NO: 143764 - DNA, 75 bp, synthetic construct
  source 1..75: mol_type = other DNA
atgataccccggtccaggtactgatgccgggtaataagaagacgaagaccgggcggttgtgggcgtatgttcgtg

SEQ ID NO: 143765 - DNA, 75 bp, synthetic construct
  source 1..75: mol_type = other DNA
atgaatggctggtagaaaaaaatgagacgctgtcgaaaaagtcccgtctgggcgaagcgttcgcttatgtcctgt

SEQ ID NO: 143766 - DNA, 75 bp, synthetic construct
  source 1..75: mol_type = other DNA
ctactgcggtggtatctggaatctgtacacactgaacaacggtggcgcatttatggcccccgaaccggatgacga

SEQ ID NO: 143767 - DNA, 75 bp, synthetic construct
  source 1..75: mol_type = other DNA
tgttgcctggcaataagaaaacgaagaccgggcggttatggacctacgttcgtgacgaccgtaacgccgggtcaa

SEQ ID NO: 143768 - DNA, 75 bp, synthetic construct
  source 1..75: mol_type = other DNA
cattccacagtgggtgaccctggagccccgtgtcttcggctggatggaccgtctttgcgaaaactactgcggtgg

SEQ ID NO: 143769 - DNA, 75 bp, synthetic construct
  source 1..75: mol_type = other DNA
aactgtcagccaaccagattgaaggcgatattgtcaaaacagtgggtaaggctttcccgcgggactcccgggcac

SEQ ID NO: 143770 - DNA, 75 bp, synthetic construct
  source 1..75: mol_type = other DNA
ccacaccttctgtttccgtaactactgcatcagggaataaccagtctcaactagttgccacccctgtccctgatg

SEQ ID NO: 143771 - DNA, 75 bp, synthetic construct
  source 1..75: mol_type = other DNA
gctggcacggcagtgctgaagcgtatactggtcgtgaagtgcaggatattcccggcgttcttgccgtgtttgcag

SEQ ID NO: 143772 - DNA, 75 bp, synthetic construct
  source 1..75: mol_type = other DNA
ggggtatcctacaggcagatgcgtttaatggttacgatcggctgttcagtgccgaacgtgaaggcggcgcgttga

SEQ ID NO: 143773 - DNA, 75 bp, synthetic construct
  source 1..75: mol_type = other DNA
aacgatggctgggtggaaatcgataacaacatcgctgaaaatgccctgcgggcggtcagtctgggtcgtaaaaac

SEQ ID NO: 143774 - DNA, 75 bp, synthetic construct
  source 1..75: mol_type = other DNA
tcgttacagtgggcgggaagacgatcctcaggttccccgccagttgcgacagtcgcgccatcgtcgtccgttacc

SEQ ID NO: 143775 - DNA, 75 bp, synthetic construct
  source 1..75: mol_type = other DNA
cattccacagtgggttaccctggagccccgtgtcttcggctggatggaccgtctatgcgaaaactactgcggtgg

SEQ ID NO: 143776 - DNA, 75 bp, synthetic construct
  source 1..75: mol_type = other DNA
cattccacagtgggtaaccctggatccccgtgtcttcggctggatggaccgtctctgcgaaaactactgcggtgg

SEQ ID NO: 143777 - DNA, 75 bp, synthetic construct
  source 1..75: mol_type = other DNA
gcttctggccgcagcattttggcctcattccacagtgggtcaccctggatccccgtgtcttcggctggatggacc

SEQ ID NO: 143778 - DNA, 75 bp, synthetic construct
  source 1..75: mol_type = other DNA
cggacttaaggtgaaagtgaaccgggttcctgacggcgttgcagaatacagtgtgtgggggctgaagttgccgac

SEQ ID NO: 143779 - DNA, 75 bp, synthetic construct
  source 1..75: mol_type = other DNA
ttaagattttccagaaaggcaatcagggcgcaggtaacatcacagactgtacggtgattgtgaccaaaaaagctg

SEQ ID NO: 143780 - DNA, 75 bp, synthetic construct
  source 1..75: mol_type = other DNA
ataccaacatctccggcgtcacggtggtgttccgggcaggtgagcaggagcagacaccgccggaaggttttgaat

SEQ ID NO: 143781 - DNA, 75 bp, synthetic construct
  source 1..75: mol_type = other DNA
gtgaaagtgagccgtgttcctgacggcgttgccgaatacagcgtgtgggggctgaagctgccgacgctgcgccag

SEQ ID NO: 143782 - DNA, 75 bp, synthetic construct
  source 1..75: mol_type = other DNA
aataccaggtgctggcgcgctgggacacgccgaaggtggtgaagggcgtgagcttcctgcttcgcctgaccgtgg

SEQ ID NO: 143783 - DNA, 75 bp, synthetic construct
  source 1..75: mol_type = other DNA
tgcggcggatgtggataaatgggcgttgtatgccatcggtcggtactgcgaccagtcggtaccggatggctctgg

SEQ ID NO: 143784 - DNA, 75 bp, synthetic construct
  source 1..75: mol_type = other DNA
ttaccgggcgttatacgaatccggcagaataacggaagccgcgtgtatggcccatgcccggagaaaaatccacga

SEQ ID NO: 143785 - DNA, 75 bp, synthetic construct
  source 1..75: mol_type = other DNA
gtgaaatataccgcctggagcctgaagaaagctgttgcccggagtgtggcggtgagctggattatctgggggaag

SEQ ID NO: 143786 - DNA, 75 bp, synthetic construct
  source 1..75: mol_type = other DNA
cggtggtatctggaatctgtacacactgaacaacggtggcgcatttatggcccccgaaccggatgacgatgatgg

SEQ ID NO: 143787 - DNA, 75 bp, synthetic construct
  source 1..75: mol_type = other DNA
tacctgtcgccagactggcagagtcagtggaaaaagtgaatgaactggcccgcccccaggatacaaactttcagg

SEQ ID NO: 143788 - DNA, 75 bp, synthetic construct
  source 1..75: mol_type = other DNA
aaatatgcagaccatctgccgttataccgccagtcagaaatatatcgtcgtcagggagtggagctgagccgtgcc

SEQ ID NO: 143789 - DNA, 75 bp, synthetic construct
  source 1..75: mol_type = other DNA
tgccgcctgtctgatggcgtacagccatcatgcctgccgtacggaatgttatgccatgacggtccattattaccg

SEQ ID NO: 143790 - DNA, 75 bp, synthetic construct
  source 1..75: mol_type = other DNA
tccctctcatttattcacattacaaggatttcatacatgaaaacattgtctcagaacacctgcgtattaccgtga

SEQ ID NO: 143791 - DNA, 75 bp, synthetic construct
  source 1..75: mol_type = other DNA
gtggatcactattgcaccgttcgtgacaatatcaggaagcactgggttgcgttgtgcaacttctgtgataacggt

SEQ ID NO: 143792 - DNA, 75 bp, synthetic construct
  source 1..75: mol_type = other DNA
ccagctcccgacttttactccctctcatttattcacattacaaggatttcatacatgaaaacattgtctcagaac

SEQ ID NO: 143793 - DNA, 75 bp, synthetic construct
  source 1..75: mol_type = other DNA
aacacactttatatgcaggaagccctgagctggatacgcagtaatggagaagaaatcggggttgaagatatcgcc

SEQ ID NO: 143794 - DNA, 75 bp, synthetic construct
  source 1..75: mol_type = other DNA
aagctgccggcattgccgcctgtctgatggcgtacagtcatcacgcctgtcgtacagagtgttatgccatgacgg

SEQ ID NO: 143795 - DNA, 75 bp, synthetic construct
  source 1..75: mol_type = other DNA
gtatctggaatctgtacacgctgaacaacggcggggcatttatggcccccgaaccggatgacgatgatgacgaaa

SEQ ID NO: 143796 - DNA, 75 bp, synthetic construct
  source 1..75: mol_type = other DNA
gtatctggaatctgtacacgctgaacaacggcggggcatttatggcacccgaaccggatgacgatgatgccgaaa

SEQ ID NO: 143797 - DNA, 75 bp, synthetic construct
  source 1..75: mol_type = other DNA
gtatctggaatctgtacaccctgaacaacggcggggcatttatggctcccgaaccggatgacgatgatgtcgaaa

SEQ ID NO: 143798 - DNA, 75 bp, synthetic construct
  source 1..75: mol_type = other DNA
ccatgcgtattcaccaacaacatcctgcatcccgtcttttcccgttctgtaccggcaaataccgctggcacggca

SEQ ID NO: 143799 - DNA, 75 bp, synthetic construct
  source 1..75: mol_type = other DNA
tatcggtgaactgtatgtcatgaggcagaagtccggggatgttcagcagaacagcgtctggcgacaagaaaagcc

SEQ ID NO: 143800 - DNA, 75 bp, synthetic construct
  source 1..75: mol_type = other DNA
ttcaggaagaaatggcggaaacgctgggtgagcaatatgacccggtactgccatccgccctgcgccagtcttcag

SEQ ID NO: 143801 - DNA, 75 bp, synthetic construct
  source 1..75: mol_type = other DNA
gcccggaagccgccggcattgctgcctgtctgatgacgtacagtcatcatgcctgtcgtacggagtgttatgcca

SEQ ID NO: 143802 - DNA, 75 bp, synthetic construct
  source 1..75: mol_type = other DNA
ttggttgccactcccgtccctgatgaacagcgcatcagcttctggccgcagcattttggcctcattccacagtgg

SEQ ID NO: 143803 - DNA, 75 bp, synthetic construct
  source 1..75: mol_type = other DNA
acagagaacgccttacggggagtggccgtaggccggaaaaactggatgttcgcgggttccgacagcggtggtgaa

SEQ ID NO: 143804 - DNA, 75 bp, synthetic construct
  source 1..75: mol_type = other DNA
gtatctggaatctgtacacactgaacaacggcggggcatttatggcgcccgaaccggatgacgatgatggcgaaa

SEQ ID NO: 143805 - DNA, 75 bp, synthetic construct
  source 1..75: mol_type = other DNA
tgtatggttcatgcccggagaaaaatccacgatgtacatgcaagagtgccaaccgacatcaccactgaagccctg

SEQ ID NO: 143806 - DNA, 75 bp, synthetic construct
  source 1..75: mol_type = other DNA
gatgatgacgaaacatgggtactgttcaatgccatgaacggtaaccgcgcagaaatgagcccggaagccgccggt

SEQ ID NO: 143807 - DNA, 75 bp, synthetic construct
  source 1..75: mol_type = other DNA
atatattggatattaaagtatttgacagtgtaagtaaaaaagaaagtgttagtcagccaataaaaaaagacttca

SEQ ID NO: 143808 - DNA, 75 bp, synthetic construct
  source 1..75: mol_type = other DNA
ctactgcggtggtatctggaatctgtacaccctgaacaacggtggcgcatttatggcacccgaaccggatgacga

SEQ ID NO: 143809 - DNA, 75 bp, synthetic construct
  source 1..75: mol_type = other DNA
atgacaaccgtctcgcataattccaccactccttctgtttccgtaaccgctgcatcagggaatgaccagcctcag

SEQ ID NO: 143810 - DNA, 75 bp, synthetic construct
  source 1..75: mol_type = other DNA
agcgtatctgcgccatatcctgagcgtactgccggaatggccttccaaccgagttgacgaactcctgccatggaa

SEQ ID NO: 143811 - DNA, 75 bp, synthetic construct
  source 1..75: mol_type = other DNA
agcagtgatcgctggggagatcctcgcgagaagttgttgcaaggtgaagagtggcagactcagcgtattcctgtc

SEQ ID NO: 143812 - DNA, 75 bp, synthetic construct
  source 1..75: mol_type = other DNA
ataatgccgcagaaagagcgcttcgtgcagtctgtctcgggaagaaaaattatgtgttcttcggcagcgatcacg

SEQ ID NO: 143813 - DNA, 75 bp, synthetic construct
  source 1..75: mol_type = other DNA
tggaccgtctgtgcgaagactactgcggagggatctggaatctgtacaccctgaacaacgggggggcatttatgg

SEQ ID NO: 143814 - DNA, 75 bp, synthetic construct
  source 1..75: mol_type = other DNA
tggaccgtctgtgcgaagactactgcggagggatctggaatctgtacaccctgaacaacggcggcgcatttatgg

SEQ ID NO: 143815 - DNA, 75 bp, synthetic construct
  source 1..75: mol_type = other DNA
tggaccgtctgtgcgaagactactgcggagggatctggaatctgtacaccctgaacaacggtggtgcatttatgg

SEQ ID NO: 143816 - DNA, 75 bp, synthetic construct
  source 1..75: mol_type = other DNA
gcatcagcttctggccgcagcagtttggcctcattccacagtgggtcaccctggaaccccgtgtcttcggctgga

SEQ ID NO: 143817 - DNA, 75 bp, synthetic construct
  source 1..75: mol_type = other DNA
gcatcagcttctggccgcagcactttggcctcattccacagtgggtgaccctggaaccccgtgtcttcggctgga

SEQ ID NO: 143818 - DNA, 75 bp, synthetic construct
  source 1..75: mol_type = other DNA
agggaataaccagccccaactggttgctactcccgtccctgatgaacaacgtatcagcttctggccgcagcactt

SEQ ID NO: 143819 - DNA, 75 bp, synthetic construct
  source 1..75: mol_type = other DNA
gtctacgtccgtgatgaccgcaacgccggttcacagatgcccccggcggtctggttcgcgtacagtccggaccgg

SEQ ID NO: 143820 - DNA, 75 bp, synthetic construct
  source 1..75: mol_type = other DNA
acagtatctggacgtatgtccgggatgatcgcaatgtgggttcgtcatctcctccagcggtctggttcgcgtact

SEQ ID NO: 143821 - DNA, 75 bp, synthetic construct
  source 1..75: mol_type = other DNA
cgcgtactcgccgaaccggcaggggaaacacccggagcaacacctccgccccttccggggtatcctgcaggcgga

SEQ ID NO: 143822 - DNA, 75 bp, synthetic construct
  source 1..75: mol_type = other DNA
ttatcggcacttgccttctgaacgacattgatccggaagcgtatctgcgccatatcctgagcatactgccggaat

SEQ ID NO: 143823 - DNA, 75 bp, synthetic construct
  source 1..75: mol_type = other DNA
cgcaaaaaccgaacggcagatacaggaagcacaggagcgaatcagcgcacttcaggaagaaatggcggaaacgct

SEQ ID NO: 143824 - DNA, 75 bp, synthetic construct
  source 1..75: mol_type = other DNA
gggtgttatacgaatccggcagaataacggaagccgcgtgtatggctcatgcccggagaaaaatccacgatgtgc

SEQ ID NO: 143825 - DNA, 75 bp, synthetic construct
  source 1..75: mol_type = other DNA
atgatgccctgtacagttatgtgatgaacacccgcaaggttcacactgatgacacaccagtaaaagtactggcac

SEQ ID NO: 143826 - DNA, 75 bp, synthetic construct
  source 1..75: mol_type = other DNA
gacaggcagggaaaacatccggtacaacaccttcgtcccttccggggtatcctgcaggcggatgcattcagcggt

SEQ ID NO: 143827 - DNA, 75 bp, synthetic construct
  source 1..75: mol_type = other DNA
caggacagcgatcgttacagtgggcgggaagacgatccacaggttccccgccagttgcggcagtcgcgccatcgt

SEQ ID NO: 143828 - DNA, 75 bp, synthetic construct
  source 1..75: mol_type = other DNA
ctgtattgttgaagcaccggcgccgtcccgcccgatagagcgtggtatcgcgggccccggattacttgcccgcgt

SEQ ID NO: 143829 - DNA, 75 bp, synthetic construct
  source 1..75: mol_type = other DNA
tcagggagtggagctgagccgtgccacactggggcgctggacaggtgctgttgctgaactgctggagccgttgta

SEQ ID NO: 143830 - DNA, 75 bp, synthetic construct
  source 1..75: mol_type = other DNA
atatatctggacgtatgtccgggatgaccgaaatgccggttcgccagaacctccggcggtctggttcgcctactc

SEQ ID NO: 143831 - DNA, 75 bp, synthetic construct
  source 1..75: mol_type = other DNA
cggagcaacacctccgccccttccggggtatcctgcaggcggatgcgttcacaggttacgacaggttgttcagtg

SEQ ID NO: 143832 - DNA, 75 bp, synthetic construct
  source 1..75: mol_type = other DNA
ggaaagagcgcttcgtgcagtttgtcttggaaagaaaaattacgtgttcttcggtagcgatcacggcggcgagcg

SEQ ID NO: 143833 - DNA, 75 bp, synthetic construct
  source 1..75: mol_type = other DNA
ctgtatgactggatacagactcagatgaaaacactgtcgcgtcactcgatacggcaaaagcgttcgcatacctgc

SEQ ID NO: 143834 - DNA, 75 bp, synthetic construct
  source 1..75: mol_type = other DNA
gctgtacggactaatcgggagctgtcggttgaacggtatcgatccagaagcgtatctgcgccatatcctgagcgt

SEQ ID NO: 143835 - DNA, 75 bp, synthetic construct
  source 1..75: mol_type = other DNA
agcactgggttgcgttgtgcaacttctgtgatgacggtctggcggaggcggacaataacacagcggaaagagcgc

SEQ ID NO: 143836 - DNA, 75 bp, synthetic construct
  source 1..75: mol_type = other DNA
ctgatcggcacctgccgactgaacggtatcgatccggaagcgtatctgcgccatattctgagcgtactgccggaa

SEQ ID NO: 143837 - DNA, 75 bp, synthetic construct
  source 1..75: mol_type = other DNA
aattcagaaaggaaattaatgatgcgcttaatatttgtcagcaaacagcgaaacagttagaaactctggtgactg

SEQ ID NO: 143838 - DNA, 75 bp, synthetic construct
  source 1..75: mol_type = other DNA
gccttacggggagtggccgtaggccggaaaaactggctcttcgcgggttccgacagcggtggcgaacatgcggcg

SEQ ID NO: 143839 - DNA, 75 bp, synthetic construct
  source 1..75: mol_type = other DNA
caggccgatgcttacggtggttaccgggcgttatacgaatccggcagaataacggaagccgcgtgtatggctcat

SEQ ID NO: 143840 - DNA, 75 bp, synthetic construct
  source 1..75: mol_type = other DNA
tacgccatcgaggatgaaatacggggattaccagagtcagagcgtcttgcagccaggcagcagcgaagcaaagcg

SEQ ID NO: 143841 - DNA, 75 bp, synthetic construct
  source 1..75: mol_type = other DNA
gctgcctgtctgatgacgtacagtcatcatgcctgtcgtacggagtgttatgccattgcgtattaccgtgaagga

SEQ ID NO: 143842 - DNA, 75 bp, synthetic construct
  source 1..75: mol_type = other DNA
ttgttgaagcaccggcgccgtcccgcccgatagagcgtggtatcccgggccccggattacttgcccgcgtgttaa

SEQ ID NO: 143843 - DNA, 75 bp, synthetic construct
  source 1..75: mol_type = other DNA
gtgacgagtacaacagtggtatctggtccttttacacgctcagcaatggcggcgcgtttatggcccctgatgctg

SEQ ID NO: 143844 - DNA, 75 bp, synthetic construct
  source 1..75: mol_type = other DNA
gtcaccctggaaccccgtgtcttcggctggatggaccgtctttgcgaaaactactgcggtggtatctggaatctg

SEQ ID NO: 143845 - DNA, 75 bp, synthetic construct
  source 1..75: mol_type = other DNA
ctactgcggtggtatctggaatctgtacaccctgaacaacggcgggcatttatggcacccgaaccggatgacgat

SEQ ID NO: 143846 - DNA, 75 bp, synthetic construct
  source 1..75: mol_type = other DNA
gcactgaagcgtataccggtcgtgaagtgcaggatattcccggtgtgctggccgtgtttgctgaacgccataagg

SEQ ID NO: 143847 - DNA, 75 bp, synthetic construct
  source 1..75: mol_type = other DNA
atgacaaccttttcgcatagctccaccacgccttctgtttccgtaaccactgcaccagggaataaccagtctcaa

SEQ ID NO: 143848 - DNA, 75 bp, synthetic construct
  source 1..75: mol_type = other DNA
atgacaaccttttcgcataactccatcacaccttctgtttccgtaaccactgcatcagggaataaccagtctcag

SEQ ID NO: 143849 - DNA, 75 bp, synthetic construct
  source 1..75: mol_type = other DNA
accgccagtcagaaatataccgtcgtcagggagtggagctgagccgtgccacactggggcgctacaggtgctgtt

SEQ ID NO: 143850 - DNA, 75 bp, synthetic construct
  source 1..75: mol_type = other DNA
ttcatgaatggatggtggagaagaatggcacgctgtcgaaaaaatccagactgggcgaagcgttcagctatgtac

SEQ ID NO: 143851 - DNA, 75 bp, synthetic construct
  source 1..75: mol_type = other DNA
gtgctggcacgtgccgaagaaaagatcgaagaagatgaacgggaaatagaacatctgcgggctcagatagaaaaa

SEQ ID NO: 143852 - DNA, 75 bp, synthetic construct
  source 1..75: mol_type = other DNA
atgcagacaattatccagatcgagccaaacgaatgggtttcagaggacttgctgatggcagtcactggtatgaag

SEQ ID NO: 143853 - DNA, 75 bp, synthetic construct
  source 1..75: mol_type = other DNA
gagcatatccaggactggccggcaaaccgggtacgcgatctgttaccctggaaagttgatctgagctctcagtaa

SEQ ID NO: 143854 - DNA, 75 bp, synthetic construct
  source 1..75: mol_type = other DNA
aacaagaactgcccggctgtgggtctatgtccgtgatgaccgtaatgccggttcacagatgcccccggcggtctg

SEQ ID NO: 143855 - DNA, 75 bp, synthetic construct
  source 1..75: mol_type = other DNA
accattgacgttgtggtgcatatggaaaagcggaaaatcaaagaaatttattttgatcctgaatataaaatgcag

SEQ ID NO: 143856 - DNA, 75 bp, synthetic construct
  source 1..75: mol_type = other DNA
taacgggaaaatactgcgaacacctgccgctgtatcgtcagagtgaaatctttgctcgtcagggtgtcgaactga

SEQ ID NO: 143857 - DNA, 75 bp, synthetic construct
  source 1..75: mol_type = other DNA
aaattacgtgttcttcggtagcgatcacggcggcgagcgtggagcactgctgtacgggctgatcggcacctgccg

SEQ ID NO: 143858 - DNA, 75 bp, synthetic construct
  source 1..75: mol_type = other DNA
gttgacagaagcggcatgctgggctcatgcgcggcgcaaaatccatgacgtctatatcagcacccggacggccac

SEQ ID NO: 143859 - DNA, 75 bp, synthetic construct
  source 1..75: mol_type = other DNA
actgtatcgtcagagtgaaatctttgcccgccagggtgtcgaactgagccgggcctactctccaactgggttgac

SEQ ID NO: 143860 - DNA, 75 bp, synthetic construct
  source 1..75: mol_type = other DNA
gctcctggcccatgtcgtcaccggaaatatgcagaccatctgccgttataccgccagtcagagatataccgccgt

SEQ ID NO: 143861 - DNA, 75 bp, synthetic construct
  source 1..75: mol_type = other DNA
gcttctggcccatgttatcaccgggaaatatgcagaccatctgccgttataccgccagtcagaaatataccgtcg

SEQ ID NO: 143862 - DNA, 75 bp, synthetic construct
  source 1..75: mol_type = other DNA
gaactgtataccatcgaggcagaagtccggggatgttcagcagaacagcgtctggcggcaagaaaagcaagagcc

SEQ ID NO: 143863 - DNA, 75 bp, synthetic construct
  source 1..75: mol_type = other DNA
gggcgttatacgaatccggcagaataacggaagccgcgtgtatggcccatgcccggagaaaaatccacgatgtgc

SEQ ID NO: 143864 - DNA, 75 bp, synthetic construct
  source 1..75: mol_type = other DNA
ctgggggaagtcagtgcagaacaactggaactggtgagcagcgccctgaaagtgatccgcacagaacgggtaaaa

SEQ ID NO: 143865 - DNA, 75 bp, synthetic construct
  source 1..75: mol_type = other DNA
cccgtccgatactggaagatctgtggtcatggcttgaagagcaggaaccgcaatgttctccgggaagtaagcgta

SEQ ID NO: 143866 - DNA, 75 bp, synthetic construct
  source 1..75: mol_type = other DNA
gtgcatggctcagtaatgaacgccccggactgatgttcgattttgccaccgcgtggttgcttcaaaataaagtgt

SEQ ID NO: 143867 - DNA, 75 bp, synthetic construct
  source 1..75: mol_type = other DNA
atgaacggtaaccgcgctgaaatgagcccggaagccgccggcattgccgcctgtctgatggcgtacagtcatcat

SEQ ID NO: 143868 - DNA, 75 bp, synthetic construct
  source 1..75: mol_type = other DNA
ggcaaataccgctggcacggcagcactgaaacgtataccggtcgtgaagtgcaggatattcccggtgtgctggcc

SEQ ID NO: 143869 - DNA, 75 bp, synthetic construct
  source 1..75: mol_type = other DNA
ggtgaagccatgcgtattcaccaacaacatccgacatcccgtctttttccgttctgtaccggtaaataccgctgg

SEQ ID NO: 143870 - DNA, 75 bp, synthetic construct
  source 1..75: mol_type = other DNA
ttgacgcgtgctgccagttaatgacggcgctgaatgatgccctgtaccgttatgtgatgaatacccgcaagcttc

SEQ ID NO: 143871 - DNA, 75 bp, synthetic construct
  source 1..75: mol_type = other DNA
acagaagttgcgtgctgggctcatgcccggagaaaatccacgatgtatacatcagcagcaaaagtgcgacggcag

SEQ ID NO: 143872 - DNA, 75 bp, synthetic construct
  source 1..75: mol_type = other DNA
aaaaattcacttgtcctgactgcaggaatataaaattagattgcagaacctgcaatggtgaaggatcaattagca

SEQ ID NO: 143873 - DNA, 75 bp, synthetic construct
  source 1..75: mol_type = other DNA
tatttctaaatgtgacgacatttttatttaatgtagttactggattatatttaactccatttttgattaaatatt

SEQ ID NO: 143874 - DNA, 75 bp, synthetic construct
  source 1..75: mol_type = other DNA
atacggatgacactccggtgcccgtgctggcgccgggcagaaagaagatgaaaaccgggcgtatctggacatatg

SEQ ID NO: 143875 - DNA, 75 bp, synthetic construct
  source 1..75: mol_type = other DNA
aaatacgcggccttccggcatctcagcggctggccgccagacggtcccgaagtaaaccgttgctgatatccctgc

SEQ ID NO: 143876 - DNA, 75 bp, synthetic construct
  source 1..75: mol_type = other DNA
agtgcaggatattcccggtgtgctggctgtgtttgctgaacgccgtaaggacagttttggcccgtatgtccggct

SEQ ID NO: 143877 - DNA, 75 bp, synthetic construct
  source 1..75: mol_type = other DNA
ccatgcgtattcaccaacaacatccggcatcccgtcttttcccgttctgtaccggtaagtaccgctggcacggca

SEQ ID NO: 143878 - DNA, 75 bp, synthetic construct
  source 1..75: mol_type = other DNA
gtgaccctggagccccgtgttttcggctggatggaccgtctgtgcgaaggctactgcggtggtatctggaatctg

SEQ ID NO: 143879 - DNA, 75 bp, synthetic construct
  source 1..75: mol_type = other DNA
gatggcgctgattgatgttccgcagatgaaacctctggtgcacgtttctggtatgtttggcgcatggcgcggtaa

SEQ ID NO: 143880 - DNA, 75 bp, synthetic construct
  source 1..75: mol_type = other DNA
cagataacgtggatgcacagctttataacggctttttcagtgacgccgatcgtgcagcaatgaaaattgtgctgg

SEQ ID NO: 143881 - DNA, 75 bp, synthetic construct
  source 1..75: mol_type = other DNA
ttcgcggaagccgaaccgtttacaccttcagataacgtggatgcacagctttataacggctttttcagtgacgcc

SEQ ID NO: 143882 - DNA, 75 bp, synthetic construct
  source 1..75: mol_type = other DNA
atgagcggacttgatgcatttgacgaatacctcgatcgcgttaaaggcgcggttttacaaataccgttcatcaaa

SEQ ID NO: 143883 - DNA, 75 bp, synthetic construct
  source 1..75: mol_type = other DNA
ctaccttcctctttcacgattacgaaacctttggcacgcaccccgcgttagatcgccctgcacagttcgcagcca

SEQ ID NO: 143884 - DNA, 75 bp, synthetic construct
  source 1..75: mol_type = other DNA
gcgaaaggagaaaacgaagctgcgtttgccgctcgcattcattcgctttttaccgtaccgaagacctgtattctg

SEQ ID NO: 143885 - DNA, 75 bp, synthetic construct
  source 1..75: mol_type = other DNA
cgctggctggaacaccgtcggcagatcttcaccccggaatttttacaggcctacgcccagcaactggagatgttg

SEQ ID NO: 143886 - DNA, 75 bp, synthetic construct
  source 1..75: mol_type = other DNA
gacgctggattatgccgagcagcaacgctggctggagcaccgccgccaggtcttcacgccagagtttttgcaggg

SEQ ID NO: 143887 - DNA, 75 bp, synthetic construct
  source 1..75: mol_type = other DNA
gaatgtttggggcatggcgcggcaataccagctgggtggcaccgctggcgtggcatcctgaaaatcgcaatgccg

SEQ ID NO: 143888 - DNA, 75 bp, synthetic construct
  source 1..75: mol_type = other DNA
tgctgatgaattgcagatgctggtacaacaatatgccgatgacaaagagaaagtggcgctgttaaaagcactttg

SEQ ID NO: 143889 - DNA, 75 bp, synthetic construct
  source 1..75: mol_type = other DNA
taacgccgccgttccggttaagctggtgcatatcaataaatgtccggtgctggcccaggcgaatacgctacgccc

SEQ ID NO: 143890 - DNA, 75 bp, synthetic construct
  source 1..75: mol_type = other DNA
tacggtcagtatgaggggaataacgagaagctatcgctgctgaaggcgctgtatcagtacgtgcaggagattgtt

SEQ ID NO: 143891 - DNA, 75 bp, synthetic construct
  source 1..75: mol_type = other DNA
gggtgtggcttacagccgtgtgtcgactttctccggggattatcttcgcgtaactgacaacaaggggaaaacgca

SEQ ID NO: 143892 - DNA, 75 bp, synthetic construct
  source 1..75: mol_type = other DNA
aattacgagttgattacggtcctggttacagggtttattattcaatcgaagatggcgaaataattcttctgctca

SEQ ID NO: 143893 - DNA, 75 bp, synthetic construct
  source 1..75: mol_type = other DNA
cgatgacagcaaccggcgtggccgtctgtggcccgataagttttattggtctcgtcgtgccgcacatggtgcgca

SEQ ID NO: 143894 - DNA, 75 bp, synthetic construct
  source 1..75: mol_type = other DNA
gtcgcttatgaaggttccggcagtggcgactggcgcactgacagtttcatcgtaggtgtcggttataaattctga

SEQ ID NO: 143895 - DNA, 75 bp, synthetic construct
  source 1..75: mol_type = other DNA
atccggtgcgcctgcatgggcatctgaacatcagtccacactgagcgcggggtatcttcatgcccggacgaacgc

SEQ ID NO: 143896 - DNA, 75 bp, synthetic construct
  source 1..75: mol_type = other DNA
gcggggccgtctgtgcgcgtgaatgaatggttcagcgcgtatgcgatggcgggtgtagcttacagccgtgtgtcg

SEQ ID NO: 143897 - DNA, 75 bp, synthetic construct
  source 1..75: mol_type = other DNA
taaagaaaatatagaaagtacatcaaagcttaacttccagaaattaaatcgtggtaatattgatatatttaaagg

SEQ ID NO: 143898 - DNA, 75 bp, synthetic construct
  source 1..75: mol_type = other DNA
atcaatgactcctatatttgatgtcgcaattccggaggtttctgttacgctgggactggggattattgcttccag

SEQ ID NO: 143899 - DNA, 75 bp, synthetic construct
  source 1..75: mol_type = other DNA
ttggactggggattattacttccagtatggggatcagttttgatcaactgattaatggtgatacttatgaagaac

SEQ ID NO: 143900 - DNA, 75 bp, synthetic construct
  source 1..75: mol_type = other DNA
ggcgggcgtgctggtacaggggattgtgcgtaacccgctagcatcaccggatattctcggcattaaccatgccgc

SEQ ID NO: 143901 - DNA, 75 bp, synthetic construct
  source 1..75: mol_type = other DNA
aacagatataaaagtaatacccacaaaaggagccatcgttgaaggcagattgaaaactaataagggaatgaaata

SEQ ID NO: 143902 - DNA, 75 bp, synthetic construct
  source 1..75: mol_type = other DNA
attaacgtgaaataccgttatgagtttacggacacactgggggtggtgacgtcattcagctatgcaggagacagg

SEQ ID NO: 143903 - DNA, 75 bp, synthetic construct
  source 1..75: mol_type = other DNA
aatggttcagtgcttatgcgatggcgggtatggcttacagccgtgtgtcgaccttctccggggattatctccgcg

SEQ ID NO: 143904 - DNA, 75 bp, synthetic construct
  source 1..75: mol_type = other DNA
taacacatctggcgcaacaggcggcaaaatgatttctcctcagagtattgctatcgctgtttcagccactcgtat

SEQ ID NO: 143905 - DNA, 75 bp, synthetic construct
  source 1..75: mol_type = other DNA
gcgaagaggtgggattacgcggcgggcaaactgccacccgcgcggtgtcgccggacgtcgccattgtgcttgata

SEQ ID NO: 143906 - DNA, 75 bp, synthetic construct
  source 1..75: mol_type = other DNA
gtgaccgacgacaaggggaaaacgcacgatgtgctgaccggaagtgatgacggtcgccacagcaacacgtctctg

SEQ ID NO: 143907 - DNA, 75 bp, synthetic construct
  source 1..75: mol_type = other DNA
aacgggcggcggagtgatcatcggcatgatagccgcattgctgggcgtgggtggcagcgtgatgacagtgccatt

SEQ ID NO: 143908 - DNA, 75 bp, synthetic construct
  source 1..75: mol_type = other DNA
cctggatcaagctctgcttatccgtgcggccaaagaggagcgtgaagccatcctgcgtgttgcgaaggatgtgtt

SEQ ID NO: 143909 - DNA, 75 bp, synthetic construct
  source 1..75: mol_type = other DNA
ctgatggcgtagcaggcagttttgccgggataagtcatgacgcacttatatttgcaggaggggccggcttcgaag

SEQ ID NO: 143910 - DNA, 75 bp, synthetic construct
  source 1..75: mol_type = other DNA
tgttggtaaaaacagtaagggattaacacaggtattcaacgacgtccataaatataaccccagaaccaatacatg

SEQ ID NO: 143911 - DNA, 75 bp, synthetic construct
  source 1..75: mol_type = other DNA
tgtagaggaagccattctggagaacgttgcgccgggcttaccagaagtctttcgccaaaaaatggtgaaggtggc

SEQ ID NO: 143912 - DNA, 75 bp, synthetic construct
  source 1..75: mol_type = other DNA
cctctggcagtcgctatgcgtgaaggccatcttctcctcatcaacgaggttgatttggctgaccctgccgagctg

SEQ ID NO: 143913 - DNA, 75 bp, synthetic construct
  source 1..75: mol_type = other DNA
ctggcggtgacgcattgttcgtaaccggacctaccgggtctggtaaaacctctggtatcaccgagatcgctggtc

SEQ ID NO: 143914 - DNA, 75 bp, synthetic construct
  source 1..75: mol_type = other DNA
ctgaaaaatacccgtggtacgctggcaatggcccgtactcaggcaccgcactctgcaactgcacagttcttcatc

SEQ ID NO: 143915 - DNA, 75 bp, synthetic construct
  source 1..75: mol_type = other DNA
tccctatctgaggacggagaccagaaacacgtatacatcgcgctttacagaagtggcaatggcgttcgccagcat

SEQ ID NO: 143916 - DNA, 75 bp, synthetic construct
  source 1..75: mol_type = other DNA
aaatgcactgaacatcatgcgcctgtattcgcccgactccgccattctcagtgcggtcattttcaacgccttgat

SEQ ID NO: 143917 - DNA, 75 bp, synthetic construct
  source 1..75: mol_type = other DNA
atgacagacacagataagcaacctaccttcctctttcacgattatgaaacttttggcacgcaccctgcgttagat

SEQ ID NO: 143918 - DNA, 75 bp, synthetic construct
  source 1..75: mol_type = other DNA
tcatcgtattctggcagaaatcccaggaaacaaaattttgcagacaatacacactgcattttctgaatggttaat

SEQ ID NO: 143919 - DNA, 75 bp, synthetic construct
  source 1..75: mol_type = other DNA
gtttttacaacaacactattttccaccgtgttatcaacggctttatgattcagggcggcggttttgaaccgggca

SEQ ID NO: 143920 - DNA, 75 bp, synthetic construct
  source 1..75: mol_type = other DNA
gcgcttcagcccgcacccgtggtcgttcgttggaagaacacgaacaaaacatctacagaacgtattaccagtgca

SEQ ID NO: 143921 - DNA, 75 bp, synthetic construct
  source 1..75: mol_type = other DNA
atgatcctagcccgtttcgcgatatggtgctggcgacgcttaataaagcagatattccatggcgactggcttatg

SEQ ID NO: 143922 - DNA, 75 bp, synthetic construct
  source 1..75: mol_type = other DNA
tacgtggaaaaagggaaaaaagaaagattcattcaattgggtatatggcctgagatgaaactggccacagcgaat

SEQ ID NO: 143923 - DNA, 75 bp, synthetic construct
  source 1..75: mol_type = other DNA
ggagcgtcagagctggggcgacattgtagaagaagaatggaaagtcacggccgggctctggcgaaactggtatcc

SEQ ID NO: 143924 - DNA, 75 bp, synthetic construct
  source 1..75: mol_type = other DNA
gtaatgttatcgtaaaatccttatctgagagttattctttaaatgtagaaaactccaatatatcagtattgcatg

SEQ ID NO: 143925 - DNA, 75 bp, synthetic construct
  source 1..75: mol_type = other DNA
atcaatgactcctatatttgatgtcgcaattccggaggtgtctgttacgcttggactggggattattgcttccag

SEQ ID NO: 143926 - DNA, 75 bp, synthetic construct
  source 1..75: mol_type = other DNA
aattcagttatattacgcaaaagataaagacgaacattactcaatcttaaataagttgaaaaaacacgaaggttt

SEQ ID NO: 143927 - DNA, 75 bp, synthetic construct
  source 1..75: mol_type = other DNA
cctgaaactcacgcggcactagaatctaaagttgatgctaacaaacaagaattggatagcacaattgcagtaaat

SEQ ID NO: 143928 - DNA, 75 bp, synthetic construct
  source 1..75: mol_type = other DNA
tgcgacccgaaacaagccgttgcggtcgccaacaaaatcgttaatgacggcattaaatacgttattggtcatctg

SEQ ID NO: 143929 - DNA, 75 bp, synthetic construct
  source 1..75: mol_type = other DNA
ccaatattatcgaattggtgatccgatgcggcaacaatagcccgaaaggtgttgtattcaatgcgtattatacta

SEQ ID NO: 143930 - DNA, 75 bp, synthetic construct
  source 1..75: mol_type = other DNA
ccattggggtgcaagcaatacaggtcgaaataacgttttaagtcttcgtgactcaaaaggatttttagccgaatt

SEQ ID NO: 143931 - DNA, 75 bp, synthetic construct
  source 1..75: mol_type = other DNA
cttttaaacagacaacgccagaaattaagaaaacagaacttttttagcttagaaaatatctcatgggatggaata

SEQ ID NO: 143932 - DNA, 75 bp, synthetic construct
  source 1..75: mol_type = other DNA
atgaaacggaatgcgaaaactatcatcgcagggatgattgcactggcaatttcacacaccgctatggctgacgat

SEQ ID NO: 143933 - DNA, 75 bp, synthetic construct
  source 1..75: mol_type = other DNA
gatttcagcatatccccgcgcgtgtcacccgggatggccgtgtactgaaagtggaagagatcccgatggaaggag

SEQ ID NO: 143934 - DNA, 75 bp, synthetic construct
  source 1..75: mol_type = other DNA
tccggcattctgacccgtaagttcggatttcagcatatccccgcgcgtgtcacccgggatggccgtgtactgaaa

SEQ ID NO: 143935 - DNA, 75 bp, synthetic construct
  source 1..75: mol_type = other DNA
tcacgacaaacaacagtatggtgaagggctggcgcgttcggtgcaggacggattgaaagcagccaatgccaacgt

SEQ ID NO: 143936 - DNA, 75 bp, synthetic construct
  source 1..75: mol_type = other DNA
tgaaacccgagcgcatcgccattattcacgacaaacaacagtatggcgaagggctggcgcgttcggtgcaggacg

SEQ ID NO: 143937 - DNA, 75 bp, synthetic construct
  source 1..75: mol_type = other DNA
attaaagttgccgttgtcggcgcgatgtctggcccggttgcccagtggggcgatatggaatttaacggtgctcgc

SEQ ID NO: 143938 - DNA, 75 bp, synthetic construct
  source 1..75: mol_type = other DNA
tactgccgccagacaaattcttttctaatctgccgaactttaacctaaaaagtggtgctgatacccagagtcgaa

SEQ ID NO: 143939 - DNA, 75 bp, synthetic construct
  source 1..75: mol_type = other DNA
tgttactggaaattctggtattgatattcgtcgaggaccaaacgaatcaagccattttaatttcatggattatcg

SEQ ID NO: 143940 - DNA, 75 bp, synthetic construct
  source 1..75: mol_type = other DNA
caatattatgtatggcttggcttatgctaattagtagtaacacttcttttgcgaaaaataaatacgagtttgaca

SEQ ID NO: 143941 - DNA, 75 bp, synthetic construct
  source 1..75: mol_type = other DNA
tgcagttgaacgttatggagccggtcattggccaggctatgttcgaatccgttcacattctgaccaacgcttgct

SEQ ID NO: 143942 - DNA, 75 bp, synthetic construct
  source 1..75: mol_type = other DNA
tacggccgccaggcaaattctgttttatcagaccgcttctgcgttctgatttaatctgtatccaggctgaaaatg

SEQ ID NO: 143943 - DNA, 75 bp, synthetic construct
  source 1..75: mol_type = other DNA
tactatcgcagcaaatcacgcagaaattaacaataaagttgatgtaattaaacgcgaaaccgacgcgacaatcga

SEQ ID NO: 143944 - DNA, 75 bp, synthetic construct
  source 1..75: mol_type = other DNA
tgaacaaaggcggctggtattcatgggctgcaaatggtgatttcacatctagtgcgtcggtttactgtaacgatg

SEQ ID NO: 143945 - DNA, 75 bp, synthetic construct
  source 1..75: mol_type = other DNA
agctctgaacgattctctatcaacaattggggaaattcagaagttggtcgcgcggcagtaatggaaatcggcgat

SEQ ID NO: 143946 - DNA, 75 bp, synthetic construct
  source 1..75: mol_type = other DNA
ttttaatcaaagcaattcaagaaatgagcgaagaaaataaaatccttcgtgaacgtcttgctgctattgaagcaa

SEQ ID NO: 143947 - DNA, 75 bp, synthetic construct
  source 1..75: mol_type = other DNA
aaagcaattaatgacaaggttgatttgattaaggcagaaactgaccgcactatcgcagcaaataaaacctatgcg

SEQ ID NO: 143948 - DNA, 75 bp, synthetic construct
  source 1..75: mol_type = other DNA
caaatgctaaaaagatgttgcgtcgcttccgtagttgtgctcctgccactatctggcatgagacagttgatgata

SEQ ID NO: 143949 - DNA, 75 bp, synthetic construct
  source 1..75: mol_type = other DNA
gtgccggtgctgaaaacgtggcaggagtccgatccggatcgcttctcggttgccgtatccatcgacgggaagctc

SEQ ID NO: 143950 - DNA, 75 bp, synthetic construct
  source 1..75: mol_type = other DNA
gtgcttcccataccgaaattgaagcagccatgcgaggcatgacggacgctgaaattgacgcgattctggaaaaac

SEQ ID NO: 143951 - DNA, 75 bp, synthetic construct
  source 1..75: mol_type = other DNA
tgctgtatccatcgacgggaagctccagaatgaccccgcatggaaagacaaaacgctcactgaacgtttcgctga

SEQ ID NO: 143952 - DNA, 75 bp, synthetic construct
  source 1..75: mol_type = other DNA
tgaaaaactattactcgctcttggaataaaaaagaatctgattaagacagttgatacatgttctaaccaaaataa

SEQ ID NO: 143953 - DNA, 75 bp, synthetic construct
  source 1..75: mol_type = other DNA
cttcccagacctgccgaattagataaatcatatggcaaccaagataatgatcctcgaggtgcatggacaacaaat

SEQ ID NO: 143954 - DNA, 75 bp, synthetic construct
  source 1..75: mol_type = other DNA
aactacgcccggtggtagagttattgatcttccaaaggatttatgttggcgatatacgcaaaaacgtatggaaga

SEQ ID NO: 143955 - DNA, 75 bp, synthetic construct
  source 1..75: mol_type = other DNA
atttaactattacttacaaaacatcaagtattgttaaaccactgcaagtttccctgaataacgttaatactcgcg

SEQ ID NO: 143956 - DNA, 75 bp, synthetic construct
  source 1..75: mol_type = other DNA
tgtccgcagccatttgtctgtccgtatccggtgcgcctgcatgggcgtctgaacatcagtccacgctgagcgcgg

SEQ ID NO: 143957 - DNA, 75 bp, synthetic construct
  source 1..75: mol_type = other DNA
cgatgtgctgaccggaagtgatgacggtcgccacagcgacacctctctggcgtggctgtctcttgatcagatctc

SEQ ID NO: 143958 - DNA, 75 bp, synthetic construct
  source 1..75: mol_type = other DNA
atggtgcaggaggtccgcacctatgccggtgaactggatgaagacccgggccggattgttcgcagccttccggca

SEQ ID NO: 143959 - DNA, 75 bp, synthetic construct
  source 1..75: mol_type = other DNA
ttttatctggcatccattattcaaatatctataaggcatatgctgctggtctaagcatgagccttgattctttgg

SEQ ID NO: 143960 - DNA, 75 bp, synthetic construct
  source 1..75: mol_type = other DNA
actttctccggggattatctccgcgtaactgacaacaagggaaaaacgcacgacgtgctgaccggaagtgatgac

SEQ ID NO: 143961 - DNA, 75 bp, synthetic construct
  source 1..75: mol_type = other DNA
gtattaacccgctggataccgtgtcattagccggtccgttgtattttctggatgcggatgatgaacgacaggtgg

SEQ ID NO: 143962 - DNA, 75 bp, synthetic construct
  source 1..75: mol_type = other DNA
tgatcagcctgcctctggcagcgaaggatctgggcgtacagggcgacctctggccggtacaggagcagagcatgc

SEQ ID NO: 143963 - DNA, 75 bp, synthetic construct
  source 1..75: mol_type = other DNA
aacatttgcatagcgcaccggaaggcaaacatatccctactgctcgcccgcgttcactgattgacggcaaacgga

SEQ ID NO: 143964 - DNA, 75 bp, synthetic construct
  source 1..75: mol_type = other DNA
ccatgatgctgctgattttctccgccggcagcggggctaaagatctcggtacctggggcaacgtcttcgagcctg

SEQ ID NO: 143965 - DNA, 75 bp, synthetic construct
  source 1..75: mol_type = other DNA
cccgttcaccgacacgctctattttattgatgcagataatccgcaacaactgtcctggattaaagcgcagaaacc

SEQ ID NO: 143966 - DNA, 75 bp, synthetic construct
  source 1..75: mol_type = other DNA
actggctgaagcaacaaccggtggagctgaaccggaaagtgatactggtgaagggaaatatccgggaagcgacac

SEQ ID NO: 143967 - DNA, 75 bp, synthetic construct
  source 1..75: mol_type = other DNA
cgcgctggcgctgaaaaacgcgctcgccgacgcccgcagcctgtacaacctcatccgcctccagggtaacactga

SEQ ID NO: 143968 - DNA, 75 bp, synthetic construct
  source 1..75: mol_type = other DNA
attctactttattgtcgatcgtcttgatctgctccagcaggcgcagcgtgaattcaccgcccgtggcttaatcgt

SEQ ID NO: 143969 - DNA, 75 bp, synthetic construct
  source 1..75: mol_type = other DNA
gccaggcggtgatgatctgaatggtattaacgtgaaataccgttatgaatttacggacacgcttgggatggtgac

SEQ ID NO: 143970 - DNA, 75 bp, synthetic construct
  source 1..75: mol_type = other DNA
ccgcccggacatcacgctactgatcaatggtatgccactgatctttatcgaagtaaaaaaacccaacaaccgcga

SEQ ID NO: 143971 - DNA, 75 bp, synthetic construct
  source 1..75: mol_type = other DNA
cggaaatcttcactgaccagataaaccagatccaggaccgggaaaccgcgctggtactgaagaacgcgctgaccg

SEQ ID NO: 143972 - DNA, 75 bp, synthetic construct
  source 1..75: mol_type = other DNA
actctacctcgggcgggtgatcagaaagcacaacctgctccaggcgctgacccgcgtcaaccgaacctacaacca

SEQ ID NO: 143973 - DNA, 75 bp, synthetic construct
  source 1..75: mol_type = other DNA
acttcgaggccatgcaaaaggagatgtacgggcagtttgaaaacacgttcatgatgtacctgccgcgcctgtgcg

SEQ ID NO: 143974 - DNA, 75 bp, synthetic construct
  source 1..75: mol_type = other DNA
taaaggatgtcgccaccctacttaaggttggtgagaagactgtctattccatggcccagaccggggaattacctg

SEQ ID NO: 143975 - DNA, 75 bp, synthetic construct
  source 1..75: mol_type = other DNA
gctgcatttgcttgacgcgacgcacacgctggcaaccatcgccaggcaaatcattgccgatgagcaactgcaaac

SEQ ID NO: 143976 - DNA, 75 bp, synthetic construct
  source 1..75: mol_type = other DNA
tggcaggcactgaccaataaagcctatgccaaatccattgccgatcaaattgatatcaacaaagcgaagccgtcc

SEQ ID NO: 143977 - DNA, 75 bp, synthetic construct
  source 1..75: mol_type = other DNA
ggttatccgaaaaactgggaagaccaggaagagtggcaaggcggctgggtgcgtgatgtgaatggcaagatccgc

SEQ ID NO: 143978 - DNA, 75 bp, synthetic construct
  source 1..75: mol_type = other DNA
ccggtactgcgggcgctaaaacggatgatggcgatgcgccactatatgcgttcacaaaccgtggaaggcgttacc

SEQ ID NO: 143979 - DNA, 75 bp, synthetic construct
  source 1..75: mol_type = other DNA
gcgcagcgacattctggtcttctttggtatctggctgatcctgccgtttgtctggcgtcgcctggtcattcctac

SEQ ID NO: 143980 - DNA, 75 bp, synthetic construct
  source 1..75: mol_type = other DNA
gtgacccctactcaacccttctcggaactgagcttccgtccgacgaaagatttgagcggtgcggatatgtggggt

SEQ ID NO: 143981 - DNA, 75 bp, synthetic construct
  source 1..75: mol_type = other DNA
cttcaggccgtcgcgcgggcgtactcaccgggcttggtgtcgcgttgggcgatgccatctattccgggctggggt

SEQ ID NO: 143982 - DNA, 75 bp, synthetic construct
  source 1..75: mol_type = other DNA
aagtgccggtcatttatgctccggcgaaaaccggcaacatttttgtgctcgatcgtcgcaatggtgaactggtgg

SEQ ID NO: 143983 - DNA, 75 bp, synthetic construct
  source 1..75: mol_type = other DNA
tgataaaaccatcgtgatggcgggttccgtcactgataacttctcaacccgcgaaacgtctggcgtgatccgtgg

SEQ ID NO: 143984 - DNA, 75 bp, synthetic construct
  source 1..75: mol_type = other DNA
ctggcctgcctatggtcgcaatcaggaaggtcaacgcttttcaccactgaagcaaattaacgccgataacgtcca

SEQ ID NO: 143985 - DNA, 75 bp, synthetic construct
  source 1..75: mol_type = other DNA
ttcgaacgtaaaccgatttactggatcctgagtgaagtcgcgaaacgtcttggacctgacgtctatcaaaagttc

SEQ ID NO: 143986 - DNA, 75 bp, synthetic construct
  source 1..75: mol_type = other DNA
atgggcagcacgcaaagcattatggttgctccggacggtgagttgtacggcgcatctgatccacgttcggtagat

SEQ ID NO: 143987 - DNA, 75 bp, synthetic construct
  source 1..75: mol_type = other DNA
ggtgaacagcatcaattgtggaatgaatgttgccgaagcgaccaatgcgcctcgtttccaccatcagtggttgcc

SEQ ID NO: 143988 - DNA, 75 bp, synthetic construct
  source 1..75: mol_type = other DNA
catgtagaaaagcctttgaacgagcagtaaaacgggcaggtatagatctaccggagggccaatgcacccacgtac

SEQ ID NO: 143989 - DNA, 75 bp, synthetic construct
  source 1..75: mol_type = other DNA
aatggaagaagtgaataaaaaaccgtggttgggtgaaaaggatgatcggcgacgcctatcagaattaattgagct

SEQ ID NO: 143990 - DNA, 75 bp, synthetic construct
  source 1..75: mol_type = other DNA
gctacttccagtttttagccgtgatggatagaacctcgatcgtactaccacgcgggcaacttacccacgttctac

SEQ ID NO: 143991 - DNA, 75 bp, synthetic construct
  source 1..75: mol_type = other DNA
aaccattgtggtgaaagacggtaaaacctggctggtcaccggtagccctggcgggagccggatcatcactacagt

SEQ ID NO: 143992 - DNA, 75 bp, synthetic construct
  source 1..75: mol_type = other DNA
ggtatcaggtttactccatgccaccgccatcttccggcgggatccatatcgtacaaatcctcaatattctggaaa

SEQ ID NO: 143993 - DNA, 75 bp, synthetic construct
  source 1..75: mol_type = other DNA
aggaagttgttttagcgccgccgccgcgcctcctccgccacctgtttcttatggcgtggaggaagatgtcttcca

SEQ ID NO: 143994 - DNA, 75 bp, synthetic construct
  source 1..75: mol_type = other DNA
ccgctatcgatttccgcgaaatggcacccgccaaagcgacccgcgatatgttcctcgatgaccagggcaacccgg

SEQ ID NO: 143995 - DNA, 75 bp, synthetic construct
  source 1..75: mol_type = other DNA
cgctgaacaccaccttcggtacgggcattgtcgcgggcgagagcggtattctgcttaataaccagatggatgatt

SEQ ID NO: 143996 - DNA, 75 bp, synthetic construct
  source 1..75: mol_type = other DNA
caaagcattatggttgggccggacggtgagctgtacggtgcatccgacccgcgctcggtggatgatttaacggcg

SEQ ID NO: 143997 - DNA, 75 bp, synthetic construct
  source 1..75: mol_type = other DNA
cagaaatgcagcaagtaaagcgggtggttcagcaggccatcgaccagtacccacgtctggctgtatttcggttga

SEQ ID NO: 143998 - DNA, 75 bp, synthetic construct
  source 1..75: mol_type = other DNA
ggcgcaaatcaccttgcagcatcttcaggaattaggctgccagattgcgattgatgatttcggcaccggctacgc

SEQ ID NO: 143999 - DNA, 75 bp, synthetic construct
  source 1..75: mol_type = other DNA
cattccttttatctggccgccatttttcaatcttttcatgctcattggtcactggatttcaacttccggtcctgt

SEQ ID NO: 144000 - DNA, 75 bp, synthetic construct
  source 1..75: mol_type = other DNA
attattcgtcgaaggttttttgctgatgggctcattcgtaacgctgtttaattacatcggctatcggttgatgct

SEQ ID NO: 144001 - DNA, 75 bp, synthetic construct
  source 1..75: mol_type = other DNA
cgtcggcgcatttattgctctgatgctggtcattgctctgctggtcgggacgcgtttgcatcgtcgtctgcacgc

SEQ ID NO: 144002 - DNA, 75 bp, synthetic construct
  source 1..75: mol_type = other DNA
tgataaatcagagctgcaagcggcggagcagatggttaaggcacttggtggtaaagagaatattaagtcactgga

SEQ ID NO: 144003 - DNA, 75 bp, synthetic construct
  source 1..75: mol_type = other DNA
tcggcgggaactggaggcgctgaagaaaatagattcggcggtatataacaaacgtaaagcggaatttgacagact

SEQ ID NO: 144004 - DNA, 75 bp, synthetic construct
  source 1..75: mol_type = other DNA
atacagttgtccctgttgccagaaggtgttcagcggtgaaatgccggcacatatcctcccgaaaagtgccgttga

SEQ ID NO: 144005 - DNA, 75 bp, synthetic construct
  source 1..75: mol_type = other DNA
ctctcaacaccacgaatgacatcgaaaaactgcgtgccatggcacttgccatggtacaaaaagtcatgtcggaga

SEQ ID NO: 144006 - DNA, 75 bp, synthetic construct
  source 1..75: mol_type = other DNA
gcgcagatggttcaggcacttggcggtagagagaatattaaatctctggataattgtgtaactcgtttacgttta

SEQ ID NO: 144007 - DNA, 75 bp, synthetic construct
  source 1..75: mol_type = other DNA
gtttactggcgatctgattcagtttattagctttggtgtcttacgtggcacaagaacgggctggccgatagcggt

SEQ ID NO: 144008 - DNA, 75 bp, synthetic construct
  source 1..75: mol_type = other DNA
acagaaaggctatcaaagcattgcttatttccggtgtgctgacggtcattattggtggcgttagcgaaccgattg

SEQ ID NO: 144009 - DNA, 75 bp, synthetic construct
  source 1..75: mol_type = other DNA
tttgtggtggtacaaaccagcctggcttccggtcgacgcgcaggagtgctgaccgggttgggcgtggcactgggc

SEQ ID NO: 144010 - DNA, 75 bp, synthetic construct
  source 1..75: mol_type = other DNA
tatctggcgaatctgctgaccgccggtgataccaaaccggtactgcgcgcgctgaaacgtatgctggcgatgcgt

SEQ ID NO: 144011 - DNA, 75 bp, synthetic construct
  source 1..75: mol_type = other DNA
catcaacaaacaatggccaggtaaagcatcaattggtcgtctgaaaggtgaggaactggtgcaatataatttgtg

SEQ ID NO: 144012 - DNA, 75 bp, synthetic construct
  source 1..75: mol_type = other DNA
tagcgccccctggtatgtctttttccgccgtggattaattaccgatctctctaacccgcaaaccgttttattttt

SEQ ID NO: 144013 - DNA, 75 bp, synthetic construct
  source 1..75: mol_type = other DNA
attaaaatcgtcggcggatcttatctcttatggtttgcctggaacagtatgcgccgacaatcaacaccacagatg

SEQ ID NO: 144014 - DNA, 75 bp, synthetic construct
  source 1..75: mol_type = other DNA
agcaggtcgccagtcggattattgggatgattattggtgtattcgcgctacggctgatttatgaaggggtgacgc

SEQ ID NO: 144015 - DNA, 75 bp, synthetic construct
  source 1..75: mol_type = other DNA
gtggttggcttattatcgctggcttatttgaccggtacatggagctcacccaaagccggaaccatgaccacccgc

SEQ ID NO: 144016 - DNA, 75 bp, synthetic construct
  source 1..75: mol_type = other DNA
tctggcggcaatcggttgtttcgcgctggcctcggcgttgatgttctggaaaatcctcccggaatcacgccattt

SEQ ID NO: 144017 - DNA, 75 bp, synthetic construct
  source 1..75: mol_type = other DNA
atttgacaggcacctggagttcgccaaaagcaggcaccatgactacccgcttcggtcgtggtccggtgatgttat

SEQ ID NO: 144018 - DNA, 75 bp, synthetic construct
  source 1..75: mol_type = other DNA
gtctctttatgttgaaaaaggtgagtggcctgaagaaaaaggtgttgatatagacgaagtaattttcagggaata

SEQ ID NO: 144019 - DNA, 75 bp, synthetic construct
  source 1..75: mol_type = other DNA
gtggctggattatctggacgcactggaactggtcgatacttccgggacgccagatattgaatggcctacgcctcc

SEQ ID NO: 144020 - DNA, 75 bp, synthetic construct
  source 1..75: mol_type = other DNA
tctggcataactatggctggaacggcgttggcgcattcattgctttgatgctggtggtggcgattctgattggaa

SEQ ID NO: 144021 - DNA, 75 bp, synthetic construct
  source 1..75: mol_type = other DNA
tgatcctgagcatgctttataaagcacagccagaagatgtgcgtttcatcatgatcgacccgaaaatgctggagc

SEQ ID NO: 144022 - DNA, 75 bp, synthetic construct
  source 1..75: mol_type = other DNA
acagccgtccgttgcataaaccgacgacgccgctgccttctctggatttgctgacaccgccgccgagcgaagtgg

SEQ ID NO: 144023 - DNA, 75 bp, synthetic construct
  source 1..75: mol_type = other DNA
acagccagttgcgccacagccgcaggataccctgcttcatccgctgttgatgcgtaatggcgacagccgtccgtt

SEQ ID NO: 144024 - DNA, 75 bp, synthetic construct
  source 1..75: mol_type = other DNA
cttcagcgaccagctgcacttcgctgccattgctggcggaatacggtgtgactcatgccgaacccggtcatgcgc

SEQ ID NO: 144025 - DNA, 75 bp, synthetic construct
  source 1..75: mol_type = other DNA
aagtttctgcggcagcggtgaaggccggacgtgtgcagtttgtgctgctcaaagtttatagcgacgatgattttc

SEQ ID NO: 144026 - DNA, 75 bp, synthetic construct
  source 1..75: mol_type = other DNA
cggtaggtaaaaaagtggaagagctgatagcacgtctggcgcaaaaagcccgtgccgcgggtatccacctcgtac

SEQ ID NO: 144027 - DNA, 75 bp, synthetic construct
  source 1..75: mol_type = other DNA
gcgaagttttggataacgccaaattccgcgataatccgtcgccattaaccgtggtgctgggtaaagatatcgccg

SEQ ID NO: 144028 - DNA, 75 bp, synthetic construct
  source 1..75: mol_type = other DNA
gggcggtttcgatggcgctgaagaactggatccgttgttcgatcaggcggtgcagtttgtcactgaaaaacgcaa

SEQ ID NO: 144029 - DNA, 75 bp, synthetic construct
  source 1..75: mol_type = other DNA
gatgtcgggtggaaacatcttggccttacaaaaaattctcggacatcacgatataaaaatgactatgcgttatgc

SEQ ID NO: 144030 - DNA, 75 bp, synthetic construct
  source 1..75: mol_type = other DNA
ttcgatggcgctgaagaactggatccgttgttcgatcaggcggtgcagtttgtcactgaaaaacgcaaagcatca

SEQ ID NO: 144031 - DNA, 75 bp, synthetic construct
  source 1..75: mol_type = other DNA
cgtaaaagcggcgcgcatttctaacttgtcacgggaccttgcccgttcactttcgacggtggcggtgcgtgtcgt

SEQ ID NO: 144032 - DNA, 75 bp, synthetic construct
  source 1..75: mol_type = other DNA
acagcgaaagcgaaggtggtgcgggtggtttcgatggcgctgaagaactggatccgttgttcgatcaggcggtgc

SEQ ID NO: 144033 - DNA, 75 bp, synthetic construct
  source 1..75: mol_type = other DNA
ctgctgggtatgggggatatgctttactctgggccgaactccacgttgccggtacgtgttcatggtgcttttgtt

SEQ ID NO: 144034 - DNA, 75 bp, synthetic construct
  source 1..75: mol_type = other DNA
gtacattgtggtgttggtggacgaatttgccgacctgatgatgacggtaggtaaaaaagtggaagagcttatagc

SEQ ID NO: 144035 - DNA, 75 bp, synthetic construct
  source 1..75: mol_type = other DNA
gatgacagcagtatcgactattacctgccgttagcaggcgagtttccggtgagtagtgccgtagtgttctgtttt

SEQ ID NO: 144036 - DNA, 75 bp, synthetic construct
  source 1..75: mol_type = other DNA
atcattgccctggaataatagtctattaattattggcggtgaaactgcaggcggcaaagcggtgacggattcagt

SEQ ID NO: 144037 - DNA, 75 bp, synthetic construct
  source 1..75: mol_type = other DNA
ttgtacacaatggtaaagcctatattactggcggtgtaaatcagaatatcttcaatggttattttgaggatctca

SEQ ID NO: 144038 - DNA, 75 bp, synthetic construct
  source 1..75: mol_type = other DNA
tactggcggtgttaaccagaatatcttcaatggctattttgaagatctcaacgaagctggaaaagattcaaccac

SEQ ID NO: 144039 - DNA, 75 bp, synthetic construct
  source 1..75: mol_type = other DNA
tggactacaaagaggcacgagtgatgcgtcgcgccggtttgccggtggcgcatcaggggcatctggtacaaatcc

SEQ ID NO: 144040 - DNA, 75 bp, synthetic construct
  source 1..75: mol_type = other DNA
cttcagcgaccagctgtacttcgctgccattgctggcgggatacggtgtgactcatgccgaacccggtcacgcgc

SEQ ID NO: 144041 - DNA, 75 bp, synthetic construct
  source 1..75: mol_type = other DNA
tactgaaaccaatctcaaaactgtggatgacagcagtatcgactacaccctgccgctggcaggcgagtttccggt

SEQ ID NO: 144042 - DNA, 75 bp, synthetic construct
  source 1..75: mol_type = other DNA
agaacccggcgctgatttccgccgcactaagtttgtggcagcagggcaagatcgccccggacagttgggtgatcg

SEQ ID NO: 144043 - DNA, 75 bp, synthetic construct
  source 1..75: mol_type = other DNA
cgaatcttcacacgctggtacaggcgcgggatcaactggctaaatctggcactgcccttgagcaactaaacgcgc

SEQ ID NO: 144044 - DNA, 75 bp, synthetic construct
  source 1..75: mol_type = other DNA
gtgtttaccctcgataaagcacgggaaatatctgcggcagcggtgaaggctggatgcgtacagtctgtgctgctc

SEQ ID NO: 144045 - DNA, 75 bp, synthetic construct
  source 1..75: mol_type = other DNA
ttcgcctggcgtaaatcgcccggataaaaaagccgtgagccgctatttacagcagcgctttggcaccggtctgcc

SEQ ID NO: 144046 - DNA, 75 bp, synthetic construct
  source 1..75: mol_type = other DNA
tgggattactggcaggaaaaactgccgcaactgcccttagcgccagagctgccggtggttgagacgcccccggaa

SEQ ID NO: 144047 - DNA, 75 bp, synthetic construct
  source 1..75: mol_type = other DNA
cggccacgccggaaatgctggcgacgctcgccagccgaggtatgggcgcgttaagcgatgccgaaggctgctggc

SEQ ID NO: 144048 - DNA, 75 bp, synthetic construct
  source 1..75: mol_type = other DNA
gtcgatggatctgtgagtgttacccttccgggcgttccggacgcagggtaagaaaacagtttgccaccaaaggcg

SEQ ID NO: 144049 - DNA, 75 bp, synthetic construct
  source 1..75: mol_type = other DNA
aactggccacggttcttgacgatctggcggccaacggcggcattgccggagcgattcatgccgctggcgtattgg

SEQ ID NO: 144050 - DNA, 75 bp, synthetic construct
  source 1..75: mol_type = other DNA
cgactggcgatgcgcgtttttaccgacaaaatgcccccgttacaacaggctctgtttaacatcagcgccacagaa

SEQ ID NO: 144051 - DNA, 75 bp, synthetic construct
  source 1..75: mol_type = other DNA
ttggtatgcagtgcggcggcagcgatgcgttttctggcgtgacagccaatccggcggttggctatgcgtctgatc

SEQ ID NO: 144052 - DNA, 75 bp, synthetic construct
  source 1..75: mol_type = other DNA
ttaatttacgccgcgacgccagccagcgattttgtctgtggcacgcaacaggtggcttcgggtatcaccgtgcaa

SEQ ID NO: 144053 - DNA, 75 bp, synthetic construct
  source 1..75: mol_type = other DNA
tccaggctgggagatccatttgcttctcagtttgacaaaaatatgtttgctacttatcgggaaaggaggttatca

SEQ ID NO: 144054 - DNA, 75 bp, synthetic construct
  source 1..75: mol_type = other DNA
actggccacggttcttgacgatctggcggccaacggcggcattgccggagcgattcatgccgctggcgtattggc

SEQ ID NO: 144055 - DNA, 75 bp, synthetic construct
  source 1..75: mol_type = other DNA
acggcgattaccgctgcaccgacgggcgatacgtccgcgcccgccccattgaacatcaacagcgggaatcactgc

SEQ ID NO: 144056 - DNA, 75 bp, synthetic construct
  source 1..75: mol_type = other DNA
cgacggattatgccggggcgctgagagagaatgcggatgccagctctctggccttcacaaccctgcacgcgcgcc

SEQ ID NO: 144057 - DNA, 75 bp, synthetic construct
  source 1..75: mol_type = other DNA
acgcttgcaaccatcgtcaatgaaatcattgccgatgaacagttgcaaacgctcggttttgaaggccagcaggtg

SEQ ID NO: 144058 - DNA, 75 bp, synthetic construct
  source 1..75: mol_type = other DNA
cgcagaaaaggaaatggcatggcttacacatgagcagatcatcgaattactgtctgactgcaaacgtcagaaccc

SEQ ID NO: 144059 - DNA, 75 bp, synthetic construct
  source 1..75: mol_type = other DNA
ctaaccgctgggcagcatgtctatgataaattgctgttgatggttgacgctctgggcaatcccctagcaaccgat

SEQ ID NO: 144060 - DNA, 75 bp, synthetic construct
  source 1..75: mol_type = other DNA
gtattccggtgcaatatctcgccaatatgttgagtgccggtgataccggtccggtactgcgggcgctgaaacgga

SEQ ID NO: 144061 - DNA, 75 bp, synthetic construct
  source 1..75: mol_type = other DNA
ttatcttggcgtgctgctctacgacgccgaccgcatcgaggaagcggcgagcaccgagcgcgaagttgacctcta

SEQ ID NO: 144062 - DNA, 75 bp, synthetic construct
  source 1..75: mol_type = other DNA
atggttcaaactacatggtaaatctctaaccgctggacagcatgtctatgacaaattgctgttgatggttgacgc

SEQ ID NO: 144063 - DNA, 75 bp, synthetic construct
  source 1..75: mol_type = other DNA
gaacgggcgagacggcaagcgtgtgcgcaaacaatttgcgacgaaaggcgaggccatagcattcgaaaacttcac

SEQ ID NO: 144064 - DNA, 75 bp, synthetic construct
  source 1..75: mol_type = other DNA
gctaggcaatcccctagccacgtccctcactccaaaaatgtttgctcattatcgggataagcgtttaaccggaga

SEQ ID NO: 144065 - DNA, 75 bp, synthetic construct
  source 1..75: mol_type = other DNA
ctgcaaaaaatactgggacaccacgatataaaaatgactatgcgctatgcccatcttgccccagaccatttggaa

SEQ ID NO: 144066 - DNA, 75 bp, synthetic construct
  source 1..75: mol_type = other DNA
atactggtgctgcagaaaatactcggacatgccaacattcgagaaacaatgaagtatgcacactttgcgcctgac

SEQ ID NO: 144067 - DNA, 75 bp, synthetic construct
  source 1..75: mol_type = other DNA
tcctggctaactttgtctcagctcccggagctgttccgagcctgtgaacaatatggcaaagaaaatcttacgatg

SEQ ID NO: 144068 - DNA, 75 bp, synthetic construct
  source 1..75: mol_type = other DNA
aatggaagaagtgaacaaaaaaccgtggctgggggaaaaggaagatcggcgacatttgtcagaagtgattgaaca

SEQ ID NO: 144069 - DNA, 75 bp, synthetic construct
  source 1..75: mol_type = other DNA
atgcgctataatggtttaaataatatgtttttctctctttgccagattaacgataaccactctgtcacaagtcca

SEQ ID NO: 144070 - DNA, 75 bp, synthetic construct
  source 1..75: mol_type = other DNA
tcaggccaacagcattaaaacgcggcgggtaatctcgtatctgacgttagcggagaatgtcttacgacactcccc

SEQ ID NO: 144071 - DNA, 75 bp, synthetic construct
  source 1..75: mol_type = other DNA
agattgagcaaaatttccgtgatgaaaagaatccacgctggggtcttggtcttcgtgaggggatgagccagtcag

SEQ ID NO: 144072 - DNA, 75 bp, synthetic construct
  source 1..75: mol_type = other DNA
tgcagagcttgagactaatctcgcggcgctggctgcggagaatgcttggctgaagtctgaaactccacttggtgc

SEQ ID NO: 144073 - DNA, 75 bp, synthetic construct
  source 1..75: mol_type = other DNA
ggcaggggcgggtttgatgtcaccaccggacagcatacacaactgaacggtgccgtgattgcgtccacggcaacg

SEQ ID NO: 144074 - DNA, 75 bp, synthetic construct
  source 1..75: mol_type = other DNA
atggcggggataccaaaaaaactgaaagccgcactgctggcggcaacgattgccggtggcggtgtgggtggttat

SEQ ID NO: 144075 - DNA, 75 bp, synthetic construct
  source 1..75: mol_type = other DNA
aaatcgagcagaacttacgggatgaaaaaagcgagcgcttcgggttcgctctgcgtgccggttacagtcgttccg

SEQ ID NO: 144076 - DNA, 75 bp, synthetic construct
  source 1..75: mol_type = other DNA
tgcagctgttaagttggcacacgataagttttcggcgctggcagtggagaatgcggggctgaagtatgtgcaacc

SEQ ID NO: 144077 - DNA, 75 bp, synthetic construct
  source 1..75: mol_type = other DNA
ctgttaccagcgccaattttaacgacaccacattaggcgtcagggatttagccactgtgataatgcctgcgacgg

SEQ ID NO: 144078 - DNA, 75 bp, synthetic construct
  source 1..75: mol_type = other DNA
cgcagggggtggaaatgtttgcggagtgtgcatacacacttgaacatcatgatcacgcagtagcttttgccgccg

SEQ ID NO: 144079 - DNA, 75 bp, synthetic construct
  source 1..75: mol_type = other DNA
gttgagagaggatgaagataacgcgctgctggatgagctggaagcagcagagaagcggattgctgaactggaagc

SEQ ID NO: 144080 - DNA, 75 bp, synthetic construct
  source 1..75: mol_type = other DNA
cgcatgattttgtcagcgaaagaagagttggctaatgaagcgcatccgattgatggcctgtctggtgaatatgcg

SEQ ID NO: 144081 - DNA, 75 bp, synthetic construct
  source 1..75: mol_type = other DNA
aaggctcttgatgcgtatgagaagcatcaggatgaagcgccagagactggaatgctcaatgcatttttcatcttg

SEQ ID NO: 144082 - DNA, 75 bp, synthetic construct
  source 1..75: mol_type = other DNA
attcccggataagggtgactttcgatggtgtccggggtgaaacgccggataagtttaatttatccggtcaggcaa

SEQ ID NO: 144083 - DNA, 75 bp, synthetic construct
  source 1..75: mol_type = other DNA
ggaaaaagcatgccacctttaattctcagggggaatgaagacgggcttgattatactcttcgcattgtcagaaat

SEQ ID NO: 144084 - DNA, 75 bp, synthetic construct
  source 1..75: mol_type = other DNA
ggaaattgatatgggaaccacgccactcagggatttacagaacagccctgccggtcccgagaagaaattccggtt

SEQ ID NO: 144085 - DNA, 75 bp, synthetic construct
  source 1..75: mol_type = other DNA
atttgttagaacttattgatgacatgataagaactattgtgaataatgtaatttcaaatgccaaaggacaaacta

SEQ ID NO: 144086 - DNA, 75 bp, synthetic construct
  source 1..75: mol_type = other DNA
atgcagaagtatccacaaagtctctctatgaaatatccttaaagcatcagatagagaagcttctattttttcgtg

SEQ ID NO: 144087 - DNA, 75 bp, synthetic construct
  source 1..75: mol_type = other DNA
tgcctaataactttttgctgattggatttattgctggtgattattatcttttattcgtatttccgactaagttgc

SEQ ID NO: 144088 - DNA, 75 bp, synthetic construct
  source 1..75: mol_type = other DNA
atagccacacagatgtacggtaagccggtgagtgaactgagcgagacagagaagcagacggtctcgacactggca

SEQ ID NO: 144089 - DNA, 75 bp, synthetic construct
  source 1..75: mol_type = other DNA
cagatccacaattacgcacaacagctggcaggagatacaccgctgaaagaggttcggccggggatctatactgca

SEQ ID NO: 144090 - DNA, 75 bp, synthetic construct
  source 1..75: mol_type = other DNA
ttcagcggtagccggcgcacagtcaggtaagacgactgttgaaaacaatatgctgaacgtgatagccactgaaac

SEQ ID NO: 144091 - DNA, 75 bp, synthetic construct
  source 1..75: mol_type = other DNA
gggcaggtgattgctccggcctgcacgctggccatggaagacacatggcaggcaattgatatgggggagaccccg

SEQ ID NO: 144092 - DNA, 75 bp, synthetic construct
  source 1..75: mol_type = other DNA
ggcaagtcgtgtgcgtgtaacttttgagggggggcatggtgaaactcccgataaattcttattactcggaggttc

SEQ ID NO: 144093 - DNA, 75 bp, synthetic construct
  source 1..75: mol_type = other DNA
tgacgggtaatgaagaagcgctgggttacaccctcagaattgtgagaaacggaaaaaaacttgaagccggaaatt

SEQ ID NO: 144094 - DNA, 75 bp, synthetic construct
  source 1..75: mol_type = other DNA
ttacgctggcctgtcgtttggtaatgaagcttctacccgtcaccgttttcaggtgtctaacccgcgactggcggc

SEQ ID NO: 144095 - DNA, 75 bp, synthetic construct
  source 1..75: mol_type = other DNA
ttgggattcagcggcagcgatgaacagatactggaaaaagttgcccgccaggcgccgcactggctttccagcgtc

SEQ ID NO: 144096 - DNA, 75 bp, synthetic construct
  source 1..75: mol_type = other DNA
taacccgataagcgagctgaaagtttttgatttacgcgaaagcatggcaaacggcggaggcccggcgtgcctgcg

SEQ ID NO: 144097 - DNA, 75 bp, synthetic construct
  source 1..75: mol_type = other DNA
tacttagccgcgatgacggttccatgctgctggtgctgccgcaggagtgtcgggaacacgctggagtctggcgtt

SEQ ID NO: 144098 - DNA, 75 bp, synthetic construct
  source 1..75: mol_type = other DNA
tagtaagccgtgatgatagttcaatgatgttagtgctgccgcaggagtgccgggagcacgccggagtgtggcgtt

SEQ ID NO: 144099 - DNA, 75 bp, synthetic construct
  source 1..75: mol_type = other DNA
tcgtcgttcactcagcgttgccacaggtggccttgctcggtgacgaaggggcggcaaaccacaatcgactcggcg

SEQ ID NO: 144100 - DNA, 75 bp, synthetic construct
  source 1..75: mol_type = other DNA
ataaatttcaccgctcgctggaagcgcacgtcaccgaatcacttttaaaagcgatttttaacgacgaagagaaat

SEQ ID NO: 144101 - DNA, 75 bp, synthetic construct
  source 1..75: mol_type = other DNA
gctactttgctggcaatacatgaaaataatgagtggcgtaaagcgcttgtcaaactgattactgccacgccagag

SEQ ID NO: 144102 - DNA, 75 bp, synthetic construct
  source 1..75: mol_type = other DNA
accgagctggcatcaacgtctatgtcatcatctttcactcgcttcagaagatgagtggcaacgctgtgtgaataa

SEQ ID NO: 144103 - DNA, 75 bp, synthetic construct
  source 1..75: mol_type = other DNA
acgggctggtggggctgacgcatcattacgcggggctgtcgtttggcaatgaagcctctacccgccaccgttttc

SEQ ID NO: 144104 - DNA, 75 bp, synthetic construct
  source 1..75: mol_type = other DNA
tcaccgttcattctgctttgccgcaggtggcgatgctgggggatgagggggcggcaaaccacaatcggctcggtg

SEQ ID NO: 144105 - DNA, 75 bp, synthetic construct
  source 1..75: mol_type = other DNA
ctggatgtattgagccaattactgaatctcggttcggtttatccgttccagcgcgagggagggggcaatggataa

SEQ ID NO: 144106 - DNA, 75 bp, synthetic construct
  source 1..75: mol_type = other DNA
atgactattgctgaacggctacggcaggaaggacatcaaattggctggcaggaaggtaagattgaaggctggcaa

SEQ ID NO: 144107 - DNA, 75 bp, synthetic construct
  source 1..75: mol_type = other DNA
atgactattgctgaacggctgaggcaggaagggcatcagattggctggcaggagggtaaattagaaggtttgcag

SEQ ID NO: 144108 - DNA, 75 bp, synthetic construct
  source 1..75: mol_type = other DNA
aggaagggcatcagattggctggcaggaaggtaagcttgaaggctggcaggagggtaaattagaaggtttgcagg

SEQ ID NO: 144109 - DNA, 75 bp, synthetic construct
  source 1..75: mol_type = other DNA
cagggctctgccgccaggtaattctggaagcgggacaggaggtggagatgccggagccggaaaggaaacagcaac

SEQ ID NO: 144110 - DNA, 75 bp, synthetic construct
  source 1..75: mol_type = other DNA
tccgcgctggcgtcgaccattgaaacactggccgccgccgagcgcctgactgcccacaaaaatgccgttactttg

SEQ ID NO: 144111 - DNA, 75 bp, synthetic construct
  source 1..75: mol_type = other DNA
tgactaaagatttagcgcagtgcgtagagatctccaaccagtacggcccggagcacctgatcattcagacccgca

SEQ ID NO: 144112 - DNA, 75 bp, synthetic construct
  source 1..75: mol_type = other DNA
attactccccaaaatctccaaaattgagcgatgacgcaccggctacaggctcaggttgtttaacaattacggatg

SEQ ID NO: 144113 - DNA, 75 bp, synthetic construct
  source 1..75: mol_type = other DNA
aggtctctaacccgcgactggcggcgaaacagggcttactgaaaatgaaagcccttgccgatttgggatttcccc

SEQ ID NO: 144114 - DNA, 75 bp, synthetic construct
  source 1..75: mol_type = other DNA
tttgatttacgcgaaagtatggcaaacggtggcggccctgcgtgcctgcgtttgcgcgtggtgctgacggcagaa

SEQ ID NO: 144115 - DNA, 75 bp, synthetic construct
  source 1..75: mol_type = other DNA
gaacaagccattaaaattgctttgcgcatgctggaacagggcattgatcgtgaccaggtgctcgcggccactcag

SEQ ID NO: 144116 - DNA, 75 bp, synthetic construct
  source 1..75: mol_type = other DNA
gaaaaaatcagtgaagcgtttttacgatacattggtggttcagtttgatattgaagaggcgtgggcggaacagca

SEQ ID NO: 144117 - DNA, 75 bp, synthetic construct
  source 1..75: mol_type = other DNA
gcatttaatgccatatgcaaagtgacgagtgctattacacttgatacgtggaaaaaatcagtgaagcgtttttac

SEQ ID NO: 144118 - DNA, 75 bp, synthetic construct
  source 1..75: mol_type = other DNA
tgatagtggtcaccgtggcggatgtgatgagcgcgttacatgccagctatgacgacgggctgtcaggggaaaaat

SEQ ID NO: 144119 - DNA, 75 bp, synthetic construct
  source 1..75: mol_type = other DNA
atgttaacaaacctgaatcatgccgcaatgagtacgcttcttggtgagaggattatggaccgcatgaccatgaac

SEQ ID NO: 144120 - DNA, 75 bp, synthetic construct
  source 1..75: mol_type = other DNA
agaacggttgcggagtggcgcgagtggcaacttgctgaaggccagaaacgttgcgaggagatcaaccgcctgaat

SEQ ID NO: 144121 - DNA, 75 bp, synthetic construct
  source 1..75: mol_type = other DNA
aaaccggcaccgggaaaaatcaccttgcagcggcgatgggtaaccggctgatggcgaaggggcgcagcgtgatta

SEQ ID NO: 144122 - DNA, 75 bp, synthetic construct
  source 1..75: mol_type = other DNA
ccgccagagcgttgccatctgttccgtgaggatggcacagcatgtcgtcgactgcatcaggagccgggcgtttaa

SEQ ID NO: 144123 - DNA, 75 bp, synthetic construct
  source 1..75: mol_type = other DNA
ttgtcggaccgtctggctgcggtaaatcgactttactgcgcatgattgccgggcttgagacgatcaccagcggcg

SEQ ID NO: 144124 - DNA, 75 bp, synthetic construct
  source 1..75: mol_type = other DNA
aacctggtaccgggaagaaccatttagcggcagctatcggaaatcgcctgctgaaagatggccagacagtgattg

SEQ ID NO: 144125 - DNA, 75 bp, synthetic construct
  source 1..75: mol_type = other DNA
acagctcgatgcgcagtgtcgggatgctgacaaacctgaatcatgcgcagcgatgagcacactcctcggtgagat

SEQ ID NO: 144126 - DNA, 75 bp, synthetic construct
  source 1..75: mol_type = other DNA
taccaggtgcagaacgacggccagcgatacgcgttaagccaggcgaaatccatcgccgatgaactgatgaccggg

SEQ ID NO: 144127 - DNA, 75 bp, synthetic construct
  source 1..75: mol_type = other DNA
tgaatcgctcaggcatccagccgttgcaccgcaaatgttcgtttgcgaattaccaggtgcagaacgacggtcagc

SEQ ID NO: 144128 - DNA, 75 bp, synthetic construct
  source 1..75: mol_type = other DNA
cccgccacatgtaaccgccccattcagaacggtagcggagtggcgcgagtggcaacttgctgaaggccagaaacg

SEQ ID NO: 144129 - DNA, 75 bp, synthetic construct
  source 1..75: mol_type = other DNA
tgcagcagcgattggcaactggctgatggcgaaggggagaagcgtgattatcgtcaccgtgtccgatgtcatgag

SEQ ID NO: 144130 - DNA, 75 bp, synthetic construct
  source 1..75: mol_type = other DNA
ttctggagcgtatccgcagactggccccaccacatgtaaccgccccattcagaacggttgcggagtggcgcgagt

SEQ ID NO: 144131 - DNA, 75 bp, synthetic construct
  source 1..75: mol_type = other DNA
ctcggcgagcgggtgatggaccgcatgtccatgaacggtggtcgctgggtgacgtttaactgggagagctggcgt

SEQ ID NO: 144132 - DNA, 75 bp, synthetic construct
  source 1..75: mol_type = other DNA
gtgtcggaatgctgacgaacctgaatcacgcagcgatgagcacactcctcggagatcgggtgatggaccgtatga

SEQ ID NO: 144133 - DNA, 75 bp, synthetic construct
  source 1..75: mol_type = other DNA
gcgcgtgagcttgcccctgccttctggcactggcgatcgcgatatgcctcgctggcctctctggactggctgcgg

SEQ ID NO: 144134 - DNA, 75 bp, synthetic construct
  source 1..75: mol_type = other DNA
gcggcagagcttgccggaccgttctggcgctggcagtcgcggttcgcgtcgctgaaggaacttgactggcttcgc

SEQ ID NO: 144135 - DNA, 75 bp, synthetic construct
  source 1..75: mol_type = other DNA
cagcggtgagccgctgtatgcagtgatgtacgaaattccgttaattgtccgggaaacacctgaacatattcgtgt

SEQ ID NO: 144136 - DNA, 75 bp, synthetic construct
  source 1..75: mol_type = other DNA
atgaaaaatattgcggcaggtggcgttcttgaacgtatccgcagaatgaccccaccacatgtaaccgccccattc

SEQ ID NO: 144137 - DNA, 75 bp, synthetic construct
  source 1..75: mol_type = other DNA
caggagctggatctcgactggaacggtcgccgcctgctggcaacgccgtcgacctgtgtgcagtttaagccgcac

SEQ ID NO: 144138 - DNA, 75 bp, synthetic construct
  source 1..75: mol_type = other DNA
tttacaaattaccgacactcacctgtttgcacaaaagcacgaagccctgttaggggtaaacacctgggaaagcta

SEQ ID NO: 144139 - DNA, 75 bp, synthetic construct
  source 1..75: mol_type = other DNA
atgaaaatcaagagcatcagtaagggtgtattgctgcttgcactgctaacctctacgagctttgctgcaggtaag

SEQ ID NO: 144140 - DNA, 75 bp, synthetic construct
  source 1..75: mol_type = other DNA
tgaatcgttccggtatccagccgttgcaccagaaatgttcgtttgcgaattacctggtgcagaacgacggacagc

SEQ ID NO: 144141 - DNA, 75 bp, synthetic construct
  source 1..75: mol_type = other DNA
tcatgaaaacattgctcggcgagcggatattggatcgcatgaccatgaacggcgggcgatgggtgaattttaact

SEQ ID NO: 144142 - DNA, 75 bp, synthetic construct
  source 1..75: mol_type = other DNA
ttgtatcaaatggattaaaagaagaagcgctagatttgatcatgaaatcagaaatcttatcgatttagtaaaaaa

SEQ ID NO: 144143 - DNA, 75 bp, synthetic construct
  source 1..75: mol_type = other DNA
aggaaagcggagaactgtttttttctgccccggcagaagatgttgctatgattgtggccagttcgataaaaggcg

SEQ ID NO: 144144 - DNA, 75 bp, synthetic construct
  source 1..75: mol_type = other DNA
ctggaactgctcaatggcgagtacgccaaacatgaaacatcgcagaaattctatgcagatataaatctgcgccct

SEQ ID NO: 144145 - DNA, 75 bp, synthetic construct
  source 1..75: mol_type = other DNA
aattcgataaaaccttggcgtttcttgaagctatcgttaatgcggataatgaaacaacgattggtgagattcgct

SEQ ID NO: 144146 - DNA, 75 bp, synthetic construct
  source 1..75: mol_type = other DNA
gcaatgaagaagttaacattgacccgttaagtcgccgggaaacgaaagctgagatgacaacacctaaattcgagt

SEQ ID NO: 144147 - DNA, 75 bp, synthetic construct
  source 1..75: mol_type = other DNA
cgtaaatgagaatacaggtgagtataaagtaaatttaagcagaaaactcattgtcatacctgcattcatgacaat

SEQ ID NO: 144148 - DNA, 75 bp, synthetic construct
  source 1..75: mol_type = other DNA
tgacccgtcttcagctgtacaggatgtgacgtttatggatatggctacgcatctttatcatgcctggcccggcaa

SEQ ID NO: 144149 - DNA, 75 bp, synthetic construct
  source 1..75: mol_type = other DNA
ggctcggtatcctcctgaccgtgatgtctccggtaacggtaaacgcagccgggggactggattttaaaggtaatc

SEQ ID NO: 144150 - DNA, 75 bp, synthetic construct
  source 1..75: mol_type = other DNA
caatggggaaggtggtacaactgacattcaaaggtgcagaagagaagggcttacccggatatctacaggtcagtg

SEQ ID NO: 144151 - DNA, 75 bp, synthetic construct
  source 1..75: mol_type = other DNA
cgctatcagccggatcaacccctgatgtacctgaaacccggcagccccattcggatcctgatctgcgataaaagc

SEQ ID NO: 144152 - DNA, 75 bp, synthetic construct
  source 1..75: mol_type = other DNA
cttccgcgtagtactgtcacagcgctctggaaagataacgccacccggattgagttgccagtgctaagcattctc

SEQ ID NO: 144153 - DNA, 75 bp, synthetic construct
  source 1..75: mol_type = other DNA
atttttcattcaatgtttccgaaaccaattcaggaacggcgtaaaagaaatggagttacatccttatttactatt

SEQ ID NO: 144154 - DNA, 75 bp, synthetic construct
  source 1..75: mol_type = other DNA
taagagtgcttcaaacccgtaatgacgctcgtaaaaacaaagttaaaaaatacagcgtcaacatacagattgagt

SEQ ID NO: 144155 - DNA, 75 bp, synthetic construct
  source 1..75: mol_type = other DNA
tggtgacggtggcggatgtgatgctggcgttacacggcaactacgacaacaaaaactcaggcgaaaaatttttgc

SEQ ID NO: 144156 - DNA, 75 bp, synthetic construct
  source 1..75: mol_type = other DNA
gtatgaccattcctattatatttcaattaataagatgggctgggggcaatacattaaaaagttaattaataatcc

SEQ ID NO: 144157 - DNA, 75 bp, synthetic construct
  source 1..75: mol_type = other DNA
tagagttgctgcttatcatactcacggtgcagatagtcatggcgattatgttgatgaatttttttcaagtagcga

SEQ ID NO: 144158 - DNA, 75 bp, synthetic construct
  source 1..75: mol_type = other DNA
caacacctgatggacgatttgaggcgcttaataataaaggagaatatatttttatcagaaatagtgtcccgggat

SEQ ID NO: 144159 - DNA, 75 bp, synthetic construct
  source 1..75: mol_type = other DNA
ggagctttgtggagttgaccttctggtccttgatgaaattggcatgcagcgggatacgcgcaacgagcaggtcac

SEQ ID NO: 144160 - DNA, 75 bp, synthetic construct
  source 1..75: mol_type = other DNA
agtgatgatcgtcggtgatgacgaccagtcaatctacggctggcgcggggcgcagggggagaatattcagcgttt

SEQ ID NO: 144161 - DNA, 75 bp, synthetic construct
  source 1..75: mol_type = other DNA
tatcctggatgaaatcggtatgcagcgggatacgcgtaacgaacaggtcacactgaaccagatagtcgatcgcag

SEQ ID NO: 144162 - DNA, 75 bp, synthetic construct
  source 1..75: mol_type = other DNA
aagcgaggaggttaatcgtctgaatcatcagacgcgggttgaaaaaatcattaaccgctccggtatccagccgct

SEQ ID NO: 144163 - DNA, 75 bp, synthetic construct
  source 1..75: mol_type = other DNA
ttaaccgtatcaaaacctggcaggacaacggcggtgcgctcgctgagtgcgccattctctaccgtagcaacgccc

SEQ ID NO: 144164 - DNA, 75 bp, synthetic construct
  source 1..75: mol_type = other DNA
gtacgtcagacatcgcgcgatcgacagttaacgctgtggcaagcgtgccgtgaactgttgcaggaaaaagccctc

SEQ ID NO: 144165 - DNA, 75 bp, synthetic construct
  source 1..75: mol_type = other DNA
cgtttgcaggtggcattccagggccagggaatcaaatggctggtggcagcttacgcccggctggagtcggtgtaa

SEQ ID NO: 144166 - DNA, 75 bp, synthetic construct
  source 1..75: mol_type = other DNA
atgcgtaaagtttgtgcagccattttgtccgcagccatctgtctggccgtatccggtgcacctgcatgggcgtct

SEQ ID NO: 144167 - DNA, 75 bp, synthetic construct
  source 1..75: mol_type = other DNA
tgacggtcgccacagcaacacgtctctggcgtggggggctggcgtgcagtttaacccgaccgaatccgtggccat

SEQ ID NO: 144168 - DNA, 75 bp, synthetic construct
  source 1..75: mol_type = other DNA
gcgctccggatgaatatgatgatctcatatcaggaacttgttcgcaccttcccaaggggaaaacgcacgacgtgc

SEQ ID NO: 144169 - DNA, 75 bp, synthetic construct
  source 1..75: mol_type = other DNA
cgaatccgtgaccattgaccttgcttatgaaggttccggtagtggcgactggcgaacggatgcatttattgttgg

SEQ ID NO: 144170 - DNA, 75 bp, synthetic construct
  source 1..75: mol_type = other DNA
attaacgtgaaataccgttatgagtttacggacacactagggctggtgacgtcattcagctatgcaggagacaag

SEQ ID NO: 144171 - DNA, 75 bp, synthetic construct
  source 1..75: mol_type = other DNA
ttacggacgcgctggggctgattacgtccttcagttatgccaatgctgaggatgagcaaaaaaacgcactacagc

SEQ ID NO: 144172 - DNA, 75 bp, synthetic construct
  source 1..75: mol_type = other DNA
gcggggccgtctgtgcgcgtgaatgaatggttcagcgcgtatgcgatggcgggtgtggcttacagccgtgtatcg

SEQ ID NO: 144173 - DNA, 75 bp, synthetic construct
  source 1..75: mol_type = other DNA
gtcgttcagctatgcaggagacaagaatcgccagattacccgttacagcgatacccgctggcatgaagattccgt

SEQ ID NO: 144174 - DNA, 75 bp, synthetic construct
  source 1..75: mol_type = other DNA
tgggccgattaacgcgccgacggtatttaactcagtatttaacgttgagcagttctgggatggtcgtgcggcaac

SEQ ID NO: 144175 - DNA, 75 bp, synthetic construct
  source 1..75: mol_type = other DNA
ctctggcgtggggagctggcgtgcagtttaacccgaccgaatccgtgaccattgatattgcttatgaaggttccg

SEQ ID NO: 144176 - DNA, 75 bp, synthetic construct
  source 1..75: mol_type = other DNA
taacatcgacgtataattgtgaggaagatttctgcaagactgcggaatctattaaaaatcaaaattattgtaata

SEQ ID NO: 144177 - DNA, 75 bp, synthetic construct
  source 1..75: mol_type = other DNA
gcattaacgtgaaataccgttatgaatttacggacacgctggggctggtgacgtcattcagttatgccaatgcca

SEQ ID NO: 144178 - DNA, 75 bp, synthetic construct
  source 1..75: mol_type = other DNA
tctgccgatgggcgtgaccacgccagatatctggggcggtaaccgcacaccggaacaggaacgttatgccagctc

SEQ ID NO: 144179 - DNA, 75 bp, synthetic construct
  source 1..75: mol_type = other DNA
cactgcgggcaacgtgttgtttattgccgctacggcagataactacttgcgcgcttacaacatgagcaacggtga

SEQ ID NO: 144180 - DNA, 75 bp, synthetic construct
  source 1..75: mol_type = other DNA
gggcgggatttccgttgatccaaatcgtgaagtggcaattgccaacccaatggcactgccgtttgtttcgaaact

SEQ ID NO: 144181 - DNA, 75 bp, synthetic construct
  source 1..75: mol_type = other DNA
ggtatcttcagacccatactgatatgcctggcagcgatgatctgaacgggattaacgtgaaataccgttatgagt

SEQ ID NO: 144182 - DNA, 75 bp, synthetic construct
  source 1..75: mol_type = other DNA
gtccttcagttatgccaatgctgaagatgagaaaaaaacgcactacagcgatacccgctggcatgaagattccgt

SEQ ID NO: 144183 - DNA, 75 bp, synthetic construct
  source 1..75: mol_type = other DNA
ttaaaactcgtactttctcaattggtatcgtaggtaatatcgcaacccgtctggggactggctgtgttccgtttc

SEQ ID NO: 144184 - DNA, 75 bp, synthetic construct
  source 1..75: mol_type = other DNA
gtcattcagctatgcaggagacaagaatcgccagcttacccgttacagcgataccgctggcatgaagattccgtg

SEQ ID NO: 144185 - DNA, 75 bp, synthetic construct
  source 1..75: mol_type = other DNA
cccatactgatatgccaggcagcgatgacctgaagggcattaacgtgaaataccgttatgaatttacggacacgc

SEQ ID NO: 144186 - DNA, 75 bp, synthetic construct
  source 1..75: mol_type = other DNA
gcgcagcgacattctggtcttcttcggcatctggctgatcctgccgtttgtctggcgtcgcctggtcattcctgc

SEQ ID NO: 144187 - DNA, 75 bp, synthetic construct
  source 1..75: mol_type = other DNA
tgtccgcagccatttgtctgcccgtatccggagcgcctgcatgggcgtctgagcagcaggccacgctgagcgcgg

SEQ ID NO: 144188 - DNA, 75 bp, synthetic construct
  source 1..75: mol_type = other DNA
tgtccgcagccatttgtctgaccgtatccggcgcgcctgcatgggcgtctgagcagcaggccacgctgagcgcgg

SEQ ID NO: 144189 - DNA, 75 bp, synthetic construct
  source 1..75: mol_type = other DNA
tattgcttatgaaggctccggcagtggtgactggcgcactgacggtttcatcgtgggtgtcggttataaattctg

SEQ ID NO: 144190 - DNA, 75 bp, synthetic construct
  source 1..75: mol_type = other DNA
cgggtgtagcttacagccgtgtgtcgactttctccggggattatcttcgcgtaactgacaacaaggggaaaacgc

SEQ ID NO: 144191 - DNA, 75 bp, synthetic construct
  source 1..75: mol_type = other DNA
cgtcattcagctatgcaggagacaagaatcgccagctgacccgttacagcgatacccgctggcatgaagattccg

SEQ ID NO: 144192 - DNA, 75 bp, synthetic construct
  source 1..75: mol_type = other DNA
aaaatgcgccgatcttccagtacgcggattacggcattgttggcgacgccgtgaagatccttccggcactgaccg

SEQ ID NO: 144193 - DNA, 75 bp, synthetic construct
  source 1..75: mol_type = other DNA
tcgtcctcaatgatgccgacggcgcacaggcaatccagctcggcgctaatcatgtctggaaattaaacggcaaac

SEQ ID NO: 144194 - DNA, 75 bp, synthetic construct
  source 1..75: mol_type = other DNA
ccattaatagtgatatcctgataacactacagcaactctttgaagaggattgtgccactcatactggcatgtcac

SEQ ID NO: 144195 - DNA, 75 bp, synthetic construct
  source 1..75: mol_type = other DNA
aacggcgctactggtcttctgtgaggaatttatccgtcacggtggcaaacttatcgactgccaggtccttaacga

SEQ ID NO: 144196 - DNA, 75 bp, synthetic construct
  source 1..75: mol_type = other DNA
gcggggccatctgtacgcgtgaatgaatggttcagtgcttatgcgatggcaggtgtggcttacagccgtgtgtcg

SEQ ID NO: 144197 - DNA, 75 bp, synthetic construct
  source 1..75: mol_type = other DNA
gattatctccgcgtaactgacaacaaggggaaaaagcacgatgtgctgaccggaagtgatgacggtcgccacagc

SEQ ID NO: 144198 - DNA, 75 bp, synthetic construct
  source 1..75: mol_type = other DNA
cgtggcccagggaacgctattttgtggcgagtccatgttcagccggatggaaaatgcgtctaaaacggcgcttct

SEQ ID NO: 144199 - DNA, 75 bp, synthetic construct
  source 1..75: mol_type = other DNA
tctcctggcgaccccattctctggtggtcgccggatccacgcgcagtattatggccggaatcactgcacatcagt

SEQ ID NO: 144200 - DNA, 75 bp, synthetic construct
  source 1..75: mol_type = other DNA
tacgcgtgaatgaatggttcagcgcgtatgcgatggcaggcgtggcttacagccgtgtgtcgactttttccgggg

SEQ ID NO: 144201 - DNA, 75 bp, synthetic construct
  source 1..75: mol_type = other DNA
cgcagtctatggcatgatgatcccttcacaggcggcatcactgattaaaagtggtgatatcaccgaagggattac

SEQ ID NO: 144202 - DNA, 75 bp, synthetic construct
  source 1..75: mol_type = other DNA
tcgtaaccgctggttcagcgtaatggcggggccgtctgtgcgcgtgaatgaagggctcagcgcgtatgcgatggc

SEQ ID NO: 144203 - DNA, 75 bp, synthetic construct
  source 1..75: mol_type = other DNA
aaatggttgcgtggagatgagaatgcgctgacggcgcaacagaaaaaaggctatcaattatttaaagataataaa

SEQ ID NO: 144204 - DNA, 75 bp, synthetic construct
  source 1..75: mol_type = other DNA
gtgtggtaccacgataataaacgcagtaaacaggccgatgttcaggcatctgctgtcagtgaaaataataaggtt

SEQ ID NO: 144205 - DNA, 75 bp, synthetic construct
  source 1..75: mol_type = other DNA
tggcgtggggagctggcgtgcagtttaacccgaccgaatccgtggccattgatgtcgcttatgaaggttccggca

SEQ ID NO: 144206 - DNA, 75 bp, synthetic construct
  source 1..75: mol_type = other DNA
ctggatgtcgctgtcacggaaaccggaagtgacctggtacggctgggacggcgaccggctgaccacgatacagaa

SEQ ID NO: 144207 - DNA, 75 bp, synthetic construct
  source 1..75: mol_type = other DNA
tgatattgcttatgaaggttctggcagtggtgactggcgcactgacgggttcatcgtgggtgttggttataaatt

SEQ ID NO: 144208 - DNA, 75 bp, synthetic construct
  source 1..75: mol_type = other DNA
agttatcgccgcttacgggcctcctgccggttggctgatggtggcaaccgccgcagagatggtcagatacgggcc

SEQ ID NO: 144209 - DNA, 75 bp, synthetic construct
  source 1..75: mol_type = other DNA
gtcgttcagctatgcaggagacaagaatcgccagctgacccgttacagcgatacccgctggtatgaagattccgt

SEQ ID NO: 144210 - DNA, 75 bp, synthetic construct
  source 1..75: mol_type = other DNA
tcggaagaaagcattattactgacgatgaacgcccttttgtggcacatcgaccgtcagcggtgcagagggaagaa

SEQ ID NO: 144211 - DNA, 75 bp, synthetic construct
  source 1..75: mol_type = other DNA
gcgtaaccgctggttcagcgtaatggcggggccgtctgtgcgcgtgaatgaatggctcagcgcgtatgcgatggc

SEQ ID NO: 144212 - DNA, 75 bp, synthetic construct
  source 1..75: mol_type = other DNA
ggccattgttctattcggttataaatctaagccaacatttccagtagtaagcctcttgggccgaaaagttagcag

SEQ ID NO: 144213 - DNA, 75 bp, synthetic construct
  source 1..75: mol_type = other DNA
tctgaaaaatagctttcgcccagccttagtggcgggccgttttaatggaattgttactaacccaccatggctatc

SEQ ID NO: 144214 - DNA, 75 bp, synthetic construct
  source 1..75: mol_type = other DNA
atccgtggccattgatattgcttatgaaggctccggcagtggcgactggcgcactgacggcttcatcgtgggtgt

SEQ ID NO: 144215 - DNA, 75 bp, synthetic construct
  source 1..75: mol_type = other DNA
ggcatttaatgctatatgcgaggtgacaaaccagataacacgcgcgtcatgggaaaaaacagttaagaaattcta

SEQ ID NO: 144216 - DNA, 75 bp, synthetic construct
  source 1..75: mol_type = other DNA
gcatttaatgccatatgcaaagtgacgagtgctatcacgcttgatacatggaaaaaatcagtgaaacgcttttac

SEQ ID NO: 144217 - DNA, 75 bp, synthetic construct
  source 1..75: mol_type = other DNA
actattccccaaaatcgccaggcctgactgatgcatccgtctcgacgtcaaaaaatgcgctgagcatcactgatg

SEQ ID NO: 144218 - DNA, 75 bp, synthetic construct
  source 1..75: mol_type = other DNA
ccgaattcgtggccattgatattgcttatgaagggtccggaagtggggactggcgcactgacggtttcatcgtgg

SEQ ID NO: 144219 - DNA, 75 bp, synthetic construct
  source 1..75: mol_type = other DNA
gccgtctgtacgcgtgaatgaatggttcagtgcttatgcgatggcaggtgtggcttacagccgtgtttcgacttt

SEQ ID NO: 144220 - DNA, 75 bp, synthetic construct
  source 1..75: mol_type = other DNA
gaagatgagaaaaaaacgcactacagcgatacccgctggcatgaagattccgttcgtaaccgctggttcagcgta

SEQ ID NO: 144221 - DNA, 75 bp, synthetic construct
  source 1..75: mol_type = other DNA
cgcgtaactgacaacaagggaaaaacgcacgacgtgctgaccggaagtgatgacgctcgccacagtaacacctct

SEQ ID NO: 144222 - DNA, 75 bp, synthetic construct
  source 1..75: mol_type = other DNA
ccgaatgcgtggccattgatattgcttatgaagggtccggaagtggtgactggcgcactgacggtttcatcgtgg

SEQ ID NO: 144223 - DNA, 75 bp, synthetic construct
  source 1..75: mol_type = other DNA
ccgaatccgtggccattgatattgcttatgaagggtccggtagtggcgactggcgcactgacggtttcatcgtgg

SEQ ID NO: 144224 - DNA, 75 bp, synthetic construct
  source 1..75: mol_type = other DNA
tggaatacttaagcaaagcctgtcaaaaacatcccgctgcggctcttgccgcttatgctactttgctggcaatac

SEQ ID NO: 144225 - DNA, 75 bp, synthetic construct
  source 1..75: mol_type = other DNA
gcatgctggagcagggctttgaacgtgagattgtgctggcggcaacccaactcactgatgctgatattccgaact

SEQ ID NO: 144226 - DNA, 75 bp, synthetic construct
  source 1..75: mol_type = other DNA
gaaggacatcaaattggctggcaggaaggtaagattgaaggctggcaagaaggtaaattagaaggtttgcaggaa

SEQ ID NO: 144227 - DNA, 75 bp, synthetic construct
  source 1..75: mol_type = other DNA
tcttatcctgaaaactggcagctggcgtttgccgagttacaaaggcgaattctgaataatcaacaaacaggaagt

SEQ ID NO: 144228 - DNA, 75 bp, synthetic construct
  source 1..75: mol_type = other DNA
tgcggatgctgcggcagcggcaaaagcggagcttaagctgatcgcagagaaaacgaaaaaaggctatgtggaaaa

SEQ ID NO: 144229 - DNA, 75 bp, synthetic construct
  source 1..75: mol_type = other DNA
gtatgcgacgtcattccctgggttaatgctaaggcggcaggcatattatctgaatgtcgtcctcagtcagtcgct

SEQ ID NO: 144230 - DNA, 75 bp, synthetic construct
  source 1..75: mol_type = other DNA
atcgtaaagcgatctcgttagcgagtggggtaaatgcggcgacaacgcgcgccaactcctattataacattgcca

SEQ ID NO: 144231 - DNA, 75 bp, synthetic construct
  source 1..75: mol_type = other DNA
ttataacattgccaaaatttatgaaactgctggacaggacgctgatgcattgcagcattatcaactcgctcttca

SEQ ID NO: 144232 - DNA, 75 bp, synthetic construct
  source 1..75: mol_type = other DNA
actattccccaaaatcgccaggtctgactgatgcatccgtctcgacgtcaaaagatgtgctgagcatcactgatg

SEQ ID NO: 144233 - DNA, 75 bp, synthetic construct
  source 1..75: mol_type = other DNA
aggaaggacaccaaattggctggcaagaaggtaagattgaaggcttgcaagaaggtaaattagaaggtttgcagg

SEQ ID NO: 144234 - DNA, 75 bp, synthetic construct
  source 1..75: mol_type = other DNA
aaacagggcgtgccggttttcagaaactgccagcgttgtggtggacgtggttacgaaagattaccgtcaacgaag

SEQ ID NO: 144235 - DNA, 75 bp, synthetic construct
  source 1..75: mol_type = other DNA
ggaaagggtgaggtttccaccgcctgtaaggattgccgtgggcgtggtgtcgccattcatcgtgaagagtcggta

SEQ ID NO: 144236 - DNA, 75 bp, synthetic construct
  source 1..75: mol_type = other DNA
gggtgtggcttacagccgtgtgtcgactttctccggggattatctgcacgtaaccgacaacaggggaaaaagcac

SEQ ID NO: 144237 - DNA, 75 bp, synthetic construct
  source 1..75: mol_type = other DNA
ggtatcttcatgtctggacgaacgttcctggcagtgatgatctgaacgggattaacgtgaaataccgttatgagt

SEQ ID NO: 144238 - DNA, 75 bp, synthetic construct
  source 1..75: mol_type = other DNA
gacggtcgccacagcaacacgtctctggcgtggggggctggcgtgcagtttaacccgaccgaatccgtgaccatt

SEQ ID NO: 144239 - DNA, 75 bp, synthetic construct
  source 1..75: mol_type = other DNA
ggcagcgatgacctgaagggcattaacgtgaaataccgttatgaatttacggacacgctggggctggtgacgtca

SEQ ID NO: 144240 - DNA, 75 bp, synthetic construct
  source 1..75: mol_type = other DNA
ccatctgtgcgcgtgaatgaatggttcagcgcgtatgtgatcgctggtgtgacttacagccgtgtgtcgactttt

SEQ ID NO: 144241 - DNA, 75 bp, synthetic construct
  source 1..75: mol_type = other DNA
cattacagcgatacccgctggcatgaagattccgttcgtaaccgctggttcagcgtaatggcggggccgtctgtg

SEQ ID NO: 144242 - DNA, 75 bp, synthetic construct
  source 1..75: mol_type = other DNA
acggaggaagaaatctcgttgctggaagcatggaaaaagtatcgggtattgctgaaccgtgttgatacgtcaact

SEQ ID NO: 144243 - DNA, 75 bp, synthetic construct
  source 1..75: mol_type = other DNA
attaacgtgaaataccgttatgagtttacggacacactggggatagtgacgtcgttcagctatgcaggagacaag

SEQ ID NO: 144244 - DNA, 75 bp, synthetic construct
  source 1..75: mol_type = other DNA
attaacgtgaaataccgttatgaatttacggacacgctggggctggtgacgtcattcagttatgccaatgcaaag

SEQ ID NO: 144245 - DNA, 75 bp, synthetic construct
  source 1..75: mol_type = other DNA
taccgttatgagtttacggactacactggggctggtgacgtcattcagctatgcaggagacaggaatcgccagct

SEQ ID NO: 144246 - DNA, 75 bp, synthetic construct
  source 1..75: mol_type = other DNA
cagcaacacgtctctggcgtggggggctggcgtgcagtttaacccgaccgagtccgtggccattgatattgctta

SEQ ID NO: 144247 - DNA, 75 bp, synthetic construct
  source 1..75: mol_type = other DNA
gatgtcgcttatgaaggctccggcagtggtgactggcgcactgacggtttcatcgtgggtgtcggttataaattc

SEQ ID NO: 144248 - DNA, 75 bp, synthetic construct
  source 1..75: mol_type = other DNA
atccggtgcgcctgcatgggcgtctgaacatcagtccacgctgagcgcggggtatcttcatgcccggacgaacgc

SEQ ID NO: 144249 - DNA, 75 bp, synthetic construct
  source 1..75: mol_type = other DNA
attaacgtgaaataccgttatgagtttacgaaaacactggggatggtgacgtcattcagctatgcaggagacaag

SEQ ID NO: 144250 - DNA, 75 bp, synthetic construct
  source 1..75: mol_type = other DNA
gcggggccgtctgtacgcgtgaatgaatggttcagcgcgtatgcgatggtactggtggaagaactatcgagcaag

SEQ ID NO: 144251 - DNA, 75 bp, synthetic construct
  source 1..75: mol_type = other DNA
ccccggcagcgataatctgaacgggattaacgtgaaataccgttatgaatttacggacacgctggggctggtgac

SEQ ID NO: 144252 - DNA, 75 bp, synthetic construct
  source 1..75: mol_type = other DNA
atacccgctggcatgaagattccgtgcgtaaccgctggttcagcgtgatggtggggccggtctgtgcgcgtgaat

SEQ ID NO: 144253 - DNA, 75 bp, synthetic construct
  source 1..75: mol_type = other DNA
aaacgcacgatgtgctgaccggaagtgatgacgatcgccacagcaacacgtctctggcgtggggagctggcgtgc

SEQ ID NO: 144254 - DNA, 75 bp, synthetic construct
  source 1..75: mol_type = other DNA
aatggttcagcgcgtatgcgatggcgggcgtggcttacagccgtgtgtcgactttctccggggattatctccgcg

SEQ ID NO: 144255 - DNA, 75 bp, synthetic construct
  source 1..75: mol_type = other DNA
ctccgcgtaactgacaataaggggaaaacgcacgatgtgctaaccggaagtgatgacggtcgccacagcaacacg

SEQ ID NO: 144256 - DNA, 75 bp, synthetic construct
  source 1..75: mol_type = other DNA
gcggggccatctgtacgcgtgaatgaatggttcagtgcttatgcgatggcgggtatggcttacagccgtgtgtcg

SEQ ID NO: 144257 - DNA, 75 bp, synthetic construct
  source 1..75: mol_type = other DNA
ttcagctatgcaggagacaagaatcgccagattacccgttacagcgatacccgctggcatgaagattccgtgcgt

SEQ ID NO: 144258 - DNA, 75 bp, synthetic construct
  source 1..75: mol_type = other DNA
tgtccgcagtagtcttgctggttgccgctggtacgccagcgagcgcagcagagcatcagtccacactaagcgccg

SEQ ID NO: 144259 - DNA, 75 bp, synthetic construct
  source 1..75: mol_type = other DNA
ggtcgccacagcaacacgcctctggcgtggggggctggcgtgcagtttaacccgaccgaatccgtggccattgat

SEQ ID NO: 144260 - DNA, 75 bp, synthetic construct
  source 1..75: mol_type = other DNA
tttacgggcgtaacgggaatgctctgtatccggcgttaattgttaactggttaacgtcacctggaggcaccaggc

SEQ ID NO: 144261 - DNA, 75 bp, synthetic construct
  source 1..75: mol_type = other DNA
gagaaagcgcgtgggcaaaacgtgccggtggttttctttaacaaagaaccgtctcgtaaggcgctggatagctac

SEQ ID NO: 144262 - DNA, 75 bp, synthetic construct
  source 1..75: mol_type = other DNA
gtgcgcaaggctattgagcaagatgcgaaagccgcgccagatgttcagctgctgatgaatgattctcagaatgac

SEQ ID NO: 144263 - DNA, 75 bp, synthetic construct
  source 1..75: mol_type = other DNA
cgaacttcagcgaaggtcactatctgcaagtggaagtcgccgcccgcaccgctgccagcaagcagccggagctgg

SEQ ID NO: 144264 - DNA, 75 bp, synthetic construct
  source 1..75: mol_type = other DNA
cgctggcgctgctggaattctgaacccgataccggaaaacagcttaatgtggggctcgccagtgaagggcttctc

SEQ ID NO: 144265 - DNA, 75 bp, synthetic construct
  source 1..75: mol_type = other DNA
tcataaccatgctgccaaactcccctcatgtgaaagaggtggcgctgggtgagaatggcattattgaaggcgcga

SEQ ID NO: 144266 - DNA, 75 bp, synthetic construct
  source 1..75: mol_type = other DNA
accagggaacgcatttccggctggttatccgcaatgccggagggcagctacgctggcggtgctggaattttgaac

SEQ ID NO: 144267 - DNA, 75 bp, synthetic construct
  source 1..75: mol_type = other DNA
gtacaccggggctgggtctgttgctatggatgcaaaaagtctatggcgatgacgccccacaagcctggcagaaac

SEQ ID NO: 144268 - DNA, 75 bp, synthetic construct
  source 1..75: mol_type = other DNA
tggcgggtgatttatgaagatccgcgcaccagtactcctggtctgggcctgctgctatggatgcaaaaaatctat

SEQ ID NO: 144269 - DNA, 75 bp, synthetic construct
  source 1..75: mol_type = other DNA
gccgatgtggtgctggggctggataacaatctgttagacgccgccagcaaaaccggactgtttgccaaaagcggc

SEQ ID NO: 144270 - DNA, 75 bp, synthetic construct
  source 1..75: mol_type = other DNA
accacgctggagttcacgcccgccgaagtggcggcacaacgtcaggcatggattagcgaatggcaacgcgccgtc

SEQ ID NO: 144271 - DNA, 75 bp, synthetic construct
  source 1..75: mol_type = other DNA
gctgttgtggatgcaaaaagtctatggcgatgacgccccacaagcctggcagaaactggcgaagaaaacggtcac

SEQ ID NO: 144272 - DNA, 75 bp, synthetic construct
  source 1..75: mol_type = other DNA
tttcgtcccgtttgattacggctatttcgccttcgtctatgacaagaacaaactgaaaaacccgccgcaaagcct

SEQ ID NO: 144273 - DNA, 75 bp, synthetic construct
  source 1..75: mol_type = other DNA
aaccgaattgattcggatatcgaccaactgaataaagagacaacttttgcgcttgatgccgatggcaatatcacg

SEQ ID NO: 144274 - DNA, 75 bp, synthetic construct
  source 1..75: mol_type = other DNA
gggttaccgcttcaacgagcagaccgcagccaaagcaggtattgcagccagcgacggtgatgtttcctacaacgt

SEQ ID NO: 144275 - DNA, 75 bp, synthetic construct
  source 1..75: mol_type = other DNA
ttttgtctactgcactggctggtgttttggcctgtttttcatttaatgcccaggcccaggatgttggtaattatt

SEQ ID NO: 144276 - DNA, 75 bp, synthetic construct
  source 1..75: mol_type = other DNA
ccggtttcattatcgtatatttggtataataagctttagtctgttattaacgggttttttgggtgatgctgccaa

SEQ ID NO: 144277 - DNA, 75 bp, synthetic construct
  source 1..75: mol_type = other DNA
ggctgtggctgttggtgtgggttaccgcttcaacgagcagacagcagccaaagcaggtattgcagccagcgacgg

SEQ ID NO: 144278 - DNA, 75 bp, synthetic construct
  source 1..75: mol_type = other DNA
cgcagatattaaggctgacactactgtctaccagaataaagatggcagctatacacttgaccagagcgcaccggg

SEQ ID NO: 144279 - DNA, 75 bp, synthetic construct
  source 1..75: mol_type = other DNA
tggtgttccagatccgttacatgacggtgaaatgctggcggtattgttgatctctgatgctgttacttataaggg

SEQ ID NO: 144280 - DNA, 75 bp, synthetic construct
  source 1..75: mol_type = other DNA
tatccgcaatgccgaagggcagctacgctggcggtgctggaattttgaacctgatgccggaaaacagctaaattc

SEQ ID NO: 144281 - DNA, 75 bp, synthetic construct
  source 1..75: mol_type = other DNA
atgtcggactgccgccctgttttattgcccgaaggccctttctcacgcgaacaggcggttgccgtcacaacagct

SEQ ID NO: 144282 - DNA, 75 bp, synthetic construct
  source 1..75: mol_type = other DNA
ttctttcttctgctgttgccggactgatgctggtgagttctggggccatggctttagatatcccagttaaagaca

SEQ ID NO: 144283 - DNA, 75 bp, synthetic construct
  source 1..75: mol_type = other DNA
tgtagttgcagccattcaggcagatacaaccatttatcaggaagaggatggcagctatacacatgatgttacagc

SEQ ID NO: 144284 - DNA, 75 bp, synthetic construct
  source 1..75: mol_type = other DNA
ttctttcttctgctgttgccggactgttgctggtgagttcgggagctatggctgctgagacctatactattaata

SEQ ID NO: 144285 - DNA, 75 bp, synthetic construct
  source 1..75: mol_type = other DNA
cagcgggacggtaaccgtcacagtttacgatgaccagggcttcgaccggcagattatcattcccccggtgctgtt

SEQ ID NO: 144286 - DNA, 75 bp, synthetic construct
  source 1..75: mol_type = other DNA
tggctgaaggatctttctcatacgggcaggcggttgctgtcataaccgcttaccgcaatgtgtttatccagaatg

SEQ ID NO: 144287 - DNA, 75 bp, synthetic construct
  source 1..75: mol_type = other DNA
caatgtgtgtgtgtttacttatactcatttagctgttctggtaaagtatgctgacattgttggtagtgatgttag

SEQ ID NO: 144288 - DNA, 75 bp, synthetic construct
  source 1..75: mol_type = other DNA
atgtcggactgacaccctgttttattgcccgaaggccctttctcacgcgaacaggcggttggcgtcacaacagct

SEQ ID NO: 144289 - DNA, 75 bp, synthetic construct
  source 1..75: mol_type = other DNA
atgttggactgcctccctgttttattgcccgaaggccctttctcacgcgaacaggcggttggcgtcacaacagct

SEQ ID NO: 144290 - DNA, 75 bp, synthetic construct
  source 1..75: mol_type = other DNA
atgtaggactgccaccctgttttattgcccgaaggccctttctcacgcgaacaggcggttggcgtcacaacagct

SEQ ID NO: 144291 - DNA, 75 bp, synthetic construct
  source 1..75: mol_type = other DNA
cgggcaaaaatctcaccacatctcggtatacgaaattgttggcgagcaggggctactgcatgaaaaaggccgcta

SEQ ID NO: 144292 - DNA, 75 bp, synthetic construct
  source 1..75: mol_type = other DNA
cgacgcatatttctaccgaccatcaaggccaatttgtttttgtcggctcttacaatgcgggcaatgtaagcgtaa

SEQ ID NO: 144293 - DNA, 75 bp, synthetic construct
  source 1..75: mol_type = other DNA
gtttacgaaattgtcggcgagcagggtctactgcatgaaaaaggccgttatgcggtcgggcaggggccaatgtgg

SEQ ID NO: 144294 - DNA, 75 bp, synthetic construct
  source 1..75: mol_type = other DNA
tatgttggtgttcgccctgagtttcgcgtcctggcgtatcgtatcgccccggacgatggcgcgctgacctttgcc

SEQ ID NO: 144295 - DNA, 75 bp, synthetic construct
  source 1..75: mol_type = other DNA
agcctgattaccgtcttcagcgtttcggaagatggcagcgtgttgagcaaagaaggcttccagccaacggaaact

SEQ ID NO: 144296 - DNA, 75 bp, synthetic construct
  source 1..75: mol_type = other DNA
agtctgattaccgttttcagcgtttcggaagatggcagcgtgttgagtaaagaaggcttccagccaacggaaacc

SEQ ID NO: 144297 - DNA, 75 bp, synthetic construct
  source 1..75: mol_type = other DNA
cagaaaagagctatctcaatacgacgcacaatgtgttttcggaagtgctgcaaatgtaccctggatttgtggcga

SEQ ID NO: 144298 - DNA, 75 bp, synthetic construct
  source 1..75: mol_type = other DNA
tcatgaagcctggctcgaagagatggaacgctatttccgcgaacgcggtcgcgtaatggcgccgagcaaccgcaa

SEQ ID NO: 144299 - DNA, 75 bp, synthetic construct
  source 1..75: mol_type = other DNA
aatcgaactgaaactgaccggacccgcctcagaacaagagacgatggaaaaactgtggctggaagtgaagcgcgt

SEQ ID NO: 144300 - DNA, 75 bp, synthetic construct
  source 1..75: mol_type = other DNA
ttatgtgaaaacatggggttgcggaggttttttgaatgagacgaacatttacagcagaggaaaaagcctctgttt

SEQ ID NO: 144301 - DNA, 75 bp, synthetic construct
  source 1..75: mol_type = other DNA
tgttgctctgtacagcacccgctttcgctaaacccgttctgactgtttatacctacgattccttcgccgccgact

SEQ ID NO: 144302 - DNA, 75 bp, synthetic construct
  source 1..75: mol_type = other DNA
ccggcggctggaaaaatgacacctttgtgccgtttgactatggctatttcgccttcgtctatgacaagaacaaac

SEQ ID NO: 144303 - DNA, 75 bp, synthetic construct
  source 1..75: mol_type = other DNA
atgtgggactgccgccctgttttattgcccgaaggccctttctcacgcgaacaggcggttggcgtcacaacagct

SEQ ID NO: 144304 - DNA, 75 bp, synthetic construct
  source 1..75: mol_type = other DNA
atgtcggactggcgccctgttttattgcccgaaggccctttctcacgcgaacaggcggttggcgtcacaacagct

SEQ ID NO: 144305 - DNA, 75 bp, synthetic construct
  source 1..75: mol_type = other DNA
atgtcggactgcccccctgttttattgcccgaaggccctttctcacgcgaacaggcggttggcgtcacaacagct

SEQ ID NO: 144306 - DNA, 75 bp, synthetic construct
  source 1..75: mol_type = other DNA
aatcgttgacactaacgctgcctggctggccgattttttctttcatcaggggttgccattatctcgccgcaatac

SEQ ID NO: 144307 - DNA, 75 bp, synthetic construct
  source 1..75: mol_type = other DNA
agcacgccgatgtgctgatcgttaacggcgggctgggaccgaccagtgatgatttaagcgcactcgccgctgcga

SEQ ID NO: 144308 - DNA, 75 bp, synthetic construct
  source 1..75: mol_type = other DNA
gaagatgacgaagcagaagaaatggaagccctcgaaacagagattatacttgctctgggctatgaggatccgtac

SEQ ID NO: 144309 - DNA, 75 bp, synthetic construct
  source 1..75: mol_type = other DNA
gggataaattatcctacgcaattaaaaatgccctgtctggtgttgtgttttcgctactcttcgttttaccagtcc

SEQ ID NO: 144310 - DNA, 75 bp, synthetic construct
  source 1..75: mol_type = other DNA
tatctgcacggctagataaatctacgatgatattatcgcttagcattccccaggcatggttgaaataccaggcaa

SEQ ID NO: 144311 - DNA, 75 bp, synthetic construct
  source 1..75: mol_type = other DNA
ggatggcagacgcacactggttgatgacagcggcaataaagctctgcgaattgagaaaaataacagcgcgaaatc

SEQ ID NO: 144312 - DNA, 75 bp, synthetic construct
  source 1..75: mol_type = other DNA
taatacttttcaagtcggtacagcctcgatcccttatttaacgcgtaaagggcaaatacgctataaaacgtcatt

SEQ ID NO: 144313 - DNA, 75 bp, synthetic construct
  source 1..75: mol_type = other DNA
atcgatatttcccgtttcgagaaaaaaggttatatcacaccggggaaatatctcgttcgggtgcaaataaataaa

SEQ ID NO: 144314 - DNA, 75 bp, synthetic construct
  source 1..75: mol_type = other DNA
agctacggcgataacgcccgcatgatggtcgataccgatggtattcctggcgttgaaatcaactctaaccgtact

SEQ ID NO: 144315 - DNA, 75 bp, synthetic construct
  source 1..75: mol_type = other DNA
tcaccggtcggcacgtttacggcagacaaattgcgcgtgaccgatatcactagcggtgcgacatatccggtgctg

SEQ ID NO: 144316 - DNA, 75 bp, synthetic construct
  source 1..75: mol_type = other DNA
acttctggcagtggtctggatgcagggagaagcagaccttgcatcgggaagtcagcagcataatggtttattcac

SEQ ID NO: 144317 - DNA, 75 bp, synthetic construct
  source 1..75: mol_type = other DNA
gtgccgtggatttgtggtgacaccacgtattactggaaaaacacgtatgccacgcagtatgaaacagtctatgga

SEQ ID NO: 144318 - DNA, 75 bp, synthetic construct
  source 1..75: mol_type = other DNA
gggggaataacctgctggcagcgttctacatccagacagatgcaaaagacctgaatgtgatgtaccacaatgcga

SEQ ID NO: 144319 - DNA, 75 bp, synthetic construct
  source 1..75: mol_type = other DNA
ccctgccggagggagtgacgctggcagaggaaggcaacgacatgctgatgtccttctttctgcagacggatgcga

SEQ ID NO: 144320 - DNA, 75 bp, synthetic construct
  source 1..75: mol_type = other DNA
attcaggtgacgccggtactggatgagaaacggggtacgccgttcacactggtgaaatctccggcatcaggggcg

SEQ ID NO: 144321 - DNA, 75 bp, synthetic construct
  source 1..75: mol_type = other DNA
gcttccactggccgggcagtccaacgggatggcctacggtgaagggcttccgctaccggcttcattcgaccgccc

SEQ ID NO: 144322 - DNA, 75 bp, synthetic construct
  source 1..75: mol_type = other DNA
gatattacaggtagtgcagaaacctaccctgtacttattgatatggtggaagttaaagcaaacaaagctggagca

SEQ ID NO: 144323 - DNA, 75 bp, synthetic construct
  source 1..75: mol_type = other DNA
ggaagacccggatattgaagctattggatattatggctccaaatggcgtgatagttcaacaacatggacgtcaca

SEQ ID NO: 144324 - DNA, 75 bp, synthetic construct
  source 1..75: mol_type = other DNA
acttctggctgtggtatggatgcagggagaggcagaccttgcttcaggaagtcagcagcataatggtttattcac

SEQ ID NO: 144325 - DNA, 75 bp, synthetic construct
  source 1..75: mol_type = other DNA
ttaccggattcatttgaccgcccggacccacggattaagcaactggcacgccgcagcacggtcacgccgggcggt

SEQ ID NO: 144326 - DNA, 75 bp, synthetic construct
  source 1..75: mol_type = other DNA
gccgcagaaggtgaagtcaggattcctgttgaagttcctgatgacggtgatggttcacaaaccacaataacctct

SEQ ID NO: 144327 - DNA, 75 bp, synthetic construct
  source 1..75: mol_type = other DNA
ggtgtgaatgtcacggataaagcgacaggtaaagatgtgggcctggtagcggaagatggcttcgtttatctcagc

SEQ ID NO: 144328 - DNA, 75 bp, synthetic construct
  source 1..75: mol_type = other DNA
gattatagctatggcgataacgcccgcatgatggtcgataccgatggcatctccggcgttgaaatcaactctaac

SEQ ID NO: 144329 - DNA, 75 bp, synthetic construct
  source 1..75: mol_type = other DNA
atcaaatcgttggcataatccgtatggaaaatggccacttccctccactggggatcagcgttacagataaaacct

SEQ ID NO: 144330 - DNA, 75 bp, synthetic construct
  source 1..75: mol_type = other DNA
ggtgatgtcaccacacctgtggtggtgaagccgtcggatggagaaggcacagttatcagcgccaccagcgaccca

SEQ ID NO: 144331 - DNA, 75 bp, synthetic construct
  source 1..75: mol_type = other DNA
agctacggtgataatgcccgcatgatggtggatacagacggcattgctggcgttgagattaactctaaccgtacc

SEQ ID NO: 144332 - DNA, 75 bp, synthetic construct
  source 1..75: mol_type = other DNA
aagcggttcgttactgtgcctgacgaaagagcatttaactaactttggcctgaatgaagaattcattgaaacctt

SEQ ID NO: 144333 - DNA, 75 bp, synthetic construct
  source 1..75: mol_type = other DNA
aacgcagcttatcgccagcggctcggtgggctgatgatgggctatgacagaagtcttcctcgccagactggcctg

SEQ ID NO: 144334 - DNA, 75 bp, synthetic construct
  source 1..75: mol_type = other DNA
atggcaattactgaagttttcacacataaccagccgctcggtaacagcgacccggcgcacactgcgtatggtcct

SEQ ID NO: 144335 - DNA, 75 bp, synthetic construct
  source 1..75: mol_type = other DNA
tgccgctgtacgaaccgcaggcgaaattatcggtctgcaaatggggctgtcatttgcgacgtttgtggatcctgg

SEQ ID NO: 144336 - DNA, 75 bp, synthetic construct
  source 1..75: mol_type = other DNA
ccgatcgcttgaattacccaatgaaacgcgtgggtacacgcggtgaaggcaaattcgaacggattagctgggatg

SEQ ID NO: 144337 - DNA, 75 bp, synthetic construct
  source 1..75: mol_type = other DNA
cctgctgccgacagccggagaggctgctgcgcagggctggagcattaagaatggcggaattcagttgtcagatgg

SEQ ID NO: 144338 - DNA, 75 bp, synthetic construct
  source 1..75: mol_type = other DNA
caacaacagcgacggctcagtagacagctacagcgccgcgttatacgccagctattatgatcaaagtcgtttctg

SEQ ID NO: 144339 - DNA, 75 bp, synthetic construct
  source 1..75: mol_type = other DNA
ctgccaacgatgttcctgttttttcgttctttgctctgtggctggccgtgcagcagatcctgatcggcattgcgc

SEQ ID NO: 144340 - DNA, 75 bp, synthetic construct
  source 1..75: mol_type = other DNA
atgttgcaggtgacaagcgatcaatggctttcctggctaagtctgtacttctggccgttactgcgcgtgctggcg

SEQ ID NO: 144341 - DNA, 75 bp, synthetic construct
  source 1..75: mol_type = other DNA
taagtgccctggtcgttgaatcttttgataaggggcagatggccactgttaatggaatgcgtggttcagccgcat

SEQ ID NO: 144342 - DNA, 75 bp, synthetic construct
  source 1..75: mol_type = other DNA
atttgcctttgccgctgtgcgaaccgctggcgaaattatcggtctgcaaatggggctgtcatttgcgacgtttgt

SEQ ID NO: 144343 - DNA, 75 bp, synthetic construct
  source 1..75: mol_type = other DNA
atggatatgctggcgttactgctgttcctgacatttaacggtcatttatggttgatttcactgctggtcgatacc

SEQ ID NO: 144344 - DNA, 75 bp, synthetic construct
  source 1..75: mol_type = other DNA
ccatttatggctgatttcgctgctggtcgatacttttcacacattacccattagcggtgaaccgctgaacagcaa

SEQ ID NO: 144345 - DNA, 75 bp, synthetic construct
  source 1..75: mol_type = other DNA
cgaacctgaacgcgatgtaccacaagaagccgaatgcgaagctggatacgttcggggtctttgataacggatggc

SEQ ID NO: 144346 - DNA, 75 bp, synthetic construct
  source 1..75: mol_type = other DNA
tgatgtccttcttcctgcagacggatgcgacgaacctgaacgcgatgtaccacaagaagcagaatgcgaagctgg

SEQ ID NO: 144347 - DNA, 75 bp, synthetic construct
  source 1..75: mol_type = other DNA
ccggcagaagacccggacctggaaacagtcggttattacggttcaaagtggcgtaatgaccagaagacctggaca

SEQ ID NO: 144348 - DNA, 75 bp, synthetic construct
  source 1..75: mol_type = other DNA
gggctgcatattgccaaaaaactgctgccttatattccgcagaatgccgggatacttctggttccctgctgtcgt

SEQ ID NO: 144349 - DNA, 75 bp, synthetic construct
  source 1..75: mol_type = other DNA
ctggaatgcaccggataacgccggaccgtctggcggtacaaatggcagcagtacagagccggagtattactatgt

SEQ ID NO: 144350 - DNA, 75 bp, synthetic construct
  source 1..75: mol_type = other DNA
acagagaacggcgagcgggaaaaagcgcagcggcgcagcctggcagagacgctccagcaggaagggagtgagaac

SEQ ID NO: 144351 - DNA, 75 bp, synthetic construct
  source 1..75: mol_type = other DNA
ggtgatgtcaccacacctgtggtggtgaagccgtcggatggagaaggcaccgttatcagcaccaccagcgaaccg

SEQ ID NO: 144352 - DNA, 75 bp, synthetic construct
  source 1..75: mol_type = other DNA
attccgggtatcgggtattacggttcgaaatggcgtgacagctcagccacctggacgtcacaggacagggcgagc

SEQ ID NO: 144353 - DNA, 75 bp, synthetic construct
  source 1..75: mol_type = other DNA
cgcggaggatgcgcactatgtctaccgccacgatgaatacggcaggctgacggagaagacggaccgcatcccggc

SEQ ID NO: 144354 - DNA, 75 bp, synthetic construct
  source 1..75: mol_type = other DNA
tctgtccattgtccgccaggccgcgccgcgcgcgcgtctggtcggtggtaaaagcgaacgcttacgggcacggta

SEQ ID NO: 144355 - DNA, 75 bp, synthetic construct
  source 1..75: mol_type = other DNA
accggtggtaaggccctgcaactgaacaaaccggaaagccacatctggtttctggagcatgatgccgccgggaag

SEQ ID NO: 144356 - DNA, 75 bp, synthetic construct
  source 1..75: mol_type = other DNA
tacagcgaatcagccggtgcatcggaaaattcactgcgctggggtgtgggtaagccgctgtatcaggatttggtg

SEQ ID NO: 144357 - DNA, 75 bp, synthetic construct
  source 1..75: mol_type = other DNA
agttatgtgaaaacatggggttgcggaggttttttgaatgagacgaacatttacagcagaggaaaaagcctctgt

SEQ ID NO: 144358 - DNA, 75 bp, synthetic construct
  source 1..75: mol_type = other DNA
cccgtcttgataccgcgctagaaactttctggcaggcattgcaccgtcgggatgttcaggttcctgaccttctgt

SEQ ID NO: 144359 - DNA, 75 bp, synthetic construct
  source 1..75: mol_type = other DNA
ctccttgctggaatatgcgcgggaaaaactgaatggcctggatgtagaggtttatcactggaatctgcaaaactt

SEQ ID NO: 144360 - DNA, 75 bp, synthetic construct
  source 1..75: mol_type = other DNA
ctggaagaggcaggttttaccaccgaaacgctgcacggcccgttgttagaagagttatctacctctgggatctgg

SEQ ID NO: 144361 - DNA, 75 bp, synthetic construct
  source 1..75: mol_type = other DNA
ctggaagaggcgggttttaccaccgaaacgctgcatggtccgttgttagaagatttatctgcctccgggatctgg

SEQ ID NO: 144362 - DNA, 75 bp, synthetic construct
  source 1..75: mol_type = other DNA
gccgattcaggacagcgacaaaagccacatctggctactggtcaatgacgaccagcgtctggagcagatgataag

SEQ ID NO: 144363 - DNA, 75 bp, synthetic construct
  source 1..75: mol_type = other DNA
tcctcaaattgaggatgaaccaaaaatagatgtaatggggcgttctcgattaattcaggtgttccgatttagcga

SEQ ID NO: 144364 - DNA, 75 bp, synthetic construct
  source 1..75: mol_type = other DNA
ctggacggatgagcaatcaggcatcactcgttggtctttgtctcctgcgggggcatgcccggaactgatcaaagt

SEQ ID NO: 144365 - DNA, 75 bp, synthetic construct
  source 1..75: mol_type = other DNA
cttgagatgcaacagaattcacttgtacttttggctgaccagcaacaacattggattgatgaagaaacaggcatt

SEQ ID NO: 144366 - DNA, 75 bp, synthetic construct
  source 1..75: mol_type = other DNA
ttaacgttgaaggcattttctgcctgccgattcaggacagcgacaaaagccatatcagactattggtcaatgatg

SEQ ID NO: 144367 - DNA, 75 bp, synthetic construct
  source 1..75: mol_type = other DNA
cgcaaaaatttctccagtttatggtttctccggcttttcagaatgcgatcccaaccggcaactggatgtatccgg

SEQ ID NO: 144368 - DNA, 75 bp, synthetic construct
  source 1..75: mol_type = other DNA
attggctaccgccagctggcggcgaaatgcggcctgaccgaagccaaatgccgcaaccttgtcaacgcttaccgg

SEQ ID NO: 144369 - DNA, 75 bp, synthetic construct
  source 1..75: mol_type = other DNA
agttctgcgcctgatgcgtaaccgctggagctaccccgatattctggaagacgttaacacgcggtacggggctaa

SEQ ID NO: 144370 - DNA, 75 bp, synthetic construct
  source 1..75: mol_type = other DNA
acgaggcgcacaagctggagcgctttggctggcctgttgctgagattgccggaaagcttgaaattccagtcgaag

SEQ ID NO: 144371 - DNA, 75 bp, synthetic construct
  source 1..75: mol_type = other DNA
gtcattgaccagcccagcactccatattttagtactgctggtaaaaaaactgatgactttgcaagtcttgatgca

SEQ ID NO: 144372 - DNA, 75 bp, synthetic construct
  source 1..75: mol_type = other DNA
tataagcccggcaagctgcaccgtgatacagagtttatgattgcccgcgatatgctgattcgccctgaaacagtg

SEQ ID NO: 144373 - DNA, 75 bp, synthetic construct
  source 1..75: mol_type = other DNA
ggttcctctgtgggtgatagttactggtatggtttttggtcagatacccctgatatggaagtaaaaacattcgat

SEQ ID NO: 144374 - DNA, 75 bp, synthetic construct
  source 1..75: mol_type = other DNA
atgcgcatcaaacgattttttctaattcttgctttgcttactccattttcatcaatggcaaatgtaagcaaatgg

SEQ ID NO: 144375 - DNA, 75 bp, synthetic construct
  source 1..75: mol_type = other DNA
tgagcaactggtttacccgcaatggctgcatgacctgcaacaaggtaaagaggttacggcaaaacctaccggtga

SEQ ID NO: 144376 - DNA, 75 bp, synthetic construct
  source 1..75: mol_type = other DNA
tcaatgaatggatcaagcaacataacctgaaaaccgatgcgccggtagcgttgtacggaaatgacaaagatgtca

SEQ ID NO: 144377 - DNA, 75 bp, synthetic construct
  source 1..75: mol_type = other DNA
agatttatctgcctcggggatctggctggttatcagctccacccacggtgccggagatattccggacaacctttc

SEQ ID NO: 144378 - DNA, 75 bp, synthetic construct
  source 1..75: mol_type = other DNA
ctcagttctgaaattaaacggatagttgttctccctaaatatgattacactgataccatagaaaacattactact

SEQ ID NO: 144379 - DNA, 75 bp, synthetic construct
  source 1..75: mol_type = other DNA
acgacggcggctggtacgagtggagcagcgatccaaaaaacccggtagcaacgggtgaacgcggcccggacagca

SEQ ID NO: 144380 - DNA, 75 bp, synthetic construct
  source 1..75: mol_type = other DNA
cctgaaaaccgatgctccggtggcgctgtacggtaatgacaaagatgtcgatgccgtcaaaacgcgtctgcaaaa

SEQ ID NO: 144381 - DNA, 75 bp, synthetic construct
  source 1..75: mol_type = other DNA
atcgtgggttcagttaaggcctggcagtacatgcaggctgatggctggaaatccgctgatggatacgatgataac

SEQ ID NO: 144382 - DNA, 75 bp, synthetic construct
  source 1..75: mol_type = other DNA
tgcgaaagcagctgagcttagaaaacaactcacgccggaagtcgtgatgatggtgaaggataattgtattgacaa

SEQ ID NO: 144383 - DNA, 75 bp, synthetic construct
  source 1..75: mol_type = other DNA
gcgcaagctgaatctgaaacctgccagcggttattattccgacctgacatcggtctatcagggtgaagaccaggg

SEQ ID NO: 144384 - DNA, 75 bp, synthetic construct
  source 1..75: mol_type = other DNA
gtgaacgccttgatgagaacattacttctctcatcgtgcgtatacgcagagggacgtatcacccgcaagcggcaa

SEQ ID NO: 144385 - DNA, 75 bp, synthetic construct
  source 1..75: mol_type = other DNA
tccggccagcaatggagcggagttggcaaaagcgttggataacgttatgcgccagtctgatgaattgcggccact

SEQ ID NO: 144386 - DNA, 75 bp, synthetic construct
  source 1..75: mol_type = other DNA
ccgccccgacgtgaactcattgaatataatgtcgctggtggatttgataccgataattttgcgttggtggaaaaa

SEQ ID NO: 144387 - DNA, 75 bp, synthetic construct
  source 1..75: mol_type = other DNA
atgtttctgaattacatggtgaattcccccaacataatgctaggatttgaaaatggcagaaaaaagaaaaaaacc

SEQ ID NO: 144388 - DNA, 75 bp, synthetic construct
  source 1..75: mol_type = other DNA
ttcttcacttaaggccagcagatatgtgaaaatatttaaatttggcgcagcttcaaacgcattcactctacttgc

SEQ ID NO: 144389 - DNA, 75 bp, synthetic construct
  source 1..75: mol_type = other DNA
ataaataaaatatgttcttcacttaaggccagcagatatgtgaaaatatttaaatttggcgcagcttcaaacgca

SEQ ID NO: 144390 - DNA, 75 bp, synthetic construct
  source 1..75: mol_type = other DNA
tgaactgtacccggtggcaggcgaaccggtgattgataagcctggcaaaggcgcgttttatcaaaccgacttaca

SEQ ID NO: 144391 - DNA, 75 bp, synthetic construct
  source 1..75: mol_type = other DNA
atgtcatcatttaaggaatgtctttcggcatccaaagaattaatgaccccatcaaattacatgatatgcatagaa

SEQ ID NO: 144392 - DNA, 75 bp, synthetic construct
  source 1..75: mol_type = other DNA
aatggcacattttttaccgtgaaaattcaggcgcggaagttttgcttgaaataccatcatttcgggaatgtcttt

SEQ ID NO: 144393 - DNA, 75 bp, synthetic construct
  source 1..75: mol_type = other DNA
ggtggttgataacgccacggtgctggcgaattactttgccatcagcgagttgacgatggggctgacggcaattgc

SEQ ID NO: 144394 - DNA, 75 bp, synthetic construct
  source 1..75: mol_type = other DNA
taatatcatcggtgcgaacatttttaatatcgttattgtgttgggcctgcctgcgctgataacgccaggggaaat

SEQ ID NO: 144395 - DNA, 75 bp, synthetic construct
  source 1..75: mol_type = other DNA
tttagccgttggtacagccctcggctcaaacattatcaatatattgctgatcctcggtctggctgcgctggttcg

SEQ ID NO: 144396 - DNA, 75 bp, synthetic construct
  source 1..75: mol_type = other DNA
ctttgccagcgagtaccaaatgagaaacccagatagcgagcagagttgtacttacattgtcgctttcagtcaaaa

SEQ ID NO: 144397 - DNA, 75 bp, synthetic construct
  source 1..75: mol_type = other DNA
gatttatttgaagaaaaattagccatttataaacctaatgataaactcgcgcttagcgaattacacgaaagcata

SEQ ID NO: 144398 - DNA, 75 bp, synthetic construct
  source 1..75: mol_type = other DNA
acgaccagtgatgcgcttgggttgttatctatggctggtctgaacgatgcatatctgtttgttcgcaagccttct

SEQ ID NO: 144399 - DNA, 75 bp, synthetic construct
  source 1..75: mol_type = other DNA
atcggactgggttacatcgggctgcctacagcagctgcgtttgcctcacggcaaaaacaggtgattggtgtcgat

SEQ ID NO: 144400 - DNA, 75 bp, synthetic construct
  source 1..75: mol_type = other DNA
cgcgcccggaagccatcaagatggcgccgttggtgcatgcgttggcaaaagatcctttttttgaggctaaagttt

SEQ ID NO: 144401 - DNA, 75 bp, synthetic construct
  source 1..75: mol_type = other DNA
tagaattccactggtagttgaaatatataaagcagtcctgcaacctaagcaacatccgcgtatttctctcaaaaa

SEQ ID NO: 144402 - DNA, 75 bp, synthetic construct
  source 1..75: mol_type = other DNA
gcgtctattctttgccgaacctttggcatcccgccgctgatcatcggcatgacggtggtcagtattggtacatcg

SEQ ID NO: 144403 - DNA, 75 bp, synthetic construct
  source 1..75: mol_type = other DNA
cttcccagcaatattcatctgcgtggcgaagaggtggcagccgtctcgttgcaatgcgtcgggccggggcattac

SEQ ID NO: 144404 - DNA, 75 bp, synthetic construct
  source 1..75: mol_type = other DNA
tccattgtacctgactacgatctcaacataatgcagccaggacagggactgacagagataacctgtcgaattctt

SEQ ID NO: 144405 - DNA, 75 bp, synthetic construct
  source 1..75: mol_type = other DNA
ggaaatgaaagggaagcaacatgctgcagaaattgtgcagtactggaaagatatcaaacgcggcggcattaagga

SEQ ID NO: 144406 - DNA, 75 bp, synthetic construct
  source 1..75: mol_type = other DNA
gggttaaaaactggctgtgtatttatggccgcctgacctgcggtgtactggctgaaaaaatgaatatgccgccat

SEQ ID NO: 144407 - DNA, 75 bp, synthetic construct
  source 1..75: mol_type = other DNA
cgttgcagaagtggatgatgagatgtgcaaacagggaatgccccgttttgcaatggcacgtatcgatatccggct

SEQ ID NO: 144408 - DNA, 75 bp, synthetic construct
  source 1..75: mol_type = other DNA
ggtattccacctgtaagctgcaggtgctgaagaacggggttgagattttccatgaaccggcaacggatgtcagcc

SEQ ID NO: 144409 - DNA, 75 bp, synthetic construct
  source 1..75: mol_type = other DNA
tgatttcggttttgtggatattgacttctggaacaaaactcagcatcgattcctgagattagtgcgcaaaattga

SEQ ID NO: 144410 - DNA, 75 bp, synthetic construct
  source 1..75: mol_type = other DNA
atgaccgatcctaaatggctaattgaggcacgaaaaaatctcggcattcgggaaatgaaagggaagcaacatgct

SEQ ID NO: 144411 - DNA, 75 bp, synthetic construct
  source 1..75: mol_type = other DNA
cgatgaaaaaaatgcattgttttcgtctctatatttgaatggcagagcaactgaaaaagaagctattagtatatt

SEQ ID NO: 144412 - DNA, 75 bp, synthetic construct
  source 1..75: mol_type = other DNA
tatatatcctatttcgatgttatcgtttttcataaacctccatttacaaaaaacttgcaggctgcaatagctttt

SEQ ID NO: 144413 - DNA, 75 bp, synthetic construct
  source 1..75: mol_type = other DNA
ctactggttaagcaatcctccggctgctttccttaccaacattaagaagactggcactaagcagactttgaaaat

SEQ ID NO: 144414 - DNA, 75 bp, synthetic construct
  source 1..75: mol_type = other DNA
cgggcgtctgacctgtggtgttctggctgaaaaaatgaagatgccaccttcctcaatggtgtatttcctgcgtga

SEQ ID NO: 144415 - DNA, 75 bp, synthetic construct
  source 1..75: mol_type = other DNA
cacgtcctgcgctatctcattcttgattattcaccggttccggcggcaacacaggatgtcagcgagcatggttaa

SEQ ID NO: 144416 - DNA, 75 bp, synthetic construct
  source 1..75: mol_type = other DNA
gtgtcagcacattattacgggcttacgggcgtctgacctgcggggttctggctgaaaaaatgaatatgctgccct

SEQ ID NO: 144417 - DNA, 75 bp, synthetic construct
  source 1..75: mol_type = other DNA
caacggttatgccgaccagattacttctgtactgaaagctgccggcgttgaaactgaagtcttctttgaagttga

SEQ ID NO: 144418 - DNA, 75 bp, synthetic construct
  source 1..75: mol_type = other DNA
atgaaaaactgtccccgacgctggcaatgtaccgtgcaaaagatttcgaagacgcggtagagaaagctgagaaac

SEQ ID NO: 144419 - DNA, 75 bp, synthetic construct
  source 1..75: mol_type = other DNA
cctgctgatttgtaacgttattcgctacaacgcgaacgacaacccgaccaagcagactgcattcagccagtatga

SEQ ID NO: 144420 - DNA, 75 bp, synthetic construct
  source 1..75: mol_type = other DNA
cggacgtacaggaatatcagaccctgccacactcccgtctggtgtatgttgtttctgaaacaaaagcagagccca

SEQ ID NO: 144421 - DNA, 75 bp, synthetic construct
  source 1..75: mol_type = other DNA
aatgccattatcaccggaaacgatcctctgagcagagaagttattgatcaggcaaaaaacctgaaggttatttca

SEQ ID NO: 144422 - DNA, 75 bp, synthetic construct
  source 1..75: mol_type = other DNA
cgtagaaggagcaccggcggcagcaaaggaagcagctccagctaaagcagagaaaaaagcgaagaaatccgctta

SEQ ID NO: 144423 - DNA, 75 bp, synthetic construct
  source 1..75: mol_type = other DNA
aactcacggcggctacattttacagggcaaagagctgaaagcggttcaggacgttatcctgaaaaacggcgcgct

SEQ ID NO: 144424 - DNA, 75 bp, synthetic construct
  source 1..75: mol_type = other DNA
atgaagaacgtcaaaaacacggaaaatcgaatagccgcgatgctgaaagcaaaaggatggactcaggctcaactg

SEQ ID NO: 144425 - DNA, 75 bp, synthetic construct
  source 1..75: mol_type = other DNA
ccttgatggcgaaccattaagtggccaacgttttcatatagaaatacttccggcggcgttgcgttgtcgattacc

SEQ ID NO: 144426 - DNA, 75 bp, synthetic construct
  source 1..75: mol_type = other DNA
ttcactcagaagcaagtagacaaaattttccgtgctgccgccctggccgccgcagatgcccgaatccctctcgct

SEQ ID NO: 144427 - DNA, 75 bp, synthetic construct
  source 1..75: mol_type = other DNA
cctgctgatttgtaacgtcattcgctacaatgcgaacgataacccgactaagcagactgcattcagtcagtacga

SEQ ID NO: 144428 - DNA, 75 bp, synthetic construct
  source 1..75: mol_type = other DNA
gcgctgactccggatatggcgattgtcgacgccaacctggttatggacatgccgaagtccctgtgtgctttcggt

SEQ ID NO: 144429 - DNA, 75 bp, synthetic construct
  source 1..75: mol_type = other DNA
cgctgaaaaccctgctcgacctgctgccagaacgcgctttgcaaggcaaagtggtgctaccgctggcgacgggcg

SEQ ID NO: 144430 - DNA, 75 bp, synthetic construct
  source 1..75: mol_type = other DNA
accagaacgcgcactacaaggaaaagtggtgttgccgctggcgacaggtggcacggtggctcatctactggctgt

SEQ ID NO: 144431 - DNA, 75 bp, synthetic construct
  source 1..75: mol_type = other DNA
agtgcgctgaaagcccaggagatcctgcacggcgtgtttgccgatgactcacaagtaattgattaccatcacaaa

SEQ ID NO: 144432 - DNA, 75 bp, synthetic construct
  source 1..75: mol_type = other DNA
ccgggtaaaaaataccagtaatgtcattatctgtttttccacagcagttcagcaactgaatactgttctgctggt

SEQ ID NO: 144433 - DNA, 75 bp, synthetic construct
  source 1..75: mol_type = other DNA
atttgcgacgccttccgcgaggtggttggcgagtctgtcacgcccgcagaaaacttctttgaggcgggcgcaacg

SEQ ID NO: 144434 - DNA, 75 bp, synthetic construct
  source 1..75: mol_type = other DNA
aaattgaatggcctggatgtcgaggtttatcactggaatctgcaaaacttctccccggaagatttgctctatgcc

SEQ ID NO: 144435 - DNA, 75 bp, synthetic construct
  source 1..75: mol_type = other DNA
atgaaaataaaactttccagtgaaatatcaaaattaatttttttatatgcagcggtgtccatgcctgctttttcc

SEQ ID NO: 144436 - DNA, 75 bp, synthetic construct
  source 1..75: mol_type = other DNA
taaatctggtcagggcaaatatcgagactgaatccagacaattcattgaaaataaaaactattcaatccaatcaa

SEQ ID NO: 144437 - DNA, 75 bp, synthetic construct
  source 1..75: mol_type = other DNA
cgaaagattgatatgcgtccagcgaggattttacctagcatagaaagatatgaatatgatgtcgtaatgcgtgag

SEQ ID NO: 144438 - DNA, 75 bp, synthetic construct
  source 1..75: mol_type = other DNA
atgacgtaccggagccgctgcgcagctacttcgattatgaagcctgggcgcgtgacctgttcagcagcggctatg

SEQ ID NO: 144439 - DNA, 75 bp, synthetic construct
  source 1..75: mol_type = other DNA
taaagaggatatagacaaaaacagaaaacgtgcagatgcaggtattgcaggtgcgatggcaatgacggggatacc

SEQ ID NO: 144440 - DNA, 75 bp, synthetic construct
  source 1..75: mol_type = other DNA
tctggatgaaagagtgacagccaatacacagacagcagaagaacataagctgcttatttcggagaacagcaaaca

SEQ ID NO: 144441 - DNA, 75 bp, synthetic construct
  source 1..75: mol_type = other DNA
atgaagggcgggtaatgatggacggtcctcgtgatgaaatactgaaaaaattgtcagggaaacagcagagtgggg

SEQ ID NO: 144442 - DNA, 75 bp, synthetic construct
  source 1..75: mol_type = other DNA
actctgcgtgaaaatctgcagctttcgcgtcttccgggaagcctgtcggatgtggatatgattaatgcagccgga

SEQ ID NO: 144443 - DNA, 75 bp, synthetic construct
  source 1..75: mol_type = other DNA
gcagaatccccggctttttctgggaactctgcgtgaaaatctgcagctttcgcgtcttccgggaagcctgtcgga

SEQ ID NO: 144444 - DNA, 75 bp, synthetic construct
  source 1..75: mol_type = other DNA
acagtatgcaaagtggttttcattactattggttaagcaatcctccggctgctttccttaccaacattaagaaga

SEQ ID NO: 144445 - DNA, 75 bp, synthetic construct
  source 1..75: mol_type = other DNA
atgatcactattaccaaagagcgactactgacaatcaagcagtggcgcgaaacatacggacctgatagcaacgtt

SEQ ID NO: 144446 - DNA, 75 bp, synthetic construct
  source 1..75: mol_type = other DNA
cacgctgctggcttttgtggatttgccttttattctgcttttcatatgtgttatcgagcttgtggggggctggct

SEQ ID NO: 144447 - DNA, 75 bp, synthetic construct
  source 1..75: mol_type = other DNA
atgaacgtctatgaccgggttatacctaatcgatcctgggaaacgttatggatgctgagtatcggggtgattgtc

SEQ ID NO: 144448 - DNA, 75 bp, synthetic construct
  source 1..75: mol_type = other DNA
actatgtagagcagcggttaactccggagcgaatctgcggtgttggcgtcgacactcgcatcctggaaacctcat

SEQ ID NO: 144449 - DNA, 75 bp, synthetic construct
  source 1..75: mol_type = other DNA
gataatcatctttcccggcgatctccggaagatatcccgtcacttgcggttccgacgcttcttttattgaacgct

SEQ ID NO: 144450 - DNA, 75 bp, synthetic construct
  source 1..75: mol_type = other DNA
gcggtcaggggctgtcaggaggacagcggcagatggtggccctgacaagaatggttctgggttctccccgggtgg

SEQ ID NO: 144451 - DNA, 75 bp, synthetic construct
  source 1..75: mol_type = other DNA
attgttgaccgtattgtcgtgatgaatgaagggcgggtaatgatggacggttcccgtgatgaaatactgaaaaaa

SEQ ID NO: 144452 - DNA, 75 bp, synthetic construct
  source 1..75: mol_type = other DNA
gctattatttttgagtgtactgcgaaattaatccggagttatctgacggatgttgcgggaaagaaagctgatctg

SEQ ID NO: 144453 - DNA, 75 bp, synthetic construct
  source 1..75: mol_type = other DNA
taaacggtctcgtgatccgggcgacagcgcggaaatgatgcaagcacgccgcgcattcttagatgccggacatta

SEQ ID NO: 144454 - DNA, 75 bp, synthetic construct
  source 1..75: mol_type = other DNA
gcaattgttgaagtgctgtcgcccggtcaacccccgactaaacgcgcattaatttacgccgcgacgccagccagc

SEQ ID NO: 144455 - DNA, 75 bp, synthetic construct
  source 1..75: mol_type = other DNA
gcaattgttgaagtgctgtcgcccggtcaactcccgactaaacgcgcattaatttacgccgcgacgccagccagt

SEQ ID NO: 144456 - DNA, 75 bp, synthetic construct
  source 1..75: mol_type = other DNA
gcaattgttgaagtgctgtcgcccggtcaactcccgactaaacgcgtattaatttacgccgcgacgccagccagc

SEQ ID NO: 144457 - DNA, 75 bp, synthetic construct
  source 1..75: mol_type = other DNA
gattccttttaagatcttattattcattcttgttggaggctggcaaaaattattcgaatttctgttggtggtgaa

SEQ ID NO: 144458 - DNA, 75 bp, synthetic construct
  source 1..75: mol_type = other DNA
gccgtacggcctgatggcggtacccgtcattaaaatggcgacccgcaccgagctggcgaaccgctggtttgattt

SEQ ID NO: 144459 - DNA, 75 bp, synthetic construct
  source 1..75: mol_type = other DNA
gcaattgttgaagtgctgtcgcccggtcaacgcccgactaaacgcgcattaatttacgccgcgacgccagccagg

SEQ ID NO: 144460 - DNA, 75 bp, synthetic construct
  source 1..75: mol_type = other DNA
tctcaatatgggaaaaaccgaccgcagcgccaacccttcgccgggcaacgataagggcgggctcgcaaacgtggt

SEQ ID NO: 144461 - DNA, 75 bp, synthetic construct
  source 1..75: mol_type = other DNA
tctcaatatgggaaaaaccgaccgcagcgccaacccttcgccgggcaacgataacggcggcctcgcaaacgtggt

SEQ ID NO: 144462 - DNA, 75 bp, synthetic construct
  source 1..75: mol_type = other DNA
tctcaatatgggaaaaaccgaccgcagcgccaacccttcgccgggcaacgataaaggcggactcgcaaacgtggt

SEQ ID NO: 144463 - DNA, 75 bp, synthetic construct
  source 1..75: mol_type = other DNA
gcaattgttgaagtgctgtcgcccggtcaacacccgactaaacgcgcattaatttacgccgcgacgccagccaga

SEQ ID NO: 144464 - DNA, 75 bp, synthetic construct
  source 1..75: mol_type = other DNA
gcaattgttgaagtgctgtcgcccggtcaacacccgactaaacgcgaattaatttacgccgcgacgccagccagc

SEQ ID NO: 144465 - DNA, 75 bp, synthetic construct
  source 1..75: mol_type = other DNA
tctcaatatgggaaaaaccgaccgcagcgccaacccttcgccgggcaacgagaatggcggactcgcaaacgtggt

SEQ ID NO: 144466 - DNA, 75 bp, synthetic construct
  source 1..75: mol_type = other DNA
aaacgcgtctgtattacctgaaactcctgtgccatttaaaagtggtaccggagcaattgataacgacactgtcta

SEQ ID NO: 144467 - DNA, 75 bp, synthetic construct
  source 1..75: mol_type = other DNA
ggaataatagtttattaattattggcggtgaaactgcaggcggcaaagcggtgacggattcagttttgatttctg

SEQ ID NO: 144468 - DNA, 75 bp, synthetic construct
  source 1..75: mol_type = other DNA
ctatcctaatggcttcatttgccgcaaacgcgtctgtattaccggaaactcctgtgccatttaaaagtggtaccg

SEQ ID NO: 144469 - DNA, 75 bp, synthetic construct
  source 1..75: mol_type = other DNA
gcatggtacaagctggatacacaggccaaaaataaaagctggacagcgttagctgcattccctggcggaccgaga

SEQ ID NO: 144470 - DNA, 75 bp, synthetic construct
  source 1..75: mol_type = other DNA
gggaaactgccggagcagtttttctggacggatgcggacaataatgacgtaccgatggacgctgaaacactgatt

SEQ ID NO: 144471 - DNA, 75 bp, synthetic construct
  source 1..75: mol_type = other DNA
ctgcaattgatgggcatggattggcgtatctaccttatgatcaggttgagcgggctattaaagaaaaaaaactga

SEQ ID NO: 144472 - DNA, 75 bp, synthetic construct
  source 1..75: mol_type = other DNA
atcgtggagtcggttcttcaggcagatcgatttgaaaagtatatgttttggctgttaaaggataagacgctacct

SEQ ID NO: 144473 - DNA, 75 bp, synthetic construct
  source 1..75: mol_type = other DNA
cggaaaaattacgccagatacgtaaggcggagggcttaacgcaaaaacaatttgctgaaattacagggttatctc

SEQ ID NO: 144474 - DNA, 75 bp, synthetic construct
  source 1..75: mol_type = other DNA
tatactgttaccggctttcacgatggggcagcttgaagctgcattcaagataggtttttgctctatttacccttt

SEQ ID NO: 144475 - DNA, 75 bp, synthetic construct
  source 1..75: mol_type = other DNA
agtttagtataaatgaaaaatccccatccttttcggaagatgatatggcatttttagaggagtttgacaaagtcg

SEQ ID NO: 144476 - DNA, 75 bp, synthetic construct
  source 1..75: mol_type = other DNA
atcagtccgtctctctcccctgatgggctaaaaagcacatcgccttctcaaaaaccccgcaagactggcacacag

SEQ ID NO: 144477 - DNA, 75 bp, synthetic construct
  source 1..75: mol_type = other DNA
gcggcgtgggtgaaaaaatcagagctatcagggatgcggaggggttaacaaggcagcaattctttgaattaactg

SEQ ID NO: 144478 - DNA, 75 bp, synthetic construct
  source 1..75: mol_type = other DNA
gtgaatacaacgctgtttcgatggccggttcgcgtctactatgaagatgccggtggtgtggtgtaccacgccagt

SEQ ID NO: 144479 - DNA, 75 bp, synthetic construct
  source 1..75: mol_type = other DNA
aatactttgttgaatgaagcagaggttctggttgtttgcgttgactcactcaaaatgaagcctcgtgcgcttccc

SEQ ID NO: 144480 - DNA, 75 bp, synthetic construct
  source 1..75: mol_type = other DNA
tgctggcggacgaaccgactggtaacctggacgacgcgttgtcggaaggcattttacgtctgtttgaagagttta

SEQ ID NO: 144481 - DNA, 75 bp, synthetic construct
  source 1..75: mol_type = other DNA
agttcacgacacagataatgtggcaattattgttaatgataatggcctgaaagcaggaacgcgttttccggatgg

SEQ ID NO: 144482 - DNA, 75 bp, synthetic construct
  source 1..75: mol_type = other DNA
ccgcgacgccagccagcgattttgtctgtggcacgcaacaggtggcatcagggattaccgtgcaagtgtttacga

SEQ ID NO: 144483 - DNA, 75 bp, synthetic construct
  source 1..75: mol_type = other DNA
aaacaacagtaggtaaagccattgcggatttgtttcctcctgaacggcgctatgcaacaattgaagatgtccacg

SEQ ID NO: 144484 - DNA, 75 bp, synthetic construct
  source 1..75: mol_type = other DNA
ctgggaaaaccgtctgtttttgtttaagccaacaagtggcagacgaaacagaaatatcagcggtaaagcagcata

SEQ ID NO: 144485 - DNA, 75 bp, synthetic construct
  source 1..75: mol_type = other DNA
ctgtcaaaagaagggtttgcgatgtatatcggcaagaccgttgacgccatcgtgagcatggcaaaagcagggaaa

SEQ ID NO: 144486 - DNA, 75 bp, synthetic construct
  source 1..75: mol_type = other DNA
tgaacctgatttgcaaactgcaccacggcacctgctcgcgcccggaagaagctgcatcgctggccctggcgcgca

SEQ ID NO: 144487 - DNA, 75 bp, synthetic construct
  source 1..75: mol_type = other DNA
atgattcgctttgaacatgtcagcaaggcttatctcggtgggaggcaggcgctgcagggcgttacgttccatatg

SEQ ID NO: 144488 - DNA, 75 bp, synthetic construct
  source 1..75: mol_type = other DNA
tttctgcgccgccagattggcatgattttccaggatcaccatctactgatggaccgtactgtctacgataacgtg

SEQ ID NO: 144489 - DNA, 75 bp, synthetic construct
  source 1..75: mol_type = other DNA
cagccgggtgagatggcgtttctgaccggtcattccggcgcagggaaaagtaccctcctgaagctgatctgtggg

SEQ ID NO: 144490 - DNA, 75 bp, synthetic construct
  source 1..75: mol_type = other DNA
atatgacgcgcaccttgctggtgaatggcgaaggggtaattgccgaatctcacccgctgtttaacgtctatcaga

SEQ ID NO: 144491 - DNA, 75 bp, synthetic construct
  source 1..75: mol_type = other DNA
ccgtccatgacagccgtagcaggctcatcgatcagcatacggtcgatatgattggcaacactgacttgatgcgtt

SEQ ID NO: 144492 - DNA, 75 bp, synthetic construct
  source 1..75: mol_type = other DNA
acttcaacttttccgccccggcaggatactctgctcccattgctcctaatcgtgctgaaaatgcctatgcggatt

SEQ ID NO: 144493 - DNA, 75 bp, synthetic construct
  source 1..75: mol_type = other DNA
tctcaatatgggaaaaaccgaccgcagcgccaacccttcgccgggcaacgaaaatggcgggctcgcaaacgtggt

SEQ ID NO: 144494 - DNA, 75 bp, synthetic construct
  source 1..75: mol_type = other DNA
cgattcgaacggctgaaggactcagccagaatcaattttgcaaaatcatggagataccaattagcaccttgaaaa

SEQ ID NO: 144495 - DNA, 75 bp, synthetic construct
  source 1..75: mol_type = other DNA
ggttgcgccagaagccgggcagatttccccggtcgtcgcacactctgggcaagaagaaacaacctcgtcacactc

SEQ ID NO: 144496 - DNA, 75 bp, synthetic construct
  source 1..75: mol_type = other DNA
tggtcataatagtggtgatttgttcctcattcaggttggcgagcgccttaatacgctccagcaaaatggcgaagt

SEQ ID NO: 144497 - DNA, 75 bp, synthetic construct
  source 1..75: mol_type = other DNA
ctgcgccaccctgcgtggcgataccgccatgtcgacgctgtttggtcatgtgaaaggcgcgtttaccggggcgcg

SEQ ID NO: 144498 - DNA, 75 bp, synthetic construct
  source 1..75: mol_type = other DNA
tattctcgacgtcgccagcgggaagaagaaaaccttctcggatcaatgggggctgcataaccagctggcagtgtt

SEQ ID NO: 144499 - DNA, 75 bp, synthetic construct
  source 1..75: mol_type = other DNA
tttgtctggacaacgatccttgacaatatcgcatatcaaggctctttcagcccgatttggcgttaagccggaatg

SEQ ID NO: 144500 - DNA, 75 bp, synthetic construct
  source 1..75: mol_type = other DNA
agaatgcggatatttcgtcgctgcgagaacgtattcaacagcaaatacgtggagaatatcacttaggtgatgttg

SEQ ID NO: 144501 - DNA, 75 bp, synthetic construct
  source 1..75: mol_type = other DNA
acttcaaattaatcaatgaccgttttggtcataatagtggcgatctgtttctcattcaggttggcgagcgcctta

SEQ ID NO: 144502 - DNA, 75 bp, synthetic construct
  source 1..75: mol_type = other DNA
gaagaactggttgaaccgtttttgacccgcttcgtcggtaaaattcagggcaagaatgaccgcctggccatcgtc

SEQ ID NO: 144503 - DNA, 75 bp, synthetic construct
  source 1..75: mol_type = other DNA
atgaaaaaagtcatgcatggcgaccgaattatcgcggtgatccacagtgaaaaagaacgtgaatccgcagagcca

SEQ ID NO: 144504 - DNA, 75 bp, synthetic construct
  source 1..75: mol_type = other DNA
cagcaaaaaacgccgtcgaggaagatgtgtatagcaaaatcctgatgatgaatgaggggcatcggtcggtaaaat

SEQ ID NO: 144505 - DNA, 75 bp, synthetic construct
  source 1..75: mol_type = other DNA
gccggatgacaaactacagttgattgtggcgattgccgacccaaccgcgtggatcgcagaaggcagcaagctgga

SEQ ID NO: 144506 - DNA, 75 bp, synthetic construct
  source 1..75: mol_type = other DNA
cctcggtgaaaaaggtgaagtactggatatcgttgccgaaccacgtcgtattgctaatcgtatcgtcgaagaagc

SEQ ID NO: 144507 - DNA, 75 bp, synthetic construct
  source 1..75: mol_type = other DNA
gcgcgtttcctgaaagacaaagcgggcactgacacccgttttgcggcagaaatcgtcgatatcagccggggcggt

SEQ ID NO: 144508 - DNA, 75 bp, synthetic construct
  source 1..75: mol_type = other DNA
agcctgatgggtaacctgacgcgcggctcaatgatgattgaaggacgaattgcgcgctttgtatatatctcgctg

SEQ ID NO: 144509 - DNA, 75 bp, synthetic construct
  source 1..75: mol_type = other DNA
cgggcgcggcagtcagcgctggtcgaaatggcgtccgtcactctgtctatgccagcaagaatcgttagtcatcaa

SEQ ID NO: 144510 - DNA, 75 bp, synthetic construct
  source 1..75: mol_type = other DNA
cgcccctccgcgcttacggcgttgctgggcgcagaggcagaaaacatcgatctcttcgaccgtatgcaactggaa

SEQ ID NO: 144511 - DNA, 75 bp, synthetic construct
  source 1..75: mol_type = other DNA
atgccattagttaatggacggatactgctcgaccgcattcaggaaaaacgggtattagcgggcgcgtttaatacc

SEQ ID NO: 144512 - DNA, 75 bp, synthetic construct
  source 1..75: mol_type = other DNA
tacaaagggctgactaacgaagccctgaatgtaacgctggtggaagcgggcgagcgaattttgccagcattgccg

SEQ ID NO: 144513 - DNA, 75 bp, synthetic construct
  source 1..75: mol_type = other DNA
aaatggcaaagtgaacattgcgattgtcggcggcggcgcgacgggtgtagaactctccgctgaattgcacaacgc

SEQ ID NO: 144514 - DNA, 75 bp, synthetic construct
  source 1..75: mol_type = other DNA
cttatcgccggaacggtgcgcgatttgcgccaactggttgtcgaaggcaaatttcgcgaagacctgtacgcacgg

SEQ ID NO: 144515 - DNA, 75 bp, synthetic construct
  source 1..75: mol_type = other DNA
tctctttgaccgtatgcaactggaaaacgttattgccgtttgtcgtcaggcaaaatctctttctgctgccggacg

SEQ ID NO: 144516 - DNA, 75 bp, synthetic construct
  source 1..75: mol_type = other DNA
cagcgtcacgcggatggccacctttgccactagcggacgcatcacactggatacggtggaagatgagatcaaccg

SEQ ID NO: 144517 - DNA, 75 bp, synthetic construct
  source 1..75: mol_type = other DNA
gaaaacaagaacgggagctattaaataaaatatgcattctttcaatgctggcccgtttacgtccgatacaaaaag

SEQ ID NO: 144518 - DNA, 75 bp, synthetic construct
  source 1..75: mol_type = other DNA
gtgcttgacacacaggaattagctccagttgcaattgcgctcctgctttcagtaattggtgggataggcacgttc

SEQ ID NO: 144519 - DNA, 75 bp, synthetic construct
  source 1..75: mol_type = other DNA
cggtgtttgagaccacctcaaccagcggtatctgggatctggcctgggaagcctcggaaagcctcagcctggaga

SEQ ID NO: 144520 - DNA, 75 bp, synthetic construct
  source 1..75: mol_type = other DNA
atacgtggaagcttgttgacgttccgagctggattgacaaaaaagcgttcgccagcgtcaagggaatgaatgaac

SEQ ID NO: 144521 - DNA, 75 bp, synthetic construct
  source 1..75: mol_type = other DNA
gggcagaaggtgcgtgtattggtcatcgtgaagttgatgaagtgaaggaatggactgagccgggcaacggtaatc

SEQ ID NO: 144522 - DNA, 75 bp, synthetic construct
  source 1..75: mol_type = other DNA
tggacggaagccggtgaagatggcatgaagattgttcgcgtatcttatacgtggaaactggctgacgttccttcg

SEQ ID NO: 144523 - DNA, 75 bp, synthetic construct
  source 1..75: mol_type = other DNA
ttgtcggaacggtgctggattatgccggacgcggcagccaacgctggtcgaaatggcgtccgacactgtgtttat

SEQ ID NO: 144524 - DNA, 75 bp, synthetic construct
  source 1..75: mol_type = other DNA
tcctggggttaattccggctattatcgcgcaaagtaaagggcgttcattttggggatggtggatatacggagcct

SEQ ID NO: 144525 - DNA, 75 bp, synthetic construct
  source 1..75: mol_type = other DNA
cagaaagttactggataaccagggaaataatattggtgttccgccttccgttataccggaaaatgcgatcgtcct

SEQ ID NO: 144526 - DNA, 75 bp, synthetic construct
  source 1..75: mol_type = other DNA
atgacttcagcggtgggcttaaaatgaccgctcgcgaagtgatggatattgacgaagcccgggaaaaatatgctc

SEQ ID NO: 144527 - DNA, 75 bp, synthetic construct
  source 1..75: mol_type = other DNA
gagaaattcgcgggttacggatttaacaaatcgcactctgcggcctatgctttggtgtcatatcaaacgttatgg

SEQ ID NO: 144528 - DNA, 75 bp, synthetic construct
  source 1..75: mol_type = other DNA
gtcgcgaagaaatctcctatccggacgtacagtggcagcatgaaagcctgaaaccggtactggagccaacctacg

SEQ ID NO: 144529 - DNA, 75 bp, synthetic construct
  source 1..75: mol_type = other DNA
gaacaggtggggccagagcttcctgcaaaagttgtcgaactttcttatcagaaagccaaagcaacaaaaggtgaa

SEQ ID NO: 144530 - DNA, 75 bp, synthetic construct
  source 1..75: mol_type = other DNA
gagcttcctgcaaaagttgtcgaactttcttatcagaaagccaaagcaacaaaaggtgaagtgaagggcaatatc

SEQ ID NO: 144531 - DNA, 75 bp, synthetic construct
  source 1..75: mol_type = other DNA
tccggggcgtttgaccgtcttgggccacaccgcgcggcgctgatgaactcgctgggcgatgcgttaaaagcggca

SEQ ID NO: 144532 - DNA, 75 bp, synthetic construct
  source 1..75: mol_type = other DNA
caaaaacacctttatttatataaccctggcttttcttcatcttattttaatcaattcatgtgcccattttattta

SEQ ID NO: 144533 - DNA, 75 bp, synthetic construct
  source 1..75: mol_type = other DNA
attgatatcggtgttggccggatgtcagatcctgaactgatgaccgggcttaattacgaattgctgtttctcgaa

SEQ ID NO: 144534 - DNA, 75 bp, synthetic construct
  source 1..75: mol_type = other DNA
tctggcgggtttaaaaaccggggaaatcgatatcggcattggtcggatgtcagatcctgaactgatgaccgggct

SEQ ID NO: 144535 - DNA, 75 bp, synthetic construct
  source 1..75: mol_type = other DNA
taaagatgttgcagacagctggcgctctaagggatggaatgtattgcctctttattcactgacccgccccatcaa

SEQ ID NO: 144536 - DNA, 75 bp, synthetic construct
  source 1..75: mol_type = other DNA
ttcggcactggtagccatgatcaacgccagctgtcaacgacggatgaaaagtgatccacttatatctccaccaac

SEQ ID NO: 144537 - DNA, 75 bp, synthetic construct
  source 1..75: mol_type = other DNA
cttgcgactattgcctgtggtttaacaatgattagcgtgacctgtaattgtcaacgacggatgaaaagtgatcca

SEQ ID NO: 144538 - DNA, 75 bp, synthetic construct
  source 1..75: mol_type = other DNA
cgtcgctccatggtgatgacggaagcgcaaaaagaatcgactgcttaccacgaagcaggtcacgcgattatcggt

SEQ ID NO: 144539 - DNA, 75 bp, synthetic construct
  source 1..75: mol_type = other DNA
gatgttcgtggtcgtgagcagatcctgaaagttcacatgcgtcgcgtacctttggcacccgatatcgacgcggca

SEQ ID NO: 144540 - DNA, 75 bp, synthetic construct
  source 1..75: mol_type = other DNA
cgcagaaagaatcgactgcttaccacgaagctggccacgcgattattggtcgtctggtgccggaacacgatccgg

SEQ ID NO: 144541 - DNA, 75 bp, synthetic construct
  source 1..75: mol_type = other DNA
aagatattgaaccgaacctggattatgaagtggagcgccacgcctcactcactggcgacagcgtgcgttttaaca

SEQ ID NO: 144542 - DNA, 75 bp, synthetic construct
  source 1..75: mol_type = other DNA
gccgatagcgggcgcattactctggaaaccgtagaagatgagataaaccgtctgcgctataactggcaggagagt

SEQ ID NO: 144543 - DNA, 75 bp, synthetic construct
  source 1..75: mol_type = other DNA
ggattattacgcagcgccaacggcgggatgttatttcttgatgagattggcgaactgggcgcagacgaacaggcg

SEQ ID NO: 144544 - DNA, 75 bp, synthetic construct
  source 1..75: mol_type = other DNA
gctgcgacgaagcaaaagaagaagttgctgaactggtagagtatctgcgcgagccgagccgcttccagaaactcg

SEQ ID NO: 144545 - DNA, 75 bp, synthetic construct
  source 1..75: mol_type = other DNA
aggtggattactctaccttcctacaagaggtcaataacgaccaggttcgtgaagcgcgtatcaacggacgtgaaa

SEQ ID NO: 144546 - DNA, 75 bp, synthetic construct
  source 1..75: mol_type = other DNA
atggataatttcgcgcagaaacatcaggttgcgtctggtgctgactggaatattgatgtgaagaagtgcgctaag

SEQ ID NO: 144547 - DNA, 75 bp, synthetic construct
  source 1..75: mol_type = other DNA
aaaacgctgctggcgaaagccattgcaggtgaagcgaaagttccgttctttaccatctccggttctgacttcgta

SEQ ID NO: 144548 - DNA, 75 bp, synthetic construct
  source 1..75: mol_type = other DNA
gggcccagcgagtctaatggtcgtaaggtggattactctaccttcctacaagaggtcaataacgaccaggttcgt

SEQ ID NO: 144549 - DNA, 75 bp, synthetic construct
  source 1..75: mol_type = other DNA
gaagtgaaagcactgattgagcgtaactataatcgtgcgcgtcagcttctgaccgacaatatggatattctgcat

SEQ ID NO: 144550 - DNA, 75 bp, synthetic construct
  source 1..75: mol_type = other DNA
acacgggattgcctgtgggtaaggccagtatccggtgatccgagtgtggaaattaccggagcgggtatcggtgcg

SEQ ID NO: 144551 - DNA, 75 bp, synthetic construct
  source 1..75: mol_type = other DNA
atttaatcagccggacaaaagcggcgctggcgaagaacccgaaaaaccgcctgcttgccgtggtgtggatgcagg

SEQ ID NO: 144552 - DNA, 75 bp, synthetic construct
  source 1..75: mol_type = other DNA
gcgcgcttacggctaatcagtacgcactggcgctgtactggccggtttcttcgctgcctcagggcgtcacactgg

SEQ ID NO: 144553 - DNA, 75 bp, synthetic construct
  source 1..75: mol_type = other DNA
gcatacgctgggcttccgttttgccggtaacaacagtattgaggtgacgccggtcattgatggtaaggacgggac

SEQ ID NO: 144554 - DNA, 75 bp, synthetic construct
  source 1..75: mol_type = other DNA
ggctacaaaggcaaggaagcacagaatattttctttgtaccgttcctgacagatgaaaacggcgcaaacacgcca

SEQ ID NO: 144555 - DNA, 75 bp, synthetic construct
  source 1..75: mol_type = other DNA
aatgcgggcattctgctggttccgtgctgtcgtggtggttcagcgttcaccaccggagctgatggcacatacagt

SEQ ID NO: 144556 - DNA, 75 bp, synthetic construct
  source 1..75: mol_type = other DNA
accctgacaggggatgcagggaataatctgctggcagcgttctacatccagacggatgcaaaagacctgaatgtg

SEQ ID NO: 144557 - DNA, 75 bp, synthetic construct
  source 1..75: mol_type = other DNA
gaaccgtggggcaggggctgcatattgccaaaaagctgctgccgtttataccggcgaatgcgggtattcttctgg

SEQ ID NO: 144558 - DNA, 75 bp, synthetic construct
  source 1..75: mol_type = other DNA
tcgcagcacagtgacgccggatggcgctccctgtaaatataacgacattattccggcagaccactgtctgcatga

SEQ ID NO: 144559 - DNA, 75 bp, synthetic construct
  source 1..75: mol_type = other DNA
ctggcgcaccgacgccatcaccgtcagaaaatgaagcggtaagcacaacaacactgctgtcttaccgtgccagtg

SEQ ID NO: 144560 - DNA, 75 bp, synthetic construct
  source 1..75: mol_type = other DNA
ccgaccgtctggcaacggcgattctgattcatgcgggacgaaccacagtaaaagtcgatgctccatcttctgaaa

SEQ ID NO: 144561 - DNA, 75 bp, synthetic construct
  source 1..75: mol_type = other DNA
taaactgcatgtgacagacattaccaaaggtgcgacttacccggtactgatagacagcattacggtggaagtgaa

SEQ ID NO: 144562 - DNA, 75 bp, synthetic construct
  source 1..75: mol_type = other DNA
attaacgctctggctgtttctgatccgctagttgttccgctgtcatttacacgcaactttggtaaagaaccagca

SEQ ID NO: 144563 - DNA, 75 bp, synthetic construct
  source 1..75: mol_type = other DNA
caggtatcagcgcaaatcagggaaaatcttatcctgtcatgttccgcagtatcatggtaagcattaaccaggcaa

SEQ ID NO: 144564 - DNA, 75 bp, synthetic construct
  source 1..75: mol_type = other DNA
gaccgtcacgccgtatcagaatcgtcgctttgattcctgcttcctgacggcgaaaaaagcgattgaaagcggcaa

SEQ ID NO: 144565 - DNA, 75 bp, synthetic construct
  source 1..75: mol_type = other DNA
acatcctcaacggcaccttttgctatcaccgtaactacctgaaaaagcaccgctacgatgacgattgcaatttag

SEQ ID NO: 144566 - DNA, 75 bp, synthetic construct
  source 1..75: mol_type = other DNA
tggggggcggtgcaggcgcggcttacggagattcgccatcactattgcgatgcgtttatggatggcaaggcggga

SEQ ID NO: 144567 - DNA, 75 bp, synthetic construct
  source 1..75: mol_type = other DNA
aaacaccgggcgctcatctccggttccgaccagatccccatctggtacagccacatcaaccgcattttcaaaagc

SEQ ID NO: 144568 - DNA, 75 bp, synthetic construct
  source 1..75: mol_type = other DNA
gacagccacttcgagtacgcgaaacgcgcgctggaagccgggaaaaatgtgctggtcgaaaaaccgttcaccccg

SEQ ID NO: 144569 - DNA, 75 bp, synthetic construct
  source 1..75: mol_type = other DNA
ctttgcagattgtgtgatccgcttcagcacgaaagagccattatgggtaatgcctgtgtccggtacccccagtgc

SEQ ID NO: 144570 - DNA, 75 bp, synthetic construct
  source 1..75: mol_type = other DNA
tgccttatatcccgcagaatgccgggatacttctggtgccctgttgccgtggtgggtcagcatttaccaccgggg

SEQ ID NO: 144571 - DNA, 75 bp, synthetic construct
  source 1..75: mol_type = other DNA
gacagccatttcgagtacgcgaagcgcgcgctggaagccgggaaaaatgtgctggtcgaaaaaccgttcactccg

SEQ ID NO: 144572 - DNA, 75 bp, synthetic construct
  source 1..75: mol_type = other DNA
cgatctaaaagccatcgtcaaaaccagccatctggtgaaaatcgattatccgaaatttatcgttcacggtaagaa

SEQ ID NO: 144573 - DNA, 75 bp, synthetic construct
  source 1..75: mol_type = other DNA
ggcgtgcataccctcgaccagattatttcactgtttggtcgcccggatcatgtggcttacgatattcgcagcctg

SEQ ID NO: 144574 - DNA, 75 bp, synthetic construct
  source 1..75: mol_type = other DNA
taaggcgctgaggtggaccaaacagacaggaagttcctcgtggtttatgcagcatgatgtcggtaatggcgcaga

SEQ ID NO: 144575 - DNA, 75 bp, synthetic construct
  source 1..75: mol_type = other DNA
accgtcttgcctcagcgattcttctccatgcaggacggacggctgaactggtgggtggggaacaggttgtgatgc

SEQ ID NO: 144576 - DNA, 75 bp, synthetic construct
  source 1..75: mol_type = other DNA
cagcgttctacatccagacagatgcaaaagacctgaatgtgatgtaccacaatgcgaaagtggcgacaaacaacc

SEQ ID NO: 144577 - DNA, 75 bp, synthetic construct
  source 1..75: mol_type = other DNA
agtttggtgcgctggttgataaattccgtgcagacctgacggatatggcaggtcagtgcgttggtggctctgctg

SEQ ID NO: 144578 - DNA, 75 bp, synthetic construct
  source 1..75: mol_type = other DNA
tgttcaggatttgagtaagttttcacacccgaaagccagcgcagctcagtatggatgcgtggggcagggattaca

SEQ ID NO: 144579 - DNA, 75 bp, synthetic construct
  source 1..75: mol_type = other DNA
atggtgcgcttacggctaatcagtacgcactggcgctgtactggccggtttctggtctgccacaaggggttactc

SEQ ID NO: 144580 - DNA, 75 bp, synthetic construct
  source 1..75: mol_type = other DNA
accgtctggcctcagctattctgctccatgcaggacgcacggctgaactgatgggcggacagaccgtaacatcac

SEQ ID NO: 144581 - DNA, 75 bp, synthetic construct
  source 1..75: mol_type = other DNA
ctcgcgcggtgcactcgagtctttgctaacagtcgaattgaccactttgcagatcgctatagcactcggtgagga

SEQ ID NO: 144582 - DNA, 75 bp, synthetic construct
  source 1..75: mol_type = other DNA
gttgtacgtgaggaagacggtaaactctatattgacattgccaaaaatattcggttgtacatacctgagaataaa

SEQ ID NO: 144583 - DNA, 75 bp, synthetic construct
  source 1..75: mol_type = other DNA
tggggcagggattacatatcgcgaagaaattgttgccgtttattccggcgaatgccggtattcttctggttccgt

SEQ ID NO: 144584 - DNA, 75 bp, synthetic construct
  source 1..75: mol_type = other DNA
gagtattactttgttgttgccctggccgggcagtcaaacggtatggcgtatggtgaagggcttccgctgccggag

SEQ ID NO: 144585 - DNA, 75 bp, synthetic construct
  source 1..75: mol_type = other DNA
tggactgccggtggtggcaaggctcaaatcgtggatgatgccggagccagcgggggtaaggcaatgaaactgacc

SEQ ID NO: 144586 - DNA, 75 bp, synthetic construct
  source 1..75: mol_type = other DNA
atgcgcgggcagaccgtgacaccaccggatgagaagccgtcacctgatacaccatcaaaaccgtccacgccaccc

SEQ ID NO: 144587 - DNA, 75 bp, synthetic construct
  source 1..75: mol_type = other DNA
acagcgtgacagccatttcagctcatgggcacgcaggggcgtcatttcagaccgtctggcctcagctattatgct

SEQ ID NO: 144588 - DNA, 75 bp, synthetic construct
  source 1..75: mol_type = other DNA
gcccgaaacctgtgaccgtccggacccgcgaattaagcaactggcgcgtcgcagtacggtaactccgggcggcga

SEQ ID NO: 144589 - DNA, 75 bp, synthetic construct
  source 1..75: mol_type = other DNA
ggtgaaactaccgggatgacaacactgtttgcatacagggccagcgattcggaaggacaactgactccacagggc

SEQ ID NO: 144590 - DNA, 75 bp, synthetic construct
  source 1..75: mol_type = other DNA
tcagggcggcgtcgccgtcagatcttgcggaaaagctgacacacaaaactgaagagggctggcagccatttggca

SEQ ID NO: 144591 - DNA, 75 bp, synthetic construct
  source 1..75: mol_type = other DNA
gccgtggatttgtggtgacacgacgtattactggaaaaatacatacgctacccagtacgacaccgtgtacggcgg

SEQ ID NO: 144592 - DNA, 75 bp, synthetic construct
  source 1..75: mol_type = other DNA
ggaacctttggcgcatttgataatgagtggcatacgctggccttccgctttgccgggaataacagccttcaggtg

SEQ ID NO: 144593 - DNA, 75 bp, synthetic construct
  source 1..75: mol_type = other DNA
acaaaagcagcactgaagaagaacccgaaaaatgtgctgtttaccgtggtgtggatgcagggggaatttgatttt

SEQ ID NO: 144594 - DNA, 75 bp, synthetic construct
  source 1..75: mol_type = other DNA
ttgctgctgttgaaacaggtaccttgagccgttcgtcttcactgcttattcaggcgggttttagctctaggcttg

SEQ ID NO: 144595 - DNA, 75 bp, synthetic construct
  source 1..75: mol_type = other DNA
ggggcattattcctgatcgtctggcaactgctattctgaacgcagttggtcgaaccagcgccttcatcagcggta

SEQ ID NO: 144596 - DNA, 75 bp, synthetic construct
  source 1..75: mol_type = other DNA
ggcgacacgccatcggggccgtctgaagatgcatccgtacgcacaatctccctgttgccgacagccggagacgct

SEQ ID NO: 144597 - DNA, 75 bp, synthetic construct
  source 1..75: mol_type = other DNA
actggcttgcggaacaacagcttgatgcggtgcttctctcttcacggcagaacaagcagccacatctgggactct

SEQ ID NO: 144598 - DNA, 75 bp, synthetic construct
  source 1..75: mol_type = other DNA
tgatggcgtttgtcgtcgttgcagaggagcgtagcttcactcgcgcagcagcccgcctgagcatggcgcagtcag

SEQ ID NO: 144599 - DNA, 75 bp, synthetic construct
  source 1..75: mol_type = other DNA
cagcgacaagattgttgcagcgggcgagtttgtcactctcgatttcggtgcgctgtatcagggctactgctctga

SEQ ID NO: 144600 - DNA, 75 bp, synthetic construct
  source 1..75: mol_type = other DNA
ctaaaacaccgcgcagtacgcttatcaccagcttcgaactggaaccggtcgatggcggcccggtagcagaatacc

SEQ ID NO: 144601 - DNA, 75 bp, synthetic construct
  source 1..75: mol_type = other DNA
cacaagtgaactggttccatgcggcagaaaatggcgatgttcacgcctttgccgatgaagttaaggaactggggc

SEQ ID NO: 144602 - DNA, 75 bp, synthetic construct
  source 1..75: mol_type = other DNA
cagccgagtgaagccgatcgcgcgaaaggtcagtttgatagcgaaggtctgatggatctgagcaaactcgaaggt

SEQ ID NO: 144603 - DNA, 75 bp, synthetic construct
  source 1..75: mol_type = other DNA
atgatcgattcagatgtcattttgcagttaatccgggattttatgcgccagaccgttgaacggcagcataatacc

SEQ ID NO: 144604 - DNA, 75 bp, synthetic construct
  source 1..75: mol_type = other DNA
atggcacaggttaatatgagtttaagaattgacgctgaactgaaagatgcttttatggccgctgcaaaaaacatg

SEQ ID NO: 144605 - DNA, 75 bp, synthetic construct
  source 1..75: mol_type = other DNA
tcgcaagcaatcgagtcaaccagttctacatcattgacagtgccacatacgttgtaaagacagtagcatatcccg

SEQ ID NO: 144606 - DNA, 75 bp, synthetic construct
  source 1..75: mol_type = other DNA
gtaatgccacgcgaaccacagacgcatttctggaaacggagtgcgtggaaaatgtcgccacaaccgaaatcaata

SEQ ID NO: 144607 - DNA, 75 bp, synthetic construct
  source 1..75: mol_type = other DNA
gagcaattaacattattaggatttactgatgaatttattgaaaaaactcagcaaaacctgatcgatggttgttac

SEQ ID NO: 144608 - DNA, 75 bp, synthetic construct
  source 1..75: mol_type = other DNA
cagcgttggcggcgattccttacaacagcccttcttctggaccggtgaattctcatggggttggctgaacaacgt

SEQ ID NO: 144609 - DNA, 75 bp, synthetic construct
  source 1..75: mol_type = other DNA
ctactccacgccggagagcgccgatcagcaaatccgcgaaatattgccggtggctcatgatatggcagagttgcg

SEQ ID NO: 144610 - DNA, 75 bp, synthetic construct
  source 1..75: mol_type = other DNA
gctacgcgccgacaaatggctggcctgttacccgagcctttgttaccagcgaccgggctttagcgatatcgagaa

SEQ ID NO: 144611 - DNA, 75 bp, synthetic construct
  source 1..75: mol_type = other DNA
aaagatcacccgtcttgccgcctgtgaggatgaaaacagtcaactgggtcgccgccagtcgcacttacaggcgct

SEQ ID NO: 144612 - DNA, 75 bp, synthetic construct
  source 1..75: mol_type = other DNA
agctggcggagattcgccatcactattgcgacgcgtttatggatggcaaggcgggggaacgggcggcaatggtga

SEQ ID NO: 144613 - DNA, 75 bp, synthetic construct
  source 1..75: mol_type = other DNA
agcctttgttatcagcgaccgggctttagcgatatccagaaaaaaacgactgataatattgctcgctatttcaat

SEQ ID NO: 144614 - DNA, 75 bp, synthetic construct
  source 1..75: mol_type = other DNA
gctgaatctggataaacgcccggatcgtttacggcagatccgtgaagagctggcattgctgcatattccgcctga

SEQ ID NO: 144615 - DNA, 75 bp, synthetic construct
  source 1..75: mol_type = other DNA
ctctcgccgctgttgcgggccgcgatagacgccttcgacgaagccgatccggacgcagcgttcgagcagggactc

SEQ ID NO: 144616 - DNA, 75 bp, synthetic construct
  source 1..75: mol_type = other DNA
caccctgacatctatgagctgttgcatgcaacgcctaacggagggaaacgttcaaaagcaaccgccgggaaaatg

SEQ ID NO: 144617 - DNA, 75 bp, synthetic construct
  source 1..75: mol_type = other DNA
atgcaacgcctaacggagggaaacgttcaaaagcaaccgccgggaaaatgaaggctgaagggcagaaaaaaggtt

SEQ ID NO: 144618 - DNA, 75 bp, synthetic construct
  source 1..75: mol_type = other DNA
acgcggttattctcaagcaggagaaacatattcaggtactgaacacgctgctggcgagcctggcgaaaattccct

SEQ ID NO: 144619 - DNA, 75 bp, synthetic construct
  source 1..75: mol_type = other DNA
cactagctacccaccgcgaaaaacccttcgtcagcgtcgtcacgccaacctggaaccgcagcgcattcctgccgt

SEQ ID NO: 144620 - DNA, 75 bp, synthetic construct
  source 1..75: mol_type = other DNA
gcagccgctgctacgcgccgacaaatggctggcctgttacccgagcctttgttaccaacgaccgggctttagtga

SEQ ID NO: 144621 - DNA, 75 bp, synthetic construct
  source 1..75: mol_type = other DNA
taaaataagcaatcctaaaattgaagagaatgttggtgatttcaggctgatgagccgtgatgttgtcgaaaatat

SEQ ID NO: 144622 - DNA, 75 bp, synthetic construct
  source 1..75: mol_type = other DNA
ggctaagcgctcagaccgttctacagacggaagactgaagcgcatgactgctgagtggttctataaacttcacaa

SEQ ID NO: 144623 - DNA, 75 bp, synthetic construct
  source 1..75: mol_type = other DNA
ttatggtgcatggatgattttagataagctgatatttggaaatgatgttcctgggtatccatcaattattgtgtc

SEQ ID NO: 144624 - DNA, 75 bp, synthetic construct
  source 1..75: mol_type = other DNA
ataaattctattgcctcttgggatcctcttgtggttgcattatcgttcacccggaattttgggaaggaaccagct

SEQ ID NO: 144625 - DNA, 75 bp, synthetic construct
  source 1..75: mol_type = other DNA
tcttcaatgaggaagccacgataccgatcttttataaaacggtaagagagtttgaagagttacagcaatatgatg

SEQ ID NO: 144626 - DNA, 75 bp, synthetic construct
  source 1..75: mol_type = other DNA
aatacattggacgcatatacatagaaaccaaaaaaagaccaaagtacatactaaagaaaggtgaaaataggaatg

SEQ ID NO: 144627 - DNA, 75 bp, synthetic construct
  source 1..75: mol_type = other DNA
aatcctctttttaggcggtgtacaactgattgggataggggttcttggtgagtatataggtagaatatatataga

SEQ ID NO: 144628 - DNA, 75 bp, synthetic construct
  source 1..75: mol_type = other DNA
agggatatacatcgataatggtatcgatgctattccttggcggcgttcagctgataggtattggagtgctcggcg

SEQ ID NO: 144629 - DNA, 75 bp, synthetic construct
  source 1..75: mol_type = other DNA
tcgacgcctggcataacggcacgctcgatcgcgcgttgccggaaaatatccaaccagatgttcgtaaacctacga

SEQ ID NO: 144630 - DNA, 75 bp, synthetic construct
  source 1..75: mol_type = other DNA
tgtcccgtgatattgttgagaatatacgtcaattaccagaaagaaacctgtttatgaaaggtgttctcagttggg

SEQ ID NO: 144631 - DNA, 75 bp, synthetic construct
  source 1..75: mol_type = other DNA
cttcgtatatggacatatataggattattcattgctggatgctcatttatatatggtgcatggatgatatttgac

SEQ ID NO: 144632 - DNA, 75 bp, synthetic construct
  source 1..75: mol_type = other DNA
cattcttttcttaggagggattcaactcattggaattggcgtgcttggtgaatatataggaagaatttacataga

SEQ ID NO: 144633 - DNA, 75 bp, synthetic construct
  source 1..75: mol_type = other DNA
caccggtcagtgcatttgcggcggataaactgcatgtgacagacattaccaaaggtgcgacttacccggtgctga

SEQ ID NO: 144634 - DNA, 75 bp, synthetic construct
  source 1..75: mol_type = other DNA
gttcaccaccggagctgatggcacatacagtgacgcgagtggtgcctcggagaattcaacccgctggggtgtgga

SEQ ID NO: 144635 - DNA, 75 bp, synthetic construct
  source 1..75: mol_type = other DNA
atgtaccacaatgcgaaagtgaaccgccccggttttcctggagagtgttttatctgtgaactcaggctgccagat

SEQ ID NO: 144636 - DNA, 75 bp, synthetic construct
  source 1..75: mol_type = other DNA
ttttatggccgctgcaaaaagcatggaccgtaatggctcccagttaatccgggattttatgcgccagaccgttga

SEQ ID NO: 144637 - DNA, 75 bp, synthetic construct
  source 1..75: mol_type = other DNA
gaatcgacgctgaactgaaggatgcttttatggccgctgcaaaaagcatggatcgtaatggctcccagttaatca

SEQ ID NO: 144638 - DNA, 75 bp, synthetic construct
  source 1..75: mol_type = other DNA
atgacatttaaacattatgatgttgtcagggcggcgtcgccgtcagaccttgctgatgcacttgctcaaaaaatt

SEQ ID NO: 144639 - DNA, 75 bp, synthetic construct
  source 1..75: mol_type = other DNA
agtacattggacgaatttatattgaaacaaagcaaaggccgaaatatcttttaaagagttctaaaaatgaaaaat

SEQ ID NO: 144640 - DNA, 75 bp, synthetic construct
  source 1..75: mol_type = other DNA
aattttttataaaacggtacgtgaattcgaagagttgaagccatatgaagtggaaattgtttttataaatgatgg

SEQ ID NO: 144641 - DNA, 75 bp, synthetic construct
  source 1..75: mol_type = other DNA
tgtcgcgtgaagttgtcgagaacataaaaaaattgccagagcgcaatctttttatgaagggagtccttagctggg

SEQ ID NO: 144642 - DNA, 75 bp, synthetic construct
  source 1..75: mol_type = other DNA
atccatttcgtaccgttcatgaccgatgagaacggggtgaatgtgccgacgaacaaaccggaagaagacccggac

SEQ ID NO: 144643 - DNA, 75 bp, synthetic construct
  source 1..75: mol_type = other DNA
gaccttatcggtcgaacaaaagcagcactgaagaagaatccgaaaaatgtgctgtttgccgtggtgtggatgcag

SEQ ID NO: 144644 - DNA, 75 bp, synthetic construct
  source 1..75: mol_type = other DNA
aatcaccagcttctctaccttaccactgagaatgtggacatacattggcctttttgtcgccagtctgtcatttat

SEQ ID NO: 144645 - DNA, 75 bp, synthetic construct
  source 1..75: mol_type = other DNA
agttcatgggccaacatcttcccggatgaaattggcagtttctacaactttaatggcaatttcccacaaaccgac

SEQ ID NO: 144646 - DNA, 75 bp, synthetic construct
  source 1..75: mol_type = other DNA
aaagaaataaaggtacgccacagggtggagtcatcagcccggtactggcgaatttatttctgcactatgtgtttg

SEQ ID NO: 144647 - DNA, 75 bp, synthetic construct
  source 1..75: mol_type = other DNA
caaagatacagtcagtgctggcttatgatgcgaatgcggaaaatgccgatctggcttcgcagggctggacgctga

SEQ ID NO: 144648 - DNA, 75 bp, synthetic construct
  source 1..75: mol_type = other DNA
gcgggaaggttatcagttgccgccgggccagctggcgccggtaccggccggtgtcaggggcgcaggagcggggct

SEQ ID NO: 144649 - DNA, 75 bp, synthetic construct
  source 1..75: mol_type = other DNA
atgtgtctcgcgcagcgatgatagcttgtgtctggtgtatgaacatctcagcggtgtttatcactatcgggtaag

SEQ ID NO: 144650 - DNA, 75 bp, synthetic construct
  source 1..75: mol_type = other DNA
tttccgttgtcgccgcaaacgcggattcaggcacaggcgagcagctaccgcaggaactggattttaaccagcccg

SEQ ID NO: 144651 - DNA, 75 bp, synthetic construct
  source 1..75: mol_type = other DNA
atgaccatctataccttatctcacggggggctcacgctggacgtttctgaccagggcggtgtcatagaaggtttc

SEQ ID NO: 144652 - DNA, 75 bp, synthetic construct
  source 1..75: mol_type = other DNA
aggacttagagcagaaatcgaaagcgcagcagcagagtaccggcgagatgctgaaagccgcattcagcgagcacg

SEQ ID NO: 144653 - DNA, 75 bp, synthetic construct
  source 1..75: mol_type = other DNA
atgagcaatctttttacggcctcgagggacttcgaggagaaattgaaagcgcagcagcagagtaccggcgagatg

SEQ ID NO: 144654 - DNA, 75 bp, synthetic construct
  source 1..75: mol_type = other DNA
ccattccgatgaatacctgatcaaagggattcaggagagcgcgaagcactcctggtataaagacgaagcaccgca

SEQ ID NO: 144655 - DNA, 75 bp, synthetic construct
  source 1..75: mol_type = other DNA
agtcatttaacggcagcctgcgtgatgaatgtctgaacgtgcactggttcctgtcactggaagatgctcaggagt

SEQ ID NO: 144656 - DNA, 75 bp, synthetic construct
  source 1..75: mol_type = other DNA
atgattaacctgttaatcgtcgttctgcatgtcgtagctgcgctgtcaaatgcgctgattgcggtactggaactg

SEQ ID NO: 144657 - DNA, 75 bp, synthetic construct
  source 1..75: mol_type = other DNA
ggcgtgaggtatcaggaagacaaccaggggcgttttctggtgctgccggaaggcgtgaaagcggacacgaactgg

SEQ ID NO: 144658 - DNA, 75 bp, synthetic construct
  source 1..75: mol_type = other DNA
atggaaggctgttgccagcaagtgaactggaggcgttacgtaatgtcgcaagaagcaatcagagtgatgtgcttt

SEQ ID NO: 144659 - DNA, 75 bp, synthetic construct
  source 1..75: mol_type = other DNA
tggctggaggtcgtcgttttcgactttatcatatttcatttatggacggatttagtgtagagcccattcctggca

SEQ ID NO: 144660 - DNA, 75 bp, synthetic construct
  source 1..75: mol_type = other DNA
aacttagccacgagattatgaaaattagatttaataatgagtttaacaaaacacacaagctaacgcattccgaac

SEQ ID NO: 144661 - DNA, 75 bp, synthetic construct
  source 1..75: mol_type = other DNA
gcaaatgagtctgaaaaatacgttcgaggctattgctcgcgaatggcaccagtcaaaagctgatcggtggtcatt

SEQ ID NO: 144662 - DNA, 75 bp, synthetic construct
  source 1..75: mol_type = other DNA
ttgttggaagccggagttttcgacttcatcatatttcatttatggacggatttagtgtggagcccattccgggcg

SEQ ID NO: 144663 - DNA, 75 bp, synthetic construct
  source 1..75: mol_type = other DNA
ccccggaaatgatagtcctcaaagaggaatgcaattttattccggcagaacaacacttctgcgtacactccgggc

SEQ ID NO: 144664 - DNA, 75 bp, synthetic construct
  source 1..75: mol_type = other DNA
ttcccagctgatatcgtcgttaaatgtgttgctgaaacaggcgctaacctggaatggctagctactggtcacggc

SEQ ID NO: 144665 - DNA, 75 bp, synthetic construct
  source 1..75: mol_type = other DNA
catggcgaacaggattcaattgggttccttccttttctgtacgcgataccctgtatggtaaattcaaaaatttta

SEQ ID NO: 144666 - DNA, 75 bp, synthetic construct
  source 1..75: mol_type = other DNA
acggggtgaatgtgccgacgaacaaaccggaagaagacccggatattccgggtatcgggtattacggttcaaaat

SEQ ID NO: 144667 - DNA, 75 bp, synthetic construct
  source 1..75: mol_type = other DNA
tggtgctaatgatgatatacttgatttaataaatgaatctgatatcgttatatctgattatagtggagcaatatt

SEQ ID NO: 144668 - DNA, 75 bp, synthetic construct
  source 1..75: mol_type = other DNA
aatgattcaatatggttatgcaaaagagccccacaattatggagcatggcgagctttgggagatctttgtttaac

SEQ ID NO: 144669 - DNA, 75 bp, synthetic construct
  source 1..75: mol_type = other DNA
aatacttcgcaacggtgatcttcgcgccgattatgggctggctgacgcatgaagtgggctggtcacacgtcttct

SEQ ID NO: 144670 - DNA, 75 bp, synthetic construct
  source 1..75: mol_type = other DNA
acagcacggcgtgatgcaggtgcgcatggatttgcgcgatgatgaggggttgttaagcaatggtcgcgtctggct

SEQ ID NO: 144671 - DNA, 75 bp, synthetic construct
  source 1..75: mol_type = other DNA
gatcgctgccctgctggttagcggcctgcgtattgctttaccgcatcttgacgcctggcgtccggaaatcctcaa

SEQ ID NO: 144672 - DNA, 75 bp, synthetic construct
  source 1..75: mol_type = other DNA
gggtacgccttgcggcggtggtgttacaaatcatgccgcaagcaaatccctcgggacaattgctgttgctggatg

SEQ ID NO: 144673 - DNA, 75 bp, synthetic construct
  source 1..75: mol_type = other DNA
gaacgaagcattaagtggcagcgtggcgtgggatggtaaagtgggcattgagctgccttatcatgctggcgcgac

SEQ ID NO: 144674 - DNA, 75 bp, synthetic construct
  source 1..75: mol_type = other DNA
ctgcgcttattgagcgttgatgccctgatgcgtaagctgcgttttgatttcagagacacctttggcgaagggttc

SEQ ID NO: 144675 - DNA, 75 bp, synthetic construct
  source 1..75: mol_type = other DNA
tacttaagtggcgcgattcagggcggtgaagcggataacgcgacgctggtttatggtggcaatccgcaactcttc

SEQ ID NO: 144676 - DNA, 75 bp, synthetic construct
  source 1..75: mol_type = other DNA
agcgattaccgcaggcaatttaaaaactgttttgcggaacaagaaatcctatctgaatttcctcaaccggtaagt

SEQ ID NO: 144677 - DNA, 75 bp, synthetic construct
  source 1..75: mol_type = other DNA
ctgataaaagatattcttttctatctgaataataattatcgcgaaaaaatcactttagaacagttatcgaaaaaa

SEQ ID NO: 144678 - DNA, 75 bp, synthetic construct
  source 1..75: mol_type = other DNA
ggtacatcgtttagcggatgacgcgctgaacggcgtaactggtctggttgagtatcacgagcacttcaatcgctt

SEQ ID NO: 144679 - DNA, 75 bp, synthetic construct
  source 1..75: mol_type = other DNA
ctggcgcaggcctatgggatgaatttccgccgtctggacattgaaggtcacagaatgctgatttcgacagcctga

SEQ ID NO: 144680 - DNA, 75 bp, synthetic construct
  source 1..75: mol_type = other DNA
agtccggacatcacgttcatgacaatgaaaccgagctgatttacgtcaagaaaggggtagcaaggtttaccatcg

SEQ ID NO: 144681 - DNA, 75 bp, synthetic construct
  source 1..75: mol_type = other DNA
atattcttttctatctgaataataattatcgcgaaaaaaatcactttagaacagttatcgaaaaaatttcgtgcc

SEQ ID NO: 144682 - DNA, 75 bp, synthetic construct
  source 1..75: mol_type = other DNA
accgactttctacggcaaaacggtagaagtggggccgctggctaacatgctggtgaaactggcggcaggacgcga

SEQ ID NO: 144683 - DNA, 75 bp, synthetic construct
  source 1..75: mol_type = other DNA
taaaaacggcagcttcctgttcccgggcggctacattgagaatgcggatctgtcctcgtatcgtccgatcacttc

SEQ ID NO: 144684 - DNA, 75 bp, synthetic construct
  source 1..75: mol_type = other DNA
taacgaattcaaaatggcgctggcactcgatctccgacaagtacagtctgtagagcacggcggtgatgagattgg

SEQ ID NO: 144685 - DNA, 75 bp, synthetic construct
  source 1..75: mol_type = other DNA
tggtgaaactggcggcaggtcgcgaatctacccagaacaaactgaatgaaatcgttgcgatttatcagaaactga

SEQ ID NO: 144686 - DNA, 75 bp, synthetic construct
  source 1..75: mol_type = other DNA
cgcgatgcctggatgattgtgcaacgtatctgtggcgtatgtaccaccactcacgcgctctcttctgttcgtgcg

SEQ ID NO: 144687 - DNA, 75 bp, synthetic construct
  source 1..75: mol_type = other DNA
acggtaaatactcctgggtgaaatcaccgactttctacggcaaaacggtagaagtgggtccgctggctaacatgc

SEQ ID NO: 144688 - DNA, 75 bp, synthetic construct
  source 1..75: mol_type = other DNA
aatcaacgccacgctggcgatgcgtaataacgcgccgtggctggcgaatatcaaatatctttattacaacccaag

SEQ ID NO: 144689 - DNA, 75 bp, synthetic construct
  source 1..75: mol_type = other DNA
caatctggaactggctgggctggaaggcatacgcccgttggcagcgaaactttcacctgctttgggggatatctg

SEQ ID NO: 144690 - DNA, 75 bp, synthetic construct
  source 1..75: mol_type = other DNA
acatcagcgatctttttctacgccagttcgatcacttcgatctccgcgatagcgaagtcagctttctgacgccat

SEQ ID NO: 144691 - DNA, 75 bp, synthetic construct
  source 1..75: mol_type = other DNA
tgagattgcgccagagcgttgatggatatagtcgaactcaacagaagctgggagagtttgtacttagcgatccgg

SEQ ID NO: 144692 - DNA, 75 bp, synthetic construct
  source 1..75: mol_type = other DNA
cttcctcatctggcgcaaaacgagcatacagaaagggtaaacctttgagtgaagcagagcggcagagggctgctt

SEQ ID NO: 144693 - DNA, 75 bp, synthetic construct
  source 1..75: mol_type = other DNA
taatctggaactggcgggactggaaggcgtacgcccgctggtggcgaaactttcgcctgtgctgggagacatctg

SEQ ID NO: 144694 - DNA, 75 bp, synthetic construct
  source 1..75: mol_type = other DNA
cgcatcgaggaagccgggaacaagacggagaatcatgccgcgctatggggctgtatccgttcacgcacacagcgc

SEQ ID NO: 144695 - DNA, 75 bp, synthetic construct
  source 1..75: mol_type = other DNA
tattaccccgagggaatgcacagccagaaacgcgaggagtggcgcgaatatctggaacgagagcgccagaaaaga

SEQ ID NO: 144696 - DNA, 75 bp, synthetic construct
  source 1..75: mol_type = other DNA
aatagacctgcgttagaaaaagacagtgaagcattaaaagcgctcactgaattagaacgcatttacaatatgccc

SEQ ID NO: 144697 - DNA, 75 bp, synthetic construct
  source 1..75: mol_type = other DNA
aatctccgcagatggtctggatagtctggtcccgttctggcgcttctattcagcgattgaaagcttcctggaacc

SEQ ID NO: 144698 - DNA, 75 bp, synthetic construct
  source 1..75: mol_type = other DNA
tattcaatattgactcacgtgcgaatgttgaagatggcgttgatgccatactcaaagtctttctgaaagtcttta

SEQ ID NO: 144699 - DNA, 75 bp, synthetic construct
  source 1..75: mol_type = other DNA
cactggtcgccactggggaggccgcagggtggcgcatggttcggtgatgtatgttgtcggtgaaggtggcattgg

SEQ ID NO: 144700 - DNA, 75 bp, synthetic construct
  source 1..75: mol_type = other DNA
cgcatctatctgattaaacaggtgctggaaggcaacgaagtcacgcttaaaacacaggagcatctcgatcgctgt

SEQ ID NO: 144701 - DNA, 75 bp, synthetic construct
  source 1..75: mol_type = other DNA
ccgtgtacataaaatcaggcaacatgacgagcgccaaatcaaaaaggctgctggtcttgttaaagagatcttttc

SEQ ID NO: 144702 - DNA, 75 bp, synthetic construct
  source 1..75: mol_type = other DNA
atacccgattaataagcaagactttgcggtgagccgtttttgcaatggtcatccaaaagatggcaccacgctgga

SEQ ID NO: 144703 - DNA, 75 bp, synthetic construct
  source 1..75: mol_type = other DNA
aacttctgcgcgaggaaccgctggaaaaactggcaattcgcggcgataaaaaactggccttccactgcccgtgta

SEQ ID NO: 144704 - DNA, 75 bp, synthetic construct
  source 1..75: mol_type = other DNA
tggccccgctggcggataccgccagcaatccgtggcgctacaaaccgaccgaaggcaatatgaccttacaggggc

SEQ ID NO: 144705 - DNA, 75 bp, synthetic construct
  source 1..75: mol_type = other DNA
gcgcaaaaaaaaacgactgatattgtgatgagccagttgccggggcaggaactcccggttacccgtgaggtacgt

SEQ ID NO: 144706 - DNA, 75 bp, synthetic construct
  source 1..75: mol_type = other DNA
ggctgaatatgcccgccgctggcaggattttctggctagtattcacagcatcaacagtgccggggaagacggtag

SEQ ID NO: 144707 - DNA, 75 bp, synthetic construct
  source 1..75: mol_type = other DNA
atgcccgccacgatgacggcggtgaaatcagtgcgacccggcgcaccgctcaacggcgtgatcctgacgctgaac

SEQ ID NO: 144708 - DNA, 75 bp, synthetic construct
  source 1..75: mol_type = other DNA
gggccgcgcaacggctcaatggcggaaatcaccgccagcccgcgcatccgccaggacacctcgacgctgctgact

SEQ ID NO: 144709 - DNA, 75 bp, synthetic construct
  source 1..75: mol_type = other DNA
gatgctcaatgagtattacacccagctcaccatcgccgacagcgcactggcggcgagcacattaccgggccgcat

SEQ ID NO: 144710 - DNA, 75 bp, synthetic construct
  source 1..75: mol_type = other DNA
gcagcggtaaatacagcttcactctgcaaggcagtgaaatcgcactgaagcaggcgtgggacgcgtttaataatt

SEQ ID NO: 144711 - DNA, 75 bp, synthetic construct
  source 1..75: mol_type = other DNA
aggcatctacagtaaggcacgaccttacggagagctgcaccggattattccgctgattgaaaccgttgaaaccat

SEQ ID NO: 144712 - DNA, 75 bp, synthetic construct
  source 1..75: mol_type = other DNA
gtgaaaacagaagcggcaataccggcgctggaagctgtctggcaggaaaaaggcgatattttgcgtaaccagttg

SEQ ID NO: 144713 - DNA, 75 bp, synthetic construct
  source 1..75: mol_type = other DNA
catggagagcgaagcaccgcaggagttttcgctggttcgcgcggtgggcgcggatgcgggaacggtttttgtccg

SEQ ID NO: 144714 - DNA, 75 bp, synthetic construct
  source 1..75: mol_type = other DNA
tccggttttccctttgatgccattccatgtctttcctgagtatatggcattactcagaaaagcactggaaaaaaa

SEQ ID NO: 144715 - DNA, 75 bp, synthetic construct
  source 1..75: mol_type = other DNA
atgaaaggcttcccaattgcgcatatttttcacccttcaatcccgccaatgcacgcagtggttaacaatcacaat

SEQ ID NO: 144716 - DNA, 75 bp, synthetic construct
  source 1..75: mol_type = other DNA
atacgatttacgcgtggtggagctttttaccgacgctgacaaggagttaatcacgtcactggtggttgtggataa

SEQ ID NO: 144717 - DNA, 75 bp, synthetic construct
  source 1..75: mol_type = other DNA
aggtgcaggcagtgaagccctggttatcgcatgtaccaagatgaaggatgcggaggaactgaaagaaatggcttg

SEQ ID NO: 144718 - DNA, 75 bp, synthetic construct
  source 1..75: mol_type = other DNA
gctgattgtgatcgacacgctggcccgttgctttggtgggaatgatgaaaatgattcccgtgatatgggcgcatt

SEQ ID NO: 144719 - DNA, 75 bp, synthetic construct
  source 1..75: mol_type = other DNA
aaaatgattcccgtgatatgggggcgtttatccgtggttgtgacgaactgaaacggcgcacaggggccacggtgc

SEQ ID NO: 144720 - DNA, 75 bp, synthetic construct
  source 1..75: mol_type = other DNA
tcccccagcgaaaaaccacgctaccgatgagcgttggatctaccggatacgacacacagcttgattacgtggtaa

SEQ ID NO: 144721 - DNA, 75 bp, synthetic construct
  source 1..75: mol_type = other DNA
gatcgccggagtccaggaggcgcggctactttctgaaaatttcgaattgctggaggaatggagcgaccagcttcc

SEQ ID NO: 144722 - DNA, 75 bp, synthetic construct
  source 1..75: mol_type = other DNA
cgtgctacaggtcacggttttagacatacaatgtcgacaattctgcacgagcaagggtttgatagtgcttggatt

SEQ ID NO: 144723 - DNA, 75 bp, synthetic construct
  source 1..75: mol_type = other DNA
gggaaattacagcctagtattccctggtcgtaatgatgtcagaaaaccaatgagtgaagccagtataaataaagt

SEQ ID NO: 144724 - DNA, 75 bp, synthetic construct
  source 1..75: mol_type = other DNA
aaagtgaactgcccgagttcgtcaacgctctggataactatcagggtagtttagtcaccaaatacgccacgcagc

SEQ ID NO: 144725 - DNA, 75 bp, synthetic construct
  source 1..75: mol_type = other DNA
ggtatttggcagcgtgcagtcggtcgcccgtaatcttgatgcctttcagggtgaattttcgctgttgattgtcga

SEQ ID NO: 144726 - DNA, 75 bp, synthetic construct
  source 1..75: mol_type = other DNA
tgtcagggatggtttgaagatgacgacggtcatcgcgaacagtgtgacttccgtttccgttttaaaaattgcccg

SEQ ID NO: 144727 - DNA, 75 bp, synthetic construct
  source 1..75: mol_type = other DNA
cgaactggcacggctggcgcgtggtcgtgttctggtgctggcacacgtcaaagaactggtggcgcaaaaccatgc

SEQ ID NO: 144728 - DNA, 75 bp, synthetic construct
  source 1..75: mol_type = other DNA
agaggctacggcgctggttgcagcatgtacgaagatgaaggacgcggaggagccaaaagaaagtgcctacgacct

SEQ ID NO: 144729 - DNA, 75 bp, synthetic construct
  source 1..75: mol_type = other DNA
aactggggtatgaaatgaaaaacttccggcgctggctgtacaagctggaaaaagatggggttattcgtatcgatg

SEQ ID NO: 144730 - DNA, 75 bp, synthetic construct
  source 1..75: mol_type = other DNA
cgatggcggcggcattcaccctggtgccgattgttcttatcgcactgtacctggcgttcgtgaaacgtctgggag

SEQ ID NO: 144731 - DNA, 75 bp, synthetic construct
  source 1..75: mol_type = other DNA
cgaaccggccacatcattttcaaacgtctggatctggttgataagcttaatgacattatcagccgtcaatatggt

SEQ ID NO: 144732 - DNA, 75 bp, synthetic construct
  source 1..75: mol_type = other DNA
aataatatggtcggttcctcatccagcaaaaactgttattacgtgactattgaaggccgaaacaaagtcaatgat

SEQ ID NO: 144733 - DNA, 75 bp, synthetic construct
  source 1..75: mol_type = other DNA
aatgaagcacttccggcgctggctgggcaagctggaaaaagacggcgttatctatgttgacggcgatgatgtagg

SEQ ID NO: 144734 - DNA, 75 bp, synthetic construct
  source 1..75: mol_type = other DNA
cgtgaaaaatatgcggcgatggttagccaaactggaaaaagacgccgtgatttacattgatggtgatgatgtagg

SEQ ID NO: 144735 - DNA, 75 bp, synthetic construct
  source 1..75: mol_type = other DNA
gattaccgaaagataaatacaccgatgcgattatttttgcgggtattgatgctcactcattcgcagagcattaca

SEQ ID NO: 144736 - DNA, 75 bp, synthetic construct
  source 1..75: mol_type = other DNA
gtttatccgtggttgtgacgaactgaaacgacgcacaggggccacggtgctggtggttcaccattccggcaagga

SEQ ID NO: 144737 - DNA, 75 bp, synthetic construct
  source 1..75: mol_type = other DNA
accactgctgactgcgttcctcacgctaccggcggtgggcggcaatacgctgtcaacttccgggctggggcgctt

SEQ ID NO: 144738 - DNA, 75 bp, synthetic construct
  source 1..75: mol_type = other DNA
cgggaaaatgaaagcgtttttttatatcgcggtaatgttgccgatgtgggcgagctacattgtgaaagcctatgc

SEQ ID NO: 144739 - DNA, 75 bp, synthetic construct
  source 1..75: mol_type = other DNA
aaaatttcgaattgctggaggaatggagcgaccagcttccacggcttagggaggcatgggaacgcggggaaagcc

SEQ ID NO: 144740 - DNA, 75 bp, synthetic construct
  source 1..75: mol_type = other DNA
ctcaaggattgaaagcgatttattacagtctttattaggtgaaaatctccaacaaaaaatcagtaaaatcattaa

SEQ ID NO: 144741 - DNA, 75 bp, synthetic construct
  source 1..75: mol_type = other DNA
tagcaaaggcttttaacccgtgggttaaatcatttttcaaagatgaccgccgtgtttataaagatagtcgtgcta

SEQ ID NO: 144742 - DNA, 75 bp, synthetic construct
  source 1..75: mol_type = other DNA
gatcgtggtgcacgagctggcgcacctgaaggagaaagagcataacaatgaaccgccccggaaatcctggagact

SEQ ID NO: 144743 - DNA, 75 bp, synthetic construct
  source 1..75: mol_type = other DNA
ccccgctgcggcctgatttatgaattgtatcagcgccgcctgagcgcagatattgatggctatcttgctgacgtt

SEQ ID NO: 144744 - DNA, 75 bp, synthetic construct
  source 1..75: mol_type = other DNA
ctcttgaagattttcgtcgccagtgtgagagttttgcgcgcgaacagcagccccgctgcggcctgatttatgaac

SEQ ID NO: 144745 - DNA, 75 bp, synthetic construct
  source 1..75: mol_type = other DNA
aatattagctgtcgatgaaccagagttatctttacatgcgacatcttgctttaaacaatttgagaagattaaaaa

SEQ ID NO: 144746 - DNA, 75 bp, synthetic construct
  source 1..75: mol_type = other DNA
aatcactggcggacgtgaacgtaaaatgcgacttcgtttctgtgccgacgcatccaaccattaccaaactgcggg

SEQ ID NO: 144747 - DNA, 75 bp, synthetic construct
  source 1..75: mol_type = other DNA
ggcgcactggaagcggtcgactgggtagtgtcgtttgaagaagacacgccgcagcgtctgatcgccgggatcctg

SEQ ID NO: 144748 - DNA, 75 bp, synthetic construct
  source 1..75: mol_type = other DNA
cagcgggtaattcgctggaagaagcctgcttctttgccaatgcggcggctggcgtggtggtcggcaaactgggaa

SEQ ID NO: 144749 - DNA, 75 bp, synthetic construct
  source 1..75: mol_type = other DNA
cgttctatcaattgtgttgccatatggaaccgcagtaccaccagcttgagtttgacacccggctgtggctaacgc

SEQ ID NO: 144750 - DNA, 75 bp, synthetic construct
  source 1..75: mol_type = other DNA
atgagcggattaatcaggcgctgagttcgattggcgcgctggtgctttctgactacgccaaaggtgcgctggcaa

SEQ ID NO: 144751 - DNA, 75 bp, synthetic construct
  source 1..75: mol_type = other DNA
atgcgacttcgtttctgtgccgacgcatccaaccattaccaaactgcgggtgctttcccgtaaccaacagcttat

SEQ ID NO: 144752 - DNA, 75 bp, synthetic construct
  source 1..75: mol_type = other DNA
aaaactgcggcagacagcgggcgtcttccgacgggaagcggtgcgaatatcagcattgataagcgtttgccgatg

SEQ ID NO: 144753 - DNA, 75 bp, synthetic construct
  source 1..75: mol_type = other DNA
attcgtctgttaacgcccgttgaaggcgtggaacatgaagataacctgatcgttcgcgcagcacggttgttgatg

SEQ ID NO: 144754 - DNA, 75 bp, synthetic construct
  source 1..75: mol_type = other DNA
gcgtttgccgaaggcgttggtgaaatactaacgccggtggatccgccagagaagtggtatctggtggcgcaccct

SEQ ID NO: 144755 - DNA, 75 bp, synthetic construct
  source 1..75: mol_type = other DNA
aagatggaagcttggatgcatggccctgttgtccctgagctttatcgccgttataaacaatatggtaatggcgct

SEQ ID NO: 144756 - DNA, 75 bp, synthetic construct
  source 1..75: mol_type = other DNA
ctgagcatcgatgagctagcggaaatgggtctgacgctgggcgcagatgttcctgtatttgtccgtggtcatgcc

SEQ ID NO: 144757 - DNA, 75 bp, synthetic construct
  source 1..75: mol_type = other DNA
ggcggcggtctcggcggtggttcatccaatgccgcgacggttctggtggcgttaaatcatctctggcaatgcgga

SEQ ID NO: 144758 - DNA, 75 bp, synthetic construct
  source 1..75: mol_type = other DNA
gaaggcagcaccctcccctggcatcgggtggttaatcgccacggcacaatctcgttaaccggcccggatttgcag

SEQ ID NO: 144759 - DNA, 75 bp, synthetic construct
  source 1..75: mol_type = other DNA
tacggtgatgtggcgaaactggcgggatcgccccgcgccgcgcgccaggttggcggtgtgttaaagcgtctcccc

SEQ ID NO: 144760 - DNA, 75 bp, synthetic construct
  source 1..75: mol_type = other DNA
agccaggggctgattttaacttcggcgtattctcaaccaagctcttccccaacccgcgccaccattctcacctga

SEQ ID NO: 144761 - DNA, 75 bp, synthetic construct
  source 1..75: mol_type = other DNA
cagtattgacaagcgtttgccgatgggcggcggtctaggtggtggttcatccaatgccgcgacggtgctggtggc

SEQ ID NO: 144762 - DNA, 75 bp, synthetic construct
  source 1..75: mol_type = other DNA
caccgcatcaggcagaaatcgggcgtgatgtggccagttttgctgccggactgcgttctgctgtacgacgtaatc

SEQ ID NO: 144763 - DNA, 75 bp, synthetic construct
  source 1..75: mol_type = other DNA
gcgggatcgccccgcgccgcgcgccaggtgggcggtgtgttaaagcgtctccctgaaggcagcaccttaccctag

SEQ ID NO: 144764 - DNA, 75 bp, synthetic construct
  source 1..75: mol_type = other DNA
ttcgcgttacggaacaggcagcgttggctgcctggccgcaaaccggctgtggcgacaaaaataaaattgatggcc

SEQ ID NO: 144765 - DNA, 75 bp, synthetic construct
  source 1..75: mol_type = other DNA
tccccgacatcactgagccgggtattatcactgatgacgtcatccgtccgtgttctgagcagcactgaaagagta

SEQ ID NO: 144766 - DNA, 75 bp, synthetic construct
  source 1..75: mol_type = other DNA
gcattaaaaaccctgcatgccactggtctggtcgtgaatgtcgccacgctggcgcggttgaatgccctgcgggcc

SEQ ID NO: 144767 - DNA, 75 bp, synthetic construct
  source 1..75: mol_type = other DNA
cacggcgctggattcgaacaagtacacctgtaataaggtgaacgcggatactttcgcctcttatgcgcagcttga

SEQ ID NO: 144768 - DNA, 75 bp, synthetic construct
  source 1..75: mol_type = other DNA
gcgaaacctctttaactccctgcgcctgccggtcctgaacagtatcagcatgcagaatgcgaatgccgaactgct

SEQ ID NO: 144769 - DNA, 75 bp, synthetic construct
  source 1..75: mol_type = other DNA
aatatggacaattcggtggcatacacaggcagatacgccaatcccgatgcactggtccaggatgcacgctcatcc

SEQ ID NO: 144770 - DNA, 75 bp, synthetic construct
  source 1..75: mol_type = other DNA
aatattttatcaacaccatcacctggttcttcctcacctggttcccgatttatctggtgcaggaaaaaggcatgt

SEQ ID NO: 144771 - DNA, 75 bp, synthetic construct
  source 1..75: mol_type = other DNA
ggctgatacagctcagattgatggcgttgtattggatgcagatctatccaaaaccctcactacaaatgcaaggcg

SEQ ID NO: 144772 - DNA, 75 bp, synthetic construct
  source 1..75: mol_type = other DNA
taggggtcgctcttatatggggcggcgtcgtcctattcaaaaaatatctagaagaccgcaaagagattcgcatgg

SEQ ID NO: 144773 - DNA, 75 bp, synthetic construct
  source 1..75: mol_type = other DNA
tttctgaccgttcatggagtgaaagccaaataatgcaatcttatcatggcggaaagcaagatcttattagtgtgg

SEQ ID NO: 144774 - DNA, 75 bp, synthetic construct
  source 1..75: mol_type = other DNA
atcgcggtactgagctacctggtgctggtgggcgatatcaagcgtatcgagttgaaacctgttgcggggcaataa

SEQ ID NO: 144775 - DNA, 75 bp, synthetic construct
  source 1..75: mol_type = other DNA
caagaattaacaaaaaacctgacggcggacgaagtggcaacacttgagcatttgcttaagaaagtcctgccgtaa

SEQ ID NO: 144776 - DNA, 75 bp, synthetic construct
  source 1..75: mol_type = other DNA
caaatccacttgatggagtccgtgttttcaaggaagccgagaaagaaatgtcttggctcactttgtctcaaattc

SEQ ID NO: 144777 - DNA, 75 bp, synthetic construct
  source 1..75: mol_type = other DNA
ttctggggaggttgtattcacataatttcagacaggcgttcacgtcctcactgagaagatatatttattttgtgt

SEQ ID NO: 144778 - DNA, 75 bp, synthetic construct
  source 1..75: mol_type = other DNA
ctttccacggacgaaatcaaacgcctgcttaatgcctgcgccgaatctcaaaacaccagcctactaatgattgca

SEQ ID NO: 144779 - DNA, 75 bp, synthetic construct
  source 1..75: mol_type = other DNA
aatctctggccgacgtcaacgtcaaatgcgacttcgtttctgtaccgacgcatccgactatcaccaaattacggg

SEQ ID NO: 144780 - DNA, 75 bp, synthetic construct
  source 1..75: mol_type = other DNA
attgttaaggtatgtttggcaaccggtgcacgatggggagaagccgagaggcttacacgcgctcaactctcaccc

SEQ ID NO: 144781 - DNA, 75 bp, synthetic construct
  source 1..75: mol_type = other DNA
attcaaagaagctgagaaagaaatgtcctggctaactttgtctcagctcccggagctgttccgagcctgtgaaca

SEQ ID NO: 144782 - DNA, 75 bp, synthetic construct
  source 1..75: mol_type = other DNA
ctgcatcaggttgggcgcaatgaagaggcgctggagttgctgttcgggcatctgcgtaaagatctcaccgccgca

SEQ ID NO: 144783 - DNA, 75 bp, synthetic construct
  source 1..75: mol_type = other DNA
caagtaccgtgactggttcatgtttgatgaaactgatcccgctggcggacaaatagccccggcgctcgcgcacat

SEQ ID NO: 144784 - DNA, 75 bp, synthetic construct
  source 1..75: mol_type = other DNA
gtgaccgaccagaaaggcgaaaaaatcctcctggacaccaccgggccgattgcgcgcacgaataccagttatgac

SEQ ID NO: 144785 - DNA, 75 bp, synthetic construct
  source 1..75: mol_type = other DNA
aaagataatacgcagttgggtttttctattttttcatttattattaccacattgggcgtattagccgcggagtgt

SEQ ID NO: 144786 - DNA, 75 bp, synthetic construct
  source 1..75: mol_type = other DNA
gtctgaaaatgaaggaggtagctgaactagctggcatcaactacaccacatatgcaggttatgaatcaggtaagg

SEQ ID NO: 144787 - DNA, 75 bp, synthetic construct
  source 1..75: mol_type = other DNA
cgacttctaaaacatccaagattccgtaaataccgtgattggttcatgtttgatgaaactgatcccgcagctggt

SEQ ID NO: 144788 - DNA, 75 bp, synthetic construct
  source 1..75: mol_type = other DNA
ccgctgcgggttattggttcgtttgtgctgggctctatggtaacgggcgctattgtcggtgcgatgaatatcggc

SEQ ID NO: 144789 - DNA, 75 bp, synthetic construct
  source 1..75: mol_type = other DNA
atgatcattgcaacgaagagcggcttgctggtggccgcagaactaatcaaggaagaggccgggtactggctacta

SEQ ID NO: 144790 - DNA, 75 bp, synthetic construct
  source 1..75: mol_type = other DNA
gatgactcatcatctcggatacaagaaaaatcagcccaaacaggaagccactcccgcaatagctattccacaaag

SEQ ID NO: 144791 - DNA, 75 bp, synthetic construct
  source 1..75: mol_type = other DNA
ttcagacccgacctcccgcagctggaaccgcctttatacccgcctgatggcagaaaacggtaactggctggtaga

SEQ ID NO: 144792 - DNA, 75 bp, synthetic construct
  source 1..75: mol_type = other DNA
atgaaccgcaattgttcctcggttttgctaccgattaccgttttgcaggctggacactgcgcgatgtggagatgg

SEQ ID NO: 144793 - DNA, 75 bp, synthetic construct
  source 1..75: mol_type = other DNA
cggtacgttgggagcgggcagtctgatgctgtttgtggtgggggaacctgtcgcctggatcaataactcgcttac

SEQ ID NO: 144794 - DNA, 75 bp, synthetic construct
  source 1..75: mol_type = other DNA
ctctagctttgaacgcaaccgcaatattgaaagaacgcgctcaggccttgcagctgcacgcgcaaggggccgtgt

SEQ ID NO: 144795 - DNA, 75 bp, synthetic construct
  source 1..75: mol_type = other DNA
tcacttccccgtgaaacccgggttatccggccggaagaagaatgctgcccggcctgtggtggtgaactcagttga

SEQ ID NO: 144796 - DNA, 75 bp, synthetic construct
  source 1..75: mol_type = other DNA
cgaaacacaacgtccgaaactggcgtgttgtcggtgcgaccatatcgtgcaggcaacagtaccttcaaaacccat

SEQ ID NO: 144797 - DNA, 75 bp, synthetic construct
  source 1..75: mol_type = other DNA
aaacgttatccgttctgcgtgggatccagcagaaattccccaaaatggacatcggtttgcatctgcataacaccc

SEQ ID NO: 144798 - DNA, 75 bp, synthetic construct
  source 1..75: mol_type = other DNA
aaatggacaaaatggacaaaatggacaaaatggacaagatgaaaaaggatgatatgggtaaaaaagacagcatga

SEQ ID NO: 144799 - DNA, 75 bp, synthetic construct
  source 1..75: mol_type = other DNA
tacggtaaaagagatcgcagaacgttttaacgtgtcgcggccaacgatttacagacatataacccccgacaacag

SEQ ID NO: 144800 - DNA, 75 bp, synthetic construct
  source 1..75: mol_type = other DNA
acgggatgcccgcccgcatgtggctgtgtctggataacctgttacttgacgggctgagcatgcagattctgttgg

SEQ ID NO: 144801 - DNA, 75 bp, synthetic construct
  source 1..75: mol_type = other DNA
tacccctgaagcggaaaacccggccgaagcggatttaccccagggcgacattgaaaataaatatcctccggcata

SEQ ID NO: 144802 - DNA, 75 bp, synthetic construct
  source 1..75: mol_type = other DNA
aaaaccgacgtcccggtagaacaaccattcgtccactcccctgaagatcgctaccagccctttgcgcttaccgac

SEQ ID NO: 144803 - DNA, 75 bp, synthetic construct
  source 1..75: mol_type = other DNA
ggtacatcgtttagcggatgacgcgctgaatggcgtaactggtctggttgagtatcacgagcatttcaatcgctt

SEQ ID NO: 144804 - DNA, 75 bp, synthetic construct
  source 1..75: mol_type = other DNA
cccgtcgtctttaccagcgcgctgggttttgagcagggtaactttctcgcccggcgcaatctgcttaaaccggtc

SEQ ID NO: 144805 - DNA, 75 bp, synthetic construct
  source 1..75: mol_type = other DNA
gcgcaacttgatgatattcctccggctcctgcattgccgctacgttcgctacgttgcatgcctcaggacgtcgaa

SEQ ID NO: 144806 - DNA, 75 bp, synthetic construct
  source 1..75: mol_type = other DNA
acaactggaacaccggttacggtggtgcggagttaggcttaagttacccgatcaccaaacatgtgcgactttata

SEQ ID NO: 144807 - DNA, 75 bp, synthetic construct
  source 1..75: mol_type = other DNA
tgtctgtgggtatgctgccgatggcagtatatgcgcaagaggcaacagtgaaagaggtgcatgatgcacctgcgg

SEQ ID NO: 144808 - DNA, 75 bp, synthetic construct
  source 1..75: mol_type = other DNA
aatactgacgataacccggatatcaccaaatatatggggtactaccagcttaaaatcggctatcacctcggtgat

SEQ ID NO: 144809 - DNA, 75 bp, synthetic construct
  source 1..75: mol_type = other DNA
aacaggtgctcgaacagacgcctcgctgggtaatacccgcacacatcctccatacgcctgaagaggcgttgcagg

SEQ ID NO: 144810 - DNA, 75 bp, synthetic construct
  source 1..75: mol_type = other DNA
ggcgcaggacaacttgttgcggttctggccgtcctgctggccggggcggtttacgttccggtttcgctggatcag

SEQ ID NO: 144811 - DNA, 75 bp, synthetic construct
  source 1..75: mol_type = other DNA
aatattcttctgctggataccgcctgcgatggcgataccgtcagcaacctggcgcgtaaaaaccagctcacgttt

SEQ ID NO: 144812 - DNA, 75 bp, synthetic construct
  source 1..75: mol_type = other DNA
acgaaccgcaattgttcctcggttttgccacggattacaactttgctggctggacgctgcgcgatgtggaaatgg

SEQ ID NO: 144813 - DNA, 75 bp, synthetic construct
  source 1..75: mol_type = other DNA
cctggcatttccgctgtggcgtgggattttaggcccgaactcggtgttgggtgcgtcttatacgcaaaaatcctg

SEQ ID NO: 144814 - DNA, 75 bp, synthetic construct
  source 1..75: mol_type = other DNA
tagctatgcgcaacgcaaaatttacgcaaggtaggctggccaaagaagtgggtatggctcagtccagtgtcaatc

SEQ ID NO: 144815 - DNA, 75 bp, synthetic construct
  source 1..75: mol_type = other DNA
gcgaggcgctgtggctggaggtgagtcaggatccggagttgatagcgcagttttcaagtggtaaccaaacacgta

SEQ ID NO: 144816 - DNA, 75 bp, synthetic construct
  source 1..75: mol_type = other DNA
acatggtggtggagtgtatgatattgataattttaagattgttacgccccgactacatgatgaaattcactacag

SEQ ID NO: 144817 - DNA, 75 bp, synthetic construct
  source 1..75: mol_type = other DNA
ccaaatatatgggttactaccagcttaaaattggctatcacctcggtgatgcggtgttgagtgcgaaaggacagt

SEQ ID NO: 144818 - DNA, 75 bp, synthetic construct
  source 1..75: mol_type = other DNA
cgtcccaccgaatcagtgagtctttaccaacaaattgttggtcgcggcctgcgcctggcgcccggtaaaacagat

SEQ ID NO: 144819 - DNA, 75 bp, synthetic construct
  source 1..75: mol_type = other DNA
cgcccggcgctgaacgtgacgtattaattgaagattttaaagcccaacgttttcgttatctggtcaacgttgcag

SEQ ID NO: 144820 - DNA, 75 bp, synthetic construct
  source 1..75: mol_type = other DNA
actcacgtaagggacaggcagatggcagctcagccacaggcagcactgcaggaaactgaatataaactgcagtga

SEQ ID NO: 144821 - DNA, 75 bp, synthetic construct
  source 1..75: mol_type = other DNA
gatgctgcactgattactggcgacacccccggcgctgagcgcgatgtgttaattgaagattttaaagcccagcgt

SEQ ID NO: 144822 - DNA, 75 bp, synthetic construct
  source 1..75: mol_type = other DNA
gcgtctcgctcctggcaagactgattgcttaattcttgattatgcgggtaatcctcacgatctctacgcgccgga

SEQ ID NO: 144823 - DNA, 75 bp, synthetic construct
  source 1..75: mol_type = other DNA
aagaactggtggcgcaaaaccatgcaaaatatcaggcgctggggctggaagccgatatttttgccgccgggctaa

SEQ ID NO: 144824 - DNA, 75 bp, synthetic construct
  source 1..75: mol_type = other DNA
agaaaggtaaattcccgcgcatgaagcaggcgctgtatgtcgacagtatctcttccgtgacaggttcgtttatcg

SEQ ID NO: 144825 - DNA, 75 bp, synthetic construct
  source 1..75: mol_type = other DNA
gggctggatgctgggtgatgtgcactacaacggcatcgtgtctgcgccaccgagcgtaatgacagtagtgggtca

SEQ ID NO: 144826 - DNA, 75 bp, synthetic construct
  source 1..75: mol_type = other DNA
gggctggatgttgggagacgtgcactacaacggcattgtctccgcgccgccgagcgtgatgacagttgtgggtca

SEQ ID NO: 144827 - DNA, 75 bp, synthetic construct
  source 1..75: mol_type = other DNA
cgaaaatcgacccactggatctgcatcgcgccattgttgcattgagcgaaaaaatgaaagcggttgatgacaatg

SEQ ID NO: 144828 - DNA, 75 bp, synthetic construct
  source 1..75: mol_type = other DNA
tcttccgtgaccggttcttttatcggtacttcttccgttacggcgtatattgagtcttcttccggtgtatcggtt

SEQ ID NO: 144829 - DNA, 75 bp, synthetic construct
  source 1..75: mol_type = other DNA
tcaagtcttgctcgcgtgaactggcaggatcttactgaatctgttccggcgtttattaccgctgtgatgatgccg

SEQ ID NO: 144830 - DNA, 75 bp, synthetic construct
  source 1..75: mol_type = other DNA
cttctggggcgcgattggtctgctgttactgacgattttccgcgttcgctactggatgatagccaacattccggt

SEQ ID NO: 144831 - DNA, 75 bp, synthetic construct
  source 1..75: mol_type = other DNA
ctgaaggaggatccgcgaaagctgcctggtgttgtaacagggcgcggcgtcccgctttcaccaggaactcgctgg

SEQ ID NO: 144832 - DNA, 75 bp, synthetic construct
  source 1..75: mol_type = other DNA
cgcagaagctcaaaccatgctactgtttccgggtagtgtgttggcgactcaaatatggggaaaatggtcgctcag

SEQ ID NO: 144833 - DNA, 75 bp, synthetic construct
  source 1..75: mol_type = other DNA
ctgtctgattgctgcgttcggcagtattctgatggggctgtttgctaacctgccagtcgcgctggctcccgctat

SEQ ID NO: 144834 - DNA, 75 bp, synthetic construct
  source 1..75: mol_type = other DNA
taccggacgtctgcgtgatctaagcccgtgcgtaatcatcgttgcgctgctgtttatcctgaagattgtgtttat

SEQ ID NO: 144835 - DNA, 75 bp, synthetic construct
  source 1..75: mol_type = other DNA
atgagtcatcaacataccacccagacttctggtcaggggatgctggaacgcgtttttaaactgcgcgaacatggt

SEQ ID NO: 144836 - DNA, 75 bp, synthetic construct
  source 1..75: mol_type = other DNA
cgcctgggtgatgggccgggaaaacgcgcaaaaaaaaacgatggatagcgtgatgagccagctaccggggcagga

SEQ ID NO: 144837 - DNA, 75 bp, synthetic construct
  source 1..75: mol_type = other DNA
gtatctgggcgtgctgctttacgacgccgaccgcattgaggaagcggcgagcaccgagcgcgaagttgacctcta

SEQ ID NO: 144838 - DNA, 75 bp, synthetic construct
  source 1..75: mol_type = other DNA
ggatcaaattgccccaaataaatagtgccgatatgttgaataatccgtatttaacatttggcgtgacttataatg

SEQ ID NO: 144839 - DNA, 75 bp, synthetic construct
  source 1..75: mol_type = other DNA
caatattgtgcttgtttgttaatgtttcttcttatgcagtcgattgctatcagaataaacgttttggtaatacag

SEQ ID NO: 144840 - DNA, 75 bp, synthetic construct
  source 1..75: mol_type = other DNA
caggatcaaagaggtggtaatacgcaaatacgtggtactttaccttccttcagaattccagaaaacgcccagccg

SEQ ID NO: 144841 - DNA, 75 bp, synthetic construct
  source 1..75: mol_type = other DNA
aacactgcctcaatcccagttgcgtggcgacctgcccaagcggcgctatctacaaacgcgaagaagacggcattg

SEQ ID NO: 144842 - DNA, 75 bp, synthetic construct
  source 1..75: mol_type = other DNA
aggaagccctgaaacaaggtattccacaaaacgtgattgaagctgcccagcgttcgcctgtctacaaaatggcga

SEQ ID NO: 144843 - DNA, 75 bp, synthetic construct
  source 1..75: mol_type = other DNA
aaacaaattggtcgtgccgattttaatgacccaaataaaaatgccgtgttttctcccatcgaggttttgaccggc

SEQ ID NO: 144844 - DNA, 75 bp, synthetic construct
  source 1..75: mol_type = other DNA
gtcgatctggcgcagtcttcatgggataccctcagtccggaagtcctgccactgcctgagcagaactccgaacgt

SEQ ID NO: 144845 - DNA, 75 bp, synthetic construct
  source 1..75: mol_type = other DNA
gagcaggagcaattgttgaaacaaatgacggtagagaatgttaacactactgttaaacaatatctttctcatccg

SEQ ID NO: 144846 - DNA, 75 bp, synthetic construct
  source 1..75: mol_type = other DNA
tgcacgactcgcaaaactcacaaaatcaaactgtgctgttagaccccactcagtttgacgccatcgttacagcaa

SEQ ID NO: 144847 - DNA, 75 bp, synthetic construct
  source 1..75: mol_type = other DNA
gttaacgtgtcagggtaatccggcatatttgactgaaatccagatttcactcaaagctgacgccatcaacgcacc

SEQ ID NO: 144848 - DNA, 75 bp, synthetic construct
  source 1..75: mol_type = other DNA
gctaacttgccagggcaacccggcatatctgactgaaatccagatttcactaaaagctgacgccatcaacgcgcc

SEQ ID NO: 144849 - DNA, 75 bp, synthetic construct
  source 1..75: mol_type = other DNA
atgaagagcgttaagggactttcagatattcaggacttttttaactggatgtgggcagtggatccccggctggct

SEQ ID NO: 144850 - DNA, 75 bp, synthetic construct
  source 1..75: mol_type = other DNA
ggtttgcgaaacggcgttgcgccttacatcccggcggccttttgccgggatgccaggagctcaggccacggcgcg

SEQ ID NO: 144851 - DNA, 75 bp, synthetic construct
  source 1..75: mol_type = other DNA
ctaccagcgtcagctggatgtgttcctcgatccgaacgatccgaaagtcatcgagcaggcgattaaagacggtat

SEQ ID NO: 144852 - DNA, 75 bp, synthetic construct
  source 1..75: mol_type = other DNA
acggcgaaacgcagtggaacgccgagcggcgtattcagggccagtctgacagcccgctaaccgcaaaaggtgagc

SEQ ID NO: 144853 - DNA, 75 bp, synthetic construct
  source 1..75: mol_type = other DNA
ggctgaccggaaaaaggtgttcagggcagagccggaaaagggcatgggagactggcgtttttatctctgcgagcc

SEQ ID NO: 144854 - DNA, 75 bp, synthetic construct
  source 1..75: mol_type = other DNA
atgcagaacgccagacatccgaaaacacacagggaacagcgtgagctggcctgccgttttctccgcaacaacggc

SEQ ID NO: 144855 - DNA, 75 bp, synthetic construct
  source 1..75: mol_type = other DNA
ggattgtgcggtgacaatcactaaccgaacggtttctcgcgcggaagagttggctaaattatttgcgcatactgg

SEQ ID NO: 144856 - DNA, 75 bp, synthetic construct
  source 1..75: mol_type = other DNA
attgctatgacatgttctatcagaaaggaaaaactccttttctggcatggtgtgagcagcgaggctcaaagcgta

SEQ ID NO: 144857 - DNA, 75 bp, synthetic construct
  source 1..75: mol_type = other DNA
ccaaaacaggtttaatagcggttgcattggttgcgctaattacaacaactgttacgcttttaatgcagtaccttg

SEQ ID NO: 144858 - DNA, 75 bp, synthetic construct
  source 1..75: mol_type = other DNA
gaaagaagaggaagaagaggaagaggaaaaagaagaagaacagtaacaggcacggtaaccacagaaaaataacat

SEQ ID NO: 144859 - DNA, 75 bp, synthetic construct
  source 1..75: mol_type = other DNA
ttgcgaaacggcgttgccccttacatcccggcggccttttgccgggatgccgggagcgcaggccacggcgcgaca

SEQ ID NO: 144860 - DNA, 75 bp, synthetic construct
  source 1..75: mol_type = other DNA
tattcaggcgttgggtatggacgaactggaagggcatgagtttgatctcattattaatgcaacatccagtggcat

SEQ ID NO: 144861 - DNA, 75 bp, synthetic construct
  source 1..75: mol_type = other DNA
actaattttgtttgcacgtcagaaatttcagccacatatccaggaatagatgccttagacaaagaaaataaacta

SEQ ID NO: 144862 - DNA, 75 bp, synthetic construct
  source 1..75: mol_type = other DNA
tagccaggctcaggcagcttctgctttagggtcactcaacctcgcatatctgaacttgccagaggtaaaatccag

SEQ ID NO: 144863 - DNA, 75 bp, synthetic construct
  source 1..75: mol_type = other DNA
atgcgcattagtgtgaacagtcatatggcacgttatcagagcggcaagaacacgccagatcaggtaagtctctac

SEQ ID NO: 144864 - DNA, 75 bp, synthetic construct
  source 1..75: mol_type = other DNA
ctcaaatataacatgctggctttagaaacaatttttggctcagaaaaagcgggaaaatcacccaaagagctggca

SEQ ID NO: 144865 - DNA, 75 bp, synthetic construct
  source 1..75: mol_type = other DNA
ctatattcatatgcccttttgccagagccgctgcgggttttgtaatctttttacctgcacgggagcaaacaatgc

SEQ ID NO: 144866 - DNA, 75 bp, synthetic construct
  source 1..75: mol_type = other DNA
ccgctatataacatgccgcgtcagccggatatgtatagcctctatattgaagcccgcgatcgcttattgcatgaa

SEQ ID NO: 144867 - DNA, 75 bp, synthetic construct
  source 1..75: mol_type = other DNA
acagagctcttgatattaccgcagccgaattgtcagcccacctgcttactccgggaaacgcctgaatgcggttct

SEQ ID NO: 144868 - DNA, 75 bp, synthetic construct
  source 1..75: mol_type = other DNA
attgcgatcatgttattgagggcaacattctcctcgacattgcgagtactccgcccgttctgaaaaaggccctga

SEQ ID NO: 144869 - DNA, 75 bp, synthetic construct
  source 1..75: mol_type = other DNA
aggtaactattcagcaacgtaaggatatttctcttgcacttagtgcaggcaagaaatatgcaattgtgctgaagg

SEQ ID NO: 144870 - DNA, 75 bp, synthetic construct
  source 1..75: mol_type = other DNA
tactgcgctggcggtgatcctggcgcggacacagtcacgtttaattgactcaattcaaaagttgttcacgttaat

SEQ ID NO: 144871 - DNA, 75 bp, synthetic construct
  source 1..75: mol_type = other DNA
actcgctgctgcgaaggatggaaaactggggacgaagcctaaagcatggtgtgatctgacggtagatggtgaaac

SEQ ID NO: 144872 - DNA, 75 bp, synthetic construct
  source 1..75: mol_type = other DNA
caggttctggtaaaccggatgcgacattctggtcggcattaatcaaagaacgctataacgtgatgacctgtattg

SEQ ID NO: 144873 - DNA, 75 bp, synthetic construct
  source 1..75: mol_type = other DNA
agcttattgattgggcaaaagagcgaattccttcagatatgcatgagcaatttaatgaatataaagaagagttta

SEQ ID NO: 144874 - DNA, 75 bp, synthetic construct
  source 1..75: mol_type = other DNA
atcaagttttattcgatgaattttatgacttctgttatagaactgattggattactactcgtcaaccagatttaa

SEQ ID NO: 144875 - DNA, 75 bp, synthetic construct
  source 1..75: mol_type = other DNA
tctcgttacgtgattacagcacgcgggatacaaaatgggacagcgatcgagtgatggctgacaggatggcgcaga

SEQ ID NO: 144876 - DNA, 75 bp, synthetic construct
  source 1..75: mol_type = other DNA
tgacggtagagaatgttaacactgccgttaaacaatatctttctcatccggtaaatacttataccggagtattat

SEQ ID NO: 144877 - DNA, 75 bp, synthetic construct
  source 1..75: mol_type = other DNA
atagatggtggtatggtcgcaccatttagccatcgccaacaatcatggtgtaaatcgcaaggggtttgtgaaata

SEQ ID NO: 144878 - DNA, 75 bp, synthetic construct
  source 1..75: mol_type = other DNA
accgcacgaaattaccgcaagcaaatcagattgcacagtttactgccgcagatgcactggctgccgatcgccagt

SEQ ID NO: 144879 - DNA, 75 bp, synthetic construct
  source 1..75: mol_type = other DNA
gcgtccacgccactacaagaacaagccattgccgatgcgcttgatggtgattatcggctgcgcagcggaatgaaa

SEQ ID NO: 144880 - DNA, 75 bp, synthetic construct
  source 1..75: mol_type = other DNA
acaggcttgaaaaagaaagtgctgatgcagatgccttttcaaggaaactggcaagaatatataacaataaagatc

SEQ ID NO: 144881 - DNA, 75 bp, synthetic construct
  source 1..75: mol_type = other DNA
atgccttacccgtatggagcgtaaaattaactgttttacaaaataatgtgatgagtgcagtagcgatacatggat

SEQ ID NO: 144882 - DNA, 75 bp, synthetic construct
  source 1..75: mol_type = other DNA
ccaaagattgtggcggaatatccaggcgcgcgctggttgtttctcacgctgacggtgcgcaactgttccattgat

SEQ ID NO: 144883 - DNA, 75 bp, synthetic construct
  source 1..75: mol_type = other DNA
aacaataacaaatgaacatcttaagagtgttctagatgaaaatggatatttagcaggtgttttaaagtataaaaa

SEQ ID NO: 144884 - DNA, 75 bp, synthetic construct
  source 1..75: mol_type = other DNA
gctaccagttcagcggggaatggagtggccctgaagggttaatgccttcggacgataccctgaaaaactggaaag

SEQ ID NO: 144885 - DNA, 75 bp, synthetic construct
  source 1..75: mol_type = other DNA
tgcatttgaacgtttagttcgtgaagacttacctcatccattgacacgagaggaaataacggaatcaatgattgt

SEQ ID NO: 144886 - DNA, 75 bp, synthetic construct
  source 1..75: mol_type = other DNA
gcaagagagtcttcaggataaaatatctcaatgtaagttttctgttaatccagatgaccttcagtgcccgcctga

SEQ ID NO: 144887 - DNA, 75 bp, synthetic construct
  source 1..75: mol_type = other DNA
ggtatcaatgattgtaagacctgaaaattgtatatatgacccatcaaagggaaacttcattataaaagatagtta

SEQ ID NO: 144888 - DNA, 75 bp, synthetic construct
  source 1..75: mol_type = other DNA
tccagcggcgacagtggaggattgctttctgagttattgcttttggggtttaatagtggtcctcaagctcttagc

SEQ ID NO: 144889 - DNA, 75 bp, synthetic construct
  source 1..75: mol_type = other DNA
cttatttgattcggtttctttttctcatttggttcgcgacggtgggaagcacccgctaacacgagaaccaataac

SEQ ID NO: 144890 - DNA, 75 bp, synthetic construct
  source 1..75: mol_type = other DNA
tttctggattattacttacagggcttaatggtggtcctgaagcgctcagggatataatgttaagaatggtttcag

SEQ ID NO: 144891 - DNA, 75 bp, synthetic construct
  source 1..75: mol_type = other DNA
atgccattaatcccggatattaattcatcttcgttcagtcctgagttggaggcttttcgtgcgcaaattgtagcc

SEQ ID NO: 144892 - DNA, 75 bp, synthetic construct
  source 1..75: mol_type = other DNA
atgacagcattatgggctgaaaagcagacagccattgaaaatggcgacctgaccgttgaagagttcattaatgaa

SEQ ID NO: 144893 - DNA, 75 bp, synthetic construct
  source 1..75: mol_type = other DNA
ccagcaatacatgaacaaaaagttcaaaatgacggcacaaaaaacgctggatattacgcaacaattacgtgaaaa

SEQ ID NO: 144894 - DNA, 75 bp, synthetic construct
  source 1..75: mol_type = other DNA
tgtaagttttctgtttgtccagagagacttcagtgcccgcttgaggctattcaatgtccaattacactggagcaa

SEQ ID NO: 144895 - DNA, 75 bp, synthetic construct
  source 1..75: mol_type = other DNA
gagtattcaggacaaaatatctcaatgtaagtttcctgttagttcaggaaatttccagtgcccgcttgaggctat

SEQ ID NO: 144896 - DNA, 75 bp, synthetic construct
  source 1..75: mol_type = other DNA
tgatgcaactgatgggcgcttttcatccagcggcggcagtggaggattgctttctgagttattgcttttggggtt

SEQ ID NO: 144897 - DNA, 75 bp, synthetic construct
  source 1..75: mol_type = other DNA
ctgaagcccgaaaacggcggctcagacagcaaaatcagaactgaacaaacggccttttttatcagccagttatcc

SEQ ID NO: 144898 - DNA, 75 bp, synthetic construct
  source 1..75: mol_type = other DNA
actctggcaggcagtgaggcgttggcggcggcaaatgcaggcccggcgggtgttacagcagatgagtgatgagcg

SEQ ID NO: 144899 - DNA, 75 bp, synthetic construct
  source 1..75: mol_type = other DNA
actctggcaggcggtgaggcgttggcggcggcaaatgcagacccgacgagtgttacagcagatgagtgatgagcg

SEQ ID NO: 144900 - DNA, 75 bp, synthetic construct
  source 1..75: mol_type = other DNA
atggaatttcacgaaaacaaagccaaaacgccgtttatcagacttgtgcaactctggcaggcagtgaggcgttgg

SEQ ID NO: 144901 - DNA, 75 bp, synthetic construct
  source 1..75: mol_type = other DNA
aaacgtggctacgccacgtgatcggtgtcatcaacacgtggcctgccaaccgtgtgaaagagttgttgccctgga

SEQ ID NO: 144902 - DNA, 75 bp, synthetic construct
  source 1..75: mol_type = other DNA
gggttacaatgctctttacgaaagcggtcaggtaaccgaagcggcttgtatggcacatgcccgatgcaagatcca

SEQ ID NO: 144903 - DNA, 75 bp, synthetic construct
  source 1..75: mol_type = other DNA
ggtgaacggcttagtgcgcaggggcaaaaaatggcggcgctgggtaacgatccgcgtttagcagcaatggtggtg

SEQ ID NO: 144904 - DNA, 75 bp, synthetic construct
  source 1..75: mol_type = other DNA
gcagctggtacagcagtctgacaccgtggagtgggatgacgcgcaaggtacgctgaaagcctggcgtcggctgca

SEQ ID NO: 144905 - DNA, 75 bp, synthetic construct
  source 1..75: mol_type = other DNA
acagcagtctgacaccgtggaatgggatgacgcgcaaggtacgctgaaagcctggcgtcggctgcaaatcggtca

SEQ ID NO: 144906 - DNA, 75 bp, synthetic construct
  source 1..75: mol_type = other DNA
ttgatccgcgtacagggcttacgcggctggttactcaacgcgttagtcaggcgtcgatgacgcaacgtgccgggc

SEQ ID NO: 144907 - DNA, 75 bp, synthetic construct
  source 1..75: mol_type = other DNA
gtcaggaaagtggatcattactgttatttttacctggcgtcggagaaattcagcgtgtgcaggaacaactgactt

SEQ ID NO: 144908 - DNA, 75 bp, synthetic construct
  source 1..75: mol_type = other DNA
tggattggtgatcctcgatgagtttcatgagcgcagcttgcaggcggatttggcgttggcgctgttactcgatgt

SEQ ID NO: 144909 - DNA, 75 bp, synthetic construct
  source 1..75: mol_type = other DNA
ggatttaaaaagaaaagtggtggaacgtatgatacagttcttgtccttgaggataagaaaacagggaagctgggt

SEQ ID NO: 144910 - DNA, 75 bp, synthetic construct
  source 1..75: mol_type = other DNA
gccattctggaaacgctgaagaagagaaactatatcacgctcgaaaaagggaaacttattccgactgataccgga

SEQ ID NO: 144911 - DNA, 75 bp, synthetic construct
  source 1..75: mol_type = other DNA
tatcttgttcagttcatgcctgaaaaaacataccaggaagtgtcagttgcaattcagtgtggtgatgagtcgttc

SEQ ID NO: 144912 - DNA, 75 bp, synthetic construct
  source 1..75: mol_type = other DNA
actggcaaatcttaaagacaatcgtgatttcaaaggactttaccttaaggcgctggcgcgttcagttgccgatgc

SEQ ID NO: 144913 - DNA, 75 bp, synthetic construct
  source 1..75: mol_type = other DNA
gaactgtacaatgatctgataccgatgatcagtaatgcgaacagtgctgaaataaaagtttcccccagcgcgccg

SEQ ID NO: 144914 - DNA, 75 bp, synthetic construct
  source 1..75: mol_type = other DNA
aggagaaacactgacgacaaaagaagttattgttaatgagaagaaaacaacaccgccgccgttattcaccgaagc

SEQ ID NO: 144915 - DNA, 75 bp, synthetic construct
  source 1..75: mol_type = other DNA
aacgatgttacgcctccgggaaaacgtcacgctgaatatatgaccacgctcacccgcatgattcccgcgccgctg

SEQ ID NO: 144916 - DNA, 75 bp, synthetic construct
  source 1..75: mol_type = other DNA
catggctggcccggaaatcatcagtgggtggttacggttgcaaaaccgttcagggcaaacaaacaggctgaatgc

SEQ ID NO: 144917 - DNA, 75 bp, synthetic construct
  source 1..75: mol_type = other DNA
gcgacgtattcagggccagtctgacagcccgctgactgcaaaaggtgagcaacaggcaatgcaggtggcgaaccg

SEQ ID NO: 144918 - DNA, 75 bp, synthetic construct
  source 1..75: mol_type = other DNA
gaagtcggtgtttgatcagccaatggatattgatacgacacgtaaaagcaaggcatttaacagcgcaaaagtaac

SEQ ID NO: 144919 - DNA, 75 bp, synthetic construct
  source 1..75: mol_type = other DNA
cacttgcaggaaaaccagccacagttgaagcggcagcaacagatgataaaaaaacggctgcaccgttgcccttta

SEQ ID NO: 144920 - DNA, 75 bp, synthetic construct
  source 1..75: mol_type = other DNA
tgctgccgggttttgacaatacgccaaaggtaacagcgacaccgccgagggcattaccggagatgaagcaaagtc

SEQ ID NO: 144921 - DNA, 75 bp, synthetic construct
  source 1..75: mol_type = other DNA
aggcgctggcgcgttcagttgctgatgccgtctatggcttctccatgacgcgtgcttacaccattcctgcaaaag

SEQ ID NO: 144922 - DNA, 75 bp, synthetic construct
  source 1..75: mol_type = other DNA
gcgcttgttcgtgtcgcagattttgtcactgatccagtgattaaaaagttactgaaggataaagatcgggataaa

SEQ ID NO: 144923 - DNA, 75 bp, synthetic construct
  source 1..75: mol_type = other DNA
taaaaggttttgtcagttctaagacgaacaaacaattttcggctaaggttaagctgattgataaagcaaccggaa

SEQ ID NO: 144924 - DNA, 75 bp, synthetic construct
  source 1..75: mol_type = other DNA
ataccggatatgcgcttattgatgctctgccggatatagctgttaatccagatatgacagcattatgggctgaaa

SEQ ID NO: 144925 - DNA, 75 bp, synthetic construct
  source 1..75: mol_type = other DNA
gaagaagagaaattatatcacgctggaaaaaggaaaactcattccgacagataccggatatgcgcttattgatgc

SEQ ID NO: 144926 - DNA, 75 bp, synthetic construct
  source 1..75: mol_type = other DNA
cttggcctgattgtgaatcgtacccgtgctaaccagaaccataaatccagtttttactacaccatgaccggagtc

SEQ ID NO: 144927 - DNA, 75 bp, synthetic construct
  source 1..75: mol_type = other DNA
aaaggtattacaggcgagttaaaaggatttatcagttccaggacgaacaaagagttttcggctaaggtcaagctg

SEQ ID NO: 144928 - DNA, 75 bp, synthetic construct
  source 1..75: mol_type = other DNA
cttttgatcttctctgtaaaattcgcacaggagaaacagtgacgacaaaagaagtggttgtgaatgagaagaaaa

SEQ ID NO: 144929 - DNA, 75 bp, synthetic construct
  source 1..75: mol_type = other DNA
ttgaactgctctgtaaaattcgcacaggagaaacactgacgacaaaagaagttgttgttaatgagaagaaaacga

SEQ ID NO: 144930 - DNA, 75 bp, synthetic construct
  source 1..75: mol_type = other DNA
cagctattgaaaatggcgatctgaccgtcgaacagttcattaatgagctttatggtgaactggcagacatgataa

SEQ ID NO: 144931 - DNA, 75 bp, synthetic construct
  source 1..75: mol_type = other DNA
aactgctttgtaagatccgcaccggagaaacgttgacgacaaaagaagtcgttgttaatgagaagaaaacaacac

SEQ ID NO: 144932 - DNA, 75 bp, synthetic construct
  source 1..75: mol_type = other DNA
ctgtacggtgaactgacaggcatgatttctgatgttgacttgggcgagatgaagattgaacccgctgcgccagca

SEQ ID NO: 144933 - DNA, 75 bp, synthetic construct
  source 1..75: mol_type = other DNA
gtggtgcaggagaaacccaggcctgcggcagcggcgcgtgtgcggcggtagcggtagggattcagcaaggtttgc

SEQ ID NO: 144934 - DNA, 75 bp, synthetic construct
  source 1..75: mol_type = other DNA
tacatcggatatgactcaggtgtcacaaacccggccagtccgcgtgtaccggataaaacccgggttctcggtggt

SEQ ID NO: 144935 - DNA, 75 bp, synthetic construct
  source 1..75: mol_type = other DNA
accgttatctggagtatggcctgcagcagatgcttgaggggtacaggataatactggcgagggaattttttacac

SEQ ID NO: 144936 - DNA, 75 bp, synthetic construct
  source 1..75: mol_type = other DNA
cagcactggctgggtaccgatcacttaggccgcgatattttctcacggctaatggcggcgacccgtgtgtcgctc

SEQ ID NO: 144937 - DNA, 75 bp, synthetic construct
  source 1..75: mol_type = other DNA
ccgaaaagaagccatcttaacaccccctgcgtactttaataaaaccagcattacttcagattgttggcaaattct

SEQ ID NO: 144938 - DNA, 75 bp, synthetic construct
  source 1..75: mol_type = other DNA
tgcattgaatttctatcaaggcgatgttccttctgtcatgatccgaatccaaccggaaaatatgagtccattcat

SEQ ID NO: 144939 - DNA, 75 bp, synthetic construct
  source 1..75: mol_type = other DNA
agcttctgcgcgaggaaccgctggaaaaactggcagttcgcggcgataaaaaactggccttccactgcccgtgta

SEQ ID NO: 144940 - DNA, 75 bp, synthetic construct
  source 1..75: mol_type = other DNA
gcgtccggcggtcttccgtgcgctgacgcaggtagggctggtgctgcgaccgtttttaccggagcaggtcagagc

SEQ ID NO: 144941 - DNA, 75 bp, synthetic construct
  source 1..75: mol_type = other DNA
tgcggcagaacgcgcgggcgctggaagccgacagcatcctgcgcgcctgtgttcactgcggattttgtaccgcaa

SEQ ID NO: 144942 - DNA, 75 bp, synthetic construct
  source 1..75: mol_type = other DNA
aaactggccttccactgtccgtgtaccctgcaacatgcgcaaaaactgaatggcgaagtagaaaaagtgttactg

SEQ ID NO: 144943 - DNA, 75 bp, synthetic construct
  source 1..75: mol_type = other DNA
tgcgccagaatacgcgggcgctggaagctgacagcattctgcgcgcctgtgtgcactgcggattttgtaccgcaa

SEQ ID NO: 144944 - DNA, 75 bp, synthetic construct
  source 1..75: mol_type = other DNA
tgcgcaagagaaagggctggcgcgggcgcgcaataatattgatgcctggtggcccgcgattgaagcaggtgccga

SEQ ID NO: 144945 - DNA, 75 bp, synthetic construct
  source 1..75: mol_type = other DNA
cgggcgaaggcgactggaaaactgccgccctgcttcgcatcatgaaggtgatgtcaaccggtctgcagggcggca

SEQ ID NO: 144946 - DNA, 75 bp, synthetic construct
  source 1..75: mol_type = other DNA
cgttcagcatctcggtattggtggtaaggacgatcctgcccgcctgatcttcaatacccaaaccggtccagcgat

SEQ ID NO: 144947 - DNA, 75 bp, synthetic construct
  source 1..75: mol_type = other DNA
attgaccatcctcaacaaaccactgctgcaattccacacccagtttaacgctgcattaccatgggacagcatcga

SEQ ID NO: 144948 - DNA, 75 bp, synthetic construct
  source 1..75: mol_type = other DNA
gtgtggatcactattgcaccgttcgtgacaccaaccaaaccaatcgtagtaaccattcaggaacgcaaccgcagc

SEQ ID NO: 144949 - DNA, 75 bp, synthetic construct
  source 1..75: mol_type = other DNA
ttaactgcatcgacacggtgaaaacaccgcactccctgccgaaactgccggtggcgaatgcgctgtggaaagcgc

SEQ ID NO: 144950 - DNA, 75 bp, synthetic construct
  source 1..75: mol_type = other DNA
atgacgatttttgataattatgaagtgtggtttgtaattggcagccagcatctgtatggcccggaaaccctacgt

SEQ ID NO: 144951 - DNA, 75 bp, synthetic construct
  source 1..75: mol_type = other DNA
cagatgcgccgctacgcgtcttatcatgccgacaaaaccgtgctcacccgtaggccggataaggcgttcacgccg

SEQ ID NO: 144952 - DNA, 75 bp, synthetic construct
  source 1..75: mol_type = other DNA
aagtgggataagagtaagaatcggtcacgctgatggaacagactggtggttggcagatgctaataaaatagctcc

SEQ ID NO: 144953 - DNA, 75 bp, synthetic construct
  source 1..75: mol_type = other DNA
cagcactggctgggcaccgatcacttagggcgcgatattttctcgcggctgatggcagcgacccgcgtgtcgctc

SEQ ID NO: 144954 - DNA, 75 bp, synthetic construct
  source 1..75: mol_type = other DNA
ccgtcaccaataacagtaatggcgtttctgtcgattacgaaacagagacgccgatgacattactggtgccagaag

SEQ ID NO: 144955 - DNA, 75 bp, synthetic construct
  source 1..75: mol_type = other DNA
ctggatgccttctggacgaagcaactggccccactggcggataccgccagcaacccgtggcgctacaaaccgacc

SEQ ID NO: 144956 - DNA, 75 bp, synthetic construct
  source 1..75: mol_type = other DNA
gggtggtgctggagattaccgctgggcgggattttgacccggtgaaccgggggctactgcaacgcttcgcctgcc

SEQ ID NO: 144957 - DNA, 75 bp, synthetic construct
  source 1..75: mol_type = other DNA
cagggtaacagcggttatctgaatgaaatcgccagccggacgacccaactggatggtgatgtcaaagcctatacc

SEQ ID NO: 144958 - DNA, 75 bp, synthetic construct
  source 1..75: mol_type = other DNA
gctggggcgcgtttggtgatgtgatacgtcagggtgaaacaggccaggttaaccagttactggatatcctcagac

SEQ ID NO: 144959 - DNA, 75 bp, synthetic construct
  source 1..75: mol_type = other DNA
ctcgcgctattcggcaactgaaacaactgcgcgtagacctgccgggctggcgtaaggtactggaaggaaaacgtt

SEQ ID NO: 144960 - DNA, 75 bp, synthetic construct
  source 1..75: mol_type = other DNA
gggtggtgctggaaatcaccgccggacgagactttgatccggtgaaccgcgggctgctgcaaagcttcgcctgcc

SEQ ID NO: 144961 - DNA, 75 bp, synthetic construct
  source 1..75: mol_type = other DNA
gggtggtgctggaaatcaccgccgggcgagactttgacccggtgaatcgcgggctgctgcaacgcttcgcctgcc

SEQ ID NO: 144962 - DNA, 75 bp, synthetic construct
  source 1..75: mol_type = other DNA
ggatatggacccggctatcaccgaactggtgattgatattgacggccaggtgctgcgctacgctcacggcccggt

SEQ ID NO: 144963 - DNA, 75 bp, synthetic construct
  source 1..75: mol_type = other DNA
ggcggccgtgcagcagtgctggaacatatcgacgccctgtttgacggcagccgcgtggtgcattcgccttatgac

SEQ ID NO: 144964 - DNA, 75 bp, synthetic construct
  source 1..75: mol_type = other DNA
gctggatcaggggctggatacccggttgcaggaagagtacgaccttaaaagccgtcagcggctctaccgcttccc

SEQ ID NO: 144965 - DNA, 75 bp, synthetic construct
  source 1..75: mol_type = other DNA
gctattttctgcacgatctgctgacgcagtttatcttccgcgaagcgcacctggtggagccgaaccttcagtggg

SEQ ID NO: 144966 - DNA, 75 bp, synthetic construct
  source 1..75: mol_type = other DNA
tggtactggcgctggctttctggttgtggcagggaatgcagggcagccagcagggtaacagcgattatctgcatg

SEQ ID NO: 144967 - DNA, 75 bp, synthetic construct
  source 1..75: mol_type = other DNA
aggcagataacgagtggcatgacgcgattaactggctgggagactggtgcagtgaagagcagcatccggtgatct

SEQ ID NO: 144968 - DNA, 75 bp, synthetic construct
  source 1..75: mol_type = other DNA
atcgcctggaaaggtccgggtcacccgttatatatgactggcccggcggtacatgtctacgacggatttattcat

SEQ ID NO: 144969 - DNA, 75 bp, synthetic construct
  source 1..75: mol_type = other DNA
cgccgcggatcccgcaagcgcgtaatttgtggctgatttcacttaagctctggagttgcgaaggcgagattattg

SEQ ID NO: 144970 - DNA, 75 bp, synthetic construct
  source 1..75: mol_type = other DNA
tccacttttgtgggtacccgggtaaacgacagggtcagttcactggtcagtgatactgccaggctggcgcattat

SEQ ID NO: 144971 - DNA, 75 bp, synthetic construct
  source 1..75: mol_type = other DNA
taccggttcgcatgcctcgcctctgctctgcagaacgcctctctgaaagtatggtcgatgaaatatttcagaagg

SEQ ID NO: 144972 - DNA, 75 bp, synthetic construct
  source 1..75: mol_type = other DNA
ttaagattctttcttatcttttatctaaccgcaaagttacacataacggtacggaacgtaatgcttactccttct

SEQ ID NO: 144973 - DNA, 75 bp, synthetic construct
  source 1..75: mol_type = other DNA
ccgctggcgcggacgtccccttagcggtctgttgcgcttgatcttcgtcgcctccttgctgtgctggtgtgtcgg

SEQ ID NO: 144974 - DNA, 75 bp, synthetic construct
  source 1..75: mol_type = other DNA
cgcggtaacgcagaatgtctttttttcaccggagctgattcgtcgcctggcggatcggcacctgggggtagggtt

SEQ ID NO: 144975 - DNA, 75 bp, synthetic construct
  source 1..75: mol_type = other DNA
tgtttgggctggtgggcaacccgtctactggtggcgctaaaggtatacgcgagcaatttctcgacttcattgagg

SEQ ID NO: 144976 - DNA, 75 bp, synthetic construct
  source 1..75: mol_type = other DNA
tggcggtagtgcaaccgtgcgtctgaacactctggactggcttggtggtcagggccgggagcaggcagataacga

SEQ ID NO: 144977 - DNA, 75 bp, synthetic construct
  source 1..75: mol_type = other DNA
gccgccatttttctgccgaccggcacccaggctaacctggtcgctctgctcagtcactgcgaacgcggcgaagag

SEQ ID NO: 144978 - DNA, 75 bp, synthetic construct
  source 1..75: mol_type = other DNA
ttgagattgatggtgtactacatgagtacagcaccaaggaaggcgttcaggaagatatcctggaaatcctgctca

SEQ ID NO: 144979 - DNA, 75 bp, synthetic construct
  source 1..75: mol_type = other DNA
ccgatgagaacgcatctattagcatgcgtatcaaagttcagcgcggccgtggttatgtgccggcttctacccgaa

SEQ ID NO: 144980 - DNA, 75 bp, synthetic construct
  source 1..75: mol_type = other DNA
ttcattattgtgctggcgttgctcatgctttttttcttcggcggcatgaaaacaacgtcgcttatttttgctttt

SEQ ID NO: 144981 - DNA, 75 bp, synthetic construct
  source 1..75: mol_type = other DNA
taatgggtggcttgatttggtacatgatgtaacaccaattgcatcatgctcagattctttaacttttgtcggtca

SEQ ID NO: 144982 - DNA, 75 bp, synthetic construct
  source 1..75: mol_type = other DNA
tggaactcaattagtggcgtttataatgcgactattggtggagcatcaacattgattcttcactttaatatgaat

SEQ ID NO: 144983 - DNA, 75 bp, synthetic construct
  source 1..75: mol_type = other DNA
gaaggggaaatgtatctgctcggtacggtgctttcgcattttctgtcgctgtacgccagcgttaactcattccac

SEQ ID NO: 144984 - DNA, 75 bp, synthetic construct
  source 1..75: mol_type = other DNA
ggatgacgatgctgaaacgcgcaagctggtgggcgcgaatattgccatggattatggtgaagattttaagccgtg

SEQ ID NO: 144985 - DNA, 75 bp, synthetic construct
  source 1..75: mol_type = other DNA
ctatatctggttgccgttcatgatcctgcccgtgcaggcggcgcttgagcgtttgccgccgtcattgttgcaggc

SEQ ID NO: 144986 - DNA, 75 bp, synthetic construct
  source 1..75: mol_type = other DNA
gtgctggcttcccgtggactgtctcttggcatgcgcctggaaaactggccaccggcaagcatcgctgacgagtaa

SEQ ID NO: 144987 - DNA, 75 bp, synthetic construct
  source 1..75: mol_type = other DNA
taaaaccgcgcctggttgatatcgagcaagtgagttcgacgcacgccaaggtgacccttgagcctttagagcgtg

SEQ ID NO: 144988 - DNA, 75 bp, synthetic construct
  source 1..75: mol_type = other DNA
gaagaccacgataacgccgcctggatggcggagcagttgcgtgaagcaggcgcggatgtgatgcgtcaggacacc

SEQ ID NO: 144989 - DNA, 75 bp, synthetic construct
  source 1..75: mol_type = other DNA
tgatcgagaagctcaatgactggccgtcgaaccaagtgcatgaactgctgccctggaacttctcgtctgtaaaat

SEQ ID NO: 144990 - DNA, 75 bp, synthetic construct
  source 1..75: mol_type = other DNA
ccgaaagcgattatctactttggttcggtattctcattgtttgttggtgagaacgtcggcaccactgagcgctgg

SEQ ID NO: 144991 - DNA, 75 bp, synthetic construct
  source 1..75: mol_type = other DNA
ggcattttcgcgttgattattatcgaaacactggcgtggtttaccgtcgttgccagcctgtttgccctgccgcaa

SEQ ID NO: 144992 - DNA, 75 bp, synthetic construct
  source 1..75: mol_type = other DNA
tgaaaacactgtcgcgtcactcggatacggcaaaagcgttcgcatacctgctgaaacagtgggatggcctgaacg

SEQ ID NO: 144993 - DNA, 75 bp, synthetic construct
  source 1..75: mol_type = other DNA
cgcagatattccaaacaaagataaatttacgcaaacaataggtgcttgccgctcttttcatggtgctattagcac

SEQ ID NO: 144994 - DNA, 75 bp, synthetic construct
  source 1..75: mol_type = other DNA
aggagcattacagaaaaaccagaacggcgcagatattccgggaaaagataccttcaccaaaaatattggtgcctg

SEQ ID NO: 144995 - DNA, 75 bp, synthetic construct
  source 1..75: mol_type = other DNA
aggttgagtatgtagctggtattctgaagcaatctcaccatctggatgacatcgaggcaagggaatggctgaaaa

SEQ ID NO: 144996 - DNA, 75 bp, synthetic construct
  source 1..75: mol_type = other DNA
ttggtcgcctggtttccggctttccgcatggcgcattttttggcgtcggcgcgatcgtgttatcaaaaattatca

SEQ ID NO: 144997 - DNA, 75 bp, synthetic construct
  source 1..75: mol_type = other DNA
ggcaaagtcaccgctgccgtggcgggtatggtttcagggatgacggtcgccaatctgctgggcattccgctggga

SEQ ID NO: 144998 - DNA, 75 bp, synthetic construct
  source 1..75: mol_type = other DNA
gagtcccggccccgatttcttttttgtctctcagactgccgttagtcgttcccgtaaagaagcgatgatgggtgt

SEQ ID NO: 144999 - DNA, 75 bp, synthetic construct
  source 1..75: mol_type = other DNA
ccgaaagcaattatctactttggttcggtattctcgctgtttgtcggcgataacgtcggcaccactgagcgctgg

SEQ ID NO: 145000 - DNA, 75 bp, synthetic construct
  source 1..75: mol_type = other DNA
aatgacaaatgcgctggcaggcaaacagcctctggatgcaactttaaccgcgctcgctggccttgcgactggtgc

SEQ ID NO: 145001 - DNA, 75 bp, synthetic construct
  source 1..75: mol_type = other DNA
agctgtatgagtttcgcagatgccagcagatgctgggatatgcctcgctggcagaggttccggcggaacagctgg

SEQ ID NO: 145002 - DNA, 75 bp, synthetic construct
  source 1..75: mol_type = other DNA
gccgcgtttaaaacaggttgccctgtcggcaatttccgaggtcaacgctgagctgtatgagtttcgcagacgcca

SEQ ID NO: 145003 - DNA, 75 bp, synthetic construct
  source 1..75: mol_type = other DNA
gcagatgctgggatatgcctcgctggcagaggttccggcggaacagttggacggcaaaagtgagcgcattcatca

SEQ ID NO: 145004 - DNA, 75 bp, synthetic construct
  source 1..75: mol_type = other DNA
atgaaactgaaaaaactccccggatttagtttaggacttattgctttggcggtgggtaatgcatatgtaacacaa

SEQ ID NO: 145005 - DNA, 75 bp, synthetic construct
  source 1..75: mol_type = other DNA
ggttcgggaagctgccactctgtctgttcatttgcattatcttgacggcggtgaccgtggtgaccacggcgcacc

SEQ ID NO: 145006 - DNA, 75 bp, synthetic construct
  source 1..75: mol_type = other DNA
gcagatgctggggtatgcgtcgctggctgaggttccggcggaacagttggacggcaaaagtgagcgcattcagca

SEQ ID NO: 145007 - DNA, 75 bp, synthetic construct
  source 1..75: mol_type = other DNA
aaatacgccgttctggcctgatgttgatttgtcggaatttcgcagcgtgatgcgaacggacggcacggtgacggc

SEQ ID NO: 145008 - DNA, 75 bp, synthetic construct
  source 1..75: mol_type = other DNA
gcagaggttccggcggaacagctggacggcaaaagtgagcgcattcatcactatttcaacgcggtttactgctgg

SEQ ID NO: 145009 - DNA, 75 bp, synthetic construct
  source 1..75: mol_type = other DNA
ggatgcagaaagctggaagtgtgtgtttaccgcagcattaaagcagcaggatgttgttcctgtcaacgacggatg

SEQ ID NO: 145010 - DNA, 75 bp, synthetic construct
  source 1..75: mol_type = other DNA
atgaagtttgttgcgccagaacaggcaccggaacaggcaccggaacaggcggaaatcatcagaaacacgccgttc

SEQ ID NO: 145011 - DNA, 75 bp, synthetic construct
  source 1..75: mol_type = other DNA
gcggaagcaagcggtgatttgtggcgtgacgcccgctgggccatcagccgggtggcaccgcgcatgaaggcgggg

SEQ ID NO: 145012 - DNA, 75 bp, synthetic construct
  source 1..75: mol_type = other DNA
agctttacaccttccgccagcgccagcagatgctggggtttatgacgctggcagatgtgcctgcggagcagctgg

SEQ ID NO: 145013 - DNA, 75 bp, synthetic construct
  source 1..75: mol_type = other DNA
cgctggctctatctttaccttctcactcacactgggcgattttatcgtcccgcagctggttggtcctccaggata

SEQ ID NO: 145014 - DNA, 75 bp, synthetic construct
  source 1..75: mol_type = other DNA
acggcaaaagtgagcgcattcagcactatttcaacgcggtttactgctggcacgcgccatgctcaacgaacgtta

SEQ ID NO: 145015 - DNA, 75 bp, synthetic construct
  source 1..75: mol_type = other DNA
gctgaggttccggcggaacagctggacgggaaaagtgagcgtattcatcactatttcaacgcggtttactgctgg

SEQ ID NO: 145016 - DNA, 75 bp, synthetic construct
  source 1..75: mol_type = other DNA
ggcggcaatacgctgtcaacgtcaggactgggacgctttctcgtgtttctttatatctggctgccgttcatgatc

SEQ ID NO: 145017 - DNA, 75 bp, synthetic construct
  source 1..75: mol_type = other DNA
ctggaccttattgctggcaaaagatggcgtggcgcagtggtttttacaacatctggggttggagccgctactcac

SEQ ID NO: 145018 - DNA, 75 bp, synthetic construct
  source 1..75: mol_type = other DNA
atggcgatgaacgtattgcaatcaccttcacgtccaggtctgggtaaggtgtccggtttcttctggcgtaatccg

SEQ ID NO: 145019 - DNA, 75 bp, synthetic construct
  source 1..75: mol_type = other DNA
gcggaggccagcggtgatctgtggcgtgatgcccgctgggccatcagccgggtgcaggatgcgccgcactgtacg

SEQ ID NO: 145020 - DNA, 75 bp, synthetic construct
  source 1..75: mol_type = other DNA
gcacgcgccatgctcaacgaacgttaccaggactatgacaccacggcatccggtgtgaagcggggcgaagaactg

SEQ ID NO: 145021 - DNA, 75 bp, synthetic construct
  source 1..75: mol_type = other DNA
cggtgcgaagcgaggcgaggaactggcggaagccagcggtgatttatggcgtgacgcccgctgggccatcagccg

SEQ ID NO: 145022 - DNA, 75 bp, synthetic construct
  source 1..75: mol_type = other DNA
gcagatgctggggtatgcgtcgttggctgaggttccggcggaacagctggacgggaaaagtgagcgtattcatca

SEQ ID NO: 145023 - DNA, 75 bp, synthetic construct
  source 1..75: mol_type = other DNA
tggtgtgaagcgaggcgaggaactggcggaagccagcggtgatttatggcgtgacgcccgctgggccatcagccg

SEQ ID NO: 145024 - DNA, 75 bp, synthetic construct
  source 1..75: mol_type = other DNA
gcagaagccagcggtgatttgtggcgtgacgcccgctgggccatctgccgggtacccgcaatattgaacagctcg

SEQ ID NO: 145025 - DNA, 75 bp, synthetic construct
  source 1..75: mol_type = other DNA
gaacagaacgcgccacaaccagtaccaaccacacagataaccagccagatggccgggaatatccgggcgttattt

SEQ ID NO: 145026 - DNA, 75 bp, synthetic construct
  source 1..75: mol_type = other DNA
gcaaaaaatttcgcgttgccgtttccggttcaaccatcgacggacgtgaaatttctggtgaaatgctgcgtcagg

SEQ ID NO: 145027 - DNA, 75 bp, synthetic construct
  source 1..75: mol_type = other DNA
tcataatacacctgaatttaccaaaagccttagcgaagccaaaaaagagtttgaagaattaaatactcctaccaa

SEQ ID NO: 145028 - DNA, 75 bp, synthetic construct
  source 1..75: mol_type = other DNA
cacactcaggcacgctatgcgttaccaaacgtcatcaaaggttttattgagcgttatcctcgcgtttctttgcat

SEQ ID NO: 145029 - DNA, 75 bp, synthetic construct
  source 1..75: mol_type = other DNA
acggagcgccgcagcgaggaaggtgcgcagtggcttaaccgcgtgatgaacatgattgggcgaggacgcagggct

SEQ ID NO: 145030 - DNA, 75 bp, synthetic construct
  source 1..75: mol_type = other DNA
cagaagctggggagcactgaagcttccttcagtcagcgaccacctgcgaacggcggcgccaacgcgcagctggct

SEQ ID NO: 145031 - DNA, 75 bp, synthetic construct
  source 1..75: mol_type = other DNA
gtctcaggcgggccttatcgatcaagttgcggaactgacaagccagcgcgctgacgacgctaaggaaatccagaa

SEQ ID NO: 145032 - DNA, 75 bp, synthetic construct
  source 1..75: mol_type = other DNA
gtgaagttgaacgtgaatatgccgtgcgtgtatttggtcaggttgacgacgcgaaactgcgtgatttgagtcgtg

SEQ ID NO: 145033 - DNA, 75 bp, synthetic construct
  source 1..75: mol_type = other DNA
ggtacgtgagtccgctgaacaaatttgtcgcgttctggcctattacaaaccggaaggtgagttgtgtacccgtaa

SEQ ID NO: 145034 - DNA, 75 bp, synthetic construct
  source 1..75: mol_type = other DNA
tggacggagctggacctcgcccagactaactatctgcgcgaactggtggagctaccgccagaaaccagctctaaa

SEQ ID NO: 145035 - DNA, 75 bp, synthetic construct
  source 1..75: mol_type = other DNA
tcaccattgaagaactggcgcagtatccgttggtgacgtataccttcggttttaccggacgctccgagctggata

SEQ ID NO: 145036 - DNA, 75 bp, synthetic construct
  source 1..75: mol_type = other DNA
caactggaactggtgagcagcgctctgaaagtgatccgcacagaacgggtaaaaaaagcctgtacaaaatgtgac

SEQ ID NO: 145037 - DNA, 75 bp, synthetic construct
  source 1..75: mol_type = other DNA
aaaccagctctaaagtcgctgtagaaaaagaccgtcgtcgcatgaaggcgaatcagattcgtcgtgcggtgaaac

SEQ ID NO: 145038 - DNA, 75 bp, synthetic construct
  source 1..75: mol_type = other DNA
atctctcttttagcctgcaacgcggtgagacgctggcaattgttggcgaatccggctccggtaagtcagtgactg

SEQ ID NO: 145039 - DNA, 75 bp, synthetic construct
  source 1..75: mol_type = other DNA
ctggcagcggtaaatccactaccgggcgggcgttgctgcgcctggtcgaatcgcagggcggcgaaattatcttta

SEQ ID NO: 145040 - DNA, 75 bp, synthetic construct
  source 1..75: mol_type = other DNA
gtcactattcaggcgcagatcctgcaattaatcaaagtattgcaaaaagagatgtcgatgggcgttatctttatc

SEQ ID NO: 145041 - DNA, 75 bp, synthetic construct
  source 1..75: mol_type = other DNA
gaatctttggttatcaatacaccattccgactcaccagggccgtggcgcagagcaaatttatattccggtactga

SEQ ID NO: 145042 - DNA, 75 bp, synthetic construct
  source 1..75: mol_type = other DNA
tctcaatattgcctttatgcaggaccagcaaaaagtggctgcggttcgcggtctctcttttagcctgcgacgtgg

SEQ ID NO: 145043 - DNA, 75 bp, synthetic construct
  source 1..75: mol_type = other DNA
cgctggcattgatgcgtctgttggaacaggcgggcggtttagtgcagtgcgataaaatgctgttgcggcggcgca

SEQ ID NO: 145044 - DNA, 75 bp, synthetic construct
  source 1..75: mol_type = other DNA
atgggttaggcgcggttgggttatatctggcggcgatggcaggattgacgctaatcgccctgctgttgacgcatg

SEQ ID NO: 145045 - DNA, 75 bp, synthetic construct
  source 1..75: mol_type = other DNA
gcagaacagcgccatcagcagtgcttcctgtgcaaaataccaggtcgccccaatctgtcgggatttcaggatcat

SEQ ID NO: 145046 - DNA, 75 bp, synthetic construct
  source 1..75: mol_type = other DNA
ttacgctgcccgcgtgaacgttgagcactatctctcgccatgtccgtcaagcgaattttccgcaatgggcgatgt

SEQ ID NO: 145047 - DNA, 75 bp, synthetic construct
  source 1..75: mol_type = other DNA
aaaccattctttcacgttatccgcatcaactctctggcgggatgcgccagcgagtgatgattgcgatggcgctgt

SEQ ID NO: 145048 - DNA, 75 bp, synthetic construct
  source 1..75: mol_type = other DNA
gcaaaaagtttcgcgtggctgtctccggatcaactgttgatggccgcgaaatcagtccggtacatctgcgtgaag

SEQ ID NO: 145049 - DNA, 75 bp, synthetic construct
  source 1..75: mol_type = other DNA
tgtatgttcgcgtgtcgctgcatgagtcgccggtgtttgagaaagtcgctaaagcgaaaaaacaggtgaagatcc

SEQ ID NO: 145050 - DNA, 75 bp, synthetic construct
  source 1..75: mol_type = other DNA
ggtctcaacattcctgatggctatgaagtcactggtgattttgaatttaacggcgggtttgacgctatgcgctga

SEQ ID NO: 145051 - DNA, 75 bp, synthetic construct
  source 1..75: mol_type = other DNA
gctgggcgtagcggggcgaatatcgcgtttattgcctgtacgggtgatgacagcattggtgagagcgttcgccag

SEQ ID NO: 145052 - DNA, 75 bp, synthetic construct
  source 1..75: mol_type = other DNA
catgcgccgcatagccgacttacacgccggtgaagctaaaactgtttctcgtgacgctgccatcattgccgaagc

SEQ ID NO: 145053 - DNA, 75 bp, synthetic construct
  source 1..75: mol_type = other DNA
cggcttcgatgatgatcttgccggggggggggggggcacagacaacgcaggccagcaaccgtactccgccggcct

SEQ ID NO: 145054 - DNA, 75 bp, synthetic construct
  source 1..75: mol_type = other DNA
aatttaataataatttattgtttttgtttttgactatttcaacaatatcgtatggttgcgaaatattctttgtgc

SEQ ID NO: 145055 - DNA, 75 bp, synthetic construct
  source 1..75: mol_type = other DNA
cgttttgcccatgctgccgctgcgattgccgtaacacgtaaaggcgcacaaccttccgtaccgtggcgtgaagag

SEQ ID NO: 145056 - DNA, 75 bp, synthetic construct
  source 1..75: mol_type = other DNA
gactttattgaatcccgcgagtacgaaaaaccacttaacgtctacggttattcgaagttcctgtttgatgaatat

SEQ ID NO: 145057 - DNA, 75 bp, synthetic construct
  source 1..75: mol_type = other DNA
gcgacttcgtctacgtaggcgacgtggctgatgtgaacctgtggttcctggaaaatggcgtttccggcatcttta

SEQ ID NO: 145058 - DNA, 75 bp, synthetic construct
  source 1..75: mol_type = other DNA
gactttattgaatcccgcgagtacgaaaaaccgttgaatgtctacggttactcaaaattcctgtttgatgaatat

SEQ ID NO: 145059 - DNA, 75 bp, synthetic construct
  source 1..75: mol_type = other DNA
cgtgtgcagttattgggacgagcatggtagccatgccagcacatgcagcagaaggagaccatacaatttctctgg

SEQ ID NO: 145060 - DNA, 75 bp, synthetic construct
  source 1..75: mol_type = other DNA
gagattggtgttataacatcttttacatgggcgcgttctatgactaatgcgcaggcatttattgatgttaaccca

SEQ ID NO: 145061 - DNA, 75 bp, synthetic construct
  source 1..75: mol_type = other DNA
aacctcttttacatgggtgcgctccatgactaatgcgcaggcatttattgatgttaagcccgcagatcaaaaccc

SEQ ID NO: 145062 - DNA, 75 bp, synthetic construct
  source 1..75: mol_type = other DNA
atcaacctgatttgggcctggggccacccggaagtttacatcctgatcctgcctgtattcggtgtgttctccgaa

SEQ ID NO: 145063 - DNA, 75 bp, synthetic construct
  source 1..75: mol_type = other DNA
agtatttacctgggcatcactgtgcgcaaacgtactgattattgcttccttcccaattctgacggttaccgtcgc

SEQ ID NO: 145064 - DNA, 75 bp, synthetic construct
  source 1..75: mol_type = other DNA
ctttatgccactgtatgcgctgggcttcatgggcatgacccgtcgtttgagccagcagattgacccgcagttcca

SEQ ID NO: 145065 - DNA, 75 bp, synthetic construct
  source 1..75: mol_type = other DNA
aagaagaatccggcagaggcttaccggctggctgcatgggctgacgatgagccgttacccgtgacacaggtctgt

SEQ ID NO: 145066 - DNA, 75 bp, synthetic construct
  source 1..75: mol_type = other DNA
cactggcctcggctggcgaagcaggcttcctgccgccacaccactatgatcaagttttcaccgctcacggtgtga

SEQ ID NO: 145067 - DNA, 75 bp, synthetic construct
  source 1..75: mol_type = other DNA
taagccatctacgtcaaaaacattgaatgctgcatcgcactctaaaaacttaattgacattatagattctggttg

SEQ ID NO: 145068 - DNA, 75 bp, synthetic construct
  source 1..75: mol_type = other DNA
gaccattccagtgttctacgctgcttaccatgaatacgggagctatggggtcggggaactatccaattttgacaa

SEQ ID NO: 145069 - DNA, 75 bp, synthetic construct
  source 1..75: mol_type = other DNA
gcgagacgacgctgcgacgttctgttcgccatgatgcgcgacgggactttttatacccccgcaggcgtcataaca

SEQ ID NO: 145070 - DNA, 75 bp, synthetic construct
  source 1..75: mol_type = other DNA
gcgcaaacattctgattatcgcctccttcccaattctgacggttaccgtcgcgttgctaaccctggatcgctatc

SEQ ID NO: 145071 - DNA, 75 bp, synthetic construct
  source 1..75: mol_type = other DNA
aaacgcacccccgcgttggcgtattcgctggcagaatggtcagaagacgaaatacggatgccaccgctaccagta

SEQ ID NO: 145072 - DNA, 75 bp, synthetic construct
  source 1..75: mol_type = other DNA
atgacgactaaacgtaaaccgtatgtacggccaatgacgtccacctggtggaaaaaattgccgttttatcgcttt

SEQ ID NO: 145073 - DNA, 75 bp, synthetic construct
  source 1..75: mol_type = other DNA
tcatacttcgcgcaagcgtaaaaaacagctggataagtgctcatccgctggaagtgatgtagttgaaaaaattaa

SEQ ID NO: 145074 - DNA, 75 bp, synthetic construct
  source 1..75: mol_type = other DNA
ttgatgatgttcaatttacggcgctaaagaaagatatttatccggtaatagaaaacaataatggaacaaataggc

SEQ ID NO: 145075 - DNA, 75 bp, synthetic construct
  source 1..75: mol_type = other DNA
atatgaaaattaacgatttttatttgccgttgttgccagttatcggaaccggtcgcctctatattacgtccgaag

SEQ ID NO: 145076 - DNA, 75 bp, synthetic construct
  source 1..75: mol_type = other DNA
taatctacagaagttaaataatccgcaggagttaaataattcgcaggagttaaataattcgcaggagttaaataa

SEQ ID NO: 145077 - DNA, 75 bp, synthetic construct
  source 1..75: mol_type = other DNA
atattaagtcctcatcttatatcaaaaataatgacggtagtgagataatgaagtttgttatgaataatcctgtag

SEQ ID NO: 145078 - DNA, 75 bp, synthetic construct
  source 1..75: mol_type = other DNA
gcgggaaatcacaaaatggaaaatggaaaatggatgttcgctttaacagggcggatttaatttcaagaattgaga

SEQ ID NO: 145079 - DNA, 75 bp, synthetic construct
  source 1..75: mol_type = other DNA
actggcgctgggtgagtgaatcactacgacagctacgggcaagcgttgatgccttccacactcgcgccagccact

SEQ ID NO: 145080 - DNA, 75 bp, synthetic construct
  source 1..75: mol_type = other DNA
gcgttctgcctgtgccgcctaccgctcatcagttgctgatgcgctgccaggcgttacttattcaactgctccata

SEQ ID NO: 145081 - DNA, 75 bp, synthetic construct
  source 1..75: mol_type = other DNA
tgatgatagtcaagagagaaggtgctggattgttattaatacccctttagcaacagtaaatctgagtgataataa

SEQ ID NO: 145082 - DNA, 75 bp, synthetic construct
  source 1..75: mol_type = other DNA
caaattgtttcacaagcagcgcgtcgcagtgccgaaggcgaactgctgttagctacccgcaaccgcttgagtagt

SEQ ID NO: 145083 - DNA, 75 bp, synthetic construct
  source 1..75: mol_type = other DNA
caacaactaagccaggcattatggctgagcggcatcagccagccgcttattcactacgaggccgctttcaaccgc

SEQ ID NO: 145084 - DNA, 75 bp, synthetic construct
  source 1..75: mol_type = other DNA
tatcaattaattaagaagtatgagggcgaacagctgtatcttaatgagttaggatatgtttatggtaatgaagaa

SEQ ID NO: 145085 - DNA, 75 bp, synthetic construct
  source 1..75: mol_type = other DNA
taatattcttattgattccttagatgatgcaaaagttaatctcgaaaaggtcatcgattcgatgttgaagacttt

SEQ ID NO: 145086 - DNA, 75 bp, synthetic construct
  source 1..75: mol_type = other DNA
tatctaaggtggaaatagaaattacactttctactaccactactatggggactcgtcaaggacatacagccatta

SEQ ID NO: 145087 - DNA, 75 bp, synthetic construct
  source 1..75: mol_type = other DNA
ccagataatgttatcaaagaaaaactgaataatgaatacaaacttagatttagaatgatgcaaactatcttaaaa

SEQ ID NO: 145088 - DNA, 75 bp, synthetic construct
  source 1..75: mol_type = other DNA
ataaaagtatgcaatattttggtgattctgaaaagataacgcatgcatgctccgtgatgagtcatattgattttg

SEQ ID NO: 145089 - DNA, 75 bp, synthetic construct
  source 1..75: mol_type = other DNA
cacgcagctgatcctgtccacgccgttcacggcggcgccattacctaatgccgtattcgtcattgatgctggtca

SEQ ID NO: 145090 - DNA, 75 bp, synthetic construct
  source 1..75: mol_type = other DNA
gtgttgctgatggtgtaaatttacgtttatgggaaccagtggatcgtagaaccatagcagagtttatttatcttg

SEQ ID NO: 145091 - DNA, 75 bp, synthetic construct
  source 1..75: mol_type = other DNA
tattgatgccaccggcctcggtgtcggcgtgttccagctcgtgcgctcgttctatcccgccgcgcgtgatatccg

SEQ ID NO: 145092 - DNA, 75 bp, synthetic construct
  source 1..75: mol_type = other DNA
cttatatcaaaaataatgatggtagtgagataatgaagtttgttatgaataatcctgaaggggagcgagcggatt

SEQ ID NO: 145093 - DNA, 75 bp, synthetic construct
  source 1..75: mol_type = other DNA
tggagcgtagctacctgaatgcattgggcgacgcgctgaaaattccccaggatgttcgcgaagggatcgaacgcg

SEQ ID NO: 145094 - DNA, 75 bp, synthetic construct
  source 1..75: mol_type = other DNA
ttctacctcctcgtctgcggatcagggattgggcaaacttttagtgccaggcgcattaggcggactggctgggct

SEQ ID NO: 145095 - DNA, 75 bp, synthetic construct
  source 1..75: mol_type = other DNA
gctggtcgcaaataaatcagcacgtaaacttcttacgaaatatggcaccaacgcgttactggttggcggcggagc

SEQ ID NO: 145096 - DNA, 75 bp, synthetic construct
  source 1..75: mol_type = other DNA
ccgcagaggaaaaacttgccaggttcgctgccattgatgacccgaaaaaggcgattgaggcgctggaaatgctgt

SEQ ID NO: 145097 - DNA, 75 bp, synthetic construct
  source 1..75: mol_type = other DNA
gcgaactggcgcagtttgatgaggcgctggagttcctcgtcgaaaattaccctcagaaagactacatcctgaaag

SEQ ID NO: 145098 - DNA, 75 bp, synthetic construct
  source 1..75: mol_type = other DNA
gccagtttctcccgtattcaggaagcggtggaaggcgtcgcaacgtcacaggccgacattatcgaccgttttaat

SEQ ID NO: 145099 - DNA, 75 bp, synthetic construct
  source 1..75: mol_type = other DNA
gtgttgaggtaaaagaaaaattaacagatgatattattgaactcatatctggaattaaacgcaaccaggaaaaaa

SEQ ID NO: 145100 - DNA, 75 bp, synthetic construct
  source 1..75: mol_type = other DNA
agttcacggctgatacgttccgtgattttattatccggacactgacagatacccttccggctggcggaaatacaa

SEQ ID NO: 145101 - DNA, 75 bp, synthetic construct
  source 1..75: mol_type = other DNA
cctttctcctggcgaaaggcaattgttcgcgcaataaaacatagaagagttcgttatttattttggtggcgcata

SEQ ID NO: 145102 - DNA, 75 bp, synthetic construct
  source 1..75: mol_type = other DNA
cagcgatgaccaaaatcacctcactgaatggcgaggcgaaaactcaccgcgaagcgaaggaagcggcggaagcca

SEQ ID NO: 145103 - DNA, 75 bp, synthetic construct
  source 1..75: mol_type = other DNA
cgctgctgctgaccgcctgtagcaccgaccagaaaacactgctgccggtggatgaaaacaccaccatgctgaata

SEQ ID NO: 145104 - DNA, 75 bp, synthetic construct
  source 1..75: mol_type = other DNA
cgctactgttggcagcatgtagcacagaccagaaaactctgctgccggtggatgaaaacaccaccatgctgaata

SEQ ID NO: 145105 - DNA, 75 bp, synthetic construct
  source 1..75: mol_type = other DNA
gtcacaggccgacattatcgaccgttttaatgcgctggaaacccgccatcagcaggacagccagaaaatcacttc

SEQ ID NO: 145106 - DNA, 75 bp, synthetic construct
  source 1..75: mol_type = other DNA
cattaacgggcgcgcctatctggtcgggctggcaatgaccgacaccccggccagcctgggcacggagcgcctgaa

SEQ ID NO: 145107 - DNA, 75 bp, synthetic construct
  source 1..75: mol_type = other DNA
tacatcctcaaagcgtccggcaacagcggcggtggctctcaccagtcgcagcatcaggccgggcagaaaaccatg

SEQ ID NO: 145108 - DNA, 75 bp, synthetic construct
  source 1..75: mol_type = other DNA
cgatcacaaggtggacgggaacccctacgagaaattacccaaagaggtacgcgcagattttcaggcgcgtatcga

SEQ ID NO: 145109 - DNA, 75 bp, synthetic construct
  source 1..75: mol_type = other DNA
tgaacaaaacatacacaaaaaatatagatctccgtcacatttttgcgttatacaggaagctcgccactgtgaagg

SEQ ID NO: 145110 - DNA, 75 bp, synthetic construct
  source 1..75: mol_type = other DNA
gaactgcaggcgctttggcaactgccggtactgcagcctcaacagcatcaaccgttgcgggtgcatcagctgcaa

SEQ ID NO: 145111 - DNA, 75 bp, synthetic construct
  source 1..75: mol_type = other DNA
atagcagccgccagacgctggatgcgcaggtaatcagcggcgaaggtgaagataatctgctgacgttatcactgc

SEQ ID NO: 145112 - DNA, 75 bp, synthetic construct
  source 1..75: mol_type = other DNA
gcgctggtcgctaaaggcatcaccattgagttgttctgtgcgcctggcgaaattccctctgcccgcttaccgatg

SEQ ID NO: 145113 - DNA, 75 bp, synthetic construct
  source 1..75: mol_type = other DNA
ataagtatcttgttcctttctttggtaaatacagcatagataaaattacagcaccattagcaattaaggcactgg

SEQ ID NO: 145114 - DNA, 75 bp, synthetic construct
  source 1..75: mol_type = other DNA
agagagcatgagaaaattaccaaaatcagaccagcaaaatataaaactcaaactagacgaaattgattcaagaaa

SEQ ID NO: 145115 - DNA, 75 bp, synthetic construct
  source 1..75: mol_type = other DNA
gttacaagctaacttcacagccctgtctgagggcttcagacaggtcgtttcatctgtagaaaatgactatattca

SEQ ID NO: 145116 - DNA, 75 bp, synthetic construct
  source 1..75: mol_type = other DNA
gggatggatcttgaactgacatggctccagtcgttgaaggttgtgctggttcgtggagctgttgcattgggtctg

SEQ ID NO: 145117 - DNA, 75 bp, synthetic construct
  source 1..75: mol_type = other DNA
gacaatggtcaggccagatgaggagattagagcagtgttgtcagaggttgattttgattctggattgtggattat

SEQ ID NO: 145118 - DNA, 75 bp, synthetic construct
  source 1..75: mol_type = other DNA
aatgggtaggagatttttttgatgaggcgagaaaaggggtaattaatagatccggtggtaagaaaggtttgagaa

SEQ ID NO: 145119 - DNA, 75 bp, synthetic construct
  source 1..75: mol_type = other DNA
tgcggcgtgcaggacgtgtttaacgtcggcggcgcacaggccattgccgcgctggcgtttggtacagaatccgtg

SEQ ID NO: 145120 - DNA, 75 bp, synthetic construct
  source 1..75: mol_type = other DNA
gccgcgtgccgaaaccgcccgtcaggcactgagcgccagccgcctgatcgtgactaaagatttagcgcagtgcgt

SEQ ID NO: 145121 - DNA, 75 bp, synthetic construct
  source 1..75: mol_type = other DNA
cgctggccgccgccgagcgcctgaccgcccacaaaaacgccgttacgctgcgcgttgcagccctgaaggagcaag

SEQ ID NO: 145122 - DNA, 75 bp, synthetic construct
  source 1..75: mol_type = other DNA
gctgatggcgatgcgcagagggatggggcagctcagttctgagtacgcgttgacggcaaagcgtattggttttaa

SEQ ID NO: 145123 - DNA, 75 bp, synthetic construct
  source 1..75: mol_type = other DNA
atgcttgatctgtggtcgcgagccgtcattggctggtcgatgtcgccgcgtatgacggcacaacttgcctgcgat

SEQ ID NO: 145124 - DNA, 75 bp, synthetic construct
  source 1..75: mol_type = other DNA
ccgcggccctgaagggcgttgccggttatcaggaagagctggccaaaatcgccctgatcacctctgcggacggga

SEQ ID NO: 145125 - DNA, 75 bp, synthetic construct
  source 1..75: mol_type = other DNA
aacagctgccgtattggtgttttataagcctttagtaggtattcaactatctagacaaatgtttagctctatttt

SEQ ID NO: 145126 - DNA, 75 bp, synthetic construct
  source 1..75: mol_type = other DNA
attgggcaaccagaaccatataagttaaagtttctgtattctgtattgcaaagcactggtgtattatattgctgc

SEQ ID NO: 145127 - DNA, 75 bp, synthetic construct
  source 1..75: mol_type = other DNA
cccacaagaggtgtggatcaaccccattgatgctcaggcacgcggtatccgtcatggcgataccgtgcgggtatt

SEQ ID NO: 145128 - DNA, 75 bp, synthetic construct
  source 1..75: mol_type = other DNA
gcgttatccgccagccgcctgattgtggcgcgcgatcttgaccagtgcatcgctatctccaaccagtacggcccg

SEQ ID NO: 145129 - DNA, 75 bp, synthetic construct
  source 1..75: mol_type = other DNA
aggcggaacacggcccggattctcaggtgattttactgacgccagatgccgatatggccaaacgcgtgggtgaag

SEQ ID NO: 145130 - DNA, 75 bp, synthetic construct
  source 1..75: mol_type = other DNA
gcctgcgaacgcctgagcgacgagctaaaacaggcgatggcggtggcagtaaagaatattgaaaccttccacact

SEQ ID NO: 145131 - DNA, 75 bp, synthetic construct
  source 1..75: mol_type = other DNA
tgctgtaatttgttgtccctgtgtgtgctggccccggtattctgtacacccaaaaagctggctgaagtttccagg

SEQ ID NO: 145132 - DNA, 75 bp, synthetic construct
  source 1..75: mol_type = other DNA
tatacgcaacatcagacaggagacagtctgcggtacagttacaagggcaacacagaaccaactatgcaccatcgc

SEQ ID NO: 145133 - DNA, 75 bp, synthetic construct
  source 1..75: mol_type = other DNA
caggggatcgctcagttggcaatcaagaatccctggttgcttatgttcattcctgccaacaatacgccgaccacc

SEQ ID NO: 145134 - DNA, 75 bp, synthetic construct
  source 1..75: mol_type = other DNA
agtattatccagcatgaaaatggaagaaatatctattctcgagagctgattaataaggctgccgtggcaggaatt

SEQ ID NO: 145135 - DNA, 75 bp, synthetic construct
  source 1..75: mol_type = other DNA
cgaggcggccagaagctccaacaaatttatgacctccctgcgtgagtttagcgcgatggcaggcatggcccgtga

SEQ ID NO: 145136 - DNA, 75 bp, synthetic construct
  source 1..75: mol_type = other DNA
cttgctcgtcagttaatgttgtacgccggacgtggaataaacagcgtggagaaaattatctctacctgggcgcct

SEQ ID NO: 145137 - DNA, 75 bp, synthetic construct
  source 1..75: mol_type = other DNA
aagaaggcggtcaaagcctgctgccctgggataaatgggagccagaaatagaggctgccctgaaatcgcttggcg

SEQ ID NO: 145138 - DNA, 75 bp, synthetic construct
  source 1..75: mol_type = other DNA
tgagtcgacggggctggccattgtgggcttcaccgcctcgatcgccagcggccttgataaactctactgggccgc

SEQ ID NO: 145139 - DNA, 75 bp, synthetic construct
  source 1..75: mol_type = other DNA
tagaaataataaccccggtaatatcgactttcgtgggcaatctggggcgacgctcgaaaggcctggcggcaggtt

SEQ ID NO: 145140 - DNA, 75 bp, synthetic construct
  source 1..75: mol_type = other DNA
cttcaggcttattgagggaacatccagccttatcacctggtggcaatcactcgacaagcaaacgcgggagctgat

SEQ ID NO: 145141 - DNA, 75 bp, synthetic construct
  source 1..75: mol_type = other DNA
gaatggataaaggataaaaccggttgggatccgcgcagtgtaggacagaccataaggagcattggagaggatgaa

SEQ ID NO: 145142 - DNA, 75 bp, synthetic construct
  source 1..75: mol_type = other DNA
tgacgcggcgcgcacctctctggaaagcctctcccggtttgttcgtaacaatcccggcgcggaaggcttcctgaa

SEQ ID NO: 145143 - DNA, 75 bp, synthetic construct
  source 1..75: mol_type = other DNA
accgtgacaccgtatggcaccttccgcgccgagcaaggtagctacgcgctggtggatctcttcacccgctaccag

SEQ ID NO: 145144 - DNA, 75 bp, synthetic construct
  source 1..75: mol_type = other DNA
gaaacgccgttaatcctaatctgccacgcaccacggttaaaatgttcaccagctatcggttgcctgtcatgccag

SEQ ID NO: 145145 - DNA, 75 bp, synthetic construct
  source 1..75: mol_type = other DNA
acctgaccactgcaaaatttgacgcactgatcgacttcttcaccattggtgaatttggtgttctggcccgcaata

SEQ ID NO: 145146 - DNA, 75 bp, synthetic construct
  source 1..75: mol_type = other DNA
aactactacctgaacggcgattcaaaaattcaggttcagtcatatccggcgcagggcatcaagaaccaccgtcac

SEQ ID NO: 145147 - DNA, 75 bp, synthetic construct
  source 1..75: mol_type = other DNA
tgtctgctgaaggtttgcaaatcaccgcagacgatcagggcctgtctggtgttgtctacggcgctaacctggcgt

SEQ ID NO: 145148 - DNA, 75 bp, synthetic construct
  source 1..75: mol_type = other DNA
gccaactgataactacaacttccgcatcatgtcagcagaaggtttacagatcacctgcgacatgttaggccgttc

SEQ ID NO: 145149 - DNA, 75 bp, synthetic construct
  source 1..75: mol_type = other DNA
accgcgcatgatgccgactgataactacaacttccgcatcatgtccgctgagggtctgcaaatcacccgtgacat

SEQ ID NO: 145150 - DNA, 75 bp, synthetic construct
  source 1..75: mol_type = other DNA
aaattctaccttgaaggtaatgacgcaatggttgttgatggtcataaagcaatgggcattaaaaaccacaaaaac

SEQ ID NO: 145151 - DNA, 75 bp, synthetic construct
  source 1..75: mol_type = other DNA
agtcggtaaaacgctgaaaatgtacaacgtatccggtgacatcaatgatgaagttgtgatgtctatggatggtca

SEQ ID NO: 145152 - DNA, 75 bp, synthetic construct
  source 1..75: mol_type = other DNA
ctaccaacgcccgtatgcagggtcattggagcgaactgtgggcgcagcgcaatatcttcaacgctcagcatgacg

SEQ ID NO: 145153 - DNA, 75 bp, synthetic construct
  source 1..75: mol_type = other DNA
atcggtattgaaatcgtcaacgacctgatgggtgtgcaaaccgtactgcctatcggtaaaacgctgaaaatgtac

SEQ ID NO: 145154 - DNA, 75 bp, synthetic construct
  source 1..75: mol_type = other DNA
gactttcgataagattattgaattctttaccactggtgagttcgggaaactggcccgcgccaacttcgtagctaa

SEQ ID NO: 145155 - DNA, 75 bp, synthetic construct
  source 1..75: mol_type = other DNA
gcagttaaagaacgctatctatcgcgcactgacacaactggacggttatgagctgcgtccacaggatattttgtt

SEQ ID NO: 145156 - DNA, 75 bp, synthetic construct
  source 1..75: mol_type = other DNA
catattgcggtcatccatcaatatatgcgtgaaatgatggcaggcggcggcaaaatgatcctcgggtcagacagc

SEQ ID NO: 145157 - DNA, 75 bp, synthetic construct
  source 1..75: mol_type = other DNA
ggagtacgccttcgatgtaacgccgtataaaaaccgtgtttatcagggctttgtgaaaggggcgacccagcaacc

SEQ ID NO: 145158 - DNA, 75 bp, synthetic construct
  source 1..75: mol_type = other DNA
tgggatgaagctctggataccatcagcgataacctccgtcggatccttaaagattacggaaatgaggctgtacat

SEQ ID NO: 145159 - DNA, 75 bp, synthetic construct
  source 1..75: mol_type = other DNA
tttattctgagcggctggcgaccattgcggatacctgggaattgaaaaaggatgaaattattcatccgctgccag

SEQ ID NO: 145160 - DNA, 75 bp, synthetic construct
  source 1..75: mol_type = other DNA
accggtgcggtggtgatgttgcgatcaacgattcgtatgggccgccagttgcaaaatgtcgccgcccaggacgtc

SEQ ID NO: 145161 - DNA, 75 bp, synthetic construct
  source 1..75: mol_type = other DNA
gttattgaaagaaaaggataaaagtttaataggaaagggggctgtaaaattacagcggtacaatcaacaagataa

SEQ ID NO: 145162 - DNA, 75 bp, synthetic construct
  source 1..75: mol_type = other DNA
gaacgtgagcatctggcgttgagcgcgttactggaggcgttgcctgaacctgtgctttctgtcgatatgaaaagc

SEQ ID NO: 145163 - DNA, 75 bp, synthetic construct
  source 1..75: mol_type = other DNA
tggcgcagccgtacgtggtgaatggcgttgtaagcggcactgtgttgcaggctgttcttccattcgcaccggtga

SEQ ID NO: 145164 - DNA, 75 bp, synthetic construct
  source 1..75: mol_type = other DNA
aatgtcagcgagctgacagaggtgtttgcgcgcattaagcagattggtaagcgtaaaccgaccgccgtatgtagc

SEQ ID NO: 145165 - DNA, 75 bp, synthetic construct
  source 1..75: mol_type = other DNA
tatatggaaagtctgactgctgaagagcgcgagattatcaaggcgggtagtttgattaacttcaataaaaaccgt

SEQ ID NO: 145166 - DNA, 75 bp, synthetic construct
  source 1..75: mol_type = other DNA
aaaacctgcgccgtatgtggggccgcaggatgtggcgctggctatcatcggtgccgtgttcaaaaacggctacgt

SEQ ID NO: 145167 - DNA, 75 bp, synthetic construct
  source 1..75: mol_type = other DNA
tgtgctgattcttgtttctcctgccgtggttaatggggcgcctgacgtcacgctgagtattcagcgtgatattgc

SEQ ID NO: 145168 - DNA, 75 bp, synthetic construct
  source 1..75: mol_type = other DNA
gtcacaaaagcctatcacatttgcgtgctgatcatcagcgccatcttttcggccttctatcgcctactcgatagc

SEQ ID NO: 145169 - DNA, 75 bp, synthetic construct
  source 1..75: mol_type = other DNA
acaactgactccgaacagtatggagcaatagcagagtcatatggtgctgattttttgctgagaccggaagaacta

SEQ ID NO: 145170 - DNA, 75 bp, synthetic construct
  source 1..75: mol_type = other DNA
atgtgccgaaacccggacttcaaagaatatgcagaaagctgtatggaaggttcaactggcagacaacgagttaac

SEQ ID NO: 145171 - DNA, 75 bp, synthetic construct
  source 1..75: mol_type = other DNA
tggtttattttagatagcactggtgtatcagttagtatagatcagataattgactttaatccaaagcgaacttta

SEQ ID NO: 145172 - DNA, 75 bp, synthetic construct
  source 1..75: mol_type = other DNA
ttatcttaagaagttcaatgttaatctgccaacaggagcttccctacgcaaaattaatgagttattagattcatt

SEQ ID NO: 145173 - DNA, 75 bp, synthetic construct
  source 1..75: mol_type = other DNA
gataccactgatgctgaccatgacaagcgtatcgcagagaactatatctatgatgaagtgctgggtgtcaatgtt

SEQ ID NO: 145174 - DNA, 75 bp, synthetic construct
  source 1..75: mol_type = other DNA
gatcagcaaatagaggaagcgaagaaggtctatacgacattcagtgagctaccactggagatcgtggttgatgtc

SEQ ID NO: 145175 - DNA, 75 bp, synthetic construct
  source 1..75: mol_type = other DNA
tgatgaagtgctgggtgtctctgttccacgctcagagtttgaaagacgcgctaagtttaacaatgaccagacatc

SEQ ID NO: 145176 - DNA, 75 bp, synthetic construct
  source 1..75: mol_type = other DNA
ggaaaactttacatatgatggactgcactttagtcagttagcttataatcaattgacgaaagagatagaggaaaa

SEQ ID NO: 145177 - DNA, 75 bp, synthetic construct
  source 1..75: mol_type = other DNA
ttgcaatattaacctcttgctgtgctcaggcgaaaacactaacaaatgcggagattgcttcacgatttgttaata

SEQ ID NO: 145178 - DNA, 75 bp, synthetic construct
  source 1..75: mol_type = other DNA
actgccaaaagaactttgttgataaaggaatgattgctgatatcgcattccacgatttagacagtaaaaatcccc

SEQ ID NO: 145179 - DNA, 75 bp, synthetic construct
  source 1..75: mol_type = other DNA
aataattgagccagttattgaattgtataacgacgtggtatgggcgtcgttcaatacactgcacaataaaattaa

SEQ ID NO: 145180 - DNA, 75 bp, synthetic construct
  source 1..75: mol_type = other DNA
ctggtgattgtctgcatacgcggggtgtttctgatgagtgataagctcccttctgattacgaaattctttttgac

SEQ ID NO: 145181 - DNA, 75 bp, synthetic construct
  source 1..75: mol_type = other DNA
gcgctgtgggtgtgtctggtttaaccggggcacaggatgcgcaggtcgcgaaagcggcagcagcggtattggcga

SEQ ID NO: 145182 - DNA, 75 bp, synthetic construct
  source 1..75: mol_type = other DNA
ctggcttatcacaagaaaggccagatcgaatacattccgttcccggataaactgaaaggccgctatcaggcgttc

SEQ ID NO: 145183 - DNA, 75 bp, synthetic construct
  source 1..75: mol_type = other DNA
atgcctacattattcagaaaagaatatccgcgaaagagtagaacaacagaatttctgtttctcgttctgtttatc

SEQ ID NO: 145184 - DNA, 75 bp, synthetic construct
  source 1..75: mol_type = other DNA
aataattgagccagttattgaattgtataacgacgttgtatgggcgctgttcaacacactgcacaacaaaatcaa

SEQ ID NO: 145185 - DNA, 75 bp, synthetic construct
  source 1..75: mol_type = other DNA
actgcctgtacaaaatgggctgcaaagggcctaccacctataacgcctgttcctccacacgctggaacgatggcg

SEQ ID NO: 145186 - DNA, 75 bp, synthetic construct
  source 1..75: mol_type = other DNA
ttgctaccgagcaaatgggggagattgacgtcatttacgataaatttgaggcattcctggataagaagcttatgg

SEQ ID NO: 145187 - DNA, 75 bp, synthetic construct
  source 1..75: mol_type = other DNA
caacgttacttcaccggcaatccatccgggctcacagaacgtgatgcccggatttacagccattacctgcagact

SEQ ID NO: 145188 - DNA, 75 bp, synthetic construct
  source 1..75: mol_type = other DNA
aggagaaagcgcgtaccgccgcgctggggcgtcgtgaaactaagggctatgaagagatggtgaacaacggacgta

SEQ ID NO: 145189 - DNA, 75 bp, synthetic construct
  source 1..75: mol_type = other DNA
ttttacgctggctggaaagcgaaccgcaagattcgcataacgagcatgtcgttattaatgggcagaatttcctga

SEQ ID NO: 145190 - DNA, 75 bp, synthetic construct
  source 1..75: mol_type = other DNA
agtttgcaggacattcaggggaaagatgataaatggtcagtaccgctaaccgtgcgtggtaaaagtgccgatatt

SEQ ID NO: 145191 - DNA, 75 bp, synthetic construct
  source 1..75: mol_type = other DNA
gcctgctggcgggcgataccggcaaagtgatgatcgttggcgatgacgatcagtcaatctacggctggcgcggag

SEQ ID NO: 145192 - DNA, 75 bp, synthetic construct
  source 1..75: mol_type = other DNA
tatatattgtctttgcttttttctaaaaataaaaatttcatactatattctttactgatatttataacatcgata

SEQ ID NO: 145193 - DNA, 75 bp, synthetic construct
  source 1..75: mol_type = other DNA
atgtcggtgaaaataatcaatttactgagaagcctgtaactgaatactccccggtgatacaggataatacagcga

SEQ ID NO: 145194 - DNA, 75 bp, synthetic construct
  source 1..75: mol_type = other DNA
gcgtatcaggaagcctgtgaccgcgcgggtctggttgattttgctgaattgctgcttcgtgcccacgaattatgg

SEQ ID NO: 145195 - DNA, 75 bp, synthetic construct
  source 1..75: mol_type = other DNA
acgctggacgtggtacgtcagacatcgcgcgatcgccagttaacactctggcaggcatgtcgtgaactgttgcag

SEQ ID NO: 145196 - DNA, 75 bp, synthetic construct
  source 1..75: mol_type = other DNA
ttcaaagctacggtaatccggtggagcagacctggcagaaggtgtatcaggcgtatcaggaagcgtgcgaccgtg

SEQ ID NO: 145197 - DNA, 75 bp, synthetic construct
  source 1..75: mol_type = other DNA
tgtcagcattgatgagcagcattatccagcatgagaatggaagaaatatctattctcgagagctgattaataagg

SEQ ID NO: 145198 - DNA, 75 bp, synthetic construct
  source 1..75: mol_type = other DNA
tcctcgtctcgcttggtttcgatatcgacgaagctggcgcggaaaagttcgattcagtcctggccggcacgaccg

SEQ ID NO: 145199 - DNA, 75 bp, synthetic construct
  source 1..75: mol_type = other DNA
atgaacgctgaaactattaaagatttccttgtctcgcttggcttcagtgtggatgatgcaggcgcgaaaaaattc

SEQ ID NO: 145200 - DNA, 75 bp, synthetic construct
  source 1..75: mol_type = other DNA
tgacatcagacaatatcgctgaatatgttggtgagaataatcaatttactgagaagcctgtaactgaataccccc

SEQ ID NO: 145201 - DNA, 75 bp, synthetic construct
  source 1..75: mol_type = other DNA
tgttacagagaaggtctcttccggcaggactgcaggcgggtatcaccacaggagtaaaggatacacctggtatat

SEQ ID NO: 145202 - DNA, 75 bp, synthetic construct
  source 1..75: mol_type = other DNA
gcaacgcattcaatgccgtaactgcaaaaaagtctggacgccactcgtggcaacattcttcatctctccacgaat

SEQ ID NO: 145203 - DNA, 75 bp, synthetic construct
  source 1..75: mol_type = other DNA
catattatattagcccctgtttccacacctgctcatattattgaaagctcctcagcactctggaatgaagttgaa

SEQ ID NO: 145204 - DNA, 75 bp, synthetic construct
  source 1..75: mol_type = other DNA
tcctcttctcaaaacatcagagcaaagtaccgcgctcccatgaggtgtaggaaacagaccaagccccgccagaat

SEQ ID NO: 145205 - DNA, 75 bp, synthetic construct
  source 1..75: mol_type = other DNA
tggttacagacccgtgcatgaatatttataccggtgcgtattacctggcaatagcgttcaaaaagtggggggtaa

SEQ ID NO: 145206 - DNA, 75 bp, synthetic construct
  source 1..75: mol_type = other DNA
tgaaccgcgctcctgtgaggagtaggaaacagaccaagccccgccagaatggtttgtttaagcgtttcacgctgc

SEQ ID NO: 145207 - DNA, 75 bp, synthetic construct
  source 1..75: mol_type = other DNA
aaaaaagacagaagctggaatgataagaagataatgctccaatggcgtgagtcgtgggccacgatgtcaaacagc

SEQ ID NO: 145208 - DNA, 75 bp, synthetic construct
  source 1..75: mol_type = other DNA
atgcagcgtgttcatcgtgctaaatggaataacaccgagtcacaggaacaacgagctgctgaacaagccctacgt

SEQ ID NO: 145209 - DNA, 75 bp, synthetic construct
  source 1..75: mol_type = other DNA
ttttatcagggataaattcatatgggctaaaacaaacaaaactaaagttgatagtatcagtgaagaacatgataa

SEQ ID NO: 145210 - DNA, 75 bp, synthetic construct
  source 1..75: mol_type = other DNA
aagaaaaagcgctatggcttgctaaagccgctgaaacaaaccgccctgcaatgaaacgtatccacagtgccaaat

SEQ ID NO: 145211 - DNA, 75 bp, synthetic construct
  source 1..75: mol_type = other DNA
ttcagagctacggcaacccagtggagcaaacctggcagaaggtgtatcaggcgtatcaggaagcctgtgaccgcg

SEQ ID NO: 145212 - DNA, 75 bp, synthetic construct
  source 1..75: mol_type = other DNA
gatgcagttaaagtcgttgcctttagccaaatcaacatgagagagctaatgcaggctggaacgtcttctggggac

SEQ ID NO: 145213 - DNA, 75 bp, synthetic construct
  source 1..75: mol_type = other DNA
ttagcgttgaaaacggaacagacaaagcggttgccagagtattctttaaaggagttattgccagcccaggaagaa

SEQ ID NO: 145214 - DNA, 75 bp, synthetic construct
  source 1..75: mol_type = other DNA
taacggataaagataaatttatagattctataataaaagatcctaaggttaaaactagcggattgaatgatagtg

SEQ ID NO: 145215 - DNA, 75 bp, synthetic construct
  source 1..75: mol_type = other DNA
gagttaaataattctcaggacttaaataactctaaggtgagttgtacagtttcagttgattctacgattacgggt

SEQ ID NO: 145216 - DNA, 75 bp, synthetic construct
  source 1..75: mol_type = other DNA
aggcgtttttaacccgccatcctgatgctgttgtgttcagcgtgaaaaaacgccagtggggaacccgggaggatt

SEQ ID NO: 145217 - DNA, 75 bp, synthetic construct
  source 1..75: mol_type = other DNA
tgcgaccaaaagagcctaactggacagcctgggccaatgacgtgcgcacaatgcggatgctggatggcagaagcc

SEQ ID NO: 145218 - DNA, 75 bp, synthetic construct
  source 1..75: mol_type = other DNA
tattcagttatattcatgatgataacattcgtatgaatagcactggatttttgtcatttttagattgtaatcaga

SEQ ID NO: 145219 - DNA, 75 bp, synthetic construct
  source 1..75: mol_type = other DNA
gcggttcgaaaacccgtggagcgaacagtgcccagtatgacgacagcaatatgggtcagaacaaagtgggtctga

SEQ ID NO: 145220 - DNA, 75 bp, synthetic construct
  source 1..75: mol_type = other DNA
ataccgtgctggcgaatgaagtgaccgcacgtaataacctcgataacgctgtagagcaactgcgtcagatcaccg

SEQ ID NO: 145221 - DNA, 75 bp, synthetic construct
  source 1..75: mol_type = other DNA
gcgggcacaacgggatccgttctggataaaaaacatcaagagtccggaaaaactccgtgagaaatgggatgaact

SEQ ID NO: 145222 - DNA, 75 bp, synthetic construct
  source 1..75: mol_type = other DNA
gattttactgccctggaaaacgtggctatgccgctgctgattggcaagaaaaagcccgctgaaatcaacagccgt

SEQ ID NO: 145223 - DNA, 75 bp, synthetic construct
  source 1..75: mol_type = other DNA
tgcgcaaccagaagctgggctttatttatcagtttcaccacctgctgccggattttaccgccctggaaaacgtgg

SEQ ID NO: 145224 - DNA, 75 bp, synthetic construct
  source 1..75: mol_type = other DNA
cgaaacgtatgagtcgccaactggagatgcgtgatggtcgtctgacggcagaactgagcctgatgggggcggagt

SEQ ID NO: 145225 - DNA, 75 bp, synthetic construct
  source 1..75: mol_type = other DNA
gaaaaattggcgacggcaaaatcttcgtcgctgaattgcaacgcgtcattcgtattcgtaccggcgaagccgacg

SEQ ID NO: 145226 - DNA, 75 bp, synthetic construct
  source 1..75: mol_type = other DNA
tcatactaaaggcgcaaatgttgatttttgcttaggttggattaataaaaacaggtctgttttaactgataaaaa

SEQ ID NO: 145227 - DNA, 75 bp, synthetic construct
  source 1..75: mol_type = other DNA
tgaagattacagccctgaagacctgatgctggtggttgactacctgaacgcgaaatgggctcaggatccgaagat

SEQ ID NO: 145228 - DNA, 75 bp, synthetic construct
  source 1..75: mol_type = other DNA
gtcatttatgtgcacgatctcccgatgccggaattattacgccacgcaaaagcggtggtgacgattaacagtacg

SEQ ID NO: 145229 - DNA, 75 bp, synthetic construct
  source 1..75: mol_type = other DNA
aacccggtatatgttcgctttgatgtttccgttgccggcaaagaagcgaccagcctgattggtcgctgtcagaaa

SEQ ID NO: 145230 - DNA, 75 bp, synthetic construct
  source 1..75: mol_type = other DNA
gtccacggatatctttacgcttaacaaaggcgatcatgccggcgagcagcgtgtcagcctgaaagcccgcttaat

SEQ ID NO: 145231 - DNA, 75 bp, synthetic construct
  source 1..75: mol_type = other DNA
ttaatggggtttattatggggagtcacagttacactgcgacactattacattagaaatcaattctgcattgaaca

SEQ ID NO: 145232 - DNA, 75 bp, synthetic construct
  source 1..75: mol_type = other DNA
ttctctttatgatatcgttgacttaacataccaaggaacattagatgacttctggttaacaaaattcaaaccaga

SEQ ID NO: 145233 - DNA, 75 bp, synthetic construct
  source 1..75: mol_type = other DNA
attgcagggaccgatgggaccttttttcaatgacgtcgccgaatggttagagtcattaggccgtaacgctgtgaa

SEQ ID NO: 145234 - DNA, 75 bp, synthetic construct
  source 1..75: mol_type = other DNA
tacgtccgttttgatgtcacggttgccggtaaggaggcaacctccctgattgcccgctgccagaaggcggtggat

SEQ ID NO: 145235 - DNA, 75 bp, synthetic construct
  source 1..75: mol_type = other DNA
agcctttaatgccatggttcagttctgccgtgaggtcagacgccgggtcagttatccaaacagaacgagggccag

SEQ ID NO: 145236 - DNA, 75 bp, synthetic construct
  source 1..75: mol_type = other DNA
tgcgtccctgcagttaactcaatccatttttgatatgtcgaaatggcgtgcgttaacgctgcaggaaaaagcagc

SEQ ID NO: 145237 - DNA, 75 bp, synthetic construct
  source 1..75: mol_type = other DNA
gataatccggcctacgtccgttttgacatttctgtcgcaggtaaagaggcaaccagccttatcgcccgctgccag

SEQ ID NO: 145238 - DNA, 75 bp, synthetic construct
  source 1..75: mol_type = other DNA
agcggcaacgaatcagggtacacagaatgggtgcgaggacaggccagcatagatgtttccgacatcacagacgtg

SEQ ID NO: 145239 - DNA, 75 bp, synthetic construct
  source 1..75: mol_type = other DNA
catcttcaccctgaacaagggagagcatgccggtgaacaacgcgtcagcctgaaggcccgtctgatcaaggtgga

SEQ ID NO: 145240 - DNA, 75 bp, synthetic construct
  source 1..75: mol_type = other DNA
catgcaacggctgtaccgtttttatgaccgtataccgtttgtttcgtcagggatacccggtgaattaccgtggat

SEQ ID NO: 145241 - DNA, 75 bp, synthetic construct
  source 1..75: mol_type = other DNA
tgtcattgttgatgaaacgggcgaagaaccgatgccgacaccgtggacggtctatgagttggtaaaggccatcag

SEQ ID NO: 145242 - DNA, 75 bp, synthetic construct
  source 1..75: mol_type = other DNA
aaccgcgaaagtaaccgctcactctgcgggggctaaaattgcgcaatattactcctacaagctgaaccgccgtga

SEQ ID NO: 145243 - DNA, 75 bp, synthetic construct
  source 1..75: mol_type = other DNA
atcaatcaaaaactactgcaggagataaaagaacgtagccaggccgagcaagtgttgcaaatcacgcgtagtgaa

SEQ ID NO: 145244 - DNA, 75 bp, synthetic construct
  source 1..75: mol_type = other DNA
cattttcgcataaggcaccgaaagagagttatttggtgatcaaacaccatccgatggatcgcggtcacagactct

SEQ ID NO: 145245 - DNA, 75 bp, synthetic construct
  source 1..75: mol_type = other DNA
gtcatatacgtacacgatctcccaatgccggaattattacgccatgcaaaagcggttgtgacaattaacagtaca

SEQ ID NO: 145246 - DNA, 75 bp, synthetic construct
  source 1..75: mol_type = other DNA
atgacacctcagcaagaaaacgcccttcgcagcattgcccatctggctaactctgaaatcaaaaaagccagacag

SEQ ID NO: 145247 - DNA, 75 bp, synthetic construct
  source 1..75: mol_type = other DNA
tatttcagacggactggaatccaaggcgggtacagtttctgctgatttcagtcgctatatgacgtggaaaacagc

SEQ ID NO: 145248 - DNA, 75 bp, synthetic construct
  source 1..75: mol_type = other DNA
acgcctacaagctgaaccgccgtgatatccaggcactggaagaaacgcagcccgatattctcttgttcaccggcg

SEQ ID NO: 145249 - DNA, 75 bp, synthetic construct
  source 1..75: mol_type = other DNA
gttgcaggcatcaatgacgctgtcagactgggagcgcgtgtatgacgtggcaccacgtgagggcgcaacgcaaca

SEQ ID NO: 145250 - DNA, 75 bp, synthetic construct
  source 1..75: mol_type = other DNA
atcgtgttgcagcagctgcattactggttgagagataccggttccggtatggaatgtgacggggttcgctggatt

SEQ ID NO: 145251 - DNA, 75 bp, synthetic construct
  source 1..75: mol_type = other DNA
ctatttcaggagaaccggtcaacgggaaaatgtatttttccgggagtttacgggatcatgtttgcggctggctgg

SEQ ID NO: 145252 - DNA, 75 bp, synthetic construct
  source 1..75: mol_type = other DNA
atgacgagggtgtgtcatggcctgccattgaaactatccggcgtcagatcggtgcaagaagtgaatccacagtga

SEQ ID NO: 145253 - DNA, 75 bp, synthetic construct
  source 1..75: mol_type = other DNA
aactatgggagcgagcttttagatggtggcaaattgagcgaatccatcggttcaaaatgcgccgctccatcaggt

SEQ ID NO: 145254 - DNA, 75 bp, synthetic construct
  source 1..75: mol_type = other DNA
atgcggatgctggatggcagaactcacagacaaatttgcgaaatgtttggtcgggtgcagcgggatcccttctgg

SEQ ID NO: 145255 - DNA, 75 bp, synthetic construct
  source 1..75: mol_type = other DNA
accggacccgcagacggctgaacaggattttttaacccgacaccctgacgcggttgtgttcagtgcgaaaaaacg

SEQ ID NO: 145256 - DNA, 75 bp, synthetic construct
  source 1..75: mol_type = other DNA
tttagatgtgctcaacacgctcaattcgctctctcaggagttgcaagaccctaacgttgacccggcagatccgca

SEQ ID NO: 145257 - DNA, 75 bp, synthetic construct
  source 1..75: mol_type = other DNA
atatctctacctctaatgatgagctgattggttcattacaggatctcgattacggcccggcgtcgatcaccttta

SEQ ID NO: 145258 - DNA, 75 bp, synthetic construct
  source 1..75: mol_type = other DNA
aattatcaggacgaagacgggcactacgtgtttggcggcaccatcaacgatcagccgccgattgtggcggtggac

SEQ ID NO: 145259 - DNA, 75 bp, synthetic construct
  source 1..75: mol_type = other DNA
ccatgaacggtggtcgatgggtgacgtttaactgggatagctggcgtccaaatgtcagcaatatgaggggtgtga

SEQ ID NO: 145260 - DNA, 75 bp, synthetic construct
  source 1..75: mol_type = other DNA
gcgggaatggcaacttgctgaaggacgaaaacgcagcgaggagattaaccgccagaatcgccagttgcgggtgga

SEQ ID NO: 145261 - DNA, 75 bp, synthetic construct
  source 1..75: mol_type = other DNA
atgcgagtaaccacccaacaaacctacgtctcgatgacgcaaagttttaataatctctccggctctctggcgcat

SEQ ID NO: 145262 - DNA, 75 bp, synthetic construct
  source 1..75: mol_type = other DNA
taccgggccattcagaaagtcagggaaacgcttcaggcactgcgcgacgccggttatggcgatgcgctggatcgt

SEQ ID NO: 145263 - DNA, 75 bp, synthetic construct
  source 1..75: mol_type = other DNA
tacctggccattcagaaagtcagggaaacccttcaggcactgcgcgacgccggttatggcgatgcactggatcgc

SEQ ID NO: 145264 - DNA, 75 bp, synthetic construct
  source 1..75: mol_type = other DNA
cgtccccagtgccaccgtctccctcttctggtggggcagggttctgggggcgcatgatggggcgcgccggtgggt

SEQ ID NO: 145265 - DNA, 75 bp, synthetic construct
  source 1..75: mol_type = other DNA
aaatattcttacggattacgggatcaacgtttaccagttgctggctgataagctgggagttaaccagaaaacgct

SEQ ID NO: 145266 - DNA, 75 bp, synthetic construct
  source 1..75: mol_type = other DNA
gacagcctgaaaaagagcctgaaaggcttcctggattatgccgatgcggcacagaaaagcggcttacaggataag

SEQ ID NO: 145267 - DNA, 75 bp, synthetic construct
  source 1..75: mol_type = other DNA
taaacagggcttcttcggtcgtatgatgagccgtgccggtggtctgctaacggcggccggaaaccgcatggggct

SEQ ID NO: 145268 - DNA, 75 bp, synthetic construct
  source 1..75: mol_type = other DNA
ccgtttgacagcctgaaaaagagcctgaaaggcttcctggattatgccgatgcggcacagaaaagcggcttacag

SEQ ID NO: 145269 - DNA, 75 bp, synthetic construct
  source 1..75: mol_type = other DNA
cggaaaaaacagaagaaattcgtaagtgggcagagcaaaacgccaaagacaccacatggggattgtctggtgtta

SEQ ID NO: 145270 - DNA, 75 bp, synthetic construct
  source 1..75: mol_type = other DNA
gcgtgcgtgctggtgacgacccggatagcacgctggcagagatgtcagaaatcagcgtctgcaaccgcgctgccg

SEQ ID NO: 145271 - DNA, 75 bp, synthetic construct
  source 1..75: mol_type = other DNA
caggcggacgtcaggggcggggccgcaggaaacgcggaccggggcgcggaagaccggtcacgcctcccctgccac

SEQ ID NO: 145272 - DNA, 75 bp, synthetic construct
  source 1..75: mol_type = other DNA
cagcaatctttacggaatgctggccggtggtgcagctgtatatggctttaaccggggatttattcgcccggcagc

SEQ ID NO: 145273 - DNA, 75 bp, synthetic construct
  source 1..75: mol_type = other DNA
taaacagggcttcttcggtcgtatgatgagccgtgccggtggtctgctttcggcggccggaaaccgcatggggct

SEQ ID NO: 145274 - DNA, 75 bp, synthetic construct
  source 1..75: mol_type = other DNA
taaagctggcttaatagatagtaacggtaaattccccaatatgaataaggcgctgtatgttgatagcatcagttc

SEQ ID NO: 145275 - DNA, 75 bp, synthetic construct
  source 1..75: mol_type = other DNA
ccgcaacattattgtatggtatgtcagtagtcatgtcggtcgggaattgttcaacaactgtccagactaatcttc

SEQ ID NO: 145276 - DNA, 75 bp, synthetic construct
  source 1..75: mol_type = other DNA
cctgagcctgtttacgatagcgatctggccatgcgtttcgattatcgtcagctcgaaatgactgcgatcggctgc

SEQ ID NO: 145277 - DNA, 75 bp, synthetic construct
  source 1..75: mol_type = other DNA
atgacgacaccaaccagacggataagtttctatctgaagcccgccgccgtcaagaacgaaggcgaagcatgcgca

SEQ ID NO: 145278 - DNA, 75 bp, synthetic construct
  source 1..75: mol_type = other DNA
ttgcaggatcaggacacccgctatcaggggctggtggcgcaaatcgaactgctgaagcaggcggctgatacgccg

SEQ ID NO: 145279 - DNA, 75 bp, synthetic construct
  source 1..75: mol_type = other DNA
ggcgttatcagtgacacaaaccaggacagagcgccccttgtcacagccagtaccaaccgcacagataaccagtca

SEQ ID NO: 145280 - DNA, 75 bp, synthetic construct
  source 1..75: mol_type = other DNA
acctggaagtgaccggacaggtgaaagacctgtgcgactccggcggcaccaccatgtcagcgatgcggcttgcct

SEQ ID NO: 145281 - DNA, 75 bp, synthetic construct
  source 1..75: mol_type = other DNA
attttttggcatacctacatcacaggttgatcattccgttgattataacgccgctgcacttgaagagataacatg

SEQ ID NO: 145282 - DNA, 75 bp, synthetic construct
  source 1..75: mol_type = other DNA
gaccctatatcacgagtcgattattccgttgattataaaactgtttcgctagcagaaataagatgcagcaacagc

SEQ ID NO: 145283 - DNA, 75 bp, synthetic construct
  source 1..75: mol_type = other DNA
tggccgcctggtgctcattgatgaattggggggaacatggacagaaaaagtaacagtgattcataccaacgctgg

SEQ ID NO: 145284 - DNA, 75 bp, synthetic construct
  source 1..75: mol_type = other DNA
gacaacttctcggcctgattgggcgggccgtggtgaaaagcatcagtgccgccacgaaatgtcagaccgtggatg

SEQ ID NO: 145285 - DNA, 75 bp, synthetic construct
  source 1..75: mol_type = other DNA
gggaggggatcgtggtggacggtgcaggtaaaacgatcacgtttcgcaatgcacctgaagcacgttttgaaatgg

SEQ ID NO: 145286 - DNA, 75 bp, synthetic construct
  source 1..75: mol_type = other DNA
gttgggactgggcgtctggcaagcaagtaatgaggaagtaatcaccgccggtaatgactccaacttattgatagt

SEQ ID NO: 145287 - DNA, 75 bp, synthetic construct
  source 1..75: mol_type = other DNA
tacaggatggcaatgtcatgccccagttgggactgggcgtctggcaagcaagtaatgaggaagtaatcaccgcca

SEQ ID NO: 145288 - DNA, 75 bp, synthetic construct
  source 1..75: mol_type = other DNA
atcaatctcatcgcaaacagtgcataacatatattaacaatatgtttctgcgttatttatcattattaggtaatg

SEQ ID NO: 145289 - DNA, 75 bp, synthetic construct
  source 1..75: mol_type = other DNA
cgttatttatcattattaggtaatgactccaacttattgatagtgttttatgttcagataatgcccgatgacttt

SEQ ID NO: 145290 - DNA, 75 bp, synthetic construct
  source 1..75: mol_type = other DNA
atgaggcagaaatgaagattggcgactctggtaatgactccaacttattgatagtgttttatgttcagataatgc

SEQ ID NO: 145291 - DNA, 75 bp, synthetic construct
  source 1..75: mol_type = other DNA
tatcttcccgaacccggatcacactctgctgccgggtatgttcgtgcgcgcacgtctggaagaagggcttaatcc

SEQ ID NO: 145292 - DNA, 75 bp, synthetic construct
  source 1..75: mol_type = other DNA
gataacggtgaatggaaagaaggcaaagctggtaatgactccaacttattgatagtgttttatgttcagataatg

SEQ ID NO: 145293 - DNA, 75 bp, synthetic construct
  source 1..75: mol_type = other DNA
catattcatcactaccgcgcgatccggatttttatcgtaagctaccagaaatacctgcaccacacgttgaaaatt

SEQ ID NO: 145294 - DNA, 75 bp, synthetic construct
  source 1..75: mol_type = other DNA
gaagtgacgctcattttcccgattatcctctggcatcgcccagtaataatgaaattgatttacttaatctaatct

SEQ ID NO: 145295 - DNA, 75 bp, synthetic construct
  source 1..75: mol_type = other DNA
acccaaccgccatgggatgcagtaggtcaactggaaacagccagcggtaatttatgtacggcaacattgatcgcg

SEQ ID NO: 145296 - DNA, 75 bp, synthetic construct
  source 1..75: mol_type = other DNA
agaggattttttctggaaaagtgagtactttaatcaaggaggacgatatgaattaatgcattatttgttttctcc

SEQ ID NO: 145297 - DNA, 75 bp, synthetic construct
  source 1..75: mol_type = other DNA
ccacaggaaactgcgctgatcagtcctatccgtgaattgacctatcgccaactgtcgacggcggcggatcatgtg

SEQ ID NO: 145298 - DNA, 75 bp, synthetic construct
  source 1..75: mol_type = other DNA
tgcaggcgcgggcaaacgtgatccactctcaactgtggcgcgatttggataaccgcttgtttggcggtatccagg

SEQ ID NO: 145299 - DNA, 75 bp, synthetic construct
  source 1..75: mol_type = other DNA
aacggtgattatcgatgcggtgagcgggcgcaagcaggtgttagcccatgcctcgctgatgccggatgtggcgat

SEQ ID NO: 145300 - DNA, 75 bp, synthetic construct
  source 1..75: mol_type = other DNA
aactcacaaaaggtggtgcaggacatgtgcctgagtattttgtggggattggtacacctatatctttctatggct

SEQ ID NO: 145301 - DNA, 75 bp, synthetic construct
  source 1..75: mol_type = other DNA
tttgtggtgcggggggcttaacttttgggctaaaaaaagccgggattgaggtttctcatggtattgatattgatg

SEQ ID NO: 145302 - DNA, 75 bp, synthetic construct
  source 1..75: mol_type = other DNA
acgtcttctctcggctttgaagtgcagggtatctactcgggtcgctatctggtccgtgtcagggcggtgaacgcc

SEQ ID NO: 145303 - DNA, 75 bp, synthetic construct
  source 1..75: mol_type = other DNA
atggctgatattgcaattgtatgggatcagggatgcggctcgctgcaactgaacggtgccgacctgctgacggat

SEQ ID NO: 145304 - DNA, 75 bp, synthetic construct
  source 1..75: mol_type = other DNA
acaaggatgtaacccttgttattacgattggtaataaccatcaaaaaattaatggtagtggaagacatattactg

SEQ ID NO: 145305 - DNA, 75 bp, synthetic construct
  source 1..75: mol_type = other DNA
aagcgatggatgctaagggtctgacaattaaggcattgtcagacttgtcaaaaattccatatcgctcacttcaaa

SEQ ID NO: 145306 - DNA, 75 bp, synthetic construct
  source 1..75: mol_type = other DNA
gaagaaaactcctggttgtggatgtaccgcaaactgggcggcgggatgctcgggattttgatggtgccggtgctg

SEQ ID NO: 145307 - DNA, 75 bp, synthetic construct
  source 1..75: mol_type = other DNA
gacggcacgacctcatcctccgatggccagcgcttccgcgcgggtggccggggcgagagcaccgggcacgtcaac

SEQ ID NO: 145308 - DNA, 75 bp, synthetic construct
  source 1..75: mol_type = other DNA
ctgcgtcagtatgagcgcgatgccggtgcaggtgacggcggactgagcaccacagaacgccagcgtctgaaggaa

SEQ ID NO: 145309 - DNA, 75 bp, synthetic construct
  source 1..75: mol_type = other DNA
ctgaggtccgtcagcgagccgttcgtatggttatcgaaagccagaatgactatgactcgcagtgggcggccatca

SEQ ID NO: 145310 - DNA, 75 bp, synthetic construct
  source 1..75: mol_type = other DNA
ctctggaaaatattgcccagtcaacgtattaccactgtcagcaacagcgacatcatcctgataaacgcagtgccc

SEQ ID NO: 145311 - DNA, 75 bp, synthetic construct
  source 1..75: mol_type = other DNA
gagtttaaaaaccgctgttttggcgatatacaggcgtttattgatttgtccgttgaacaatatgatgcccgcccc

SEQ ID NO: 145312 - DNA, 75 bp, synthetic construct
  source 1..75: mol_type = other DNA
gttactggcaggacgccaaaggttgtctggttcccgagtctatgatcaagcccattgaccgcgcacgcgatgcgc

SEQ ID NO: 145313 - DNA, 75 bp, synthetic construct
  source 1..75: mol_type = other DNA
ctgcgtcagtatgagcgcgatgccggtgcaggtgacggcggactgagcaccactgaacgtcagcatctgaaggaa

SEQ ID NO: 145314 - DNA, 75 bp, synthetic construct
  source 1..75: mol_type = other DNA
ataaaagccattcaggcgatgggggcaacaccaactcccatgccattaggcgaagtttatcccgcattaacccag

SEQ ID NO: 145315 - DNA, 75 bp, synthetic construct
  source 1..75: mol_type = other DNA
acaataatgtgtttataaaaaattacctgataatattctccaaggtgttgttattaattttgctatgggagcagg

SEQ ID NO: 145316 - DNA, 75 bp, synthetic construct
  source 1..75: mol_type = other DNA
atgagggcatcgataaatcaacctttcataaactgctaaaacgatatgacattaaagtgaagattgaagctaccg

SEQ ID NO: 145317 - DNA, 75 bp, synthetic construct
  source 1..75: mol_type = other DNA
ccgaagtgcatcaacgggcagttcgtatggtgctggaaagtcgggacgaatatgactcacaatgggcagcaattt

SEQ ID NO: 145318 - DNA, 75 bp, synthetic construct
  source 1..75: mol_type = other DNA
agaccaaccagacaatcagcgtcaaggatggcaacaacgttctgagagtgcaggttggccgattaacgggggtgt

SEQ ID NO: 145319 - DNA, 75 bp, synthetic construct
  source 1..75: mol_type = other DNA
tgcgccgtagtaacgatatccttcgccaggcttccgcttattttgcgaaggcggagtttgaccgcctctggaaaa

SEQ ID NO: 145320 - DNA, 75 bp, synthetic construct
  source 1..75: mol_type = other DNA
tgaaagaaaaactgcgtcgctgcggcattcgttctatcgatgcggtcgttgacgtgaccaactacgtgctccttg

SEQ ID NO: 145321 - DNA, 75 bp, synthetic construct
  source 1..75: mol_type = other DNA
gcgaaacgctggtgttgctcgacggcactgaagcgaagctggatgctgacaccctggtcatcgccgaccacaaca

SEQ ID NO: 145322 - DNA, 75 bp, synthetic construct
  source 1..75: mol_type = other DNA
gcgcgcgacgttgccgtgttgaaccagctgccgctggttgaaccggaaatcgttccggttggtgcgaccatcgac

SEQ ID NO: 145323 - DNA, 75 bp, synthetic construct
  source 1..75: mol_type = other DNA
accagaaccgtcagcaaaaccgtgtgcgtattttcgaaagtggtctgcgttttgttccggacacccaggcaccat

SEQ ID NO: 145324 - DNA, 75 bp, synthetic construct
  source 1..75: mol_type = other DNA
aactgggccagccgatgcacgccttcgacaaagatcgcattgaaggcggcattgtggtgcggatggcgaaagagg

SEQ ID NO: 145325 - DNA, 75 bp, synthetic construct
  source 1..75: mol_type = other DNA
actctggttattgctgaccacaacaaggcactggcaatgggtggcatcttcggcggcgaacattctggcgtaaat

SEQ ID NO: 145326 - DNA, 75 bp, synthetic construct
  source 1..75: mol_type = other DNA
gtggacgctttgtctgaggttttcgttaataattggcttcctggtatctgcacattttttttaggtatcttttat

SEQ ID NO: 145327 - DNA, 75 bp, synthetic construct
  source 1..75: mol_type = other DNA
caggtatctacggcagggcggcaacaccaacaatagggcatcttgcgcgcgtactgttacgcgaacgcctgggca

SEQ ID NO: 145328 - DNA, 75 bp, synthetic construct
  source 1..75: mol_type = other DNA
ccgtgatgattgatcacgagatcctaaacgagcttaaaaaacttcaattcgatgttattcgccggatgaatgaag

SEQ ID NO: 145329 - DNA, 75 bp, synthetic construct
  source 1..75: mol_type = other DNA
gagaacaaccttattgatagtgagtgccatgttgctgaactggaagaagcgctacgcgataagcaggcgttactt

SEQ ID NO: 145330 - DNA, 75 bp, synthetic construct
  source 1..75: mol_type = other DNA
agcatgcttcatcgaacagattttcacgaggattaccaaacggtaatggcatacaaagtttctgaagtcatcgct

SEQ ID NO: 145331 - DNA, 75 bp, synthetic construct
  source 1..75: mol_type = other DNA
tccggcaatggaacgcctgttaatgttgccagttgatgatgatctgataagcgagcaggaacttaaagatagcgg

SEQ ID NO: 145332 - DNA, 75 bp, synthetic construct
  source 1..75: mol_type = other DNA
tgatggaaaccctgcgggatgggaaaatcaatatatatgattatattaatgaaaaacagttagaaaaattaaatc

SEQ ID NO: 145333 - DNA, 75 bp, synthetic construct
  source 1..75: mol_type = other DNA
cgaacagctgtatcttaatgagttaggatatgtttttggtgatgaggaaaaaacaaaagaaattgtaaataaact

SEQ ID NO: 145334 - DNA, 75 bp, synthetic construct
  source 1..75: mol_type = other DNA
tgtattaccatatattaatgaacagcgtttaaataaactaaatccacctgaaaatttacgtatagcaatagaaaa

SEQ ID NO: 145335 - DNA, 75 bp, synthetic construct
  source 1..75: mol_type = other DNA
ggctggaagaactggctaccctgcccgatgccacccgcaaacgcgcacaggtgctggtcgctaaaggcatcacca

SEQ ID NO: 145336 - DNA, 75 bp, synthetic construct
  source 1..75: mol_type = other DNA
ttcatcaacttcgggggattacgacctgctatcgacatcagatattacttgaaagcatctgtgttcctccttcgc

SEQ ID NO: 145337 - DNA, 75 bp, synthetic construct
  source 1..75: mol_type = other DNA
agtactgatgctgtaaagttttttaatattgggaaaatacaactacctagtgactcgtccatgataactgtgcca

SEQ ID NO: 145338 - DNA, 75 bp, synthetic construct
  source 1..75: mol_type = other DNA
ccggatgctgaaaaaagacggcaaggattccgatatccggattggcgacctgccgattatccgggattctgaaat

SEQ ID NO: 145339 - DNA, 75 bp, synthetic construct
  source 1..75: mol_type = other DNA
atcacaagccggatttggaatggctgcgttctgtggtaagcacgaactcagccagaatgacaaacaaaaagccat

SEQ ID NO: 145340 - DNA, 75 bp, synthetic construct
  source 1..75: mol_type = other DNA
agttaaataatatacaggggttaaataatcctcaggagttaaataatccgcagaatttaaataattctcaggact

SEQ ID NO: 145341 - DNA, 75 bp, synthetic construct
  source 1..75: mol_type = other DNA
agcagtgggggatagttgctgagaaagagtgcggaagatgtaaaggcgtcggttattcaagaatgccagcaagcg

SEQ ID NO: 145342 - DNA, 75 bp, synthetic construct
  source 1..75: mol_type = other DNA
tgttgaggagtggtgctttggctatatgcggggcgtggcactttctgactggtcaacgttgcccgattcgttaaa

SEQ ID NO: 145343 - DNA, 75 bp, synthetic construct
  source 1..75: mol_type = other DNA
cttgatttacatgcgtactggatggcgcatccgcaggaaaaagctgttcagcaaccgatcaaagcagaagagaaa

SEQ ID NO: 145344 - DNA, 75 bp, synthetic construct
  source 1..75: mol_type = other DNA
ctgcatacggcctcttaatcaggtcgataacttatttattctgccggtcgctgagtgtatttcgctcggttggga

SEQ ID NO: 145345 - DNA, 75 bp, synthetic construct
  source 1..75: mol_type = other DNA
atggctaaacctgtacgattcacacgagaggtattgcttccgattgctaaacgttattttgaagcgatgcagggt

SEQ ID NO: 145346 - DNA, 75 bp, synthetic construct
  source 1..75: mol_type = other DNA
aaaagttgaatttattatcattggatggaaatttaaagaaaaatgtattctacgcacatgtttatgctaagtgcc

SEQ ID NO: 145347 - DNA, 75 bp, synthetic construct
  source 1..75: mol_type = other DNA
gccatccttgatgtagctgagctggacggtttattgacggcggtgttgagttctccgcaagaaattgaaccagaa

SEQ ID NO: 145348 - DNA, 75 bp, synthetic construct
  source 1..75: mol_type = other DNA
cgttgaacgcatggcggcgcttttgcaacaaacagacgaccccgtgtgtctggtttctggctttgtcagttttgt

SEQ ID NO: 145349 - DNA, 75 bp, synthetic construct
  source 1..75: mol_type = other DNA
tcaggcaggggcgctggcgggagggcaaatcgtctcacaagcagcgaaacgcagtgccgaaggtgagctgttgtt

SEQ ID NO: 145350 - DNA, 75 bp, synthetic construct
  source 1..75: mol_type = other DNA
ttggcggcatcagccagccgcttattcactacgaggccgctttcagccgcgcgcagcaagcggcggaacgctgca

SEQ ID NO: 145351 - DNA, 75 bp, synthetic construct
  source 1..75: mol_type = other DNA
gataacgtgctgacgttatcactgccagcttcaaccagtgcgccctttgcagttgaacgtatggcgtccctttta

SEQ ID NO: 145352 - DNA, 75 bp, synthetic construct
  source 1..75: mol_type = other DNA
ttcagggtacaggtcgccgtcgctggcgggtaggtgaaaaactgcatatgaggcagcactgccctcacccggatc

SEQ ID NO: 145353 - DNA, 75 bp, synthetic construct
  source 1..75: mol_type = other DNA
gttcgaaagctacgatcatctcggtgaaactaactggtcattgttagtgcaggcagtgaaccactggcatgagcc

SEQ ID NO: 145354 - DNA, 75 bp, synthetic construct
  source 1..75: mol_type = other DNA
tccagggcaccggtcgtcgtcgctggcgggtcggcgaaaagctgcaaatgaaacagcattgtccgcacccggatc

SEQ ID NO: 145355 - DNA, 75 bp, synthetic construct
  source 1..75: mol_type = other DNA
acgcgaccagtcgtgaatttaaaggcgatgtctcggcggaatacggtagctggaacaaagaacggtatgtggcgg

SEQ ID NO: 145356 - DNA, 75 bp, synthetic construct
  source 1..75: mol_type = other DNA
aacaaaagttaaaagaaaggaattatacgcaagaaaaatatcatgagcatcagcaaactgccgcaaatgataatt

SEQ ID NO: 145357 - DNA, 75 bp, synthetic construct
  source 1..75: mol_type = other DNA
cgtgaactaccagactggcgtattgatgacctgatgatctctttttccgtacctggcggcggcgtcggcccacat

SEQ ID NO: 145358 - DNA, 75 bp, synthetic construct
  source 1..75: mol_type = other DNA
atacccggatgctgccatactggtgcatccagaatcaccacaagctattgtcgatatggcggatgcggtcggttc

SEQ ID NO: 145359 - DNA, 75 bp, synthetic construct
  source 1..75: mol_type = other DNA
gaggggggcaacaaggggattgatatcgcaggcagcaaaggacaggcaattatcgcgaccgcagatggccgcgtt

SEQ ID NO: 145360 - DNA, 75 bp, synthetic construct
  source 1..75: mol_type = other DNA
gatctcgcccagcgcaacaatattcaggcgccatacgcactgaatgtaggtcagactctacaggtggggaacgct

SEQ ID NO: 145361 - DNA, 75 bp, synthetic construct
  source 1..75: mol_type = other DNA
attatgctctgtaaacagctggccgttacggatggttaaaggaacctttgtgggaacaactgacacattgcgtga

SEQ ID NO: 145362 - DNA, 75 bp, synthetic construct
  source 1..75: mol_type = other DNA
acttcggaacccagcgtgcggtagctaaagcgttaggcattagcgatgcagcagtctctcagtggaaggaacaga

SEQ ID NO: 145363 - DNA, 75 bp, synthetic construct
  source 1..75: mol_type = other DNA
cggatgcggtcggttccaccagtcaactgatcgctgctgcgaaaacattgccacatcagcggcttatcgtggcaa

SEQ ID NO: 145364 - DNA, 75 bp, synthetic construct
  source 1..75: mol_type = other DNA
taatgcgcaaaaaaccggagatcgcaaagcgggcgtagtctggcatactcagggttccggtaaatcgctttcgat

SEQ ID NO: 145365 - DNA, 75 bp, synthetic construct
  source 1..75: mol_type = other DNA
ttgctgctgaactttataaagaaatcatagcgttaaaacctgaatggcacagcgataatctaaatgatggcgtga

SEQ ID NO: 145366 - DNA, 75 bp, synthetic construct
  source 1..75: mol_type = other DNA
gtcattaatcagctcacgatcaaagaaggcaactattctcgccgaccggatcttattttgttcatcaacggtctg

SEQ ID NO: 145367 - DNA, 75 bp, synthetic construct
  source 1..75: mol_type = other DNA
gaccgaaggaatcaatatcgaagtcagcaaggatggtaatacacaaggagagctggcctgcctgatcgactttaa

SEQ ID NO: 145368 - DNA, 75 bp, synthetic construct
  source 1..75: mol_type = other DNA
ctactattcaaaaattccagcctgatgatggcagcaatatctatgagttgttgtcagacagaaccaatattgtcg

SEQ ID NO: 145369 - DNA, 75 bp, synthetic construct
  source 1..75: mol_type = other DNA
gatttcagacggactggaagccaaagcgggaacggtttccgccgatttcagtcgttatatgacatggaaaaccgc

SEQ ID NO: 145370 - DNA, 75 bp, synthetic construct
  source 1..75: mol_type = other DNA
gtgcgtgagactatgaaaaaatcacctttgaatttactgctccttgcagcgctcacgctgggggcatcacaccag

SEQ ID NO: 145371 - DNA, 75 bp, synthetic construct
  source 1..75: mol_type = other DNA
tcatttcccctttccttttatggatatgctgcattttatcgatgggattaataaaccctcaatagtaagctacca

SEQ ID NO: 145372 - DNA, 75 bp, synthetic construct
  source 1..75: mol_type = other DNA
accagaattaaaaatcgttattgttggttcgggaactgaagagcagaagttaaaaagcaaagcaaaagaattagg

SEQ ID NO: 145373 - DNA, 75 bp, synthetic construct
  source 1..75: mol_type = other DNA
cgtactgctttgcaacgactaaatccacacctcagtgagcagaaatgcgaggaaactctaaaacaggtgatgcag

SEQ ID NO: 145374 - DNA, 75 bp, synthetic construct
  source 1..75: mol_type = other DNA
cgcactggcgggaaactgtcggcgataagttctttctcttcgtcggcactttccgctactacaaagggctgcata

SEQ ID NO: 145375 - DNA, 75 bp, synthetic construct
  source 1..75: mol_type = other DNA
ccaaaagagccggagaagaagccagaaaagcccaaaccaaaacctgtgccagaagcgaagctaacaccgccgatg

SEQ ID NO: 145376 - DNA, 75 bp, synthetic construct
  source 1..75: mol_type = other DNA
ggatatcactatctcatcaggaacagtaaccgccataagactggggtcggtgaccgcacatatgcccggaacatg

SEQ ID NO: 145377 - DNA, 75 bp, synthetic construct
  source 1..75: mol_type = other DNA
agacatcactattacatccggtatgacccaggctacagcagacggcagatatgttcgtaatgtgcaacttggtgc

SEQ ID NO: 145378 - DNA, 75 bp, synthetic construct
  source 1..75: mol_type = other DNA
ccagaatctggatgtttacagcaagagcgaaggtgataaccgttatctgcgcaaggatcagaatggcgcggatat

SEQ ID NO: 145379 - DNA, 75 bp, synthetic construct
  source 1..75: mol_type = other DNA
ctggcgaaggatcagaatctggccgacctggagaatacgggaaccgcccgtaataatctggatgtttacagcaaa

SEQ ID NO: 145380 - DNA, 75 bp, synthetic construct
  source 1..75: mol_type = other DNA
ctgccttctgacgggaccgccgtcgccgcgaacaggctggcaaatgcccgccgaattaataatgttccctttgac

SEQ ID NO: 145381 - DNA, 75 bp, synthetic construct
  source 1..75: mol_type = other DNA
aacctcggtttacgggatacggtaaataaggctgctgatgccctgccatcgggtggaaccgcagtggcggcaaac

SEQ ID NO: 145382 - DNA, 75 bp, synthetic construct
  source 1..75: mol_type = other DNA
gttgagtgtgcccagcatccgaatgcggacaaactgcgtgtgaccaaagttaatgtcggcggcgatcgtctgctt

SEQ ID NO: 145383 - DNA, 75 bp, synthetic construct
  source 1..75: mol_type = other DNA
aggtagttggcgtaaacttatttgatgtgtaccgcggtaagggtgttgcggaggggtataagagcctcgccataa

SEQ ID NO: 145384 - DNA, 75 bp, synthetic construct
  source 1..75: mol_type = other DNA
accctggttatcgccgaccacaacaaggcgctggcgatgggcggtatctttggtggcgaacactctggcgtgaat

SEQ ID NO: 145385 - DNA, 75 bp, synthetic construct
  source 1..75: mol_type = other DNA
gtaagcgcatagcagggttagaaagtggttctcaggcacaaaagttagttgaagcaatcattgttgcgatagaaa

SEQ ID NO: 145386 - DNA, 75 bp, synthetic construct
  source 1..75: mol_type = other DNA
tacgaagagcactgggacctggcaaaagagaccgttgatttctatgatttgaaaggcgatcttgaatccgttctc

SEQ ID NO: 145387 - DNA, 75 bp, synthetic construct
  source 1..75: mol_type = other DNA
aggcgctggcgatgggcggcatcttcggtggcgaacactctggcgtgaatgacgaaacgcaaaacgttctgctgg

SEQ ID NO: 145388 - DNA, 75 bp, synthetic construct
  source 1..75: mol_type = other DNA
tgtttacgtggaatattatttcaaataacagtgttgttatgccaacaggcggttgcaccgttgatagtcgtaatg

SEQ ID NO: 145389 - DNA, 75 bp, synthetic construct
  source 1..75: mol_type = other DNA
attttagctgcgatcaatctaaaattaaaatagctgagaccttatttttcaatctcgataaagaaccctataaaa

SEQ ID NO: 145390 - DNA, 75 bp, synthetic construct
  source 1..75: mol_type = other DNA
caattcttcgatggttatcaagcaaaatcaatggaaagtttcaaatacaaaccacgcataaaagatcctgatatt

SEQ ID NO: 145391 - DNA, 75 bp, synthetic construct
  source 1..75: mol_type = other DNA
tattggcgctcagtttatcggcatgggattactcggtgaatatatcggcaggatctacaccgatgtccgcgcccg

SEQ ID NO: 145392 - DNA, 75 bp, synthetic construct
  source 1..75: mol_type = other DNA
cccggcattctcaaatcagtggtggtgctgcccggaacacggaactcagttagcactcgaactacaaagtaaaca

SEQ ID NO: 145393 - DNA, 75 bp, synthetic construct
  source 1..75: mol_type = other DNA
atggctacatacggagaccgtgagtacacttacatgcaaatcacctggagagggatgtatcagaggttactgaag

SEQ ID NO: 145394 - DNA, 75 bp, synthetic construct
  source 1..75: mol_type = other DNA
aagtcagatgcgttttacggggctgaagcggggttaccgactggcagagctggtcctgatgcatgagcgactggc

SEQ ID NO: 145395 - DNA, 75 bp, synthetic construct
  source 1..75: mol_type = other DNA
tcccggtctgcggacaatatcggtggggtctattatcgcccggttcagatttatattaataatacctggagaacg

SEQ ID NO: 145396 - DNA, 75 bp, synthetic construct
  source 1..75: mol_type = other DNA
gttatgtcattaagatttttgaagaaaagatgggtaatgaattaaaaattagaacaagaatgatgaaaatcctcc

SEQ ID NO: 145397 - DNA, 75 bp, synthetic construct
  source 1..75: mol_type = other DNA
tgcatcctgtgcggaggtcagatgcgttttacggggctgaagcggggctaccgtctgacagagctggtcctgatg

SEQ ID NO: 145398 - DNA, 75 bp, synthetic construct
  source 1..75: mol_type = other DNA
tacatcataacggagacagtgagaaaaacggcgacgcaaatcacctggagagggatgtatcagaggttactgaag

SEQ ID NO: 145399 - DNA, 75 bp, synthetic construct
  source 1..75: mol_type = other DNA
gattactgaagccctgaataataaccgcgatttgagaatggctgccctgaaggttgaagaggcccgggcccagtt

SEQ ID NO: 145400 - DNA, 75 bp, synthetic construct
  source 1..75: mol_type = other DNA
agctcgattttttcggcaagctcaaaaatatgagcgagtctgacaggcagaactatttcgccagcgaagaagccc

SEQ ID NO: 145401 - DNA, 75 bp, synthetic construct
  source 1..75: mol_type = other DNA
gcagaacgttctctgttcaccacgcagcaagccattctggatcttacctattcccggcaggtcaatgaaattaat

SEQ ID NO: 145402 - DNA, 75 bp, synthetic construct
  source 1..75: mol_type = other DNA
gaaggtcaggatgcggatgaattactcagcaaatggcaaaaggaaatttggttattcgcgcgtcaggattttgac

SEQ ID NO: 145403 - DNA, 75 bp, synthetic construct
  source 1..75: mol_type = other DNA
ccgcgtcgtgaaacgctggagatggtggttcgcgatctctatccacgcggcggtcatgttgagcaggcgactttc

SEQ ID NO: 145404 - DNA, 75 bp, synthetic construct
  source 1..75: mol_type = other DNA
gaaaaacctgaatgcggcgctggcggagtccgatcgtctggggctgtcgatgccggacagtctgaatgcgaagct

SEQ ID NO: 145405 - DNA, 75 bp, synthetic construct
  source 1..75: mol_type = other DNA
cctgacgccagcggtaaatggctatcaggatacgggctggcgtaacttttttgtcgatccccaggttacccggtt

SEQ ID NO: 145406 - DNA, 75 bp, synthetic construct
  source 1..75: mol_type = other DNA
acccgggaggaggcccggcatctggaggcgttcctggcagagcacggtggctggaaggcgtttctgtggacaccg

SEQ ID NO: 145407 - DNA, 75 bp, synthetic construct
  source 1..75: mol_type = other DNA
accgggaggaggcccggcatctggaagcgttcctggcagagcacggaggctggaaggcatttttgtggaagccac

SEQ ID NO: 145408 - DNA, 75 bp, synthetic construct
  source 1..75: mol_type = other DNA
tggaaggcaatgcgatcaaaccagtaaaactgccaccaaacctgtcatcgcagattttgctgcagcggccggata

SEQ ID NO: 145409 - DNA, 75 bp, synthetic construct
  source 1..75: mol_type = other DNA
atttgaccttacttcctgcgaatacttattctgccataattcagagggtgacctatagatactttagtgaaataa

SEQ ID NO: 145410 - DNA, 75 bp, synthetic construct
  source 1..75: mol_type = other DNA
tgaaaggcggggagatcgcaccagtaaaattgccaccaaatctatcttcacaaattttactgcagcgaccggata

SEQ ID NO: 145411 - DNA, 75 bp, synthetic construct
  source 1..75: mol_type = other DNA
tgcgtctggcggaatacagccgtgattgcctgaaagcattgcgcgccgaaactcatattcagtatgaagggcggc

SEQ ID NO: 145412 - DNA, 75 bp, synthetic construct
  source 1..75: mol_type = other DNA
cgctgccgccggatatccggttaagcccgcatctttacctggcgaccaacagcgcacaggggccgtggtggatac

SEQ ID NO: 145413 - DNA, 75 bp, synthetic construct
  source 1..75: mol_type = other DNA
gagcgagtatgcgtatattagttttttgacggtcagccagcgccgcactttgtttatgcatgccggattaactga

SEQ ID NO: 145414 - DNA, 75 bp, synthetic construct
  source 1..75: mol_type = other DNA
atgacagtgatgacacttaatctcgtcgaaaaacagccagcagctatgcgccggataattggtaagcatctggcc

SEQ ID NO: 145415 - DNA, 75 bp, synthetic construct
  source 1..75: mol_type = other DNA
gctcaattaaaacagcgtcatgcgacgatgcgtcttgaagaaatgaacgatgtagaccgggagcgtctggtgtgc

SEQ ID NO: 145416 - DNA, 75 bp, synthetic construct
  source 1..75: mol_type = other DNA
agatggccgcgcaactggaggcggaatacatcccggagaggaaacttcatctttaccactgtgaccaccgtgggc

SEQ ID NO: 145417 - DNA, 75 bp, synthetic construct
  source 1..75: mol_type = other DNA
attattttgaagttcaactggaaatataacgcctgggctaaatccatatatgaagctggcatagttttatcagcc

SEQ ID NO: 145418 - DNA, 75 bp, synthetic construct
  source 1..75: mol_type = other DNA
ataacgcctgggctaaatctatatatgaagttggcatagttttatcagccatagcattatctttccatctatggc

SEQ ID NO: 145419 - DNA, 75 bp, synthetic construct
  source 1..75: mol_type = other DNA
tctggctaagggtatttatacaccagctcttgtggtggatcacatcattcccatcaatggcggcggtgatgttct

SEQ ID NO: 145420 - DNA, 75 bp, synthetic construct
  source 1..75: mol_type = other DNA
cacggcgtggtatttccggctgaactggtgcggctgctggacaggctggaggaagaaatccgggcagaccgcgtg

SEQ ID NO: 145421 - DNA, 75 bp, synthetic construct
  source 1..75: mol_type = other DNA
tcagcctccgggcctgacggactggaaatgcgccggaaatatgatgagtacgggcgtctgacgcaggaaaccacc

SEQ ID NO: 145422 - DNA, 75 bp, synthetic construct
  source 1..75: mol_type = other DNA
gaatcggaccgtatcactcatcgcacggtgaacggcgaagcggcagagcagtggcagtacgacgcccacggctgg

SEQ ID NO: 145423 - DNA, 75 bp, synthetic construct
  source 1..75: mol_type = other DNA
taaagttgtttactggcatgatggtcagtgtgcggattttcatgggttgccgggagtggatattcgtcctgatac

SEQ ID NO: 145424 - DNA, 75 bp, synthetic construct
  source 1..75: mol_type = other DNA
cccgcctttccgtaggccaggcacaacgtgtggcggtggcgcgtgcattactgaatccctgttcgctattactgt

SEQ ID NO: 145425 - DNA, 75 bp, synthetic construct
  source 1..75: mol_type = other DNA
gatactcccgtgggtgatcaggctgctcgtctttccgtgggccaggcgcaacgcgtggcggtggcgcgagcattg

SEQ ID NO: 145426 - DNA, 75 bp, synthetic construct
  source 1..75: mol_type = other DNA
tggacaccgccttatgcctggcggcagataaaggtgacctgtgccgcctggtcatcacgggttcgcatgctgcgg

SEQ ID NO: 145427 - DNA, 75 bp, synthetic construct
  source 1..75: mol_type = other DNA
ttgataatgcggatgccgacattacgttcgccgggtatcgtttctcagagcgaaactatatgaccatggagcagt

SEQ ID NO: 145428 - DNA, 75 bp, synthetic construct
  source 1..75: mol_type = other DNA
cggtgccggctgggacctgggtgtgccggggaccctttccgctgatatcacgcagtcagtagcccgtattgaggg

SEQ ID NO: 145429 - DNA, 75 bp, synthetic construct
  source 1..75: mol_type = other DNA
gaaagcattcgttctgcttcggaagatttccgtcaacggacaatggaagtgctgcggctggcatttttatcctcc

SEQ ID NO: 145430 - DNA, 75 bp, synthetic construct
  source 1..75: mol_type = other DNA
acctgcggggagctgggcgacgctggtactcgagcaaattgacgatatgcatgattactatgcacgctacctgcc

SEQ ID NO: 145431 - DNA, 75 bp, synthetic construct
  source 1..75: mol_type = other DNA
ggacgttacgcggaattaagtgtggctggtggcccattcgccacattactggcccatcgtcaggaggagatttaa

SEQ ID NO: 145432 - DNA, 75 bp, synthetic construct
  source 1..75: mol_type = other DNA
gttgaacgcgatttccggttttctttcctatcaggggtcgctacggatcaacgggatagaattgcgagatttatc

SEQ ID NO: 145433 - DNA, 75 bp, synthetic construct
  source 1..75: mol_type = other DNA
ttttggtttctcctatctcggcgagctggattttggtcactacgacactggcgtaacgctggccgcaggcttcct

SEQ ID NO: 145434 - DNA, 75 bp, synthetic construct
  source 1..75: mol_type = other DNA
gaaagtatccgttcagcctcagaagatttccgccaacggacaatggaagtgctacgtctggcgtttttatcctcc

SEQ ID NO: 145435 - DNA, 75 bp, synthetic construct
  source 1..75: mol_type = other DNA
tgacctgtgccgcctggtcatcacgggttcgcatgctgcgggttgaattcagagctgagtttaagcaggtggtga

SEQ ID NO: 145436 - DNA, 75 bp, synthetic construct
  source 1..75: mol_type = other DNA
tgacctgtgccgcctggtcatcacgggttcgcatgctgtgggttgaattcagcgccgagtttaagcaggtggtga

SEQ ID NO: 145437 - DNA, 75 bp, synthetic construct
  source 1..75: mol_type = other DNA
tgacctgtgccgcctggtcatcacgggttcgcatgctgagggttgaattcagtgcggagtttaagcaggtggtga

SEQ ID NO: 145438 - DNA, 75 bp, synthetic construct
  source 1..75: mol_type = other DNA
tgacctgtgccgcctggtcatcacggattcgcatgctgcgggttgaattcagtgccgagtttaagcaggtggtga

SEQ ID NO: 145439 - DNA, 75 bp, synthetic construct
  source 1..75: mol_type = other DNA
atgaaaaccttccgctggaaagtgaaacccgggatggatgtgacatcggccccttccgtaagaaaggtgcgcttt

SEQ ID NO: 145440 - DNA, 75 bp, synthetic construct
  source 1..75: mol_type = other DNA
acccgggaggaggcccggcatctggaagcgttcctggcagagcacggtggctggaaggcatttctgtggacaccg

SEQ ID NO: 145441 - DNA, 75 bp, synthetic construct
  source 1..75: mol_type = other DNA
tccgtgacccgggaggaggcccggcatctggaagcgttcctggcagagcacggaggctggaaggcatttttgtgg

SEQ ID NO: 145442 - DNA, 75 bp, synthetic construct
  source 1..75: mol_type = other DNA
ctctggaatcatacgcatactgctactctagaagattataaacttaagggagaacttaatgacttataccaccag

SEQ ID NO: 145443 - DNA, 75 bp, synthetic construct
  source 1..75: mol_type = other DNA
ccagcattcagacccatgaaatcatgctgcttacacattttaatctgggcggcgttttactcagtgagctacatc

SEQ ID NO: 145444 - DNA, 75 bp, synthetic construct
  source 1..75: mol_type = other DNA
caggctgaacagtctgctccggcgtttcgaagatcgcgatctctaccacacgctgatatgctgtgctggtatgat

SEQ ID NO: 145445 - DNA, 75 bp, synthetic construct
  source 1..75: mol_type = other DNA
tcgcagagaagaaaacaaagcaacgagtttggacattattccctacttgagaaatttactagttcggtttccttc

SEQ ID NO: 145446 - DNA, 75 bp, synthetic construct
  source 1..75: mol_type = other DNA
aaaaccaaacttatggagaatatcacttaatcactccggctacacggtttgacctggctcgctgtatgtccatgg

SEQ ID NO: 145447 - DNA, 75 bp, synthetic construct
  source 1..75: mol_type = other DNA
tgcaagaaggctaccgcctgcattttctcgctgaccgcgccgggtttaacggttctttcagcgacgagcatgtgt

SEQ ID NO: 145448 - DNA, 75 bp, synthetic construct
  source 1..75: mol_type = other DNA
cgttatggatatttatttcgtttctagcgatctatgcctttattatctataaaggttcttatattggagtagcat

SEQ ID NO: 145449 - DNA, 75 bp, synthetic construct
  source 1..75: mol_type = other DNA
ggaactgctctggcagcatgagacgaaacacgcctacaacgaacagggactggcaaaccgcgtcacgccggacgg

SEQ ID NO: 145450 - DNA, 75 bp, synthetic construct
  source 1..75: mol_type = other DNA
atgacagtgatgacgctcaatctcgtcgaaaaacagccagcagctatgcgccggataattggtaagcatcttgcc

SEQ ID NO: 145451 - DNA, 75 bp, synthetic construct
  source 1..75: mol_type = other DNA
ttcgacgatcgtgatctctaccacacgctgatatggctgtgctggtatgatctgatgtgtgcccactccatgcag

SEQ ID NO: 145452 - DNA, 75 bp, synthetic construct
  source 1..75: mol_type = other DNA
cgcatcttcatggttatcaccgcctgaccctggcccacttttttctgccggaaaaaggcaccatcatctcggtgg

SEQ ID NO: 145453 - DNA, 75 bp, synthetic construct
  source 1..75: mol_type = other DNA
caggggaagagataatctttattcttgaaacagaatcccctgaattaagtgatcaagaattagaaataatccagt

SEQ ID NO: 145454 - DNA, 75 bp, synthetic construct
  source 1..75: mol_type = other DNA
ttcatctggatgtaaggcgaaataacaaccgaaatacggtaaggggcttcgaaggggctttaaaggggcttcgaa

SEQ ID NO: 145455 - DNA, 75 bp, synthetic construct
  source 1..75: mol_type = other DNA
tccaggaccagctggcacgacaccggaagcagattccgggcgttgtgtgcagcaggtgctgatcgtcgaaccgga

SEQ ID NO: 145456 - DNA, 75 bp, synthetic construct
  source 1..75: mol_type = other DNA
cgaaggctggcgcagtcagcctgcgttgcgtgaatcacatttctgaaccggacaccgaaattccgccgggtttca

SEQ ID NO: 145457 - DNA, 75 bp, synthetic construct
  source 1..75: mol_type = other DNA
catggaaagacgctgttgattgggtgctaaaagaggcctgccaggttgtaaacatccgcatcaaaggaggtgagt

SEQ ID NO: 145458 - DNA, 75 bp, synthetic construct
  source 1..75: mol_type = other DNA
aaacgggaacggaatttgttcagcgagcgacgacgttttttggaccggaccggaattttgaaaacccctggttgc

SEQ ID NO: 145459 - DNA, 75 bp, synthetic construct
  source 1..75: mol_type = other DNA
cctggcaggttggggaaacgttgaagcctggcgataaccgttgtgcaggtgtcaggaatgagtatgcatcattac

SEQ ID NO: 145460 - DNA, 75 bp, synthetic construct
  source 1..75: mol_type = other DNA
aaaacactatggtccatggcgtaaaaaacgccacgaaccaggcaggggatgttcagaccgtcaatcctggtcagc

SEQ ID NO: 145461 - DNA, 75 bp, synthetic construct
  source 1..75: mol_type = other DNA
cgctgccgaaggctggcgcagtcagcctgcgttgcgtgaatcacatttctgaaccggacaccgaaattccgccgg

SEQ ID NO: 145462 - DNA, 75 bp, synthetic construct
  source 1..75: mol_type = other DNA
accaaagaagagagcacttattgaaatttaataatctagaggttacttatgccaaaggagagggaaaaaataaag

SEQ ID NO: 145463 - DNA, 75 bp, synthetic construct
  source 1..75: mol_type = other DNA
ttcaatgcctggagggccagattacgcgaaggggtgtcaccggatgtcgtgctggatggcgtgaggcgttacgca

SEQ ID NO: 145464 - DNA, 75 bp, synthetic construct
  source 1..75: mol_type = other DNA
ggattgccgacccaggccttcagccggaacgcacatcgctggcatggtttcgtaccatgctgggctacggtgcgt

SEQ ID NO: 145465 - DNA, 75 bp, synthetic construct
  source 1..75: mol_type = other DNA
atgccggatagccgcaaagccagacggattgccgacccaggccttcagccggaacgcacatcgctggcatggttt

SEQ ID NO: 145466 - DNA, 75 bp, synthetic construct
  source 1..75: mol_type = other DNA
ttaccctctgcactggcgcactattttgcccaactgcggggcgatttccccggcgatgcactcaatcgtcagcgc

SEQ ID NO: 145467 - DNA, 75 bp, synthetic construct
  source 1..75: mol_type = other DNA
gcaattatccccgactgagtcaggcgaagccctacatggtttgctggcgctggctcgccatcaactggcttctca

SEQ ID NO: 145468 - DNA, 75 bp, synthetic construct
  source 1..75: mol_type = other DNA
tcagtcaacaattactggaacaactcacattattaatcgcccaggaaaatcaatttgccgaaatgggccaggcgc

SEQ ID NO: 145469 - DNA, 75 bp, synthetic construct
  source 1..75: mol_type = other DNA
caagcgctttgccatattctgcgcgatctacatagcggcgttaatttacccggcgtttctctttctgcggcggta

SEQ ID NO: 145470 - DNA, 75 bp, synthetic construct
  source 1..75: mol_type = other DNA
cggcgcggctcatggcgcactgatgcgtctggaacatcctaacgccagtgccgaagcggcgctgacgatgctggc

SEQ ID NO: 145471 - DNA, 75 bp, synthetic construct
  source 1..75: mol_type = other DNA
gaagccgcacgccataaattagaagccgatatgctggacgcgggtggaatcggcagtatcaccacatgtcttagc

SEQ ID NO: 145472 - DNA, 75 bp, synthetic construct
  source 1..75: mol_type = other DNA
gcacagttgcgcggccatacactacctctacgcactgactggctggatgccatagctggctcgctgattaaagaa

SEQ ID NO: 145473 - DNA, 75 bp, synthetic construct
  source 1..75: mol_type = other DNA
aagtgagtctgcatatattagttttctaacagtaggtcagcgacgctctttatttttacacgcggggttaagtga

SEQ ID NO: 145474 - DNA, 75 bp, synthetic construct
  source 1..75: mol_type = other DNA
acgagccgggaagcttcacaccgctcatccgcatcgaaacagacgtgaccgaactggagaaagcgcagcgccgga

SEQ ID NO: 145475 - DNA, 75 bp, synthetic construct
  source 1..75: mol_type = other DNA
attaaagaggcattaaacgcgccgttgccgtggagctatcgcggggtcattcatcccgataccgatccaattctg

SEQ ID NO: 145476 - DNA, 75 bp, synthetic construct
  source 1..75: mol_type = other DNA
tgatgtgctggcgggatacctttcaggaatgcctgctccggtctggcaaaactggtgctggaaatttggtttgca

SEQ ID NO: 145477 - DNA, 75 bp, synthetic construct
  source 1..75: mol_type = other DNA
tctggcgtccttcagtcaacaattactggagcaactcacattattaatcgcccaggaaaatcaatttgccgaaat

SEQ ID NO: 145478 - DNA, 75 bp, synthetic construct
  source 1..75: mol_type = other DNA
acgtgagttgtttagcctgtttgagtatgcgccgacgatattaacatcggtcaagcctgagcaatatttgcatta

SEQ ID NO: 145479 - DNA, 75 bp, synthetic construct
  source 1..75: mol_type = other DNA
cggcatcatagtccggcctgcgcccggctggtgaaatcgttaatcgaaagccagcggccacgatacgtgttgatt

SEQ ID NO: 145480 - DNA, 75 bp, synthetic construct
  source 1..75: mol_type = other DNA
gcttaccttaaatcgctttacccccgatggactggcgcaaagtcaggtgttacatcggctggtaatactggagat

SEQ ID NO: 145481 - DNA, 75 bp, synthetic construct
  source 1..75: mol_type = other DNA
acgtgaactattcagtctgtttgagtatgcaccgacaattctgacgtcggtaaaaccagagcaatatttgcatta

SEQ ID NO: 145482 - DNA, 75 bp, synthetic construct
  source 1..75: mol_type = other DNA
gcaattgatgaattgcgtggcgcattctcaaaacgccgtcaggtcggcgcaagtgagtatgcatatattagtttt

SEQ ID NO: 145483 - DNA, 75 bp, synthetic construct
  source 1..75: mol_type = other DNA
attattataatcagatgatggagcgcgaacggctaacggtttgcttccatgcgcagttaaaacagcgtcacgcaa

SEQ ID NO: 145484 - DNA, 75 bp, synthetic construct
  source 1..75: mol_type = other DNA
aacaactgctaaaaacggttctcacccgtttgcgccagcacaacttgcctgcttcgaccgcggatatggctgccg

SEQ ID NO: 145485 - DNA, 75 bp, synthetic construct
  source 1..75: mol_type = other DNA
cgacgtgttagtcgtctgcggcggctggcacgctcctgcactggcaaaaatgtggcgcgaatgcccgcaggaaat

SEQ ID NO: 145486 - DNA, 75 bp, synthetic construct
  source 1..75: mol_type = other DNA
ctgctttggtgcaacactccaggaagccgcacgccataaattagaagccgatatgctggacgcgggtggaatcgg

SEQ ID NO: 145487 - DNA, 75 bp, synthetic construct
  source 1..75: mol_type = other DNA
gttcttacccgtttgcgccagcaccacttgcctgcttcaacagcggatatggctgccgctcatctgcatgcgatg

SEQ ID NO: 145488 - DNA, 75 bp, synthetic construct
  source 1..75: mol_type = other DNA
ccgggtagatgaattgtttttagcccaccagcttcctgttgccatatacagttattctcaatatcaggacagtaa

SEQ ID NO: 145489 - DNA, 75 bp, synthetic construct
  source 1..75: mol_type = other DNA
atgagcgagccattaattgtcggcatccggcatcatagcccggcctgtgcccggctggtgaaatcgctaatcgaa

SEQ ID NO: 145490 - DNA, 75 bp, synthetic construct
  source 1..75: mol_type = other DNA
tggcctggctggaatggggatcactacggaggcaattctggctatggttgcccatattgttacccgctctgccgc

SEQ ID NO: 145491 - DNA, 75 bp, synthetic construct
  source 1..75: mol_type = other DNA
gccgtggctgctcgccatcccccacgtcgcttttgccaccagcgtcctgctactgtttgccgaaggcggcctggt

SEQ ID NO: 145492 - DNA, 75 bp, synthetic construct
  source 1..75: mol_type = other DNA
tgccactggtggcgggccagtacacgctggcgctatggctgaaactggatggaagctggacggcggtggtctggg

SEQ ID NO: 145493 - DNA, 75 bp, synthetic construct
  source 1..75: mol_type = other DNA
gaatgccggaagaaacgggtgacattattgttgtttcggatggcattgtaatgtcagggatttcttattctcgtc

SEQ ID NO: 145494 - DNA, 75 bp, synthetic construct
  source 1..75: mol_type = other DNA
aaagttctggataacctgtcacagcaaaaacttgttcacagagatgtgctgccgttctcgcttccggtaactccg

SEQ ID NO: 145495 - DNA, 75 bp, synthetic construct
  source 1..75: mol_type = other DNA
gactccacatttggctgcgttggccccattggtccgctgaaacatctctcaaaagaggcacttgaagccgcagcc

SEQ ID NO: 145496 - DNA, 75 bp, synthetic construct
  source 1..75: mol_type = other DNA
gatgctgaaattaccgttgctatggaagataaattgaagatcaacatggagcgccagtggcctgagccaaaagat

SEQ ID NO: 145497 - DNA, 75 bp, synthetic construct
  source 1..75: mol_type = other DNA
gcaaccatcctcaaactaatgaatatggtctgattagcaatgtaacccactggatgccgctaccagagcctccac

SEQ ID NO: 145498 - DNA, 75 bp, synthetic construct
  source 1..75: mol_type = other DNA
tcaggatggttggataagctgtagtgagcgaatgccccctcaagatgattggattttaatttattcaaagcacgg

SEQ ID NO: 145499 - DNA, 75 bp, synthetic construct
  source 1..75: mol_type = other DNA
atggctacgccgttacggtacgcattaatctttctgctgtggtcactgatggcggtgatttacgcaccgctgatt

SEQ ID NO: 145500 - DNA, 75 bp, synthetic construct
  source 1..75: mol_type = other DNA
ccgccaatggaccgatttggcatcggtctgggcctcacccttgcagtgaaagaaagcgcatttctgctgtggatc

SEQ ID NO: 145501 - DNA, 75 bp, synthetic construct
  source 1..75: mol_type = other DNA
ttcacagagatgtgctgccgttctcgcttccggtaactccggatggttgggttatggttcctaaacaggtaacgc

SEQ ID NO: 145502 - DNA, 75 bp, synthetic construct
  source 1..75: mol_type = other DNA
ctttccgggcctacaccattcagctctatctttatggatacatgtcgaggactcggcaatgcaaagctttcactc

SEQ ID NO: 145503 - DNA, 75 bp, synthetic construct
  source 1..75: mol_type = other DNA
cccttgatgattatctggcaaccgtggcggcgcagctcgcaccgggccagcgccgtaagctcacgcgcgaggtgg

SEQ ID NO: 145504 - DNA, 75 bp, synthetic construct
  source 1..75: mol_type = other DNA
catgttgacgaacaggacttcttatgaagtgccgcaaggtgtgaaatgtacaatcgatgaaatggtaagagcgct

SEQ ID NO: 145505 - DNA, 75 bp, synthetic construct
  source 1..75: mol_type = other DNA
gattgatttgattgatttactggtccaactattgcgtggcaagatgactatcatcatttctgtcattgtggctat

SEQ ID NO: 145506 - DNA, 69 bp, synthetic construct
  source 1..69: mol_type = other DNA
atggaacttaaaaaattgatggaacatatttctattatccccgattacagacaagcctggaaagtggaa

SEQ ID NO: 145507 - DNA, 75 bp, synthetic construct
  source 1..75: mol_type = other DNA
gtatttctcgtcatcatgcaaagcaaatagcaagggaaagcagcggcagcgataaacagaaagctgaagttgtgg

SEQ ID NO: 145508 - DNA, 75 bp, synthetic construct
  source 1..75: mol_type = other DNA
gactccacatttggctgcgttggccccattggtccgctgaaacatctctcaaaagaggctctggaagccgcagcc

SEQ ID NO: 145509 - DNA, 75 bp, synthetic construct
  source 1..75: mol_type = other DNA
aacggtgagttttttgatgttgtccgcaatggtgaggagttcttcgaaacgcagagccgcaatgtaacccactgg

SEQ ID NO: 145510 - DNA, 75 bp, synthetic construct
  source 1..75: mol_type = other DNA
ctgcaatatgtgaacgaggcactgaaggatgagcactggatctgcgggcaaagatttacaattgctgatgcctat

SEQ ID NO: 145511 - DNA, 75 bp, synthetic construct
  source 1..75: mol_type = other DNA
ggcagagtatctgctcgtttttcagatggctcatccttaagaatttccgtcactaacagcgaaagtattgaagcc

SEQ ID NO: 145512 - DNA, 75 bp, synthetic construct
  source 1..75: mol_type = other DNA
gttaggaatgttgacaaaccgaaccacttattcagtgccaaaagatctaaaatgtaaaattaatgatatggtaag

SEQ ID NO: 145513 - DNA, 75 bp, synthetic construct
  source 1..75: mol_type = other DNA
taaaaacaactacccaccaaacatccccaacactcaggtcggcgtatatggcgactggtttaatgatggcaagcc

SEQ ID NO: 145514 - DNA, 75 bp, synthetic construct
  source 1..75: mol_type = other DNA
aatcgtacctgaatggtagtaaaaagtttgttgtacttaatagtgcaaacactgatggttttgaaattaatatag

SEQ ID NO: 145515 - DNA, 75 bp, synthetic construct
  source 1..75: mol_type = other DNA
gcattaataataacgcttctcgtcagaatgggagtgggttttatttcagtgaaatgtatttcagaggtgtccttt

SEQ ID NO: 145516 - DNA, 75 bp, synthetic construct
  source 1..75: mol_type = other DNA
actcttcactttttattgcttatatgggatgtttgggatgggggagtgcttatttctatggttggggcacttcct

SEQ ID NO: 145517 - DNA, 75 bp, synthetic construct
  source 1..75: mol_type = other DNA
acaaaaatgtctgtttatccataatgactggttaggccgtatcgaagccagcctacaggatgtcggcacccagat

SEQ ID NO: 145518 - DNA, 75 bp, synthetic construct
  source 1..75: mol_type = other DNA
cgcgattgtgcaacgtcacctgcaactccagcagcaacaaagcgataaaacagccttaacggtaattcgtctggg

SEQ ID NO: 145519 - DNA, 75 bp, synthetic construct
  source 1..75: mol_type = other DNA
cgccgctggaaaaaagcgatccgtttactgcaggccagcgccttttttagcggtcgcaatgcggttgccccgatt

SEQ ID NO: 145520 - DNA, 75 bp, synthetic construct
  source 1..75: mol_type = other DNA
taataaaaataaattctatatccctgacaaccgttgtcaccatattgtcacgcctgaagccatcagcctggcgct

SEQ ID NO: 145521 - DNA, 75 bp, synthetic construct
  source 1..75: mol_type = other DNA
gcgttcactttttgcagggctatttgtactctccgccagtaccgggtaataaatttgtctctgaatgggtaatga

SEQ ID NO: 145522 - DNA, 75 bp, synthetic construct
  source 1..75: mol_type = other DNA
atccaacctgttttctgcgcacagacaggggtactgacaggctgtgaagtgcttgttcgctgggagcatccgcaa

SEQ ID NO: 145523 - DNA, 75 bp, synthetic construct
  source 1..75: mol_type = other DNA
aatagtcacaaatatattaatgataatcactatcaccatatcgtcacgcctgaagccatcagtctggcgttggaa

SEQ ID NO: 145524 - DNA, 75 bp, synthetic construct
  source 1..75: mol_type = other DNA
cttgattgtgataatgacccgtcagttgatgaaacaaaccgcggatattctggcaccagtaaaacatttgctgcc

SEQ ID NO: 145525 - DNA, 75 bp, synthetic construct
  source 1..75: mol_type = other DNA
aggcatccagagtgatattaccttctggcgggatatcttttttcaatatcatccgcaagtcatcagtggcacggg

SEQ ID NO: 145526 - DNA, 75 bp, synthetic construct
  source 1..75: mol_type = other DNA
gttttggtactttctggcttgtttttggtggctgcggcagcgccgtgctggcggcagcattcccggaattaggca

SEQ ID NO: 145527 - DNA, 75 bp, synthetic construct
  source 1..75: mol_type = other DNA
cgctcaatttgctggaacacgatgatagccatgacggcgttcaactggtgaaggcgcaaacggttattgggtcgg

SEQ ID NO: 145528 - DNA, 75 bp, synthetic construct
  source 1..75: mol_type = other DNA
ttaaatagtcctgcactgaccggaacgccaacaacaccaactgcgcgacagggaacgaataatacccaaatcgca

SEQ ID NO: 145529 - DNA, 75 bp, synthetic construct
  source 1..75: mol_type = other DNA
gaaccagacgatcttggcgagtgggctgatatgcagtttctgttgtgggatgcacagcgccgtgctggcatcagc

SEQ ID NO: 145530 - DNA, 75 bp, synthetic construct
  source 1..75: mol_type = other DNA
gactggccgccccctgcgcgctccctgcgccagtggctttatatggcattgcacatgaaaggagcgcaacaatgc

SEQ ID NO: 145531 - DNA, 75 bp, synthetic construct
  source 1..75: mol_type = other DNA
cctggcggttattccatgctttctgccctggtggttgaactggtactgagtgcaggtttcctgctggttatccac

SEQ ID NO: 145532 - DNA, 75 bp, synthetic construct
  source 1..75: mol_type = other DNA
gcgcttgaggatgcgagcacgacgaaaaaggggatagtacagctcagcagtgcgaccaacagcacttccgagtca

SEQ ID NO: 145533 - DNA, 75 bp, synthetic construct
  source 1..75: mol_type = other DNA
aaaggtttctataaagatcaagaacaagcgttagcggatattcgtaacatgactattcagtctgttggtaagggt

SEQ ID NO: 145534 - DNA, 75 bp, synthetic construct
  source 1..75: mol_type = other DNA
ttctgtaaatgccccggggcattttatgaggctggcgatagaaaaaggtttctataaagatcaagaacaagcgtt

SEQ ID NO: 145535 - DNA, 75 bp, synthetic construct
  source 1..75: mol_type = other DNA
aggctcagggcgttcgcagacctgccgcatggtcatcatcgtcagcagtgtggcctcagtggcgctgaccattga

SEQ ID NO: 145536 - DNA, 75 bp, synthetic construct
  source 1..75: mol_type = other DNA
tatgaccttgctaacgggaaatacactgcacatgcgtattttcatgaaaggagatcactcaataacttccatcga

SEQ ID NO: 145537 - DNA, 75 bp, synthetic construct
  source 1..75: mol_type = other DNA
ccataacctggacaggaaaaggtcgccgacctgcagcgtttgccgagatgagcgacgatgagctcaaaaaatatg

SEQ ID NO: 145538 - DNA, 75 bp, synthetic construct
  source 1..75: mol_type = other DNA
ggctggaggtattttacaactcggtgtttcggtcatgtcagagtttttccccaaaagcaaggccaaagtcaccag

SEQ ID NO: 145539 - DNA, 75 bp, synthetic construct
  source 1..75: mol_type = other DNA
gcattaaaaaccgtctcttattacagtatgggttcgctggtctgcgtctttatttttgccgcgctactgaaaaaa

SEQ ID NO: 145540 - DNA, 75 bp, synthetic construct
  source 1..75: mol_type = other DNA
ttaccgcgttttcattattcctgaaaatgatgtgcggtttggcgagcgtaaatttagcacccggttaaacacaat

SEQ ID NO: 145541 - DNA, 75 bp, synthetic construct
  source 1..75: mol_type = other DNA
ggaggaacccgtcttctggtggataccgatggtgtcggaggtgtgccggttgacggtggccgggtttataccaac

SEQ ID NO: 145542 - DNA, 75 bp, synthetic construct
  source 1..75: mol_type = other DNA
agctattccaaacgttttgatgacgtgaatacggatatcacttttgcgggttaccgcttctctgaacgcaattac

SEQ ID NO: 145543 - DNA, 75 bp, synthetic construct
  source 1..75: mol_type = other DNA
tgaccaggatatttcaccatcggcatttcagattgcgtttcttgaaccacctttttcggattcggataacgagaa

SEQ ID NO: 145544 - DNA, 75 bp, synthetic construct
  source 1..75: mol_type = other DNA
aacataccgtgtgacgctttccgtgacccgggaggaggcccgacatttggaggcgttcctggcagagcacggtgg

SEQ ID NO: 145545 - DNA, 75 bp, synthetic construct
  source 1..75: mol_type = other DNA
cgccattttatctcagtaaccgatgccaataccaaagccctgaaaaaaacctgcaaggtaatgaaaacatatatc

SEQ ID NO: 145546 - DNA, 75 bp, synthetic construct
  source 1..75: mol_type = other DNA
cgccattttatcccagtaaccgatgccagtaccaaagccctgaaaaatacctgcaagataatgaaagcatatatc

SEQ ID NO: 145547 - DNA, 75 bp, synthetic construct
  source 1..75: mol_type = other DNA
cacaaggaaagcacgaaggtcagtccttaccacagccatgcctgacctctgaaatggttagcaggatggggttaa

SEQ ID NO: 145548 - DNA, 75 bp, synthetic construct
  source 1..75: mol_type = other DNA
tgacctgtgccggatggtccgcgcgggtcgggatgttgcgcgttgagttcagcgcggagtttaagcaggtggtga

SEQ ID NO: 145549 - DNA, 75 bp, synthetic construct
  source 1..75: mol_type = other DNA
catctggaagcgtttctggcagagcacggaggctggaaggcatttttgtggaagccaccctatgcataccggcag

SEQ ID NO: 145550 - DNA, 75 bp, synthetic construct
  source 1..75: mol_type = other DNA
caacctgaatcacaccaccggcagtgcgcaggggacggacagccagttcacctggagccgtttctacatgtaccg

SEQ ID NO: 145551 - DNA, 75 bp, synthetic construct
  source 1..75: mol_type = other DNA
atgaccgttatgtgaatatggccggctacactgacacgttcaatgacggtctggacagctacagcctgaacgccg

SEQ ID NO: 145552 - DNA, 75 bp, synthetic construct
  source 1..75: mol_type = other DNA
cagctatccgccctttggtgccagcgtgacaaatgcgaaaggccgtgaactggggatggtggcagacagcggtct

SEQ ID NO: 145553 - DNA, 75 bp, synthetic construct
  source 1..75: mol_type = other DNA
ctaaatccctgttcgctattactgttggatgaacccgctgccagccttgatgctcacagtgaacagcgcgtaatg

SEQ ID NO: 145554 - DNA, 75 bp, synthetic construct
  source 1..75: mol_type = other DNA
tccgcgaagtgctggatacagatgtgccggacagtgaatgtgtttttgccgtggtgctgacccgtggggatgtgc

SEQ ID NO: 145555 - DNA, 75 bp, synthetic construct
  source 1..75: mol_type = other DNA
tacttcgccaataaagacgccattattgaagagatggttcgccgtatcatcgactttcgtattgctcagatggac

SEQ ID NO: 145556 - DNA, 75 bp, synthetic construct
  source 1..75: mol_type = other DNA
cctgcatgcagggggcatgaacggaggaacccggctgctggtagacaccgatggtgtcggaggcgtgcctgtcga

SEQ ID NO: 145557 - DNA, 75 bp, synthetic construct
  source 1..75: mol_type = other DNA
tgccgtggagaacggttacacgtcattcggtatgagcgcatccggtggtgcaacgattaccgcgaaaggcgcggc

SEQ ID NO: 145558 - DNA, 75 bp, synthetic construct
  source 1..75: mol_type = other DNA
tgctgccggtgaggcatcctggggtatcagcaacacgtggtctctttacggtggcggtatcgttgccggggatta

SEQ ID NO: 145559 - DNA, 75 bp, synthetic construct
  source 1..75: mol_type = other DNA
tgagaaggagctgtacaccgtcacgctcaacaagaacttcgaggactggaagacctcggtcaacctgcagtacag

SEQ ID NO: 145560 - DNA, 75 bp, synthetic construct
  source 1..75: mol_type = other DNA
atactggaataacgggcagtgtgcggacctcagccagctgccgggggtggagattcgcccgaatccggctgaagg

SEQ ID NO: 145561 - DNA, 75 bp, synthetic construct
  source 1..75: mol_type = other DNA
atactggaataatgggcagtgtgcggatctcagtcagctgccgggggtggagatacgcccgaatctggcggaagg

SEQ ID NO: 145562 - DNA, 75 bp, synthetic construct
  source 1..75: mol_type = other DNA
acgttaatggtaaaagtgctgccaccgtttgctgccgggatctttctggctgcacctatggctgcgatcatgtcg

SEQ ID NO: 145563 - DNA, 75 bp, synthetic construct
  source 1..75: mol_type = other DNA
tgggtattgctggcgatgattcagctacctgcggtctggctttcgctcggtattctcggcaagaagttcgcgatt

SEQ ID NO: 145564 - DNA, 75 bp, synthetic construct
  source 1..75: mol_type = other DNA
ggcttttgctttttgttactgccagagcaatcggcggtgatgaggtatcacagtctgtcgatatgaatttcatcg

SEQ ID NO: 145565 - DNA, 75 bp, synthetic construct
  source 1..75: mol_type = other DNA
ctggcgagtttgagtttgctggtcgcgtttattggcgcgatgaccgtgcagtttatcggcggcgcgcgcctgctg

SEQ ID NO: 145566 - DNA, 75 bp, synthetic construct
  source 1..75: mol_type = other DNA
gcgatgaccgtgcagtttatcggcggtgcgcgcctgctggaaaccgcggcgggtattccttatgaaaccgggctg

SEQ ID NO: 145567 - DNA, 75 bp, synthetic construct
  source 1..75: mol_type = other DNA
cttgcgcgccgctacaatgcggtgacgctgaacgatatgctgtttgcccgctaccagagtcgtcttctggtgtgg

SEQ ID NO: 145568 - DNA, 75 bp, synthetic construct
  source 1..75: mol_type = other DNA
gcaactgcgatatttgcggtgaacagagcgacgcgctcctgagcctgatgacgaccaaaaattacggtgcgaatt

SEQ ID NO: 145569 - DNA, 75 bp, synthetic construct
  source 1..75: mol_type = other DNA
ggaggcgttgattgggcgcttcagttccgctttctctgcattagcggaaacgctggataatcaggaagaacgcga

SEQ ID NO: 145570 - DNA, 75 bp, synthetic construct
  source 1..75: mol_type = other DNA
ccaggctccgggagggatggtacgcattactactgctgagtttcagcgattttttgaggaagcagtaagggaggt

SEQ ID NO: 145571 - DNA, 75 bp, synthetic construct
  source 1..75: mol_type = other DNA
caattgaaatgcgcctgcgtaagcatctgtcactagcaaatgacgaggtatggcaacgctgcgccggcaaactga

SEQ ID NO: 145572 - DNA, 75 bp, synthetic construct
  source 1..75: mol_type = other DNA
cttatcgactcgccgattagcaccacgctaccaccgatggttctggcggtactggttgcgctggaacaaggcttc

SEQ ID NO: 145573 - DNA, 75 bp, synthetic construct
  source 1..75: mol_type = other DNA
tacattcaagcccagcgaagacataattaaagaagaaaacgtttttttctcatcgcttaaaaatgtggacgaggt

SEQ ID NO: 145574 - DNA, 75 bp, synthetic construct
  source 1..75: mol_type = other DNA
ctgccgggctgaatgccgacctgaaaacctacagcgtgacgctttttgtctcccgcggggaggccacggcgctgg

SEQ ID NO: 145575 - DNA, 75 bp, synthetic construct
  source 1..75: mol_type = other DNA
ccctgatggacagcccggaggcactggggcacgcactgtgtaatctgctgccggagatggtgcagggtttccgcg

SEQ ID NO: 145576 - DNA, 75 bp, synthetic construct
  source 1..75: mol_type = other DNA
tagttaaatacgactctgacagggattggaaagtgtggagtttcatcaactactacttacccgaagacgagcaag

SEQ ID NO: 145577 - DNA, 75 bp, synthetic construct
  source 1..75: mol_type = other DNA
gcttcacggattctaagtctgttacggagtgcattgaaagaagcatggttctccgatccaaaaggtgcacggggt

SEQ ID NO: 145578 - DNA, 75 bp, synthetic construct
  source 1..75: mol_type = other DNA
cgacaacatgaaagcccgctgttggtacgaacaccgtttcccgctgctgctcaataaaaaagaaggccagatacc

SEQ ID NO: 145579 - DNA, 75 bp, synthetic construct
  source 1..75: mol_type = other DNA
tcagataatgacggtaacaggggtagcaaattcttccggattcgcccttgccgcattacttaatgctaatattga

SEQ ID NO: 145580 - DNA, 75 bp, synthetic construct
  source 1..75: mol_type = other DNA
aaacgtatgactctgcaaccgtcatctcttccagaactgtttgaattaaaaatggtgaatggaattatattggta

SEQ ID NO: 145581 - DNA, 75 bp, synthetic construct
  source 1..75: mol_type = other DNA
tgggtattgctggcgatgattcagcttcctgcagtctggctttcgctcggtattctcggcaagaagtttgcgatt

SEQ ID NO: 145582 - DNA, 75 bp, synthetic construct
  source 1..75: mol_type = other DNA
agagataggttttgccgtttgcacaacaggtattttccagttattttctgttcccttttacttctggttaagtaa

SEQ ID NO: 145583 - DNA, 75 bp, synthetic construct
  source 1..75: mol_type = other DNA
gatcctgttgaggactatacagttcatgaaataacattaggccctggttgcaatgttccaggttacgccggaacc

SEQ ID NO: 145584 - DNA, 75 bp, synthetic construct
  source 1..75: mol_type = other DNA
agttcatgaaataacattaggccctggttgcaatgttcctggttatgccggaaccacgataggatatatttcaac

SEQ ID NO: 145585 - DNA, 75 bp, synthetic construct
  source 1..75: mol_type = other DNA
ccgagtcacgacagataaagatacagataaagataaagatacagataaagaagatcaaaacactatggtccatgg

SEQ ID NO: 145586 - DNA, 75 bp, synthetic construct
  source 1..75: mol_type = other DNA
aagaagaagcggaactgaaggtattcctggacgcgctgtatcgcctggaacaggaaggcgatttccagcaaaaag

SEQ ID NO: 145587 - DNA, 75 bp, synthetic construct
  source 1..75: mol_type = other DNA
tttagcaaaaaaagcaattgagatatcaaaagcagactggaaccaattcgagacatcttgggagttcagtaaaaa

SEQ ID NO: 145588 - DNA, 75 bp, synthetic construct
  source 1..75: mol_type = other DNA
cctctaacagatcaggagtggtttaaagacgacgcaactaaccgtttccgcgagtttgttcaagtcgtatggggt

SEQ ID NO: 145589 - DNA, 75 bp, synthetic construct
  source 1..75: mol_type = other DNA
ttggacgatgaaactgagcttcttctaccagacaacctaacacgtaccgactcaatactgcgtggattggtagac

SEQ ID NO: 145590 - DNA, 75 bp, synthetic construct
  source 1..75: mol_type = other DNA
tcaccccgttactaggcaaatacgatgcttatgctgagcagcttgagaagcagattgaaacagctgactcaacca

SEQ ID NO: 145591 - DNA, 75 bp, synthetic construct
  source 1..75: mol_type = other DNA
cgttagccgcaccatcactcaggcttgccagaatggcattcttgatgagttcgatggcaacctgctgaaaacgct

SEQ ID NO: 145592 - DNA, 75 bp, synthetic construct
  source 1..75: mol_type = other DNA
caatattatctttcagcaatcagccctactattaacactacagtaaatgatgttttatcgttaccagttcctgaa

SEQ ID NO: 145593 - DNA, 75 bp, synthetic construct
  source 1..75: mol_type = other DNA
caaatcgccggtaacagttttgacggtaaactggctgagcctagaaaacgcatagtggccagaagccagaaactt

SEQ ID NO: 145594 - DNA, 75 bp, synthetic construct
  source 1..75: mol_type = other DNA
gcaaaaatctaaatctctgccgcccgcattcagcggccagggtagccctgtaaacacccctcaaattatcgcgga

SEQ ID NO: 145595 - DNA, 75 bp, synthetic construct
  source 1..75: mol_type = other DNA
agcctgcggcgaagcagttgattgaatttgttcatcaggcattggttctatcgattcgttacgatgctgtgattg

SEQ ID NO: 145596 - DNA, 75 bp, synthetic construct
  source 1..75: mol_type = other DNA
tcggtcgtcaatggctgcaaacctacccagactctgccattaaaacgcagatggaatactatattgagcctgctg

SEQ ID NO: 145597 - DNA, 75 bp, synthetic construct
  source 1..75: mol_type = other DNA
ggttgaccaaaaaattcaacgagctacgcaattttgacgatcgcttgcgtcactatgctgatagacgtatcacta

SEQ ID NO: 145598 - DNA, 75 bp, synthetic construct
  source 1..75: mol_type = other DNA
aatgctggtttcaactcaatggtaacaatgcaatcctggatgttcctttccagttttgaaaacatgcgtgaaaat

SEQ ID NO: 145599 - DNA, 75 bp, synthetic construct
  source 1..75: mol_type = other DNA
cacggttatcttgagcacggcttccgtatgttgtcccatccggagacgccgaccgcgtttgaggtgctggatcat

SEQ ID NO: 145600 - DNA, 75 bp, synthetic construct
  source 1..75: mol_type = other DNA
tggtaccgctgctggcgcgttatcaggccaatatcgatcgcctgaacgatcaactcgatgaagcttctggcggtg

SEQ ID NO: 145601 - DNA, 75 bp, synthetic construct
  source 1..75: mol_type = other DNA
tgccggaaaataaggcgcagctggttgaaatgaagctttccggtaatcaggacgaagccctgtaccgcgaactgc

SEQ ID NO: 145602 - DNA, 75 bp, synthetic construct
  source 1..75: mol_type = other DNA
gttaaggttaactacggcaagtttggcgatctgctggcagatgtcaaagccatcaccggcaatgccccagaggtg

SEQ ID NO: 145603 - DNA, 75 bp, synthetic construct
  source 1..75: mol_type = other DNA
gtactggtgagtgttcctacagttcactcaaacaaacagattttaatgttattcctggctcacctattgcttatt

SEQ ID NO: 145604 - DNA, 75 bp, synthetic construct
  source 1..75: mol_type = other DNA
atgccccggtggcacgtaaacagttccgcgatgcggtcatgcaaaaattgaccacgctgggcattgaggccgata

SEQ ID NO: 145605 - DNA, 75 bp, synthetic construct
  source 1..75: mol_type = other DNA
tcaacacgccttggaatggcaacagcggataatgagcgttttttacgtttttggcatgaagttaatttcgcgaat

SEQ ID NO: 145606 - DNA, 75 bp, synthetic construct
  source 1..75: mol_type = other DNA
gatgattctggagaacaacctctacggcttggacatagatgatcgtgcagcgcagctatctggctttgcgctgat

SEQ ID NO: 145607 - DNA, 75 bp, synthetic construct
  source 1..75: mol_type = other DNA
taaggctggggagtttcgaaaatggtatgggaatttaaattgcgtggtcgattgggaaaatgatggcgcgagaat

SEQ ID NO: 145608 - DNA, 75 bp, synthetic construct
  source 1..75: mol_type = other DNA
aataccgacagcgcggaatataagctgctgatgcgtactctggcgttgttcaccagtgcgaaaacgctgggatcg

SEQ ID NO: 145609 - DNA, 75 bp, synthetic construct
  source 1..75: mol_type = other DNA
ctgcgccattcgctatatggaattgcacggttatcttgatcacggtttccgcatgctgtctcacccgacgctgaa

SEQ ID NO: 145610 - DNA, 75 bp, synthetic construct
  source 1..75: mol_type = other DNA
cggtatcgcggcgcggtggccgggcatcgagctgtgggccatgtcggccggtctggggctgcgccaccataccga

SEQ ID NO: 145611 - DNA, 75 bp, synthetic construct
  source 1..75: mol_type = other DNA
gaaagtgtctcgaaatgggaacgtaatgaaataaaaccgagcggcccggcactacgtattttgaatacattggca

SEQ ID NO: 145612 - DNA, 75 bp, synthetic construct
  source 1..75: mol_type = other DNA
agtttctttgaatatgcgctgggtgctgccgatgatatcgctaacaagatcaagcagaccactgacgaatatatc

SEQ ID NO: 145613 - DNA, 75 bp, synthetic construct
  source 1..75: mol_type = other DNA
gagatttaattaacagttcattacctttaatgtcaaaaatattaagatatttacacactgtatcattttttcaga

SEQ ID NO: 145614 - DNA, 75 bp, synthetic construct
  source 1..75: mol_type = other DNA
attcaaatgtaaaacaggtagatggtttattatctagttctaaagatatatcattcaataatcagttgtggaaag

SEQ ID NO: 145615 - DNA, 75 bp, synthetic construct
  source 1..75: mol_type = other DNA
atgagtattcaacatttccaaacaaagttaggcatcacaaagtacagcatcgtgaccaacagcaacgattccgtc

SEQ ID NO: 145616 - DNA, 75 bp, synthetic construct
  source 1..75: mol_type = other DNA
ctcggagctggtatccaaaataaagtattagagtatatggcgctcggtatgccggtgataacatctagggtgggt

SEQ ID NO: 145617 - DNA, 75 bp, synthetic construct
  source 1..75: mol_type = other DNA
ataaataacaagttcagcttgactactttggtatcacaggttgactccgattatttatatccagaccgtccgaat

SEQ ID NO: 145618 - DNA, 75 bp, synthetic construct
  source 1..75: mol_type = other DNA
ttttagagatgaccgatgccatttcacttaattataaacgagtaaaggaaaaagcatctttattgagtttaaaaa

SEQ ID NO: 145619 - DNA, 75 bp, synthetic construct
  source 1..75: mol_type = other DNA
aaagagctgcacggtatgaccgaagaagtttacctcgacgaaatggtaggtcgtattaacgccaatatgatcctt

SEQ ID NO: 145620 - DNA, 75 bp, synthetic construct
  source 1..75: mol_type = other DNA
tattcacggtgcataccgtcaggctgatggccgctataccggtaagcgtcgtctcagcaccgtctggcagatcct

SEQ ID NO: 145621 - DNA, 75 bp, synthetic construct
  source 1..75: mol_type = other DNA
aagaactttccaaaaaatatgatcttattcttctgagcttatgtgatcaaccactagaacttgaaataaatataa

SEQ ID NO: 145622 - DNA, 75 bp, synthetic construct
  source 1..75: mol_type = other DNA
atgatgccatttcgtggagccattccggtcgccaaagaacaactggcacaaacctggcaagagatgatcggtcaa

SEQ ID NO: 145623 - DNA, 75 bp, synthetic construct
  source 1..75: mol_type = other DNA
aatgctttcccggcgcaggtttccctcgggggtaaaaatgtcgcctggctgcagtctgaaatcacagcgtggatg

SEQ ID NO: 145624 - DNA, 75 bp, synthetic construct
  source 1..75: mol_type = other DNA
ttggcggtaaaaatgtggcctggctgcactctgaagtcaccgcatggatggccggccgcattgccggacgccaac

SEQ ID NO: 145625 - DNA, 75 bp, synthetic construct
  source 1..75: mol_type = other DNA
ctgaccgaatcgacgcttgccttgatgcgggagcaaaccgcttctcgattggcattcagtcatttaacagcaaaa

SEQ ID NO: 145626 - DNA, 75 bp, synthetic construct
  source 1..75: mol_type = other DNA
caaacagcaacaccacgtaaacgactggtttatctgcacattccattttgtgcgacacactgcacgttttgcggt

SEQ ID NO: 145627 - DNA, 75 bp, synthetic construct
  source 1..75: mol_type = other DNA
tcaagccacattttgctttagacggtacgcagccatttaaagacagacgcgccatgatgccatttcgcggggcta

SEQ ID NO: 145628 - DNA, 75 bp, synthetic construct
  source 1..75: mol_type = other DNA
tcacggcatatattgaagatgtcgatgcgctggcgcaggcaggcgcggatatcatcgcgattgacggcaccgacc

SEQ ID NO: 145629 - DNA, 75 bp, synthetic construct
  source 1..75: mol_type = other DNA
aaacattgtcaacaattattgatactaatagtaaactgttaagatatctaatcgatcttcacgcttttttgacat

SEQ ID NO: 145630 - DNA, 75 bp, synthetic construct
  source 1..75: mol_type = other DNA
gatgaaaaaaagcagtaaaagaataaaaaataaagattttgctaattcattattctgtaaaatgtggggaggagt

SEQ ID NO: 145631 - DNA, 75 bp, synthetic construct
  source 1..75: mol_type = other DNA
gtgagtcttggcggtaaaaatgtggcctggctgcactctgaagtcaccgcatggatggccggacgcattgccgga

SEQ ID NO: 145632 - DNA, 75 bp, synthetic construct
  source 1..75: mol_type = other DNA
tgcctgcaaactgcgcggcgatcagcctctgcccatcatcgccacggggcatttaacgaccgttggtgccagcaa

SEQ ID NO: 145633 - DNA, 75 bp, synthetic construct
  source 1..75: mol_type = other DNA
attattatcaacaacactatgcagatgcctgcaagctgcgcggcaatcaacctcttcccatcatcgccacggggc

SEQ ID NO: 145634 - DNA, 75 bp, synthetic construct
  source 1..75: mol_type = other DNA
gtttttaacggagagaagaacgttcctgcagacagccttaagtcacagcaacttattcttcctgacagtaacaat

SEQ ID NO: 145635 - DNA, 75 bp, synthetic construct
  source 1..75: mol_type = other DNA
tcggtcagcgacagtgctaatcctgttcatcatgatggtcatgtgcaggggggctacagcgttcccctgattatt

SEQ ID NO: 145636 - DNA, 75 bp, synthetic construct
  source 1..75: mol_type = other DNA
tggaatgacaacggcgacctggtgcgcatcagcggcccgcgacagacgcgggaatacggctacagcgccacgggc

SEQ ID NO: 145637 - DNA, 75 bp, synthetic construct
  source 1..75: mol_type = other DNA
tcctgccgggtgtaccgttgtatgacacgattgttatcgttactggtgagagtgtgcgcagggattatatgtcgg

SEQ ID NO: 145638 - DNA, 75 bp, synthetic construct
  source 1..75: mol_type = other DNA
actaccactacgacagccagcaccgcctggtgttctacacgcggatacagcaaggggagccacaggtcgagagcc

SEQ ID NO: 145639 - DNA, 75 bp, synthetic construct
  source 1..75: mol_type = other DNA
agtgtgcgcagggattatatgtcggtatatggctatcctgtgccaaccacaccgtggctgaatactgctcccggt

SEQ ID NO: 145640 - DNA, 75 bp, synthetic construct
  source 1..75: mol_type = other DNA
cggtctgctgtttaaagatggcgatgccaactggagcgctgataaagcgctgaaaggacagaacgcaatgggcgt

SEQ ID NO: 145641 - DNA, 75 bp, synthetic construct
  source 1..75: mol_type = other DNA
atccagaccgacgtgtcgtcatcaaccataaatattaaagattacaaaggcatgggcaacaaccagatggtggcg

SEQ ID NO: 145642 - DNA, 75 bp, synthetic construct
  source 1..75: mol_type = other DNA
cgacgccagtaaagggtttgaaaaccagggcgacctgttgattaaaacccgtctggcggcagacgccgtgggggc

SEQ ID NO: 145643 - DNA, 75 bp, synthetic construct
  source 1..75: mol_type = other DNA
caaacagaagcaagggtttgcgaaccttctgctacttaatttattatgtgcaggtgatttttaatgtgatgaagt

SEQ ID NO: 145644 - DNA, 75 bp, synthetic construct
  source 1..75: mol_type = other DNA
gacgggccacaacagcggtgtgatccatgccggggtctattacacgcccggcagcctgaaggcgaaattttgcct

SEQ ID NO: 145645 - DNA, 75 bp, synthetic construct
  source 1..75: mol_type = other DNA
ttctgcgatcaaaacggcatccgctacgacaactgcggcaagatgctggtcgccacatccgcactcgaaatggat

SEQ ID NO: 145646 - DNA, 75 bp, synthetic construct
  source 1..75: mol_type = other DNA
gtgcaaaagcggctatctgcggctggtgcaaaaatattgtccccggctttcgttaagcgatctccagccctggcc

SEQ ID NO: 145647 - DNA, 75 bp, synthetic construct
  source 1..75: mol_type = other DNA
aaacggatgacatgttgttgttacaggaaacagaacgtgcgctggcggatacatcctcgccgaaggtgattttcc

SEQ ID NO: 145648 - DNA, 75 bp, synthetic construct
  source 1..75: mol_type = other DNA
ggtttgtcagcagggcgagaaactgtatgcgctacaacctgaagagacattaaccctggatgtaaaagcacaacg

SEQ ID NO: 145649 - DNA, 75 bp, synthetic construct
  source 1..75: mol_type = other DNA
accagattgttaaccacctgatttaccccattcccgacccggcaatgccatttttaggcgttcatctcacccgga

SEQ ID NO: 145650 - DNA, 75 bp, synthetic construct
  source 1..75: mol_type = other DNA
acagcggcaatggcaaaaatcttccaggccagaggcggtgagattatctataacgccgaagtcagcggccttagt

SEQ ID NO: 145651 - DNA, 75 bp, synthetic construct
  source 1..75: mol_type = other DNA
gatgcccgcattgcgttgctggaaaaagagtccggcccggcctgtcaccagacgggccacaacagtagcgtgatc

SEQ ID NO: 145652 - DNA, 75 bp, synthetic construct
  source 1..75: mol_type = other DNA
gtattcatggtgattttctggcgaacacaccaccgcggtcaccgtaactggctggcactgctgctgttcgtatta

SEQ ID NO: 145653 - DNA, 75 bp, synthetic construct
  source 1..75: mol_type = other DNA
acctcgccagcatcagtaaactggataactttctcggtcagcttgatggtatccttcgccggcattcccgtcatt

SEQ ID NO: 145654 - DNA, 75 bp, synthetic construct
  source 1..75: mol_type = other DNA
ttattgacggttatacatcggcagcagccagtaccgtaccttccctgagccggacactgatttatgactatgagc

SEQ ID NO: 145655 - DNA, 75 bp, synthetic construct
  source 1..75: mol_type = other DNA
cacgatgaagaggctcgttctctggcggtggtgattaaaaaccgtaacggcctccacgtgcgcccggcctcccga

SEQ ID NO: 145656 - DNA, 75 bp, synthetic construct
  source 1..75: mol_type = other DNA
gaggcactgatcgctttccgtcagctggctgaagataactttggtgaaacggaggaagtcgctccacctactctg

SEQ ID NO: 145657 - DNA, 75 bp, synthetic construct
  source 1..75: mol_type = other DNA
aaagtgatggaggccatcgaatctgttgctgatgccgaccatgtgctggtcatgatggatatgggtagcgcatta

SEQ ID NO: 145658 - DNA, 75 bp, synthetic construct
  source 1..75: mol_type = other DNA
gtttatacgcgatcaagccgaaaaaaggcgaatctgcgcttgagaccattcgtcgctatctttccacccagttct

SEQ ID NO: 145659 - DNA, 75 bp, synthetic construct
  source 1..75: mol_type = other DNA
aaacagtggatttagctcaaataaccttatttaagaatatggcttatattttttctgatactgcaaacaaagaat

SEQ ID NO: 145660 - DNA, 75 bp, synthetic construct
  source 1..75: mol_type = other DNA
aagctgatttatttgcgatgtttatgcaacatgcattttctttgcttaacgaaaatgggtttaatgcacaagtca

SEQ ID NO: 145661 - DNA, 75 bp, synthetic construct
  source 1..75: mol_type = other DNA
gttattccaaccctggttttatatttgatgctaaaggatcttcttgtttttcagatagcacaacacttaaattag

SEQ ID NO: 145662 - DNA, 75 bp, synthetic construct
  source 1..75: mol_type = other DNA
gttaactacggcaagtttggcgatctgctggcagatgtcaaagccatcaccggcaatgccccagaggtgatctaa

SEQ ID NO: 145663 - DNA, 75 bp, synthetic construct
  source 1..75: mol_type = other DNA
gacgacgtcacctctcgcgtcaaagagtttgtccgcaccgtctggggcgaagagcacctgcaggaaaacctcgaa

SEQ ID NO: 145664 - DNA, 75 bp, synthetic construct
  source 1..75: mol_type = other DNA
aaaaacaaaatggttcccatatcaaaaaggtggtgcataccgtaaatggtatggtaataatgattatgttgttga

SEQ ID NO: 145665 - DNA, 75 bp, synthetic construct
  source 1..75: mol_type = other DNA
acatccaaaaaacttcatgatgtttgcaatctaaaacaaggattaattactggtgataatgaaagatacctaaga

SEQ ID NO: 145666 - DNA, 75 bp, synthetic construct
  source 1..75: mol_type = other DNA
gataatcgcactttaagcctaatgaccccctttacttggatgaatttatcatcatttgaagagctccgaaaaatt

SEQ ID NO: 145667 - DNA, 75 bp, synthetic construct
  source 1..75: mol_type = other DNA
agcaggtacaaaccggcagtatgggagatatgtttgctgaaaataccgcgttaacccaaactgacagcgcagaat

SEQ ID NO: 145668 - DNA, 75 bp, synthetic construct
  source 1..75: mol_type = other DNA
ccgttggccgccagtggttgcagacctacccggactcgccgctgaaagacaaaatggagtactacattgagcctg

SEQ ID NO: 145669 - DNA, 75 bp, synthetic construct
  source 1..75: mol_type = other DNA
catttagtcattacaagtagcaactttaatgggataaatgaagaattaattgattcagaaataactttagtcagc

SEQ ID NO: 145670 - DNA, 75 bp, synthetic construct
  source 1..75: mol_type = other DNA
aagttagaggtaaaaaaattaattgatttcaaaatgttatactcaggatgcagtaagaataagatgaaaacaaat

SEQ ID NO: 145671 - DNA, 75 bp, synthetic construct
  source 1..75: mol_type = other DNA
ttaaagaaggtcttggtacacgtgatgatgatatatttttgcgtagacactgggaagtatcaagaaaaaaaacaa

SEQ ID NO: 145672 - DNA, 75 bp, synthetic construct
  source 1..75: mol_type = other DNA
gcagatgtattaagttattccatcggctgcatgatgggtcgctactccctcgatcgcgaaggcctcgtctacgcc

SEQ ID NO: 145673 - DNA, 75 bp, synthetic construct
  source 1..75: mol_type = other DNA
gcccaaacgctatcaaatctgacagcctattttgagcgaaaagcagacattagcatccttcttatagaaaaggta

SEQ ID NO: 145674 - DNA, 75 bp, synthetic construct
  source 1..75: mol_type = other DNA
gatgtacaggaaattgcttcttgcagatgttgtaattgccgacatatctaccaacaatgcaaatgcactctatga

SEQ ID NO: 145675 - DNA, 75 bp, synthetic construct
  source 1..75: mol_type = other DNA
gccgtggttctgacattagcgccacgctgaatatctctgccgacgatcatggccgtttattgctggaactacaaa

SEQ ID NO: 145676 - DNA, 75 bp, synthetic construct
  source 1..75: mol_type = other DNA
gcgatgagccctactcttgattaccgtctgaccagtttatcaagaattcctttattagaggacgcaaactatgaa

SEQ ID NO: 145677 - DNA, 75 bp, synthetic construct
  source 1..75: mol_type = other DNA
atttaaatcaaacatatgttactctggcatttttaaactccactgttggtcaatattatctttcagcaatcagcc

SEQ ID NO: 145678 - DNA, 75 bp, synthetic construct
  source 1..75: mol_type = other DNA
caattctaagttttggaataaattaggtataacatggtcccttattggcacaaaaagtatttcatttcgtattaa

SEQ ID NO: 145679 - DNA, 75 bp, synthetic construct
  source 1..75: mol_type = other DNA
tatttaacgataaatttaacagtgatctttatacgcttgctctcttgaatacaaaagtttttaatgttctactta

SEQ ID NO: 145680 - DNA, 75 bp, synthetic construct
  source 1..75: mol_type = other DNA
ggttttgaggtgctggttgagcactgcgcctacacctggtttaaccgcttatgtgcaattcgctatatggagcta

SEQ ID NO: 145681 - DNA, 75 bp, synthetic construct
  source 1..75: mol_type = other DNA
ttcattgagcgccaatgattggaatggtttcgaacgctcatgggagttcaagaaaaacccattagtagcggagaa

SEQ ID NO: 145682 - DNA, 75 bp, synthetic construct
  source 1..75: mol_type = other DNA
tccagttgaaatggatgtggcaaatgttacgtaactgcgacaccagccactacatggaaaacaaagggcggatgg

SEQ ID NO: 145683 - DNA, 75 bp, synthetic construct
  source 1..75: mol_type = other DNA
cctatcacggttccagctcgcaccaggcagaaaagtactggctgcgggaagtggttgaaggcgtgctgaaacagt

SEQ ID NO: 145684 - DNA, 75 bp, synthetic construct
  source 1..75: mol_type = other DNA
ccattgcgacaccatctgggtctcgacgccgtacctggccaacaaatatgcgcacctgaatcccgatgtggttcc

SEQ ID NO: 145685 - DNA, 75 bp, synthetic construct
  source 1..75: mol_type = other DNA
tgcgactcggcacagatgattcacctcattctctggcagatattgccgtcaaattaggaatttcccgtgaaaggg

SEQ ID NO: 145686 - DNA, 75 bp, synthetic construct
  source 1..75: mol_type = other DNA
agggcgggacgctgcaactgttccgtaccgaacaacaatatgaaaacgcgactcgcgatattgccgttctggaag

SEQ ID NO: 145687 - DNA, 75 bp, synthetic construct
  source 1..75: mol_type = other DNA
cgcacgccagcgatcccgtatgaggacttaagcgtagcgcgctacagccgcggatttacgccatcacgtccgggc

SEQ ID NO: 145688 - DNA, 75 bp, synthetic construct
  source 1..75: mol_type = other DNA
acggcctgccggtagaccgccacggtggttcggtggcggcgtttggtcatctctatttcccgcgaatgcatcgcg

SEQ ID NO: 145689 - DNA, 75 bp, synthetic construct
  source 1..75: mol_type = other DNA
gctttaaaaacggcgtcttttttgcccaggccaaaggccggctaattatcgacggtatcgaggcgctaaaatccg

SEQ ID NO: 145690 - DNA, 75 bp, synthetic construct
  source 1..75: mol_type = other DNA
ccaggccaaagggcgactgattatcgacggtatcgaggcactgaaatccgcgttctggaatttctcttcattctc

SEQ ID NO: 145691 - DNA, 75 bp, synthetic construct
  source 1..75: mol_type = other DNA
caatgagatcactcaggcaatcaccgaaatcaacaagaaatgggatgaccttctccccgtatgttccaaaacatt

SEQ ID NO: 145692 - DNA, 75 bp, synthetic construct
  source 1..75: mol_type = other DNA
ctctattttccccgaatgcatcgcgctggttatgtcgcgcctaatctcggcgaagtgccgccgcacgccagccct

SEQ ID NO: 145693 - DNA, 75 bp, synthetic construct
  source 1..75: mol_type = other DNA
gctttaaaaacggtgtgttttttgctcaggctaaaggtcggctaattatcgacggtatcgaggcgctgaaatccg

SEQ ID NO: 145694 - DNA, 75 bp, synthetic construct
  source 1..75: mol_type = other DNA
ttgcaatggtaccggactaacaacccgtaagcaggtcattcgtaaggtttcatacccatgtggtaaagcgccata

SEQ ID NO: 145695 - DNA, 75 bp, synthetic construct
  source 1..75: mol_type = other DNA
gcaagactgatgagcagatggcagtccaggcgctggcgcgtcacgcgatggaaattgcaccgaagaatgtgcgta

SEQ ID NO: 145696 - DNA, 75 bp, synthetic construct
  source 1..75: mol_type = other DNA
tgatgaagtgcgttttaacgcgcgctttggtggcattccgcgtcaggtttcagtaccgctggctgccgtgctggc

SEQ ID NO: 145697 - DNA, 75 bp, synthetic construct
  source 1..75: mol_type = other DNA
cccgctgggacggcgaatggcgaaacgggtctggcggcgggagcgtgacctgacggggtggatgtcgctgtcgcg

SEQ ID NO: 145698 - DNA, 75 bp, synthetic construct
  source 1..75: mol_type = other DNA
gtgcatgcagatgttggcacaatttgcctttgctgattattcacgttcggcggctacaagcgtgacgtgtcacag

SEQ ID NO: 145699 - DNA, 75 bp, synthetic construct
  source 1..75: mol_type = other DNA
gttgacatttgtcaccaggaagagcgtaaggccgatattgcttttcagaatgtgacaagttttggtaatgatgta

SEQ ID NO: 145700 - DNA, 75 bp, synthetic construct
  source 1..75: mol_type = other DNA
ccctaattcattctgctatcgaaagtttatctaataaacgacatcaatatattcttctaatgcgactcggcacag

SEQ ID NO: 145701 - DNA, 75 bp, synthetic construct
  source 1..75: mol_type = other DNA
gttctcgttacgtcagctggaagaacatgccatctcaacaaacacatggaaacttatagaggctgaactgaaaac

SEQ ID NO: 145702 - DNA, 75 bp, synthetic construct
  source 1..75: mol_type = other DNA
cacgagggtaaaaagcaatgctggccgtaaatgggcacatactcaaggatggggatggttggttattagtgacag

SEQ ID NO: 145703 - DNA, 75 bp, synthetic construct
  source 1..75: mol_type = other DNA
atgaaaaaatggcctttatttaatggcccgcaccgtctgagaaacgggttactgctggctgcgttgatagcaata

SEQ ID NO: 145704 - DNA, 75 bp, synthetic construct
  source 1..75: mol_type = other DNA
atgataggtaaggatcgacacacaatcaatcaccttctaaaccacatggcaaaacgacaaccaactatacatgat

SEQ ID NO: 145705 - DNA, 75 bp, synthetic construct
  source 1..75: mol_type = other DNA
gagtttaaagattatatcgccgatgaacatgatattatcatgttgattcataccgctatcgaaagcttacccaat

SEQ ID NO: 145706 - DNA, 75 bp, synthetic construct
  source 1..75: mol_type = other DNA
cctgtgcggcgatatcacgcgccagcggcagcataaacaaccctaccctgtctgccgataacgcgttttcattag

SEQ ID NO: 145707 - DNA, 75 bp, synthetic construct
  source 1..75: mol_type = other DNA
gactggaatgaagaattgcgatcacgtattggtgtgatgaattatatccatcaacgtacacgcatatcgcgttct

SEQ ID NO: 145708 - DNA, 75 bp, synthetic construct
  source 1..75: mol_type = other DNA
gaagttctcgctgctttgcgtaaaggcggctatatcgaaatgaataaaggcaaactggtcgctatcaaccgtttg

SEQ ID NO: 145709 - DNA, 75 bp, synthetic construct
  source 1..75: mol_type = other DNA
tgtgggggataggtgacgcaaaaaagcaacattttgacccaaaatgtaaacccaatctttgtttagaaattctcg

SEQ ID NO: 145710 - DNA, 75 bp, synthetic construct
  source 1..75: mol_type = other DNA
ttatcagagaatgaagatccttatttagtaaaagaatttaatgcatggataaaagaaattaagaaaaaatattaa

SEQ ID NO: 145711 - DNA, 75 bp, synthetic construct
  source 1..75: mol_type = other DNA
tgttaatgatggtttgagagatttaataaacatatattgtgtggctattgattcttttgaaaatgatatcgttga

SEQ ID NO: 145712 - DNA, 75 bp, synthetic construct
  source 1..75: mol_type = other DNA
tatttcgtgaaatcaatatgttcgctgatatgagaaattgtgttgtggatgatatgactctgacaaacgagagga

SEQ ID NO: 145713 - DNA, 75 bp, synthetic construct
  source 1..75: mol_type = other DNA
tcaccggcgtgacggacggtgccgggcgggagttccgtctggtgctgaccacacaggcgcagcgggcggaagagg

SEQ ID NO: 145714 - DNA, 75 bp, synthetic construct
  source 1..75: mol_type = other DNA
cagctactatattgagaatgaatccggctcccgtcttgagcgcccggaactcttccgtcttctgagagattgcca

SEQ ID NO: 145715 - DNA, 75 bp, synthetic construct
  source 1..75: mol_type = other DNA
aactacctgttacttatcatgattcgagcttataccttgataacggaacttacagtataggtgattatattctct

SEQ ID NO: 145716 - DNA, 75 bp, synthetic construct
  source 1..75: mol_type = other DNA
tgctggccgccgtcgccaggcgagactatgaacagcgccgggaacggcagcagcaggggatcgccagggcgaaaa

SEQ ID NO: 145717 - DNA, 75 bp, synthetic construct
  source 1..75: mol_type = other DNA
cagttgctggacgcctcacgtatgttaatccgtcacgctggcgtggtgctggctgactgtaatctgacacctgcc

SEQ ID NO: 145718 - DNA, 75 bp, synthetic construct
  source 1..75: mol_type = other DNA
gacccaacaggtttaactcaagaggacaattggacctatggtgaggtaggtaatagctgtgttacgagtcaacgc

SEQ ID NO: 145719 - DNA, 75 bp, synthetic construct
  source 1..75: mol_type = other DNA
tggtgccgggaagaacgttgttgagaataactcactggcgcatgtactggcagcagcggaagcgaacaaagcagg

SEQ ID NO: 145720 - DNA, 75 bp, synthetic construct
  source 1..75: mol_type = other DNA
ccggacgtagatccgtcgaaactgacagaagagcagaagcaaactgtaagcacgctggcaacgctgtcagcgggt

SEQ ID NO: 145721 - DNA, 75 bp, synthetic construct
  source 1..75: mol_type = other DNA
gtggcgcaggcaggttttatcttaacccgacactggcgggacaccccacaagggaccgaagtttccttctggctg

SEQ ID NO: 145722 - DNA, 75 bp, synthetic construct
  source 1..75: mol_type = other DNA
gggatcggtggcggcgtttggtcatctctattttccccgtatgcatcgcgctggttatgtcgcgcctaatctcgg

SEQ ID NO: 145723 - DNA, 75 bp, synthetic construct
  source 1..75: mol_type = other DNA
aatacggcgtggagcggggagtatgatgagtggggaaacctgctgaatgaggaaaacccgcatcacctgcaccag

SEQ ID NO: 145724 - DNA, 75 bp, synthetic construct
  source 1..75: mol_type = other DNA
ttattggaactctcaaggatatggatggtaagccagttcctaaagagaatggaggatattgggatcatatgcagg

SEQ ID NO: 145725 - DNA, 75 bp, synthetic construct
  source 1..75: mol_type = other DNA
ctgaatgagatcagttctggcgaggtgttaagcgatgatgaaattgctgtcctcgaagaaatcaaccggacgttt

SEQ ID NO: 145726 - DNA, 75 bp, synthetic construct
  source 1..75: mol_type = other DNA
aggttatcagtgcgtctgaaaacaactggcctcatgtgctgggctgtctgaacataaatgtccctgactctccgc

SEQ ID NO: 145727 - DNA, 75 bp, synthetic construct
  source 1..75: mol_type = other DNA
ggttcacagccaacggccgtcagtacgaggtagacgaagccctgattgattacagcatgacccgccagagctcac

SEQ ID NO: 145728 - DNA, 75 bp, synthetic construct
  source 1..75: mol_type = other DNA
atgaccggctcaggttacatcgctgcctcccgggataagatgaagagccgctttgactccgttgctgaacaaacc

SEQ ID NO: 145729 - DNA, 75 bp, synthetic construct
  source 1..75: mol_type = other DNA
cagctcgatggtgcggttatcgcttccacggcgacggcagataaaaacagcctcgataccgggacgctcggcttc

SEQ ID NO: 145730 - DNA, 75 bp, synthetic construct
  source 1..75: mol_type = other DNA
taccgtttcagaattcaaagcgggcaaaatcaaacactggctggcgcatattcacaccctgaaacccactttacc

SEQ ID NO: 145731 - DNA, 75 bp, synthetic construct
  source 1..75: mol_type = other DNA
gcaaacggatgagcatgttgtttcagtccggggcgttgttcacagatatgaacgtatttgacaacgttgcctatc

SEQ ID NO: 145732 - DNA, 75 bp, synthetic construct
  source 1..75: mol_type = other DNA
caccagatcatggtgagatccttttcgatggtgagaatattccggcgatgtctcgttcgcgcctgtatacagtgc

SEQ ID NO: 145733 - DNA, 75 bp, synthetic construct
  source 1..75: mol_type = other DNA
aacatgtagaaaatcgcactattctaaataataaaacaattgaaataaagaaaggttcgtttaatattataactg

SEQ ID NO: 145734 - DNA, 75 bp, synthetic construct
  source 1..75: mol_type = other DNA
aacctatagaaaacagaaccatcctgaataatagcactattgagataaaagagggttcattcaatattattactg

SEQ ID NO: 145735 - DNA, 75 bp, synthetic construct
  source 1..75: mol_type = other DNA
gcgctggaatgggtctttaccctcgctgatgagatttatggggacaggcgatcaccagcgatgctgaccgtaatg

SEQ ID NO: 145736 - DNA, 75 bp, synthetic construct
  source 1..75: mol_type = other DNA
aacaatctgataaatcagaaaaaaacaatattgtttcaaaaactcccaagttgattgaaaaagataagaaaaaaa

SEQ ID NO: 145737 - DNA, 75 bp, synthetic construct
  source 1..75: mol_type = other DNA
ccatatcttaaagcaatttactatctttctaatactggtaatttgattcatactctaagatataatatttaccaa

SEQ ID NO: 145738 - DNA, 75 bp, synthetic construct
  source 1..75: mol_type = other DNA
agaacgtgaagaactacaaggagtgaaacactccagccgtggctctaagatgaaaacccctcaccttgtcccatt

SEQ ID NO: 145739 - DNA, 75 bp, synthetic construct
  source 1..75: mol_type = other DNA
ggaagattatgttgaaaatggtataccactaattaaccctacaaatattaaaaatggtattatcattcccaactt

SEQ ID NO: 145740 - DNA, 75 bp, synthetic construct
  source 1..75: mol_type = other DNA
aataacggtatctcacgacgtagaaaagaagatactaatgagggggatattgtccttagactacaagatgtacat

SEQ ID NO: 145741 - DNA, 75 bp, synthetic construct
  source 1..75: mol_type = other DNA
atgcttcagtggtgggctgactatcttgatgccaaccgtaaagggatattacgaccttacgattttaaagactga

SEQ ID NO: 145742 - DNA, 75 bp, synthetic construct
  source 1..75: mol_type = other DNA
catgcgctggaagccaaacgtgaacaactgggtttaccgtcctccgacactgaaatctctgacacatgtcctccg

SEQ ID NO: 145743 - DNA, 75 bp, synthetic construct
  source 1..75: mol_type = other DNA
aagccttttattatcaaccggttttatgcacagtacaggcgaaatcatcactgagtgtggaagaagaacaggaac

SEQ ID NO: 145744 - DNA, 75 bp, synthetic construct
  source 1..75: mol_type = other DNA
caacataggggctgtcaccatgactaccaccactacccacccattcctcaaaattgagattattaacggtaagac

SEQ ID NO: 145745 - DNA, 75 bp, synthetic construct
  source 1..75: mol_type = other DNA
ttgagtgctgaaactgcactggagttgctggcccccgagatcgccgcaaaagtacgtttgtgtgcggcaccgtta

SEQ ID NO: 145746 - DNA, 75 bp, synthetic construct
  source 1..75: mol_type = other DNA
acgatattgccgcaatcttttctggtcaccatacactgttagatgatccggaactgctggcggcggcaagcgaac

SEQ ID NO: 145747 - DNA, 75 bp, synthetic construct
  source 1..75: mol_type = other DNA
gcggagaacatttatccgtctacggttctgcaactggatccggcggttgtaaaagggatctgccttagcgccgga

SEQ ID NO: 145748 - DNA, 75 bp, synthetic construct
  source 1..75: mol_type = other DNA
caaaccattacgcttattgaacaaaatcaactctggcgagacgctttttactggatcgcctggcaaaatagaatt

SEQ ID NO: 145749 - DNA, 75 bp, synthetic construct
  source 1..75: mol_type = other DNA
cggctctattatctggtggcgaaaaacaacgtgttgcacttgcaagagccttactaagaaaacctaaaatactgc

SEQ ID NO: 145750 - DNA, 75 bp, synthetic construct
  source 1..75: mol_type = other DNA
gatcacgagttctttggagaatatttttttttgggagaaaaaatagatgtaaaaaacaatcatgaaactacagac

SEQ ID NO: 145751 - DNA, 75 bp, synthetic construct
  source 1..75: mol_type = other DNA
cgagagctgcattgaagcattccatgaggcagggaacagcctgaatcttaccgctttccgccgtaatcagtggga

SEQ ID NO: 145752 - DNA, 75 bp, synthetic construct
  source 1..75: mol_type = other DNA
atgagtttcgcagctccggtggtggaagtttttcaccgatcaaggaggctgccatcatggctacagtcccaactt

SEQ ID NO: 145753 - DNA, 75 bp, synthetic construct
  source 1..75: mol_type = other DNA
cctgccgccggtggagtggctgacgtatggcagcggttacctggcgggcatgaagctgggcgggacgccgctggt

SEQ ID NO: 145754 - DNA, 75 bp, synthetic construct
  source 1..75: mol_type = other DNA
cagggacctgaaaccggagaccagtgtaaccgaagagatcggtattatttatagtaatgatagtggtttttcggc

SEQ ID NO: 145755 - DNA, 75 bp, synthetic construct
  source 1..75: mol_type = other DNA
taaattacctgattctgccagacacgctgattaattttgccgttcttaacgtcacagacagaaagagcgaggata

SEQ ID NO: 145756 - DNA, 75 bp, synthetic construct
  source 1..75: mol_type = other DNA
atgaatatgatgatctcatatcaggaacttgttcgcaccttccttagtatcactggtgggaatgaaaaaccggat

SEQ ID NO: 145757 - DNA, 75 bp, synthetic construct
  source 1..75: mol_type = other DNA
cagattttcgaccaccaggcgcgcctgcattcgtttgaactggcgatggatgttaaggaagagttgttgggatag

SEQ ID NO: 145758 - DNA, 75 bp, synthetic construct
  source 1..75: mol_type = other DNA
cgaaggtgaactgatgcatgaattctttattaacggtcaatatcgcaatgccattcgcatgtgcatattccagca

SEQ ID NO: 145759 - DNA, 75 bp, synthetic construct
  source 1..75: mol_type = other DNA
ccattcgcatgtgtatattccagcatcagtatctggcagagcacaaaacggcgggttttactccttcatcaacaa

SEQ ID NO: 145760 - DNA, 75 bp, synthetic construct
  source 1..75: mol_type = other DNA
gtcggttctgccattacgcgtcttgaacacatttgccagtggtacaacacagcgatgaaaaaggcggtgctatga

SEQ ID NO: 145761 - DNA, 75 bp, synthetic construct
  source 1..75: mol_type = other DNA
tttaccactgcgaccaccggggcctgccgctggcgcttatcagtgaagacggcaatacggcgtggagcgcggaat

SEQ ID NO: 145762 - DNA, 75 bp, synthetic construct
  source 1..75: mol_type = other DNA
attataaccggaaccggtactacaatccgttgctgggacgatatattactcaggacccgattgggctggcggggg

SEQ ID NO: 145763 - DNA, 75 bp, synthetic construct
  source 1..75: mol_type = other DNA
ggtcgatgcagtaaaagatgttgaagggattagtatcactggtgggaatgaaaaaccggatatcagtatacgtgg

SEQ ID NO: 145764 - DNA, 75 bp, synthetic construct
  source 1..75: mol_type = other DNA
ggcggcagatgcgatgcgccacggcgcgtgggcggtgacggtcggttctgccattacgcgtcttgaacacatttg

SEQ ID NO: 145765 - DNA, 75 bp, synthetic construct
  source 1..75: mol_type = other DNA
atgtcgttacttgcacaactggatcaaaaaatcgctgctaacggtggcctgattgtctcctgccagccggttccg

SEQ ID NO: 145766 - DNA, 75 bp, synthetic construct
  source 1..75: mol_type = other DNA
gccgcccctccaatgccagtagtacctgaagaaaaaccaatgcccaaccctcttaaaatgtacgcggtcgatgct

SEQ ID NO: 145767 - DNA, 75 bp, synthetic construct
  source 1..75: mol_type = other DNA
tcatcattggtctggccgccggctggttttgtcggggctgggagcaggattctgtgcagctggccatcaataccg

SEQ ID NO: 145768 - DNA, 75 bp, synthetic construct
  source 1..75: mol_type = other DNA
taattgcattttttattagatatttaatgaggattgatacggctatagaacaaatccgggttgtgttttttaata

SEQ ID NO: 145769 - DNA, 75 bp, synthetic construct
  source 1..75: mol_type = other DNA
ccaaaacagaagtttgtgggcatggtttccgctctatggcctgtagtgccttaatcgaatccggcttatggtcaa

SEQ ID NO: 145770 - DNA, 75 bp, synthetic construct
  source 1..75: mol_type = other DNA
aagatcagttcgttgatatgactttcatcacccgcctgctgggggtcagtgataagtggatttaccgactcatca

SEQ ID NO: 145771 - DNA, 75 bp, synthetic construct
  source 1..75: mol_type = other DNA
atggtgagcctcgcttgcacattaaagaacccggcaactctccggtaactccggatggttggataagctgtagtg

SEQ ID NO: 145772 - DNA, 75 bp, synthetic construct
  source 1..75: mol_type = other DNA
aatatgaccggcattgccagtgctgcaacatcagtattgattggctatctggcggcaaataccaccacgctgcat

SEQ ID NO: 145773 - DNA, 75 bp, synthetic construct
  source 1..75: mol_type = other DNA
attatcgccgccgacagcaaccgcgatgccgaatttctgtttacctcaatgcagcaagcctttgtgaagctgcgc

SEQ ID NO: 145774 - DNA, 75 bp, synthetic construct
  source 1..75: mol_type = other DNA
gcactacaactttatcgcagcaacttcaaaccctccgcacgactggagaaaccgtacgcaatggtgtgtatcaat

SEQ ID NO: 145775 - DNA, 75 bp, synthetic construct
  source 1..75: mol_type = other DNA
atgaacaaagttatgctttccggcagaaagagtttgttcaacgacagggaatggctgcaacagctaatatgttct

SEQ ID NO: 145776 - DNA, 75 bp, synthetic construct
  source 1..75: mol_type = other DNA
gcagcaagcttttgtgaagctgcgccgcggcgaaaccgggcaactaccgccaccgattcagaatatggatcagtt

SEQ ID NO: 145777 - DNA, 75 bp, synthetic construct
  source 1..75: mol_type = other DNA
aatatgaccggcattgccagtgctgcaacatcagttttgattggctatctggcggcgaataccactacgctgcat

SEQ ID NO: 145778 - DNA, 75 bp, synthetic construct
  source 1..75: mol_type = other DNA
ccgatatgtcggcaaaaatcggtggtgaaggggatctggcaatcaatacggtgcgacaggtttcgctttccaacg

SEQ ID NO: 145779 - DNA, 75 bp, synthetic construct
  source 1..75: mol_type = other DNA
cgccgcattgctggtcggcctgggttttaaaccgctgtacgccgccgggctgtgcctgattgttaacaccgcgcc

SEQ ID NO: 145780 - DNA, 75 bp, synthetic construct
  source 1..75: mol_type = other DNA
ggatcatggcgattatggacggctggcgcggtatcaaagaaacctggcctgcggtcgtggttgcgggcggctcgt

SEQ ID NO: 145781 - DNA, 75 bp, synthetic construct
  source 1..75: mol_type = other DNA
gggtgatcaatattccggtgccgtacctcgataaactggttgcccgtatgccgccagtggtcagcgaagcgacag

SEQ ID NO: 145782 - DNA, 75 bp, synthetic construct
  source 1..75: mol_type = other DNA
gacatcatccgctcgtctattctttcgataacccctgaccagcgcctgcaaatgctgatcgtcggtttctgtttc

SEQ ID NO: 145783 - DNA, 75 bp, synthetic construct
  source 1..75: mol_type = other DNA
ctcttcactggtatcgctgctctgcctgacgctgtttctcaaacgctggcagccggtgcgcgtattccgcttcgg

SEQ ID NO: 145784 - DNA, 75 bp, synthetic construct
  source 1..75: mol_type = other DNA
gcacagtttctcagctccaacttcattggaccggagctgccggacattatctcttcactggtatcgctgctctgc

SEQ ID NO: 145785 - DNA, 75 bp, synthetic construct
  source 1..75: mol_type = other DNA
ctgaagattgacccgctgaagtgcgtactgtgcgggagtcagatgcgttttacggggctgaagcggggctaccga

SEQ ID NO: 145786 - DNA, 75 bp, synthetic construct
  source 1..75: mol_type = other DNA
gccggagccagcgaactggtgcgcgaagtggggatggactggatgtcgcaagatctcgctgctcgtttgtctacc

SEQ ID NO: 145787 - DNA, 75 bp, synthetic construct
  source 1..75: mol_type = other DNA
gcctcaatccatgaaacgcagaacgatcgtgaagtggtcagcctgtatgctcacctggtccagccagttttagat

SEQ ID NO: 145788 - DNA, 75 bp, synthetic construct
  source 1..75: mol_type = other DNA
aaatggaaaacctggtatcagttgaaattacaacaagaaggcgtgatgccgttacatcatcgggaggagcactat

SEQ ID NO: 145789 - DNA, 75 bp, synthetic construct
  source 1..75: mol_type = other DNA
cggcgacccataaccccctttggctgcaattaaaggcagatattttacagcgtccggttgaagcaattgcattta

SEQ ID NO: 145790 - DNA, 75 bp, synthetic construct
  source 1..75: mol_type = other DNA
ccgccgcaagttaccatagcccaacgtttgttaccgaatcgggcgagataccatcaattacagcgttatcagcac

SEQ ID NO: 145791 - DNA, 75 bp, synthetic construct
  source 1..75: mol_type = other DNA
tctgccgacgcaaacggtgctgcatcatcatgcccacgcagcggcgtgtctggcagaacacctctggcctctgga

SEQ ID NO: 145792 - DNA, 75 bp, synthetic construct
  source 1..75: mol_type = other DNA
gccctgcttgccttgccgaaatgaataccccgggcgagcggcgttatcgttatccgtttatcaactgtacccact

SEQ ID NO: 145793 - DNA, 75 bp, synthetic construct
  source 1..75: mol_type = other DNA
gggcacaaagaagatgtctttacccgctgtaacgttgacggcagtctgcgtctgatgcaggcagcaaaagagagc

SEQ ID NO: 145794 - DNA, 75 bp, synthetic construct
  source 1..75: mol_type = other DNA
ggcgatggtggattgtctctggggcagggggttattgttgcggcgcgttggttggcaggggaagtccagaacgga

SEQ ID NO: 145795 - DNA, 75 bp, synthetic construct
  source 1..75: mol_type = other DNA
gagcgcgggtggcgtcatgaatacgcaaattgttcccgatgccgcgacttgccctgcttgtcttgccgaaatgaa

SEQ ID NO: 145796 - DNA, 75 bp, synthetic construct
  source 1..75: mol_type = other DNA
gatggcgggttgtctctggggcagggggttattgttgcggcgcgttggttggcaggggaagtccagaacggataa

SEQ ID NO: 145797 - DNA, 75 bp, synthetic construct
  source 1..75: mol_type = other DNA
ttggtgaatttgatgatattgttaatgaatccagcaaaggggaagcgagtaagattaaaaatcaaaaaatttgtc

SEQ ID NO: 145798 - DNA, 75 bp, synthetic construct
  source 1..75: mol_type = other DNA
aagcactaatctaaagaaattcaagtcacttataactgtgggtgataaacttcgtgaaatttatggtagtgatat

SEQ ID NO: 145799 - DNA, 75 bp, synthetic construct
  source 1..75: mol_type = other DNA
gctgccaacaccacaggtggcgtcaccggcaagatgatctccccgcagtctatcgccatagcttgtgcggcggta

SEQ ID NO: 145800 - DNA, 75 bp, synthetic construct
  source 1..75: mol_type = other DNA
ggcttttgccaacgttttctgtttatctcttcgctggcggcgcgccatcccgagctctcctggtatgcaaaatcc

SEQ ID NO: 145801 - DNA, 75 bp, synthetic construct
  source 1..75: mol_type = other DNA
gggcacaaagaagagattttcacccgctgtaacgttgacggcagtctgcgcctgatgcaggcggcaaaagagagc

SEQ ID NO: 145802 - DNA, 75 bp, synthetic construct
  source 1..75: mol_type = other DNA
ggacacaaagaagatatctttacccgttgtaacgtcgacggcagcctgcgcctgatgcaggcggcaaaagagagc

SEQ ID NO: 145803 - DNA, 75 bp, synthetic construct
  source 1..75: mol_type = other DNA
atgcatatcaacattgcctggcaggacgtagacaccgttctgctggatatggacggcacactactcgacctcgcc

SEQ ID NO: 145804 - DNA, 75 bp, synthetic construct
  source 1..75: mol_type = other DNA
tcgatacggatattcctgctgcgacgcttgcagagggatatatcagcgtcgatacgctggttgtcggcgcgggtg

SEQ ID NO: 145805 - DNA, 75 bp, synthetic construct
  source 1..75: mol_type = other DNA
ctttctgtatccggggccggagtccgaacctgtaattctggctgccagacagtcccttgacgaatggctgaccga

SEQ ID NO: 145806 - DNA, 75 bp, synthetic construct
  source 1..75: mol_type = other DNA
atgtgacggtttccatcctgtccactgaaggcgacggcacagcaacggaggcgttgcttaataccgttcgcgccg

SEQ ID NO: 145807 - DNA, 75 bp, synthetic construct
  source 1..75: mol_type = other DNA
atgtgggaggtcaataagaatgtctataccaccattggtgttgcgggcgtcggaaacctcaatattagcgatggc

SEQ ID NO: 145808 - DNA, 75 bp, synthetic construct
  source 1..75: mol_type = other DNA
ctcgggcaatatgaacacaaatcgcctgtttatcactccggcaacggataccaccgacgctgtgatggatagtga

SEQ ID NO: 145809 - DNA, 75 bp, synthetic construct
  source 1..75: mol_type = other DNA
cagcttgggcgtattggcgcgaaaaccattatctactttgaagtgatcaccaccgtcgccatcattctggggatc

SEQ ID NO: 145810 - DNA, 75 bp, synthetic construct
  source 1..75: mol_type = other DNA
cctggcagattctgtttgctatggtgctgggcattctcctgggaagctacctgcactaccatagcgacagtcgcg

SEQ ID NO: 145811 - DNA, 75 bp, synthetic construct
  source 1..75: mol_type = other DNA
tccggcgggtgatatttttatccacctgatcaaaatgattgttgtgccgattgttatctccacgctggttgttgg

SEQ ID NO: 145812 - DNA, 75 bp, synthetic construct
  source 1..75: mol_type = other DNA
gatggatgcgacatcatcgttcgatactgtaggtatcaatgtcggtaattttggtagcggcatcgtaaatgtcag

SEQ ID NO: 145813 - DNA, 75 bp, synthetic construct
  source 1..75: mol_type = other DNA
gcgggttaagcgtctggatcctgattcgtattctgaaagatgagctgattctggcgtactccactgccagctctg

SEQ ID NO: 145814 - DNA, 75 bp, synthetic construct
  source 1..75: mol_type = other DNA
aatgcgctggcggtgctggtgattgccaagtgggaacacaaatttgaccgcaaaaaggcgctggcttatgagcgt

SEQ ID NO: 145815 - DNA, 75 bp, synthetic construct
  source 1..75: mol_type = other DNA
tgctatcaattattaatacttcttggaactggtacattaacatatttaattatcgttattctgcaatggttagtc

SEQ ID NO: 145816 - DNA, 75 bp, synthetic construct
  source 1..75: mol_type = other DNA
cggctttatattgaggatgtgattgttaaagtgatagagagaacaaaaaaagattttgctgaatcaatgaaagat

SEQ ID NO: 145817 - DNA, 75 bp, synthetic construct
  source 1..75: mol_type = other DNA
atgaaaaataaacaaatgctgccgtgtgtagtggctgtcactaatgatgaaacagaaatattcatggaaatggca

SEQ ID NO: 145818 - DNA, 75 bp, synthetic construct
  source 1..75: mol_type = other DNA
ctttatcgtggaaaaagagtacagcttctgactttaccaatattaattacaatacgtcgttgcaactcaatgctc

SEQ ID NO: 145819 - DNA, 75 bp, synthetic construct
  source 1..75: mol_type = other DNA
gggttgctgcactgaccgtcatggcaatggatgttcgccatgtgttgtatggcccgtcactgcgtagccgtatta

SEQ ID NO: 145820 - DNA, 75 bp, synthetic construct
  source 1..75: mol_type = other DNA
tattattcttgttaatgaagggcgagaaagtgctactaatatatcattggtttttaactataagccaatgcatat

SEQ ID NO: 145821 - DNA, 75 bp, synthetic construct
  source 1..75: mol_type = other DNA
gtcttgagaacgcccggggcaaagatctgtaccaattctggggtgatgtgatcaccaacaagctgaacgaggcgc

SEQ ID NO: 145822 - DNA, 75 bp, synthetic construct
  source 1..75: mol_type = other DNA
gtcttgagaacgccagaggaaaagatttgtaccagttctggggcgatatcatcaccaacaagctgaacgaggcgc

SEQ ID NO: 145823 - DNA, 75 bp, synthetic construct
  source 1..75: mol_type = other DNA
ctatttttatccgggaccggaatcagagccgatactgaatgcggcaaaaaacaacctggaagcctggatcaggga

SEQ ID NO: 145824 - DNA, 75 bp, synthetic construct
  source 1..75: mol_type = other DNA
ctaaagtgatagagcgaacaaaacaagagtttgctgaatcaatgaaagataataaaggagaagaatattacctgt

SEQ ID NO: 145825 - DNA, 75 bp, synthetic construct
  source 1..75: mol_type = other DNA
gacagaaatatttatggagatggctattaataactttaaaaagcatcttcaggtcatgattgattgtatgggaaa

SEQ ID NO: 145826 - DNA, 75 bp, synthetic construct
  source 1..75: mol_type = other DNA
aagccatgctgtatggctccattgtaactttccttggctggacattatatggcctggtatctccacgttttgaac

SEQ ID NO: 145827 - DNA, 75 bp, synthetic construct
  source 1..75: mol_type = other DNA
acttcaatgtggttctggagagaacggtccgagaactcaatggagaaagctgtatttcactggaggaagaaccgc

SEQ ID NO: 145828 - DNA, 75 bp, synthetic construct
  source 1..75: mol_type = other DNA
cacaaggccggggcgcgtggctgttgatggcgtttaccgctctggcactggaactgacggcgctgtggttccagc

SEQ ID NO: 145829 - DNA, 75 bp, synthetic construct
  source 1..75: mol_type = other DNA
aggacgcgggattgcgccagaatggcagatgaagagagaaatgctttcaccggcatacacgacccgttggtcgga

SEQ ID NO: 145830 - DNA, 75 bp, synthetic construct
  source 1..75: mol_type = other DNA
atgaaacttcaggtattaccgttaagtcaggaagcctttagtgcttatggcgacgtaatcgaaacgcagcaacgg

SEQ ID NO: 145831 - DNA, 75 bp, synthetic construct
  source 1..75: mol_type = other DNA
tcccgcagttgagccctactcaattgatgaaatgttcattgatttgcggggggtgaaccgttgcatctctccgga

SEQ ID NO: 145832 - DNA, 75 bp, synthetic construct
  source 1..75: mol_type = other DNA
cgaactcaacggcgagtcctgcatatccctggaagaagcaccaccggcaaaacagcagattgtctgtagtcgcag

SEQ ID NO: 145833 - DNA, 75 bp, synthetic construct
  source 1..75: mol_type = other DNA
cgcagttttggcgtgaagatcactgagttcgagtcgctccgccaggctatctgccagcacgcagagcgggcctct

SEQ ID NO: 145834 - DNA, 75 bp, synthetic construct
  source 1..75: mol_type = other DNA
tttccgaccggatttgaaaggaaagccgatagtcgtcctgagcaacaacgacgggaacgtaatcgctcgcagtgc

SEQ ID NO: 145835 - DNA, 75 bp, synthetic construct
  source 1..75: mol_type = other DNA
atgccttctggaaatcaggaaccccgcagggaccctgaattgaaacgcaaagcctggcttgcggtatttcttggt

SEQ ID NO: 145836 - DNA, 75 bp, synthetic construct
  source 1..75: mol_type = other DNA
gccccccaaacagcagatagtctgcagcaggagctttggggaacgtgtcacaacttatgaagccatgcgacaggc

SEQ ID NO: 145837 - DNA, 75 bp, synthetic construct
  source 1..75: mol_type = other DNA
gcctcaaaggagtggaaacagtttcgtggtgtgctcgccctgacccggggaaatccacagcgaacgcggaaactg

SEQ ID NO: 145838 - DNA, 75 bp, synthetic construct
  source 1..75: mol_type = other DNA
gttctggacgggatcaaccactcagggctgggtaaagtatggttcgcagggcggggcattgccccggaatggcag

SEQ ID NO: 145839 - DNA, 75 bp, synthetic construct
  source 1..75: mol_type = other DNA
acaccttccccttctaaaacaccattatctttgcgatgaaaattttgattattttgactttttatctgcacctga

SEQ ID NO: 145840 - DNA, 75 bp, synthetic construct
  source 1..75: mol_type = other DNA
tcaatcgaaggtagcgaagcgtctcggcgttagcgtgagcaccgttaaacgccactggaacaagggcgaggggtg

SEQ ID NO: 145841 - DNA, 75 bp, synthetic construct
  source 1..75: mol_type = other DNA
aaggactgcaattctatgaagtggttcctgttgcattagtggtagcgggaacacaaatggcaaccggtcaccgta

SEQ ID NO: 145842 - DNA, 75 bp, synthetic construct
  source 1..75: mol_type = other DNA
gcttactcacgcgatgcttcagtctgacagtgaaaataccacatcggtaaaagtgggagagcaatccattggtgg

SEQ ID NO: 145843 - DNA, 75 bp, synthetic construct
  source 1..75: mol_type = other DNA
ggccggaacctggggccccgttgcctcggtggcgatgattacccgtgacggtcgttcctggaatgagtttgagta

SEQ ID NO: 145844 - DNA, 75 bp, synthetic construct
  source 1..75: mol_type = other DNA
acagtttttgggcgtctataatacatggagaactatcagagctttcacagcctacagatgatgaatcgcttctga

SEQ ID NO: 145845 - DNA, 75 bp, synthetic construct
  source 1..75: mol_type = other DNA
acgcctggctgacaacgataagctggcagcagggaacgctggagatcaaggggctgacaacaagcattaccgcgt

SEQ ID NO: 145846 - DNA, 75 bp, synthetic construct
  source 1..75: mol_type = other DNA
atgaacccgccaattaattttttgccctggcgacagcaacgccggaccgcttttcttcgtttctggttgctgatg

SEQ ID NO: 145847 - DNA, 75 bp, synthetic construct
  source 1..75: mol_type = other DNA
cagcgtggagccacgcagcaggatgctcaaggtcgctggcaatttgagtatcagttaacaaggacggttagtgat

SEQ ID NO: 145848 - DNA, 75 bp, synthetic construct
  source 1..75: mol_type = other DNA
gctttcgaaaacattaagcaagttattgatgatatggcgactgatgccaccatgtttgacgtcaacaaaaagtaa

SEQ ID NO: 145849 - DNA, 75 bp, synthetic construct
  source 1..75: mol_type = other DNA
acgcacctatcaatgcttatgaaatggtgatctaccccatcgccttttttgtctgcttgtttggtcaaatgcgtt

SEQ ID NO: 145850 - DNA, 75 bp, synthetic construct
  source 1..75: mol_type = other DNA
gccggcaaaacagcagattgtctgtagtcgcagttttggtgaacgaatcacagacaaagatgccatgcaccaggc

SEQ ID NO: 145851 - DNA, 75 bp, synthetic construct
  source 1..75: mol_type = other DNA
atattatcaaatatagctgatgaattttctttaaaaacagaaaagatatgggttctgccgaaaggaaagggaaac

SEQ ID NO: 145852 - DNA, 75 bp, synthetic construct
  source 1..75: mol_type = other DNA
ctctccgcgatttataaatgcgtcgaaaaaaacaacttttgataaaggcgaggttttaagcttctttgaagctct

SEQ ID NO: 145853 - DNA, 75 bp, synthetic construct
  source 1..75: mol_type = other DNA
cctatatttagatggtttcattaccgagaaggtttttcaaaacaattaatagagtatatattgaaaaatattaat

SEQ ID NO: 145854 - DNA, 75 bp, synthetic construct
  source 1..75: mol_type = other DNA
atatcgtttgccaaaagctggggctacggtggcgtatacatggccaacctgttcgcattcgttcacacccagcga

SEQ ID NO: 145855 - DNA, 75 bp, synthetic construct
  source 1..75: mol_type = other DNA
atggcgctgaaaaaatattcaacgccatcgactttttatgcctttgcggcatcgggcaatgcgtgtcggatgccg

SEQ ID NO: 145856 - DNA, 75 bp, synthetic construct
  source 1..75: mol_type = other DNA
ttaatattcgggaatatcatgatattcctgctgaaacgtcgtatgcgccgggagaacaaattatgggagggcaat

SEQ ID NO: 145857 - DNA, 75 bp, synthetic construct
  source 1..75: mol_type = other DNA
caggggcgcggcagctgctggctgcaaaaggtaaaaccagaattgctggtagtgacttttggcaaaggatttggc

SEQ ID NO: 145858 - DNA, 75 bp, synthetic construct
  source 1..75: mol_type = other DNA
attgttgccgaccggcttagccatgcctccttgctggaggctgccagtttaagcccgtcgcagcttcgccgtttt

SEQ ID NO: 145859 - DNA, 75 bp, synthetic construct
  source 1..75: mol_type = other DNA
agcgccatccagccattgatcgtcggtgataacagccgtgcgttacaactggcagaaaaactgcgccagcaaggc

SEQ ID NO: 145860 - DNA, 75 bp, synthetic construct
  source 1..75: mol_type = other DNA
attttatcagaaatagccaatgagttttcattgaaaacagaaaaaatatgggttcttcctaaaggaaaaggaaac

SEQ ID NO: 145861 - DNA, 75 bp, synthetic construct
  source 1..75: mol_type = other DNA
atgagctggcaggataaaatcaacgcggcgctcgatgcgcggcgtgctgccgatgccctgcgtcgccgttatcca

SEQ ID NO: 145862 - DNA, 75 bp, synthetic construct
  source 1..75: mol_type = other DNA
ggctgcggtgctttgctccagtacggtggcggattatctgctgcaattcgcccgccatcttatctacagcaccag

SEQ ID NO: 145863 - DNA, 75 bp, synthetic construct
  source 1..75: mol_type = other DNA
gtgccaggtaaaattgccgttgaggtggcttatgcgctacctgagaagcagtacctgcagcgagtgacgctgcag

SEQ ID NO: 145864 - DNA, 75 bp, synthetic construct
  source 1..75: mol_type = other DNA
gtgccaggtaaaattgccgttgaggtagcttacgcgttaccagagaagcagtacctgcaacgtgtgatgttgcag

SEQ ID NO: 145865 - DNA, 75 bp, synthetic construct
  source 1..75: mol_type = other DNA
aacagggcggctatcgggcgctcaacaaaggtaaagtcgactctgcctctgcggttattattctcgaaagttatt

SEQ ID NO: 145866 - DNA, 75 bp, synthetic construct
  source 1..75: mol_type = other DNA
ccgactggctcgctgaacatatagatgatccggaaattcagattattgatgcccgtatggcaccgcccggacagg

SEQ ID NO: 145867 - DNA, 75 bp, synthetic construct
  source 1..75: mol_type = other DNA
agtcgcagttttggtgaacgaatcacagacaaagatgccatgcaccaggctgttgttcagtatgcagagcgggcc

SEQ ID NO: 145868 - DNA, 75 bp, synthetic construct
  source 1..75: mol_type = other DNA
acttcagcgtcattcttgagcgtacggtacgcgaactcaacggcgagtccagcatatccctggaagaagcaccac

SEQ ID NO: 145869 - DNA, 75 bp, synthetic construct
  source 1..75: mol_type = other DNA
gatgaggtggacaggcatttgctcgctcagtttcttggcgtagcggcctatgcccttgtggggacgaaaaccagc

SEQ ID NO: 145870 - DNA, 75 bp, synthetic construct
  source 1..75: mol_type = other DNA
aagaaaaaccagctacttaccgtaaaaaaatacagtattacgcttttggtacttttggtgtgatcctggtaattc

SEQ ID NO: 145871 - DNA, 75 bp, synthetic construct
  source 1..75: mol_type = other DNA
gttcgcattcgttcacacccagcgacatgaaatgatgaaagcgtctgatcccattggcaaagataacgatagcca

SEQ ID NO: 145872 - DNA, 75 bp, synthetic construct
  source 1..75: mol_type = other DNA
atttcggcactaaaagcattggtgtggcggtaggtcaacgtattaccggcaccgctcgccctttgcctgcagtta

SEQ ID NO: 145873 - DNA, 75 bp, synthetic construct
  source 1..75: mol_type = other DNA
aaatgaaccaccggcacctatacaagcggtggatgtcaccgcaaaacaactgacaaataactggtgtagtgggcg

SEQ ID NO: 145874 - DNA, 75 bp, synthetic construct
  source 1..75: mol_type = other DNA
ggcacttgacctctgcctgcagctttggcagcaaggcggtttaatcgccagtaaagcagcgttgttactggcggc

SEQ ID NO: 145875 - DNA, 75 bp, synthetic construct
  source 1..75: mol_type = other DNA
tggttgaccaagaaactatgaattggttgattgacctgaacaggtcgggctttaatatctgtttcctgcattgct

SEQ ID NO: 145876 - DNA, 75 bp, synthetic construct
  source 1..75: mol_type = other DNA
aatgcgatacatactggtcgcaactgtaaatggtttgaaagccaccgggaaaacattcaacgttctggtgtccac

SEQ ID NO: 145877 - DNA, 75 bp, synthetic construct
  source 1..75: mol_type = other DNA
caggcaggcatgatagccagaaaaccaaaactcgacctgacaaacactgactggatttgcggggtggatttatga

SEQ ID NO: 145878 - DNA, 75 bp, synthetic construct
  source 1..75: mol_type = other DNA
gctctaccgggccgaaaggcacggctcagcagaaccggtgccacctgcgctacaaccaacgttaccaccagcgac

SEQ ID NO: 145879 - DNA, 75 bp, synthetic construct
  source 1..75: mol_type = other DNA
ttaccgcgcaggaaagcttagtcctgccgaactatctgcatcgccgttgttaccagattcagaaaaaactgcatc

SEQ ID NO: 145880 - DNA, 75 bp, synthetic construct
  source 1..75: mol_type = other DNA
tcctggagtaaaagacactctggcatttttaatgaccagggaagcagcacacatgctttcatttgaaaaagcatt

SEQ ID NO: 145881 - DNA, 75 bp, synthetic construct
  source 1..75: mol_type = other DNA
gatcatcgtttccgatggaagcataataagctttttctgcttctgccggaggagtatggcccagcctttccagca

SEQ ID NO: 145882 - DNA, 75 bp, synthetic construct
  source 1..75: mol_type = other DNA
gtgcaattactgcatataaagcgtatgtcatggcggaaaccacgcagctggttaccgacaccaaagcctttaccg

SEQ ID NO: 145883 - DNA, 75 bp, synthetic construct
  source 1..75: mol_type = other DNA
gacggcgaatttacagcctggcgaatacgatatgacctgcggtctgctgactaacccgaaagggaagttgatcgt

SEQ ID NO: 145884 - DNA, 75 bp, synthetic construct
  source 1..75: mol_type = other DNA
agggggaattagaactttcgcgtgtgcctattccgacacagatatttttcccggtatcaggtgaagaacctgaac

SEQ ID NO: 145885 - DNA, 75 bp, synthetic construct
  source 1..75: mol_type = other DNA
gtgacatattaactcaatccggtcaccaccgtgcaggcaatcgagagcttccggtcctatcaataaccatgaaaa

SEQ ID NO: 145886 - DNA, 75 bp, synthetic construct
  source 1..75: mol_type = other DNA
tgctttataattcttcggctgttccggcgaattataaaggtggcgccggagagattaacaatccatttggaggaa

SEQ ID NO: 145887 - DNA, 75 bp, synthetic construct
  source 1..75: mol_type = other DNA
atgatgaacacggaaggtaataacggtaacaaacccctcggtctatggaacgtcgtttccatcggcattggggca

SEQ ID NO: 145888 - DNA, 75 bp, synthetic construct
  source 1..75: mol_type = other DNA
tcccagggtagccgtgcgttgatatggattattggctcactcttactcagccttattgtggcaatggtcatgaag

SEQ ID NO: 145889 - DNA, 75 bp, synthetic construct
  source 1..75: mol_type = other DNA
gcaaacctcttggtctatggaacgtggtttccattggtatcggggcgatggtgggggcagggatttttgcgctgc

SEQ ID NO: 145890 - DNA, 75 bp, synthetic construct
  source 1..75: mol_type = other DNA
agaaataccttttctccggttgcagtgagatccatcacagatgtcatcgtttacccggaatcactctctaaccat

SEQ ID NO: 145891 - DNA, 75 bp, synthetic construct
  source 1..75: mol_type = other DNA
aaaaacaccttttctccggttgcggtgagatccattacggatgtaattgcatacccggaatcactctctaacctt

SEQ ID NO: 145892 - DNA, 75 bp, synthetic construct
  source 1..75: mol_type = other DNA
ctcaaaaacgtcttcagtttatccaggaaaccattcagacctacggcatccaccatattcatactggccgtaaca

SEQ ID NO: 145893 - DNA, 75 bp, synthetic construct
  source 1..75: mol_type = other DNA
gcgaatattatatattcaggcacactgagtccagctaatgcagcaaaactttgtactggtgtgactaacagtatt

SEQ ID NO: 145894 - DNA, 75 bp, synthetic construct
  source 1..75: mol_type = other DNA
ttttcagcgctgctttattcagtaccactgcacacgccgttatccaggaccagcaatgggggaactggttcggta

SEQ ID NO: 145895 - DNA, 75 bp, synthetic construct
  source 1..75: mol_type = other DNA
aggagaaggcgattgttctattttcctgaaacaaggtgaatattcaaaaactcctgtcaaattgccttttgccct

SEQ ID NO: 145896 - DNA, 75 bp, synthetic construct
  source 1..75: mol_type = other DNA
tgtgcagctatagcatataaaaataattctgatgttcataaattattaagcaaatactccatttctctaggtatt

SEQ ID NO: 145897 - DNA, 75 bp, synthetic construct
  source 1..75: mol_type = other DNA
catgtattggcgctgtccgctgggggaacctgccggataatgcccgggagataatcacagcgttaatgcactgcc

SEQ ID NO: 145898 - DNA, 75 bp, synthetic construct
  source 1..75: mol_type = other DNA
agttcgtccggcaaacctttgttgaatgggctgccaagacggttaactcatcatactgggccagactttattatc

SEQ ID NO: 145899 - DNA, 75 bp, synthetic construct
  source 1..75: mol_type = other DNA
cattaactctgtattgttggagccattacggattttctccagagggagatgtgccatcactagaatatattaggg

SEQ ID NO: 145900 - DNA, 75 bp, synthetic construct
  source 1..75: mol_type = other DNA
tgtgcagttatagcatataaaaataattctgatgttcataaattattaagcaaatactccatttccctgggtatt

SEQ ID NO: 145901 - DNA, 75 bp, synthetic construct
  source 1..75: mol_type = other DNA
acgaaagatttcattggaaacaaacctaatttaaaaacagcaacacaaaatgcaaaggggcttcttgaatcctgc

SEQ ID NO: 145902 - DNA, 75 bp, synthetic construct
  source 1..75: mol_type = other DNA
agcttactgttgtgtgagctgattatccggtggcccagtctgcaacaactgaaacgagccagacgcgacacgatc

SEQ ID NO: 145903 - DNA, 75 bp, synthetic construct
  source 1..75: mol_type = other DNA
cgcacgttggtctggactgggctgataaaaaacacgatgtctgtgttcagtttaaaaacggtgaacgcgtattcg

SEQ ID NO: 145904 - DNA, 75 bp, synthetic construct
  source 1..75: mol_type = other DNA
gtgagggcaactctagaccacgctacagagtttctcaatatggattgaatcttatcaaagaacaacaagacaacc

SEQ ID NO: 145905 - DNA, 75 bp, synthetic construct
  source 1..75: mol_type = other DNA
aaaacgagccaggcgagacacgatccgcaactttctcaatgccaaaggtggccgcgcaatggcccttaccgagca

SEQ ID NO: 145906 - DNA, 75 bp, synthetic construct
  source 1..75: mol_type = other DNA
ccggcaagccttctcgcccagcggtgctaaagatgacccgcaggatgccgagctggcattagagttaatgctgcg

SEQ ID NO: 145907 - DNA, 75 bp, synthetic construct
  source 1..75: mol_type = other DNA
cgcacgttggtctggactgggcagataaaaagcacgatgtctgtgttcagtttaaaaacggtgaacgcacattcc

SEQ ID NO: 145908 - DNA, 75 bp, synthetic construct
  source 1..75: mol_type = other DNA
atcaaagtgtctcaggatattcaaacattattcttattcatagaacaacctttgaggattattactttgatgtcg

SEQ ID NO: 145909 - DNA, 75 bp, synthetic construct
  source 1..75: mol_type = other DNA
gcattatttttcggagcagggagccgggcaggcgagataccgcttaatgcggcggcgggccagcaatgagcaacg

SEQ ID NO: 145910 - DNA, 75 bp, synthetic construct
  source 1..75: mol_type = other DNA
tggaaggcgaaacggaaacctgggttatcaacgagctggcgcgtcagtgtgggcatcatttcgatgcagaaggga

SEQ ID NO: 145911 - DNA, 75 bp, synthetic construct
  source 1..75: mol_type = other DNA
aagagattgccgggagtaaagaagtctgggccaacggtggcgaagtgttggtgctcaactttgaagacggttgct

SEQ ID NO: 145912 - DNA, 75 bp, synthetic construct
  source 1..75: mol_type = other DNA
gaaaaaacggttatacgtgaaagactatcctcgctgagggaaaattacgatatggaaaaagccatttacatttac

SEQ ID NO: 145913 - DNA, 75 bp, synthetic construct
  source 1..75: mol_type = other DNA
cacctgttgttattattaagaaaaaaagacgaattctttctcatcaggatgatgctgtacaggcagttcctgatg

SEQ ID NO: 145914 - DNA, 75 bp, synthetic construct
  source 1..75: mol_type = other DNA
gttgcttgtgttaatgatgatgaccagtatgttcctagttttggtggggggaatagaggggaaagatgcagggaa

SEQ ID NO: 145915 - DNA, 75 bp, synthetic construct
  source 1..75: mol_type = other DNA
ataccgcgcttacactatctagttttgccttccctcccatcgcattagccactctgccgcttattttttacaaca

SEQ ID NO: 145916 - DNA, 75 bp, synthetic construct
  source 1..75: mol_type = other DNA
tttgtatcgattatgaatcagaatgtgtctgggctgggagtaaagttttctaatacggataatgctttgtcagat

SEQ ID NO: 145917 - DNA, 75 bp, synthetic construct
  source 1..75: mol_type = other DNA
gattgatatttaccatgtcaatgagatggtggttatgctgccagtgatccgtaaaacagatgtttccaaccgtgt

SEQ ID NO: 145918 - DNA, 75 bp, synthetic construct
  source 1..75: mol_type = other DNA
cgctggcggtcattcgcagtgatgagggggatgcacggcgcgaaaaactggcggcactcattacgcgttttcgtg

SEQ ID NO: 145919 - DNA, 75 bp, synthetic construct
  source 1..75: mol_type = other DNA
cccgccatcttatctacagcaccagtatgccgcccgctcaggcgcaggcattacgtgcgtcgctggcggtcattc

SEQ ID NO: 145920 - DNA, 75 bp, synthetic construct
  source 1..75: mol_type = other DNA
atgacgcccacggcacgggcgttatcggggagcaggggcgtggcagctgctggctgcaaaaggtaaaaccagaat

SEQ ID NO: 145921 - DNA, 75 bp, synthetic construct
  source 1..75: mol_type = other DNA
agtgccatatctgtggccgtggagatggaagggaaatatctcgattcgtctttggcaaataacccggagctttgg

SEQ ID NO: 145922 - DNA, 75 bp, synthetic construct
  source 1..75: mol_type = other DNA
tccaatcatcgatctgaccgtgcaggagcttgctaccgtttttgacggtgtagagatgctccgcgtgttcatccg

SEQ ID NO: 145923 - DNA, 75 bp, synthetic construct
  source 1..75: mol_type = other DNA
tgcggaagtggtgtttaatgctctgccaggtaaggtattcagcggtaagctggcagccattagtccagccgttcc

SEQ ID NO: 145924 - DNA, 75 bp, synthetic construct
  source 1..75: mol_type = other DNA
cgacgaagcgccggaagaagaggggcaagtcgaagcggtaatggatgcggcgctgcgtccgaagcgcagtttgtg

SEQ ID NO: 145925 - DNA, 75 bp, synthetic construct
  source 1..75: mol_type = other DNA
attaccggaatgcgtcacttggcatttctcagcagaggctgcaactggaaaaatacaaccagcgacggcttgagt

SEQ ID NO: 145926 - DNA, 75 bp, synthetic construct
  source 1..75: mol_type = other DNA
ttttgaatttgcgcagtctcagtttgagcaccgaaaagaaaatgatcagcgtacatatgatcttaatgtcaggaa

SEQ ID NO: 145927 - DNA, 75 bp, synthetic construct
  source 1..75: mol_type = other DNA
tttcgccggggccagtgaactggtgcgcgaagtggggatggactggatgtcgcaggatctcgccgcacgcttgtc

SEQ ID NO: 145928 - DNA, 75 bp, synthetic construct
  source 1..75: mol_type = other DNA
gaattaaagccatggaactttgccgtccactgccgtggattgatgatgataaacctcgcctgggggatttccgtc

SEQ ID NO: 145929 - DNA, 75 bp, synthetic construct
  source 1..75: mol_type = other DNA
atcgtgaagtggtcagtttgtatgctcacctggtccagccagtgctggatgcgcaggcgcgccgtgaaattagcc

SEQ ID NO: 145930 - DNA, 75 bp, synthetic construct
  source 1..75: mol_type = other DNA
ggatggatatcaatgcctggctggtttcccgctcactgtggaatgcggatcagtctaaggatgttgagacgcttt

SEQ ID NO: 145931 - DNA, 75 bp, synthetic construct
  source 1..75: mol_type = other DNA
tcgtgggtatttggtacggttataggggcattctccggcagcggtttgctgcaaggttatccagccgttgaagca

SEQ ID NO: 145932 - DNA, 75 bp, synthetic construct
  source 1..75: mol_type = other DNA
aaactgcgctgtgggcgtttggcctgacagacgaagtttttgcagcggcaacggcaaagctggtacgcaataatc

SEQ ID NO: 145933 - DNA, 75 bp, synthetic construct
  source 1..75: mol_type = other DNA
ttgttgtgccgattgtgatctccacgctggtggtgggtatcgcgggtgttggtgatgccaaacagctcgggcgta

SEQ ID NO: 145934 - DNA, 75 bp, synthetic construct
  source 1..75: mol_type = other DNA
tttttaaacatgaaagaagaaaacccaaaaagaatgaaaaagttccaagggttaaaattgaaatgctgctatggt

SEQ ID NO: 145935 - DNA, 75 bp, synthetic construct
  source 1..75: mol_type = other DNA
cgacagattgcttttctgcggatggggatggatatcaatgcctggctggtttcccgctcactgtggaatgcggat

SEQ ID NO: 145936 - DNA, 75 bp, synthetic construct
  source 1..75: mol_type = other DNA
tgactattacgctcacgggaaaatctcgaaacgtgagttcctcaaccttgcggcgaagtgcggtaggcgggatga

SEQ ID NO: 145937 - DNA, 75 bp, synthetic construct
  source 1..75: mol_type = other DNA
caagttgaagcggtgatggacgcagcgttacgtcctaaacgcagcctgtggcgcaaaatggtgatgggcgggctg

SEQ ID NO: 145938 - DNA, 75 bp, synthetic construct
  source 1..75: mol_type = other DNA
gcattggttgacgcaaagggcacgctaaagctgtcaccggcagctcaaaaacaggggatgcccttcaacattatg

SEQ ID NO: 145939 - DNA, 75 bp, synthetic construct
  source 1..75: mol_type = other DNA
cgtcagatcgcctttctgggaatggggatggatttgaacgcctggctggtctcccgctcactgtggaatgccgat

SEQ ID NO: 145940 - DNA, 75 bp, synthetic construct
  source 1..75: mol_type = other DNA
gaacgcattctgtccctgagtggcatggccccggcggaagtccgtgatgacagtgacacacaggcggcactgacg

SEQ ID NO: 145941 - DNA, 75 bp, synthetic construct
  source 1..75: mol_type = other DNA
ttaaaaatagtgaagagcatgctgcagctatggaaaggctcattgaacttgcgtctagtgatttacaacctggaa

SEQ ID NO: 145942 - DNA, 75 bp, synthetic construct
  source 1..75: mol_type = other DNA
caggtggcggaaacctgaatgttacagggggaacgctggctatcgaggggcttaatgcacgctacaatgcgttaa

SEQ ID NO: 145943 - DNA, 75 bp, synthetic construct
  source 1..75: mol_type = other DNA
ctggaagatacacattcgcttagcgaactggttgccggagccagcgcggtggtccattgcgccgggcaagtgcgc

SEQ ID NO: 145944 - DNA, 75 bp, synthetic construct
  source 1..75: mol_type = other DNA
ggatggtcggtattcctctgccgctactcacctgccttgcggatatcagtaccgcgttgagccgtctggcgggta

SEQ ID NO: 145945 - DNA, 75 bp, synthetic construct
  source 1..75: mol_type = other DNA
cctcagggataaaaaggcagagcatgaaaaggcgctggattatagcgcttccgcatctgccgagaagatcaaagg

SEQ ID NO: 145946 - DNA, 75 bp, synthetic construct
  source 1..75: mol_type = other DNA
gacaaaactgggtaccgggatcctgactcttaacaacgattccgcggcgtatcagggtacgacggatatcgtggg

SEQ ID NO: 145947 - DNA, 75 bp, synthetic construct
  source 1..75: mol_type = other DNA
ttttgaatttgcacagtcgcagtttgaacataataaagacgttgatcagcggaactttgattacagagccaaagt

SEQ ID NO: 145948 - DNA, 75 bp, synthetic construct
  source 1..75: mol_type = other DNA
acctggggcaacatcattgtcgtggtgttgattatgctgatgacggcggcgctgaatttaggctcactcgccagc

SEQ ID NO: 145949 - DNA, 75 bp, synthetic construct
  source 1..75: mol_type = other DNA
catcaacgcgaacctgttcgccgtgtttaacatcatggacaacatgggcagcgaacgcgaactgccgaagctaat

SEQ ID NO: 145950 - DNA, 75 bp, synthetic construct
  source 1..75: mol_type = other DNA
gctacctggcggtgtttatggtcgctatccgcctgcgtcatgatattcacgcctcgttaccgatccttgttgttg

SEQ ID NO: 145951 - DNA, 75 bp, synthetic construct
  source 1..75: mol_type = other DNA
tatggtcccggcgataaagagttaaaaccgctgtttgactggatgctgcgcggcctgctgccacgacttggtgcg

SEQ ID NO: 145952 - DNA, 75 bp, synthetic construct
  source 1..75: mol_type = other DNA
taaagcaggtcgcgaagctggcgtatacatgcgggttgttcgtaacaccctgctgcgccgtgctgttgaaggtac

SEQ ID NO: 145953 - DNA, 75 bp, synthetic construct
  source 1..75: mol_type = other DNA
gcttttggcggcattgtggcgatgttttccggatatgcctatgcgcgccttggcgcaagttatcccagcaatggc

SEQ ID NO: 145954 - DNA, 75 bp, synthetic construct
  source 1..75: mol_type = other DNA
gccgcagtatcagcagaaaattcagcagcaaaaaattcaacaagtgattaccagttgggcgggtgatgatccgga

SEQ ID NO: 145955 - DNA, 75 bp, synthetic construct
  source 1..75: mol_type = other DNA
ctggaggataaactggcagaaaaagcgcgcgaacaaggcgcgaaaggttatgtcattaattccgcaggcggaaat

SEQ ID NO: 145956 - DNA, 75 bp, synthetic construct
  source 1..75: mol_type = other DNA
gaatacggcagtgcacatcctgatgatcaaaccgtgctggcgatacccgttgataaggctgtcgctcttgtcagg

SEQ ID NO: 145957 - DNA, 75 bp, synthetic construct
  source 1..75: mol_type = other DNA
ctccaccgcgcataaacctgtaacagaatacggcagtgcacatcctgatgatcaaaccgtgctggcgatacccgt

SEQ ID NO: 145958 - DNA, 75 bp, synthetic construct
  source 1..75: mol_type = other DNA
gcctgtgatggctgcgcttggaaaggctgtggatgctggtgatcgggatgcggcaatgcgtctttacgggcagtt

SEQ ID NO: 145959 - DNA, 75 bp, synthetic construct
  source 1..75: mol_type = other DNA
gaacataataaagacgttgatcagcggaactttgattacagagccaaagtcgacgaccgtaattatgcactgcag

SEQ ID NO: 145960 - DNA, 75 bp, synthetic construct
  source 1..75: mol_type = other DNA
gttgataaggctgttgagcttgtcagggaacgcagtaaattcgcggaaatttcgaaaaatttcggctatttcacg

SEQ ID NO: 145961 - DNA, 75 bp, synthetic construct
  source 1..75: mol_type = other DNA
ggaactttgattacagagccaaagttgacgaccgtaattatgcactgaaggaaagggagtttaacgctaaccaga

SEQ ID NO: 145962 - DNA, 75 bp, synthetic construct
  source 1..75: mol_type = other DNA
tacgccggagaatcttgatgtcctttccggggtgtttggcccggaactgcaacagcgtattggcatgcccgattc

SEQ ID NO: 145963 - DNA, 75 bp, synthetic construct
  source 1..75: mol_type = other DNA
caatggaaatgcttgaagctctggctgatgctggtgtgaccatcggcaacttcttcagtaatgacctgatgaacg

SEQ ID NO: 145964 - DNA, 75 bp, synthetic construct
  source 1..75: mol_type = other DNA
acctccgcagtgctacccattccgctggtcgttccaaggcttcaattatggctgacctcgatagtggcgctaact

SEQ ID NO: 145965 - DNA, 75 bp, synthetic construct
  source 1..75: mol_type = other DNA
aggccggaagctatatcagcaacattgccgcagccaactcgctggcgacggaaacgtgcaaacgcgacttggggt

SEQ ID NO: 145966 - DNA, 75 bp, synthetic construct
  source 1..75: mol_type = other DNA
aatggtcaaaccgtaggccgtgaaggtgcgcgtaatctcggtgaagtacgtaccggggttgaggcgaaagtaaat

SEQ ID NO: 145967 - DNA, 75 bp, synthetic construct
  source 1..75: mol_type = other DNA
aaccctgaccaacgtatcgctgaagacattctcttactgatcagcaaaacgctcagtctttcatttggcttcatc

SEQ ID NO: 145968 - DNA, 75 bp, synthetic construct
  source 1..75: mol_type = other DNA
acgattatcctgagatcagttttgacttcctgggctatacgtttcgccctcggaagacaaaagctggcgacgggt

SEQ ID NO: 145969 - DNA, 75 bp, synthetic construct
  source 1..75: mol_type = other DNA
ttctggctacgttatcagaagcatcctcaggcatttgcgcgctggacgcgcattgtgccgccggttgtcgatacg

SEQ ID NO: 145970 - DNA, 75 bp, synthetic construct
  source 1..75: mol_type = other DNA
ttatacccaggatccccaggttaaacacgtggttgtgattcttatttggctaaacgcgttgtttatgcctatttg

SEQ ID NO: 145971 - DNA, 75 bp, synthetic construct
  source 1..75: mol_type = other DNA
ttgttctggcgcgagataaccccgcttgctgttcctatcttcatggagaatgcctgtgtcctgttgatgggtgtc

SEQ ID NO: 145972 - DNA, 75 bp, synthetic construct
  source 1..75: mol_type = other DNA
cttaaagccagtaagttcgccgtacagtcttactctgcgctggtgctggcccgtcagcaaaaagcgccgctgggc

SEQ ID NO: 145973 - DNA, 75 bp, synthetic construct
  source 1..75: mol_type = other DNA
gcaggcgctgccggtaacgctcaacgaacagggcgaaggctcggttacactgccgattggcgattttaacggtga

SEQ ID NO: 145974 - DNA, 75 bp, synthetic construct
  source 1..75: mol_type = other DNA
gctgcgtgaaatctgggagcatcgtgcagatgctgcttctggattaccgctgctgcaacttggcgttgcgctgaa

SEQ ID NO: 145975 - DNA, 75 bp, synthetic construct
  source 1..75: mol_type = other DNA
aaaggtatgctgatgatatagtgattcactgcaatagccaggctcaggcaatagtgctgcgaaacaaactggagc

SEQ ID NO: 145976 - DNA, 75 bp, synthetic construct
  source 1..75: mol_type = other DNA
tggaaagcatatcaacgaattagagccaatcgtggctcgccgggtgttgacggtcaaacgatagagacgtttgaa

SEQ ID NO: 145977 - DNA, 75 bp, synthetic construct
  source 1..75: mol_type = other DNA
tccctcaagccccctgccaggccccaacgtgctgtcaggcttcgcctgattcccgatctgcgccgatacttcagc

SEQ ID NO: 145978 - DNA, 75 bp, synthetic construct
  source 1..75: mol_type = other DNA
gccctgcttgccttgccgaaatgaataccccaggcgaacggcgttatcgttatccgtttatcaactgtacccact

SEQ ID NO: 145979 - DNA, 75 bp, synthetic construct
  source 1..75: mol_type = other DNA
ctgaaaaataccttctgtctggtgcgtggtgaacaggcggtgttgagtcaacatttgggcgatttaagtgacgat

SEQ ID NO: 145980 - DNA, 75 bp, synthetic construct
  source 1..75: mol_type = other DNA
tggatgattcagtggtgcgcgaaagtggcgaaatgttgcgccgctcgcgggggtatgtaccggatgcgctggctt

SEQ ID NO: 145981 - DNA, 75 bp, synthetic construct
  source 1..75: mol_type = other DNA
gtgctggtggataaaaaatacgtacctgagctttgtgatgatatcgcccctggccttaacgaagtcggggtgatg

SEQ ID NO: 145982 - DNA, 75 bp, synthetic construct
  source 1..75: mol_type = other DNA
tggcgcttgctgggggcgatttggctgcaaagcagccgtggcgtaacctgctggcgcagtgcctgcgctttgtgc

SEQ ID NO: 145983 - DNA, 75 bp, synthetic construct
  source 1..75: mol_type = other DNA
gggtatgtgccggatgcgctggctttgcctccgggctttaaaaatgttccgcctgtgctgtgtctcggcgcggat

SEQ ID NO: 145984 - DNA, 75 bp, synthetic construct
  source 1..75: mol_type = other DNA
cgctttgtttatgcctatttggtccgcctcatgggtgttacctgctggttttaaaggtgctcgtgatgcacgcta

SEQ ID NO: 145985 - DNA, 75 bp, synthetic construct
  source 1..75: mol_type = other DNA
aaataccctcgacccgaaccgcaaaagtgtgaaaaaagccagctgtgtcggaataaacgacaaaatgcagattat

SEQ ID NO: 145986 - DNA, 75 bp, synthetic construct
  source 1..75: mol_type = other DNA
acttatctggagctgacggtactcagttatccagcagctgccatcactcttattggtagcggggcacttcgtggt

SEQ ID NO: 145987 - DNA, 75 bp, synthetic construct
  source 1..75: mol_type = other DNA
ctcgcctgcgatgcgcgtaacagtaacgcggtggcgacacttcgggcacgcaaacatcgcccggcgaaaccgctg

SEQ ID NO: 145988 - DNA, 75 bp, synthetic construct
  source 1..75: mol_type = other DNA
cgacccgctcgatcgtcgcttccacgcccagccggtggcctgcccggagtgtggcccacatcttgaatgggtaag

SEQ ID NO: 145989 - DNA, 75 bp, synthetic construct
  source 1..75: mol_type = other DNA
gctacgaatctcgttaaagagctattttaagccattgaatttcagcattatctgggaagttatgggaattggtat

SEQ ID NO: 145990 - DNA, 75 bp, synthetic construct
  source 1..75: mol_type = other DNA
atgaaaaccttgaagattacgagggactcttacttgggcacatcagcgctattcaggacgagcaagcggatgata

SEQ ID NO: 145991 - DNA, 75 bp, synthetic construct
  source 1..75: mol_type = other DNA
ataaagctttatatgatgctttaaaccaaaagcaaattactctaaatgaaattcaagatcttttcttagagaggg

SEQ ID NO: 145992 - DNA, 75 bp, synthetic construct
  source 1..75: mol_type = other DNA
cgtcaaaacaactcaatgatttaaatgagttatctcaaaagttaacagaagaactcaaagagttacctgtgcgcg

SEQ ID NO: 145993 - DNA, 75 bp, synthetic construct
  source 1..75: mol_type = other DNA
gccagcaataaaaatggtgagatgccaaaacaggtgaatgtgctggtgtctgcggttgatagcggtgtgctgaat

SEQ ID NO: 145994 - DNA, 75 bp, synthetic construct
  source 1..75: mol_type = other DNA
gtagcaacgaaagcaaagtggttgttgccgcaccggtgatagcagaactgaacatgccgcgctttatggccggcg

SEQ ID NO: 145995 - DNA, 75 bp, synthetic construct
  source 1..75: mol_type = other DNA
acagcggtgaaaaaagatgcgccttctgaagttactaaagcggcctcttcagaaaacgcgagttcagcaaaactc

SEQ ID NO: 145996 - DNA, 75 bp, synthetic construct
  source 1..75: mol_type = other DNA
ccatgttcaggaagatgattgttcgtggcgaacggcggacgacaactcggaagtcagctatgacttcgatgtcat

SEQ ID NO: 145997 - DNA, 75 bp, synthetic construct
  source 1..75: mol_type = other DNA
agacagcggcggattttagtcctctttcagtccacaatatcgcatctgcaccagacaatattttccgcatggccg

SEQ ID NO: 145998 - DNA, 75 bp, synthetic construct
  source 1..75: mol_type = other DNA
ttttatctagaattatatctgtattatctaatattataatcattcctattatattaaagcatttaacgccagagc

SEQ ID NO: 145999 - DNA, 75 bp, synthetic construct
  source 1..75: mol_type = other DNA
tgcttaaatctgaagagttgaattctttgtatgatagagggttttatatttggaaaataagatggagaataaagg

SEQ ID NO: 146000 - DNA, 75 bp, synthetic construct
  source 1..75: mol_type = other DNA
atatgttttagatgatgttacggatgtttatatctaccatcctaaacctgctgtcatggaggaggaagatgggga

SEQ ID NO: 146001 - DNA, 75 bp, synthetic construct
  source 1..75: mol_type = other DNA
acaaagctttatacgaggctttatgccaatcacgtgtcactgataatgatatggtggaattgtttttatcccgtg

SEQ ID NO: 146002 - DNA, 75 bp, synthetic construct
  source 1..75: mol_type = other DNA
atgaaaaagttacgcgtagccgcctgcatgctaatgctaatgctggcgctggcagggtgcgacaacaacgataac

SEQ ID NO: 146003 - DNA, 75 bp, synthetic construct
  source 1..75: mol_type = other DNA
tactactggaactggtcggaagatgaaggctggcggtcgcagtttgatcaaaaagatctgatcgaaaatgagcaa

SEQ ID NO: 146004 - DNA, 75 bp, synthetic construct
  source 1..75: mol_type = other DNA
tggggataaccaatatcggatgtgggatttccacgtcgaagattttatgccggagcgcatggcgttgaatctgac

SEQ ID NO: 146005 - DNA, 75 bp, synthetic construct
  source 1..75: mol_type = other DNA
gtttggcccacgcgatctttatcgcccgggtgaaacggtaatcctcaatggtttgctgcgtgatgcagacggtaa

SEQ ID NO: 146006 - DNA, 75 bp, synthetic construct
  source 1..75: mol_type = other DNA
gggcggtcgcccggtgacgcgccgcgctgagcaggctatctggcctgccgatgcattgccggggatccgtccgca

SEQ ID NO: 146007 - DNA, 75 bp, synthetic construct
  source 1..75: mol_type = other DNA
acgttacaccagatccgtggcaggcattctttggtcagaaacgttatggtgctgatatttacgatatttacggtc

SEQ ID NO: 146008 - DNA, 75 bp, synthetic construct
  source 1..75: mol_type = other DNA
aaaaattattgctgccgctgggcgatatcaaaccgcttcagcaggcgggcgtgtatctggctgtgatgaatcagg

SEQ ID NO: 146009 - DNA, 75 bp, synthetic construct
  source 1..75: mol_type = other DNA
acgcgccgcgctgagcaggctatctggcctgccgatgcattgccggggatccgtccgcagttcgcctcgaaatcg

SEQ ID NO: 146010 - DNA, 75 bp, synthetic construct
  source 1..75: mol_type = other DNA
tagcgatcaacttgccaccttgcaggtgaccaacagtggcgatcagccgttatggctgcgtgtggatgccagcgg

SEQ ID NO: 146011 - DNA, 75 bp, synthetic construct
  source 1..75: mol_type = other DNA
gcaaaacttctcgcctgttacgctggaagggcaattgttgttgagcggcaaaccaccgctgaacattgcacgtta

SEQ ID NO: 146012 - DNA, 75 bp, synthetic construct
  source 1..75: mol_type = other DNA
gtatgttaatactggcgctggtagggtgtgataacaacgataacgcgccaacagcggtgaaaaaagagacgcctg

SEQ ID NO: 146013 - DNA, 75 bp, synthetic construct
  source 1..75: mol_type = other DNA
gcctggaaaacggcgcggctcagcaaggaattgaagtttcgttattaaatgagaaagggcagattctgactcagg

SEQ ID NO: 146014 - DNA, 75 bp, synthetic construct
  source 1..75: mol_type = other DNA
ggtggtggatctgaccgggcggcggaataacggtgtgcctgtgtccctttccgtatcaacaggagcagagaatgg

SEQ ID NO: 146015 - DNA, 75 bp, synthetic construct
  source 1..75: mol_type = other DNA
cggcagaactcagcgaattaccgaatgggctagagaggttggcttgactgcgaccattatctcgcagcgaatttt

SEQ ID NO: 146016 - DNA, 75 bp, synthetic construct
  source 1..75: mol_type = other DNA
cgcaaaaaatggcgttaattccagcctgcatctttttgtgtttcgctgcgctatcggtgcaggcagaagaaacac

SEQ ID NO: 146017 - DNA, 75 bp, synthetic construct
  source 1..75: mol_type = other DNA
tggttccctgctgtcggcgctgatagaccagccacaaaatccggcgttacgcctgcagattatgtcggcggtgta

SEQ ID NO: 146018 - DNA, 75 bp, synthetic construct
  source 1..75: mol_type = other DNA
gtagccgcattgctcgccgtgaatatggttccctgctgttggcactgatagaccagccacaaaatccggcgttac

SEQ ID NO: 146019 - DNA, 75 bp, synthetic construct
  source 1..75: mol_type = other DNA
gcctgcaggtcatgtcggcagtgtatgtagcgctgagtcgctgggagccacggatgacgctggattccatcacca

SEQ ID NO: 146020 - DNA, 75 bp, synthetic construct
  source 1..75: mol_type = other DNA
ttgctcatgaaatagacacttacggtcatattcccaacggcaaccgcagttactatttaagccgctcgcaaccgc

SEQ ID NO: 146021 - DNA, 75 bp, synthetic construct
  source 1..75: mol_type = other DNA
cctttgaacgcggagaggatgacggcgcgatgtacgtcgatatgaccggcacgcgttcggcatcaggccagcctt

SEQ ID NO: 146022 - DNA, 75 bp, synthetic construct
  source 1..75: mol_type = other DNA
ttgccgctaacccggaatacagctcgctgaacctggcgatggcggttcaggttattgcctatgaagtgcgcatgg

SEQ ID NO: 146023 - DNA, 75 bp, synthetic construct
  source 1..75: mol_type = other DNA
atcaaaaaacttttgccgacgccgtgcccaacagcgacccgctaatgatcctcgctgactatcggatgcaacaga

SEQ ID NO: 146024 - DNA, 75 bp, synthetic construct
  source 1..75: mol_type = other DNA
cgggcaaaaagaggtggcgatggacattagctggcacttcctgaccaatgttcagcacacttatgaccgggagaa

SEQ ID NO: 146025 - DNA, 75 bp, synthetic construct
  source 1..75: mol_type = other DNA
aaggctggtatgccgattacgatctgaagagtaataaagttcgcaatcaattaaccgccgccgctctgttcccgc

SEQ ID NO: 146026 - DNA, 75 bp, synthetic construct
  source 1..75: mol_type = other DNA
agtgcgcaaaattgaagaaggtcaggatccggacgaattactcagtaaatggcaaaaggaaatgtggttattcgc

SEQ ID NO: 146027 - DNA, 75 bp, synthetic construct
  source 1..75: mol_type = other DNA
acttaccgttacccaaaaaatttgatgatctggttttcccctggcttggcccgacgcgtaccagcgaactggctg

SEQ ID NO: 146028 - DNA, 75 bp, synthetic construct
  source 1..75: mol_type = other DNA
ccccgtggttgcctgttcgtttcaaagacggaacgacaggcaagctggcaccagtcgatctggctgatgaaaatg

SEQ ID NO: 146029 - DNA, 75 bp, synthetic construct
  source 1..75: mol_type = other DNA
aaaattacggcgcgaattatgccatgtggcagcatcccttaaggaaggtgcgaataagtccgagatgtgagatca

SEQ ID NO: 146030 - DNA, 75 bp, synthetic construct
  source 1..75: mol_type = other DNA
gaccgcacgcaagaaatattttacaacatcggcggagaagcaaaatgctaaagccgccagggagaaaaagcagga

SEQ ID NO: 146031 - DNA, 75 bp, synthetic construct
  source 1..75: mol_type = other DNA
ttagcacttttttcaatccagctgaatgctcccaaaggtggacgcggttactatccggggttacgtggcgggggg

SEQ ID NO: 146032 - DNA, 75 bp, synthetic construct
  source 1..75: mol_type = other DNA
cacatcctgcaccggggacatcagcaggtgctgtttgtggtgacgcaggccgacaaaacggagccctgccatgaa

SEQ ID NO: 146033 - DNA, 75 bp, synthetic construct
  source 1..75: mol_type = other DNA
aaaaatatgttcgccgcgtcagagataaagttccgtactctgactgggataaagagcaacttcaggatgcaaaca

SEQ ID NO: 146034 - DNA, 75 bp, synthetic construct
  source 1..75: mol_type = other DNA
taaacaaaaaagaagacctaatacctaagttgcgtctggcagcgcaagcggcatcacacattctaagcttgttac

SEQ ID NO: 146035 - DNA, 75 bp, synthetic construct
  source 1..75: mol_type = other DNA
caataaactccaggcgtactggggaatgccgcggcgtattcgtattgattttaataccacgacagtcggcaactg

SEQ ID NO: 146036 - DNA, 75 bp, synthetic construct
  source 1..75: mol_type = other DNA
tttatgcaggatttcgaggcgctcaccggagataaaattccggtcgcttcgctactgcctgagattcccggcgct

SEQ ID NO: 146037 - DNA, 75 bp, synthetic construct
  source 1..75: mol_type = other DNA
tttatgcaggatttcgaggcgctcacgggagataaagttcaggtcgcttcgctactgcctgagattcccggcgct

SEQ ID NO: 146038 - DNA, 75 bp, synthetic construct
  source 1..75: mol_type = other DNA
agtggagagtttcgggatttcgtcgtcacccgcatcgaagcgccaacattgcttgaagaggttccacaggccaac

SEQ ID NO: 146039 - DNA, 75 bp, synthetic construct
  source 1..75: mol_type = other DNA
atcaggacgcgctgcttaatacgccggaaggaagagttttcgacagctttcagcaacagctccgtcaatcttctg

SEQ ID NO: 146040 - DNA, 75 bp, synthetic construct
  source 1..75: mol_type = other DNA
ctgaccgcgctcttcgccaatccattattggtgagcaatatcatcgcggcgatatagtagaacgcctgctcaacg

SEQ ID NO: 146041 - DNA, 75 bp, synthetic construct
  source 1..75: mol_type = other DNA
atggtcatgtgaatgttagagagtatgtccagttgaatgatctcaattctgatacacgcatagcattgtggaact

SEQ ID NO: 146042 - DNA, 75 bp, synthetic construct
  source 1..75: mol_type = other DNA
attcatatattaatctatcgaagcatctcaattccatctttaaaaagcatggcgttggttataccataataaatg

SEQ ID NO: 146043 - DNA, 75 bp, synthetic construct
  source 1..75: mol_type = other DNA
tttaataaattaggtatggttaaagttatttccctaggcaaaatcaatagatatgaaccaaacaaaaaacgatta

SEQ ID NO: 146044 - DNA, 75 bp, synthetic construct
  source 1..75: mol_type = other DNA
atcctgtcagaaacctgttccattatcggggccaatattcttaacatcgcccgccaggattacgaaccacagggt

SEQ ID NO: 146045 - DNA, 75 bp, synthetic construct
  source 1..75: mol_type = other DNA
cctcaaacgaaaaggtgaagccagaaggtatgccaacgctttactgcttaatatcgtgcgcctctatgaaaagaa

SEQ ID NO: 146046 - DNA, 75 bp, synthetic construct
  source 1..75: mol_type = other DNA
acaaacgctggcgttctcgattctaagcgatgccgatatgccggaagtgtcggatcgcgacagaatttcgatgat

SEQ ID NO: 146047 - DNA, 75 bp, synthetic construct
  source 1..75: mol_type = other DNA
tgctgagtgagcgccgctaccgctattacagcccggcgtttttccatgacgcggagggtgtggtgacgcgcctgt

SEQ ID NO: 146048 - DNA, 75 bp, synthetic construct
  source 1..75: mol_type = other DNA
tgcctgtacttaaagaatatcgaggactagagattaaatgtctcaagaactatattgttgatatggatttttttg

SEQ ID NO: 146049 - DNA, 75 bp, synthetic construct
  source 1..75: mol_type = other DNA
cgcgaagaaattaccgctgcgctgtggaaagaaatgcgcgagatttattacgggcgcaatatgccagccatttaa

SEQ ID NO: 146050 - DNA, 75 bp, synthetic construct
  source 1..75: mol_type = other DNA
gctttttccagttgttgaaacgcgaacggataaagaaaaagatctacggaacgcgggaagaagtccgcagcgata

SEQ ID NO: 146051 - DNA, 75 bp, synthetic construct
  source 1..75: mol_type = other DNA
gctggttcattcggatcagggcagtcagtacacaagccatgaatggcagtcgttcctaaaatcacacggcctgga

SEQ ID NO: 146052 - DNA, 75 bp, synthetic construct
  source 1..75: mol_type = other DNA
gttaatgttttgggtggcacctggcgattgtatgatagcggaaataatgcaaggcctttaaatgtgggtcaatcc

SEQ ID NO: 146053 - DNA, 75 bp, synthetic construct
  source 1..75: mol_type = other DNA
gacaatagcctggaatgcggcaggtggagcattaaccaacgctataaacggagatgagcctcttactggggcgat

SEQ ID NO: 146054 - DNA, 75 bp, synthetic construct
  source 1..75: mol_type = other DNA
gcccaacaggcttcagcgacagttcaatccggatgctccggatgaacgttgggtaacggacataacctacatcag

SEQ ID NO: 146055 - DNA, 75 bp, synthetic construct
  source 1..75: mol_type = other DNA
gtgctggatgttcatcccagtggtttttacacctggcttcagcagccgcattctcaacgccatcaggcagacctg

SEQ ID NO: 146056 - DNA, 75 bp, synthetic construct
  source 1..75: mol_type = other DNA
gcagtcagtacacaagccatgagtggcagtcgttcctgaaatcacacggcctggagggcagcatgagccgtcgcg

SEQ ID NO: 146057 - DNA, 75 bp, synthetic construct
  source 1..75: mol_type = other DNA
aggacgtatgctctatcgaaacttgaaaatcacctcagctttagacgaaatatatggtggtatatgtaaaaaggc

SEQ ID NO: 146058 - DNA, 75 bp, synthetic construct
  source 1..75: mol_type = other DNA
aacagaagaagatgtaaattctaccttagctgaagctaaatttatgttagtcacttgcagtgcgttcagtaatta

SEQ ID NO: 146059 - DNA, 75 bp, synthetic construct
  source 1..75: mol_type = other DNA
aggtcggataccggagcccgcgggcttgtaaaggcgaagccagtatcgtgtcgcccaacaggcttcagcgacagt

SEQ ID NO: 146060 - DNA, 75 bp, synthetic construct
  source 1..75: mol_type = other DNA
tatcgcaaaatccatctggatctgcgtgacagcgggcaacagtgcggagtaaacagagtctggagactgatgaaa

SEQ ID NO: 146061 - DNA, 75 bp, synthetic construct
  source 1..75: mol_type = other DNA
agaatggcggcacggttcaaatgaatagcgaaggggggaaaccggggaatgtactgaccgttaacggtaactata

SEQ ID NO: 146062 - DNA, 75 bp, synthetic construct
  source 1..75: mol_type = other DNA
ctgtcgtggaatggtgaaagacattggttctgaacccgacttccggccgatgagcttcagcaaactgttgtacgt

SEQ ID NO: 146063 - DNA, 75 bp, synthetic construct
  source 1..75: mol_type = other DNA
gggttaattatcgcattactggtttacatcgcctgtcgtggaatggtgaaagacattggttctgaacccgacttc

SEQ ID NO: 146064 - DNA, 75 bp, synthetic construct
  source 1..75: mol_type = other DNA
tcgatcaatatcggttcgttagtggcgttgtcattggcgccggttattgccgacaaattcggctattccgtcacc

SEQ ID NO: 146065 - DNA, 75 bp, synthetic construct
  source 1..75: mol_type = other DNA
cggaagcgatggaagtgctgcgctacggcagccgcccgtatatttttaccgcctctccttctccgtcctgcattg

SEQ ID NO: 146066 - DNA, 75 bp, synthetic construct
  source 1..75: mol_type = other DNA
tgagattgccgaagtgttgcttaataatacgtatgcggtgtttagcgttcgtgggtcgtttacccttcgtaggca

SEQ ID NO: 146067 - DNA, 75 bp, synthetic construct
  source 1..75: mol_type = other DNA
tataacctgtgcggggcaggtttgattgtcgcgctactggtctacatcgcctgtcgcgggatggtgcaagatatt

SEQ ID NO: 146068 - DNA, 75 bp, synthetic construct
  source 1..75: mol_type = other DNA
tattctgcggctgaaagatctggattttgaagtgccagtcagccgcagcaaagtaaaagaatttcgccagttaat

SEQ ID NO: 146069 - DNA, 75 bp, synthetic construct
  source 1..75: mol_type = other DNA
tattctgcggctaaaagatctggattttgaagtgccagtcagccgcagcaaagttaaagaattcaggcagttaat

SEQ ID NO: 146070 - DNA, 75 bp, synthetic construct
  source 1..75: mol_type = other DNA
cattctacgactgaaagatctggattttgaagtgcctgtcagccgcagcaaagttaaagaattcagacaattaat

SEQ ID NO: 146071 - DNA, 75 bp, synthetic construct
  source 1..75: mol_type = other DNA
agcccaatactggcaggcatttacacgcatctgggtaacaaaggcaaagacctctcgatgccgatgaaatttact

SEQ ID NO: 146072 - DNA, 75 bp, synthetic construct
  source 1..75: mol_type = other DNA
atcatcttctttcgtcaggcattcaagctggataaaaccgggcgcaataaaatgtttgtcgcctttgtcctgatg

SEQ ID NO: 146073 - DNA, 75 bp, synthetic construct
  source 1..75: mol_type = other DNA
tgaactgtttattagcgccctgggtctggcgatggttgccgctctggtgccgcaacatttgatgggctttattct

SEQ ID NO: 146074 - DNA, 75 bp, synthetic construct
  source 1..75: mol_type = other DNA
tcagttatccagcagctgccatcactttgattggtagcggggcacttcgtggtgcagggaatacgaaaataccgc

SEQ ID NO: 146075 - DNA, 75 bp, synthetic construct
  source 1..75: mol_type = other DNA
tgcctgtgtcctgttgatgggggttctgagcacttttctggtcagctggctgggaaaagatgcgatggccggcgt

SEQ ID NO: 146076 - DNA, 75 bp, synthetic construct
  source 1..75: mol_type = other DNA
taccagaaaagacgcaggtacaacgagatacgccatcgcctaccggtagtcagcttccagcgtttcattttaaac

SEQ ID NO: 146077 - DNA, 75 bp, synthetic construct
  source 1..75: mol_type = other DNA
tcaggcgtggattatttatttgctaaattaaaagcatctaaagatatttatcatgaatttgttagtggaaaaata

SEQ ID NO: 146078 - DNA, 75 bp, synthetic construct
  source 1..75: mol_type = other DNA
taatggcgcacatatttatcctttcaaaacttctcgcataggcgagctggctaccgtgaatcctggtaccgatct

SEQ ID NO: 146079 - DNA, 75 bp, synthetic construct
  source 1..75: mol_type = other DNA
acgcattgggttattgtttttgctgatagcggttgtggttggtggcggcgggttattgctggcgcaaaaagcctt

SEQ ID NO: 146080 - DNA, 75 bp, synthetic construct
  source 1..75: mol_type = other DNA
tcgcctcggcgaacgggcgaaagaggcgattatcatcgttgagggcatctacagtatgctcggtgacgttgcgcc

SEQ ID NO: 146081 - DNA, 75 bp, synthetic construct
  source 1..75: mol_type = other DNA
ccgatagccatgccagtatctatgatgcctgctcgcttggtggggctgagatcattcgttttcgccataatgacg

SEQ ID NO: 146082 - DNA, 75 bp, synthetic construct
  source 1..75: mol_type = other DNA
aggaaggtttacgcatctggcgcgagcttatctcgctgggcgtgtatgtgaatcttatcctgccgcctgccgcgc

SEQ ID NO: 146083 - DNA, 75 bp, synthetic construct
  source 1..75: mol_type = other DNA
gcaacggctccggtagcaccctggcaaaagtcgatgctgaaaagaaaaacccacaggctgacgtctggtacggcg

SEQ ID NO: 146084 - DNA, 75 bp, synthetic construct
  source 1..75: mol_type = other DNA
gcattacagaggagcaccgtctggtatacgcggttactgacgattcactgctcattgcagcatgtcgttatcatt

SEQ ID NO: 146085 - DNA, 75 bp, synthetic construct
  source 1..75: mol_type = other DNA
cagtaaaagtctggcctcgattggcggttttgctgtcggttcggaagcgatggaagtgctgcgctacggtatatt

SEQ ID NO: 146086 - DNA, 75 bp, synthetic construct
  source 1..75: mol_type = other DNA
aaaaacaggctgcctgtacgttcagaccggggtcgccaaacttaccggtccgaaaatagtcgggcagtcacaggg

SEQ ID NO: 146087 - DNA, 75 bp, synthetic construct
  source 1..75: mol_type = other DNA
cggtctgaatctcgaaggtctggaaaactttattcaaactgatgcctccattaaccgcggcaattccggtggtgc

SEQ ID NO: 146088 - DNA, 75 bp, synthetic construct
  source 1..75: mol_type = other DNA
gctgaaatgcgtaaagtgctggcggcaaaaccggccatcattgccctgcaaattgtacgcggcaatgaaagcatc

SEQ ID NO: 146089 - DNA, 75 bp, synthetic construct
  source 1..75: mol_type = other DNA
atttaccggtcaacaacaaacctgttatgttgttaagcctggtgtttgcaccaacatggctggggttgtcgtttt

SEQ ID NO: 146090 - DNA, 75 bp, synthetic construct
  source 1..75: mol_type = other DNA
attcatcattttggcgaacaaattattgatttcgtcgcgggtgatgccacgacagacgttaaagcactggcgttg

SEQ ID NO: 146091 - DNA, 75 bp, synthetic construct
  source 1..75: mol_type = other DNA
gacagctgtacgtccggcaccctttttccttttttacacagccaggtttccggttatctgcggggaagtgacgca

SEQ ID NO: 146092 - DNA, 75 bp, synthetic construct
  source 1..75: mol_type = other DNA
cgttatgaaaatattatcatgcaagaaaatataagttatttcatatctgaagttagttttgaaggcttcaggttg

SEQ ID NO: 146093 - DNA, 75 bp, synthetic construct
  source 1..75: mol_type = other DNA
attgaggatgctaaggctgttgtagaccggaaaaggtgttcacgccgcatccggcattcggtgctcaatgcctga

SEQ ID NO: 146094 - DNA, 75 bp, synthetic construct
  source 1..75: mol_type = other DNA
cagctgactgcgtggccgtgactgccgggaaggataatttggctgcatatttttgtgccgggtgtgatgggaacc

SEQ ID NO: 146095 - DNA, 75 bp, synthetic construct
  source 1..75: mol_type = other DNA
aactctctcggcgccgtttcaggccatcgcatcgattcccggccaggttgccggtcaagcgccactgcccagtct

SEQ ID NO: 146096 - DNA, 75 bp, synthetic construct
  source 1..75: mol_type = other DNA
cttggaatacatcacctttctcaggatataaaaatatttttatagttgatcctgccaataatcttcctttgtttt

SEQ ID NO: 146097 - DNA, 75 bp, synthetic construct
  source 1..75: mol_type = other DNA
ttattcaaatatcatctcatacaaaaatgactttattggattcagggataataacatatttcttctgaatgtaaa

SEQ ID NO: 146098 - DNA, 75 bp, synthetic construct
  source 1..75: mol_type = other DNA
gaaactactatagacctgtgaatacatatcaatggtctggaggagatcttggtcagtatgccagctggctcaact

SEQ ID NO: 146099 - DNA, 75 bp, synthetic construct
  source 1..75: mol_type = other DNA
ttgggaagaaatgacctgcttattcgcaccttccctagtggaattgacaagatccgtcttgtcattaaacgaagt

SEQ ID NO: 146100 - DNA, 75 bp, synthetic construct
  source 1..75: mol_type = other DNA
agcgctttttatttgatgaccagataggtgaatacaccccctttgcggttcatgactcacgcgtcagtacgagtg

SEQ ID NO: 146101 - DNA, 75 bp, synthetic construct
  source 1..75: mol_type = other DNA
actggaggcgtttgactacattctcaaaccgtatcaggagtcacgcattaccgggatgctgcaaaaactggaagc

SEQ ID NO: 146102 - DNA, 75 bp, synthetic construct
  source 1..75: mol_type = other DNA
tgattgcttctgccgttgcgctggcaaccttaacgggtgccgcgcaggcaaaaggccggctggtggtctattgca

SEQ ID NO: 146103 - DNA, 75 bp, synthetic construct
  source 1..75: mol_type = other DNA
caaagatgagatgaacaacgttaaagaaagctcagtcgaatttaactaccttccaaacaatctcgtcaggctaga

SEQ ID NO: 146104 - DNA, 75 bp, synthetic construct
  source 1..75: mol_type = other DNA
ggtgaatatgccgcccggtaatacacaaccgcgcggcgatttcctctatcacagcatttgtaactgggttcagga

SEQ ID NO: 146105 - DNA, 75 bp, synthetic construct
  source 1..75: mol_type = other DNA
cggatagcgactatttttgtcgcgttttccggcgtcagtttggtctgacgccgggagagtatagcgcacgttttc

SEQ ID NO: 146106 - DNA, 75 bp, synthetic construct
  source 1..75: mol_type = other DNA
aatatcattcagccgctggtgttaagtttgctgcatctttgccgcaacgtggtgaatatgccgccgggcaattcg

SEQ ID NO: 146107 - DNA, 75 bp, synthetic construct
  source 1..75: mol_type = other DNA
gtttgctgcatctttgccgcaacgtggtgaatatgccgccgggtaattcgcagccgcgcggcgattttctctatc

SEQ ID NO: 146108 - DNA, 75 bp, synthetic construct
  source 1..75: mol_type = other DNA
ggcacagcgttgcggttttccggatagcgactatttttgtcgcgttttccggcgtcagtttggtctgacgccggg

SEQ ID NO: 146109 - DNA, 75 bp, synthetic construct
  source 1..75: mol_type = other DNA
gtttgctgcatctttgccgtaacgtggtgaatatgccgccgggcaattcgcagccgcgcggcgattttctctatc

SEQ ID NO: 146110 - DNA, 75 bp, synthetic construct
  source 1..75: mol_type = other DNA
cgtctcggtgcgatgctggatcaaaaaaatcgtatcaccattaactactttgccatgcctcctggcacctttggt

SEQ ID NO: 146111 - DNA, 75 bp, synthetic construct
  source 1..75: mol_type = other DNA
cgaggagtgccaggtttaccgtatcgaccactatctgggtaaagaaacggtactgaacctgctggcgctgcgttt

SEQ ID NO: 146112 - DNA, 75 bp, synthetic construct
  source 1..75: mol_type = other DNA
tgaggagtgccaggtataccgtatcgaccattaccttggtaaagaaacggtgctgaacctgttggcgctgcgttt

SEQ ID NO: 146113 - DNA, 75 bp, synthetic construct
  source 1..75: mol_type = other DNA
aatccgctgatggctaaaatgtttaaagcacagtattacagcttaagcggtaaggctggtaatattggaagtgaa

SEQ ID NO: 146114 - DNA, 75 bp, synthetic construct
  source 1..75: mol_type = other DNA
ttggggaacacggtcctgtcagccagcggaaaaaatgtctctctgctcccggacaacagcaacatacaaaaagaa

SEQ ID NO: 146115 - DNA, 75 bp, synthetic construct
  source 1..75: mol_type = other DNA
cactgttaatcctccaaaacaatcaagacagccacgaattagcggaaacagagcaatcacagcagcttactcagc

SEQ ID NO: 146116 - DNA, 75 bp, synthetic construct
  source 1..75: mol_type = other DNA
cacccggattatcggcgtagggcgtgctgactgggataaagcggcatataccaaagttgtccgcgaggcgctcga

SEQ ID NO: 146117 - DNA, 75 bp, synthetic construct
  source 1..75: mol_type = other DNA
atgtccgagaataaattaaacgttatcgatttgcataaacgctacggcgaacacgaagtgctgaaaggggtttca

SEQ ID NO: 146118 - DNA, 75 bp, synthetic construct
  source 1..75: mol_type = other DNA
atccagagctggtaggcgaagttctgcgcattatgcagcaactggcggaagaggggaaaaccatggtggtggtga

SEQ ID NO: 146119 - DNA, 75 bp, synthetic construct
  source 1..75: mol_type = other DNA
aattctttgcatgattgcgatgtctccgccgtctgacctgagcgcagacagcatccgcgatgaaaaagtgaaagt

SEQ ID NO: 146120 - DNA, 75 bp, synthetic construct
  source 1..75: mol_type = other DNA
tcttgaccataaacataacctgcaaatcactaagctggatctgagctattcagaaacctttaatcagacacatct

SEQ ID NO: 146121 - DNA, 75 bp, synthetic construct
  source 1..75: mol_type = other DNA
cgttccaatgtgcgcgaaaaaacggttcgcggacaatacaccgcaggtttcgctcagggcaagaaagttccgggt

SEQ ID NO: 146122 - DNA, 75 bp, synthetic construct
  source 1..75: mol_type = other DNA
ggagtaccatgcccgctatctcgacattcagattgtgttaaaaggtcaggaaggcatgaccttcagcacgcaacc

SEQ ID NO: 146123 - DNA, 75 bp, synthetic construct
  source 1..75: mol_type = other DNA
atgcgaccataccagcgacctcttccggttgcccatgtctttcgccgtgcggagtaccatgcccgctatctcgac

SEQ ID NO: 146124 - DNA, 75 bp, synthetic construct
  source 1..75: mol_type = other DNA
gcatttgatgttagtggttttgatcactccttaagtatccttatgaaccttcagcgtctgaccgttccgtatgag

SEQ ID NO: 146125 - DNA, 75 bp, synthetic construct
  source 1..75: mol_type = other DNA
tgaacatcctgatcattgggcgaaaatttgaagccatcagtgatgtgaaaacatatacggaaatgtgggcttata

SEQ ID NO: 146126 - DNA, 75 bp, synthetic construct
  source 1..75: mol_type = other DNA
tctcgacattcaaattgtgttaaaagggcaggagggcatgacctttagcacgcaacctgcgggtacaccggatac

SEQ ID NO: 146127 - DNA, 75 bp, synthetic construct
  source 1..75: mol_type = other DNA
gttgtgttttatccgggggaagtgcataaaccgctgtgcgcagtgggcgcgccagcccgggttcgcaaagcagta

SEQ ID NO: 146128 - DNA, 75 bp, synthetic construct
  source 1..75: mol_type = other DNA
gtttgccgtactgttggcaacgcttattcatcattttggcgaacaaattattgatttcgtcgcgggtgatgccac

SEQ ID NO: 146129 - DNA, 75 bp, synthetic construct
  source 1..75: mol_type = other DNA
ttggtggtgaagttgccattaaaccagatgaaaccagctttatgacctttagcagtaatatctacgaccaatatg

SEQ ID NO: 146130 - DNA, 75 bp, synthetic construct
  source 1..75: mol_type = other DNA
gacggttatgaaacagcgttagcattagcttcaatgattccacaaatcagaggcgtcactcttggtttatatgca

SEQ ID NO: 146131 - DNA, 75 bp, synthetic construct
  source 1..75: mol_type = other DNA
atcgtgttaaacgaaagtcatcagaaaatggtcgtaagtcagctttcgctcataaagtcaaaaatggtggaaaga

SEQ ID NO: 146132 - DNA, 75 bp, synthetic construct
  source 1..75: mol_type = other DNA
aaatgataagagctttaagcttgatgatatatcatctattcaaaagcagcagcagcagatgaagaagttcaatct

SEQ ID NO: 146133 - DNA, 75 bp, synthetic construct
  source 1..75: mol_type = other DNA
attttatcgcgttctcaattgcggctcttatcaacttacccggaagtgcgctcggctctgcttctacgatcatta

SEQ ID NO: 146134 - DNA, 75 bp, synthetic construct
  source 1..75: mol_type = other DNA
gctgcgcgggtgtttgacgtgctttgcgagttgcgcccggaaccagaagatgagattgccgaagtgttgcttaat

SEQ ID NO: 146135 - DNA, 75 bp, synthetic construct
  source 1..75: mol_type = other DNA
aacacgtatgcggtgtttaacgttcgtggtagtttgcccttcgtaggcagcatccggcagtcggcgcataatgcc

SEQ ID NO: 146136 - DNA, 75 bp, synthetic construct
  source 1..75: mol_type = other DNA
gcgagttacgcccggaaccagaagatgagattgccgaagtgttgcttaataacacgtatgcagtgtttaacgtgc

SEQ ID NO: 146137 - DNA, 75 bp, synthetic construct
  source 1..75: mol_type = other DNA
cgtgaccgttaccgttataacgaatggggcgaactgacagagcgcagggaccagcaactggagtggaacgcgcag

SEQ ID NO: 146138 - DNA, 75 bp, synthetic construct
  source 1..75: mol_type = other DNA
cgtgacagtctgcaccgtcaggtgatgcgcacgcagggggcgctgacgacgttcagcggctacaacgccgacaac

SEQ ID NO: 146139 - DNA, 75 bp, synthetic construct
  source 1..75: mol_type = other DNA
acaaaacggtgaaaactacctacagattaattttggctctcagcgctactggctggagcgatccaccaaccgaat

SEQ ID NO: 146140 - DNA, 75 bp, synthetic construct
  source 1..75: mol_type = other DNA
aaacctgtatcgattgtcataaaggcattgcccattttccgcctgaaataaaaatggatgacaacgcggcgcatg

SEQ ID NO: 146141 - DNA, 75 bp, synthetic construct
  source 1..75: mol_type = other DNA
tcatgaatttgttagcggcaaaatagacagcgacgataagttcgaatcccatcgtcaggaaatggccgaaacagt

SEQ ID NO: 146142 - DNA, 75 bp, synthetic construct
  source 1..75: mol_type = other DNA
ggcaaacagccaattgttcggttgcagggttatcaaatgcagggcagtgaaaacacgctctacctggcggcaggc

SEQ ID NO: 146143 - DNA, 75 bp, synthetic construct
  source 1..75: mol_type = other DNA
atagcggttgtggttggtggcggcgggttattgctggcgcaaaaagccttacataaaacgtcggatacagcattt

SEQ ID NO: 146144 - DNA, 75 bp, synthetic construct
  source 1..75: mol_type = other DNA
tggctaccgtgactcctggtaccgatcttaccgtcgttgatgccagtggcaaacagccaattgttcggttgcagg

SEQ ID NO: 146145 - DNA, 75 bp, synthetic construct
  source 1..75: mol_type = other DNA
gaaacagtatggaaagaattaaaagcaactgactctgcaacgtgccgtagttgccattcttttgatgccatggat

SEQ ID NO: 146146 - DNA, 75 bp, synthetic construct
  source 1..75: mol_type = other DNA
agcgattaccgattacaccacgggcgcgtttgatgattacgatcgggacgatgtggccgggttgctgaaagacag

SEQ ID NO: 146147 - DNA, 75 bp, synthetic construct
  source 1..75: mol_type = other DNA
aggcacgcgatattgaccagtatctgacatcagagaaaaaggtcgatgactggtttgaagccaagactcgcggtt

SEQ ID NO: 146148 - DNA, 75 bp, synthetic construct
  source 1..75: mol_type = other DNA
cggcgcggcgttaatgatacgttgatcacccgggcgttgcggcaactggattccgccgccgctctgggcgaaggc

SEQ ID NO: 146149 - DNA, 75 bp, synthetic construct
  source 1..75: mol_type = other DNA
atgaaactcattagtaatgatctgcgcgatggcgataagctgccgcatcgccatgtctttaacggcatgggttac

SEQ ID NO: 146150 - DNA, 75 bp, synthetic construct
  source 1..75: mol_type = other DNA
tctgggggttccggttaaaggggtaatgtgttctcaggtggggttggttaaactggggcgtcagttgattgaatg

SEQ ID NO: 146151 - DNA, 75 bp, synthetic construct
  source 1..75: mol_type = other DNA
actgattacccttcgccgacaaaatgcgctcaattatcagcagtatctggaacgtatccgcgatttgtgtaaaca

SEQ ID NO: 146152 - DNA, 75 bp, synthetic construct
  source 1..75: mol_type = other DNA
ccttgtgtgagccggtaaaagcgccacgcaatacggaagactacatttattatttttgtggtaagtcaggtctga

SEQ ID NO: 146153 - DNA, 75 bp, synthetic construct
  source 1..75: mol_type = other DNA
agttaagagtttcagcggctgaaattggtgttgttttagaaactgaaaacgccggtgaattagaaaaaataaaaa

SEQ ID NO: 146154 - DNA, 75 bp, synthetic construct
  source 1..75: mol_type = other DNA
tggcgagttttttacccttaaccggtgtgctgtgtgtggttctgctggcgatcctcgcggatcagtcgacgatca

SEQ ID NO: 146155 - DNA, 75 bp, synthetic construct
  source 1..75: mol_type = other DNA
gcatatacattgtaggctttaataaagaaaaagtaagaaatcatgaacattttacttttccaaccccattaaaaa

SEQ ID NO: 146156 - DNA, 75 bp, synthetic construct
  source 1..75: mol_type = other DNA
gtagcattctctcaagcaggcctcaaaaaaggatttaatgatacaagaggaactttgttttttgatatagcaagg

SEQ ID NO: 146157 - DNA, 75 bp, synthetic construct
  source 1..75: mol_type = other DNA
tgctgatgccgtagaggctttgcctgaaagtattcgtaagaatcaggaagccatggccgaaaccatcgaaaataa

SEQ ID NO: 146158 - DNA, 75 bp, synthetic construct
  source 1..75: mol_type = other DNA
aaatgcagcgttatgaacaactgagtcagcacggggctgacagctggagaatcctgccgggagcaccgttatatg

SEQ ID NO: 146159 - DNA, 75 bp, synthetic construct
  source 1..75: mol_type = other DNA
ttatgttcgcccattgttgcccggtaatatatctttacaagacggacgggtttgttcaaaaccagacgatgggag

SEQ ID NO: 146160 - DNA, 75 bp, synthetic construct
  source 1..75: mol_type = other DNA
cgtctgccggggcagcagcatgatgaggaatcagggctgtactataaccgtcaccggtactacgatccgttgcag

SEQ ID NO: 146161 - DNA, 75 bp, synthetic construct
  source 1..75: mol_type = other DNA
catggcgaagaaaatattgtagacagacaatattcagagttaaaaaataatcacaaacaggaagaaattcaacaa

SEQ ID NO: 146162 - DNA, 75 bp, synthetic construct
  source 1..75: mol_type = other DNA
tgtgtttgcccttatgtggctgcagacctggcctctgctgtacgccattctgaacagtgccatgacattctatgc

SEQ ID NO: 146163 - DNA, 75 bp, synthetic construct
  source 1..75: mol_type = other DNA
gtgaacgaggtctatgtcatcgccggtggggaatggttacggaacaacctgaatgccatcgctgcctttattagt

SEQ ID NO: 146164 - DNA, 75 bp, synthetic construct
  source 1..75: mol_type = other DNA
cagcctgctggttaatgtccgtacatcggtgcagattattgataacagtgacctggtcaaagtccatcgggtgga

SEQ ID NO: 146165 - DNA, 75 bp, synthetic construct
  source 1..75: mol_type = other DNA
cggcacaacgtgatggatttgctgggctgggtggccgtgtttgtgcttatcagcctgctggttaatgtccgcgca

SEQ ID NO: 146166 - DNA, 75 bp, synthetic construct
  source 1..75: mol_type = other DNA
aaaggaatggagagcgtaccttcgggtggtggcagccaggatattattgctgaccatcaggggcatcaggccatt

SEQ ID NO: 146167 - DNA, 75 bp, synthetic construct
  source 1..75: mol_type = other DNA
gacggcgatgggtcaggcaaatgcgctggcggtgctggctgtgggggataaaggctgcttcctcaatgcgccgga

SEQ ID NO: 146168 - DNA, 75 bp, synthetic construct
  source 1..75: mol_type = other DNA
atgcgaagcagaatggtgcaccggtggtgctctcggaaatttcacagatacagctgaaatactccgatctggctt

SEQ ID NO: 146169 - DNA, 75 bp, synthetic construct
  source 1..75: mol_type = other DNA
ccccgttgtcatggatgatggtaaaaggccttggcgcaggtttttccagcgtgtacagccacttcgcctcttcct

SEQ ID NO: 146170 - DNA, 75 bp, synthetic construct
  source 1..75: mol_type = other DNA
ccagacctggccgttgctgtatgccattctgaacagtgccatgacattctatgcaaagcagaatggtgcaccggt

SEQ ID NO: 146171 - DNA, 75 bp, synthetic construct
  source 1..75: mol_type = other DNA
ggtggttatcgatcacaacgtggggcgggcgtcattaccgatggtcatctgctacacgcaggcagcagtagcctc

SEQ ID NO: 146172 - DNA, 75 bp, synthetic construct
  source 1..75: mol_type = other DNA
aagggattcttgcgtgtcgattattcaaaaaaacacccgccaattgcggatcgtgttaatgcagttaaccgaatg

SEQ ID NO: 146173 - DNA, 75 bp, synthetic construct
  source 1..75: mol_type = other DNA
agcgcgccgccgagggccgccgcctgatggtgctggacacgctgcgccggttccacatcgaggaagaaaacgcca

SEQ ID NO: 146174 - DNA, 75 bp, synthetic construct
  source 1..75: mol_type = other DNA
ccgacggatggttacgtaggcaaggacaaggcccggcaacaaattagcggttatatcctgaattattacaatagc

SEQ ID NO: 146175 - DNA, 75 bp, synthetic construct
  source 1..75: mol_type = other DNA
agaatccgtatcttcgagtgcccacacagattgtctgataaattgttaaagagcagtgccacttcgctttttctc

SEQ ID NO: 146176 - DNA, 75 bp, synthetic construct
  source 1..75: mol_type = other DNA
agttttttatccgtcatcagaaaaagctggaacgtttgacgtcgattgctattaccttgccgggaattattgata

SEQ ID NO: 146177 - DNA, 75 bp, synthetic construct
  source 1..75: mol_type = other DNA
attgccggtgagagcaatatttttgctgactgggcggcttcccggcagggatgtaccgttggcggtaaatctgac

SEQ ID NO: 146178 - DNA, 75 bp, synthetic construct
  source 1..75: mol_type = other DNA
ccactttcactgacgacccgtatcgggcatgcgatggtggcaggttatgagatggtgttcgctcagcctgacagc

SEQ ID NO: 146179 - DNA, 75 bp, synthetic construct
  source 1..75: mol_type = other DNA
actacgttcagaactgcgtgctgggtgatatttacctgaaccacaaatacacgctggaagacctgatggtggctg

SEQ ID NO: 146180 - DNA, 75 bp, synthetic construct
  source 1..75: mol_type = other DNA
caatgtaccggtcgggctggcgatgccactttcactgacgacccgtatcgggcatgcaatggtggccggctatga

SEQ ID NO: 146181 - DNA, 75 bp, synthetic construct
  source 1..75: mol_type = other DNA
ccgccccagcccgctgcggggcgtttatgacagcaataataatttcgtgacctgtaaggacgcgtcggtttcgct

SEQ ID NO: 146182 - DNA, 75 bp, synthetic construct
  source 1..75: mol_type = other DNA
ccactttcactgacgacccgtatcggacatgcgatggtggccggctatgagatgatattcacccagccggacagt

SEQ ID NO: 146183 - DNA, 75 bp, synthetic construct
  source 1..75: mol_type = other DNA
ataaagaaaaggagtctcaagaacgagtgccgggggctgacagtcctgaagaactgatgaagaaggcaaaaaaat

SEQ ID NO: 146184 - DNA, 75 bp, synthetic construct
  source 1..75: mol_type = other DNA
agacatgcgaggaggcctcacgggatctgaaatcggctctcgcgctggatactcagacaggcggtaaaacctgga

SEQ ID NO: 146185 - DNA, 75 bp, synthetic construct
  source 1..75: mol_type = other DNA
tcatttaaatttgttaagtaaatttaacatatcagaggatgatttattacatgatgcctgcataaacatatcggt

SEQ ID NO: 146186 - DNA, 75 bp, synthetic construct
  source 1..75: mol_type = other DNA
agcggtcgtgatgcgaatggcctcaagactggaagttcctcaaccagatgaagcgcatagtgtggaatatcgggt

SEQ ID NO: 146187 - DNA, 75 bp, synthetic construct
  source 1..75: mol_type = other DNA
acggcccgacaaattttatggcgcgatatcccaacgccgttcgtgctacgcgagcaaattgttgcgctggtgcgt

SEQ ID NO: 146188 - DNA, 75 bp, synthetic construct
  source 1..75: mol_type = other DNA
ggcatgcaatggtggccagttacgagatgatcttcacgcaaccggacagcgtcacctacagcaaaacggggatgc

SEQ ID NO: 146189 - DNA, 75 bp, synthetic construct
  source 1..75: mol_type = other DNA
gggtgtacttccggagacattgcggatgcttttgcaggttactcacggcagcgcgttctgcagtcagcaagcaag

SEQ ID NO: 146190 - DNA, 75 bp, synthetic construct
  source 1..75: mol_type = other DNA
ggcggcattccgtgaaagccactcccagcaagagcgaaacaattttctggcgcgtcgtgagcggtgcttacggaa

SEQ ID NO: 146191 - DNA, 75 bp, synthetic construct
  source 1..75: mol_type = other DNA
atggataaaaatacccctgcttactggagtctgtcacttgataccgaatgtcccaaatgtggtcacaatttcgat

SEQ ID NO: 146192 - DNA, 75 bp, synthetic construct
  source 1..75: mol_type = other DNA
actggaaaagcatataatatagacccattaatattaaaagcaattgcatggaacgaatcaaaaaacaaaaacgga

SEQ ID NO: 146193 - DNA, 75 bp, synthetic construct
  source 1..75: mol_type = other DNA
caccaaatgcagtagaactcagaagacaatatgcaatgaaaatatataaaacatacactaaattaaaaaacaatg

SEQ ID NO: 146194 - DNA, 75 bp, synthetic construct
  source 1..75: mol_type = other DNA
acggtgtttacggaaaagcagtaagcgggctgcatcaggtgaagagtggtatctgtcagggaattacgtgggggc

SEQ ID NO: 146195 - DNA, 75 bp, synthetic construct
  source 1..75: mol_type = other DNA
tttcccgcgtcaccgaatctgcggcgctggctggctacaaatggttaggacgcggcgataaaaacaccgctgacg

SEQ ID NO: 146196 - DNA, 75 bp, synthetic construct
  source 1..75: mol_type = other DNA
ttggtggtggagttggtgtcagaggcggatttaagggaagtcttgatcgaacggatgatgattcacattctgcaa

SEQ ID NO: 146197 - DNA, 75 bp, synthetic construct
  source 1..75: mol_type = other DNA
gaaggcgcataatatcagtaatgagcaggcgactcaggaactggcatcaacaggttctaagttctcgtatggcgg

SEQ ID NO: 146198 - DNA, 75 bp, synthetic construct
  source 1..75: mol_type = other DNA
atgccggatgaagcgtttttgccgcatccggtagtcccgaaacgtgcgggggcacccccgcacacatcaataatc

SEQ ID NO: 146199 - DNA, 75 bp, synthetic construct
  source 1..75: mol_type = other DNA
caaaggcgacaacgaagagaatcgtcgcattggcgagcaggagctggcacgctgcaaagcaatgggcatcgaagc

SEQ ID NO: 146200 - DNA, 75 bp, synthetic construct
  source 1..75: mol_type = other DNA
accggtattaccaaaggcgatctgctggaaggtattagccgcaaaggcaatatcgcgactaccgaaacgctgctg

SEQ ID NO: 146201 - DNA, 75 bp, synthetic construct
  source 1..75: mol_type = other DNA
ggccattattgagcaaagaacgcaggacagtaatatccgtaatgatgtaaaacatcaggttgataatatggtcac

SEQ ID NO: 146202 - DNA, 75 bp, synthetic construct
  source 1..75: mol_type = other DNA
tgaacagtgccagggaatggacgttatcagccttgatgatatgcggcggcgaatcaatgccagtccggacgacaa

SEQ ID NO: 146203 - DNA, 75 bp, synthetic construct
  source 1..75: mol_type = other DNA
agcggtcgtgatgcggatggcctcgaggctggaggtgccacagcctgatgaggcgcatagcgtggaatatcgggt

SEQ ID NO: 146204 - DNA, 75 bp, synthetic construct
  source 1..75: mol_type = other DNA
cgccagtgcggcaggcagtgtggttgacggtaattactcctacggcaacatgcagacggaaaacgtgaacggctt

SEQ ID NO: 146205 - DNA, 75 bp, synthetic construct
  source 1..75: mol_type = other DNA
tgccctgcatggtttcagcagcagtattgccagtgcctggaactcgctcagtcagtttggttctaaccgggggag

SEQ ID NO: 146206 - DNA, 75 bp, synthetic construct
  source 1..75: mol_type = other DNA
tatgacagcaataataatttcgtaacctgtaaggacgcgtcggtttcgctgaaagacaagctgaatctggacaca

SEQ ID NO: 146207 - DNA, 75 bp, synthetic construct
  source 1..75: mol_type = other DNA
taaggacgcatccgtcggactgaaggataagctgaattttgatacgaataccggaggtaagacctggcattatta

SEQ ID NO: 146208 - DNA, 75 bp, synthetic construct
  source 1..75: mol_type = other DNA
tttccggggcggttcagaatggtgcaccggtggtgctttcggaaatttcacagatacagctgaaatactccgatc

SEQ ID NO: 146209 - DNA, 75 bp, synthetic construct
  source 1..75: mol_type = other DNA
cctggcgtgaatcccgtagcgatatcggtaaaggaatggagagcgtaccttcgggtggtggcagccaggatatta

SEQ ID NO: 146210 - DNA, 75 bp, synthetic construct
  source 1..75: mol_type = other DNA
tgagacgcgtggccaaccccgggatgtcgtgttccatagcgaccagggaagccagtatacaggccttaaatatca

SEQ ID NO: 146211 - DNA, 75 bp, synthetic construct
  source 1..75: mol_type = other DNA
tgggcaggaaatcgctggtgctatctggcggttgttatggatctttttgcccgcagggttatcggctggagtctg

SEQ ID NO: 146212 - DNA, 75 bp, synthetic construct
  source 1..75: mol_type = other DNA
ggtgccaaccgatggctatacaggcaaagacgtggcccggcagcaaatcagcagttatattctgaattattacaa

SEQ ID NO: 146213 - DNA, 75 bp, synthetic construct
  source 1..75: mol_type = other DNA
atatccgtaatgatgtaaaacatcaggttgataatatggtcacagaatatcgtggcaatatcggagatactcaga

SEQ ID NO: 146214 - DNA, 75 bp, synthetic construct
  source 1..75: mol_type = other DNA
caggaaatggcccgggaggcgtcgaacagagcagaaagtgccctgcatggtttcagcagcagtattgccagtgcc

SEQ ID NO: 146215 - DNA, 75 bp, synthetic construct
  source 1..75: mol_type = other DNA
gagaggttctgcggggatgtatggcgatgctcatgctgaatggggggttaaacctggaattcttggtgttggtgg

SEQ ID NO: 146216 - DNA, 75 bp, synthetic construct
  source 1..75: mol_type = other DNA
aacgacagaaattaatgccaacaccgtctgaagatgcgttagaacagatggtggatgataagaaagaacgattga

SEQ ID NO: 146217 - DNA, 75 bp, synthetic construct
  source 1..75: mol_type = other DNA
aagaacgcaggacagtaatatccgtaatgatgtaaaacatcaggttgataatatggtcacagaatataaagggaa

SEQ ID NO: 146218 - DNA, 75 bp, synthetic construct
  source 1..75: mol_type = other DNA
accgggggagcagtgattctgtcaccggtggtgctgacagcacgatgagcgcacaggactccatgatggccagcc

SEQ ID NO: 146219 - DNA, 75 bp, synthetic construct
  source 1..75: mol_type = other DNA
caaccgcaggttatctctcagcgatgatcccccctctttcgtggatgatggtacgaggccttggtgccggatttt

SEQ ID NO: 146220 - DNA, 75 bp, synthetic construct
  source 1..75: mol_type = other DNA
atgccatcctgaacagcgccatgacgttctatgcgaaacagagtggtactccggttgtgctgtcagaaatctcac

SEQ ID NO: 146221 - DNA, 75 bp, synthetic construct
  source 1..75: mol_type = other DNA
tgacgcagaccatcctgacggggatcgccatcggtattttcccgctcctggtactggcggctgtcttcaacaaac

SEQ ID NO: 146222 - DNA, 75 bp, synthetic construct
  source 1..75: mol_type = other DNA
cgcagtgcggtggaaagctatgcgaaggcgcacaatatcagtaatgaacaggcgacaagagaactggcatcaaga

SEQ ID NO: 146223 - DNA, 75 bp, synthetic construct
  source 1..75: mol_type = other DNA
ccatgaatatgctgaaatggcatcccgtactgagagtatgagtgggcagatgagtgaagatctgtcgcaacagtt

SEQ ID NO: 146224 - DNA, 75 bp, synthetic construct
  source 1..75: mol_type = other DNA
gcagtattgccagcgcatggaacacgctcagccagtttggttctaaccggggcagcagtgacagcgtcaccggtg

SEQ ID NO: 146225 - DNA, 75 bp, synthetic construct
  source 1..75: mol_type = other DNA
tcagcgcatgccgataccgcactgataagcagtgccctgcggatggcctatgagacgcgtggccaaccccgggat

SEQ ID NO: 146226 - DNA, 75 bp, synthetic construct
  source 1..75: mol_type = other DNA
aacggagggctgacgccggaagagtcagagaacagataccatttttactgtaaaaccgtggccaatattacttga

SEQ ID NO: 146227 - DNA, 75 bp, synthetic construct
  source 1..75: mol_type = other DNA
caggcctcaccattacaacggtgggttgacgccggaagagtcagagaacagataccgtttttactgtaaaaccgt

SEQ ID NO: 146228 - DNA, 75 bp, synthetic construct
  source 1..75: mol_type = other DNA
aagccctttgtttatacgaagaagataaacaaaggattgctttttaaccttgttaattctttgagagatttaatc

SEQ ID NO: 146229 - DNA, 75 bp, synthetic construct
  source 1..75: mol_type = other DNA
ggttcaatttattaagggaatgagtaagccctttgtttatacgaagaagataaacaaaggattactttttaactt

SEQ ID NO: 146230 - DNA, 75 bp, synthetic construct
  source 1..75: mol_type = other DNA
gagtctgaagaacgaatggatgccggtggtgggttacgtaagcttcagcgaggcagctcacgccataacggacta

SEQ ID NO: 146231 - DNA, 75 bp, synthetic construct
  source 1..75: mol_type = other DNA
ccgggctgaaacgggtggtgaaaaaagaactggcggacggcagcgtcacgcacagcgggtatgacgcggcaggaa

SEQ ID NO: 146232 - DNA, 75 bp, synthetic construct
  source 1..75: mol_type = other DNA
ctacaatagcgtcaggccccaccattacaacggtgggctgacgccggaagagtcagagaacagatatcgttctta

SEQ ID NO: 146233 - DNA, 75 bp, synthetic construct
  source 1..75: mol_type = other DNA
gatgagccgttaccgtgccgggcgtctgatgaaatatctgaacctgagcagttgtcagcccggaaaacatcagta

SEQ ID NO: 146234 - DNA, 75 bp, synthetic construct
  source 1..75: mol_type = other DNA
cctggttggtcgggcaacggctatctggatgagtttcgataagcaagaaggcgaatggccgacaggcgtacgctt

SEQ ID NO: 146235 - DNA, 75 bp, synthetic construct
  source 1..75: mol_type = other DNA
gaacgtaaagagacgctgggtgatgtgacacatcgcattctgactgtgccaatcgcgcaggatcaggttgggatg

SEQ ID NO: 146236 - DNA, 75 bp, synthetic construct
  source 1..75: mol_type = other DNA
taacgcatcgtatcctgaccgtgccgattgcgcaggatcaggtggggatgtattaccagcaaccaggacaacaac

SEQ ID NO: 146237 - DNA, 75 bp, synthetic construct
  source 1..75: mol_type = other DNA
gcactaagaccgcacgaatataacggtgggttacccccaaacgaatcggaaaatcgatactggaaaaactctaac

SEQ ID NO: 146238 - DNA, 75 bp, synthetic construct
  source 1..75: mol_type = other DNA
atggaaccagagccggggctctgcgctgaaatgctgacccaaaacggcgtcccgatgagccgttatcgtgccgga

SEQ ID NO: 146239 - DNA, 75 bp, synthetic construct
  source 1..75: mol_type = other DNA
gcctggtgttctacacgcggatacagcatggcgagccactggtcgagagccgctacctctacgacccgctgggac

SEQ ID NO: 146240 - DNA, 75 bp, synthetic construct
  source 1..75: mol_type = other DNA
tatctggcggtcgtcgatggactttttgcccgcagggttatcggctggagcctgtcagcgaatgccgatactgca

SEQ ID NO: 146241 - DNA, 75 bp, synthetic construct
  source 1..75: mol_type = other DNA
ggtacagcagggcggctttgacgggcggacgcaacgttatcattatgacctgaccggaaaactcacacagagtga

SEQ ID NO: 146242 - DNA, 75 bp, synthetic construct
  source 1..75: mol_type = other DNA
cgtttcgggcggacgctgacgtaccggcgtgaggccgcaggcgacctggccggggaaatcaccggcgtgacggac

SEQ ID NO: 146243 - DNA, 75 bp, synthetic construct
  source 1..75: mol_type = other DNA
atttaggcataagtgtattgggtaacggtggaggggttggtctccaggccggagctaaggcaagcattgatggca

SEQ ID NO: 146244 - DNA, 75 bp, synthetic construct
  source 1..75: mol_type = other DNA
gaacgaattcccggggcagatactccggatgagttgctgaagaaggccaaagagtatcaagatagaaatagttag

SEQ ID NO: 146245 - DNA, 75 bp, synthetic construct
  source 1..75: mol_type = other DNA
atcaatgcaacgcgtcagattgcagcggcacaacaggaaatggcccgggaggcgtcgaacagagcagaaagtgcc

SEQ ID NO: 146246 - DNA, 75 bp, synthetic construct
  source 1..75: mol_type = other DNA
cgcaacagtttgcacagtatgtgatgaaacacgcgccgcaggatgcagaagctattctgacaaacaccagttcac

SEQ ID NO: 146247 - DNA, 75 bp, synthetic construct
  source 1..75: mol_type = other DNA
gcagcggcacaacaggaaatggcccgggaagcatcgaacagagcagaaagtgccctgcatgggttcagcagcagt

SEQ ID NO: 146248 - DNA, 75 bp, synthetic construct
  source 1..75: mol_type = other DNA
gctatgtgtttgccctgatgtggctgcagtcatggccaatgttgtacgccattctgaacagcgccatgacatttt

SEQ ID NO: 146249 - DNA, 75 bp, synthetic construct
  source 1..75: mol_type = other DNA
acagcatccgcggcgaggaaagtattgtaataggacagtattctgaactgcaaaatcaccataaaacagaggcat

SEQ ID NO: 146250 - DNA, 75 bp, synthetic construct
  source 1..75: mol_type = other DNA
cttcagcgaggcagctcacgccataacggattatatcgttggatattacagcgcactaagaccgcacgaatataa

SEQ ID NO: 146251 - DNA, 75 bp, synthetic construct
  source 1..75: mol_type = other DNA
tcaacctggatgcagttccggtcaggcgtgtgaaaacgcgctaccggtaacgtattccaacgtggagccgagcga

SEQ ID NO: 146252 - DNA, 75 bp, synthetic construct
  source 1..75: mol_type = other DNA
ttcctctatcagcccgaccgccagtgcggcaggcagtgtggttgacggtaattactcctacggcaacatgcagac

SEQ ID NO: 146253 - DNA, 75 bp, synthetic construct
  source 1..75: mol_type = other DNA
cagtctgctggttaatgtccgcacatcggtgcagattattgataacagtgacctggttcaggtccatcgtgtgga

SEQ ID NO: 146254 - DNA, 75 bp, synthetic construct
  source 1..75: mol_type = other DNA
aacagcgtctggcgcatgtagccattggtcatgtgctgatgcgaaacctgccgatggtgcagaccattctggtgg

SEQ ID NO: 146255 - DNA, 75 bp, synthetic construct
  source 1..75: mol_type = other DNA
ccagtaagaccagtccggttgcgccctttgaaccagaagtcaaacgtcaggctgtgtgggacgccctctgttatt

SEQ ID NO: 146256 - DNA, 75 bp, synthetic construct
  source 1..75: mol_type = other DNA
ggctgctggagcgccattgaaatcaatgacgcattcgcaactctacgtgtcctcaatagccgtgctatatggcac

SEQ ID NO: 146257 - DNA, 75 bp, synthetic construct
  source 1..75: mol_type = other DNA
tctgtacagcggtcatgcgcccacacccctgaccgcacgcggtattgagcaagcgcaaaatctgcatacactgct

SEQ ID NO: 146258 - DNA, 75 bp, synthetic construct
  source 1..75: mol_type = other DNA
tgcacaggaacacctgcgggttgtaaaccttggtgctactgcgattggtacctgtgttaccgctcacccggatta

SEQ ID NO: 146259 - DNA, 75 bp, synthetic construct
  source 1..75: mol_type = other DNA
acagtgaagatctcatcgctgccacaagcgactgtggtgcatacgttgcacttagttcggccatgaagagcctct

SEQ ID NO: 146260 - DNA, 75 bp, synthetic construct
  source 1..75: mol_type = other DNA
gctgtttactgtcagtgcgggtgggcagccagcctattcacaggattttacgccactgccgccggatattcgtca

SEQ ID NO: 146261 - DNA, 75 bp, synthetic construct
  source 1..75: mol_type = other DNA
tcgccgatcagcaagcctttgctgaagccttggcttccgccgacattttaaccaatggcacaaaagtgggtatga

SEQ ID NO: 146262 - DNA, 75 bp, synthetic construct
  source 1..75: mol_type = other DNA
aatacgccaccggcagatggagctggatattctgaaaaaagcggaggaaatcataaaaaagatccgggcatcagt

SEQ ID NO: 146263 - DNA, 75 bp, synthetic construct
  source 1..75: mol_type = other DNA
taacggagtaccgccttccatgccgctaacgcggcataaatctctgttcctcagtgaaacaaaaaaacatgctga

SEQ ID NO: 146264 - DNA, 75 bp, synthetic construct
  source 1..75: mol_type = other DNA
tcgcgatttgatgcaagaagatgctgaaaattacagcgcgtggtgcgatgactggcagcataccatcccgactaa

SEQ ID NO: 146265 - DNA, 75 bp, synthetic construct
  source 1..75: mol_type = other DNA
gagaaacgcaagcgaatgtcgatggtttatatagtggtcatgcgccaacgccactgaccgcgcgcggtgtcgagc

SEQ ID NO: 146266 - DNA, 75 bp, synthetic construct
  source 1..75: mol_type = other DNA
taaaaatgcgcggaaccggtgtttcgatgccaaacaaacaactggcgtgtgaatatgttgatgaattaacacctg

SEQ ID NO: 146267 - DNA, 75 bp, synthetic construct
  source 1..75: mol_type = other DNA
ggacgatagccctggcgtgtccggcggaacaatcgacagcagccgatttgccgttgacgctggcaattgctcgcg

SEQ ID NO: 146268 - DNA, 75 bp, synthetic construct
  source 1..75: mol_type = other DNA
tgaatggttgggattgaccgtatttgaacattgttggcaggacgccgacaatatcggatttgtcagttttgttgc

SEQ ID NO: 146269 - DNA, 75 bp, synthetic construct
  source 1..75: mol_type = other DNA
gggcggcgtattaattgcgctgcgaatcaaaggcgaaggcgagtcggagatgctgggcttttacgaagctatgca

SEQ ID NO: 146270 - DNA, 75 bp, synthetic construct
  source 1..75: mol_type = other DNA
cctactttctattgctaccgcagtttatcagcgggcagatcaatttaggtgggctgatgaaatcacgtcaggcat

SEQ ID NO: 146271 - DNA, 75 bp, synthetic construct
  source 1..75: mol_type = other DNA
caatttatcaatgctcaggcggcgcgtgttttgcgtctggacgcgacggcaagtcagggcaaggcgatcactgaa

SEQ ID NO: 146272 - DNA, 75 bp, synthetic construct
  source 1..75: mol_type = other DNA
gtcacaggcggtcgcattcaggaaatgtcggctttacttggaatcggccgcactacgctgtggcggaaaatgaag

SEQ ID NO: 146273 - DNA, 75 bp, synthetic construct
  source 1..75: mol_type = other DNA
atgagtcttttgaatgaagttcagaaattcattgaagcccatccggggtgtacttccggagacattgcagatgct

SEQ ID NO: 146274 - DNA, 75 bp, synthetic construct
  source 1..75: mol_type = other DNA
tgaaagacctgattgcttacctcgaagagaagccggaaatggcggaacatctggcggcggttaaggcctatcgcg

SEQ ID NO: 146275 - DNA, 75 bp, synthetic construct
  source 1..75: mol_type = other DNA
ggaacagtgaagatctcatcgctgccacaagcgactgtggtgcatatgttgcactcagttcggccatgaagagcc

SEQ ID NO: 146276 - DNA, 75 bp, synthetic construct
  source 1..75: mol_type = other DNA
atgctcaatggtgaagtccctgaccttgagttgggcggcgtattgattgcgctgcgtatcaaaggagaaggggaa

SEQ ID NO: 146277 - DNA, 75 bp, synthetic construct
  source 1..75: mol_type = other DNA
acagaaaccattttcgaactgatgggtattacgccaacgttgcacggcgggcaggcgcaggcgaagctcgacgaa

SEQ ID NO: 146278 - DNA, 75 bp, synthetic construct
  source 1..75: mol_type = other DNA
cagtggattgagcgttgccttgctggcagcgaaccgattcccgaatcgctgaaaatccagatggcttgctgcctg

SEQ ID NO: 146279 - DNA, 75 bp, synthetic construct
  source 1..75: mol_type = other DNA
caggcggcgaaagtgaaaaaaggcgaagccatgcccgttaccgtgacggtgaaagacagcgccgggaatacggtg

SEQ ID NO: 146280 - DNA, 75 bp, synthetic construct
  source 1..75: mol_type = other DNA
ttcagccgttatctggttcggctgttacgctgagtgaaagcggtaataccattagtggcatgacaggcgcggatg

SEQ ID NO: 146281 - DNA, 75 bp, synthetic construct
  source 1..75: mol_type = other DNA
acgtttgaggtcagccaaaacggcagttatgggttcgcaatcccgctcactgcaacattgatgcgcgacacctca

SEQ ID NO: 146282 - DNA, 75 bp, synthetic construct
  source 1..75: mol_type = other DNA
acgacgccgattgttaaggcaagccaaattgttcttgaagctgcagaccccacaaaatttgaccgtatgaataat

SEQ ID NO: 146283 - DNA, 75 bp, synthetic construct
  source 1..75: mol_type = other DNA
ggttgtggtcaatggtggcctggcggacgaaacttcgcttaataataccgctgcagcatacagcgccataaccgg

SEQ ID NO: 146284 - DNA, 75 bp, synthetic construct
  source 1..75: mol_type = other DNA
tctcaaacgtgaaggatcgacaaatcgccagaatgtacagatggggaacagaactatcaccgtaatcaacgccgc

SEQ ID NO: 146285 - DNA, 75 bp, synthetic construct
  source 1..75: mol_type = other DNA
tttaccagtatccctttatttaaagatgaaatggtgttagtcgccagcaagaatcatccgagtattaaagggcca

SEQ ID NO: 146286 - DNA, 75 bp, synthetic construct
  source 1..75: mol_type = other DNA
tcgcaaacgcatctggtcgctattgcgccgcgttggctggctgaagagttcgctgaatccttagagttacaggta

SEQ ID NO: 146287 - DNA, 75 bp, synthetic construct
  source 1..75: mol_type = other DNA
taccacctcacactggacacagccaaagaactggcgataccattcccgccaggcccacttacaacagtaaaattc

SEQ ID NO: 146288 - DNA, 75 bp, synthetic construct
  source 1..75: mol_type = other DNA
ttgtggaaggagctgccatcgacctccggggtaaataaaaccaataacaataatgaggactggccctatttttcg

SEQ ID NO: 146289 - DNA, 75 bp, synthetic construct
  source 1..75: mol_type = other DNA
gtcaatctcagttcaggcaccagttcgataattccatctgccacaaaagaactgcttacctgccagacgacgccg

SEQ ID NO: 146290 - DNA, 75 bp, synthetic construct
  source 1..75: mol_type = other DNA
aacaaaatagcagaacctgttacctctcctggcatgaggcagccgggcgtgataaaggtcatcaatggatggaag

SEQ ID NO: 146291 - DNA, 75 bp, synthetic construct
  source 1..75: mol_type = other DNA
aacagccaggacgtgatgcaagcggtgctggatttccgcgttgatattggctttattgaaggaccgtgccacagc

SEQ ID NO: 146292 - DNA, 75 bp, synthetic construct
  source 1..75: mol_type = other DNA
actgaaatcatctcagaaccgtggctggaagacgagctggtggttttcgccgcgccgacttcgccattggctcgt

SEQ ID NO: 146293 - DNA, 75 bp, synthetic construct
  source 1..75: mol_type = other DNA
tcagtatatgtttgattttggcctgcgtccttcactggcttacgttcagtccagagggatggatgttaaaggtgg

SEQ ID NO: 146294 - DNA, 75 bp, synthetic construct
  source 1..75: mol_type = other DNA
tatacgtaaacataacgaaccttcccagtgtcacgaacggtgcaatagtgatccacacccaacgcctgaaatcag

SEQ ID NO: 146295 - DNA, 75 bp, synthetic construct
  source 1..75: mol_type = other DNA
ctcactccaatagatgttttttattatgcacatgcaggactcaacataaactatcattactcatcatatggtgat

SEQ ID NO: 146296 - DNA, 75 bp, synthetic construct
  source 1..75: mol_type = other DNA
ttagttgcctgtcgcgacgggtaattgaagatcaattacaggctggcacattaagtgaagttgctgtccctctac

SEQ ID NO: 146297 - DNA, 75 bp, synthetic construct
  source 1..75: mol_type = other DNA
caacacgttgatccattagggcttagtactatgataataggtaacggccccgttcctgataatccttttgggcat

SEQ ID NO: 146298 - DNA, 75 bp, synthetic construct
  source 1..75: mol_type = other DNA
gcgcaccaggggagtagcgcattacatgatgctattggctggccagtgtcgaggttctatatctcgaataccgtt

SEQ ID NO: 146299 - DNA, 75 bp, synthetic construct
  source 1..75: mol_type = other DNA
tcggtaccctggtggaagagggggaggcctggtctacgttcccgtcgggcctggctaacgatacctcgataaatg

SEQ ID NO: 146300 - DNA, 75 bp, synthetic construct
  source 1..75: mol_type = other DNA
taggcagagaatcgctaaaaatattgcatgttttgtggttgggatactacagctatttggtgtgcactataatat

SEQ ID NO: 146301 - DNA, 75 bp, synthetic construct
  source 1..75: mol_type = other DNA
aaaaatgggctagagtggctcaggaaatgtataagactaggtctgatatagctcatggttcttggtccgtgtatc

SEQ ID NO: 146302 - DNA, 75 bp, synthetic construct
  source 1..75: mol_type = other DNA
cgtctcgaaggtgtcgagagccccttggtgacgcttactgccgctgaggctttggtgcgccttgaagagctaagg

SEQ ID NO: 146303 - DNA, 75 bp, synthetic construct
  source 1..75: mol_type = other DNA
agcgttccgcgcgccgtttgctagtccgagattatgtactctccctttctgcacggctgcctgccggggaggtga

SEQ ID NO: 146304 - DNA, 75 bp, synthetic construct
  source 1..75: mol_type = other DNA
accgaaacaatttaccgatatattctccggataaggatcgcatcgccgatgaataccggaaaattgcccaacata

SEQ ID NO: 146305 - DNA, 75 bp, synthetic construct
  source 1..75: mol_type = other DNA
cgatggtgcagcacaggaaatgaattcagtttctcagcaaagcacacgctgtaaagatccagttatgcactatgt

SEQ ID NO: 146306 - DNA, 75 bp, synthetic construct
  source 1..75: mol_type = other DNA
tcaccaaaggatacacttggtcggttcttgactgcattgttcaacaagagaagcttcaaccggcttgggtgcgat

SEQ ID NO: 146307 - DNA, 75 bp, synthetic construct
  source 1..75: mol_type = other DNA
gtggtagcagtcacatgcaaacattggaggttgcccttatggctacgatcctcaccccgtcacacccgcagtttg

SEQ ID NO: 146308 - DNA, 75 bp, synthetic construct
  source 1..75: mol_type = other DNA
cccaccagcagcaccgcaaaccacatcagaagttcccggttgctcgttgttgatccatttcaataaccacggtca

SEQ ID NO: 146309 - DNA, 75 bp, synthetic construct
  source 1..75: mol_type = other DNA
ttgcggtggccagcattgatgcagacggcaacatcacggatttacggccaaaaggtagcctgagcgaacagcagg

SEQ ID NO: 146310 - DNA, 75 bp, synthetic construct
  source 1..75: mol_type = other DNA
accgatctggggacaaaaccaacatcgtcctttgattacggtactaaaacggcgagcacgtttgactatggcacg

SEQ ID NO: 146311 - DNA, 75 bp, synthetic construct
  source 1..75: mol_type = other DNA
ggtaaaagtctggctggatgtgtgctggacagggacgctgaccagtgtctggaatgtgcagagcaaaatcacggt

SEQ ID NO: 146312 - DNA, 75 bp, synthetic construct
  source 1..75: mol_type = other DNA
actaaaaccacgaacaacaccggagcgcatacgcacggtatttctgttggtaacacaggcgcaggtaatggcgtt

SEQ ID NO: 146313 - DNA, 75 bp, synthetic construct
  source 1..75: mol_type = other DNA
tcgtagtgatgttctgccggttggtgttccacttccatggccagcagatattccacctcctggctgggcaattat

SEQ ID NO: 146314 - DNA, 75 bp, synthetic construct
  source 1..75: mol_type = other DNA
aattggcgcacatagtcacacgattagcgtcgccgcgtcgggtaacacagaaacgacagttaagaatattgcatt

SEQ ID NO: 146315 - DNA, 75 bp, synthetic construct
  source 1..75: mol_type = other DNA
acgaagtgattgtccgcgcgggggactatatcgacattggtacgcctcttttgggcggatcggttgtgccggtga

SEQ ID NO: 146316 - DNA, 75 bp, synthetic construct
  source 1..75: mol_type = other DNA
aacagggcggtttaaaagaagcggaactgaaaaccttaatactcgagcaatatcaggctgcgggtattgcgccgg

SEQ ID NO: 146317 - DNA, 75 bp, synthetic construct
  source 1..75: mol_type = other DNA
caccttggggcgatttttaacggcattgcacaacaagataagcttcaaccgcctgggatgcgattatcttttgct

SEQ ID NO: 146318 - DNA, 75 bp, synthetic construct
  source 1..75: mol_type = other DNA
gggcgtacaactgccgctgcgcaatttgccggtggcgatcccgattgatgaaacggatctggtgagtgcctggca

SEQ ID NO: 146319 - DNA, 75 bp, synthetic construct
  source 1..75: mol_type = other DNA
aacagggcgggctaaaagaagcggaactgaaattcttaatcctagagcaatatcaggctgcgggcattgcgcctg

SEQ ID NO: 146320 - DNA, 75 bp, synthetic construct
  source 1..75: mol_type = other DNA
cgcaggcattgatgcaaaccggtttgctgcccgcaggtgttacgcccgaaatcattacgctttctggcggcgtgg

SEQ ID NO: 146321 - DNA, 75 bp, synthetic construct
  source 1..75: mol_type = other DNA
acattcaggtgggccaacgttgcggtcaaacacgcaatcgaaattgaagcggggaatgcgcagacacagcaacgg

SEQ ID NO: 146322 - DNA, 75 bp, synthetic construct
  source 1..75: mol_type = other DNA
ttcggaagtttgatgagattgcttcaagagccagaacagcagcggaacagacctttaggtggattaatgttgctg

SEQ ID NO: 146323 - DNA, 75 bp, synthetic construct
  source 1..75: mol_type = other DNA
ttccgagtgggctggtttgcgagttaaagaccttactggtaatgaaattcttcggaagtttgatgagattgcttc

SEQ ID NO: 146324 - DNA, 75 bp, synthetic construct
  source 1..75: mol_type = other DNA
ttctctgggctacaaatggtggtgttactttgaaaacaactctcaatcaggcttttattatcaataagttaagca

SEQ ID NO: 146325 - DNA, 75 bp, synthetic construct
  source 1..75: mol_type = other DNA
ttgacgaaaaaaacctatgtaatccagcgaagagtagcctcttcagatcgtaatgtcagtgagggtaagaagcca

SEQ ID NO: 146326 - DNA, 75 bp, synthetic construct
  source 1..75: mol_type = other DNA
taagacgaactttcggaagattagcagaagaacttacttcttatgctgtcgttaagaagctgcttaaccaccgca

SEQ ID NO: 146327 - DNA, 75 bp, synthetic construct
  source 1..75: mol_type = other DNA
gtgatcatgagtcttttgaatgaagttcagaaattcattgaagcccatccgggatgtacttccggagacattgcg

SEQ ID NO: 146328 - DNA, 75 bp, synthetic construct
  source 1..75: mol_type = other DNA
agacctgtgcgcaatttctatgtcggcactaacgatccccgggtgattttgtgcctgacccgccaggctgaagaa

SEQ ID NO: 146329 - DNA, 75 bp, synthetic construct
  source 1..75: mol_type = other DNA
atgagtcttttgaatgacgttcagaaattcattgaagcccatccgggctgtacttccggagacattgcggatgct

SEQ ID NO: 146330 - DNA, 75 bp, synthetic construct
  source 1..75: mol_type = other DNA
atggaacgctctattcgtgtaagcggctgcgtgaagccgctatacagcgcggtcacctggttgaaattcttgatc

SEQ ID NO: 146331 - DNA, 75 bp, synthetic construct
  source 1..75: mol_type = other DNA
gtgcctgacccgccaggctgaagaactggagtccaggggcttattccgtcgagctgcaacggtgtggatggaggc

SEQ ID NO: 146332 - DNA, 75 bp, synthetic construct
  source 1..75: mol_type = other DNA
atgagtcttttgaatgaagttcagaaattcattgaagcccatccagggggtacttccggagacattgctgatgct

SEQ ID NO: 146333 - DNA, 75 bp, synthetic construct
  source 1..75: mol_type = other DNA
atcaatctgggcggactgatgaaatcgcgccaggcatttatgctggtatcgaacaatttaagctggtttatttat

SEQ ID NO: 146334 - DNA, 75 bp, synthetic construct
  source 1..75: mol_type = other DNA
gaaagcggtgtgattatggtgacccatcagcctggtgtttgggatctggcggatgatatttgtgacattagcgcg

SEQ ID NO: 146335 - DNA, 75 bp, synthetic construct
  source 1..75: mol_type = other DNA
gcgggtacgctctcattcactgttagtggaacagaatggaatatccatgggtatatggtctataccgtcgcgctt

SEQ ID NO: 146336 - DNA, 75 bp, synthetic construct
  source 1..75: mol_type = other DNA
atgagtcttttcaatgacgttcagaaattcattgaagcccatccggggtgtacttccggagacattgcggatgct

SEQ ID NO: 146337 - DNA, 75 bp, synthetic construct
  source 1..75: mol_type = other DNA
atgagtcttttaaatgacgttcagaaattcattgaagcccatccggggtgtacttccggcgacattgcggatgct

SEQ ID NO: 146338 - DNA, 75 bp, synthetic construct
  source 1..75: mol_type = other DNA
cagcttcggcagcatggcaggcagtaatgccgcatatgaactgaccagcacatacacccccgcaggccagttaca

SEQ ID NO: 146339 - DNA, 75 bp, synthetic construct
  source 1..75: mol_type = other DNA
cgtcgtaacggcgagaaacagttaattaagactggtgacatcgtcgattatctggtgaaacagattaaaggctga

SEQ ID NO: 146340 - DNA, 75 bp, synthetic construct
  source 1..75: mol_type = other DNA
tttggtaacgggtatctggtagccaaaaccggcaatcagttttttgtcacgaaaggcacggggtatgtggctgga

SEQ ID NO: 146341 - DNA, 75 bp, synthetic construct
  source 1..75: mol_type = other DNA
atgatgattttacaacccatggggcgaaaaggtcaggcacctgctcatgtccgtgcgtggacacctgaagaagat

SEQ ID NO: 146342 - DNA, 75 bp, synthetic construct
  source 1..75: mol_type = other DNA
tttttgccagatttcgtggttttcacgttcaacagctcctgcacgttttttgccgtccgttcaccgttaaccccc

SEQ ID NO: 146343 - DNA, 75 bp, synthetic construct
  source 1..75: mol_type = other DNA
atgttgcgcgccgggatgatccgcaagctggcctccgggttatacacctggctgccgaccggcgtgcgcgttctg

SEQ ID NO: 146344 - DNA, 75 bp, synthetic construct
  source 1..75: mol_type = other DNA
gagcgtccgttcgtactcggcccaactcatgaagaagttatcactgacctgattcgtaacgagcttagctcttac

SEQ ID NO: 146345 - DNA, 75 bp, synthetic construct
  source 1..75: mol_type = other DNA
atggaacgctctattcgtgtaagcgactgcgtgaagcggcgttgcagcgcggccacctggttgaaattctcgatc

SEQ ID NO: 146346 - DNA, 75 bp, synthetic construct
  source 1..75: mol_type = other DNA
gattcgtaacgagcttagctcttacaaacagctgccgttgaacttctatcagatccagaccaagttccgcgacga

SEQ ID NO: 146347 - DNA, 75 bp, synthetic construct
  source 1..75: mol_type = other DNA
atgcctactctttccatacttctcaggaatccctgcaggaaacctataatgcaatgtatgcagcctacagtaaaa

SEQ ID NO: 146348 - DNA, 75 bp, synthetic construct
  source 1..75: mol_type = other DNA
gattcgtaatgagctcagctcttacaaacagttgccactgaacttctaccaaatccagacgaaattccgtgacga

SEQ ID NO: 146349 - DNA, 75 bp, synthetic construct
  source 1..75: mol_type = other DNA
agtaatatccgtaatgatgtaaaacatcaggttgataatatggtcacagaatataaagggaatatcggagatact

SEQ ID NO: 146350 - DNA, 75 bp, synthetic construct
  source 1..75: mol_type = other DNA
accaatgccttcccgcgacgcgctggtgcggatctggcaggaagtggcgctggcgcgggaagatgcctccccctg

SEQ ID NO: 146351 - DNA, 75 bp, synthetic construct
  source 1..75: mol_type = other DNA
aaagctccaatcgctccagatattgctaaattttttaagtatactttatcaaaccagattatttctcatgcttcg

SEQ ID NO: 146352 - DNA, 75 bp, synthetic construct
  source 1..75: mol_type = other DNA
ttctcaaactgttaaatgattattataaacaaggcatgactacaaaaaaatactatggtacggatagcggaaatg

SEQ ID NO: 146353 - DNA, 75 bp, synthetic construct
  source 1..75: mol_type = other DNA
ggattaaatcctttgtcgggcaaagcgaaactattgtgccgtggcagatgtggcaacagtcgctggaattaccgg

SEQ ID NO: 146354 - DNA, 75 bp, synthetic construct
  source 1..75: mol_type = other DNA
gccgatgccttcccgcgacgctctggtgcgtatctggcaggaagtggtgctggcgcgagaagatgcttctccttg

SEQ ID NO: 146355 - DNA, 75 bp, synthetic construct
  source 1..75: mol_type = other DNA
ggcgcggcaggcacgttatcaggcatttgcccgcaccttgttgcccggtgaagtgctggtcaccgcgcaacatct

SEQ ID NO: 146356 - DNA, 75 bp, synthetic construct
  source 1..75: mol_type = other DNA
tgaagaatggaatggggtcacaaaaaacaaagaatatgattatcaggatgtattcagtcatgtctgtctgcagtc

SEQ ID NO: 146357 - DNA, 75 bp, synthetic construct
  source 1..75: mol_type = other DNA
aaatgcccccttcagagcaagcggaggaagaggaagatagcgggccgctggatctctctacgccatatcccatca

SEQ ID NO: 146358 - DNA, 75 bp, synthetic construct
  source 1..75: mol_type = other DNA
caagggctggagagcgatcagagcgacagtgcggcgatgacctcgatgctgattggtctgggggttgcacaaagt

SEQ ID NO: 146359 - DNA, 75 bp, synthetic construct
  source 1..75: mol_type = other DNA
gaagatgagaggcaaggaagaaactttctcaaactgttaaatgattattataaacaaggcatgactacaaaaaaa

SEQ ID NO: 146360 - DNA, 75 bp, synthetic construct
  source 1..75: mol_type = other DNA
tcggcaataatatcgtcggttcgatatgttgcaatgtgactccagaacaatctccgcaaactatctatcaccatt

SEQ ID NO: 146361 - DNA, 75 bp, synthetic construct
  source 1..75: mol_type = other DNA
gttttggtagaaattacgatgttcgatgacccagactggccctttagtgaaagtattttagttatcaccactgct

SEQ ID NO: 146362 - DNA, 75 bp, synthetic construct
  source 1..75: mol_type = other DNA
cgctcaagtcgaaccttggtcgaagcttctcatccttccccgcttgggcagaatatttaattgcggattcgtttg

SEQ ID NO: 146363 - DNA, 75 bp, synthetic construct
  source 1..75: mol_type = other DNA
gtgtttttcattccccccaaggcttcttatcacattatattaaaatatgataacacaaaacattgcgaattattt

SEQ ID NO: 146364 - DNA, 75 bp, synthetic construct
  source 1..75: mol_type = other DNA
tgcgcccagcaggcagggcaggagtcgcggtttatctacattgaagatctcggtttgggcgtcggcggtgtactg

SEQ ID NO: 146365 - DNA, 75 bp, synthetic construct
  source 1..75: mol_type = other DNA
tcgtttgagagttcacggacttttgaaagtgatggtggtgggggaaggattcgaaccttcgaagtcgatgacggc

SEQ ID NO: 146366 - DNA, 75 bp, synthetic construct
  source 1..75: mol_type = other DNA
gctcaagtcgaaccttggtcgaagcttctcatccttccccgcatgggcagaatatttaatcgcggattcgtttga

SEQ ID NO: 146367 - DNA, 75 bp, synthetic construct
  source 1..75: mol_type = other DNA
gaagcttctcatccttccccgcatgggcagaatatttaattacggattcgtttgagagttcagggacttttgaaa

SEQ ID NO: 146368 - DNA, 75 bp, synthetic construct
  source 1..75: mol_type = other DNA
gtgccgttattgcagcagcgttggccgcattttgccgaagcaacggcccgcagcgccgcactttgtgctgaacaa

SEQ ID NO: 146369 - DNA, 75 bp, synthetic construct
  source 1..75: mol_type = other DNA
ctgccgggctttccgctatgggagaagtatctgattttgccggaacccggcttatccgcccgttgctcactcgca

SEQ ID NO: 146370 - DNA, 75 bp, synthetic construct
  source 1..75: mol_type = other DNA
cacggtttaagtgctaatgctgatgcctgggtcgtgcattgtgaaaatatctgccagcagtggcaggtgccgctg

SEQ ID NO: 146371 - DNA, 75 bp, synthetic construct
  source 1..75: mol_type = other DNA
ggcgggatctggaccggattgccgccgataacggatttgactttcatatcatcgacaatgaaatctattgggatg

SEQ ID NO: 146372 - DNA, 75 bp, synthetic construct
  source 1..75: mol_type = other DNA
tagtttcgcctgcgcaactggttcagagcctggacgccagcaaaattgttccgctgaccgtaacctggggtggtg

SEQ ID NO: 146373 - DNA, 75 bp, synthetic construct
  source 1..75: mol_type = other DNA
aagagattaaagctgatgcggcaaccacttttaccgcaacgaaaatctttgcttccgatgcgttaactaacggtt

SEQ ID NO: 146374 - DNA, 75 bp, synthetic construct
  source 1..75: mol_type = other DNA
ggtacgagcgccggatgcggtgacgccggaaacgtggcgctccaggttgacgcatttttaagagcacgttgcgcg

SEQ ID NO: 146375 - DNA, 75 bp, synthetic construct
  source 1..75: mol_type = other DNA
tgatagttacaccctggtttttaaaggcagtagtgcaggatgcggcgatggtgggaatgtagcgatccaggcgga

SEQ ID NO: 146376 - DNA, 75 bp, synthetic construct
  source 1..75: mol_type = other DNA
tgtttgccgtagctggagcatgactaaagacgggcctgtgtacacgctaaacgcaacgtttgaacaagttgtcgg

SEQ ID NO: 146377 - DNA, 75 bp, synthetic construct
  source 1..75: mol_type = other DNA
atgcaacagaagacgacgtgatcgccggtgttcgtgtcaccgggctggcggatgagccgaaagcggagatcttct

SEQ ID NO: 146378 - DNA, 75 bp, synthetic construct
  source 1..75: mol_type = other DNA
atcaccgtgcgcaccatgttgctgaaagtgagcagcatcgacggcaataccaaactggacgcgctggacatcgac

SEQ ID NO: 146379 - DNA, 75 bp, synthetic construct
  source 1..75: mol_type = other DNA
atgagtttatggaaaaaaatcagcctcggcgtggttatcgttatcttactgttgctgggatcggtggcgtttctg

SEQ ID NO: 146380 - DNA, 75 bp, synthetic construct
  source 1..75: mol_type = other DNA
gtagcgaaaacgcctttgaaggtgctgaccttagcgccaagctgaaactgctgggcgtggacgtaggcggtattg

SEQ ID NO: 146381 - DNA, 75 bp, synthetic construct
  source 1..75: mol_type = other DNA
atctacgccatcggtgaatgcgcaagctggaacaaccgagtgtttgggctggtagctccgggttacaaaatggcg

SEQ ID NO: 146382 - DNA, 75 bp, synthetic construct
  source 1..75: mol_type = other DNA
tgctttgtctatcgcaccattgaagacctcaacgcgattgaatcctgcgcccgtcgcagcaagcgcggtgccgtt

SEQ ID NO: 146383 - DNA, 75 bp, synthetic construct
  source 1..75: mol_type = other DNA
atgccagaagttttcagatggacgccgcaaagaagctacagcgtgaccagggaaccaaacgtatctgtcattaaa

SEQ ID NO: 146384 - DNA, 75 bp, synthetic construct
  source 1..75: mol_type = other DNA
ctatggatggcgtgcaaaggctttttgtttgccgtagctggagtatgacaaaggacgggcctgtatacacgctaa

SEQ ID NO: 146385 - DNA, 75 bp, synthetic construct
  source 1..75: mol_type = other DNA
cactgcgtatggcgaaaacctgcgtgggtagcacctggtgccgctacggtgttggcgacagcgtcggcctcggcg

SEQ ID NO: 146386 - DNA, 75 bp, synthetic construct
  source 1..75: mol_type = other DNA
tgagaaacagtatcaggcagatgatctgaaactgaaactttccggcaaaatgactgattacacgctgtctatgcg

SEQ ID NO: 146387 - DNA, 75 bp, synthetic construct
  source 1..75: mol_type = other DNA
cgatggcaactttatgccgtttgatatgcaaccgagccagcttgcggtcaactttaacggtatgcgctcgacgct

SEQ ID NO: 146388 - DNA, 75 bp, synthetic construct
  source 1..75: mol_type = other DNA
tctgaccctgaaaccgacgttgttaaaaggtttgctgattgctctgccgaaagtcgctgaagtagcacaggaaga

SEQ ID NO: 146389 - DNA, 75 bp, synthetic construct
  source 1..75: mol_type = other DNA
tgcattgtcttatttgctacgtggacaagggctggagagcgatcagagcgacagtgcggcgatgacctcgatgct

SEQ ID NO: 146390 - DNA, 75 bp, synthetic construct
  source 1..75: mol_type = other DNA
gttgccgcagggcagcatcaccctttccgggcgtaacgtgcaggtgacgcaaaccgtcaacgatgcggcgctgcc

SEQ ID NO: 146391 - DNA, 75 bp, synthetic construct
  source 1..75: mol_type = other DNA
ccgcagccggatgaaaagccgctcggcgaaacgctgaaagatctcttttctcgcccggtattgccggaaatgacc

SEQ ID NO: 146392 - DNA, 75 bp, synthetic construct
  source 1..75: mol_type = other DNA
gctgccgcagggtagcatcaccctttccgggcgtaacgtgcaggtgacgcaaactgtcaacgacgcggcgctgcc

SEQ ID NO: 146393 - DNA, 75 bp, synthetic construct
  source 1..75: mol_type = other DNA
cattaatgacctggcgctgaaagacattcaggtcaacatcgacagtaaaaaaatgcccccttctgaacaggttga

SEQ ID NO: 146394 - DNA, 75 bp, synthetic construct
  source 1..75: mol_type = other DNA
cgttgctcgactggcagcaggcgattagctggcgtggtgagttaacgcttaacggcattaacaccgcgaaagagt

SEQ ID NO: 146395 - DNA, 75 bp, synthetic construct
  source 1..75: mol_type = other DNA
aaatgccgccttccgaacaggtaaccgaagaggaagatagcggcccgctggatctctccacgccgtaccctatca

SEQ ID NO: 146396 - DNA, 75 bp, synthetic construct
  source 1..75: mol_type = other DNA
cattgaagagtttaagggcgagcagctgcgcgtgacgggcgacacggacatcaccgtgagcaccatgctgctgaa

SEQ ID NO: 146397 - DNA, 75 bp, synthetic construct
  source 1..75: mol_type = other DNA
accctcgatggtcgcgtggatgtcccgtgggcgcgcatcgtggtgcacgatctgccggaaagcgcagtaggcgtc

SEQ ID NO: 146398 - DNA, 75 bp, synthetic construct
  source 1..75: mol_type = other DNA
acatccagattggtgaacgcatggtatctgcggctggaggaatgccggtatcacgcctgaaatctgtcactcact

SEQ ID NO: 146399 - DNA, 75 bp, synthetic construct
  source 1..75: mol_type = other DNA
gaccttgcggtgggggaaatctcaaagggacttaaaagcctggcaaaatccggcggttttccgctgattgctctg

SEQ ID NO: 146400 - DNA, 75 bp, synthetic construct
  source 1..75: mol_type = other DNA
cgcaggttctttccacatcaatgcagccgtccagaccgcgcagatacagtaacaaacgaactgacagcagtaaga

SEQ ID NO: 146401 - DNA, 75 bp, synthetic construct
  source 1..75: mol_type = other DNA
tgaatgccggaatcagggactggagaaatccagaacgctgatgaccggtattgatgaactggacgcaaaaacagg

SEQ ID NO: 146402 - DNA, 75 bp, synthetic construct
  source 1..75: mol_type = other DNA
tcacgcctgaaatctgtctctcactttggtgacgaagactgggcgcgtttcattaagggggtggagctgatgacc

SEQ ID NO: 146403 - DNA, 75 bp, synthetic construct
  source 1..75: mol_type = other DNA
ggtgattggcgcgttttttctgcgtggggcagatccggaagtgatggatattctggccacgcttccggcggatgt

SEQ ID NO: 146404 - DNA, 75 bp, synthetic construct
  source 1..75: mol_type = other DNA
aacgtaacggttctctgggaacgatttaccggcgtttttataacggacattttctgcctgtggatcaggaaagcg

SEQ ID NO: 146405 - DNA, 75 bp, synthetic construct
  source 1..75: mol_type = other DNA
aaacactgaatgaggcgctgcagaaattacgtgatgcgcatacctgtgaagcagctgaagatgccctgaaggatg

SEQ ID NO: 146406 - DNA, 75 bp, synthetic construct
  source 1..75: mol_type = other DNA
tgatgagatatgtgcaactacgaggcaccaccggatgaaacacccggaaacggcgctggtggtggtcgattacct

SEQ ID NO: 146407 - DNA, 75 bp, synthetic construct
  source 1..75: mol_type = other DNA
atgacaaacccgacaaatccggcgtggcgtaattatgacctggaaggagctgtcatcggtgcgttttttctgcgt

SEQ ID NO: 146408 - DNA, 75 bp, synthetic construct
  source 1..75: mol_type = other DNA
atgacaaccccagtctggcgtaacgatgacctggaaggcgctgtcattggcgcgttctttctgcgtggggcagat

SEQ ID NO: 146409 - DNA, 75 bp, synthetic construct
  source 1..75: mol_type = other DNA
gcctggcgacctggtatttattgctgcacgtccttcgatgggcaaaaccgaactggcgctggatatcatcgacaa

SEQ ID NO: 146410 - DNA, 75 bp, synthetic construct
  source 1..75: mol_type = other DNA
atggtactgatgatcgtcagcggacgttcaggttcaggtaaatctgtcgccctgcgtgcgctggaagatatgggt

SEQ ID NO: 146411 - DNA, 75 bp, synthetic construct
  source 1..75: mol_type = other DNA
acgcatggtgtctgctgccggaggaatgcctgtatcgcgcctgaaatctgtctctaactttggtgacgaagactg

SEQ ID NO: 146412 - DNA, 75 bp, synthetic construct
  source 1..75: mol_type = other DNA
aggtggttgagcgtgttgaatgccggaatcagggactggagaaatccagaacgttgatgaccggtattgaggagc

SEQ ID NO: 146413 - DNA, 75 bp, synthetic construct
  source 1..75: mol_type = other DNA
atattcttgatggcgataaatattccacagaaaatgaaaagaaaactgctcttgataaagttttcaccggcacag

SEQ ID NO: 146414 - DNA, 75 bp, synthetic construct
  source 1..75: mol_type = other DNA
caaccaaaaaaagtgaaatttcttcactttttcacacttatttttcgcgctgatttggtgattatggtgataaaa

SEQ ID NO: 146415 - DNA, 75 bp, synthetic construct
  source 1..75: mol_type = other DNA
tggtgttactaccgtaaaagactcggtacgactggatccttgggtgtttatgttctccgcaggatatcgttttta

SEQ ID NO: 146416 - DNA, 75 bp, synthetic construct
  source 1..75: mol_type = other DNA
tgtgcctgctgtctatattcaaagtattctgggttcacgtaatgattacgctggtgtcgaaaagccgggatataa

SEQ ID NO: 146417 - DNA, 75 bp, synthetic construct
  source 1..75: mol_type = other DNA
tgcggtatatcatgagttgtcgcgtttaattacacttcgtcgcagccataacgagtttcatccggataataattt

SEQ ID NO: 146418 - DNA, 75 bp, synthetic construct
  source 1..75: mol_type = other DNA
ggtgtaccagttctcgctgccgccactggtgctgcatgcggtgcaaaaacagaacgttgaggcgctttgtgcgtg

SEQ ID NO: 146419 - DNA, 75 bp, synthetic construct
  source 1..75: mol_type = other DNA
attgctctgagccagctctcccgcggcgtggaatccagacccaataaacgccccatgaactcggacctgaaaaac

SEQ ID NO: 146420 - DNA, 75 bp, synthetic construct
  source 1..75: mol_type = other DNA
acagtaatgatttaaaaccactacccacatttaatcagttttaccctcaatggctgcaaagcattttttcacatg

SEQ ID NO: 146421 - DNA, 75 bp, synthetic construct
  source 1..75: mol_type = other DNA
tgaacaataaaacgacgttaaggcacgcggtatatcatcagttgtcgcgtttaattacacttcgttgcagtcata

SEQ ID NO: 146422 - DNA, 75 bp, synthetic construct
  source 1..75: mol_type = other DNA
catgtccttactgacaaaaatacccgtgagatcggcatagattcgctttctgccgatgtgaaaatggtgtctcgt

SEQ ID NO: 146423 - DNA, 75 bp, synthetic construct
  source 1..75: mol_type = other DNA
cccaggaagtggttgcgcaggagcagaagatctgcgcatccgtcagattcaggaagcgttgcagtatgcgaatca

SEQ ID NO: 146424 - DNA, 75 bp, synthetic construct
  source 1..75: mol_type = other DNA
aaaaccttttggatatcgaaagcctgaaggttgatgatcttaatataaatgcctaccgttacgttatgaaaccca

SEQ ID NO: 146425 - DNA, 75 bp, synthetic construct
  source 1..75: mol_type = other DNA
ttttctgctggggggcatatcgcctcaacgggtggggaatcagattcgtgatttcaaacgtgcttctgacagtaa

SEQ ID NO: 146426 - DNA, 75 bp, synthetic construct
  source 1..75: mol_type = other DNA
gttcggtgtgcaatgggccagtgaattgccagttcatgtatggcctgagttgtttgtcacatggttaaaatcccg

SEQ ID NO: 146427 - DNA, 75 bp, synthetic construct
  source 1..75: mol_type = other DNA
gtagacgctgcaaggaaaattgaagtcatagtcactcgtggggcctcgttgtcattggccacttcacaaggggta

SEQ ID NO: 146428 - DNA, 75 bp, synthetic construct
  source 1..75: mol_type = other DNA
tcgctgcggtagaagccggtgcgttgcaagccactggtggaatccgggtggttgcggatggagggctggagttac

SEQ ID NO: 146429 - DNA, 75 bp, synthetic construct
  source 1..75: mol_type = other DNA
ttacagaggagcagatcagaggtgttttgcgtgagcgtggctatgttgccgtaaaagaggctgtccggtacgttg

SEQ ID NO: 146430 - DNA, 75 bp, synthetic construct
  source 1..75: mol_type = other DNA
atttgaccaattggaagagatgatctttccggtgcctgaggagcgtatgtactggcagtcaatcatagctcatct

SEQ ID NO: 146431 - DNA, 75 bp, synthetic construct
  source 1..75: mol_type = other DNA
ctgggcataaccatgacccggaacagattgatttaattgatttactgatgcagttgtggcgtgggaaggtgacaa

SEQ ID NO: 146432 - DNA, 75 bp, synthetic construct
  source 1..75: mol_type = other DNA
gcagtcctgctgggcggcatggttggcgcggggattgcgctggggcgtaacgctctacgcaattacaacgcgaaa

SEQ ID NO: 146433 - DNA, 75 bp, synthetic construct
  source 1..75: mol_type = other DNA
gttgccaaagaaaagtggacttccacagctatcgttactcaacctgatgtggggcaaatcgctggttataccaac

SEQ ID NO: 146434 - DNA, 75 bp, synthetic construct
  source 1..75: mol_type = other DNA
ttcactggagcactatgttgcagcgctgcggcgaaatgccgcactgcgcgatgcagaaaaaacactgaccgaagc

SEQ ID NO: 146435 - DNA, 75 bp, synthetic construct
  source 1..75: mol_type = other DNA
aaacgacattctcacagattcttttagatgccagaatgcagcacgcaaaaaatttgatacgcgtagaaggttcag

SEQ ID NO: 146436 - DNA, 75 bp, synthetic construct
  source 1..75: mol_type = other DNA
agtccaaagagagtttctaaggagtaccgttgtcaaaggcacaccggtatgaacacggacaacacgatgagtgct

SEQ ID NO: 146437 - DNA, 75 bp, synthetic construct
  source 1..75: mol_type = other DNA
cgaattgagcttaaagaaccaaatggtaaagccccgacgaaagagcagatcgcctggatgcgcaggcttagagag

SEQ ID NO: 146438 - DNA, 75 bp, synthetic construct
  source 1..75: mol_type = other DNA
gcactatgttgcagcgttgcggcgcaatgccgcattgcgcgatgcagaaaaaacgctgaatgaggcgttgcagaa

SEQ ID NO: 146439 - DNA, 75 bp, synthetic construct
  source 1..75: mol_type = other DNA
cgacacaatcatggaaaaggcttacgaagaatacttcgaaggccttgccgaaggcgaagaagctctcagcttcag

SEQ ID NO: 146440 - DNA, 75 bp, synthetic construct
  source 1..75: mol_type = other DNA
ataaaaaaagccggcatcatgccggcccaaaaatataaacaagacgataaaaggctaataacgaggttatcatga

SEQ ID NO: 146441 - DNA, 75 bp, synthetic construct
  source 1..75: mol_type = other DNA
cggcatatagaaccctggattgcgaccatagctgccgcatcataggcaaggtagttaaggcgcagtggcctgaag

SEQ ID NO: 146442 - DNA, 75 bp, synthetic construct
  source 1..75: mol_type = other DNA
ttttctgctggggggcatatcgcctcaacgggtggggaatcagattggtgatttcaaacgtccttctgacagtaa

SEQ ID NO: 146443 - DNA, 75 bp, synthetic construct
  source 1..75: mol_type = other DNA
tcaggaagtggcgacgcttatcaccgcgcttggttgtggtatcggtcgtgacgagtacaacccggacaaactgcg

SEQ ID NO: 146444 - DNA, 75 bp, synthetic construct
  source 1..75: mol_type = other DNA
gcgtgatgtcattttcagaagacgactgcacggaatatcaggagtcggctgcactggtggattgcagcgcggtgt

SEQ ID NO: 146445 - DNA, 75 bp, synthetic construct
  source 1..75: mol_type = other DNA
gtggtcaccgcactgaaacgcggcgcggatggctatctgttaaaagatatggaaccggaagatctgctgaaagca

SEQ ID NO: 146446 - DNA, 75 bp, synthetic construct
  source 1..75: mol_type = other DNA
ccagggggaaggcggtgtggtgccggccagcaaagcttttttacaggggcttcgcgaactgtgtgaccgccacaa

SEQ ID NO: 146447 - DNA, 75 bp, synthetic construct
  source 1..75: mol_type = other DNA
gcgccggcgctgaacgtcagcgaagaagaggtgacgaccggactggatcgctttgccgctacttgcgaacacttt

SEQ ID NO: 146448 - DNA, 75 bp, synthetic construct
  source 1..75: mol_type = other DNA
ggcgagtaagttctggcataccggtaatggttacaccaacgagccggtattacggctggcgaaaaagctcattga

SEQ ID NO: 146449 - DNA, 75 bp, synthetic construct
  source 1..75: mol_type = other DNA
tgcttcatataacgatattaactctgtcagtgcactgattgacgactctacctgtgcggtgattgtcgaacccat

SEQ ID NO: 146450 - DNA, 75 bp, synthetic construct
  source 1..75: mol_type = other DNA
ccgttggtgcgctgctggcaacggaggagtgcgccagcgtgatgaccgttggcacccacggcaccacctatggcg

SEQ ID NO: 146451 - DNA, 75 bp, synthetic construct
  source 1..75: mol_type = other DNA
gaatgccgattacgccgggcaagcgaaacagatctctcaggaagcggcgaaagcaggcgtgatggtactgattgc

SEQ ID NO: 146452 - DNA, 75 bp, synthetic construct
  source 1..75: mol_type = other DNA
aaaatatggggttacaatagagtttgtggatggaaatataaaatcatataaaaaattgttatacgcaaaaaaaac

SEQ ID NO: 146453 - DNA, 75 bp, synthetic construct
  source 1..75: mol_type = other DNA
gcgaaaaattacgcatccagaaggaggcagagcaaccgagaaaacgtgaaaaacggtattcaaacaaaaacttta

SEQ ID NO: 146454 - DNA, 75 bp, synthetic construct
  source 1..75: mol_type = other DNA
tacggtttgttcagcgaaattcgcggcttaggtttgttgattggctgtgtgctgaatgccgattacgccgggcaa

SEQ ID NO: 146455 - DNA, 75 bp, synthetic construct
  source 1..75: mol_type = other DNA
aactttatgcctatatgcactacggggtgacgcccgatctgctgaccaccgctaaagctctgggcggaggtttcc

SEQ ID NO: 146456 - DNA, 75 bp, synthetic construct
  source 1..75: mol_type = other DNA
tgcagatgatatctggtttaaggcaatgactttactttccggacgaaaatgtacaagagtaaacgattttaatat

SEQ ID NO: 146457 - DNA, 75 bp, synthetic construct
  source 1..75: mol_type = other DNA
gaacccttcaggatttggtgagtttgttgatcaccttgggatggctgctctcggtccgattgactacttcaatgt

SEQ ID NO: 146458 - DNA, 75 bp, synthetic construct
  source 1..75: mol_type = other DNA
atggctacttggcaaggaacaaatggcggattgttggctggtatcggtggtgtcaactcaaacgctccgaacgta

SEQ ID NO: 146459 - DNA, 75 bp, synthetic construct
  source 1..75: mol_type = other DNA
gcaaaataacgccaaggaactggcgcgcgtcggtgttgatcctaataacgttgctcagatgtatcagcagaatcc

SEQ ID NO: 146460 - DNA, 75 bp, synthetic construct
  source 1..75: mol_type = other DNA
gtgaggatctggcaggaagtggcgctggcgcgggaagatgcctccccctgtttacgctttggcgcgtttgaaata

SEQ ID NO: 146461 - DNA, 75 bp, synthetic construct
  source 1..75: mol_type = other DNA
gttggcctgaccgcgttacgtggtctggctggagttgctgatatttacaatcaggaacagcaacagaaagctatt

SEQ ID NO: 146462 - DNA, 75 bp, synthetic construct
  source 1..75: mol_type = other DNA
cagaactgtaacggtaggcgggaaacttcacggcgctggggctaatgcgttctacgaaggcatcgacaacgaggg

SEQ ID NO: 146463 - DNA, 75 bp, synthetic construct
  source 1..75: mol_type = other DNA
tgggctttactctaaacggcgagagttgcttactcgggctctcgactacgacttcccctgcatggtcgaacatgc

SEQ ID NO: 146464 - DNA, 75 bp, synthetic construct
  source 1..75: mol_type = other DNA
tatttatttacaagaaatttaattatttttttgtattgttttttttcttgttcctgtctgttgcttcagcccttt

SEQ ID NO: 146465 - DNA, 75 bp, synthetic construct
  source 1..75: mol_type = other DNA
tgcgtgagttatgcgatcgccacaatgcattgctgattttcgatgaggtacaaaccggcgtcgggcgcaccggtg

SEQ ID NO: 146466 - DNA, 75 bp, synthetic construct
  source 1..75: mol_type = other DNA
atcaggagccagtgcagaatatgccagcgcaacaacctactactggcagtaatttttcttcactatggggtgatt

SEQ ID NO: 146467 - DNA, 75 bp, synthetic construct
  source 1..75: mol_type = other DNA
aagcctttagcgccatttaccccaaactcgccaaagagtttgatgttccgctgctgcccttttttatggaagagg

SEQ ID NO: 146468 - DNA, 75 bp, synthetic construct
  source 1..75: mol_type = other DNA
ctgtctaccgatatggcttttaggttggctaaagccttcgataccactgcaaagttctggctaaatatacagcag

SEQ ID NO: 146469 - DNA, 75 bp, synthetic construct
  source 1..75: mol_type = other DNA
agtaatatccgtaacgatgtgaagcagcaggttgataatatggtcacagaatatcgaggcaatatcggggatact

SEQ ID NO: 146470 - DNA, 75 bp, synthetic construct
  source 1..75: mol_type = other DNA
tggaattcttggtgttggtggcggcttaggtgtcagaggtggtggtcgggcaaatattgactggagtgatgagga

SEQ ID NO: 146471 - DNA, 75 bp, synthetic construct
  source 1..75: mol_type = other DNA
cggcacaacaggaaatggcccgggaggcgtcgaacagagcagaaagtgccctgcatgggttcagcagcagtattg

SEQ ID NO: 146472 - DNA, 75 bp, synthetic construct
  source 1..75: mol_type = other DNA
tccatcagtccgaccgccagtgcggcaggcagtgtggttgacggtaattactcctacggcaacatgcagacggag

SEQ ID NO: 146473 - DNA, 75 bp, synthetic construct
  source 1..75: mol_type = other DNA
tgcagtggaaagctatgcgaaggcgcataatatcagtaatgagcaggcgacaagagaactggcatcgagaagtac

SEQ ID NO: 146474 - DNA, 75 bp, synthetic construct
  source 1..75: mol_type = other DNA
ctcacattcagcaagtagtggcagcagagccagccatgatgctcgtcatgatatcgatgccagagctacacaaga

SEQ ID NO: 146475 - DNA, 75 bp, synthetic construct
  source 1..75: mol_type = other DNA
acgacgaatatgacccgcagccatgaatatgctgaaatggcatcccgtactgaaagcatgagtgggcagatgagt

SEQ ID NO: 146476 - DNA, 75 bp, synthetic construct
  source 1..75: mol_type = other DNA
ctcatgttaaagggcatttaggcatcagtgtgctgggtaacggtggaggggttggttttcaggctggagcgaagg

SEQ ID NO: 146477 - DNA, 75 bp, synthetic construct
  source 1..75: mol_type = other DNA
atcaggttgataatatggtcacagaatataaagggaatataggtgatactcagaacagcgtacgtggcgaggaaa

SEQ ID NO: 146478 - DNA, 75 bp, synthetic construct
  source 1..75: mol_type = other DNA
tgaagtactccgacctggcttccacagccggatatatctccgtcatgataccgccgttgtcatgggtgatgataa

SEQ ID NO: 146479 - DNA, 75 bp, synthetic construct
  source 1..75: mol_type = other DNA
cggagattgcagaacgccgtcgggcgatggcgtggtcttttgtgcaggaacaggtgcagcctggtgttgataatg

SEQ ID NO: 146480 - DNA, 75 bp, synthetic construct
  source 1..75: mol_type = other DNA
cctggcgtgaatcccgtggcgatattggtaaaggaatggagagcgtaccttcgggcggtggcagccaggatatta

SEQ ID NO: 146481 - DNA, 75 bp, synthetic construct
  source 1..75: mol_type = other DNA
gacatcgcaactggcgaaactgttgagttcgctgaagtgctgatgatcgcaaatggtgaagaagtcaaaatcggc

SEQ ID NO: 146482 - DNA, 75 bp, synthetic construct
  source 1..75: mol_type = other DNA
gatctggatgcacttaacgaactttccgagctgatctgtgccgcagaatgcggggagcatattgaaccgtataag

SEQ ID NO: 146483 - DNA, 75 bp, synthetic construct
  source 1..75: mol_type = other DNA
gatctggatgcacttaacgaactttccgagcttatctgtgcagcagaatgtggggaacatattgaaccgtataag

SEQ ID NO: 146484 - DNA, 75 bp, synthetic construct
  source 1..75: mol_type = other DNA
gagctgttaccgctctacattgacaccgttgataaacggatgtctggcgacgcgcaggaaatgatgctgaaaacc

SEQ ID NO: 146485 - DNA, 75 bp, synthetic construct
  source 1..75: mol_type = other DNA
tggattgttgatgccactgatttgacgattgagcagatccgcgccattgcagagactcataaacgccgttatccg

SEQ ID NO: 146486 - DNA, 75 bp, synthetic construct
  source 1..75: mol_type = other DNA
actccaaactgtgcgatccattggcctggtgcaagacggcacactttattgctccagcatttttggttatcgcaa

SEQ ID NO: 146487 - DNA, 75 bp, synthetic construct
  source 1..75: mol_type = other DNA
tttctccctggcaggagtggcagggaaaattatccttagcgttgacgtcagatattcagcaacttcgttatcagg

SEQ ID NO: 146488 - DNA, 75 bp, synthetic construct
  source 1..75: mol_type = other DNA
gtatgaatacaacgccgccggtgacctgaccgccgtcattgccccggacggcagcagaaacgggacacagtacga

SEQ ID NO: 146489 - DNA, 75 bp, synthetic construct
  source 1..75: mol_type = other DNA
cggcgacgacaacagatgcgacgggcagcacccggcagatgacctggagccgctacgggcagttgctggcgttca

SEQ ID NO: 146490 - DNA, 75 bp, synthetic construct
  source 1..75: mol_type = other DNA
aatccgtcttttagtggtgcgctttcgctggatgcagggcaaacgcttttcacggggggcagcgtgttaccgcca

SEQ ID NO: 146491 - DNA, 75 bp, synthetic construct
  source 1..75: mol_type = other DNA
tgcaggcgcatgaaaatgaactgggcgatttcgtgctgcatatggatgggctggcgaatgattttctccctgacg

SEQ ID NO: 146492 - DNA, 75 bp, synthetic construct
  source 1..75: mol_type = other DNA
cacgctgtggcgcagtttacgctttggcgataatctccaggcatggctggaacagaatgcccgattcccggaaac

SEQ ID NO: 146493 - DNA, 75 bp, synthetic construct
  source 1..75: mol_type = other DNA
tattcagcaatgatcgacgcctttactgataaatttgatgcgccgctgcgttccggaaattatgttgcagtgatc

SEQ ID NO: 146494 - DNA, 75 bp, synthetic construct
  source 1..75: mol_type = other DNA
gggcgccagactggtcgtcgatgggcgcgatatcaccgtccccggccatgagggtggtttcttcctcggcggctg

SEQ ID NO: 146495 - DNA, 75 bp, synthetic construct
  source 1..75: mol_type = other DNA
aacgtgggcaccggtgtggacagccactcgctgatgcagccgctcggcgtttgcgccgggatcacgccgtttaac

SEQ ID NO: 146496 - DNA, 75 bp, synthetic construct
  source 1..75: mol_type = other DNA
atcattctggttattagctcagacgctggcttatattcctacagggattgcttatgctatctggtcaggagtcgg

SEQ ID NO: 146497 - DNA, 75 bp, synthetic construct
  source 1..75: mol_type = other DNA
aatgcagttttactcaacgccgggtacaggaacgattcgtgcacgtttacggctggttctctcgtgggatacgga

SEQ ID NO: 146498 - DNA, 75 bp, synthetic construct
  source 1..75: mol_type = other DNA
ctgcagactaatccagctatgtcgagcgtggtcgataccatgagcggtattggcgcatcgtttggtctgatttga

SEQ ID NO: 146499 - DNA, 75 bp, synthetic construct
  source 1..75: mol_type = other DNA
aggcgttagcgaaggagcaacactggtgatggatgggcgaaattattgcgtgaagggctatcctgaaggatttta

SEQ ID NO: 146500 - DNA, 75 bp, synthetic construct
  source 1..75: mol_type = other DNA
aggctgagcagatgcgcgccacacatttccccgcgaccttcctggtcgatccgaaaacgcaccagtggcagcctc

SEQ ID NO: 146501 - DNA, 75 bp, synthetic construct
  source 1..75: mol_type = other DNA
gaagcgctggatacggccattctgtatccgtcagcggagaatttccgtcgttttatgatactccagaacttctgg

SEQ ID NO: 146502 - DNA, 75 bp, synthetic construct
  source 1..75: mol_type = other DNA
cccgtcttatcagcgaagagcacggtaaggtcttctccgacgcggtaggcgagctgacccgtggcctggaagtgg

SEQ ID NO: 146503 - DNA, 75 bp, synthetic construct
  source 1..75: mol_type = other DNA
aggtgctgggctacattgacagcggggaagcgcagggggcgaatctgcgcgtggacggccgcggctttagcgtgc

SEQ ID NO: 146504 - DNA, 75 bp, synthetic construct
  source 1..75: mol_type = other DNA
cggaccggatggggtgcgtttttatacccggatgaaaaccgttaccgcacgctggccgaacggtcagcagatcgc

SEQ ID NO: 146505 - DNA, 75 bp, synthetic construct
  source 1..75: mol_type = other DNA
cgataccaacgaagtggaaagcgaaccgctgtggaacaaagtttctgatgaacaactgaaagcgatgctggcaaa

SEQ ID NO: 146506 - DNA, 75 bp, synthetic construct
  source 1..75: mol_type = other DNA
accgttcgcgccgggcgctaacccgatgcacggtcgtgatcgcaaaggtgccgtggcctcattgacgtcggtggc

SEQ ID NO: 146507 - DNA, 75 bp, synthetic construct
  source 1..75: mol_type = other DNA
cctaacttctggtggctgctggcaattactgttgtttggctggatgagtctggtcggcgtggtgcgggcggagtt

SEQ ID NO: 146508 - DNA, 75 bp, synthetic construct
  source 1..75: mol_type = other DNA
aagccgcaggcgcgctgaaaaacttaggtattgaaacccacgttatcgaatttgcccctatgctgatggcagaac

SEQ ID NO: 146509 - DNA, 75 bp, synthetic construct
  source 1..75: mol_type = other DNA
tcaggtactgaacgcggaactggcgaaacagggcatcgaagttaacaacaacctgtgcgaacactttgcttattc

SEQ ID NO: 146510 - DNA, 75 bp, synthetic construct
  source 1..75: mol_type = other DNA
acgaagcatccatcgaaggtggtcagcacctgaacgttaacgtgatgaaccgtgaaatgctgctcgacgcgatgg

SEQ ID NO: 146511 - DNA, 75 bp, synthetic construct
  source 1..75: mol_type = other DNA
atcttcctgccattataggtatgatgttgatttgtgccggagtgttggtcattaacttgttgtcacgaagtgcga

SEQ ID NO: 146512 - DNA, 75 bp, synthetic construct
  source 1..75: mol_type = other DNA
aaacaggtgatacaggggcaggcggtggaggccgcctgtcagcccgcgcgaaaacccctggcaggctgacgcctg

SEQ ID NO: 146513 - DNA, 75 bp, synthetic construct
  source 1..75: mol_type = other DNA
atgaacggagataatccctcacctaaccggccccttgttacagttgtgtacaaggggcctgatttttatgacggc

SEQ ID NO: 146514 - DNA, 75 bp, synthetic construct
  source 1..75: mol_type = other DNA
tcgcagtatcatcctgcgtcatatgttgccaaatgccatggtcgctaccctcacctttttaccgtttattttatg

SEQ ID NO: 146515 - DNA, 75 bp, synthetic construct
  source 1..75: mol_type = other DNA
cgcacattataaattttactgtgaatttgaaaaagcatgggttgaagaagagctgaacctgacactgaaggacaa

SEQ ID NO: 146516 - DNA, 75 bp, synthetic construct
  source 1..75: mol_type = other DNA
tggctcaaaagatgaatactacacagcacagtgcgattgggtattatagaagatatttagcatcacataaaaccg

SEQ ID NO: 146517 - DNA, 75 bp, synthetic construct
  source 1..75: mol_type = other DNA
ggcggcagttgatctttgggaagttgaaaacaacatgcgcacccaggaagaattgggacggattgaaacagtggc

SEQ ID NO: 146518 - DNA, 75 bp, synthetic construct
  source 1..75: mol_type = other DNA
ttcacaaagagcacaggcagaatccaataacattgccaccatacaggcaggtgttaaagcactctatacatcagc

SEQ ID NO: 146519 - DNA, 75 bp, synthetic construct
  source 1..75: mol_type = other DNA
gaagcaggccgtgtgaaaaccggcaactgggtaatctctgacaagagaaccttcgaccatgtcgttctgtgtgtt

SEQ ID NO: 146520 - DNA, 75 bp, synthetic construct
  source 1..75: mol_type = other DNA
gtggaacggcaccgtcaccgtgaccgggaaaacctcctatttcaccatcacggacaccggtattccgagctctga

SEQ ID NO: 146521 - DNA, 75 bp, synthetic construct
  source 1..75: mol_type = other DNA
aataacattgccaccatacaggcaggtgttaaagcgttatacacgtcggcatcaagctttactggcctgacaaat

SEQ ID NO: 146522 - DNA, 75 bp, synthetic construct
  source 1..75: mol_type = other DNA
acgtaatgaatgtcgtttcattgcaggaaaacacttctttaaagtaagtggctgtgaacttgatagtttgcgaac

SEQ ID NO: 146523 - DNA, 75 bp, synthetic construct
  source 1..75: mol_type = other DNA
gccaaaactatccgtgaacatggaaaaggctatagaaaaatcagcaggtgatgcggcagctagtcgtaatgctgc

SEQ ID NO: 146524 - DNA, 75 bp, synthetic construct
  source 1..75: mol_type = other DNA
tcaggaacagcaacagaaagcgattagtgcgttcaataaggttcacgctgatgcatgggcttctggtgatccatc

SEQ ID NO: 146525 - DNA, 75 bp, synthetic construct
  source 1..75: mol_type = other DNA
cgaaaccattctgccgtggcagacgtggctacaaccgctggaattaccggcggggctggggagtgtacagcttac

SEQ ID NO: 146526 - DNA, 75 bp, synthetic construct
  source 1..75: mol_type = other DNA
tatcctggtcaattagagaagattcagtctggcatgaagtgggcagacgaagaccagcgcaattctatcggcacc

SEQ ID NO: 146527 - DNA, 75 bp, synthetic construct
  source 1..75: mol_type = other DNA
gcaacggataaagacgttgagatcgttcggcagggtgcgccaactgacatggataaccctgagacggtcgcaaga

SEQ ID NO: 146528 - DNA, 75 bp, synthetic construct
  source 1..75: mol_type = other DNA
gtattgcaggggtgtttcagcaggaaaagcaggctcagcggcagaaagaatttcagcaggcatacgctaatgctt

SEQ ID NO: 146529 - DNA, 75 bp, synthetic construct
  source 1..75: mol_type = other DNA
caggcagtgaaaacgatggccgatcaacatttcaaacaggcgctctgggattgggcattttgtgcaacgccactg

SEQ ID NO: 146530 - DNA, 75 bp, synthetic construct
  source 1..75: mol_type = other DNA
cggtggagttacagtctgctttgcttcaggttatcaagcagggtgttatcacgcgactggatgcgcggcgtttaa

SEQ ID NO: 146531 - DNA, 75 bp, synthetic construct
  source 1..75: mol_type = other DNA
aaatgtcggctttacttgggatcggccgcactacgctgtggcggaaaatgaagcaacatggcattgatgcagggc

SEQ ID NO: 146532 - DNA, 75 bp, synthetic construct
  source 1..75: mol_type = other DNA
ctttgggctatgtccgatatggctgatttgaccagacataagactcatatatcagaatcgtacgttaaaatttgc

SEQ ID NO: 146533 - DNA, 75 bp, synthetic construct
  source 1..75: mol_type = other DNA
ttttaaggatgaatttggtgatatgcaggatgagttagatgcgttaattaccttttgtaaagaattaaaaaaggc

SEQ ID NO: 146534 - DNA, 75 bp, synthetic construct
  source 1..75: mol_type = other DNA
cagttacgcaggaaagcgatgagaagcgtctttccctcagatttgccgatgccggagaaccagtggtcgggaggc

SEQ ID NO: 146535 - DNA, 75 bp, synthetic construct
  source 1..75: mol_type = other DNA
aagcgaggattagagaaaggcgcggactctgttgggaagatggttcgtgagtctcttaaatctgacgcagagctt

SEQ ID NO: 146536 - DNA, 75 bp, synthetic construct
  source 1..75: mol_type = other DNA
aaactcgcctgacaccagcggagtgggccgaagctgaagccaaatggacgtcaggcgaatatacactctcaaagc

SEQ ID NO: 146537 - DNA, 75 bp, synthetic construct
  source 1..75: mol_type = other DNA
tttttttcggcacagacctggtaattaagctgaagccaaatattagtgcctctggtgaactcttcatctgccaga

SEQ ID NO: 146538 - DNA, 75 bp, synthetic construct
  source 1..75: mol_type = other DNA
gctcatcagcgaagacggcaatacggcgtggcgcgggggtaatgactccaacttactgatagtgttttatgttca

SEQ ID NO: 146539 - DNA, 75 bp, synthetic construct
  source 1..75: mol_type = other DNA
tgttgttgagtctaagatacaatttttaggttacgataatgctagggcggaaagtttcttccactcactaaaagt

SEQ ID NO: 146540 - DNA, 75 bp, synthetic construct
  source 1..75: mol_type = other DNA
cggctgggcgtatgcgttggggcagatggtgatggtcgaagtcactacggccaaacgtgagggtaagcctttagg

SEQ ID NO: 146541 - DNA, 75 bp, synthetic construct
  source 1..75: mol_type = other DNA
tatcggtgcgcatatggacaaccgcctgcaacgtcagcaactgaacggctggcataaagcaatgctgagccatta

SEQ ID NO: 146542 - DNA, 75 bp, synthetic construct
  source 1..75: mol_type = other DNA
attcaacgaaacgtaaagacattacacttattatatcagtcattatacttcagtcgatttattttatgggacttc

SEQ ID NO: 146543 - DNA, 75 bp, synthetic construct
  source 1..75: mol_type = other DNA
tccttccagtcatcacttcgtctgagaatgatgtgcaactgctcatgcgacacccggcgacaacgactgacgacg

SEQ ID NO: 146544 - DNA, 75 bp, synthetic construct
  source 1..75: mol_type = other DNA
caagttctgcctgtctgcgaagcagcgcccatacccgacgataaccatacgtgggcaactctccgatgatatgat

SEQ ID NO: 146545 - DNA, 75 bp, synthetic construct
  source 1..75: mol_type = other DNA
caatgagtatttattttgcattctaaatagtgatgttttcaaaatgttatcagggacatttcttacatcaacaat

SEQ ID NO: 146546 - DNA, 75 bp, synthetic construct
  source 1..75: mol_type = other DNA
tttagaaatcagcgagggcagtcgactagacatcattggaaaggccgtcaatacagcaatgaatcatatcgctgc

SEQ ID NO: 146547 - DNA, 75 bp, synthetic construct
  source 1..75: mol_type = other DNA
tgcacggcgttctgcattagttgtttttattagcaaagaaaacccgctcagtcttaaagtgcaggttggtgcatg

SEQ ID NO: 146548 - DNA, 75 bp, synthetic construct
  source 1..75: mol_type = other DNA
gtagccagtaagtcccgaacatgcaccggcaccaccacgctggagtcgttgaagaacgaacagtgggtgttgcca

SEQ ID NO: 146549 - DNA, 75 bp, synthetic construct
  source 1..75: mol_type = other DNA
acaccctcgacgcgctttgcgcccggtattacgggcgcactgagggcgtggtcgagacggtgctacaggctaatc

SEQ ID NO: 146550 - DNA, 75 bp, synthetic construct
  source 1..75: mol_type = other DNA
tcggtgctcgccgcaaatccggggctggccgaactcggcgcagtgctgccacatggcacggtggtcgaactgccc

SEQ ID NO: 146551 - DNA, 75 bp, synthetic construct
  source 1..75: mol_type = other DNA
cggcaatgatggatggagggaaaattcagcgatttttcgatcgcaacgctctggaaaaaggtgagcatcggatgg

SEQ ID NO: 146552 - DNA, 75 bp, synthetic construct
  source 1..75: mol_type = other DNA
tacaggtgacttttgctgagaaaaccgcagtttctgccgccagtttttcggttaatgccggagagacatttagtt

SEQ ID NO: 146553 - DNA, 75 bp, synthetic construct
  source 1..75: mol_type = other DNA
agcgatttatctctgccgtggctgcgatcaaactggtttggtgcatggctaccctgagtcacgtatgaagaaagg

SEQ ID NO: 146554 - DNA, 75 bp, synthetic construct
  source 1..75: mol_type = other DNA
ggctctttcccgtcttgctgctaagcagggcttcggtggtgaagatgctatcgtcgatatgctgggtacagacat

SEQ ID NO: 146555 - DNA, 75 bp, synthetic construct
  source 1..75: mol_type = other DNA
gaaggtttgccaactaacgcagacccgcaggtctatgccctccagttagctaagacggttaaggctatgctgaac

SEQ ID NO: 146556 - DNA, 75 bp, synthetic construct
  source 1..75: mol_type = other DNA
gtcctgactggtagcctgacagctaaggcagacactatcatggacgcgctgtatgagaacaccgagtcttctttc

SEQ ID NO: 146557 - DNA, 75 bp, synthetic construct
  source 1..75: mol_type = other DNA
agccgaagccggacaggatgctccccggaaaaagaccggtaacaaagcgaaacaggcgaaaaaggcccgcgcatg

SEQ ID NO: 146558 - DNA, 75 bp, synthetic construct
  source 1..75: mol_type = other DNA
tgtgcgaatactacagacgcctgctgatgatgcggggagcgtggcgggtgtggttcatgcagtggccggtacaga

SEQ ID NO: 146559 - DNA, 75 bp, synthetic construct
  source 1..75: mol_type = other DNA
atcgttcacgccttagattcgctggcacatgccatgttaaagctcactggctacgtcatgctcttcgctcccctg

SEQ ID NO: 146560 - DNA, 75 bp, synthetic construct
  source 1..75: mol_type = other DNA
acagaaagataacttttacggcgtgcagtttcaccccgaacgctccggcgcggcgggcgcacagctgctgaaaaa

SEQ ID NO: 146561 - DNA, 75 bp, synthetic construct
  source 1..75: mol_type = other DNA
aaaatgaacgagatggaattattacgtacattaacagattaaatggtgatgttgagcgagctatagagtatcaaa

SEQ ID NO: 146562 - DNA, 75 bp, synthetic construct
  source 1..75: mol_type = other DNA
gggcaatggtggctaattacttagttagctcaaaaggtgtaggaacaattcagagaaacctatattggcctcaat

SEQ ID NO: 146563 - DNA, 75 bp, synthetic construct
  source 1..75: mol_type = other DNA
gcaacgactgttaagatggggactggcagcgctgctgctgtcctgcctgtagtcaaacgcctgagctttactaag

SEQ ID NO: 146564 - DNA, 75 bp, synthetic construct
  source 1..75: mol_type = other DNA
cgttgcgacggcacaattctttatcaccggcgctttccctgggtgcgacattccggtacatcatcaggaaaaaaa

SEQ ID NO: 146565 - DNA, 75 bp, synthetic construct
  source 1..75: mol_type = other DNA
acgcgaaattatcaaagcagccgcgtggcaaaacaaacaccgcggcacccgtggagctgttgaacgcgcgttatt

SEQ ID NO: 146566 - DNA, 75 bp, synthetic construct
  source 1..75: mol_type = other DNA
ctggcgttattctgcaaggcgacgatggcgtgctggtcagtaaccgcctggaaattgctgtacctattgttgatg

SEQ ID NO: 146567 - DNA, 75 bp, synthetic construct
  source 1..75: mol_type = other DNA
catcaccgaatcaaccatgattggtcacaacccgaaaactccgggcggagtgggactgggcgtggggctcaccat

SEQ ID NO: 146568 - DNA, 75 bp, synthetic construct
  source 1..75: mol_type = other DNA
ccggtgatttgacgctggaaaaagtacgcgctgtccgtcgcagtgcgaaagagcgtgtcttcgtaaccaatgccc

SEQ ID NO: 146569 - DNA, 75 bp, synthetic construct
  source 1..75: mol_type = other DNA
tctacgcgttcctgcgtgagccgcagcgggtgatgagcgcggtgcgcaaagtgctttctgcgccgcagcaaaccc

SEQ ID NO: 146570 - DNA, 75 bp, synthetic construct
  source 1..75: mol_type = other DNA
gacgaggatatccgccgggcggatgttgcgctgttgattacggatatcgagcttgccggtgccgagcgatttgaa

SEQ ID NO: 146571 - DNA, 75 bp, synthetic construct
  source 1..75: mol_type = other DNA
ttgtgttgttgattacagatatcgagctttctggtgccgagcgttttgaacattgtcgctatgtacaatgcggta

SEQ ID NO: 146572 - DNA, 75 bp, synthetic construct
  source 1..75: mol_type = other DNA
ctggcagaatgtcggaaaagaccgcaataaagccattgataccgtgaagcagcaaaaaattgaggccagcagcca

SEQ ID NO: 146573 - DNA, 75 bp, synthetic construct
  source 1..75: mol_type = other DNA
acaatatgcgttttggtctggagttggagaagtcggcgtttgggagatataatatagacaacgctataaatgcta

SEQ ID NO: 146574 - DNA, 75 bp, synthetic construct
  source 1..75: mol_type = other DNA
atcatatgactccaaaaaggggagcttacaatggagatatgataaaaacgcaggagtgggaacattaagtcaaga

SEQ ID NO: 146575 - DNA, 75 bp, synthetic construct
  source 1..75: mol_type = other DNA
ggagctgaccaataaacccagcaacgaaatttttattcaggatttattggcgatagatacctcagttcccgtcag

SEQ ID NO: 146576 - DNA, 75 bp, synthetic construct
  source 1..75: mol_type = other DNA
tttgtcaacagcagcctgaccctcgaaaaaggagcaaaactaacagctcagggaggtattttcagcaccggggct

SEQ ID NO: 146577 - DNA, 75 bp, synthetic construct
  source 1..75: mol_type = other DNA
tggagctggtttacggttctgtgtcaggaaaatcctttaactgggaagaccggggaatggcactgagcatgaaag

SEQ ID NO: 146578 - DNA, 75 bp, synthetic construct
  source 1..75: mol_type = other DNA
tgatttgtctgaaattgaaggtaaacaacaacgtattaatattgcgttgcctgatgtgttgattcgtcgtattga

SEQ ID NO: 146579 - DNA, 75 bp, synthetic construct
  source 1..75: mol_type = other DNA
gcaatcgtggaagatatggtattaagcggtgcttattctgttgatgatattcatgatgaagggtgtttgacttat

SEQ ID NO: 146580 - DNA, 75 bp, synthetic construct
  source 1..75: mol_type = other DNA
atagccttgatattaaaacacgacgtttaaataagattgtcacggaggtcgcccctgcagaagtctccagtgttg

SEQ ID NO: 146581 - DNA, 75 bp, synthetic construct
  source 1..75: mol_type = other DNA
ccaggacaagccgcgctgcatcgtgagtcaaatctgatgaagacctttgcgctacagggcgacacgctcgacgcc

SEQ ID NO: 146582 - DNA, 75 bp, synthetic construct
  source 1..75: mol_type = other DNA
gaaacaggcacaatggcaactggcgcaaacggaaattcgcgccccggtgagtggatgggtgactaatctcactac

SEQ ID NO: 146583 - DNA, 75 bp, synthetic construct
  source 1..75: mol_type = other DNA
caccgaaagatgaccatacggcatatggtataaccgttccggcttttgatcgttttgattttggctgtgtctctg

SEQ ID NO: 146584 - DNA, 75 bp, synthetic construct
  source 1..75: mol_type = other DNA
ggggatataatgctgttttgcagggcaatattatggggccccagagctcagtgaatatgaacaatgctctgtggc

SEQ ID NO: 146585 - DNA, 75 bp, synthetic construct
  source 1..75: mol_type = other DNA
actgaggcttgatgcagcaacattccatctctccagaaatgctcatatgcagggagatattagtgctgccaacgg

SEQ ID NO: 146586 - DNA, 75 bp, synthetic construct
  source 1..75: mol_type = other DNA
ttttggtctggagttggagaagtcggcgtttgggagatataacatagacaactctataaatgctaacttccgtta

SEQ ID NO: 146587 - DNA, 75 bp, synthetic construct
  source 1..75: mol_type = other DNA
actgaagcttgatgcagcaacattccatctctccagaaatactcgtatgcaaggagatattagtgctgccaacgg

SEQ ID NO: 146588 - DNA, 75 bp, synthetic construct
  source 1..75: mol_type = other DNA
actcaagattttcttaatcagcaacaaaagcatgattttgataaaacaatatcatatgactctaaaaaggggagc

SEQ ID NO: 146589 - DNA, 75 bp, synthetic construct
  source 1..75: mol_type = other DNA
acagacagcaatgccagcagccaggctttcagcggtaaaacaaaatcgctagggggaggggtgtatgcatcaggt

SEQ ID NO: 146590 - DNA, 75 bp, synthetic construct
  source 1..75: mol_type = other DNA
agctcagaaaaaacagaatatcagtacgggcattggtacgggggcggctattggtgcatccgttggtggtcctgt

SEQ ID NO: 146591 - DNA, 75 bp, synthetic construct
  source 1..75: mol_type = other DNA
agtcgaatttctgccacttccaagactgaattcccgttctgaacgctcagaagtacaggacatcatttcagttgt

SEQ ID NO: 146592 - DNA, 75 bp, synthetic construct
  source 1..75: mol_type = other DNA
ctggggctaattgataactcccgcgcggtagatgcggcagtcaacaccgtggcacaaattcgtgaagcctttggc

SEQ ID NO: 146593 - DNA, 75 bp, synthetic construct
  source 1..75: mol_type = other DNA
caaatcagtcgcggcgtgaggcattacagggaataagcgaggcagacagacgacgtgaagaaattgaggcgtcaa

SEQ ID NO: 146594 - DNA, 75 bp, synthetic construct
  source 1..75: mol_type = other DNA
ccggttggcggcgaactggaaatggtcgacggcaccacgctgtcgcattcccttgccgggcgtcataagattcgt

SEQ ID NO: 146595 - DNA, 75 bp, synthetic construct
  source 1..75: mol_type = other DNA
ccggttggcggcgaactggaaatggtcgatggcaccacgctgtcacactcccttgccgggcgtcataagattcgt

SEQ ID NO: 146596 - DNA, 75 bp, synthetic construct
  source 1..75: mol_type = other DNA
gaacatcgcgatcgcggtgatacctataacggtcaattctttaccagcggaccattaattgacggcgtgctggga

SEQ ID NO: 146597 - DNA, 75 bp, synthetic construct
  source 1..75: mol_type = other DNA
tttactgccggatacggtttcgaccgtcaggatcgtgattccgactcgctggacaaaaaccgcctggaacgccag

SEQ ID NO: 146598 - DNA, 75 bp, synthetic construct
  source 1..75: mol_type = other DNA
accattaattgatggtgtgctgggaatgaaagcttacggcagcctggcaaaacgtgaaaaggatgacccgcaaaa

SEQ ID NO: 146599 - DNA, 75 bp, synthetic construct
  source 1..75: mol_type = other DNA
tatcttattggtcaggatccatcgcgcatcaacgacttatggcaagtgatgtatcgcgccggtttttatcgtggc

SEQ ID NO: 146600 - DNA, 75 bp, synthetic construct
  source 1..75: mol_type = other DNA
aaaattcttggggttgttgatgggatgcctgaatggattgacaagccgccagtgccaaatagcgtgttgctttca

SEQ ID NO: 146601 - DNA, 75 bp, synthetic construct
  source 1..75: mol_type = other DNA
ggtgtagtgaatatcatcaccaaaaaaatcggtcagaaatggtcgggcaccgttaccgtcgataccaccgttcag

SEQ ID NO: 146602 - DNA, 75 bp, synthetic construct
  source 1..75: mol_type = other DNA
atgaacgtaccgccatggtcgctgcacaatttcccctggttcagagccacgctggcgcaatggcgttatgcgtta

SEQ ID NO: 146603 - DNA, 75 bp, synthetic construct
  source 1..75: mol_type = other DNA
actaccactacgacagccagcaccgtctggtgttcgacacgcggatacagcaaggggagccacgggtcgagagcc

SEQ ID NO: 146604 - DNA, 75 bp, synthetic construct
  source 1..75: mol_type = other DNA
agccgtgagggttttttatatccgacgccagcgacatccattcccagagacctgcttgaacctttgccaaaagga

SEQ ID NO: 146605 - DNA, 75 bp, synthetic construct
  source 1..75: mol_type = other DNA
atgattttgctgattttcttaacgataatctggcaaaaatcgttggcgtcgcgttggcgtggttagcgttcgcca

SEQ ID NO: 146606 - DNA, 75 bp, synthetic construct
  source 1..75: mol_type = other DNA
cgctgacggttgcctattatttgaatctggatgaaccctattgggcgatgacctcggctgcggtggttagctttc

SEQ ID NO: 146607 - DNA, 75 bp, synthetic construct
  source 1..75: mol_type = other DNA
tattcgcgcgctgcgccgggattttgtcgatcaactaagccgccatccaacactgagtgaaagcgaatttgaatc

SEQ ID NO: 146608 - DNA, 75 bp, synthetic construct
  source 1..75: mol_type = other DNA
ggggctacctcgcccaaaacaaatcaatggccgccattactggttacgtaaagaggtcctcgattttatagatac

SEQ ID NO: 146609 - DNA, 75 bp, synthetic construct
  source 1..75: mol_type = other DNA
aatgtatttcattctaatttgctcactcagattgaacgattaaaacctgtccatgtgattattttctctcccttt

SEQ ID NO: 146610 - DNA, 75 bp, synthetic construct
  source 1..75: mol_type = other DNA
aaacacaatattatgatgattctcaaccttaagcggatcaacgaactggtacgtcatcaacatattgattatctg

SEQ ID NO: 146611 - DNA, 75 bp, synthetic construct
  source 1..75: mol_type = other DNA
atacatgaagctgtttccgaacagttgcttctactcattttcaaagcacgcagattgtatctggatccagaatat

SEQ ID NO: 146612 - DNA, 75 bp, synthetic construct
  source 1..75: mol_type = other DNA
gcgcttaatgttatgtgccatttatacaatggttttgatgaaggaaatatcagcctgaaaagctggggagcgatg

SEQ ID NO: 146613 - DNA, 75 bp, synthetic construct
  source 1..75: mol_type = other DNA
ctggctgcgtcttgccgcacaaccagaggaccatatctacggctgcggcgaacaattctcctactttgatctgcg

SEQ ID NO: 146614 - DNA, 75 bp, synthetic construct
  source 1..75: mol_type = other DNA
ggccgtttattgctggaactacaaaacgacaaccatcaccacaaccgcatctggctgcgtcttgccgcacaacca

SEQ ID NO: 146615 - DNA, 75 bp, synthetic construct
  source 1..75: mol_type = other DNA
gattactactggaccttctttccacaacccacgtttgttagcacgcagaagtattactgccatgtcgacaacagc

SEQ ID NO: 146616 - DNA, 75 bp, synthetic construct
  source 1..75: mol_type = other DNA
gagggcgtgcagttcctggcctatatcaacccgtatgttgccagcgataaagacctctgcgaagaagcggcaaag

SEQ ID NO: 146617 - DNA, 75 bp, synthetic construct
  source 1..75: mol_type = other DNA
agcgttccggggcggggaagttaccgttaatgcgcccatcggtaaaccgccggtcttttatcgcgccgatagcga

SEQ ID NO: 146618 - DNA, 75 bp, synthetic construct
  source 1..75: mol_type = other DNA
cgactgcaaagagaatgcgggcggtgattactactggacctttttcccgcagccaacctttgtcagcacgcagaa

SEQ ID NO: 146619 - DNA, 75 bp, synthetic construct
  source 1..75: mol_type = other DNA
tatccgtgatgcgctggtacgtcagctgtataatccggttcagtggacgaaatctgttgaatacatggcagcgca

SEQ ID NO: 146620 - DNA, 75 bp, synthetic construct
  source 1..75: mol_type = other DNA
gactgcatctgttgcgctgtatcgcgtatggcagcagcagggcggtaaagcaccggcaatgatggccggtcacag

SEQ ID NO: 146621 - DNA, 75 bp, synthetic construct
  source 1..75: mol_type = other DNA
gaagccgaagccgaagccgaagccgaagccgaagccgaagccgaagccgaagccgaagccgaagccgaagccgaa

SEQ ID NO: 146622 - DNA, 75 bp, synthetic construct
  source 1..75: mol_type = other DNA
gaacatgattgaactcggctgcggcggctggatggctgacttcggcgagtatctgcccaccgacacttacctgca

SEQ ID NO: 146623 - DNA, 75 bp, synthetic construct
  source 1..75: mol_type = other DNA
atgaacatggcatcgtggtgattgatgaaactgcagctgtcggctttaacctctctttaggcattggtttcgaag

SEQ ID NO: 146624 - DNA, 75 bp, synthetic construct
  source 1..75: mol_type = other DNA
ccggaagggactggcgcaatggcggcaatcatcggtctggatgatgcgtctattgctaaggcttgtgaagaagca

SEQ ID NO: 146625 - DNA, 75 bp, synthetic construct
  source 1..75: mol_type = other DNA
tcgtgcccgtttcaagattggtatgtttgcccgccagacgggcaagacgttcaccaccacgctggaactggttga

SEQ ID NO: 146626 - DNA, 75 bp, synthetic construct
  source 1..75: mol_type = other DNA
gtgtcgatatcggcattcgtcacgacctgtttgttatctgggtgctggaacaggtgggcgacgtttactggacgc

SEQ ID NO: 146627 - DNA, 75 bp, synthetic construct
  source 1..75: mol_type = other DNA
atggaaagtaaagagcgtgcaccagccatcgtcgtcatggagatcggtgactgtatcactacatgggatgaagtg

SEQ ID NO: 146628 - DNA, 75 bp, synthetic construct
  source 1..75: mol_type = other DNA
ttaactggctcactcgctgtggagaaattttcagcaaagagagcgattatctcaccagccttgaccgtgaaattg

SEQ ID NO: 146629 - DNA, 75 bp, synthetic construct
  source 1..75: mol_type = other DNA
aatcagtcgcgggaaagccgaacctggcgataaaaccatgtgtgatgtctgggtgccggtggtggaatcgttacg

SEQ ID NO: 146630 - DNA, 75 bp, synthetic construct
  source 1..75: mol_type = other DNA
tgttccgcgatggcgcggacggcgtaatcagtcgcggtaaagccgaacctggcgataaaaccatgtgtgatgtgt

SEQ ID NO: 146631 - DNA, 75 bp, synthetic construct
  source 1..75: mol_type = other DNA
taacggcatcagcgctgaaattatgcataacgcctggcctgcgctgtgggcaaaatgtaactacgaagcccttca

SEQ ID NO: 146632 - DNA, 75 bp, synthetic construct
  source 1..75: mol_type = other DNA
tgctacatgaacttcgactttagcgcaccggaataccatgagctggcgctgtgggaagacaaagccactctgcgt

SEQ ID NO: 146633 - DNA, 75 bp, synthetic construct
  source 1..75: mol_type = other DNA
ggccgactgcaaagaaaatgcgggcggcgactattactggactttcttcccacagcctacgtttgtcagcacgca

SEQ ID NO: 146634 - DNA, 75 bp, synthetic construct
  source 1..75: mol_type = other DNA
atggaaagtaaagagcgtgcaccagccatcgtcgtcatggagatcggtaactgcatcactatatgggatgaggtg

SEQ ID NO: 146635 - DNA, 75 bp, synthetic construct
  source 1..75: mol_type = other DNA
atgaaggctttggaccaaatggttcaatgattatcgctgaaacgttgacttcaaatgttaatcgtacaattgcta

SEQ ID NO: 146636 - DNA, 75 bp, synthetic construct
  source 1..75: mol_type = other DNA
atgaaggctttggtcctaatggctcaatgattatcgctgagacattgacttcaaatgttaaccgtacgattgcta

SEQ ID NO: 146637 - DNA, 75 bp, synthetic construct
  source 1..75: mol_type = other DNA
tgtcggtatatggttatcccgtgccaaccacaccgtggctgaatactgctcccggtttatttattgacggctata

SEQ ID NO: 146638 - DNA, 75 bp, synthetic construct
  source 1..75: mol_type = other DNA
gtttttaacggagagaagaatgtgccggcagacagtctgaaaccacagcctctgattcttccggtcaagggaaaa

SEQ ID NO: 146639 - DNA, 75 bp, synthetic construct
  source 1..75: mol_type = other DNA
gtttttaacggagagaaaaatgtgccggcagacagtctgaaaccgcagccacttattcttccggaccacaggtaa

SEQ ID NO: 146640 - DNA, 75 bp, synthetic construct
  source 1..75: mol_type = other DNA
cgcgccaaagaatcagtacaactcattcggcaaatataaatacagaagctgcgaagatattcttgaaggcgttaa

SEQ ID NO: 146641 - DNA, 75 bp, synthetic construct
  source 1..75: mol_type = other DNA
ataccctttcccagctattgatactagtaactgggatgcaggtgtctggactgcaattattaacagtaccgtagc

SEQ ID NO: 146642 - DNA, 75 bp, synthetic construct
  source 1..75: mol_type = other DNA
atagatccaacttctaaagcgtcagaatataacgacctgatgcaaatcatcaaagatattgaccagatcatcatg

SEQ ID NO: 146643 - DNA, 75 bp, synthetic construct
  source 1..75: mol_type = other DNA
accagaccaaccatgtaggctggacgccgctactggaagcaattgtgcttaatgatggtggtattaaacagcagg

SEQ ID NO: 146644 - DNA, 75 bp, synthetic construct
  source 1..75: mol_type = other DNA
catgcaactgattgatctctatccggacgcccgcattgctttgctggagaaagagtctggcccggcctgtcacca

SEQ ID NO: 146645 - DNA, 75 bp, synthetic construct
  source 1..75: mol_type = other DNA
ttgtaaatagcaaatatttattttcccccttaacatcattgccccagttagaaatttgttataaggccgctgagg

SEQ ID NO: 146646 - DNA, 75 bp, synthetic construct
  source 1..75: mol_type = other DNA
aagaaaggcagctttgcttcccgtaaaacagatgacatgcagttgttgtcaacgccaagattattggccgttttt

SEQ ID NO: 146647 - DNA, 75 bp, synthetic construct
  source 1..75: mol_type = other DNA
ttttattgtcgcgttgttgcagaccacggctgatgaggctgcagagtttaccgggatgattcctgtttatcattt

SEQ ID NO: 146648 - DNA, 75 bp, synthetic construct
  source 1..75: mol_type = other DNA
catgatttaaatgaagatgcggaatttgatgagaacggagttgaggtttttgacgaaaaggccttagtaccttag

SEQ ID NO: 146649 - DNA, 75 bp, synthetic construct
  source 1..75: mol_type = other DNA
ctcgaagggacgccggagcagcacaaagcgcaggacgtttacaacatcagacgagacgaattagaaggggcaact

SEQ ID NO: 146650 - DNA, 75 bp, synthetic construct
  source 1..75: mol_type = other DNA
cattttgccgatgacgttatcgcccagcgcggcgtgcggcacgggcatttgcagtgcctgccgaaggaagattaa

SEQ ID NO: 146651 - DNA, 75 bp, synthetic construct
  source 1..75: mol_type = other DNA
gttggagtcattaccgaagttgtgttgattggtgatcggtattacgtgaaagccacggcaactattaccgatggc

SEQ ID NO: 146652 - DNA, 75 bp, synthetic construct
  source 1..75: mol_type = other DNA
acggtaaaggcggggtgaaaaagtcctcaatgagcagggctattgccacagagtacacgaaggcagactggaagg

SEQ ID NO: 146653 - DNA, 75 bp, synthetic construct
  source 1..75: mol_type = other DNA
cgccagccttgtcggttctatcggcgtcatcagctcggggtttggattcaccggcttgatggacaagctcggcat

SEQ ID NO: 146654 - DNA, 75 bp, synthetic construct
  source 1..75: mol_type = other DNA
atcgccccgtatgacgacgaaatctcgatggttttagcaaaagaggcggcaatcgaccttgaagcactggaggcg

SEQ ID NO: 146655 - DNA, 75 bp, synthetic construct
  source 1..75: mol_type = other DNA
taaatgaagataatgaacctgttatggtttttaacggagagagaatagttcctgcggacggccttaagtcacagc

SEQ ID NO: 146656 - DNA, 75 bp, synthetic construct
  source 1..75: mol_type = other DNA
acagacgaagataatgaacccgttatggtttttaacggagagaggaatgtaccggcagacagtctgaaaccgcag

SEQ ID NO: 146657 - DNA, 75 bp, synthetic construct
  source 1..75: mol_type = other DNA
ctgtaataatcacaattgcatgcggatacactgagaagagtgccacaggaaatgtgctgcttctgtttctccttc

SEQ ID NO: 146658 - DNA, 75 bp, synthetic construct
  source 1..75: mol_type = other DNA
agtgacatcacgtctcatcagtccgtcagcaggaaaatcagtgcccgtcatttcgcaggcatttttcagtggctg

SEQ ID NO: 146659 - DNA, 75 bp, synthetic construct
  source 1..75: mol_type = other DNA
tgtgttgcttctgtttctccttctgctccttgcacacagaaatactctcacatccactacagctctgttatttct

SEQ ID NO: 146660 - DNA, 75 bp, synthetic construct
  source 1..75: mol_type = other DNA
ggtttttaacggagagagaatagttcctgcggacggccttaagtcacagcctgtgattcttccgggcaagggaaa

SEQ ID NO: 146661 - DNA, 75 bp, synthetic construct
  source 1..75: mol_type = other DNA
gaataggctttgtcgatcttcatgtacaatcggtggatacaattgacgggttaagattgacactaagtgatggtt

SEQ ID NO: 146662 - DNA, 75 bp, synthetic construct
  source 1..75: mol_type = other DNA
aaaatagcggaattgcatttggtacaagtggtgctcgtggattagtgaaagattttacacccaacgtgtgtgctg

SEQ ID NO: 146663 - DNA, 75 bp, synthetic construct
  source 1..75: mol_type = other DNA
tttttgggcgtgcatctcacccgaatgatcgatggcagcgtcaccgtcgggccaaacgcggtgctggctttcaaa

SEQ ID NO: 146664 - DNA, 75 bp, synthetic construct
  source 1..75: mol_type = other DNA
ctggcgctggaggtgatggccggcgaattgacgctaaaggtcaaaaaagtgatttcggtggcggaagttctggag

SEQ ID NO: 146665 - DNA, 75 bp, synthetic construct
  source 1..75: mol_type = other DNA
agccagccgtattgtctccacccagcatcatcaccacgatctctcggttgctactctgcatgtgcacattaatca

SEQ ID NO: 146666 - DNA, 75 bp, synthetic construct
  source 1..75: mol_type = other DNA
gttagcctattctgcaatgcaagacggcatcccttgcatcatggtgacaggcagccatatcccgtttgatcgtaa

SEQ ID NO: 146667 - DNA, 75 bp, synthetic construct
  source 1..75: mol_type = other DNA
gcgctactgaagaaaaagggggcgaaagccaccataccgccgagaaaaaatgcggcaccgtgggaggaaggccat

SEQ ID NO: 146668 - DNA, 75 bp, synthetic construct
  source 1..75: mol_type = other DNA
atgtcggtatatggttatcccgtgccaaccacaccgtggctgaatatggctcccggtttatttattgacggctat

SEQ ID NO: 146669 - DNA, 75 bp, synthetic construct
  source 1..75: mol_type = other DNA
caccgtggctgaatactgctcccggtttatttattgacggctatacatcggcagcagccagtaccgtaccttccc

SEQ ID NO: 146670 - DNA, 75 bp, synthetic construct
  source 1..75: mol_type = other DNA
ggttccgggcatgatcgagcgctacactgctgccatcactggtgcagaaggcaagatcccccgtctggaagactg

SEQ ID NO: 146671 - DNA, 75 bp, synthetic construct
  source 1..75: mol_type = other DNA
ttttgcgatcaaaacggcattcgctacgacaactgcggcaagatgctggtcgccacctctgaactcgaaatggaa

SEQ ID NO: 146672 - DNA, 75 bp, synthetic construct
  source 1..75: mol_type = other DNA
actaccactacgacagccagcaccgcctggtgttcaacacgcggatacagcaaggggagccactggtcgagagcc

SEQ ID NO: 146673 - DNA, 75 bp, synthetic construct
  source 1..75: mol_type = other DNA
agcaactcgtgatgcgctgttgcctgcacttgctgtattatcattagcatatcaaaattataaaaatataaatga

SEQ ID NO: 146674 - DNA, 75 bp, synthetic construct
  source 1..75: mol_type = other DNA
atgcgaataggtatttatgagcattcaagtgctggtcgtgatctctatgctaagatttttactcgattaggtgct

SEQ ID NO: 146675 - DNA, 75 bp, synthetic construct
  source 1..75: mol_type = other DNA
actgtcgctgtagctattgataatagaccaagcagttactcaatggctcaagcctgtgttcatgcaataattgaa

SEQ ID NO: 146676 - DNA, 75 bp, synthetic construct
  source 1..75: mol_type = other DNA
aaaactatccgaaagagaaaagcaagcaacttatcacacggataagacataaccccaacatattgattgatttgt

SEQ ID NO: 146677 - DNA, 75 bp, synthetic construct
  source 1..75: mol_type = other DNA
taatagaacattgcaagctcttccaacaagagatgcccttttaccagctataatagttatggttgagtcatttaa

SEQ ID NO: 146678 - DNA, 75 bp, synthetic construct
  source 1..75: mol_type = other DNA
agcgcggattggtatttatgaacactcatctgcgggaagagatttttatcactatatttttaaagcgcttggtgc

SEQ ID NO: 146679 - DNA, 75 bp, synthetic construct
  source 1..75: mol_type = other DNA
aatggtggttttctccttgcctccgatttacaaattaatggcaaggaattaaaatcgttacctacacgagatgct

SEQ ID NO: 146680 - DNA, 75 bp, synthetic construct
  source 1..75: mol_type = other DNA
ggtttcggtggcggaagttctggagccgcaggacagggaattactgcgcagcgtgttcaacaatgtgggcgaaat

SEQ ID NO: 146681 - DNA, 75 bp, synthetic construct
  source 1..75: mol_type = other DNA
ttccaggcgcaaaccaaacggctggaacaacgttcgcctacgatcattgtcgcaccagctcaggtattacgcgca

SEQ ID NO: 146682 - DNA, 75 bp, synthetic construct
  source 1..75: mol_type = other DNA
ttttaattctgatattttaaaggggaaaagaataggagtatatgagcattctagtgcaggacgagatctatatgc

SEQ ID NO: 146683 - DNA, 75 bp, synthetic construct
  source 1..75: mol_type = other DNA
tgcccctgaactccgttgttacgctgaaggcagtgatgaaaatcaggctaagcaatatgttacgaatgtgcttgg

SEQ ID NO: 146684 - DNA, 75 bp, synthetic construct
  source 1..75: mol_type = other DNA
tgctccagaactccgttgttatgctgaggccagtgatgaaaatcaggctaagcaatatgttacgaatgtgctggg

SEQ ID NO: 146685 - DNA, 75 bp, synthetic construct
  source 1..75: mol_type = other DNA
acgcgtgggataaagcggcaaacagcaatcagccgctggcgcacacagttgtgctgctcaatagcgggggcgacg

SEQ ID NO: 146686 - DNA, 75 bp, synthetic construct
  source 1..75: mol_type = other DNA
tcgtaagatcgtcgtcaacgaggaagtaggtgacaccgggcgttataacttcggccagaaatgcgttttctgggc

SEQ ID NO: 146687 - DNA, 75 bp, synthetic construct
  source 1..75: mol_type = other DNA
cagctggcgcgaattctgcacccgtttgtcggcgtggttatgtttgcctcattcatcatcatgtttttccgttac

SEQ ID NO: 146688 - DNA, 75 bp, synthetic construct
  source 1..75: mol_type = other DNA
tgatgctgcccgagcaggcaagtaatatccggctacaaagtagcgaaacaccgcaggagattttccgcaacaacc

SEQ ID NO: 146689 - DNA, 75 bp, synthetic construct
  source 1..75: mol_type = other DNA
gacattctctcttttggtgacgaattatcgccgcaaaatgtgcaggtccgctggcgtgaaccggcaaaaacggct

SEQ ID NO: 146690 - DNA, 75 bp, synthetic construct
  source 1..75: mol_type = other DNA
ccgccatctgttacgtttctcgcaaaaagggcaattcgttctgcctccggcgcgttacgtgcgcacttatgcgcc

SEQ ID NO: 146691 - DNA, 75 bp, synthetic construct
  source 1..75: mol_type = other DNA
gaacgtatcgcaaacgccctcgatgtagcccttcctgaattgcttgaaacaaccgatcttgatgaaaatagcctg

SEQ ID NO: 146692 - DNA, 75 bp, synthetic construct
  source 1..75: mol_type = other DNA
cactatggcgtagtcgccgggcagggcaatattcggggaacagaagggccgcgcaatgcggtcgccaccgggctg

SEQ ID NO: 146693 - DNA, 75 bp, synthetic construct
  source 1..75: mol_type = other DNA
ggcgaaccgggcactcacgccggcggcatgcttgagcgggtgcgcaaggtaatggcgtccctgaccggccatgag

SEQ ID NO: 146694 - DNA, 75 bp, synthetic construct
  source 1..75: mol_type = other DNA
ggcacgattaccgccatggtggaaggatgggttaccagcgcctgggcgaagaaacatcccccgcgctggtaccgt

SEQ ID NO: 146695 - DNA, 75 bp, synthetic construct
  source 1..75: mol_type = other DNA
gtaggtgacaccgggcgtataacttcggtcagaaatgcgttttctgggcggcgattattttcctggttctgctgc

SEQ ID NO: 146696 - DNA, 75 bp, synthetic construct
  source 1..75: mol_type = other DNA
tcgtaagatcgtcgtcaacgaggaagtaggtgacaccgggcgtataacttcggtcagaaatgcgttttctgggcg

SEQ ID NO: 146697 - DNA, 75 bp, synthetic construct
  source 1..75: mol_type = other DNA
tgccggacggtcacaactttaccctgatgtgtcgcgatctttctgaactctcgacctattcatttgtggataacg

SEQ ID NO: 146698 - DNA, 75 bp, synthetic construct
  source 1..75: mol_type = other DNA
gccgtctgttgcaggaaaaacgcaaaaccatcggtatgcgtgtgccttctaacccgattgcgcaggcgttgcttg

SEQ ID NO: 146699 - DNA, 75 bp, synthetic construct
  source 1..75: mol_type = other DNA
gatgtgtcgcgatctttctgaactctcgacctattcatttgttgataacgttgcgtttcgtttaatgaaaaacaa

SEQ ID NO: 146700 - DNA, 75 bp, synthetic construct
  source 1..75: mol_type = other DNA
ttctctcagagctggatgttttatcaaaagagatcatgcctggttgtggtcttgtttttgagctataccaacgtc

SEQ ID NO: 146701 - DNA, 75 bp, synthetic construct
  source 1..75: mol_type = other DNA
tgactaaatttgcaggcgctgagatgcgccagacgctgacgctgcacaaaggggcgaattatatttcgctgacgc

SEQ ID NO: 146702 - DNA, 75 bp, synthetic construct
  source 1..75: mol_type = other DNA
tgatgttgcccgagcaggcgagcaatatccggctacaaagtagcgaaacgccgcaggagattttccgtaacaatc

SEQ ID NO: 146703 - DNA, 75 bp, synthetic construct
  source 1..75: mol_type = other DNA
tatcggcttatccctggtgaagaagagatgagctttactctgcaaccggtgaccagcaatgagattgacagcgat

SEQ ID NO: 146704 - DNA, 75 bp, synthetic construct
  source 1..75: mol_type = other DNA
tcccaaagaggggtaaaaacggaagatttgtcaacggaagatacccgcaatattaacgacagcctgattctcggc

SEQ ID NO: 146705 - DNA, 75 bp, synthetic construct
  source 1..75: mol_type = other DNA
tgctcgacagctatgcggagcaggcggataacatgccgttattgcatcgtgcgctggtgctggcgtgggcgcagg

SEQ ID NO: 146706 - DNA, 75 bp, synthetic construct
  source 1..75: mol_type = other DNA
gctacaccgcgccggaacgtatcaaccactgggtaaccgccttctgtttcatcctggcggcggtgagtgggctgg

SEQ ID NO: 146707 - DNA, 75 bp, synthetic construct
  source 1..75: mol_type = other DNA
tgatgttgcccgagcaggcgagcaatatccggctacaaagtagtgaaacgccgcaggagattttccgcaacaatc

SEQ ID NO: 146708 - DNA, 75 bp, synthetic construct
  source 1..75: mol_type = other DNA
gggcaattgctggaaaaagcgcgaaatgaaatgggcgaactggcctatatggtgccggtgaaagaactgacggga

SEQ ID NO: 146709 - DNA, 75 bp, synthetic construct
  source 1..75: mol_type = other DNA
actgctaattttattcattgagaccctcttacaaagagggcaacaatatattttcctaactgatgagcctgagct

SEQ ID NO: 146710 - DNA, 75 bp, synthetic construct
  source 1..75: mol_type = other DNA
tcaatggtttttggcaaagattaaatgctctttgctcttttaatgatgatgtaaacatcatcattggaaggaatg

SEQ ID NO: 146711 - DNA, 75 bp, synthetic construct
  source 1..75: mol_type = other DNA
tttaaatgtagattacagatcatttgaggcattacgaaagacgcaaagaattataaagatgtctttaaaatccga

SEQ ID NO: 146712 - DNA, 75 bp, synthetic construct
  source 1..75: mol_type = other DNA
ccggcagatatgacgcgctgggctgaaattaaaaagaatctgcgcttcaggatgcggcaggaagccaggacgaat

SEQ ID NO: 146713 - DNA, 75 bp, synthetic construct
  source 1..75: mol_type = other DNA
atgtggatgccattcatgctgactggcaaaccggtaacggcgtactggcatctgagaatgatatgcacacggcca

SEQ ID NO: 146714 - DNA, 75 bp, synthetic construct
  source 1..75: mol_type = other DNA
gaactaagaacagaactagcaaaactagtctcgctttcttctttatctgtttacagattaagaaatagtgatgat

SEQ ID NO: 146715 - DNA, 75 bp, synthetic construct
  source 1..75: mol_type = other DNA
tcgcttatttttcatgtattctttggcgtagtggataaaatatttatttttactttggtatgctgcttttatgca

SEQ ID NO: 146716 - DNA, 75 bp, synthetic construct
  source 1..75: mol_type = other DNA
ctgaaagggacgaaggaggtgccacgccgtctgttgcaggaaaaacgcaaaaccatcggtatgcgtgtgccttct

SEQ ID NO: 146717 - DNA, 75 bp, synthetic construct
  source 1..75: mol_type = other DNA
ctgataacccgcagcaacgtctgatcaaccaggcggtggagatcgtgcgtaaaggcggggtgattgtttatccaa

SEQ ID NO: 146718 - DNA, 75 bp, synthetic construct
  source 1..75: mol_type = other DNA
gccgactgttgcaggaaaaacgtaaaaccattggtatgcgcgtgccatctaaccccatcgcccaggcattacttg

SEQ ID NO: 146719 - DNA, 75 bp, synthetic construct
  source 1..75: mol_type = other DNA
acccgttccgagctggatcgttacggaaaggcaaaaaagattgagttctccatcagctttcagcggtgtgatgag

SEQ ID NO: 146720 - DNA, 75 bp, synthetic construct
  source 1..75: mol_type = other DNA
atggcacggggcagatttacggaatgtacgtgattacaggattacagaccacccgctccgagctggatcgttacg

SEQ ID NO: 146721 - DNA, 75 bp, synthetic construct
  source 1..75: mol_type = other DNA
gaaaacctccagccacacattgatgctctgagactcgatgtcatcgtgatccaattcaactatggattctttaat

SEQ ID NO: 146722 - DNA, 75 bp, synthetic construct
  source 1..75: mol_type = other DNA
tgaaggctttggtttacctattgctgaagcaatgctgagtgggctaccggctatcgtcaccaattggagcgggca

SEQ ID NO: 146723 - DNA, 75 bp, synthetic construct
  source 1..75: mol_type = other DNA
tccaccgcgggttaccaaaatggatgccaaagtaaaattccttcattgttatgcttgggaagaaacgggctttcc

SEQ ID NO: 146724 - DNA, 75 bp, synthetic construct
  source 1..75: mol_type = other DNA
caaagtggaaagtttgttccacctgcgccatgaagatggcagcgttcagttctttccttccccactgccacctgc

SEQ ID NO: 146725 - DNA, 75 bp, synthetic construct
  source 1..75: mol_type = other DNA
ctgcaagatattccctcaccgcttaagcgcctgttaccggattaccaggtgatcgaagctcgcgtagacgctgct

SEQ ID NO: 146726 - DNA, 75 bp, synthetic construct
  source 1..75: mol_type = other DNA
gttcgtttacgactggtgaacgcagagtatcctgttggggagtcacgcgatctggtggcagagcttaaagctgct

SEQ ID NO: 146727 - DNA, 75 bp, synthetic construct
  source 1..75: mol_type = other DNA
cgaccagatgtctccggcagacctgaatgcagcggcgtggcttgtggctgggttttttcctccaggcctgacggc

SEQ ID NO: 146728 - DNA, 75 bp, synthetic construct
  source 1..75: mol_type = other DNA
gatgaacggcaagacctatccggttgatgacaagatgctcaactacacgctggtgcagccggtaggcgtttgtgc

SEQ ID NO: 146729 - DNA, 75 bp, synthetic construct
  source 1..75: mol_type = other DNA
cagaacgtgccagagatcgccgcgatggaaaccgcggacacgggcctgccgatccatcagaccaaaaatgtgttg

SEQ ID NO: 146730 - DNA, 75 bp, synthetic construct
  source 1..75: mol_type = other DNA
ggtgattttgccccagatgcctcgtttatggcacagtcggaaaatagtgatcttctggcattttataatcaatgt

SEQ ID NO: 146731 - DNA, 75 bp, synthetic construct
  source 1..75: mol_type = other DNA
tactgcaccacgatcttatccccctcgtgcaggcggaaacctatctgcaggacgatgtatacaaaccctactatt

SEQ ID NO: 146732 - DNA, 75 bp, synthetic construct
  source 1..75: mol_type = other DNA
ccctgatgcggagagtctgcggttgctttcagaagccgatcttctgatttttgcttatcagaatactggggagtc

SEQ ID NO: 146733 - DNA, 75 bp, synthetic construct
  source 1..75: mol_type = other DNA
gccgtggttttttctattgagcatgtcggcgtggcttggcttttgtacctgggcttgcgcgcacttcacgaataa

SEQ ID NO: 146734 - DNA, 75 bp, synthetic construct
  source 1..75: mol_type = other DNA
gctttgctcatgggtcggcgcactttgctggaacgtcgccagccagcgattaccaacggtgattctcgggccact

SEQ ID NO: 146735 - DNA, 75 bp, synthetic construct
  source 1..75: mol_type = other DNA
gagcggtatcgcgctgttagtggtcggcgtggtgattgcggtcagagcaaaaccggaaaaaaccttaactgaatc

SEQ ID NO: 146736 - DNA, 75 bp, synthetic construct
  source 1..75: mol_type = other DNA
tggtgccgctccaggcggcgcacctaaagcaggaacagtatccatgacattctccggtgttacagcaggtgcagg

SEQ ID NO: 146737 - DNA, 75 bp, synthetic construct
  source 1..75: mol_type = other DNA
ctttatggggtaacgggcgcggacgggactaccacgtttacggtaaaacaagatgattctatgggtctgatgacc

SEQ ID NO: 146738 - DNA, 75 bp, synthetic construct
  source 1..75: mol_type = other DNA
cgctgttcgaccaaaatagcagcatgcaggctgaatgcggtgtaggtcatattccgagccagaatcaattacagg

SEQ ID NO: 146739 - DNA, 75 bp, synthetic construct
  source 1..75: mol_type = other DNA
gtcgccagccagcgattaccgacagtgattctcgggccgctgattgttttcgaaacgctggcaggtttgctgtac

SEQ ID NO: 146740 - DNA, 75 bp, synthetic construct
  source 1..75: mol_type = other DNA
tttgatgatcaggtgaatgaaggcgatatgactatcgagaaacagggcgttggcctggtggttgacccaatgagc

SEQ ID NO: 146741 - DNA, 75 bp, synthetic construct
  source 1..75: mol_type = other DNA
ttcaaacctgaaacgtcagttaaagagggggtaaagaactttgtagaatggtatcgtaacttctataaagtttga

SEQ ID NO: 146742 - DNA, 75 bp, synthetic construct
  source 1..75: mol_type = other DNA
cgaaaatccatatgcttacgcagattccaatttaacgggctacctgaatattttggaaggttgccgtcataataa

SEQ ID NO: 146743 - DNA, 75 bp, synthetic construct
  source 1..75: mol_type = other DNA
tggggcagccaaagcaggaacggtggctctgactttttccggcgtatccagtgggaacaataaagatatgctgca

SEQ ID NO: 146744 - DNA, 75 bp, synthetic construct
  source 1..75: mol_type = other DNA
gtgtcccgcaggccgaagggataactctagattataatggttacttgtatatagtgagtgaaccgaatttgttct

SEQ ID NO: 146745 - DNA, 75 bp, synthetic construct
  source 1..75: mol_type = other DNA
ttgactacaccgaaggtctggaaggttcgcgcttcatcgtgaacaacccgaatgcgaaaagtacctgcggttgcg

SEQ ID NO: 146746 - DNA, 75 bp, synthetic construct
  source 1..75: mol_type = other DNA
tcaggtattttaaccgacttcacctttcatgatctgaaggcgaaaggaatttcagactatgaaggaagtagccgg

SEQ ID NO: 146747 - DNA, 75 bp, synthetic construct
  source 1..75: mol_type = other DNA
agtgcgcgatggagatcgcctatctgtgcgccacgcggatcggcgatatacgaaagctgacgtgggatcaggtaa

SEQ ID NO: 146748 - DNA, 75 bp, synthetic construct
  source 1..75: mol_type = other DNA
gtgatcaatacaaccaaaggcgggaaagtcatagctaaaacgctgaataactggtggaatcaggctaaacgcgca

SEQ ID NO: 146749 - DNA, 75 bp, synthetic construct
  source 1..75: mol_type = other DNA
gggaaaatgcttgctgataatgtaaaaattgagcaggtaagaattttcatggataagcgggggcttgagagcaag

SEQ ID NO: 146750 - DNA, 75 bp, synthetic construct
  source 1..75: mol_type = other DNA
ggaaaaattcctcgccagcgcctgttacagtgagttgagcccaagaacacaaaaagattatctgcaacatcaaaa

SEQ ID NO: 146751 - DNA, 75 bp, synthetic construct
  source 1..75: mol_type = other DNA
atacccaaataaatatagttatgtatggaaaccaacatccagagaatctgtaacactaaccgccatcaaagatgg

SEQ ID NO: 146752 - DNA, 75 bp, synthetic construct
  source 1..75: mol_type = other DNA
aacgatacttcgataagtggttgtggcgcagagtatgttccaactgacaatgaacttaagaccatttatgcgcac

SEQ ID NO: 146753 - DNA, 75 bp, synthetic construct
  source 1..75: mol_type = other DNA
gttcagtcggccaaaactggcggcagaagtcgataacgaaaatggtaccgttaacgatcacaatgaaacctggtc

SEQ ID NO: 146754 - DNA, 75 bp, synthetic construct
  source 1..75: mol_type = other DNA
ggaattgggatatcgaggcgcagtgtggcagcttgaccaacgcgccaaacgatgacgacttaatgggtctgtata

SEQ ID NO: 146755 - DNA, 75 bp, synthetic construct
  source 1..75: mol_type = other DNA
tcagtggacacaaaacagaaaatcaggtgttgatttacgatcgtaaaacaaaaatcacaccaacactggatttac

SEQ ID NO: 146756 - DNA, 75 bp, synthetic construct
  source 1..75: mol_type = other DNA
gtgccacgccagtcacagcttgatgcgctctatcgcgccaacagtaataacgcgattcaaactgagcatggttgg

SEQ ID NO: 146757 - DNA, 75 bp, synthetic construct
  source 1..75: mol_type = other DNA
ggtacctcacaatcctcaatggtttactccggtattacagacgcacaggggcaggcaaccgttgttgttgagcag

SEQ ID NO: 146758 - DNA, 75 bp, synthetic construct
  source 1..75: mol_type = other DNA
acagaaaggctgtgtcattggtcgtggaagccggatacagtcgcacacgtttatttgtgagaacgtaacactggg

SEQ ID NO: 146759 - DNA, 75 bp, synthetic construct
  source 1..75: mol_type = other DNA
tgctggaacgtcgccagccagcgattaccgacagtgattctcgggccgctgattgttttcgaaacactggcaggt

SEQ ID NO: 146760 - DNA, 75 bp, synthetic construct
  source 1..75: mol_type = other DNA
tcggtcttacgtgtgtaaacattgctgagttaaaccacggactccccgattttggctggacacgttatgcctcag

SEQ ID NO: 146761 - DNA, 75 bp, synthetic construct
  source 1..75: mol_type = other DNA
tatcgatgcggcacaactcggtggcctggtgtcttacaacatcgaccgtctgcatgagctggatgaagtgggcgt

SEQ ID NO: 146762 - DNA, 75 bp, synthetic construct
  source 1..75: mol_type = other DNA
ccagctcatggcgtgagtgcgctaatacaagttatctgaaatctctgttccgggtgccttatagagacaaaatca

SEQ ID NO: 146763 - DNA, 75 bp, synthetic construct
  source 1..75: mol_type = other DNA
cgccgtggtactggcgcataaccatccttccgctaacactacacccagccaggctgacaagctgatcaccgagcg

SEQ ID NO: 146764 - DNA, 75 bp, synthetic construct
  source 1..75: mol_type = other DNA
gtctcttgaccgcgaaaccagcctcgcccttaacgcctgcgcacgtcagcatcatctgacgctcagcgcgctgtt

SEQ ID NO: 146765 - DNA, 75 bp, synthetic construct
  source 1..75: mol_type = other DNA
atgttactgcgacgttaaacttgccgcaggaaccgtcactggtggatgtcgagctggactggcaggaaaatagcg

SEQ ID NO: 146766 - DNA, 75 bp, synthetic construct
  source 1..75: mol_type = other DNA
taaaggcgatttacatgctggtgagattggcccggttcgggtaaatggtcgctgggacggtattcgtctgcgcgg

SEQ ID NO: 146767 - DNA, 75 bp, synthetic construct
  source 1..75: mol_type = other DNA
tgttagcagggttgatgtgggggcttatttttgtcgggccgttgatcgtgccggaatacccggcgatgttgcagt

SEQ ID NO: 146768 - DNA, 75 bp, synthetic construct
  source 1..75: mol_type = other DNA
acggcagcggtggccaccatgggggaagcatcagcgtttaaatcggggcgagagttcgccgcatatgtcggtctg

SEQ ID NO: 146769 - DNA, 75 bp, synthetic construct
  source 1..75: mol_type = other DNA
caacattgtcacgatctcaccctcccaccgtggaaaatcgttctgatcgcaatgccaacacaaggtgagtacgtc

SEQ ID NO: 146770 - DNA, 75 bp, synthetic construct
  source 1..75: mol_type = other DNA
gtcagatcagccgtgcgcgtacattcggtttcatgcgcgatattgaatatctgcagtctcgtggtttgtgcctgg

SEQ ID NO: 146771 - DNA, 75 bp, synthetic construct
  source 1..75: mol_type = other DNA
taagtgggctgaatttaagccgtacaatggtttttcgctggatttcaccatcgattttaaccatccggctattga

SEQ ID NO: 146772 - DNA, 75 bp, synthetic construct
  source 1..75: mol_type = other DNA
ctaacatttttaaaaaactcagacagaaaggaatactcgtcgagcatcatggtcatctctatatcaactctaaca

SEQ ID NO: 146773 - DNA, 75 bp, synthetic construct
  source 1..75: mol_type = other DNA
ctggttttattgggtttcatgtcagcaaacgccttttgaatgatgggcatcaagttgttgggattgataacatta

SEQ ID NO: 146774 - DNA, 75 bp, synthetic construct
  source 1..75: mol_type = other DNA
cagtggaactgatggactacatcaccgctctggaagaagcgctgggaatggaggcgcagaagaatatgatgccga

SEQ ID NO: 146775 - DNA, 75 bp, synthetic construct
  source 1..75: mol_type = other DNA
cctgtacggcatcccgaccaccgggctgcgcttctttacagtgtatggtccgtggggtcgcccggatatggcgct

SEQ ID NO: 146776 - DNA, 75 bp, synthetic construct
  source 1..75: mol_type = other DNA
atgaacagtgcgatcgccaactcatccgtatctgaagaaaaagctcttgagtgggccgactcttttatcacggaa

SEQ ID NO: 146777 - DNA, 75 bp, synthetic construct
  source 1..75: mol_type = other DNA
caacttgttgaccgtatacaaaacgcgatctttgccaaggcatataaggatgcgcgcctggtaaggatggttgca

SEQ ID NO: 146778 - DNA, 75 bp, synthetic construct
  source 1..75: mol_type = other DNA
cgcccaaccagggtgaaagcattccttagcgcggcgcaatcagcatcaccattggcagaaatggttcagaggttg

SEQ ID NO: 146779 - DNA, 75 bp, synthetic construct
  source 1..75: mol_type = other DNA
acagcatacatgttgataaaccacgaaaagtatataaaagaacaaaggaaaatgaggaagcaagaagaaacgctg

SEQ ID NO: 146780 - DNA, 75 bp, synthetic construct
  source 1..75: mol_type = other DNA
cgtcgttgggatatcttttcccgcagaatgaaacgcaagatttacgtctgcatagcgcttttaaacatgcggtaa

SEQ ID NO: 146781 - DNA, 75 bp, synthetic construct
  source 1..75: mol_type = other DNA
cagaaactagagctgaattttttgatgaagtttttctcaaattcccggagctagagtcttctatcattgatgatt

SEQ ID NO: 146782 - DNA, 75 bp, synthetic construct
  source 1..75: mol_type = other DNA
tgatgaactggaactcttcgatgattatctggatgaagatttagagcgtgaaaaggaattgaagtgcgaacaata

SEQ ID NO: 146783 - DNA, 75 bp, synthetic construct
  source 1..75: mol_type = other DNA
gattattatctttcaccgaaaaagaaacaaactcaggatgacaagaagcaaaaaattaaaccgaagatgtatttt

SEQ ID NO: 146784 - DNA, 75 bp, synthetic construct
  source 1..75: mol_type = other DNA
gacaaaagaacaaagtatcgggtttagacccattcgatgacagtgaagatgattattatctttcaccgaaaaaga

SEQ ID NO: 146785 - DNA, 75 bp, synthetic construct
  source 1..75: mol_type = other DNA
aatgcggcgaagctgaaaaaaggcgaaacgctacaggtaaaggtgacggtaaaagatgcgcagggcaatccattg

SEQ ID NO: 146786 - DNA, 75 bp, synthetic construct
  source 1..75: mol_type = other DNA
acatcgaccgttgttaacgacggaattgccgtccggggctaatcccgtatcctcaccgattattaactacgaaaa

SEQ ID NO: 146787 - DNA, 75 bp, synthetic construct
  source 1..75: mol_type = other DNA
tcttcgcagggaagggcatattaacgggcaggaagttcctgaaattatcctgcttaattcacatgatggttcatc

SEQ ID NO: 146788 - DNA, 75 bp, synthetic construct
  source 1..75: mol_type = other DNA
cgactgagaaagcggacgtcagcaaggctgggtgtgatgaggcgtatcaaccgctgacgactgatatgcaggggc

SEQ ID NO: 146789 - DNA, 75 bp, synthetic construct
  source 1..75: mol_type = other DNA
gctacgccggatacgccgctcaacccgcagcccatcgccaaccgcagcttttgtgctcaagggctggccgggcgt

SEQ ID NO: 146790 - DNA, 75 bp, synthetic construct
  source 1..75: mol_type = other DNA
ccatctaccaaatgccattaattacaatgttatttttaccaccccaaccagcccggatgttagtggggcgcagat

SEQ ID NO: 146791 - DNA, 75 bp, synthetic construct
  source 1..75: mol_type = other DNA
tagtgaccataaaaacacacagtgccccgccactgatgatgaattaccggatgttgaccttgatgatgaagaaga

SEQ ID NO: 146792 - DNA, 75 bp, synthetic construct
  source 1..75: mol_type = other DNA
ataaaatctctgatgtgattgctagtagtgaccataaaaacacacagtgccccgccactgatgatgagttggacc

SEQ ID NO: 146793 - DNA, 75 bp, synthetic construct
  source 1..75: mol_type = other DNA
cggaatattacgcttacaacgtatgtcaacaggccggtgtcgttacggggaagtcatcttcacagcgattttcag

SEQ ID NO: 146794 - DNA, 75 bp, synthetic construct
  source 1..75: mol_type = other DNA
gttctcagttggctgataaaactcaccagatactcgagaaaacaaatatacctaccattaacgttgtcggttccc

SEQ ID NO: 146795 - DNA, 75 bp, synthetic construct
  source 1..75: mol_type = other DNA
tctggcagcacaatctggctggagggcgtacaactgccgctgcgcaatttgccggtggcgatcccgattgatgaa

SEQ ID NO: 146796 - DNA, 75 bp, synthetic construct
  source 1..75: mol_type = other DNA
ctgaacaacggctgtgtcgggtcctgaatatcgatatcggcggtggcaccgcgaactacgccctgttcgatgccg

SEQ ID NO: 146797 - DNA, 75 bp, synthetic construct
  source 1..75: mol_type = other DNA
tgccggtgcttgttgggctggtaattgtcatcgtggccacggagttgatggtccccggtacaaccgccgccgtta

SEQ ID NO: 146798 - DNA, 75 bp, synthetic construct
  source 1..75: mol_type = other DNA
gcggcgcgatcctggatgagctgcgcgctctcgactggcgaccgcgccagctgcgacagaaatatcatcagatga

SEQ ID NO: 146799 - DNA, 75 bp, synthetic construct
  source 1..75: mol_type = other DNA
atgccggatgccgcaagtctgcaattggggcgttacgcattaaacgagatattactgcgacaaccagagctggat

SEQ ID NO: 146800 - DNA, 75 bp, synthetic construct
  source 1..75: mol_type = other DNA
attctttccgtgatggggattattgcctgggcgttgaatacctggggcaccaacttccatcagatcattatggat

SEQ ID NO: 146801 - DNA, 75 bp, synthetic construct
  source 1..75: mol_type = other DNA
gttgaagtaattgactcgctgctttatggcaaagtcgatggtttaggcgtgcttaaggctgcggttgcaacgatt

SEQ ID NO: 146802 - DNA, 75 bp, synthetic construct
  source 1..75: mol_type = other DNA
gttttcctgtggtggttcacggggttagcgaagatccaacccgcgtgctgaccgaaaccattttcgaactgatgg

SEQ ID NO: 146803 - DNA, 75 bp, synthetic construct
  source 1..75: mol_type = other DNA
acggaacgctctcgccgctcgcgcaggcattgatgcaaaccggtttgctgcccgcaggtgttacgcccgaaatca

SEQ ID NO: 146804 - DNA, 75 bp, synthetic construct
  source 1..75: mol_type = other DNA
caacaactcccgttggcagtcattgacgaagtgattgtccgcgcggggactatatcgacattggtacgcctcttt

SEQ ID NO: 146805 - DNA, 75 bp, synthetic construct
  source 1..75: mol_type = other DNA
ccagcgtttgttacccaacaaaccggttgaagtaattgactcactgctttatggcaaagtcgatggtttaggcgt

SEQ ID NO: 146806 - DNA, 75 bp, synthetic construct
  source 1..75: mol_type = other DNA
ccaaaaaccgcgaacgatatgtaaccgacaaagaataccaggcagtattaagcgttgcacctcttcctgttttta

SEQ ID NO: 146807 - DNA, 75 bp, synthetic construct
  source 1..75: mol_type = other DNA
tggccatgcaaaaaacttctccgtatttattcaggctggcggcagttatcgactcacgccattttacgacatcat

SEQ ID NO: 146808 - DNA, 75 bp, synthetic construct
  source 1..75: mol_type = other DNA
ttccagtggttgattggcgcaacagatggccatgcaaaaaacttctccgtatttattcaggctggcggcagttat

SEQ ID NO: 146809 - DNA, 75 bp, synthetic construct
  source 1..75: mol_type = other DNA
atgcaaaagccggatagcaccccgtttcttgtgagctgcgtggataaacccgcgcctgacgtcgaaccgaaaatc

SEQ ID NO: 146810 - DNA, 75 bp, synthetic construct
  source 1..75: mol_type = other DNA
tccatgaccttaaagccaaggggatatcagattacgaaggtagtagccgggataaacaacttttctctggtcaca

SEQ ID NO: 146811 - DNA, 75 bp, synthetic construct
  source 1..75: mol_type = other DNA
cgatcgaaaaagcaaaacagttaccaaaatccgcctatgtgatcagcaatcaatacggcaaccgatatatgtaca

SEQ ID NO: 146812 - DNA, 75 bp, synthetic construct
  source 1..75: mol_type = other DNA
tgacaggaaggttaaagtttcaccgacacttgatgtcccgttacctgaaaatattccaagaaaatattccaagta

SEQ ID NO: 146813 - DNA, 75 bp, synthetic construct
  source 1..75: mol_type = other DNA
aggtcatagctaaaacgctaaacaactggtggaaccaggctaaacacgcagccgagaaaaaatccggcgtcccgt

SEQ ID NO: 146814 - DNA, 75 bp, synthetic construct
  source 1..75: mol_type = other DNA
ggaaaagtgcttgctgataatgtaaaaattgaacaggtaagaattttcatggataagcggggacttgagagcaag

SEQ ID NO: 146815 - DNA, 75 bp, synthetic construct
  source 1..75: mol_type = other DNA
atgacattcggtcgcttgtgggaaaaattcctcgccagcgcctattacagtgacctcagtccaagaacacaaaaa

SEQ ID NO: 146816 - DNA, 75 bp, synthetic construct
  source 1..75: mol_type = other DNA
acgacgggatctttatccagcaagggaaaacagggaaaaaacagataaaagcatggagtccacgattacaggcgg

SEQ ID NO: 146817 - DNA, 75 bp, synthetic construct
  source 1..75: mol_type = other DNA
aagcgagaaacgcggcttctgaagaacttggtaggccacttgattgcaccttccatgatctaaaggctaaaggga

SEQ ID NO: 146818 - DNA, 75 bp, synthetic construct
  source 1..75: mol_type = other DNA
ccgctattgaaatcagagttgccgtcaggggctacagcggcagtggcgccaacggtgaataatgaaatctgggcg

SEQ ID NO: 146819 - DNA, 75 bp, synthetic construct
  source 1..75: mol_type = other DNA
agtcagactgggcgaacatcaacgcttgaagacaacgaaaactgggcgttgtttaacattaattatgcgagctct

SEQ ID NO: 146820 - DNA, 75 bp, synthetic construct
  source 1..75: mol_type = other DNA
gaatggccctggcgtcaaaacgccactggtggtcagcatctccggttttgcgcaaaccagcgaaaccgcggtgat

SEQ ID NO: 146821 - DNA, 75 bp, synthetic construct
  source 1..75: mol_type = other DNA
cgctggaaggcttatttaccgcccatccaggtaacgcgattggtactgagtatggctggcctaccgcccaacaga

SEQ ID NO: 146822 - DNA, 75 bp, synthetic construct
  source 1..75: mol_type = other DNA
catcggtgaatctggcgaacgggagcgtcgacagctactccggctttaagcagaattatctctcctgttcgggca

SEQ ID NO: 146823 - DNA, 75 bp, synthetic construct
  source 1..75: mol_type = other DNA
cggcgacggtgaaaaaaggcgacgccgcgcccattgtcgttaccgtaaaagacagcgccgggaagccggtgccga

SEQ ID NO: 146824 - DNA, 75 bp, synthetic construct
  source 1..75: mol_type = other DNA
tcctggcacgtgatacggaaaccaccactgtccttgatgcgatcttcaccgttgtcaccagccctgattccgcaa

SEQ ID NO: 146825 - DNA, 75 bp, synthetic construct
  source 1..75: mol_type = other DNA
cggatgaaactgagcatgaactgggatcggtgcgggaaaataacgaagactgggcgctgttcgatcaagacacca

SEQ ID NO: 146826 - DNA, 75 bp, synthetic construct
  source 1..75: mol_type = other DNA
gatggtttctggcaactggtctaatcaggcattttcacctgttaatggtcagttgatgcaggcatcgtccagcta

SEQ ID NO: 146827 - DNA, 75 bp, synthetic construct
  source 1..75: mol_type = other DNA
ggtatcagggatgtctggtcaatccccgcgcgaccgtctccagcgtcacgctgacatcgacggcgatagatgcca

SEQ ID NO: 146828 - DNA, 75 bp, synthetic construct
  source 1..75: mol_type = other DNA
gggtcgacaacctttacgctgaaacaggataacagtaccgggttaagaaccgatctcacggcatcactggatggc

SEQ ID NO: 146829 - DNA, 75 bp, synthetic construct
  source 1..75: mol_type = other DNA
gcaatgagatggtagcgaacgttgaagtcagcaccgatcacgatattactctcggcagcaaagcacaggccaaag

SEQ ID NO: 146830 - DNA, 75 bp, synthetic construct
  source 1..75: mol_type = other DNA
agcgggattgaaaattacctcacccccgcccgttcccaaccgcgagatacggcgacattggttgggcagtaccgt

SEQ ID NO: 146831 - DNA, 75 bp, synthetic construct
  source 1..75: mol_type = other DNA
tcagacgctatctgcgccatctgtttttagacagtgcacgcattgataacgagcatgccgcacaggagtatacgc

SEQ ID NO: 146832 - DNA, 75 bp, synthetic construct
  source 1..75: mol_type = other DNA
gttttgtttccatccggcatccggttttgcctggcagttcagcgtgctctcgcgttatctcgatccacaatggtc

SEQ ID NO: 146833 - DNA, 75 bp, synthetic construct
  source 1..75: mol_type = other DNA
ccacacctttaaaaccgctaatgatctgtgggaaataaccattacccatccacaacaggcgctttcggttagcct

SEQ ID NO: 146834 - DNA, 75 bp, synthetic construct
  source 1..75: mol_type = other DNA
actgtcgcagcgccttacggtgtgggtattcacccttatttaacctgcaacttaacgcctgttgatgactatgta

SEQ ID NO: 146835 - DNA, 75 bp, synthetic construct
  source 1..75: mol_type = other DNA
tggacagaccgtttcacttgccgcgggggattatcacgcgaccattgtgaccgtcggtgctggtctggctgaatt

SEQ ID NO: 146836 - DNA, 75 bp, synthetic construct
  source 1..75: mol_type = other DNA
tggcggcgctgctcgacagcggtattaacgacgcggtgtatgcggaagtggtgggccacggcgaagtgtggtcgg

SEQ ID NO: 146837 - DNA, 75 bp, synthetic construct
  source 1..75: mol_type = other DNA
taaccgagcctgatccgcgtgatgacctttccggcaaagacgtgatgcgcaagctggtgattctggcgcgtgaag

SEQ ID NO: 146838 - DNA, 75 bp, synthetic construct
  source 1..75: mol_type = other DNA
tggcggcgttgctcgacagcggtattaacgacgcggtgtatgcggaagtggtgggccacggtgaagtgtggtcgg

SEQ ID NO: 146839 - DNA, 75 bp, synthetic construct
  source 1..75: mol_type = other DNA
aaggcaactacgctgatgctgtgcgcctgctgacgactgctcatagcgtaccgtttgatggtaaagcgacgctgt

SEQ ID NO: 146840 - DNA, 75 bp, synthetic construct
  source 1..75: mol_type = other DNA
caccggtggtgatgcgcgtcagttggtgggctatctggtgtcgcaatcaggtctgccgttggataccagcacatt

SEQ ID NO: 146841 - DNA, 75 bp, synthetic construct
  source 1..75: mol_type = other DNA
accgttacgcgggaaggccggagatgcgctaccgctacgacgatacggggcgggtggtggagcaactgaacccgg

SEQ ID NO: 146842 - DNA, 75 bp, synthetic construct
  source 1..75: mol_type = other DNA
gcgtgacgatgtcgcggcgaaagtgaaacacgaaaaagccctcgatgcgtactacgcgctgcagcagaaagtgag

SEQ ID NO: 146843 - DNA, 75 bp, synthetic construct
  source 1..75: mol_type = other DNA
caacaaagctgaacaacaggcgaaagtggatgctgaaaaactgctggttgatttgaaagccggcaaaggtgcgga

SEQ ID NO: 146844 - DNA, 75 bp, synthetic construct
  source 1..75: mol_type = other DNA
gttacatcaagctggatgccgcaacgatgcagcaaccggttagcgatgcggatatccagagctactacgatcagc

SEQ ID NO: 146845 - DNA, 75 bp, synthetic construct
  source 1..75: mol_type = other DNA
cttattcaaaaattgtgtgaagataaagggattatctactcacgttatgcagatgatatgcttttttcttgtgat

SEQ ID NO: 146846 - DNA, 75 bp, synthetic construct
  source 1..75: mol_type = other DNA
ttgattcaaaaatattgcgatgataaaaatataatttatagtagatacgctgatgacttacttttttcttctgca

SEQ ID NO: 146847 - DNA, 75 bp, synthetic construct
  source 1..75: mol_type = other DNA
tgatcttgcgaatgccatgaaagaagaggcaaaaaaagacaatgtcaatttaagtgtctctattggtaatgctgc

SEQ ID NO: 146848 - DNA, 75 bp, synthetic construct
  source 1..75: mol_type = other DNA
cgaagaagccgataacctcattagcgcttttgtcagcgatcttgagcgcctggcggcgttgctcgacagcggtat

SEQ ID NO: 146849 - DNA, 75 bp, synthetic construct
  source 1..75: mol_type = other DNA
ttactctgaagcgattaaacagtgtaaagatagtttatggtatcgccagacacctaatcgtgtagatgcaatgat

SEQ ID NO: 146850 - DNA, 75 bp, synthetic construct
  source 1..75: mol_type = other DNA
ggtcgtttccacgtatacaaagaccatctaggttatcccacaattggttatggtcacttactcaaaagtggtgaa

SEQ ID NO: 146851 - DNA, 75 bp, synthetic construct
  source 1..75: mol_type = other DNA
ggcggcgtttgctctgcctctgccaactcaggacaaaccgagctatggtatggcgaccgatatgcaaggcaatgt

SEQ ID NO: 146852 - DNA, 75 bp, synthetic construct
  source 1..75: mol_type = other DNA
taaacaggcgattttcgcgaccccagccttccaggttgacggcaaatttgataacagccgctataacggtatcct

SEQ ID NO: 146853 - DNA, 75 bp, synthetic construct
  source 1..75: mol_type = other DNA
ctacgagcttcaacagagggtaaaactaaaagagatatattgaaggagcaaaagaataagtttagtaaaattttc

SEQ ID NO: 146854 - DNA, 75 bp, synthetic construct
  source 1..75: mol_type = other DNA
ttcatcccctgaaaaggtcattgaactcctgcatggtcagttggtagcaaaatccgagcaattgaaaagactgaa

SEQ ID NO: 146855 - DNA, 75 bp, synthetic construct
  source 1..75: mol_type = other DNA
tgccagagctgaaaagcttcggcgcttattttccctcaagcagtcgtaaagctgaggcagccaaaaaatatcaaa

SEQ ID NO: 146856 - DNA, 75 bp, synthetic construct
  source 1..75: mol_type = other DNA
gtcaaaagagtatgtagaggatgcactgctgttttatctcgagaaagctaaggcagcttttcctgaaaaagagtg

SEQ ID NO: 146857 - DNA, 75 bp, synthetic construct
  source 1..75: mol_type = other DNA
ctgccgatctgccattcgcccagtctcgtttctgcggtgcggaaggtctgaacaatgtaatcaccctttccactt

SEQ ID NO: 146858 - DNA, 75 bp, synthetic construct
  source 1..75: mol_type = other DNA
ggtatccactatcaaacaggcgctgggtaaacaaggtatcagtactggcgcgaatgaaaagtcgctcacagtggg

SEQ ID NO: 146859 - DNA, 75 bp, synthetic construct
  source 1..75: mol_type = other DNA
agtggtctgatcctgaaactatcgaacgtaatattgatgggctgctcaattccgctgagcgcgagcaaacaacat

SEQ ID NO: 146860 - DNA, 75 bp, synthetic construct
  source 1..75: mol_type = other DNA
tttgaacggaaagacgccaaaaatttcactcactggcatgggatagcggcgggacgtcttgacgaagcgattgtc

SEQ ID NO: 146861 - DNA, 75 bp, synthetic construct
  source 1..75: mol_type = other DNA
ttgcccgtgcggatacatgggcgctctggcaggacagctacccggaagataagccgctggaaagtctgctggata

SEQ ID NO: 146862 - DNA, 75 bp, synthetic construct
  source 1..75: mol_type = other DNA
aaaacatgcatgcccgtttactggaacatgccagcttgctctggcagcctgaaacaaccgatgtcattcgcacag

SEQ ID NO: 146863 - DNA, 75 bp, synthetic construct
  source 1..75: mol_type = other DNA
caacctttatcagcccaggaccgagaacctggaaaacacctgaactggcaaagtttgtaggagatgatttattta

SEQ ID NO: 146864 - DNA, 75 bp, synthetic construct
  source 1..75: mol_type = other DNA
tcgacacattactgatggaacagaagaaaaaaaataaaagattcccctacagcaaagatcgacatgcgatccaac

SEQ ID NO: 146865 - DNA, 75 bp, synthetic construct
  source 1..75: mol_type = other DNA
taagttgttgcctaaaagagggcgtgaagagagcaatttaatgcccgcaatggggtatctccatattgatggtaa

SEQ ID NO: 146866 - DNA, 75 bp, synthetic construct
  source 1..75: mol_type = other DNA
atttagtacatcgtggaggtaaggataaagagggaaaaccagtagtgattacagagcaagatttagaacaactac

SEQ ID NO: 146867 - DNA, 75 bp, synthetic construct
  source 1..75: mol_type = other DNA
gaaagaaagtcccgctcaattctttgcggtacaaaagcaaagaagaccagatcgaagtgatgcgcaactggtttt

SEQ ID NO: 146868 - DNA, 75 bp, synthetic construct
  source 1..75: mol_type = other DNA
acgatacgatacatcaatggtttattgcggtgataacctgaagggtgagattgaggctatttataatagtcttga

SEQ ID NO: 146869 - DNA, 75 bp, synthetic construct
  source 1..75: mol_type = other DNA
tttcggtatacataagccccgacatcgtgaaggcgctcaaggaacgccaccagcagaacgtaaaagcaggcattg

SEQ ID NO: 146870 - DNA, 75 bp, synthetic construct
  source 1..75: mol_type = other DNA
tttcggtgtacataagccccgaaatcgtggaggtgctcaagcagcgccacaaaaaaaactatgaggctggcgtgg

SEQ ID NO: 146871 - DNA, 75 bp, synthetic construct
  source 1..75: mol_type = other DNA
atcgccggtaaaaacacccgtgcagccgttgagcgtgctgaccctgactggctgctgaaccgtttgtttctgcaa

SEQ ID NO: 146872 - DNA, 75 bp, synthetic construct
  source 1..75: mol_type = other DNA
tcggctgcaaaagaattagggttaactcaaccagcggtcagtaaaatcattaacgatatcgaagattattttggc

SEQ ID NO: 146873 - DNA, 75 bp, synthetic construct
  source 1..75: mol_type = other DNA
cggccgtcagtaaaatcattaacgatattgaagattattttggtgtggaattagtggtgcggaaaaataccggtg

SEQ ID NO: 146874 - DNA, 75 bp, synthetic construct
  source 1..75: mol_type = other DNA
tcccgaacatgcaccggcaccaccacgctggagtcgttgaagaacgaacagtgggtgttgccacaaaccaatatg

SEQ ID NO: 146875 - DNA, 75 bp, synthetic construct
  source 1..75: mol_type = other DNA
cacttcgaagcgaaagcggcgctggatgcaggcgcgacggaagccgaaatgaagccgattcaggacgatatccgt

SEQ ID NO: 146876 - DNA, 75 bp, synthetic construct
  source 1..75: mol_type = other DNA
aaaggcatcacccatgaaatccagatcccggatatctcgaccaaagagaaagcccagcaggccattggcctgaac

SEQ ID NO: 146877 - DNA, 75 bp, synthetic construct
  source 1..75: mol_type = other DNA
gccgtatcttcagcttattgattccttttttctttttcacttctgttcacgctgaacaaacggcagctcccgcaa

SEQ ID NO: 146878 - DNA, 75 bp, synthetic construct
  source 1..75: mol_type = other DNA
attttaaacgcgtgctggaggcaggcggtatttcgattctgcaaccggatctctcccatgcaggcggtattaccg

SEQ ID NO: 146879 - DNA, 75 bp, synthetic construct
  source 1..75: mol_type = other DNA
gtgacccttgcgccgcactgtccgctcggaccgattgcactggcggcttgcctgcatatcgactttgtttcctat

SEQ ID NO: 146880 - DNA, 75 bp, synthetic construct
  source 1..75: mol_type = other DNA
aaaaaaaaatagaggcgaatgtgtagatttatttttccataattcacgattaggaattgttgctctgatccttaa

SEQ ID NO: 146881 - DNA, 75 bp, synthetic construct
  source 1..75: mol_type = other DNA
attagccaggcactgcaagcctgcaatgaaccgcagcagacgcgcctgcgcattgccattgagtgccatagctgt

SEQ ID NO: 146882 - DNA, 75 bp, synthetic construct
  source 1..75: mol_type = other DNA
tttgtttcctataacgccgtacttcaggaacaaagtatgggaattcattacaacaaaggcgcggagggtgatgct

SEQ ID NO: 146883 - DNA, 75 bp, synthetic construct
  source 1..75: mol_type = other DNA
cctgcatatcgactttgtttcctataacgccgtacttcaggaacaaagtatgggcattcattacaacaaaggcgc

SEQ ID NO: 146884 - DNA, 75 bp, synthetic construct
  source 1..75: mol_type = other DNA
aaccacaggtcattagcgccaccggtgtggtaaaaaccattgatctggaaagcaaaaaaatcaccatccaccacg

SEQ ID NO: 146885 - DNA, 75 bp, synthetic construct
  source 1..75: mol_type = other DNA
ggactggtgcagtccgcacagtcagtgagtcaggaactgatgcagatttatgatcaggggaatgcttttattgac

SEQ ID NO: 146886 - DNA, 75 bp, synthetic construct
  source 1..75: mol_type = other DNA
tcttttcgtcatgaacaaattaatgcaaaaccaattgattacagagaagcattttcaacacaagactttgatttg

SEQ ID NO: 146887 - DNA, 75 bp, synthetic construct
  source 1..75: mol_type = other DNA
agcaaaaaagaatataatggctttattgtgcaattagaaaaaacaaaaatagctgacatagtatcaagaatattt

SEQ ID NO: 146888 - DNA, 75 bp, synthetic construct
  source 1..75: mol_type = other DNA
tatcaatcaactctatatttgaacttactggtggaggtatttatgcaagaacaatattaaatgcgttaaaatata

SEQ ID NO: 146889 - DNA, 75 bp, synthetic construct
  source 1..75: mol_type = other DNA
gcggcaggcccggtgaggaagttaaacagcggctacgtactggcactgtagtaaccactgatgacaggaactggg

SEQ ID NO: 146890 - DNA, 75 bp, synthetic construct
  source 1..75: mol_type = other DNA
agattaaacttcccggccaggctaaccgtttttatgaaggcgctatttccgaacacctgcaaattggcattcggg

SEQ ID NO: 146891 - DNA, 75 bp, synthetic construct
  source 1..75: mol_type = other DNA
acattgccctttcttgtgctggcgggaactggatcaccgccgaaaccgaagcgccagaagaagccatttccgacc

SEQ ID NO: 146892 - DNA, 75 bp, synthetic construct
  source 1..75: mol_type = other DNA
tggatcaatatcgataaactgattttttctccctggcaggaatggcagggaaaactctctctcgcattaacctcc

SEQ ID NO: 146893 - DNA, 75 bp, synthetic construct
  source 1..75: mol_type = other DNA
ttaccggcggggagagtttcgcggagattgcccgtcgcccgggagggacggtggtgatgctctgcctgacccccg

SEQ ID NO: 146894 - DNA, 75 bp, synthetic construct
  source 1..75: mol_type = other DNA
attattggtgaggctaaaaggtatgtcagtgaagaagaacttgagcagcttgaccaactacttaagcgattctca

SEQ ID NO: 146895 - DNA, 75 bp, synthetic construct
  source 1..75: mol_type = other DNA
atgctcttcagttgctggttgggcttgataattatgttgttattgatcgtgcccacaggctggtttcatttcaga

SEQ ID NO: 146896 - DNA, 75 bp, synthetic construct
  source 1..75: mol_type = other DNA
aaagtgcgcctgttcagatatcacagcaggatgtgcatgtgcagggaaactttcaggagttacaaccactggaca

SEQ ID NO: 146897 - DNA, 75 bp, synthetic construct
  source 1..75: mol_type = other DNA
agcacctgaccatccactggcggcaaaaacgcgtattacaccggaagatctcgccagcgagacgctgttgattta

SEQ ID NO: 146898 - DNA, 75 bp, synthetic construct
  source 1..75: mol_type = other DNA
aactcgctacttcccgacaacagaactggcgcaaattggcgatgaaactgcagacggcatttatcatccaacgga

SEQ ID NO: 146899 - DNA, 75 bp, synthetic construct
  source 1..75: mol_type = other DNA
cagacggcatttatcatccaacggaattttcaccactatcgcattttgatgctcgccgggtcgatttttccctcg

SEQ ID NO: 146900 - DNA, 75 bp, synthetic construct
  source 1..75: mol_type = other DNA
ccaccacgattactcgccctactctctttcgttcgtatcttaatgaacaacttacgttgctgtatcaggattatg

SEQ ID NO: 146901 - DNA, 75 bp, synthetic construct
  source 1..75: mol_type = other DNA
cgaagaagccgatagcctcattagcgcctttgtcagcgatcttgaacgcctggcggcgctgctcgacagcggtat

SEQ ID NO: 146902 - DNA, 75 bp, synthetic construct
  source 1..75: mol_type = other DNA
ggatgcgcgcccatccgtatgatgatttagtggtgctggacgttaccgccagccagcagcttgccgatcaatatc

SEQ ID NO: 146903 - DNA, 75 bp, synthetic construct
  source 1..75: mol_type = other DNA
gaaatcatatccactcaacctaacggagaatattactttgaatactacttacctatatacaaaaattctgaggtg

SEQ ID NO: 146904 - DNA, 75 bp, synthetic construct
  source 1..75: mol_type = other DNA
agcgtgagctgattgaactgattaaagcctgtacgcaaccggtactggggatctgtttaggtatgcaactgctgg

SEQ ID NO: 146905 - DNA, 75 bp, synthetic construct
  source 1..75: mol_type = other DNA
gcagaaagataacttttacggcgtgcagttccacccggaacgttccggtgctgccggggcgcaactgctgaaaaa

SEQ ID NO: 146906 - DNA, 75 bp, synthetic construct
  source 1..75: mol_type = other DNA
aactggcgcgtctggcggcccccgttcttcatgcccgtaccttacagcccgtttctggcagcgaaatcgatctgc

SEQ ID NO: 146907 - DNA, 75 bp, synthetic construct
  source 1..75: mol_type = other DNA
aaaattactcaccgggaaagagacactggatgaaattgctgactgctttcttgcgtgcggcgtaaaaacggtggt

SEQ ID NO: 146908 - DNA, 75 bp, synthetic construct
  source 1..75: mol_type = other DNA
tgacgatgaaggtgccggcggtcgcaggaataaccgccatcgacaccattggcgcgggcgataactttgcttcag

SEQ ID NO: 146909 - DNA, 75 bp, synthetic construct
  source 1..75: mol_type = other DNA
agttagtagcaaatacttcggatgggcgttatggtgttagtatacctttttcaaatggcttgtttttattaagag

SEQ ID NO: 146910 - DNA, 75 bp, synthetic construct
  source 1..75: mol_type = other DNA
ttgaatgaaacgctggatgatatttgcgaagcattgagttatgtcgattatctgtttcctaattatgccgaggca

SEQ ID NO: 146911 - DNA, 75 bp, synthetic construct
  source 1..75: mol_type = other DNA
atgacgatgaaggtgccggcggtcgcaggaataaccgccatcgacaccattggcgcgggcgataactttgcttca

SEQ ID NO: 146912 - DNA, 75 bp, synthetic construct
  source 1..75: mol_type = other DNA
gtcgattatctgtttcctaattatgccgaggcaaaattactcaccgggaaagagacactggatgaaattgctgac

SEQ ID NO: 146913 - DNA, 75 bp, synthetic construct
  source 1..75: mol_type = other DNA
gcttatatgcttgtttatcgacgctgcttttcttctatgatgcaaagcatggtttgttgcccgacagatttacct

SEQ ID NO: 146914 - DNA, 75 bp, synthetic construct
  source 1..75: mol_type = other DNA
aaagagtcattaaaaaacccgctgccatttgggccatttctggcggctgcgggtttcgttgttggctgggatagt

SEQ ID NO: 146915 - DNA, 75 bp, synthetic construct
  source 1..75: mol_type = other DNA
tgctgcctcattcgcttgcggagccgtagttattggtctgctcatgagaggaaaagagtcattaaaaaacccgct

SEQ ID NO: 146916 - DNA, 75 bp, synthetic construct
  source 1..75: mol_type = other DNA
gcatatcagcaaaaacaattaggagcggttaataccgatacccctgttgtagactataaagcggcgtttgatcag

SEQ ID NO: 146917 - DNA, 75 bp, synthetic construct
  source 1..75: mol_type = other DNA
cgaccaggggaactccttcattgatgattacattaagaacccggaagccgccctgtctgagcaagccagatctct

SEQ ID NO: 146918 - DNA, 75 bp, synthetic construct
  source 1..75: mol_type = other DNA
caaaacgggcattcgtgatgttcagggactggtgcagtctgcgcaatctgtcagtaaggagctggagaagattta

SEQ ID NO: 146919 - DNA, 75 bp, synthetic construct
  source 1..75: mol_type = other DNA
agcagcagaccactggttggcggagttaatcaccggaaagttatatgacaggataccaaaagagatatggaaata

SEQ ID NO: 146920 - DNA, 75 bp, synthetic construct
  source 1..75: mol_type = other DNA
gatccggtggtgagccgtgacccggacgtggtgctgcgcgccgacaaactgtttctgccgggcgtcggtaccgcg

SEQ ID NO: 146921 - DNA, 75 bp, synthetic construct
  source 1..75: mol_type = other DNA
acaaaaagacaatttctttggcgtacagtttcacccggaacgttcgggcgcggctggggcacagttgctgaaaaa

SEQ ID NO: 146922 - DNA, 75 bp, synthetic construct
  source 1..75: mol_type = other DNA
aaagaatcattaaaaaacccgctgccttttgggccatttctggcggctgcgggtttcgttataggctgggatagt

SEQ ID NO: 146923 - DNA, 75 bp, synthetic construct
  source 1..75: mol_type = other DNA
caccggttagcagaattaatcaccggaaagttatatgacaggataccaaaagaaatatggaaatatgtaaggtaa

SEQ ID NO: 146924 - DNA, 75 bp, synthetic construct
  source 1..75: mol_type = other DNA
caccggttagcggaattaatcaccggaaagttatatgacaggataccaaaagagatatggaaatatgtaaggtaa

SEQ ID NO: 146925 - DNA, 75 bp, synthetic construct
  source 1..75: mol_type = other DNA
gctggcaattgtggattgtggctttcggcttctttatgcagtcgctggacaccaccatcgtaaacaccgcccttc

SEQ ID NO: 146926 - DNA, 75 bp, synthetic construct
  source 1..75: mol_type = other DNA
tatcgtcgggtactggtggcaaccacgcttggcctgtcgctggtcaccctgttgtttatgactaccgccctgctg

SEQ ID NO: 146927 - DNA, 75 bp, synthetic construct
  source 1..75: mol_type = other DNA
catcgcccttccggcgttcatctttgccagagtgccgaacgatacgcatcaaaatgtagctatttcgcggcgaaa

SEQ ID NO: 146928 - DNA, 75 bp, synthetic construct
  source 1..75: mol_type = other DNA
cctgctgtcgatgattatgcaattatcgatgagtatcggcgtcaccatcgccgggctgttgctggggctttttgg

SEQ ID NO: 146929 - DNA, 75 bp, synthetic construct
  source 1..75: mol_type = other DNA
acacccgcaccttttcgctgggtctggcgggaagttttgccggacgtattggcagcggtatgttgccctttatga

SEQ ID NO: 146930 - DNA, 75 bp, synthetic construct
  source 1..75: mol_type = other DNA
gcgtggtggcactggtgctttatctgctgcacgccagaaataacaaccgcgcccttttcagtctgaaactgttcc

SEQ ID NO: 146931 - DNA, 75 bp, synthetic construct
  source 1..75: mol_type = other DNA
ctttgattgaactgaatgtgtttattccagcaatattatttattgcggtaatcattctgtgcttgacgatatatc

SEQ ID NO: 146932 - DNA, 75 bp, synthetic construct
  source 1..75: mol_type = other DNA
agtgatatcagtgcgctgaaacgggatacgtcaggggcattcaggatgaccaccacctttatggggttacagggg

SEQ ID NO: 146933 - DNA, 75 bp, synthetic construct
  source 1..75: mol_type = other DNA
cgtaagtaccgctatcacatcagttttcgtaacggcggtgtggatgcgttctcgcagcgcatgtactcccttgtc

SEQ ID NO: 146934 - DNA, 75 bp, synthetic construct
  source 1..75: mol_type = other DNA
cgcgtgcggatggtttttgcgggcattgtgtgaattttttctacatgtttggtttgctcggcggcgcggtaacgt

SEQ ID NO: 146935 - DNA, 75 bp, synthetic construct
  source 1..75: mol_type = other DNA
gatcattcagcaaccgccttttggcgcaacagcaggaagcgctcaggctgctcgttgggcctctgcttatggcat

SEQ ID NO: 146936 - DNA, 75 bp, synthetic construct
  source 1..75: mol_type = other DNA
atctggcctctgtagagtggatttggatcattcagcaaccgccttttggcgcaacagcaggaagcgctcaggctg

SEQ ID NO: 146937 - DNA, 75 bp, synthetic construct
  source 1..75: mol_type = other DNA
tcggttagtgctctgttagccgaagctctcgtactcaaactacgcaagcagtcggtagccgcaacgttgaaagat

SEQ ID NO: 146938 - DNA, 75 bp, synthetic construct
  source 1..75: mol_type = other DNA
agttctgcaaacgcatcggcgtgaccaaacaggacaacaccattgagatggcatctctggaatcctgcattcgtg

SEQ ID NO: 146939 - DNA, 75 bp, synthetic construct
  source 1..75: mol_type = other DNA
aatggctactcgtcaaaaacggtattgtgcgatgatggcgagatcgaacttaacacgccgcgtgaccgtgaaaat

SEQ ID NO: 146940 - DNA, 75 bp, synthetic construct
  source 1..75: mol_type = other DNA
gtgttgcggtaaagagagccatgaggaacatgcgctacgcttgcgccagtctctggagcgtttgcgggtggtgtg

SEQ ID NO: 146941 - DNA, 75 bp, synthetic construct
  source 1..75: mol_type = other DNA
cccggatgaagccgccatgctacggcaatcccggcgaattagctggatctgcaccgcaggcgaaatcggcgctct

SEQ ID NO: 146942 - DNA, 75 bp, synthetic construct
  source 1..75: mol_type = other DNA
gggccgcagaaagaattggtctgacacttcaacgctgtcgctggctttcgctgatgtcattatggtgctggttgg

SEQ ID NO: 146943 - DNA, 75 bp, synthetic construct
  source 1..75: mol_type = other DNA
gtagggccatcgtccctttcaaagcgcaattaacgatgggagatacggcaaccgccggggatatttttgacagcg

SEQ ID NO: 146944 - DNA, 75 bp, synthetic construct
  source 1..75: mol_type = other DNA
atctctaataattacaatgcatttgcattagggatagggaaaaactttggttatatcggggcgatttccattgat

SEQ ID NO: 146945 - DNA, 75 bp, synthetic construct
  source 1..75: mol_type = other DNA
ttagcgggagcaacagtgaatatgactcttcggggtcttccagcagttatgtcgatgataatggcactgttcatc

SEQ ID NO: 146946 - DNA, 75 bp, synthetic construct
  source 1..75: mol_type = other DNA
aaaaatgcacctaaaaaaggctctaatacccgcaatggctactcgtcaaaaacgctgctttgcgatgacggcgag

SEQ ID NO: 146947 - DNA, 75 bp, synthetic construct
  source 1..75: mol_type = other DNA
ggaagaggggcgagtgctgattaaatggggaatgattcagcacaacaatgtaccgcaaaatataagttatccatg

SEQ ID NO: 146948 - DNA, 75 bp, synthetic construct
  source 1..75: mol_type = other DNA
ttttctgcacatgccggaaaatttaatcccaaattcctggaggacgttcagggtgtgggccagcatgtcgattta

SEQ ID NO: 146949 - DNA, 75 bp, synthetic construct
  source 1..75: mol_type = other DNA
ttgatgcggatattttttatttttttaatcagaaactggtcgaaagtaaggcctttttgtggctggttgcattga

SEQ ID NO: 146950 - DNA, 75 bp, synthetic construct
  source 1..75: mol_type = other DNA
gattattggtctggtcatgctattaactgcagtggtattaaaccagctgggtcaggcattaattcctgtaaaacg

SEQ ID NO: 146951 - DNA, 75 bp, synthetic construct
  source 1..75: mol_type = other DNA
gccccaatgctggaagatttacgtaacgtcatgcaggaagaaacacaaaactttcttgataaattaatccaggat

SEQ ID NO: 146952 - DNA, 75 bp, synthetic construct
  source 1..75: mol_type = other DNA
cctggcctccgagcaataatcgctattaccgccataatcgcggacgcacgcatatcagcgcagaggggcaggcat

SEQ ID NO: 146953 - DNA, 75 bp, synthetic construct
  source 1..75: mol_type = other DNA
aaagtcttatcgggacagttatcagatatacccgattcggtaaacaagatgaataaaatcagagtggaggggcat

SEQ ID NO: 146954 - DNA, 75 bp, synthetic construct
  source 1..75: mol_type = other DNA
ataagaatagtggcgatgcgccagctgctgcgccaggtaataatgaaaccactgaacctgtgggtacaacgaaat

SEQ ID NO: 146955 - DNA, 75 bp, synthetic construct
  source 1..75: mol_type = other DNA
ggcgtaagtaccgctattacatctgttttcgcaacggtgggacggatgtcttttcacagcgaatgtatgcgctgg

SEQ ID NO: 146956 - DNA, 75 bp, synthetic construct
  source 1..75: mol_type = other DNA
aaggaagtggcgctgtttaaatctgacgccagtattgcctttccctgtagcgacctgagcacgcttgagcgcagg

SEQ ID NO: 146957 - DNA, 75 bp, synthetic construct
  source 1..75: mol_type = other DNA
cactatttatgcgggtctggacgacacctggatgcaggcgttatcacagtttggttggcgcggtctacttcctga

SEQ ID NO: 146958 - DNA, 75 bp, synthetic construct
  source 1..75: mol_type = other DNA
gcgagcatcctgctcggcgaaaagagtgattgcctcaagtgaggtcgatgtgctgttagttccacttacgggaga

SEQ ID NO: 146959 - DNA, 75 bp, synthetic construct
  source 1..75: mol_type = other DNA
ctggcgaagtacctggacgatgacactatccagaatcgtattactcaagatttttacgatgtccctgtccgggag

SEQ ID NO: 146960 - DNA, 75 bp, synthetic construct
  source 1..75: mol_type = other DNA
gccctgatatagcgacaaaaccgccgttaccggcggatgtgcgcaactgcaatttctatgtgctgatggaggcgc

SEQ ID NO: 146961 - DNA, 75 bp, synthetic construct
  source 1..75: mol_type = other DNA
ggtaacactgtaacagtgggtagcggagcgaccattttaacaacagaaatttgcagtggagcagtgattggtgct

SEQ ID NO: 146962 - DNA, 75 bp, synthetic construct
  source 1..75: mol_type = other DNA
ttaggaacttttcttgaggttgaaaatcaaataaaaaatagtcgaagagagttaacaaaagcaagtttaaatgtt

SEQ ID NO: 146963 - DNA, 75 bp, synthetic construct
  source 1..75: mol_type = other DNA
aaaatccgcattgagtgccacatgccggatcgccgtcgccgtgacctggataatctgcaaaaagccgcttttgac

SEQ ID NO: 146964 - DNA, 75 bp, synthetic construct
  source 1..75: mol_type = other DNA
gtaacttttgctaatgatctttttaagtgtggtggtcccgatgcctctgcagaaagctggatacgcatcgtatta

SEQ ID NO: 146965 - DNA, 75 bp, synthetic construct
  source 1..75: mol_type = other DNA
tcattttgattttagcgaacaaaagctggtgatgagttttcctcaggcggcaatgcagcaggttgctcgcggtac

SEQ ID NO: 146966 - DNA, 75 bp, synthetic construct
  source 1..75: mol_type = other DNA
atgaaattattcctcatgcagccagtcattttgattttaatgagcaaaagctggtaatgagttttccgcaagcgg

SEQ ID NO: 146967 - DNA, 75 bp, synthetic construct
  source 1..75: mol_type = other DNA
gtgaatacttacgacatcacaataccctggcccccgagcaataaccgctagtaccgccataatcgcgggcgcaca

SEQ ID NO: 146968 - DNA, 75 bp, synthetic construct
  source 1..75: mol_type = other DNA
gtgaatacttaccacatcacaatgccctggcccccgagcaataaccgctagtaccgccataatcgcgggcgcacc

SEQ ID NO: 146969 - DNA, 75 bp, synthetic construct
  source 1..75: mol_type = other DNA
gtgaatacttacaacatcacaatgccctggcccccgagcaataaccgctagtaccgccataatcgcgggcgcaca

SEQ ID NO: 146970 - DNA, 75 bp, synthetic construct
  source 1..75: mol_type = other DNA
gtgaatacttacgacatcacaatgccctggcccccgagcaataaccgctagtaccgccataatcgcgggcgcacg

SEQ ID NO: 146971 - DNA, 75 bp, synthetic construct
  source 1..75: mol_type = other DNA
gtgaatacttacgacatcacaatcccctggcccccgagcaataaccgctagtaccgccataatcgcgggcgcacc

SEQ ID NO: 146972 - DNA, 75 bp, synthetic construct
  source 1..75: mol_type = other DNA
gtgaatacttacgacatcacaattccctggcccccgagcaataaccgctagtaccgccataatcgcgggcgcact

SEQ ID NO: 146973 - DNA, 75 bp, synthetic construct
  source 1..75: mol_type = other DNA
gcaacgtttataacggaacgttagggattatgtctttaatgacaccgttctttatcggcatggcgctggcagaag

SEQ ID NO: 146974 - DNA, 75 bp, synthetic construct
  source 1..75: mol_type = other DNA
agggttgttatccgttgcggcatttatgaccgtcacgccttatagtgtcggtgaagcttacgcggtcggcgctaa

SEQ ID NO: 146975 - DNA, 75 bp, synthetic construct
  source 1..75: mol_type = other DNA
gaaacgtatacaacggaacattagggattatgtctttaatggcgccgttttttatcggtatggcgctggcagaag

SEQ ID NO: 146976 - DNA, 75 bp, synthetic construct
  source 1..75: mol_type = other DNA
gtgactacgatggtcaggttgcagaggctatggccctggtacgagcgctgaacaaaatgacgaaagcaggtatgc

SEQ ID NO: 146977 - DNA, 75 bp, synthetic construct
  source 1..75: mol_type = other DNA
atgtaccgggtaaaacagctgttcggaggttcactgacactgcgtgactacgatggtcaggttgcagaggctatg

SEQ ID NO: 146978 - DNA, 75 bp, synthetic construct
  source 1..75: mol_type = other DNA
gtactgattaagatgtatcctgacgccgatatcccgatggtgcagttgagtatcgacagtagcaaacctgccgcc

SEQ ID NO: 146979 - DNA, 75 bp, synthetic construct
  source 1..75: mol_type = other DNA
cgggcgatgaccgacgttcatcagttttttacgttgctaaagcgccacaatctgacgcgccaacaggcgttcaat

SEQ ID NO: 146980 - DNA, 75 bp, synthetic construct
  source 1..75: mol_type = other DNA
gcaataaacgttattttattgcgtctgcaccggataaagaccaggaatgggggggtaatcggccatcttttattg

SEQ ID NO: 146981 - DNA, 75 bp, synthetic construct
  source 1..75: mol_type = other DNA
cggtcagaaaaagaggcgtcttgtctgcagtctgagtactccattacggttaaaagtgccggagaggaaggaaat

SEQ ID NO: 146982 - DNA, 75 bp, synthetic construct
  source 1..75: mol_type = other DNA
gtaatcggctcggcaaaagataacatcagaatgatggcctacagctttaccgcccccgatattatgaaagcgctg

SEQ ID NO: 146983 - DNA, 75 bp, synthetic construct
  source 1..75: mol_type = other DNA
tggccgcaacttttacaactgccaccctgcccgcctttgcggtggaaccatctgttcaggttggctactcgcctg

SEQ ID NO: 146984 - DNA, 75 bp, synthetic construct
  source 1..75: mol_type = other DNA
aagccattattaacgcgtcaacgtgggaatggctgcgtccgggaaatattgatattcagtcctttccgcgtgagg

SEQ ID NO: 146985 - DNA, 75 bp, synthetic construct
  source 1..75: mol_type = other DNA
aagcgtaaagttgatgcgctggatttgttcgctgacggcagttacgaattgtttggtcgtcagcataatctgatg

SEQ ID NO: 146986 - DNA, 75 bp, synthetic construct
  source 1..75: mol_type = other DNA
aagataacgaaggaaacgccgttaatcctaatctgccacgcaccacggttaaaatgttcaccagctatcggttgc

SEQ ID NO: 146987 - DNA, 75 bp, synthetic construct
  source 1..75: mol_type = other DNA
aatttgacagcaaaatgatgtatgtcgatgcctatgtaaacaaagcgaatggcatgctggttggtccatacagta

SEQ ID NO: 146988 - DNA, 75 bp, synthetic construct
  source 1..75: mol_type = other DNA
aatgctccagttgatgacgaaaatgattacagcgtaacgtctacctctgtaggtactaaaatgcagatgacccaa

SEQ ID NO: 146989 - DNA, 75 bp, synthetic construct
  source 1..75: mol_type = other DNA
ggtgttaactggcaaaatcgcgtgtataccgacaccgtgacaccgtatggcaccttccgcgccgagcaaggtagc

SEQ ID NO: 146990 - DNA, 75 bp, synthetic construct
  source 1..75: mol_type = other DNA
gtatccccacctattttgaatcgcgctggaatctgggcgacgcactttctgatatggcactgtttgaacgcgtag

SEQ ID NO: 146991 - DNA, 75 bp, synthetic construct
  source 1..75: mol_type = other DNA
gcggtcagttgaatggctccccgaatgtttcttcaacatacgagataaggttcccgatgacattctcaagagtcc

SEQ ID NO: 146992 - DNA, 75 bp, synthetic construct
  source 1..75: mol_type = other DNA
gggagaagcagctaaaaggaatgtaggtacaggggcgaatcagatacctgatatgagcctgttcgcgtcaagtaa

SEQ ID NO: 146993 - DNA, 75 bp, synthetic construct
  source 1..75: mol_type = other DNA
aactcactggcgatggacgtaatcagaacgctgccaacgcagcggggaaatccgtggttgtttattggtaaaaaa

SEQ ID NO: 146994 - DNA, 75 bp, synthetic construct
  source 1..75: mol_type = other DNA
tggtcgtcagcacaatctaatgtttggtggcagttacagcaaacaaaacaatcgttacttcagttcatgggccaa

SEQ ID NO: 146995 - DNA, 75 bp, synthetic construct
  source 1..75: mol_type = other DNA
cgtaaagttgatgcgctggatttgttcgctgacggtagttatgaattgtttggtcgtcagcacaatctaatgttt

SEQ ID NO: 146996 - DNA, 75 bp, synthetic construct
  source 1..75: mol_type = other DNA
atggcgcaacagcgtggtctgcgcaacatgcaattttttccgctgcaatcgtatgacgctttacccgcactgctg

SEQ ID NO: 146997 - DNA, 75 bp, synthetic construct
  source 1..75: mol_type = other DNA
tctattgtggtgttgaggaaggctctggcagtctcaactgtggcattcagcctgcgaaaacgccggggtttgcaa

SEQ ID NO: 146998 - DNA, 75 bp, synthetic construct
  source 1..75: mol_type = other DNA
acctggcaaatctggtcacctcggttaacagcaattataaggagcctgaccgatggcaatgccgcgcaaactcaa

SEQ ID NO: 146999 - DNA, 75 bp, synthetic construct
  source 1..75: mol_type = other DNA
attgctttatgtggtgatatgatgataaaagttgattatccattgaaaacttctgcgaatgaggaagattgggta

SEQ ID NO: 147000 - DNA, 75 bp, synthetic construct
  source 1..75: mol_type = other DNA
gcatttgaggccggttttgagaaggtcaaagtcaataccgtgctgatgcgtgatgttaatcatcaccagctcgac

SEQ ID NO: 147001 - DNA, 75 bp, synthetic construct
  source 1..75: mol_type = other DNA
ccgctggcgcgctggtcggcggtctgcaaaacattggttccggcgtgctggcgtcgctctctgcgatgttgccgc

SEQ ID NO: 147002 - DNA, 75 bp, synthetic construct
  source 1..75: mol_type = other DNA
aggggcggtgcagagcgtaatgggcgcttatctgctgacttacggtgtctcacagctgttttatggcccgatttc

SEQ ID NO: 147003 - DNA, 75 bp, synthetic construct
  source 1..75: mol_type = other DNA
atggcgaaagtgacaccatgccgctctatatcggcaaaaagcgttaatatccgcagtcgggtgctttctcattta

SEQ ID NO: 147004 - DNA, 75 bp, synthetic construct
  source 1..75: mol_type = other DNA
tggatttttctgccgcagcaaacttattcggcctgtttgccaaccgtcgtgcggctttacaagcattacagacca

SEQ ID NO: 147005 - DNA, 75 bp, synthetic construct
  source 1..75: mol_type = other DNA
acagcacccggaaatgactcaatatcatattattcaaaactggctgtggctggggcggttaattcgctggaagaa

SEQ ID NO: 147006 - DNA, 75 bp, synthetic construct
  source 1..75: mol_type = other DNA
tagctttattctgtggcttgctaactggatgtgaggacaaaatctatgatgtctcttactataaagaacaccagg

SEQ ID NO: 147007 - DNA, 75 bp, synthetic construct
  source 1..75: mol_type = other DNA
ggttgatccttctcgctgggacgaaggaatacctgcgctgttgctggattacagctttagtggcagcaatggacg

SEQ ID NO: 147008 - DNA, 75 bp, synthetic construct
  source 1..75: mol_type = other DNA
tgctatcggcagactacaacgctttagctctggggctggggaaaaacttcggcaccattggtgcggtatcggtgg

SEQ ID NO: 147009 - DNA, 75 bp, synthetic construct
  source 1..75: mol_type = other DNA
gttgcgacaacggcgctgggaatgggctttgacaaaccggatttggggtttgttattcattaccagatgccgggg

SEQ ID NO: 147010 - DNA, 75 bp, synthetic construct
  source 1..75: mol_type = other DNA
atttgcttactacagcggcgtgacttgtgaaggcgcggaagattctaatactgccagggagtatctggagcaggc

SEQ ID NO: 147011 - DNA, 75 bp, synthetic construct
  source 1..75: mol_type = other DNA
cactgcctccggtcatacctgcttccttttcatctccaataatacccacgaagtaaagatttcaaaatctgcctg

SEQ ID NO: 147012 - DNA, 75 bp, synthetic construct
  source 1..75: mol_type = other DNA
aaatgggaaagtaacaccgccatcgcaccagcatagtgaggagctcattgaatttgccattgattacctgaagaa

SEQ ID NO: 147013 - DNA, 75 bp, synthetic construct
  source 1..75: mol_type = other DNA
actctaagctagacaggtatggttactctataggtgaagctatcacttttaatacccctcacggtcaaattaaag

SEQ ID NO: 147014 - DNA, 75 bp, synthetic construct
  source 1..75: mol_type = other DNA
acgtctgtgccagcgtcgcctgcccggtaggtatttcaccaatgcgcataaatcgcctgcttaagcaggaattac

SEQ ID NO: 147015 - DNA, 75 bp, synthetic construct
  source 1..75: mol_type = other DNA
tggcgaactggcgcgatgctggacttactggcatcaacgtcagcgttgatagtctggacgcccgccagtttcatg

SEQ ID NO: 147016 - DNA, 75 bp, synthetic construct
  source 1..75: mol_type = other DNA
atggcttcacaactgactgatgcatttgcgcgtaagttttactacttgcgcctgtcgattactgatgtgtgtaac

SEQ ID NO: 147017 - DNA, 75 bp, synthetic construct
  source 1..75: mol_type = other DNA
tcagcggcgctgcgggagaagaaacagacccatttcctgcatcaaaataacaccggtattacgcaaaacttatcg

SEQ ID NO: 147018 - DNA, 75 bp, synthetic construct
  source 1..75: mol_type = other DNA
aaccacaaccggaaagagtcacgcttttattgcaccagcatatcggtgcaactaccctgccctgcgtgcaaaaag

SEQ ID NO: 147019 - DNA, 75 bp, synthetic construct
  source 1..75: mol_type = other DNA
gacgggaattaacgtcagcgttgatagcctcgacgcccgccagtttcatgcgattaccgggcaggataaattcag

SEQ ID NO: 147020 - DNA, 75 bp, synthetic construct
  source 1..75: mol_type = other DNA
tcgccgctgtgcgggaaaatgacgcaatccgtcagattgcggtcaccaccaatggttaccgtctggaacgcgacg

SEQ ID NO: 147021 - DNA, 75 bp, synthetic construct
  source 1..75: mol_type = other DNA
gatgagcgtaaagcagcactggcacagtgggctgatctgctggtggcactggaaagcggaaaagactacaacgta

SEQ ID NO: 147022 - DNA, 75 bp, synthetic construct
  source 1..75: mol_type = other DNA
ccgccacgctctggaattatgggccgacctgctggtggcactggaacaggggaatgaatacaacgtaaccccgtt

SEQ ID NO: 147023 - DNA, 75 bp, synthetic construct
  source 1..75: mol_type = other DNA
atcagtattttgatgagcgtaaagcagcactggcacagtgggctgatctgctggtggcactggaaagcggaaaag

SEQ ID NO: 147024 - DNA, 75 bp, synthetic construct
  source 1..75: mol_type = other DNA
ttcgctcatctactggatcatggcgacagtgttatcgacgttgcagaaccattttgagaatcaacttaatcgcca

SEQ ID NO: 147025 - DNA, 75 bp, synthetic construct
  source 1..75: mol_type = other DNA
gatgcgcctgtcgccactctggctcgtgcgctggctggcgcgtttttacatttccatttttcgcggtacgccgct

SEQ ID NO: 147026 - DNA, 75 bp, synthetic construct
  source 1..75: mol_type = other DNA
agcactggcacagtgggctgatctgctggtggcgctggaaagcggaaaagactacaacgtaacgcctctcagaag

SEQ ID NO: 147027 - DNA, 75 bp, synthetic construct
  source 1..75: mol_type = other DNA
gattacggttaaaggcgatctctacattgacgaccaccacaccgttgaagacaccggtctggcgctgggcgaagc

SEQ ID NO: 147028 - DNA, 75 bp, synthetic construct
  source 1..75: mol_type = other DNA
accgagacggcaccctgatttcggagccaccaaccgattttcaggtcgatcgtttcgacaaactggcttttgaac

SEQ ID NO: 147029 - DNA, 75 bp, synthetic construct
  source 1..75: mol_type = other DNA
ttcttccgttcgctctcatacaccatgggcgtgacgctacacctgaaaaccaaggtaaaaacgatcaccaccgtg

SEQ ID NO: 147030 - DNA, 75 bp, synthetic construct
  source 1..75: mol_type = other DNA
gtgagcaactcactaaacgcgatcgttatgcccacgtagtgcgcaacactaaagagacacagattgacgttcagg

SEQ ID NO: 147031 - DNA, 75 bp, synthetic construct
  source 1..75: mol_type = other DNA
aactggtggagcgttatctcgctgagcaggcgatggatcgcgccagcagttacgtgattggcgatcgtgcgaccg

SEQ ID NO: 147032 - DNA, 75 bp, synthetic construct
  source 1..75: mol_type = other DNA
ttctgccaatggatgagtgcctggcgcgctgtgcgatggatatctctggtcgaccgcacctggaatataaagccg

SEQ ID NO: 147033 - DNA, 75 bp, synthetic construct
  source 1..75: mol_type = other DNA
cacccagatattctccgcaggcgcattgataaagacataaatcctgccataggccacatgaaggttgaagatgta

SEQ ID NO: 147034 - DNA, 75 bp, synthetic construct
  source 1..75: mol_type = other DNA
tagccgcagaaaaacagcagcgtaaagccgaagcactggcaaaaatagaagctgaaaaaaacgcgctgcatgttt

SEQ ID NO: 147035 - DNA, 75 bp, synthetic construct
  source 1..75: mol_type = other DNA
agccttagagcaatgggcagcattgctggtctcactggagcgcggtgaggattacaatgtgatgccgataaaaaa

SEQ ID NO: 147036 - DNA, 75 bp, synthetic construct
  source 1..75: mol_type = other DNA
ttcgcgctggggatgagctaccaggatatcagccgggagatcgaagatttatatgccttcagtgtttccacggct

SEQ ID NO: 147037 - DNA, 75 bp, synthetic construct
  source 1..75: mol_type = other DNA
cgcgtcagaatgagcttacgatgaagcttctgctggtattctgctgccgtaagatggagctttgcggtgcgcgtt

SEQ ID NO: 147038 - DNA, 75 bp, synthetic construct
  source 1..75: mol_type = other DNA
agagcttgcgcgattcttacaggcaatgccaatgacaaaaggtttctcacgtcagaacgaactgacaatgaaact

SEQ ID NO: 147039 - DNA, 75 bp, synthetic construct
  source 1..75: mol_type = other DNA
attactgttagcgttatgcgtccgcaaaatggagttatgcgccgcccgctgggaggagttcgatcttgataaagc

SEQ ID NO: 147040 - DNA, 75 bp, synthetic construct
  source 1..75: mol_type = other DNA
cagagagacagcaaaggagctttcggcgcgtgttgcgctgggttatgacgttgccggggagaagcaggagcggaa

SEQ ID NO: 147041 - DNA, 75 bp, synthetic construct
  source 1..75: mol_type = other DNA
atgccatttatgtacatcgctttatgtacacacctctattcaatgtttagggatgccttaatgccaaaacttaca

SEQ ID NO: 147042 - DNA, 75 bp, synthetic construct
  source 1..75: mol_type = other DNA
ctgcgcgtaaaatgcaacacagaatgatccctcatatacaggaaagcacactacccgtagcactggcaaaagtgc

SEQ ID NO: 147043 - DNA, 75 bp, synthetic construct
  source 1..75: mol_type = other DNA
ggcgtggaaggtatctataaccgtcaccagtattttgatgagcgtaaagcggcgctggcgcagtggtgtgatttg

SEQ ID NO: 147044 - DNA, 75 bp, synthetic construct
  source 1..75: mol_type = other DNA
gcgctgaaatgcctgatgtgcctaatttcacgattcacgacttccgacgcaccgcacgtactcatttagcagcgc

SEQ ID NO: 147045 - DNA, 75 bp, synthetic construct
  source 1..75: mol_type = other DNA
ctaccactgcgatttggttaagagataagggggtagacattcgatgtgttcgtctgacgccttatagatttaatg

SEQ ID NO: 147046 - DNA, 75 bp, synthetic construct
  source 1..75: mol_type = other DNA
aagaactacatgctttagaaaaaacgacctttactctggaaggattacaggaacgttatgatttacaggaagcaa

SEQ ID NO: 147047 - DNA, 75 bp, synthetic construct
  source 1..75: mol_type = other DNA
aatattttgctctccagtattgtgcgaattatcaatacattgtcactgtttggctttgcggtgattatgccgatg

SEQ ID NO: 147048 - DNA, 75 bp, synthetic construct
  source 1..75: mol_type = other DNA
aattgccgtggtgttattaccgtggtttagcactatcggtgtggtcattgcctatacagcattgtatctattggc

SEQ ID NO: 147049 - DNA, 75 bp, synthetic construct
  source 1..75: mol_type = other DNA
tgaccgacaaaatcgccgggctggatgtcggtgccgatgactatctggtgaagccttttgcgctggaagagttac

SEQ ID NO: 147050 - DNA, 75 bp, synthetic construct
  source 1..75: mol_type = other DNA
attgattacacttccttctggtgaaattgtcgccatttctaatcaatggggtattgctaatattgaaatcttgat

SEQ ID NO: 147051 - DNA, 75 bp, synthetic construct
  source 1..75: mol_type = other DNA
acatccccctatataataccagaagtaataaataactatattatagaaaaacagaataagcataatataaaaata

SEQ ID NO: 147052 - DNA, 75 bp, synthetic construct
  source 1..75: mol_type = other DNA
attattacgtgattggataagacaatttaatcctgcaagttataatgatttaataaatggattaagtgatgactt

SEQ ID NO: 147053 - DNA, 75 bp, synthetic construct
  source 1..75: mol_type = other DNA
atttccagacgtatttgaaaaaacaaaactgcgatgccgatgcgaaagaaaaaatacttgaatttgttgagttgg

SEQ ID NO: 147054 - DNA, 75 bp, synthetic construct
  source 1..75: mol_type = other DNA
aaaagctctgctgaatgggtactggaaggcgatataaaaggatgttttgataacatcagtcatgactggttactt

SEQ ID NO: 147055 - DNA, 75 bp, synthetic construct
  source 1..75: mol_type = other DNA
acgagcttgagaatctggaaatgttgcatccgggctgtcacatccagtggcacgtgaacgaggaaaaagatgcgc

SEQ ID NO: 147056 - DNA, 75 bp, synthetic construct
  source 1..75: mol_type = other DNA
gccggtattggccaatatggcgcttgatggtctggaagcggtgcttgaatcccggtttgggatgaagaacaccaa

SEQ ID NO: 147057 - DNA, 75 bp, synthetic construct
  source 1..75: mol_type = other DNA
tgcgactgccgtaagccgaaagtaaaactggtggagcgttatctcgctgagcaagcgatggatcgcgccaacagt

SEQ ID NO: 147058 - DNA, 75 bp, synthetic construct
  source 1..75: mol_type = other DNA
gttaaaaatggcgctgggcgacaaacgcggcatcaaccgtttcggctttgtgctgccaatggacgaatgcctggc

SEQ ID NO: 147059 - DNA, 75 bp, synthetic construct
  source 1..75: mol_type = other DNA
tcggtgtggtcattgcctatacagcattgtatctattggcctttgtcctttgcgcattcattcgcgttgagcagc

SEQ ID NO: 147060 - DNA, 75 bp, synthetic construct
  source 1..75: mol_type = other DNA
cattaatggtttacgctacgaccgcgaaaccctgaactggccgatgattggcgagcaactcactaaacgagaccg

SEQ ID NO: 147061 - DNA, 75 bp, synthetic construct
  source 1..75: mol_type = other DNA
ataccggcctggcgctgggcgaagcgttaaaaattgccctcggcgataaacgcggtatttgccgctttggttttg

SEQ ID NO: 147062 - DNA, 75 bp, synthetic construct
  source 1..75: mol_type = other DNA
gcctttggtcgcaccctgcgccaggccatccgcgtggaaggcgataccctgccctcgtcgaaaggagtgctgtaa

SEQ ID NO: 147063 - DNA, 75 bp, synthetic construct
  source 1..75: mol_type = other DNA
ggaatggcactttccagtctggctttctactacatgccgcaatacttcgggcataactattggatggcaatggtg

SEQ ID NO: 147064 - DNA, 75 bp, synthetic construct
  source 1..75: mol_type = other DNA
cataaaggagcagctatttcggtttataacctttcagccgggttgtccaacttccttgctccggcaatcgccgtg

SEQ ID NO: 147065 - DNA, 75 bp, synthetic construct
  source 1..75: mol_type = other DNA
tatgccaatgatgtttgtggatgaactgggattcaccacctctgaatggttgcaggtctgggcggcatttttctt

SEQ ID NO: 147066 - DNA, 75 bp, synthetic construct
  source 1..75: mol_type = other DNA
catctgaatactggcgcctgggttttatatttggaataatatattttttaacatatattgccattgaatacccat

SEQ ID NO: 147067 - DNA, 75 bp, synthetic construct
  source 1..75: mol_type = other DNA
aaacgatcaggtccccgtctgggctaaagagcaactttctcagatggggcgactgacgacaaaagaagtcatact

SEQ ID NO: 147068 - DNA, 75 bp, synthetic construct
  source 1..75: mol_type = other DNA
atgagttatgcatatctgatgaataaaaaatttcttatattagtaccagtattattagcgttgattatatctcaa

SEQ ID NO: 147069 - DNA, 75 bp, synthetic construct
  source 1..75: mol_type = other DNA
tttacggttttgctggcctggcgcaggccgcggttaacgacgttacttttcacggcacgctggtctcgccgcccg

SEQ ID NO: 147070 - DNA, 75 bp, synthetic construct
  source 1..75: mol_type = other DNA
cgatgacgccgccattgaaaccgacgtcgctggcctcgggattgagcttcagcaaaacggccagccgtttaaagt

SEQ ID NO: 147071 - DNA, 75 bp, synthetic construct
  source 1..75: mol_type = other DNA
cgcagcattatcatcccaacactgcttagtgcgctggcctacgggctcgcctggaaagtgatggcgattatataa

SEQ ID NO: 147072 - DNA, 75 bp, synthetic construct
  source 1..75: mol_type = other DNA
ataacaccaccaacattttacgcctgatgctgctgctctcgctggcaatcggcgtggtgctgacccgcacgctat

SEQ ID NO: 147073 - DNA, 75 bp, synthetic construct
  source 1..75: mol_type = other DNA
gcgcctgacgctcgacacccatacgctcgccaccgaagcccaacaggtggataacaccactaacattttacgcct

SEQ ID NO: 147074 - DNA, 75 bp, synthetic construct
  source 1..75: mol_type = other DNA
taccaggggtatcgatattggcgcgaaatacgagatctacaaattaattaaccaactcgtccagcagggtattgc

SEQ ID NO: 147075 - DNA, 75 bp, synthetic construct
  source 1..75: mol_type = other DNA
ttcgaagtggaattgaatgccctggttcgccgccactttccacactgggacgcgcgcgatttactgggagataaa

SEQ ID NO: 147076 - DNA, 75 bp, synthetic construct
  source 1..75: mol_type = other DNA
tgctgtgacatctgaattcagtgcattcgaactggaattgaatgccctggtccgtcgtcatttcccgcactgggg

SEQ ID NO: 147077 - DNA, 75 bp, synthetic construct
  source 1..75: mol_type = other DNA
tgttgatagtattcgctatcaggttgatattaataatcttacccagcgtgaagttgaaaacctgccgctgaatgg

SEQ ID NO: 147078 - DNA, 75 bp, synthetic construct
  source 1..75: mol_type = other DNA
tgccttacggcggcatgcccgaggcagatagcctcaagcacccgcagcaattctacttaactctcgctttacagc

SEQ ID NO: 147079 - DNA, 75 bp, synthetic construct
  source 1..75: mol_type = other DNA
agctgctggcgtttcatcgcttaatgcgtacggataagccaattggcgcgttactgctgctctggccaacattat

SEQ ID NO: 147080 - DNA, 75 bp, synthetic construct
  source 1..75: mol_type = other DNA
cgctttgtgccgctctctgcgctggaaggcgataacgtggcttcgcaaagtgaaagtatgccgtggtacagcggt

SEQ ID NO: 147081 - DNA, 75 bp, synthetic construct
  source 1..75: mol_type = other DNA
accttatcgtcaaagacgaaagcgccattcagcttatcgaagatggcctgcgcgaagtgtcgtgcggctatgacg

SEQ ID NO: 147082 - DNA, 75 bp, synthetic construct
  source 1..75: mol_type = other DNA
gagatagtcgtaacgcgttctcctgagcaggtactccatccggccacgctcgcctcattcgaagggatgagcatc

SEQ ID NO: 147083 - DNA, 75 bp, synthetic construct
  source 1..75: mol_type = other DNA
gtgaaaccgaccgcgttcaaacgtgatgtgctgtccgccgctgacaaaacgctggttcgccagatagtcggtgat

SEQ ID NO: 147084 - DNA, 75 bp, synthetic construct
  source 1..75: mol_type = other DNA
cgcggtctgcttcctgaaaatgaaagggttgagttcagtgcgccatcgggtcaggatggagagataagttcctaa

SEQ ID NO: 147085 - DNA, 75 bp, synthetic construct
  source 1..75: mol_type = other DNA
gggcatcttcagaatgtgcggcgcgggactggtgaccagtctgatttgatgctggcagaccttatcgtcaaagac

SEQ ID NO: 147086 - DNA, 75 bp, synthetic construct
  source 1..75: mol_type = other DNA
tgacggctcgctgctgtgcaaagacgtgccgataggtcgaacgggtaagcagctctacggcgctgccgatctgcc

SEQ ID NO: 147087 - DNA, 75 bp, synthetic construct
  source 1..75: mol_type = other DNA
aaaaccaggtatgccactcaccgacgtactggcctgcatgatgcagatccacgttaatgccccatacctacttaa

SEQ ID NO: 147088 - DNA, 75 bp, synthetic construct
  source 1..75: mol_type = other DNA
atcgagccgttaagtaaggcctatgacgcttactccttccatgtgctgccgcgtattggctcactggtcgcgaac

SEQ ID NO: 147089 - DNA, 75 bp, synthetic construct
  source 1..75: mol_type = other DNA
gacgccgacagctaccgttatctggcagaatccatccgtatgcatcccgatcaggatactctgaaagccatgatg

SEQ ID NO: 147090 - DNA, 75 bp, synthetic construct
  source 1..75: mol_type = other DNA
taccggcgacggtgaggacgacgaagaggaaaccacgattaccggtgacgctgcttatcgtgccgaagttatcgt

SEQ ID NO: 147091 - DNA, 75 bp, synthetic construct
  source 1..75: mol_type = other DNA
tttcgacgaatgatggcgtgatggcgtttgccgataaagtattaaaaagcacccacggcctgcgtgccattttgc

SEQ ID NO: 147092 - DNA, 75 bp, synthetic construct
  source 1..75: mol_type = other DNA
tttcgaccaacgacggtgtgatggcgtttgccgatgaagtactaaaaagcacccatggcctgcgtgctattttgc

SEQ ID NO: 147093 - DNA, 75 bp, synthetic construct
  source 1..75: mol_type = other DNA
cgggattatccacagcaggtaatcaactgcggcattatggaagctaatgttattggtacagcagcaggtctggcg

SEQ ID NO: 147094 - DNA, 75 bp, synthetic construct
  source 1..75: mol_type = other DNA
aggaattcatagtactgtgcaattacctgacccgccgggcgggagaagttgatggcgaaagtaccaatttgacca

SEQ ID NO: 147095 - DNA, 75 bp, synthetic construct
  source 1..75: mol_type = other DNA
tcggcagtaaagaacaggccgatgtaagacttgctggttctgtcatgtcggtgctgcgtgtttctatgcccggta

SEQ ID NO: 147096 - DNA, 75 bp, synthetic construct
  source 1..75: mol_type = other DNA
ccgggcgcagcgccgccaactggcgcgagaaccggggttatccgcaacgcatcctgtaccagaacgcgccgcgct

SEQ ID NO: 147097 - DNA, 75 bp, synthetic construct
  source 1..75: mol_type = other DNA
gcgtcagcgcccgcgatggttgccagcgaatggcattcaccttaagcgcctataacggcggtttaggctgggtga

SEQ ID NO: 147098 - DNA, 75 bp, synthetic construct
  source 1..75: mol_type = other DNA
ttgtgttggtctcgctgtcgttagggatagagatgatgatgcacagcaggacgcgtaagcacaatttctggggac

SEQ ID NO: 147099 - DNA, 75 bp, synthetic construct
  source 1..75: mol_type = other DNA
cacgctggcgaaaaatgctgatgccgtgctggaactccacatggcgaatgaaacctgcccgaataatcttgcacc

SEQ ID NO: 147100 - DNA, 75 bp, synthetic construct
  source 1..75: mol_type = other DNA
cgtaaccgcggcggcgaagaagaagaaaagttgaaacagggagagcttcctttttctgtatcaatgctgatttac

SEQ ID NO: 147101 - DNA, 75 bp, synthetic construct
  source 1..75: mol_type = other DNA
gttgaagccaaccgtaaaaatggttcaggcaaaaagaccgtaaaaacgtccactggcagctttgaacttgccaca

SEQ ID NO: 147102 - DNA, 75 bp, synthetic construct
  source 1..75: mol_type = other DNA
tgatgaatgtttggtgatttttgccgatcgttgtattgatttctggtggcagagtggcggggtacaggagccggt

SEQ ID NO: 147103 - DNA, 75 bp, synthetic construct
  source 1..75: mol_type = other DNA
cgagtttctttattcatccggcagaggctttccatggcgatctcggtatgattacgccttatgatctcctgatcc

SEQ ID NO: 147104 - DNA, 75 bp, synthetic construct
  source 1..75: mol_type = other DNA
ccatgatccatcagcgcaaatttatgccaaatgattttgcacgttatcacccgggtggctcattaggccgtcgcc

SEQ ID NO: 147105 - DNA, 75 bp, synthetic construct
  source 1..75: mol_type = other DNA
taacatattgttagttttagtgtgggatacttcccgccgccgtcgtttggcacgtcgcagcattgccgcctgttt

SEQ ID NO: 147106 - DNA, 75 bp, synthetic construct
  source 1..75: mol_type = other DNA
ttgcccgcagaatatcaggttgaatcagtggttaaacttcaggttccggctctggatggcgaacgccatttggtt

SEQ ID NO: 147107 - DNA, 75 bp, synthetic construct
  source 1..75: mol_type = other DNA
aatgccggaagatgaaatagccctattgcccgcagaatatcaggttgaatcagtggttaaacttcaggttccggc

SEQ ID NO: 147108 - DNA, 75 bp, synthetic construct
  source 1..75: mol_type = other DNA
agtaaattttttgagggagaaaaagacgatgtcgaaacggtcgatgtcgtcttgcgcccaaaagtttattttcgg

SEQ ID NO: 147109 - DNA, 75 bp, synthetic construct
  source 1..75: mol_type = other DNA
atcgagccgctgagcaaagcctatgatgcatactccttccatgtgctgccgcgtattggctcactggtcgcgaac

SEQ ID NO: 147110 - DNA, 75 bp, synthetic construct
  source 1..75: mol_type = other DNA
catcagcgatgcgctggaaggtattacgcactctctgtgtacgcttgagttccaggacaaccgccgtctgtacga

SEQ ID NO: 147111 - DNA, 75 bp, synthetic construct
  source 1..75: mol_type = other DNA
cagttaaagcctgtcatagcctgatccccgaagcgaaaatcggcaatatgcttctcggtgggctggtttaccccc

SEQ ID NO: 147112 - DNA, 75 bp, synthetic construct
  source 1..75: mol_type = other DNA
aaaaatggaaccgcgcatcctggggaaagagaatatcaaagatgtcgccatcgatttttatcaccgttacccgga

SEQ ID NO: 147113 - DNA, 75 bp, synthetic construct
  source 1..75: mol_type = other DNA
aatcgtcgctatccaaagatgatcctctatcaacatgccgcccgctatttactctggggacaggcaagctgtctt

SEQ ID NO: 147114 - DNA, 75 bp, synthetic construct
  source 1..75: mol_type = other DNA
ttccacaaatgcgcgtgtttattgccgaagatctcggctgtcatatggatgatgttaacgtgaaagccactacta

SEQ ID NO: 147115 - DNA, 75 bp, synthetic construct
  source 1..75: mol_type = other DNA
ccgcatctgaaaagttcagagtgggggtggcaaattgatccggttggattacgggttctgttaaatacgctttgg

SEQ ID NO: 147116 - DNA, 75 bp, synthetic construct
  source 1..75: mol_type = other DNA
tggtgaaaaactacggcggttgggctaatcgggcggtcatcgatcacttcgagcattacgcccgcacggtcttta

SEQ ID NO: 147117 - DNA, 75 bp, synthetic construct
  source 1..75: mol_type = other DNA
ttaatgttttcacagccataagaacattaaaagaacaaaaagaagaaatagaaaagctcaaatacagacataaag

SEQ ID NO: 147118 - DNA, 75 bp, synthetic construct
  source 1..75: mol_type = other DNA
gtcagccgggtattgctgatgttgcggatcacgggctggctgagcctgtgtaaacgggtacgtgatgataaaggc

SEQ ID NO: 147119 - DNA, 75 bp, synthetic construct
  source 1..75: mol_type = other DNA
acaagatggcatggatgatgatccggctgtatgcgcagaataatgagggggccatttttcccacttatgacgaac

SEQ ID NO: 147120 - DNA, 75 bp, synthetic construct
  source 1..75: mol_type = other DNA
gtgcgtcggtaaccgaactcagtgctcaggtaaccgaactctgtactgcggtaaccgaacccggagaaaaaacag

SEQ ID NO: 147121 - DNA, 75 bp, synthetic construct
  source 1..75: mol_type = other DNA
taaaggtaaagcctcccgtgaaaccgttagccgggtgttgctgatgttacgaataaccggctggctcagcctgtg

SEQ ID NO: 147122 - DNA, 75 bp, synthetic construct
  source 1..75: mol_type = other DNA
caggaaaatcaacaggttatcacagagttcgggaaccgaaccattacgtacgtaatatcacacacagtgtgatta

SEQ ID NO: 147123 - DNA, 75 bp, synthetic construct
  source 1..75: mol_type = other DNA
aacgtacagaacctatttcagcagaacggctgagcggcattgtggcagggctacgggcttccctgcgtaaccgtt

SEQ ID NO: 147124 - DNA, 75 bp, synthetic construct
  source 1..75: mol_type = other DNA
atgttaactctttaacctctctttcaaaatcagaaaataatcacaattatcaaactgaaatgttgcttcgatgga

SEQ ID NO: 147125 - DNA, 75 bp, synthetic construct
  source 1..75: mol_type = other DNA
gcgcagctctgggagtaaatgctccgccgatcactgttgaggtacatatcagcaaaggtctacccggattaacaa

SEQ ID NO: 147126 - DNA, 75 bp, synthetic construct
  source 1..75: mol_type = other DNA
gatgagctacctgaatttgaacggcgtacattggatgccttgcgggagcccatagagtcaggccagatccatctt

SEQ ID NO: 147127 - DNA, 75 bp, synthetic construct
  source 1..75: mol_type = other DNA
ggttggctggatgctggctgtgatgaaacgtgcgcgtgagggaagttttaatacgccggatatgtccgtgcatga

SEQ ID NO: 147128 - DNA, 75 bp, synthetic construct
  source 1..75: mol_type = other DNA
atgacagaacaacgccctgaactgcgcacaccggggagcaccgttgcggccgcagagcgcattgtggcctggctg

SEQ ID NO: 147129 - DNA, 75 bp, synthetic construct
  source 1..75: mol_type = other DNA
tatgagttctcagattttagagatttttcctcttggacaaatgcaaatgaatttacccgaatagcttttaatttg

SEQ ID NO: 147130 - DNA, 75 bp, synthetic construct
  source 1..75: mol_type = other DNA
ggcaaatctcgaccatttaccagccgatgaaccagtacaaagtggtgatggaagtggatccgcgctatacccagg

SEQ ID NO: 147131 - DNA, 75 bp, synthetic construct
  source 1..75: mol_type = other DNA
cagggtgaactgtacgatttcgcctcgacgcagctggctccgacgatttcgcaaatcgacggtgtcggtgatgtc

SEQ ID NO: 147132 - DNA, 75 bp, synthetic construct
  source 1..75: mol_type = other DNA
accgcccggtggcgacgattttactgtcggtcgccattaccctgtgcggcatactgggtttccgtatgctgccgg

SEQ ID NO: 147133 - DNA, 75 bp, synthetic construct
  source 1..75: mol_type = other DNA
aggcggcgatcaacgccgcacaaagtctgctgcccagtgggatgcccagccgcccgacctatcgcaaagcgaacc

SEQ ID NO: 147134 - DNA, 75 bp, synthetic construct
  source 1..75: mol_type = other DNA
acccgtctggtgggcgtggtgctgcttggcaccattgcgctgaatatctggctgtatatctcgatcccgaaaacc

SEQ ID NO: 147135 - DNA, 75 bp, synthetic construct
  source 1..75: mol_type = other DNA
tcagggattatcggcggcctcgaccatctcgttcaacctgccgaccggaaaatcgctctcggacgccagtgcggc

SEQ ID NO: 147136 - DNA, 75 bp, synthetic construct
  source 1..75: mol_type = other DNA
gtggtgtttgaaaatcactcaattatgtaccacccaccacaacaggggaagacccttttgcagggggcgctggaa

SEQ ID NO: 147137 - DNA, 75 bp, synthetic construct
  source 1..75: mol_type = other DNA
gtgaacgactgtggatctgcccaagctggcgtgatgtgccggacgaaaacgccgtcaacgtaatgttagacccag

SEQ ID NO: 147138 - DNA, 75 bp, synthetic construct
  source 1..75: mol_type = other DNA
tcggaaaccgaaccattacgtacgtagtatcacacacagtgtgaataaaaatacgtacgtaccgggtaaacctgt

SEQ ID NO: 147139 - DNA, 75 bp, synthetic construct
  source 1..75: mol_type = other DNA
tgggagccgaaaatccgcaaaaaactggcaacgttaccggaactggcggacgttaactccgaccagcaggataac

SEQ ID NO: 147140 - DNA, 75 bp, synthetic construct
  source 1..75: mol_type = other DNA
gtgcgtaaaccgcagggggcgctggaagatggcactcaccgctggcagatccagaccaatgatgagctaaaaacc

SEQ ID NO: 147141 - DNA, 75 bp, synthetic construct
  source 1..75: mol_type = other DNA
atcaacggcgcagcgcgcgatgtgcaggcggcgatcaacgctgcacaaagtttgctgcccagcgggatgcccagc

SEQ ID NO: 147142 - DNA, 75 bp, synthetic construct
  source 1..75: mol_type = other DNA
ttgaaaagtggttgtgataaaaagcatacttgccccctctgcgggaaagtcgctatatctaatgaggaaattgag

SEQ ID NO: 147143 - DNA, 75 bp, synthetic construct
  source 1..75: mol_type = other DNA
cagccgcactcactacgctgatgcacgcgcttattgatattgaatgcacggcagagcttgcacaaaaggaagaac

SEQ ID NO: 147144 - DNA, 75 bp, synthetic construct
  source 1..75: mol_type = other DNA
tggcgctgaatgaggccaaagccatcctgattgctgattgtgaaaatgggggggttatgcgtgatgatcgtttta

SEQ ID NO: 147145 - DNA, 75 bp, synthetic construct
  source 1..75: mol_type = other DNA
atgttgcagaagataagttatgctcaaatcggtcatgattatgatttgcggaacgtttatgacatcaagccatta

SEQ ID NO: 147146 - DNA, 75 bp, synthetic construct
  source 1..75: mol_type = other DNA
ccattcagaattacttctgctggctaattttgtttcatttcaccaggatgcagattcacaaacattaccatcaat

SEQ ID NO: 147147 - DNA, 75 bp, synthetic construct
  source 1..75: mol_type = other DNA
gtgccgttcatgcagaagcacgaaacaacgcagactgaattcatcgctaattggcaaaaaaaagccccgaaaatc

SEQ ID NO: 147148 - DNA, 75 bp, synthetic construct
  source 1..75: mol_type = other DNA
tcccccactggaagacatggagctttaccagacgtttactgatgaatactttgaacccgcatttgcggtgctggg

SEQ ID NO: 147149 - DNA, 75 bp, synthetic construct
  source 1..75: mol_type = other DNA
tactggcggtcagtattccgcctctcgcgccatggtggatggtagtgctgggtacggtgtttgcggtgctcatcg

SEQ ID NO: 147150 - DNA, 75 bp, synthetic construct
  source 1..75: mol_type = other DNA
gcatattcccctcagcttcttagtaacgctggcgttatgcgcaacgttgggctggttgttctcaccagaaacact

SEQ ID NO: 147151 - DNA, 75 bp, synthetic construct
  source 1..75: mol_type = other DNA
gcggttatgcaacttagtgcggatatggcgctgaatgaggctaaagccatcctgattgctgattgtgaaaatggg

SEQ ID NO: 147152 - DNA, 75 bp, synthetic construct
  source 1..75: mol_type = other DNA
gataacagcaccacggatttacgtcaggggcgtgtgcgtattcgctacaaatatacgcccgttccgccactggaa

SEQ ID NO: 147153 - DNA, 75 bp, synthetic construct
  source 1..75: mol_type = other DNA
gtattcgctacaaatatacgcccgttcctccgctggaagatatggagctttaccagacgtttactgatgaatact

SEQ ID NO: 147154 - DNA, 75 bp, synthetic construct
  source 1..75: mol_type = other DNA
gtggacagtgcagagaagccccggcacggcgatattgttgtggccagcgtgcagggggagtttacggttaaacgg

SEQ ID NO: 147155 - DNA, 75 bp, synthetic construct
  source 1..75: mol_type = other DNA
ggaaataaagaaaaattactgccgttggggcgagcactggatcgcgtattaacgtggaattattacatgctgcca

SEQ ID NO: 147156 - DNA, 75 bp, synthetic construct
  source 1..75: mol_type = other DNA
gaagtgaaggaagagaaggatctggacagcctcttcttcgccggtaagactaccgcgctggtcaatactatcgtc

SEQ ID NO: 147157 - DNA, 75 bp, synthetic construct
  source 1..75: mol_type = other DNA
atgtcactgtcaattgttcatacccgtgccgcgctgggagtaaacgctccgccgatcactgttgaggtacatatc

SEQ ID NO: 147158 - DNA, 75 bp, synthetic construct
  source 1..75: mol_type = other DNA
tgcgtcgttaactgcgatggtgggcggtggtgcaattccagggccaggtgaaatttcgctggcgcataacggcgt

SEQ ID NO: 147159 - DNA, 75 bp, synthetic construct
  source 1..75: mol_type = other DNA
tcagttttttcatgtcagggaatatcagacctgtgatgatgccctgcgtgctgccagccgcatggagtacagccg

SEQ ID NO: 147160 - DNA, 75 bp, synthetic construct
  source 1..75: mol_type = other DNA
tccgaaaacctcagcaagaagctgcgtactggcaagacggtagaggacattttccgtggcgcacaggctagcttc

SEQ ID NO: 147161 - DNA, 75 bp, synthetic construct
  source 1..75: mol_type = other DNA
tcgcactttccctggttctggtcgctcccatggcagcacaggctgcggaaattacgttagtcccgtcagtaaaat

SEQ ID NO: 147162 - DNA, 75 bp, synthetic construct
  source 1..75: mol_type = other DNA
ggggcagttatttggcccataatgatgacgagaatgcgtatcgaccatgagttggcagtagctgggcaaattatt

SEQ ID NO: 147163 - DNA, 75 bp, synthetic construct
  source 1..75: mol_type = other DNA
atcgcatcggttcacccaacagcagcatccaactggttaactactggccagacatctctctcgacgaatacatca

SEQ ID NO: 147164 - DNA, 75 bp, synthetic construct
  source 1..75: mol_type = other DNA
tgtatctctgaaggtcagaacctgcaggactgcgactacctcatcaactacgacatccactggaatcccgtgcgc

SEQ ID NO: 147165 - DNA, 75 bp, synthetic construct
  source 1..75: mol_type = other DNA
tgagtccttccgcttgacgctcaagtccctgcgcgcgaaccacatgaatacgctggccaagatcagcactttcaa

SEQ ID NO: 147166 - DNA, 75 bp, synthetic construct
  source 1..75: mol_type = other DNA
acagtagggaaaactatattgttattggcgataatgtcgatattggtgcccatacatgtattattgggttaaatg

SEQ ID NO: 147167 - DNA, 75 bp, synthetic construct
  source 1..75: mol_type = other DNA
tcattcatggtaatgttgatatcggtgagaatgtcattatacggcagaatatggatttgcccctatatttccaga

SEQ ID NO: 147168 - DNA, 75 bp, synthetic construct
  source 1..75: mol_type = other DNA
tactggaaagccgaagtcatcatgcgggataagtttgtcttacaccgcctgataagaaacgggttgcagagacaa

SEQ ID NO: 147169 - DNA, 75 bp, synthetic construct
  source 1..75: mol_type = other DNA
ttgttttggtcatcattctttttgttttgctaagcattagtaaaaagctatctcaaatgattgaacatagctcta

SEQ ID NO: 147170 - DNA, 75 bp, synthetic construct
  source 1..75: mol_type = other DNA
acagtataaaataccaaccccaaacgagagaaaagcaatagatcaatatcgtattgacttagaaatcgacgaaat

SEQ ID NO: 147171 - DNA, 75 bp, synthetic construct
  source 1..75: mol_type = other DNA
atggcgagttttgcatacatagactctgaaaaatggtcaaaacttaatcgcttaaaatccatgattcagagatat

SEQ ID NO: 147172 - DNA, 75 bp, synthetic construct
  source 1..75: mol_type = other DNA
ataatgttggtactgactaatggcgctctggtctgcggcattgtggtattgctgtggccgatgatgaaagaacag

SEQ ID NO: 147173 - DNA, 75 bp, synthetic construct
  source 1..75: mol_type = other DNA
aggataatgttggtactgactgatggcgctctggtctgcggcattgtggtattgctgtggccgatgatgaaaaaa

SEQ ID NO: 147174 - DNA, 75 bp, synthetic construct
  source 1..75: mol_type = other DNA
gtcattcaatagcttattatgatattcacacactccctgtgatttcatgtggacatcaaaagatagttccttttg

SEQ ID NO: 147175 - DNA, 75 bp, synthetic construct
  source 1..75: mol_type = other DNA
ggcacatttttattatcaggaaaaaaacgtcatcttctggaatactggaaagcagaagttatcatgcgggataag

SEQ ID NO: 147176 - DNA, 75 bp, synthetic construct
  source 1..75: mol_type = other DNA
ccaattttgcctgctggggcgaagataaagtagtcggcaaggcgctggataatcgcatcggctgcgcgatgatgg

SEQ ID NO: 147177 - DNA, 75 bp, synthetic construct
  source 1..75: mol_type = other DNA
ccaattttgcctgctggggcgaagataaagtggtcggcaaggcgttggataaccgcatcggctgcgcaatgatgg

SEQ ID NO: 147178 - DNA, 75 bp, synthetic construct
  source 1..75: mol_type = other DNA
cggatactttattgactggcctggcattgatggacagagaaacgctggtgccaatgcccgttatatcgcggctat

SEQ ID NO: 147179 - DNA, 75 bp, synthetic construct
  source 1..75: mol_type = other DNA
gtttcaccacaagccgttttcgatgcgccacaactcaccacggtcgccaaagaatggccgctgttttcctggtaa

SEQ ID NO: 147180 - DNA, 75 bp, synthetic construct
  source 1..75: mol_type = other DNA
ggtttccagcaagctcattatttgcgcagcgcgttctcccgccatacgacagccgtcagagcagtgcgtcagcgg

SEQ ID NO: 147181 - DNA, 75 bp, synthetic construct
  source 1..75: mol_type = other DNA
cctggtagggaaggttgaaatgactgagtggttagttgactttgctgcccagcttcgcaaaggaggcaaccagtg

SEQ ID NO: 147182 - DNA, 75 bp, synthetic construct
  source 1..75: mol_type = other DNA
aacatggcagtacagctcgctaacgccgagagcaagtgcagggagctggcggcggagaatggggagttgaaatca

SEQ ID NO: 147183 - DNA, 75 bp, synthetic construct
  source 1..75: mol_type = other DNA
tatcaatatgaagaagggcattatttaggaaatcctggcaactatagaaatttttaccttgcctataaccctgct

SEQ ID NO: 147184 - DNA, 75 bp, synthetic construct
  source 1..75: mol_type = other DNA
gaaaaagcgcagtctgcactggcagagttaggcattgaatatcagtccgatgcgcagcatgtgaccatcagggcc

SEQ ID NO: 147185 - DNA, 75 bp, synthetic construct
  source 1..75: mol_type = other DNA
ctgccgtggacgctgaaatcgcatagtgaagatgccgatagcgtgacactgactttcgaactgacgcaaagcgac

SEQ ID NO: 147186 - DNA, 75 bp, synthetic construct
  source 1..75: mol_type = other DNA
tcattgataaagtcaatgacgcgaaagaaggcactttgaccggggggattcagacattcccggatcgtaccgatc

SEQ ID NO: 147187 - DNA, 75 bp, synthetic construct
  source 1..75: mol_type = other DNA
taatctgagtcgaaagtcgctttgtgccaaacttctttgccgactggaacacgcgactgggaagaggaacagaaa

SEQ ID NO: 147188 - DNA, 75 bp, synthetic construct
  source 1..75: mol_type = other DNA
cgggaagcgtggataaccgggaagggctgcttgcggcaaatggcgcggtgcgtctggatgcactgagccttgata

SEQ ID NO: 147189 - DNA, 75 bp, synthetic construct
  source 1..75: mol_type = other DNA
caaaaaacaggaacccggattgccatccctctggctctgcgttgtgaaccgccccggaaatcctggagactaaac

SEQ ID NO: 147190 - DNA, 75 bp, synthetic construct
  source 1..75: mol_type = other DNA
tgtttaccaccattgaaggcaactacgctgatgctgtgcgcttgttaaccaccgcccatagcgttccgtttgatg

SEQ ID NO: 147191 - DNA, 75 bp, synthetic construct
  source 1..75: mol_type = other DNA
acataatctttatggcccaacggaagcagcggtggatgttagctggtatccggcttttggcgaggaactggcaca

SEQ ID NO: 147192 - DNA, 75 bp, synthetic construct
  source 1..75: mol_type = other DNA
cgtctgaaactggaatttaacggcggggaattccgccagttggctacgcaactttcaggtgtacaacgtaccgat

SEQ ID NO: 147193 - DNA, 75 bp, synthetic construct
  source 1..75: mol_type = other DNA
gcgtaacgcttcggcggatattctgcgcctgaaactggaatttactgacggtgaattccgccaactggctacgca

SEQ ID NO: 147194 - DNA, 75 bp, synthetic construct
  source 1..75: mol_type = other DNA
ggcagtgaaacgattatcgccgcggcattcgcgtcgttgctgggttgtgacgtgcaggatgccgatgctgatttc

SEQ ID NO: 147195 - DNA, 75 bp, synthetic construct
  source 1..75: mol_type = other DNA
accgcgaaagcgaagcctggcagcgtgatgcggcattctgggcggaacagcgtcgtcaactgccaccgcccgcgt

SEQ ID NO: 147196 - DNA, 75 bp, synthetic construct
  source 1..75: mol_type = other DNA
cttcgcgaaacgctgccgccgcatatggtgccggtagtgctgctgcaacttccacagttgccgcttagcgctaat

SEQ ID NO: 147197 - DNA, 75 bp, synthetic construct
  source 1..75: mol_type = other DNA
tgctataacgccccgcttaccccccagggcagtgcgccgctgcaactttcacaaccgcaccacacggcttatatc

SEQ ID NO: 147198 - DNA, 75 bp, synthetic construct
  source 1..75: mol_type = other DNA
gaaaagcgacgctgtttgttgccgaacgcacgcttcaggaggggatgactcccgaacgggcctgggcaccatgga

SEQ ID NO: 147199 - DNA, 75 bp, synthetic construct
  source 1..75: mol_type = other DNA
atgcaggcgctgccggatgtcgaacaggcagttacccacgcctgtgtgattaaccaggcggcagccactggtggt

SEQ ID NO: 147200 - DNA, 75 bp, synthetic construct
  source 1..75: mol_type = other DNA
aaaaaaaatgcgccgccatcaacgctacgacgccgaacaaattgtccgtgacagtgggcgcgcggcgggagagga

SEQ ID NO: 147201 - DNA, 75 bp, synthetic construct
  source 1..75: mol_type = other DNA
cgttgcgtgaaggtaatggcccgacgctgttttgtttccatccggcatccggttttgcctggcagtttagcgtgc

SEQ ID NO: 147202 - DNA, 75 bp, synthetic construct
  source 1..75: mol_type = other DNA
tcggcagtttgcccgtcaggtgacgccgggtcaggtgatggttgcgtcaactgtcgccaaactggcaacgattat

SEQ ID NO: 147203 - DNA, 75 bp, synthetic construct
  source 1..75: mol_type = other DNA
ggctacccggtgtggaacacgggcctgcgcattctcgatgcgatgatgcatccggtgccgccgggtgtggcaggc

SEQ ID NO: 147204 - DNA, 75 bp, synthetic construct
  source 1..75: mol_type = other DNA
gggaaatgcgcgagcaggtggtggcgctggcgaatctgctgcgtgagcgcggcgttaaacctggcgacagcgtag

SEQ ID NO: 147205 - DNA, 75 bp, synthetic construct
  source 1..75: mol_type = other DNA
agaccagacaggattctggctggcagctattgatgatacccgcatggattgccattcaatagcttattatgatat

SEQ ID NO: 147206 - DNA, 75 bp, synthetic construct
  source 1..75: mol_type = other DNA
attttattaatctatataatgaaataaggaagaaatacaacaacaacccatcgggacaacaagagtacttaaaca

SEQ ID NO: 147207 - DNA, 75 bp, synthetic construct
  source 1..75: mol_type = other DNA
accaacacacctcagtttcaaaaatacacactatggcttatgacagataaaacagcgccggaagcaggacaaatc

SEQ ID NO: 147208 - DNA, 75 bp, synthetic construct
  source 1..75: mol_type = other DNA
ctggatatctatcgtcaggattgtgcgcatgtggatattatctctccaggggcgtttgaaaaaattgggccgatt

SEQ ID NO: 147209 - DNA, 75 bp, synthetic construct
  source 1..75: mol_type = other DNA
caatgaaactggcagcgcagttaagtcggcagtttgcccgtcaggtgacgccggggcaggtgatggtcgcgtcaa

SEQ ID NO: 147210 - DNA, 75 bp, synthetic construct
  source 1..75: mol_type = other DNA
aggccttcctggcggcacagcagggaagtacttcaacggagttgtttaccaccattgaaggcaactacgctgatg

SEQ ID NO: 147211 - DNA, 75 bp, synthetic construct
  source 1..75: mol_type = other DNA
cctgaacaggcctgggcaccgtggattgctgagctggatatctatcgtcaggattgtgcgcatgtggatattatt

SEQ ID NO: 147212 - DNA, 75 bp, synthetic construct
  source 1..75: mol_type = other DNA
atgcgtcgactgggctcagcggcgctgacggctaccggacccgtgctcaacgtgttgccgttgggtattcacatt

SEQ ID NO: 147213 - DNA, 75 bp, synthetic construct
  source 1..75: mol_type = other DNA
tgcgcaatttgccgcggatccgacgctgttgtgtggcgatgtcgatattatgctgccagacgaatatgctcagtt

SEQ ID NO: 147214 - DNA, 75 bp, synthetic construct
  source 1..75: mol_type = other DNA
gcggctgacggggatattattctgctgggtggcctggctgaatcgaaggtcacaaacgccgataccgggttcagc

SEQ ID NO: 147215 - DNA, 75 bp, synthetic construct
  source 1..75: mol_type = other DNA
ttggcgctggtgttggtgcagtaacagaaaaaggccgcgacggtaaaaatgcgcgtaaaggtgcaaaagtaggtg

SEQ ID NO: 147216 - DNA, 75 bp, synthetic construct
  source 1..75: mol_type = other DNA
cggttgcagacgctgttaccgctgattgataccgcttctgaggaagtgattgtcgccgcttacgtgtttgaggtt

SEQ ID NO: 147217 - DNA, 75 bp, synthetic construct
  source 1..75: mol_type = other DNA
tttatcggcctcgcttccgttccgtggcgtatttgtcggatattctggccgggcagtttacggggcagtttaata

SEQ ID NO: 147218 - DNA, 75 bp, synthetic construct
  source 1..75: mol_type = other DNA
tggtgcgtcagccacgttttcagttggtaatgaggttccggtgctgggtcaggtgagctacgccgacaacaggcc

SEQ ID NO: 147219 - DNA, 75 bp, synthetic construct
  source 1..75: mol_type = other DNA
tttatcggcctcgcttccgttccgtggcgtatctgtctgacattctggccggacagtttaccgggcagtttaaca

SEQ ID NO: 147220 - DNA, 75 bp, synthetic construct
  source 1..75: mol_type = other DNA
cgagacattgccgcgcccgaaagcgatagtcgctatttctgcgcactggtttactcgtggcacgggagtaacggc

SEQ ID NO: 147221 - DNA, 75 bp, synthetic construct
  source 1..75: mol_type = other DNA
tctgaccggcaatggcctcgaaggggcgattaaaggtgccgtgattggcggtacgggtggtgcggtgatgctgcc

SEQ ID NO: 147222 - DNA, 75 bp, synthetic construct
  source 1..75: mol_type = other DNA
ccagcagatttttcgcttcaaagcgcggtatgattatcctaataaaacgttgcatcaacgcgacgaaaagcatca

SEQ ID NO: 147223 - DNA, 75 bp, synthetic construct
  source 1..75: mol_type = other DNA
atgtatcctgacgccgatatcccgatggtgcagttgagtatcgacagtagcaaacctgccgcctggcatttcgaa

SEQ ID NO: 147224 - DNA, 75 bp, synthetic construct
  source 1..75: mol_type = other DNA
tcatgtcttcaacacgtatgccagcattgtttttaggtcacggtagtccgatgaatgtgctggaagataatttgt

SEQ ID NO: 147225 - DNA, 75 bp, synthetic construct
  source 1..75: mol_type = other DNA
aggtgcgtgggatggtcaggagccggtgactgttccggttgatggcatagagatgggcagtttaagcatgttgtc

SEQ ID NO: 147226 - DNA, 75 bp, synthetic construct
  source 1..75: mol_type = other DNA
agaacaattcgcgtctatcccgctacgagaaaaaaccatcgaggagaactcacagcaagctgtctttaatgctgt

SEQ ID NO: 147227 - DNA, 75 bp, synthetic construct
  source 1..75: mol_type = other DNA
gaatgggcttgctgaagctggcgctaaaaactggatgacgttcactggcaatgtgaaacaggatggttccacttc

SEQ ID NO: 147228 - DNA, 75 bp, synthetic construct
  source 1..75: mol_type = other DNA
cagttgatcaacaaggcacttgatttgcgtaacctgggtgtgaacgttgatgacaaactggcagatgcatcccgc

SEQ ID NO: 147229 - DNA, 75 bp, synthetic construct
  source 1..75: mol_type = other DNA
cggcgtcgccgggcttgatccggcatatgcaaacgagaagaacgttggcaattactttgtgctgcgcacgatcga

SEQ ID NO: 147230 - DNA, 75 bp, synthetic construct
  source 1..75: mol_type = other DNA
gtcagatcgcgctgtcatcgacctatgatggcatgataggacagaaaatcgggcgtacatcggatattgcaccag

SEQ ID NO: 147231 - DNA, 75 bp, synthetic construct
  source 1..75: mol_type = other DNA
tcgcaatgatgagctgacagtcgatgaaaacgggcatatcactaacgacaaaccggatgatttcatcttctccat

SEQ ID NO: 147232 - DNA, 75 bp, synthetic construct
  source 1..75: mol_type = other DNA
acaatacggaacgccaaagacgcgattaagaagattggcgggcgtttctggaattttgaagcaaacccggttgct

SEQ ID NO: 147233 - DNA, 75 bp, synthetic construct
  source 1..75: mol_type = other DNA
gccagagctgatgaagcggcgaatgatgactatatcattgtggttaatgataagccgattcgcgctaaggcgcgt

SEQ ID NO: 147234 - DNA, 75 bp, synthetic construct
  source 1..75: mol_type = other DNA
tcatcgaatctcattacagcaccgatgactgggcgtttatcctttctgaatacaaaaactggctgaaagataagg

SEQ ID NO: 147235 - DNA, 75 bp, synthetic construct
  source 1..75: mol_type = other DNA
atttgatgaaaaacacattagtaaggacgattttgctgatgctgtttccgttaaccgcctggtcgaaatggctgt

SEQ ID NO: 147236 - DNA, 75 bp, synthetic construct
  source 1..75: mol_type = other DNA
cgttctccggggacggcattatttttgccctttaacctgataattgaatcggtaacctttgaagagggagttgca

SEQ ID NO: 147237 - DNA, 75 bp, synthetic construct
  source 1..75: mol_type = other DNA
atggcccaccacacgccattaagctaaacgacattaccgaagcgggcgcgaagaactggctgacattcaccggga

SEQ ID NO: 147238 - DNA, 75 bp, synthetic construct
  source 1..75: mol_type = other DNA
ttccggttcgccgatcagcgccgcaatggcggctatgctcactattatggaggtaaacggtgtcagttttattca

SEQ ID NO: 147239 - DNA, 75 bp, synthetic construct
  source 1..75: mol_type = other DNA
ttctgactctgggatttggtctgcctatggggtcgccgccagtcgacgtgatcctgattattatgaccgttgttg

SEQ ID NO: 147240 - DNA, 75 bp, synthetic construct
  source 1..75: mol_type = other DNA
ccatgcaggcgcaaatcatgcaggacgtgcagcggatgcaggccaacgcccaggcgccggtgctacccgccatga

SEQ ID NO: 147241 - DNA, 75 bp, synthetic construct
  source 1..75: mol_type = other DNA
acatgcgcgtcggcacgctggcgatcactgaccatgacaccacagcagcaatcgcaccagcaagagaagaaattt

SEQ ID NO: 147242 - DNA, 75 bp, synthetic construct
  source 1..75: mol_type = other DNA
cgtgcccgtggattgaactggggcgtaaactctggctgcccgcaggcgttgaaggcgtctggcagctttgggaac

SEQ ID NO: 147243 - DNA, 75 bp, synthetic construct
  source 1..75: mol_type = other DNA
ttccggctcgccgatcagcgctgcaatggcggccatgcttactattatggaagttaacggcgtcagttttattca

SEQ ID NO: 147244 - DNA, 75 bp, synthetic construct
  source 1..75: mol_type = other DNA
tgatccagcgtattctcgttgaatatacaggtcatgacgctgattcagtgatggttgatgatgatggtgtttgtt

SEQ ID NO: 147245 - DNA, 75 bp, synthetic construct
  source 1..75: mol_type = other DNA
ttaactgttatttgttaatgctgattggcggtctggccggaatcgccgctttcgaagcctgctccggggttttga

SEQ ID NO: 147246 - DNA, 75 bp, synthetic construct
  source 1..75: mol_type = other DNA
taaacggttctcttcgttaatgtggcagtccgttatctgttgcctgctggcaggactgatgatgtggatccccag

SEQ ID NO: 147247 - DNA, 75 bp, synthetic construct
  source 1..75: mol_type = other DNA
ggctatatcgcccagacgcacggcgatcaggggctggcagccgatcctatcaaagcgtacttcaacggcactgca

SEQ ID NO: 147248 - DNA, 75 bp, synthetic construct
  source 1..75: mol_type = other DNA
tactgcaccgaaaacaacccgccgtttgataacggcctgctgaacgcgcagttgctgcaacaggcaaaaccgttt

SEQ ID NO: 147249 - DNA, 75 bp, synthetic construct
  source 1..75: mol_type = other DNA
tggtcagttaccgggtgataaagtcactccttacattgccaaactgcgctattcggtgccgggcgtgacgctgat

SEQ ID NO: 147250 - DNA, 75 bp, synthetic construct
  source 1..75: mol_type = other DNA
catttcgaagcgtcaaaaggtctggcagatgacgaccactttgtcggcctggctattgacgaagaccgtcagccg

SEQ ID NO: 147251 - DNA, 75 bp, synthetic construct
  source 1..75: mol_type = other DNA
gaactgaccgccgagcgcgtagaaaaatgggtaaaacaaatttctgaagagttacatctcgacgaaattatcaat

SEQ ID NO: 147252 - DNA, 75 bp, synthetic construct
  source 1..75: mol_type = other DNA
tatctgatagacataatatttaatggttcaaaaattggatcatctatagagttaaatatcagcgaaaaagagtct

SEQ ID NO: 147253 - DNA, 75 bp, synthetic construct
  source 1..75: mol_type = other DNA
gaatcgacccgatacactaccctggtgacaatagaacagactgcgcccgcgatcagttactggagccttccgtca

SEQ ID NO: 147254 - DNA, 75 bp, synthetic construct
  source 1..75: mol_type = other DNA
attgcaacgacaggccgaactatgaaattcaggcgttattcacggcccagcctgtgccactgacacccgaaggat

SEQ ID NO: 147255 - DNA, 75 bp, synthetic construct
  source 1..75: mol_type = other DNA
gtaccgacaaaagaggattgcaacgacaggccgagctatgagattcaggtcttattcactgtcccgcctgtgcca

SEQ ID NO: 147256 - DNA, 75 bp, synthetic construct
  source 1..75: mol_type = other DNA
aacggttttaaaatagcttatgacgttaatactgcaaaaaatagcaaccaggaaagaaccacctacagtagtatt

SEQ ID NO: 147257 - DNA, 75 bp, synthetic construct
  source 1..75: mol_type = other DNA
acttgaaaaagcgcaaataccaggtgcgctggaaggcgcgcaacgactggcgcagggcggtgcggtgacgcgcgg

SEQ ID NO: 147258 - DNA, 75 bp, synthetic construct
  source 1..75: mol_type = other DNA
acttgaaaaagcgcaaatacctggggcgctggaaggcgcgcaacgactggcgcagggcggtgcggtgacgcgcgg

SEQ ID NO: 147259 - DNA, 75 bp, synthetic construct
  source 1..75: mol_type = other DNA
ttgccagaacgcatgcccgcgtcactgtcgaacaaggcgggtacacgttgaaatcattcgtggttccgccaggtc

SEQ ID NO: 147260 - DNA, 75 bp, synthetic construct
  source 1..75: mol_type = other DNA
actctcaataacggatttaccttttatggtgcacagttaaagtccaatcaggatatgtatccctggaactcacaa

SEQ ID NO: 147261 - DNA, 75 bp, synthetic construct
  source 1..75: mol_type = other DNA
gttggtttgtcattaagtgtgccgttaagtctgtttgataaaacacattatagtttttcgaatgttaactatgat

SEQ ID NO: 147262 - DNA, 75 bp, synthetic construct
  source 1..75: mol_type = other DNA
ctgattaactcatggaccacactggttgagttgatgtctatctacaaacgtctgcgcagctttgaacatgagctg

SEQ ID NO: 147263 - DNA, 75 bp, synthetic construct
  source 1..75: mol_type = other DNA
ctattggtggcgggagcagctataccccggagttactggaaggatttattaagcgataccacgaattgccggtca

SEQ ID NO: 147264 - DNA, 75 bp, synthetic construct
  source 1..75: mol_type = other DNA
aagatgttgaagaattgtgtccgaatgcgtgggttattaatttcacgaaccccgcaggaatggttactgaagcag

SEQ ID NO: 147265 - DNA, 75 bp, synthetic construct
  source 1..75: mol_type = other DNA
tgaataataaacacctgtccctgatcgccctgtaccctgacggtaatcgggaggtgattgccatcctgccagtca

SEQ ID NO: 147266 - DNA, 75 bp, synthetic construct
  source 1..75: mol_type = other DNA
cctgggtgttatcagataccggctggcacctgccgtccggcatcctgaaagacgccacttccgttcgcctcttcc

SEQ ID NO: 147267 - DNA, 75 bp, synthetic construct
  source 1..75: mol_type = other DNA
gcatggaagacgaacagttttccgtcaagcactacgaagcacgtgtgaaagacggcgtggtacagctgcgcggtt

SEQ ID NO: 147268 - DNA, 75 bp, synthetic construct
  source 1..75: mol_type = other DNA
ttggccaggaaaccaacggtgcgggaggcctgtttaaaggtctgcgcaccattccggtgattttcgatattgtga

SEQ ID NO: 147269 - DNA, 75 bp, synthetic construct
  source 1..75: mol_type = other DNA
tgctgcggcgtatgtcctgggcagagctgacctctacggcccgggatgcagaatcaaaacatgattacgaaagcg

SEQ ID NO: 147270 - DNA, 75 bp, synthetic construct
  source 1..75: mol_type = other DNA
atgacatccccggaccttatacaagttgttctgcaccgaatgtcctggtctcagctggcaatagctgcggaagag

SEQ ID NO: 147271 - DNA, 75 bp, synthetic construct
  source 1..75: mol_type = other DNA
tactacaaaggcggtgcgcgtgcgcagatagtgcagaaagtcgagaaacaactctttgagctgtataaaaacccg

SEQ ID NO: 147272 - DNA, 75 bp, synthetic construct
  source 1..75: mol_type = other DNA
ccggcgggaatggtcactgaagccgtttatcgtcataccggatttaaacgctttatcggcgtgtgtaatattccg

SEQ ID NO: 147273 - DNA, 75 bp, synthetic construct
  source 1..75: mol_type = other DNA
tgatttatctatcgatctgttcggcctgaaccatatggtgtttattaaggatgtgctggtaaatggcaaatcgcg

SEQ ID NO: 147274 - DNA, 75 bp, synthetic construct
  source 1..75: mol_type = other DNA
cgcgcgaagttctccgcgcgtgagctgatgctgctgtggcccgacttcatcgcttacaaccccgtgagcggtgag

SEQ ID NO: 147275 - DNA, 75 bp, synthetic construct
  source 1..75: mol_type = other DNA
cacgatggcgaaggcaatcacttaccgcgcgaagttctccgcgcgtgagctgatgctgctgtggcccgacttcat

SEQ ID NO: 147276 - DNA, 75 bp, synthetic construct
  source 1..75: mol_type = other DNA
acaacaaggaaatcactaccatcatttgccgtaacggtttccgcttctggggcaaccgtacgccggaaacgaagg

SEQ ID NO: 147277 - DNA, 75 bp, synthetic construct
  source 1..75: mol_type = other DNA
gtactgaatatcgccgccgattatgctgatttcgtgacagaggttattttaagaaaaacgacggacggggattaa

SEQ ID NO: 147278 - DNA, 75 bp, synthetic construct
  source 1..75: mol_type = other DNA
gaaggcgatacggagctggggctgtatgtgaaaaacctgatggacgccattgaactggagcaaatgccgaaagcc

SEQ ID NO: 147279 - DNA, 75 bp, synthetic construct
  source 1..75: mol_type = other DNA
taacgggttccgcttctggggcaaccgcacaccggaaacgaacgcctacatctttgaggtgtatacccgaaccgc

SEQ ID NO: 147280 - DNA, 75 bp, synthetic construct
  source 1..75: mol_type = other DNA
caactggctgacagtatcgcagaggcgcagcttcaggtggtggattcgcctctgacaccttccaatgcgaaagat

SEQ ID NO: 147281 - DNA, 75 bp, synthetic construct
  source 1..75: mol_type = other DNA
cattctgcagtgacagtaccgccgcaaccggtgagcgccagtgtgtcattacaccggtaacggaagtccataaca

SEQ ID NO: 147282 - DNA, 75 bp, synthetic construct
  source 1..75: mol_type = other DNA
gccatgaaatccgtattcttcatcgtgcagttaaataccttccaccagcagggcataacgggcttgttgttcgtg

SEQ ID NO: 147283 - DNA, 75 bp, synthetic construct
  source 1..75: mol_type = other DNA
attgcggaagcgcagtttgaaacgattgatgccccgctgacccctgctaatgtgaaagacgtgttaagcgcaatt

SEQ ID NO: 147284 - DNA, 75 bp, synthetic construct
  source 1..75: mol_type = other DNA
gcacaattcaccaccgtggacaaaccgcttaccccggctaacgtcaaagacgtcgtgagtgggatcaatgccaaa

SEQ ID NO: 147285 - DNA, 75 bp, synthetic construct
  source 1..75: mol_type = other DNA
tctgacaccttccaatgcgaaagatgcagtaagtgccatcaaggcgaaactggattccctggtcacggccggaaa

SEQ ID NO: 147286 - DNA, 75 bp, synthetic construct
  source 1..75: mol_type = other DNA
tgaaaacagaaggtaaggcagaagctggttttcttgacctggagaaaagtcgtcgccgcttgcgtcgcgataaag

SEQ ID NO: 147287 - DNA, 75 bp, synthetic construct
  source 1..75: mol_type = other DNA
cggcacctgtttcattctatccgctatccgtttggtcgcccgacgattgtgcgcgaggttgcggtgataaaagat

SEQ ID NO: 147288 - DNA, 75 bp, synthetic construct
  source 1..75: mol_type = other DNA
ttgtggggatgtgtggggatttatgccaacttatcggggtggcgaaatatcaggcactgatttttccgctagttt

SEQ ID NO: 147289 - DNA, 75 bp, synthetic construct
  source 1..75: mol_type = other DNA
cggcggcagtgtgtttcccgcgaagacctggcctgctggaaagtggaccgtttcagaacagaggcgcagttgaca

SEQ ID NO: 147290 - DNA, 75 bp, synthetic construct
  source 1..75: mol_type = other DNA
atgattgcagccgaaaaaatcaaacagcgaaagcgcgacaactctcttcgtgacctctggagaacacctgattgg

SEQ ID NO: 147291 - DNA, 75 bp, synthetic construct
  source 1..75: mol_type = other DNA
acataaagctttccttgtcgttcctatggttatcttaattaaaatatttattgaaattggtacatactttaccta

SEQ ID NO: 147292 - DNA, 75 bp, synthetic construct
  source 1..75: mol_type = other DNA
acagctgaatcgtcttcctgactgcgactgggtacatctggtcttcaccctgccggacacgctgtggccggtgtt

SEQ ID NO: 147293 - DNA, 75 bp, synthetic construct
  source 1..75: mol_type = other DNA
ggccggtgttcgaaagcaaccgctggctgttgaatgacgtgtgccgtctggcggtggagaatctgctgtatgccg

SEQ ID NO: 147294 - DNA, 75 bp, synthetic construct
  source 1..75: mol_type = other DNA
acacgttctgcgctggtggcctggcgcgatgcattgtttgagcaatataaatcactcagtgatgcagatggatgg

SEQ ID NO: 147295 - DNA, 75 bp, synthetic construct
  source 1..75: mol_type = other DNA
acctttcagcaagagagaaaagctcctgagggatctcctgcataccaggacaccggttcataaatttgaggcgat

SEQ ID NO: 147296 - DNA, 75 bp, synthetic construct
  source 1..75: mol_type = other DNA
gcttcctggaaaaggatctctgggtaacggagatccttcggctgctttttaatgaggatctgctgggagatttat

SEQ ID NO: 147297 - DNA, 75 bp, synthetic construct
  source 1..75: mol_type = other DNA
atgaacatttttgattactaccggaacgcatcgcaacgccgtgagcttcaggaaatcctctcttacgcggcgcag

SEQ ID NO: 147298 - DNA, 75 bp, synthetic construct
  source 1..75: mol_type = other DNA
tgttatgggcgataaggctccacaggcgttaaaaacagcagcgcaagcttttggcggtctatctcttgccgcagg

SEQ ID NO: 147299 - DNA, 75 bp, synthetic construct
  source 1..75: mol_type = other DNA
aacagcttgaagaacaacagaaagctgaagagaaagcacaaaaaagtaaaattgttggtcaggtctttggttggt

SEQ ID NO: 147300 - DNA, 75 bp, synthetic construct
  source 1..75: mol_type = other DNA
gagcgatcgagcaggccatagacaagaagctttcaataggttctgccaagagtaaggcggaaatcgcacgtcatt

SEQ ID NO: 147301 - DNA, 75 bp, synthetic construct
  source 1..75: mol_type = other DNA
gcactggcgccagaaacgctcgccgagtcgtttatcgcagtttgtggtgagcaactggacgaaaacggtcagaac

SEQ ID NO: 147302 - DNA, 75 bp, synthetic construct
  source 1..75: mol_type = other DNA
atgcttgagacaaaaagcgatatcctgtctacaacctcaggggctaatagcactacgtttatttcagatatcatt

SEQ ID NO: 147303 - DNA, 75 bp, synthetic construct
  source 1..75: mol_type = other DNA
tcgaccaggaacaaaaatctatactcgtaagagacaggaaagatccacgcaaaaaggaaggcaaccacatgaaag

SEQ ID NO: 147304 - DNA, 75 bp, synthetic construct
  source 1..75: mol_type = other DNA
ttgctatcggcgcgattggcgcatggtcgcaagcaatggtcaccctggcgctggtattaaccgccctgctgttct

SEQ ID NO: 147305 - DNA, 75 bp, synthetic construct
  source 1..75: mol_type = other DNA
agtatgccggcatgagctggctggagttgctggagcgcggtaagcgtatggatatcaatatcccgttggtggaga

SEQ ID NO: 147306 - DNA, 75 bp, synthetic construct
  source 1..75: mol_type = other DNA
attttattacggaacactactggacgggacagggcagtatcaatgtgtaccgcattgtggggactgaccatccac

SEQ ID NO: 147307 - DNA, 75 bp, synthetic construct
  source 1..75: mol_type = other DNA
ataccacagcagcggcggacagcgccgcacaatccgcagacgcctggggaatgccggcaacaacgcctcctgacg

SEQ ID NO: 147308 - DNA, 75 bp, synthetic construct
  source 1..75: mol_type = other DNA
ccagacgctgatgctggccctttctatggtggtcatcgcctcgatgattgccgtcggcgggctgggtcagatggt

SEQ ID NO: 147309 - DNA, 75 bp, synthetic construct
  source 1..75: mol_type = other DNA
tcgcgctcattcggtgccagcccgcgccagatgctgttcaaagttcagttaccgctggcgatgccgaccattatg

SEQ ID NO: 147310 - DNA, 75 bp, synthetic construct
  source 1..75: mol_type = other DNA
gtaaacatttcgaatctacgccggatacgccggaaatcatcgccaccattcacggtgaaggttatcgcttctgcg

SEQ ID NO: 147311 - DNA, 75 bp, synthetic construct
  source 1..75: mol_type = other DNA
ccctgaaactgtccggaaaaatccacaaacagcgtgaaagtattgcccgaagtcgtggcgaccccccacccaaaa

SEQ ID NO: 147312 - DNA, 75 bp, synthetic construct
  source 1..75: mol_type = other DNA
ctctgaaactgtccggaaaaatccacaaacagcatgaaagtattgcccgaagtcgtggcgacccccctcccaaaa

SEQ ID NO: 147313 - DNA, 75 bp, synthetic construct
  source 1..75: mol_type = other DNA
cactgaaactgtccggaaaaatccacaaacagcttgaaagtattgcccgaagtcgtggcgacccccctcccaaaa

SEQ ID NO: 147314 - DNA, 75 bp, synthetic construct
  source 1..75: mol_type = other DNA
gcggcgtggcgaaatggaagtcaacattcgtgtgggtatccgcactggcgatactccagcacaagaacgcagcaa

SEQ ID NO: 147315 - DNA, 75 bp, synthetic construct
  source 1..75: mol_type = other DNA
tacagggcattgcggatgagcggcggcggcgtggcgaaatggaagtcaacattcgtgtgggtatccgcactggcg

SEQ ID NO: 147316 - DNA, 75 bp, synthetic construct
  source 1..75: mol_type = other DNA
cgctgaaactgtccggaaaaatccacaaacagcctgaaagtattgcccgaagtcgtggcgaccccccacccaaaa

SEQ ID NO: 147317 - DNA, 75 bp, synthetic construct
  source 1..75: mol_type = other DNA
tactcctcccccttttcgtgggtggacagcagggacagtgaacagtgtgactggttatggaacgccatgcaggtc

SEQ ID NO: 147318 - DNA, 75 bp, synthetic construct
  source 1..75: mol_type = other DNA
agagacgcaatcaaccggaacgattcagggtacagtgccgtggataacccgtagcgcgacagaaatcaccgacgc

SEQ ID NO: 147319 - DNA, 75 bp, synthetic construct
  source 1..75: mol_type = other DNA
gcagcttcgcgcaatcatctggtggtggcggtagatcaggaaggtggacgcgtgcagcgttttcgtgaaggtttt

SEQ ID NO: 147320 - DNA, 75 bp, synthetic construct
  source 1..75: mol_type = other DNA
aatgagcaacaggtacagtttttactgaaaagtaatcccagacgaaacagagcgaagtttacgataattcccttc

SEQ ID NO: 147321 - DNA, 75 bp, synthetic construct
  source 1..75: mol_type = other DNA
tgtgaatgggccagcatcttcaatgattactcctcccccttttcgtgggtggacagcagggacagtgaacagtgt

SEQ ID NO: 147322 - DNA, 75 bp, synthetic construct
  source 1..75: mol_type = other DNA
agcagtcatagtgcatggctgacattcatttacccacgcctttatattgctcgtgaattaatgagagaagacggg

SEQ ID NO: 147323 - DNA, 75 bp, synthetic construct
  source 1..75: mol_type = other DNA
gatcgcccggttacggtagtcaacccgcccgcaatgcgccatccgcagatacggattgtcgtaccggtcgccaat

SEQ ID NO: 147324 - DNA, 75 bp, synthetic construct
  source 1..75: mol_type = other DNA
aactcgccgcagtcaccggccccggcgtggacgtcctgcctatacgtcgtccatctcgccactggtatcttacaa

SEQ ID NO: 147325 - DNA, 75 bp, synthetic construct
  source 1..75: mol_type = other DNA
ggtcggggcaaaaaaaactgggcgatgatgacggtctggtggctctgcatttgcaggaatatgccgcagaatcgt

SEQ ID NO: 147326 - DNA, 75 bp, synthetic construct
  source 1..75: mol_type = other DNA
gagcctggtttgcacaacaaatcagccaacggatacgcgacaaaatcggcgaatcggttgatccctctgccctgc

SEQ ID NO: 147327 - DNA, 75 bp, synthetic construct
  source 1..75: mol_type = other DNA
tgcgcaatctactcggacaggtcgatccgggggaattactcgacccgcaggtcattcgccaggtggaagaagagt

SEQ ID NO: 147328 - DNA, 75 bp, synthetic construct
  source 1..75: mol_type = other DNA
atgtttatgatcttcccgcgctggaacgtttgatgcgtcgcctgaacggtggcgaaattcaaatatccgatgtaa

SEQ ID NO: 147329 - DNA, 75 bp, synthetic construct
  source 1..75: mol_type = other DNA
atctgatgctgacctcccgcgctcgcgaaacgctacgcggcgtcgaaacggtaattattgatgaagtccatgccg

SEQ ID NO: 147330 - DNA, 75 bp, synthetic construct
  source 1..75: mol_type = other DNA
cgcaaacgcgccactatacaccagtggcgctctctgccaacgatccggctaatgtgtggggaaatcttctgccct

SEQ ID NO: 147331 - DNA, 75 bp, synthetic construct
  source 1..75: mol_type = other DNA
gtcgcgcttgttactgccttcgctgtctttttcctgtagctttcccctttcagttcgaacatatatccgtgatgg

SEQ ID NO: 147332 - DNA, 75 bp, synthetic construct
  source 1..75: mol_type = other DNA
cgagcagcgcaacgcgacgggcatcgttccggggagtcgtcatctggtcctcgaacggtgccgtgatgaaattgg

SEQ ID NO: 147333 - DNA, 75 bp, synthetic construct
  source 1..75: mol_type = other DNA
ccgcacgccggggcatcgcacgccactgtggcaacaacgactacgagccagccagttgctggaaatcgcccaggg

SEQ ID NO: 147334 - DNA, 75 bp, synthetic construct
  source 1..75: mol_type = other DNA
aaaaaagctgggtgaagatgacggcctggtggcactgcatctacaggaatatgccgcagaatcgttcactcccgc

SEQ ID NO: 147335 - DNA, 75 bp, synthetic construct
  source 1..75: mol_type = other DNA
agaggtgaaactctgtgtggcttaccgtatgccggatggtcgtgaagtgacgaccactccgctggcagctgacga

SEQ ID NO: 147336 - DNA, 75 bp, synthetic construct
  source 1..75: mol_type = other DNA
tgaaagaactggaagaccgtggcatccctgttcgtgagcgtctgctgctgtctgaagcatgtccgctgatccttg

SEQ ID NO: 147337 - DNA, 75 bp, synthetic construct
  source 1..75: mol_type = other DNA
atgggtaacaacgtcgtcgtactgggcactcaatggggtgacgaaggtaaaggtaagatcgtcgatcttctgact

SEQ ID NO: 147338 - DNA, 75 bp, synthetic construct
  source 1..75: mol_type = other DNA
gccgcaggctgcgctgaactacatcaagcgtattgaagagctgaccggtgtgccgatcgatatcatctctaccgg

SEQ ID NO: 147339 - DNA, 75 bp, synthetic construct
  source 1..75: mol_type = other DNA
ggtacgctgctggatatcgatcacggtacttatccgtacgtaacttcttccaacaccactgctggtggcgtggcg

SEQ ID NO: 147340 - DNA, 75 bp, synthetic construct
  source 1..75: mol_type = other DNA
gcacccaatggggtgacgaaggtaaaggtaagatcgtcgatcttctaactgaacgggctaaatatgttgtacgct

SEQ ID NO: 147341 - DNA, 75 bp, synthetic construct
  source 1..75: mol_type = other DNA
accagtgttacgccagggaaagaaatagccaccgagatagaacatatcatcgctgcaacacattcagcagtatta

SEQ ID NO: 147342 - DNA, 75 bp, synthetic construct
  source 1..75: mol_type = other DNA
cgagaaaacaaactcattatgtgatgaatctttccttaaagatttaagatttcatgaccttcgacatgaagcaac

SEQ ID NO: 147343 - DNA, 75 bp, synthetic construct
  source 1..75: mol_type = other DNA
agcgctgcctgtagtttctgagaaaaccggtgttacgtcaggaaagcaaatagccaacgagatcgaacatatcat

SEQ ID NO: 147344 - DNA, 75 bp, synthetic construct
  source 1..75: mol_type = other DNA
gaaactctgcgtggcctaccgtatgccggatggtcgcgaagtgaccaccactccgctggccgcagacgactggaa

SEQ ID NO: 147345 - DNA, 75 bp, synthetic construct
  source 1..75: mol_type = other DNA
gccgcaggcggcactgaactacatcaagcgcattgaagagctgaccggtgtgccgatcgatatcatctctaccgg

SEQ ID NO: 147346 - DNA, 75 bp, synthetic construct
  source 1..75: mol_type = other DNA
ttctcgacttgctgaaattttccctatgcatgaactaaccaaaattacaggacataaagatccaagaatgcggta

SEQ ID NO: 147347 - DNA, 75 bp, synthetic construct
  source 1..75: mol_type = other DNA
gctgtatgccagcgatggccgtacccgcaaagatccgtcaaaaaaatacggttccggcgcctggtacagggcaaa

SEQ ID NO: 147348 - DNA, 75 bp, synthetic construct
  source 1..75: mol_type = other DNA
cgcaatgacattcttgcgggtatcttcgagccagccatgatcgacattgatctagctatcctgcttacaaaagca

SEQ ID NO: 147349 - DNA, 75 bp, synthetic construct
  source 1..75: mol_type = other DNA
tcgaaccgcagatagaaatggcatcgggcgaaagaaacaacaaccctcttaagtttgtagtaactagctatgctc

SEQ ID NO: 147350 - DNA, 75 bp, synthetic construct
  source 1..75: mol_type = other DNA
ccttgcgcttctaggcccatccgcagccacgtttttcgagccggtgccgaaggagcatttctccaaggcgctttt

SEQ ID NO: 147351 - DNA, 75 bp, synthetic construct
  source 1..75: mol_type = other DNA
tggtgagcgtatgattaaacgcacctttaatccaggttttaaaattgcgctgcaccagaaagatctcaacctggc

SEQ ID NO: 147352 - DNA, 75 bp, synthetic construct
  source 1..75: mol_type = other DNA
ccgcatgggtatcggagcgtttgcctgccgagcatcggcccctcatctgcaaggcacgcgcggcgtacctgggta

SEQ ID NO: 147353 - DNA, 75 bp, synthetic construct
  source 1..75: mol_type = other DNA
tccggtatcaaccggaccaaaaagaaaaactaccgagtcggtaatggtattgtggggcagtctaatatctggaac

SEQ ID NO: 147354 - DNA, 75 bp, synthetic construct
  source 1..75: mol_type = other DNA
aaaaatttcatttcgtgtcagatatgttagttatggtaatttgcattataagcgccttgagattttcatttatga

SEQ ID NO: 147355 - DNA, 75 bp, synthetic construct
  source 1..75: mol_type = other DNA
accagaaagttctggatgatacgatggctgttgctgacatcctgacttctatggttgttgacgtttctgatctgc

SEQ ID NO: 147356 - DNA, 75 bp, synthetic construct
  source 1..75: mol_type = other DNA
caacggcaaccagtcaccaaaggttatttataataaagcggaaaaaaccgcatctgttcaggataatccgtccgt

SEQ ID NO: 147357 - DNA, 75 bp, synthetic construct
  source 1..75: mol_type = other DNA
gtatttataaattcggtggtatcggaggcatgttaattggtgggctgtctttacttgcattaaatgcagcattac

SEQ ID NO: 147358 - DNA, 75 bp, synthetic construct
  source 1..75: mol_type = other DNA
gatctggaaatctttcacgaagaaaatatgagtgctgtcaggcagaacccacgtatgaccactttcgaagacatt

SEQ ID NO: 147359 - DNA, 75 bp, synthetic construct
  source 1..75: mol_type = other DNA
gtcacgaccgctggtggaatgcaaacagtagatataacgctggtggcaggcccggcagacgcctcgcagtccgtc

SEQ ID NO: 147360 - DNA, 75 bp, synthetic construct
  source 1..75: mol_type = other DNA
gcatacggttaccgcaacgctgggcaataacaataccagtgattcgcagccggtaacatttgtggcggacaaaac

SEQ ID NO: 147361 - DNA, 75 bp, synthetic construct
  source 1..75: mol_type = other DNA
gagtgagcagttggtggtgaattttattgcggatacgctcacagcgcaggttaatcttaacgttaccgaggacaa

SEQ ID NO: 147362 - DNA, 75 bp, synthetic construct
  source 1..75: mol_type = other DNA
tccaaaaactaagaagccatgcaaacaacctcttatgggatatcgttttccattagatacaatggataggcttct

SEQ ID NO: 147363 - DNA, 75 bp, synthetic construct
  source 1..75: mol_type = other DNA
atagtgctgagctacatcttgttttgcacgatatatcaggcaatccgatcaaagtttctgaagggatggaatttg

SEQ ID NO: 147364 - DNA, 75 bp, synthetic construct
  source 1..75: mol_type = other DNA
gcaatgtcagcgatacacagccaatgacgtttgtggcggataaagacagagcggttgtcgttctgcaaacatcga

SEQ ID NO: 147365 - DNA, 75 bp, synthetic construct
  source 1..75: mol_type = other DNA
ggggaaatgcggtcactgccgcatgggggatgtctatgtctgcgtcgatggtccggttttcaactatgccgtagc

SEQ ID NO: 147366 - DNA, 75 bp, synthetic construct
  source 1..75: mol_type = other DNA
tgacatgattttcggttataaaaaccgggactgtgtgctgtacaaacaggaaatggcgaactggcgccggcacca

SEQ ID NO: 147367 - DNA, 75 bp, synthetic construct
  source 1..75: mol_type = other DNA
aacttgctgcgaaccaaagtgcgggaaaccgaaaccgtcgcggcgcaggtgtttattacccgcagttttaacgta

SEQ ID NO: 147368 - DNA, 75 bp, synthetic construct
  source 1..75: mol_type = other DNA
cattcagtgcagagccatcctcgcaaatgatcatcagccagaatacggtctctactaatacgcagggtgtagccg

SEQ ID NO: 147369 - DNA, 75 bp, synthetic construct
  source 1..75: mol_type = other DNA
atacgaaacaggtgacgttgattggcgatccgggtaccgctcaactgacctccttaacctctgtatactcattcg

SEQ ID NO: 147370 - DNA, 75 bp, synthetic construct
  source 1..75: mol_type = other DNA
aaaatccgcaggaaatcaaccggctggacatgattttcggtttcagaaaccgggactgcgtgctgtataaacaag

SEQ ID NO: 147371 - DNA, 75 bp, synthetic construct
  source 1..75: mol_type = other DNA
ccacggcggcgcgttccgctggctggacaccctcggcagcgcgaaatatctcgatatggcacagcagtatcagca

SEQ ID NO: 147372 - DNA, 75 bp, synthetic construct
  source 1..75: mol_type = other DNA
gtcccgctggcgcacaccaacgaagcccgcgcactggtcggcattttccttaacgatcaatatgtaaaaggcaaa

SEQ ID NO: 147373 - DNA, 75 bp, synthetic construct
  source 1..75: mol_type = other DNA
tgctgttcccgtatttcgccggtttcagccagctgctgcgcgacggcgcggatttccgcaagatcgacaaagtga

SEQ ID NO: 147374 - DNA, 75 bp, synthetic construct
  source 1..75: mol_type = other DNA
cgtggatgttgtggtagaagcggttgtcgaaaacccgaaagtgaaaaaagccgtgctggcagaaaccgagcagaa

SEQ ID NO: 147375 - DNA, 75 bp, synthetic construct
  source 1..75: mol_type = other DNA
catgcccaggctgtcatggcagcaggcttcccgcagcggatgcagaaagattaccgcgatgccatcgacgcgctg

SEQ ID NO: 147376 - DNA, 75 bp, synthetic construct
  source 1..75: mol_type = other DNA
aaagtcgtcgcctgggcgagcaagatgggcaaaacgccgattgtggttaacgactgccccggattcttcgttaac

SEQ ID NO: 147377 - DNA, 75 bp, synthetic construct
  source 1..75: mol_type = other DNA
ggcgtcgctgttcttccggctgatatgtacggcctgccgtcagcgtcttgaggggcgggaaccatgtcaaagctg

SEQ ID NO: 147378 - DNA, 75 bp, synthetic construct
  source 1..75: mol_type = other DNA
atgaagaaattatccctttcactgatgctgaacgtgtcgctggcgctgtccctgatttacccgcagagcgtggcc

SEQ ID NO: 147379 - DNA, 75 bp, synthetic construct
  source 1..75: mol_type = other DNA
atctcgtggcggcgctgttattccggctgatacgtacggcctgtcgtcagcgttttgaggggcgggaaccatgtc

SEQ ID NO: 147380 - DNA, 75 bp, synthetic construct
  source 1..75: mol_type = other DNA
cgtgtactgttcccctacttcgccggattcagccagttgctgcgcgacggcgcagacttccgcaagatcgacaaa

SEQ ID NO: 147381 - DNA, 75 bp, synthetic construct
  source 1..75: mol_type = other DNA
catcggcgtgctggaacaacaatcagatttaaaagggctgctgctgcgttcgaacaaagcagcctttattgtcgg

SEQ ID NO: 147382 - DNA, 75 bp, synthetic construct
  source 1..75: mol_type = other DNA
ggcgtgtatgccactgagtatgtacttgaacgctacgggcgggagctgccgccggaatcgctggccgtgaagatt

SEQ ID NO: 147383 - DNA, 75 bp, synthetic construct
  source 1..75: mol_type = other DNA
gcggcaaaagcgagagctgcaaagcgtcgttcagacgaggggcacgcaaaacggcaggctctgtatcgtaccgct

SEQ ID NO: 147384 - DNA, 75 bp, synthetic construct
  source 1..75: mol_type = other DNA
ttggaccgtttacgcgccagcaggcagaggcggttgcgtctcaatattccaacgttgtaatagaagacgaccagg

SEQ ID NO: 147385 - DNA, 75 bp, synthetic construct
  source 1..75: mol_type = other DNA
cgctgaaactgtccggaaaaatccacaaacagcctgaaagtattgcccgaagtcgtggtgccccccaaaaaaact

SEQ ID NO: 147386 - DNA, 66 bp, synthetic construct
  source 1..66: mol_type = other DNA
atgaactgctgggaaatattaggtttacaatctggtgcggaagaacgagatattaagcgtcgttat

SEQ ID NO: 147387 - DNA, 75 bp, synthetic construct
  source 1..75: mol_type = other DNA
aagttttctggcattgaaagaatattgtacgcttatatccgtacattttccgcggtggttatattgggttattcc

SEQ ID NO: 147388 - DNA, 75 bp, synthetic construct
  source 1..75: mol_type = other DNA
actttctgaaaaatacagatgttcttaaatatttcgactataccgttcataacaatgtagataacgctgagtatt

SEQ ID NO: 147389 - DNA, 75 bp, synthetic construct
  source 1..75: mol_type = other DNA
ctgcgcaatctactcggtcaggttgatcctggtgagttactcgacccgcaagtcattcgtcaggtggaagaagag

SEQ ID NO: 147390 - DNA, 75 bp, synthetic construct
  source 1..75: mol_type = other DNA
gcgcctggtttgcccagcaaatcggtcagcgggtgcgtgaagagtgcggtcaacaagtcgatgcttcagcgttac

SEQ ID NO: 147391 - DNA, 75 bp, synthetic construct
  source 1..75: mol_type = other DNA
cgatgacggtctggtagcgctgcatttgcaagaatatgctgcagaatcgcttactgttataaaaagcgatgactc

SEQ ID NO: 147392 - DNA, 75 bp, synthetic construct
  source 1..75: mol_type = other DNA
agtcgtggtgtcctcccaaaaaaactgttgaatgaaatgattgagctggcgtaccaggattttgtggcaaatgag

SEQ ID NO: 147393 - DNA, 75 bp, synthetic construct
  source 1..75: mol_type = other DNA
aatatccctccgtggctggcggaagaaaatactctcgccaatattaaggggctgattgacgagcagcgaaacgca

SEQ ID NO: 147394 - DNA, 75 bp, synthetic construct
  source 1..75: mol_type = other DNA
ctgactattgaccgattgcgcgatctggcgacacaaaccacgcaaacgcgccactatacaccagtggcgctctct

SEQ ID NO: 147395 - DNA, 75 bp, synthetic construct
  source 1..75: mol_type = other DNA
gccaaacgcgaaacgcgaatgtacccggaagagccggtctatctgccgccccgttatcgtggtcgtatcgttctg

SEQ ID NO: 147396 - DNA, 75 bp, synthetic construct
  source 1..75: mol_type = other DNA
ttttgttgtcttctctggttatgggctgtacgcaacataaaacagatatgccccgacaattggtgaaggcattac

SEQ ID NO: 147397 - DNA, 75 bp, synthetic construct
  source 1..75: mol_type = other DNA
ccctgattgcggttattctgacgattaagctatttctgctgattaatcagtttgaaaaacagcagattaaaaaag

SEQ ID NO: 147398 - DNA, 75 bp, synthetic construct
  source 1..75: mol_type = other DNA
cgtgatgatgatcctgagcgtaacgaagagcccgctaacggtgaaccagatccaacaacgactgggagaaacgca

SEQ ID NO: 147399 - DNA, 75 bp, synthetic construct
  source 1..75: mol_type = other DNA
cgtgatgatgatcctgagcgtaacgaagcagccgctaacgatgaaacagatccaacaacgactgggagaaacgca

SEQ ID NO: 147400 - DNA, 75 bp, synthetic construct
  source 1..75: mol_type = other DNA
attgaactggcggaaccgtggcagccgtggctggcggatatccgttcgcgtcttggcaacattatgcgtgccgat

SEQ ID NO: 147401 - DNA, 75 bp, synthetic construct
  source 1..75: mol_type = other DNA
cgatccacaagttgccgggataaaagtgcctccgcactcgatcgaagcggagcagtcggtgttgggcggtttaat

SEQ ID NO: 147402 - DNA, 75 bp, synthetic construct
  source 1..75: mol_type = other DNA
atttttacacccgcccacaccgtcatatctttactgaaatggcgcgtttgcaggaaagcggtagccctatcgatc

SEQ ID NO: 147403 - DNA, 75 bp, synthetic construct
  source 1..75: mol_type = other DNA
tatctttaccgaaatggcgcgtttgcaggaaagcggtagccccatcgacctgatcaccctggcagaatcgctgga

SEQ ID NO: 147404 - DNA, 75 bp, synthetic construct
  source 1..75: mol_type = other DNA
catatcagtttgccggaacaccgtgggtgctcagtgaccgtggtcaggtcgtcccacaggagttactgaacaacg

SEQ ID NO: 147405 - DNA, 75 bp, synthetic construct
  source 1..75: mol_type = other DNA
gaaattattatcggtaaacaacgtaacggcccaatcgggacggtacgcctgacctttaacggtcaatggtcgcgc

SEQ ID NO: 147406 - DNA, 75 bp, synthetic construct
  source 1..75: mol_type = other DNA
taacggcccaatcgggacggtacggctgacctttaacggtcaatggtcgcgctttgataattacgcagggccgca

SEQ ID NO: 147407 - DNA, 75 bp, synthetic construct
  source 1..75: mol_type = other DNA
ccgccaggggccaagcccacgctggtatcagcaggattgtgcgggcctggtgcgatttgcggcgaacgaggcgct

SEQ ID NO: 147408 - DNA, 75 bp, synthetic construct
  source 1..75: mol_type = other DNA
accatgatggatgcggtaaacgccgaagaagtggtgcgcattgaaaccggtcaggcctttcgtgaccatttcggc

SEQ ID NO: 147409 - DNA, 75 bp, synthetic construct
  source 1..75: mol_type = other DNA
tggcgcaggtatccagttggggccaaatgcgttttcggcgttggatagcctcggcgtcggcgaaatcgcccgcca

SEQ ID NO: 147410 - DNA, 75 bp, synthetic construct
  source 1..75: mol_type = other DNA
tggcatgccgcctgtcgtatggcggaacaactgaccaccctgcgttaccggtttggtctgcaggctggtgaaagt

SEQ ID NO: 147411 - DNA, 75 bp, synthetic construct
  source 1..75: mol_type = other DNA
agacaatgtctgtttaatcagaagcgttgtgttcacccacaacagccctggtccgctccacaactgaggcatctg

SEQ ID NO: 147412 - DNA, 75 bp, synthetic construct
  source 1..75: mol_type = other DNA
catcatacactaaatcagtaagttggcagcattacctctttcatcttctcagacaatgtctgtttaatcagaagc

SEQ ID NO: 147413 - DNA, 75 bp, synthetic construct
  source 1..75: mol_type = other DNA
ggctcctatccctaaacccgtcgcaacgctggcgaaagcggcaaaaaaagtggttgtggatgtgtgcaaaaaaat

SEQ ID NO: 147414 - DNA, 75 bp, synthetic construct
  source 1..75: mol_type = other DNA
actgaagttcatcatgtctaactggatagatggcattggtgatgcccgtcaggaactcgtttttattggaatgga

SEQ ID NO: 147415 - DNA, 75 bp, synthetic construct
  source 1..75: mol_type = other DNA
cgtaggtcagggtatggtgatgaacccagactgggttaagtttgcagagggtaaagctgaaggaaaaattgctct

SEQ ID NO: 147416 - DNA, 75 bp, synthetic construct
  source 1..75: mol_type = other DNA
cgcgcgcatcgtctggtcgacccgtgaaatggggcgggtttaccacgccgcaggggtagaacgccaggtacgtaa

SEQ ID NO: 147417 - DNA, 75 bp, synthetic construct
  source 1..75: mol_type = other DNA
tctgctgtggaaagggaaatcgcaggcagagttttatcgcggcatggagtggctgtacggctggaaagaagataa

SEQ ID NO: 147418 - DNA, 75 bp, synthetic construct
  source 1..75: mol_type = other DNA
tggcagtaaagaggaagtgctctcttactttgaagggattcacccccgtccgcgccagatgctggataaaccgac

SEQ ID NO: 147419 - DNA, 75 bp, synthetic construct
  source 1..75: mol_type = other DNA
tttctggtaaactagttacatttggaactgtaccttctgctcctgaaactggctatggatacatcaaaaaaggtg

SEQ ID NO: 147420 - DNA, 75 bp, synthetic construct
  source 1..75: mol_type = other DNA
cctgctctggttatttgtaatgaagttcatcgttttatcgttgcagaacaaatgcgtaatgtaaatttagcgaat

SEQ ID NO: 147421 - DNA, 75 bp, synthetic construct
  source 1..75: mol_type = other DNA
gaatcaacttatatacctattggtgaggttcatagtgtgcttaacccgggaagttttccattagaaattattgaa

SEQ ID NO: 147422 - DNA, 75 bp, synthetic construct
  source 1..75: mol_type = other DNA
aatgttcccgcagattctggttaacgtgcgttataccgcaggcagcggcgatccgctggagcatgagtcagttaa

SEQ ID NO: 147423 - DNA, 75 bp, synthetic construct
  source 1..75: mol_type = other DNA
attaccgaagtaaagtctttacgtatgcaaccgtgtattaacggtatttactttgaaaaaaactggccagacttt

SEQ ID NO: 147424 - DNA, 75 bp, synthetic construct
  source 1..75: mol_type = other DNA
gcgaagttgccgagctgtttatgtggcggcatatggcgctgacctctgccgccgtcttaactcaactgacacatt

SEQ ID NO: 147425 - DNA, 75 bp, synthetic construct
  source 1..75: mol_type = other DNA
aattccgaccagatattttagccagttgccaacgctccctgtcctcttcgatacaagatttagattttatccgcc

SEQ ID NO: 147426 - DNA, 75 bp, synthetic construct
  source 1..75: mol_type = other DNA
gttatggaaaaaacagccgaagctgtcgtcgttccattaaatgcacaatggagtgatgttgggtcatggtctgca

SEQ ID NO: 147427 - DNA, 75 bp, synthetic construct
  source 1..75: mol_type = other DNA
cgggcggatatcccttcgcaggacctggcatgctgcctgccgtatggcggaacaactgaccaccctgcgttaccg

SEQ ID NO: 147428 - DNA, 75 bp, synthetic construct
  source 1..75: mol_type = other DNA
ttccttatgctaataatggaaaattagtgacttttggtattaaacctttaaagccggagattggatatggttata

SEQ ID NO: 147429 - DNA, 75 bp, synthetic construct
  source 1..75: mol_type = other DNA
ttttgtcaggtggttccggttcaagattatggcccctgtcacgacagcagtaccctaaacagtttttatctctta

SEQ ID NO: 147430 - DNA, 75 bp, synthetic construct
  source 1..75: mol_type = other DNA
gaatgaggataatttcattgatgcagttcttgcagccaagaattttgcagagcagggtaagcttgttacgtttgg

SEQ ID NO: 147431 - DNA, 75 bp, synthetic construct
  source 1..75: mol_type = other DNA
cacggtgccggttggttttacgcaagccatgaaagagaagtttaacacccagaacctgatcttctccccggagtt

SEQ ID NO: 147432 - DNA, 75 bp, synthetic construct
  source 1..75: mol_type = other DNA
tgattggcgagcgttctgaacgcgcagagcgtttcgccgcgctattacaggaaggcgccattaagaaagatatcc

SEQ ID NO: 147433 - DNA, 75 bp, synthetic construct
  source 1..75: mol_type = other DNA
gaaggcgccattaagcaagatataccaacgttgtttactgactcaaccgaagctgaggcgattaaactttttgct

SEQ ID NO: 147434 - DNA, 75 bp, synthetic construct
  source 1..75: mol_type = other DNA
aacacctatctggcaatgcgtgttgcttactttaacgagctggatagctacgcggaaacgttggggctcaattcc

SEQ ID NO: 147435 - DNA, 75 bp, synthetic construct
  source 1..75: mol_type = other DNA
catggtcactccgcaggacgtagtgatagccatctccaactcaggcgaatccagcgaaatatccgcattaattcc

SEQ ID NO: 147436 - DNA, 75 bp, synthetic construct
  source 1..75: mol_type = other DNA
ccagcgaaatcaatgccttgattccggtgcttaagcgtcttcacgtgccgttaatctgcattaccggtcgcccgg

SEQ ID NO: 147437 - DNA, 75 bp, synthetic construct
  source 1..75: mol_type = other DNA
ggtgcctaacaacatcatctccgcgattgttgacgctaaccgcacgcgtaaagactttatcgctgatgcgattct

SEQ ID NO: 147438 - DNA, 75 bp, synthetic construct
  source 1..75: mol_type = other DNA
cgccaaatcatcgaaggtgtctgtctggatcctcgcatcggtgctcactacaacaacccttcctttggttatggt

SEQ ID NO: 147439 - DNA, 75 bp, synthetic construct
  source 1..75: mol_type = other DNA
tacgtgatcattgcgacgccgaccgactacgatcctaaaaccaactacttcaacacctctacggtggacgcggtt

SEQ ID NO: 147440 - DNA, 75 bp, synthetic construct
  source 1..75: mol_type = other DNA
aggcagacgtgattatctccaaccgtatggcagaagagctggtggatgttggagataaagtctatacccgtgatc

SEQ ID NO: 147441 - DNA, 75 bp, synthetic construct
  source 1..75: mol_type = other DNA
aagcagattatcgaaggggtatgtctggatccgcgtatcggcaaccactataacaacccgtcctttggctatggc

SEQ ID NO: 147442 - DNA, 75 bp, synthetic construct
  source 1..75: mol_type = other DNA
tgctgaaagccaggggctgaacagcaagcagattatcaaaggggtatgcctggatccgcgtatcggcaaccatta

SEQ ID NO: 147443 - DNA, 75 bp, synthetic construct
  source 1..75: mol_type = other DNA
acaataaaggaattaacgttactggcttccttactcctattttttttcttgatcgatttactgcgtcatcaggct

SEQ ID NO: 147444 - DNA, 75 bp, synthetic construct
  source 1..75: mol_type = other DNA
tctggcttctgcctgactaaactggacgttctggatggcctgaaagaggttaaactctgcgtggcttaccgtatg

SEQ ID NO: 147445 - DNA, 75 bp, synthetic construct
  source 1..75: mol_type = other DNA
atggcgactcccttttttcacgttgatgttcagcagcccgcggagatgcgctttaaccgtgcccgtgtccggcgg

SEQ ID NO: 147446 - DNA, 75 bp, synthetic construct
  source 1..75: mol_type = other DNA
cattcaggggatcatgaagcgtatcaaagctaagggggtagaagtgattatctatgaaccggtaatgaaggaaga

SEQ ID NO: 147447 - DNA, 75 bp, synthetic construct
  source 1..75: mol_type = other DNA
tatgtaatcatcgcaaccccgaccgactatgatcctaaaaccaattatttcaatacatctagcgtagaatcagta

SEQ ID NO: 147448 - DNA, 75 bp, synthetic construct
  source 1..75: mol_type = other DNA
aaaatattattttctctccggaatttctccgcgaaggtaaagccctttacgataatctccatccttcacgtattg

SEQ ID NO: 147449 - DNA, 75 bp, synthetic construct
  source 1..75: mol_type = other DNA
gcgatgcataagaaatatcgtactgaaaatattattttctctccggaattcctccgcgaaggtaaagccctttac

SEQ ID NO: 147450 - DNA, 75 bp, synthetic construct
  source 1..75: mol_type = other DNA
acccgcgaacccgcgaagaaagaaagcaccacggtgaagcgtaagcgcaggaccgcaaagcagaagaaagagccg

SEQ ID NO: 147451 - DNA, 75 bp, synthetic construct
  source 1..75: mol_type = other DNA
tgctgaaagcctggggcttaattcacgccagattattgagggcgtatgccttgacccgcgtatcggtaatcacta

SEQ ID NO: 147452 - DNA, 75 bp, synthetic construct
  source 1..75: mol_type = other DNA
tagtcatcatcgtggtgcatccggtggcagcggctggcgactggctccacgtaataacttcatggtggaaacgct

SEQ ID NO: 147453 - DNA, 75 bp, synthetic construct
  source 1..75: mol_type = other DNA
caattatccggcatcaagtgagcgatatcagttaaccgatatagatggggaagatgcttttatccggattggttc

SEQ ID NO: 147454 - DNA, 75 bp, synthetic construct
  source 1..75: mol_type = other DNA
ccgggtgaaaaccccggctatcagaccggacgacttgctcgttcgattggttacatggtcccccgtaaaagctcc

SEQ ID NO: 147455 - DNA, 75 bp, synthetic construct
  source 1..75: mol_type = other DNA
aaaatattattttctcccccgaattccttcgcgaaggtaaagccctttacgataatcttcatccttctcgtatcg

SEQ ID NO: 147456 - DNA, 75 bp, synthetic construct
  source 1..75: mol_type = other DNA
aaaatattattttctccccggaattcctccgcgaaggtaaagccctttacgataatctccatccttcacgtattg

SEQ ID NO: 147457 - DNA, 75 bp, synthetic construct
  source 1..75: mol_type = other DNA
attgtcgatgctaaccgcacgcgtaaagactttattgccgatgccattttgtcacgcaagccgcaagtggtgggt

SEQ ID NO: 147458 - DNA, 75 bp, synthetic construct
  source 1..75: mol_type = other DNA
attaaagacgtagttgagataaatccttatgcggttatggtgatcaaatcaacggttcccgttggttttaccgca

SEQ ID NO: 147459 - DNA, 75 bp, synthetic construct
  source 1..75: mol_type = other DNA
cgtgacctcacaacgtttaagcaacaggctgatgtcatcatttctaatcgtatgtctgaagagcttaaggatgta

SEQ ID NO: 147460 - DNA, 75 bp, synthetic construct
  source 1..75: mol_type = other DNA
cggcgatgaagctgattaataaaaactcgaaagagtttgaggaggccatcgtccgccggctggtgagtccggcga

SEQ ID NO: 147461 - DNA, 75 bp, synthetic construct
  source 1..75: mol_type = other DNA
gacgtttgtgatatttgcgctgaactttctgacgttctggtgggagctggcacgctggatagatagctggatgat

SEQ ID NO: 147462 - DNA, 75 bp, synthetic construct
  source 1..75: mol_type = other DNA
cctgcatttgatacaatgcgccagtccttaccaatggtgcaggggctgatgttaatggcggtgtatatcatgatc

SEQ ID NO: 147463 - DNA, 75 bp, synthetic construct
  source 1..75: mol_type = other DNA
gaagacttattccgattaattaataaacatgaagagttccagggaatgctgttttgccagcttgttgccttcgaa

SEQ ID NO: 147464 - DNA, 75 bp, synthetic construct
  source 1..75: mol_type = other DNA
attcgtttatggaatactgttaaactcacaacttacaatagcttaattgatgaacatgaactatatggccaaatg

SEQ ID NO: 147465 - DNA, 75 bp, synthetic construct
  source 1..75: mol_type = other DNA
gacatctctcggcagtctggcggcgttcccggcgttcgatgcaatgcgacaggcgctgccaatggtgcaggctat

SEQ ID NO: 147466 - DNA, 75 bp, synthetic construct
  source 1..75: mol_type = other DNA
aatgacaaaagctttaagcgccattttcagcaatggctgaactcactgtggcaggaaaaagaccggcttctgacg

SEQ ID NO: 147467 - DNA, 75 bp, synthetic construct
  source 1..75: mol_type = other DNA
taatgttacgctgtgttatccggacaataaccgtcagccgttcttcgatatgttaagcggtaaactgacgcggat

SEQ ID NO: 147468 - DNA, 75 bp, synthetic construct
  source 1..75: mol_type = other DNA
tgggccatcgtcgaacgcggacgggcgctatcatccctgaccacggacgatgcaatcgcgtaccgggcctttgtc

SEQ ID NO: 147469 - DNA, 75 bp, synthetic construct
  source 1..75: mol_type = other DNA
gtcagaaatggcgagaggagtttggcttagccgcagcgaagcggaatctacgacattgtatgaagccctaacgcg

SEQ ID NO: 147470 - DNA, 75 bp, synthetic construct
  source 1..75: mol_type = other DNA
tggcggtattactgcatctgaacccacacctgcaatgggaagttcacgggctggaagggttaagtaagaagaact

SEQ ID NO: 147471 - DNA, 75 bp, synthetic construct
  source 1..75: mol_type = other DNA
gtgctggtcgctggatatgccgtttatgaagcgttattcccgcgctatttattacgtcatccggagcgacgtggt

SEQ ID NO: 147472 - DNA, 75 bp, synthetic construct
  source 1..75: mol_type = other DNA
agaatcttccccaatactgacgaatcgggacagatgtatcatctggaggctctggctattgacgaatcaggtaac

SEQ ID NO: 147473 - DNA, 75 bp, synthetic construct
  source 1..75: mol_type = other DNA
aaagggcttgagaacctacgcataagcgttactgatgcctctggggatgcttccctgatatcgcttcagctcgct

SEQ ID NO: 147474 - DNA, 75 bp, synthetic construct
  source 1..75: mol_type = other DNA
tgaacagcgtcaactggcgcaaaactggaatcaggggaacgggaaaaccggcccctacgtgaccgcgattaattt

SEQ ID NO: 147475 - DNA, 75 bp, synthetic construct
  source 1..75: mol_type = other DNA
gcagattgacagtaaagttgatgcttcaaacgattttatagcattcagacccctgcaaaaattagtcggaggtac

SEQ ID NO: 147476 - DNA, 75 bp, synthetic construct
  source 1..75: mol_type = other DNA
aaagatgtcgccgagtcacaacaacagcaattccagtctccaccacagtctccggcagacttaatgccgagttaa

SEQ ID NO: 147477 - DNA, 75 bp, synthetic construct
  source 1..75: mol_type = other DNA
agcagtgatggaggcaatacgccttctgaaagatgtcgccgagtcacaacaacagcaattccagtcaccaccaca

SEQ ID NO: 147478 - DNA, 75 bp, synthetic construct
  source 1..75: mol_type = other DNA
cgcaggaaaatacacacaccgtctcaggctcaagaagcaattacccgctggactgccacttgttgcgatccgtca

SEQ ID NO: 147479 - DNA, 75 bp, synthetic construct
  source 1..75: mol_type = other DNA
cgcagtaaaatacacacaccgtctcaggctcaagaagcaattacccgctggactgccacttgttgcgatccgaca

SEQ ID NO: 147480 - DNA, 75 bp, synthetic construct
  source 1..75: mol_type = other DNA
cgcagaaaaatacacacaccgtctcaggctcaagaagcaattacccgctggtctgccacttgttgcgatccgcca

SEQ ID NO: 147481 - DNA, 75 bp, synthetic construct
  source 1..75: mol_type = other DNA
acgggtaatcgccgcagtaaaatacacacaccgtctcaggctcaagaagcaattccccgctggactgccacttgt

SEQ ID NO: 147482 - DNA, 75 bp, synthetic construct
  source 1..75: mol_type = other DNA
acgggtaatcgccgcagaaaaatacacacaccggctcaggctcaagaagcaattccccgctggactgccacttgt

SEQ ID NO: 147483 - DNA, 75 bp, synthetic construct
  source 1..75: mol_type = other DNA
acgggtaatcgccgcagaaaaatacacacaccgcctcaggctcaagaagcaattgcccgctggactgccacttgt

SEQ ID NO: 147484 - DNA, 75 bp, synthetic construct
  source 1..75: mol_type = other DNA
ttgtcagttaccgtaccagcaaggacgggcgacgggagtttgaaaccagtgaactgatccgggcatacggagaat

SEQ ID NO: 147485 - DNA, 75 bp, synthetic construct
  source 1..75: mol_type = other DNA
gcgcgaaggtctgcgtcagggccaactgcgtggtggcgcggtgggtacattgatgagcaacatggggctggaact

SEQ ID NO: 147486 - DNA, 75 bp, synthetic construct
  source 1..75: mol_type = other DNA
atcgttgatgctgcgggtcgctatatcgagttttgcaaagccacgttcccgaacgaacttagcctcagtgaactg

SEQ ID NO: 147487 - DNA, 75 bp, synthetic construct
  source 1..75: mol_type = other DNA
gtatttcgtatatacatacctcgctggtcagtattaccatagctaccctgttgagtctgccaaatggcccccgaa

SEQ ID NO: 147488 - DNA, 75 bp, synthetic construct
  source 1..75: mol_type = other DNA
cctgccacttgttgcgatcggtaaagggctggtgataaatccagaatgggtgactttagggaaggtgcgaataag

SEQ ID NO: 147489 - DNA, 75 bp, synthetic construct
  source 1..75: mol_type = other DNA
tttaccgtgatatgcgcgcaggccttgtcagttaccgtaccagccaggacggacgacgggagtttgaaaccagtg

SEQ ID NO: 147490 - DNA, 75 bp, synthetic construct
  source 1..75: mol_type = other DNA
gcggatatgacgaccatgaacgcagtggccaggattgcgggaacggccggcagtgctgttgctgcactgggggcg

SEQ ID NO: 147491 - DNA, 75 bp, synthetic construct
  source 1..75: mol_type = other DNA
tcagactgattatcaggaggaggttatacgccggctcgtcagcccggcgaacctgacggtatctcatggcggtga

SEQ ID NO: 147492 - DNA, 75 bp, synthetic construct
  source 1..75: mol_type = other DNA
ccctgccggccggatctgcggcaactgcggtttgaggtgcagcggacgttcattgagaaccgtgcactggctgat

SEQ ID NO: 147493 - DNA, 75 bp, synthetic construct
  source 1..75: mol_type = other DNA
ggtcaataacggtctgtgggatttgctgattggcacgggactgtttgcgcttcctctggctttcaaagtgatcgg

SEQ ID NO: 147494 - DNA, 75 bp, synthetic construct
  source 1..75: mol_type = other DNA
acagcagctaaagatggaactagtggtacatatcaggcagcgcagaaagcaggtaatttagcaggggcaggcggt

SEQ ID NO: 147495 - DNA, 75 bp, synthetic construct
  source 1..75: mol_type = other DNA
ttgcacgatggcttgatagctggatgttgacagcactgtacagttcggacacgcatacccggttcaatatgatgg

SEQ ID NO: 147496 - DNA, 75 bp, synthetic construct
  source 1..75: mol_type = other DNA
acgggtaatcgccgcaggaaaatacacacaccgactcaggctcaagaagcaattccccgctggactgccacttgt

SEQ ID NO: 147497 - DNA, 75 bp, synthetic construct
  source 1..75: mol_type = other DNA
acgggtaatcgccgcagcaaaatacacacaccggctcaggctcaagaagcaattacccgctggactgccacttgt

SEQ ID NO: 147498 - DNA, 75 bp, synthetic construct
  source 1..75: mol_type = other DNA
acgggtaatcgccgcagcaaaatacacacaccgactcaggctcaagaagcaattgcccgctggactgccacttgt

SEQ ID NO: 147499 - DNA, 75 bp, synthetic construct
  source 1..75: mol_type = other DNA
tggtgatgacactaacttttgtgcagttcgcgctgttcttcctcaccttctggtgggaactggcgcgatggctcg

SEQ ID NO: 147500 - DNA, 75 bp, synthetic construct
  source 1..75: mol_type = other DNA
accaaataacgatgttattagtgccagcgcatcaagcgtaaaatctggtgactttatgaagagagtggtacaaag

SEQ ID NO: 147501 - DNA, 75 bp, synthetic construct
  source 1..75: mol_type = other DNA
acgggtaatcgccgcaggaaaatacacacaccgcctcaggctcaagaagcaattacccgctggactgccacttgt

SEQ ID NO: 147502 - DNA, 75 bp, synthetic construct
  source 1..75: mol_type = other DNA
ttatcgcgatgccatcgacgcactgtttgatgccaagcgttttggtcagaagaacggcctcggtttctggcgtta

SEQ ID NO: 147503 - DNA, 75 bp, synthetic construct
  source 1..75: mol_type = other DNA
ggttcgatcccgcttagctccaccaaatttcaaaccctcgctgcaaagcgggggttttttgtctctgccttttgc

SEQ ID NO: 147504 - DNA, 75 bp, synthetic construct
  source 1..75: mol_type = other DNA
gatgcgatgattgtgaggtcgattaccgatctggcgaaagcgaagtcgttaagcgtagtggcggagtttgttgag

SEQ ID NO: 147505 - DNA, 75 bp, synthetic construct
  source 1..75: mol_type = other DNA
atgcgaataaacttattatttgtgtgcctgaaaaccccgatcagtgagagtagtgtactcatatttgtggagcat

SEQ ID NO: 147506 - DNA, 75 bp, synthetic construct
  source 1..75: mol_type = other DNA
cggttaaaacgtttgaaggccgatatcatcaagattgatggcgtctttgtgaaagatatcgtcacgaacacgctg

SEQ ID NO: 147507 - DNA, 75 bp, synthetic construct
  source 1..75: mol_type = other DNA
atgaaaacgattttattgccggttacctggtgcccgttttcttcatcatctttacccttggtgttggtaaacttc

SEQ ID NO: 147508 - DNA, 75 bp, synthetic construct
  source 1..75: mol_type = other DNA
aagctggcttgctgttcttaccgtgctgctacttctgatgtgtacgccttatgaaaacgacttcattgccggtta

SEQ ID NO: 147509 - DNA, 75 bp, synthetic construct
  source 1..75: mol_type = other DNA
aagtttattctgcctgcaattgatggctccacggtgaagcaaaagctgttcctcgtggcgctgctggtgcttgcg

SEQ ID NO: 147510 - DNA, 75 bp, synthetic construct
  source 1..75: mol_type = other DNA
ggatgccgctgggccgcgcctgggaagcgttgcgtgaagatgaaatcgcctgtcgttcgctgggcttaagtccgc

SEQ ID NO: 147511 - DNA, 75 bp, synthetic construct
  source 1..75: mol_type = other DNA
agggctaaaaagcgtttccgggccgaagtttattctgccagcgattgatggctccacggtgaagcaaaagctgtt

SEQ ID NO: 147512 - DNA, 75 bp, synthetic construct
  source 1..75: mol_type = other DNA
tttaccttaagctggctggcagctcttagcgtgctgctacttctgatgtgcacaccgtatgaaaatgactttatt

SEQ ID NO: 147513 - DNA, 75 bp, synthetic construct
  source 1..75: mol_type = other DNA
aaaaaatttaatgagttacctgttgatagcaaggaatccccgttagatctttttatagctaatacaaagcaactt

SEQ ID NO: 147514 - DNA, 75 bp, synthetic construct
  source 1..75: mol_type = other DNA
cgctgctttctgccgctatgttctttgttctggcgggcatctttatgggcgtgcaactggaactggatggcacca

SEQ ID NO: 147515 - DNA, 75 bp, synthetic construct
  source 1..75: mol_type = other DNA
atgaccccaggattgctgagaacagtattcagcgtggaagcggaaataccccccgagccggtatctggcaggccg

SEQ ID NO: 147516 - DNA, 75 bp, synthetic construct
  source 1..75: mol_type = other DNA
taaccgcttaagcaacctagttaaattaccgcgagaacaacacaaggcattgcacagcaaattaaatcagctact

SEQ ID NO: 147517 - DNA, 75 bp, synthetic construct
  source 1..75: mol_type = other DNA
tgtactggcaatccggatgcgcagaatattctgcaacacagcgtctggctcaccctgcctgatggcacttccgtc

SEQ ID NO: 147518 - DNA, 75 bp, synthetic construct
  source 1..75: mol_type = other DNA
aagtgtggctgaacggcatggaagtgacgcagttcacttacttccagcaggttggtggtctggagtgtaaaccgg

SEQ ID NO: 147519 - DNA, 75 bp, synthetic construct
  source 1..75: mol_type = other DNA
ggctggaagatgatgactgtaactatcaggaaaaagccgctgaatggttctgggatgcaataaccgaaagagtta

SEQ ID NO: 147520 - DNA, 75 bp, synthetic construct
  source 1..75: mol_type = other DNA
cggatgctgacgctcgggtcttattgcaaaaaaggccgagggaaggctggctaaccacggatgcatttctttact

SEQ ID NO: 147521 - DNA, 75 bp, synthetic construct
  source 1..75: mol_type = other DNA
cctcgctgcaaagcgggggttttttgtctctgccttttgccgcttttgtaatacagtctacatcctggcagtgcc

SEQ ID NO: 147522 - DNA, 75 bp, synthetic construct
  source 1..75: mol_type = other DNA
agcccattcgaaacaaagaggggcagggctatgatgagatcctggcgcgtctgaaatatgacgacggcattatga

SEQ ID NO: 147523 - DNA, 75 bp, synthetic construct
  source 1..75: mol_type = other DNA
atatgaggcaggttaaatttccgtgcacattctatgtaacatggttaaggaaaacgagatctgacacacactata

SEQ ID NO: 147524 - DNA, 75 bp, synthetic construct
  source 1..75: mol_type = other DNA
gagtgtggtcgcggagtttgtcgagacgccacagcagcaggcgctattgcataagctcggggtgcaatatctgca

SEQ ID NO: 147525 - DNA, 75 bp, synthetic construct
  source 1..75: mol_type = other DNA
tccgtttttaaatctcacctgggctgtttcaacgctttgcctgctgaattacaaccagaactttttgcaaggggt

SEQ ID NO: 147526 - DNA, 75 bp, synthetic construct
  source 1..75: mol_type = other DNA
ccgtacgctgctgccgttgatgcaggaaaacgaaaagttgtatcaattgccgggtagtgaactgctgttagtgct

SEQ ID NO: 147527 - DNA, 75 bp, synthetic construct
  source 1..75: mol_type = other DNA
atgccgaaagacgaatccatgaatatccgttacctactgtgtaacgctgatgaaatggagccgggcacctataaa

SEQ ID NO: 147528 - DNA, 75 bp, synthetic construct
  source 1..75: mol_type = other DNA
gttacgaaggggcacgtaaagcgctgaccgggctgtcgcctgacgagatcgtcaaccaggtgaaagatgctggcc

SEQ ID NO: 147529 - DNA, 75 bp, synthetic construct
  source 1..75: mol_type = other DNA
cgcacctgctggtggaaggcatgctcatctccgcatttgcgctgaaagcttaccgtggttacatcttcctgcgcg

SEQ ID NO: 147530 - DNA, 75 bp, synthetic construct
  source 1..75: mol_type = other DNA
tgactaccggaaagatatctgttctgggtattcccacgcggcaggctctgcagaaaaacctgattgcctacgtcc

SEQ ID NO: 147531 - DNA, 75 bp, synthetic construct
  source 1..75: mol_type = other DNA
accacccgggatatggcgctggatcgtcattgaccggactgcgaagaaataaggaaagaggtgatatgggcgttc

SEQ ID NO: 147532 - DNA, 75 bp, synthetic construct
  source 1..75: mol_type = other DNA
tctgtcgtgccactgttcattttcaggaaatacaaaagcagttcgatacttctgtttttgcagaagggatcactt

SEQ ID NO: 147533 - DNA, 75 bp, synthetic construct
  source 1..75: mol_type = other DNA
aagatcggcaacgagaaatgcccggtggtcgacacctggtggcagaccgaaactggcggtttcatgatcacgcca

SEQ ID NO: 147534 - DNA, 75 bp, synthetic construct
  source 1..75: mol_type = other DNA
gtacggcccgctggcctgcggcgcgaccacgctgatgtttgaaggtgtgccaaactggccgacgcctgcccgtat

SEQ ID NO: 147535 - DNA, 75 bp, synthetic construct
  source 1..75: mol_type = other DNA
cgactcctggcctggtcaggcgcgtacattgtttggcgatcacgaacgctttgaacagacctacttctccacctt

SEQ ID NO: 147536 - DNA, 75 bp, synthetic construct
  source 1..75: mol_type = other DNA
gaccggactttctccggacgaaatcgttactcaggtaaaagactccggcctgaaagggcgcggcggtgcaggctt

SEQ ID NO: 147537 - DNA, 75 bp, synthetic construct
  source 1..75: mol_type = other DNA
gcgctggaacgtgtcgatatggtggattttcgccatcgacaaatcggcgagctttccggtggacaaaagaaacgc

SEQ ID NO: 147538 - DNA, 75 bp, synthetic construct
  source 1..75: mol_type = other DNA
gatcgatcgtcgctgcgcattctcggttccgtgggcgagccaattaacccggaagcgtgggagtggtactggaaa

SEQ ID NO: 147539 - DNA, 75 bp, synthetic construct
  source 1..75: mol_type = other DNA
atcctcagattgtcacagattctaagttttacgctgtacagcaactgttagaggaaacagggaaggggaaaacat

SEQ ID NO: 147540 - DNA, 75 bp, synthetic construct
  source 1..75: mol_type = other DNA
attgatgacgttaggcagatactgaggaagggagtctctatactgactctgggagatggtgaactctacgacaag

SEQ ID NO: 147541 - DNA, 75 bp, synthetic construct
  source 1..75: mol_type = other DNA
atgaagctgctagtaacatacattcgttggagtactcgagagcaagactctggagactccttaagaagacaaaca

SEQ ID NO: 147542 - DNA, 75 bp, synthetic construct
  source 1..75: mol_type = other DNA
aaacagcgtgtcagaaaatgttgcggcgacattgaaagcggtaaaaattgcgatggacaacgccagcgcgagact

SEQ ID NO: 147543 - DNA, 75 bp, synthetic construct
  source 1..75: mol_type = other DNA
aattttttgcttatggtacagctgtcggctatccagaagtgccaacacatggtgctggtttccaggcctgttaca

SEQ ID NO: 147544 - DNA, 75 bp, synthetic construct
  source 1..75: mol_type = other DNA
ctggtaaatgagaaacgccgggctgcgctgaatatgctctatatcgacccgcaaaacagcagccagattattgct

SEQ ID NO: 147545 - DNA, 75 bp, synthetic construct
  source 1..75: mol_type = other DNA
ctattgggttaatgaggctaacaagtttggcatagaggctctttgcgaattgatgttagctatcttggacgatct

SEQ ID NO: 147546 - DNA, 75 bp, synthetic construct
  source 1..75: mol_type = other DNA
tgaaccttttaccggcgttgatgtgaaaaccgaagcgaaaatcatcagcctgttgagggagttagggagcgaagg

SEQ ID NO: 147547 - DNA, 75 bp, synthetic construct
  source 1..75: mol_type = other DNA
aaagagggatcgtcaaattgtcaccgatgcgctggaacgtgtcgatatggtgaattttcgccatcgacaaatcgg

SEQ ID NO: 147548 - DNA, 75 bp, synthetic construct
  source 1..75: mol_type = other DNA
gaggaaacagggaaggggaaaacatccagcggtgaacactggctatacgtgaacatactgaaggggcttatccgt

SEQ ID NO: 147549 - DNA, 75 bp, synthetic construct
  source 1..75: mol_type = other DNA
ggaactcgatagcgaattgtgggatatggcatttgatagtgagggaataaatatttatgcaggctatggatctga

SEQ ID NO: 147550 - DNA, 75 bp, synthetic construct
  source 1..75: mol_type = other DNA
gcccccttcaatccttatgatgcccgttgcgcctgcaagcacatcgaggttacagaggatttctttgccattctc

SEQ ID NO: 147551 - DNA, 75 bp, synthetic construct
  source 1..75: mol_type = other DNA
ttccgaacatggagctacagaccggaaaacgcctccagccgtactacgaccgggcagacaggccgagaattgatg

SEQ ID NO: 147552 - DNA, 75 bp, synthetic construct
  source 1..75: mol_type = other DNA
gaaagacatttgctgaacgccttagagcaactgcaacaggactatatgcagcggctgagcgaatgggagagcgcc

SEQ ID NO: 147553 - DNA, 75 bp, synthetic construct
  source 1..75: mol_type = other DNA
atcagcggaggtgattccctttcaggggaaagagtgggtacatctgaaggagtgacacagagtgacagagctgga

SEQ ID NO: 147554 - DNA, 75 bp, synthetic construct
  source 1..75: mol_type = other DNA
ttattatcgccgacaccccagggcacgagcagtacacccgcaatatggcgaccggcgcatcgacatgtgagctgg

SEQ ID NO: 147555 - DNA, 75 bp, synthetic construct
  source 1..75: mol_type = other DNA
cccaaatatgagcgcattattgctgatgctattggtgttgcgccggaggagatctggcccagccgttacgctcgt

SEQ ID NO: 147556 - DNA, 75 bp, synthetic construct
  source 1..75: mol_type = other DNA
acaagcgttatccctggcgcgtgagcgccagccggaaacacaggaacggacactgaatggtccttcgctgggatg

SEQ ID NO: 147557 - DNA, 75 bp, synthetic construct
  source 1..75: mol_type = other DNA
ggcgaaactgaagcaagtgctgtgctatgacggttatctcacgccgcaaaatccggcgaatcagcaccattgtat

SEQ ID NO: 147558 - DNA, 75 bp, synthetic construct
  source 1..75: mol_type = other DNA
gccatattccgacaacgccggagctggcgaaactgaagcaagtgctgtgctatgacggttatctcacgccgcaaa

SEQ ID NO: 147559 - DNA, 75 bp, synthetic construct
  source 1..75: mol_type = other DNA
ggcaaaactgaaacaggtgctgtgctatgacggttatctcacgccacaaaatccggcgaatcagcaccattgtat

SEQ ID NO: 147560 - DNA, 75 bp, synthetic construct
  source 1..75: mol_type = other DNA
ggagtgatacagagtgacagagctggaaacacatttgctgaacgccttagagcagctgcaacaggactatatgca

SEQ ID NO: 147561 - DNA, 75 bp, synthetic construct
  source 1..75: mol_type = other DNA
taaatttgatcatgactggtgcggcgtcacgcagttaggctgggatgagaaaagtcagcacaaaatcgcacaaat

SEQ ID NO: 147562 - DNA, 75 bp, synthetic construct
  source 1..75: mol_type = other DNA
tgagcgacgaaccgattccgatggatgccagtacgctggcggcgttaaatccgaatcggttatgggtacggaaat

SEQ ID NO: 147563 - DNA, 75 bp, synthetic construct
  source 1..75: mol_type = other DNA
catcgcccttccggcgttcatctttgccagagtgccgaacgatacgcatcaaaatgtggctatttcacggcgaaa

SEQ ID NO: 147564 - DNA, 75 bp, synthetic construct
  source 1..75: mol_type = other DNA
gtgtggtggcactggtgctttatctgctgcacgccagaaataacaaccgcgctcttttcagtctgaaactgttcc

SEQ ID NO: 147565 - DNA, 75 bp, synthetic construct
  source 1..75: mol_type = other DNA
taatgccgaactacaccatgcagacgcggcgctttgatctttccggctttttattgctggcggttggcatggcgg

SEQ ID NO: 147566 - DNA, 75 bp, synthetic construct
  source 1..75: mol_type = other DNA
tcaccgtcagagtgtccgggcctgtaggcagcggtaaaagttacgttctgacgcgtataaaagagatggtgaaaa

SEQ ID NO: 147567 - DNA, 75 bp, synthetic construct
  source 1..75: mol_type = other DNA
gcgagggatgcattctccggacgaatgcactgctggatgttatatgccccacaggccagaacccatggacactgc

SEQ ID NO: 147568 - DNA, 75 bp, synthetic construct
  source 1..75: mol_type = other DNA
atgcaaacaaacatcaatggcacttgtgacgggcttgaactggctgtactggtaagccgtgaattctggtcaaca

SEQ ID NO: 147569 - DNA, 75 bp, synthetic construct
  source 1..75: mol_type = other DNA
ggtggttattatttattatgggattggtcactatcatgcttttttccgggagtgagtaccagtggatgcaggata

SEQ ID NO: 147570 - DNA, 75 bp, synthetic construct
  source 1..75: mol_type = other DNA
aagttgaaaacctgccgctgaacggcatcggcctggtggatctcacctttgatgagccgctggtgttagatcgtt

SEQ ID NO: 147571 - DNA, 75 bp, synthetic construct
  source 1..75: mol_type = other DNA
attttcgtggttacgccggaacgctggcctctggcagcgtgaaagtcgggcaacgtgtcaaagtgctcccctctg

SEQ ID NO: 147572 - DNA, 75 bp, synthetic construct
  source 1..75: mol_type = other DNA
agcgaagaacgcgagcagcacccgctattacgcgttttcgggaacctcattaagcatcaggaagtgaccagcgca

SEQ ID NO: 147573 - DNA, 75 bp, synthetic construct
  source 1..75: mol_type = other DNA
agaatatttcaagaaacaaaatcttgaaagtttcttccccgaaatccccgttgaatttcatattaataaagttaa

SEQ ID NO: 147574 - DNA, 75 bp, synthetic construct
  source 1..75: mol_type = other DNA
agggatggaaagatacagagagctaaaactccagaagctattatccctgccgcaaaacaataaaggtgctttcga

SEQ ID NO: 147575 - DNA, 75 bp, synthetic construct
  source 1..75: mol_type = other DNA
ctggcgataccatttcgctgattggcaccacctctttacgtattgattacaacgagattgacgataatcgagtga

SEQ ID NO: 147576 - DNA, 75 bp, synthetic construct
  source 1..75: mol_type = other DNA
agtttaataaagaggcttttaactgcccgtactgtcaggcttatgctaagcaaaagtgggaacaattataccctt

SEQ ID NO: 147577 - DNA, 75 bp, synthetic construct
  source 1..75: mol_type = other DNA
cattgtggtgaagatgcctattggtatcagggcaacatgttgatccctgcggctggcaatgttgaactcccaaac

SEQ ID NO: 147578 - DNA, 75 bp, synthetic construct
  source 1..75: mol_type = other DNA
accggtggcaaactgatgacctatcggctgatggctgaatgggctaccgacgcggtatgtcgcaagctgggcaac

SEQ ID NO: 147579 - DNA, 75 bp, synthetic construct
  source 1..75: mol_type = other DNA
gggcctactctggcgtgcgtccactggtcgccagcgatgatgacccgagcgggcgtaacgtcagccgcggcatcg

SEQ ID NO: 147580 - DNA, 75 bp, synthetic construct
  source 1..75: mol_type = other DNA
gcctgccgcgctgccggactgctgcaacgttttaacgtcacgacgtccgcgcaatctatcgagcaactttccacc

SEQ ID NO: 147581 - DNA, 75 bp, synthetic construct
  source 1..75: mol_type = other DNA
gatacccgcgaggcgcataagcgtaaaacctcacgcatcctctatatttcaccgataaaagctctgggcaccgac

SEQ ID NO: 147582 - DNA, 75 bp, synthetic construct
  source 1..75: mol_type = other DNA
gttggtggtctggagtgtaaaccggttaccggcgagatcacctatggtctggaacgtctggcgatgtacattcag

SEQ ID NO: 147583 - DNA, 75 bp, synthetic construct
  source 1..75: mol_type = other DNA
tacgagaaagaagcacagcaattgctggcgctggaaaatccgctgccgttgccagcctacgaacgtattctgaaa

SEQ ID NO: 147584 - DNA, 75 bp, synthetic construct
  source 1..75: mol_type = other DNA
gaccgaaagaaattgaggctatgttccagagtatgcctgaaggtccacgccaaggtattgagaatcaggacagac

SEQ ID NO: 147585 - DNA, 75 bp, synthetic construct
  source 1..75: mol_type = other DNA
tggatcaacagtaccaattattcggtagaagagattgccaccaagatcctcgatatcatgggtcttagccgccga

SEQ ID NO: 147586 - DNA, 75 bp, synthetic construct
  source 1..75: mol_type = other DNA
ctcaaccacgatgacaccctccccgaagacccgctgctggcagtggcactggctaacccggaatacgtcaccgca

SEQ ID NO: 147587 - DNA, 75 bp, synthetic construct
  source 1..75: mol_type = other DNA
aggttgaaaacattacaggtgttgcgacaaattgtggcggtattacttatccgcaaggcggctggctatgtccgg

SEQ ID NO: 147588 - DNA, 75 bp, synthetic construct
  source 1..75: mol_type = other DNA
cggttgaacaaattacgggcgttgcgacaaattgcagcggcattacttatccgcaaggtggttggctgtgcccag

SEQ ID NO: 147589 - DNA, 75 bp, synthetic construct
  source 1..75: mol_type = other DNA
taaatttgatcatgactggtgcggcgtcacgcagttaggctgggatgagaaaagccagcataaaatcgcacagat

SEQ ID NO: 147590 - DNA, 75 bp, synthetic construct
  source 1..75: mol_type = other DNA
ggcgcaaacgggaaatgctttgtggggtgatggaacaaacattacccctcccctgctccacgccgtggtttaacc

SEQ ID NO: 147591 - DNA, 75 bp, synthetic construct
  source 1..75: mol_type = other DNA
tgccagtacgctggcggcgttaaatccgaatcggctatgggtacggaaattgttgaaaggtaaaacagtgaaagc

SEQ ID NO: 147592 - DNA, 75 bp, synthetic construct
  source 1..75: mol_type = other DNA
ttattgcgcggatgatacccctgcgctgggtgcttctggcaatcgccagggggcgctgtatccgttgttgagcaa

SEQ ID NO: 147593 - DNA, 75 bp, synthetic construct
  source 1..75: mol_type = other DNA
atgttaaagcgttatttagtactctcggtagcaacggctgcattttcattaccttctttggtctatgctgcacaa

SEQ ID NO: 147594 - DNA, 75 bp, synthetic construct
  source 1..75: mol_type = other DNA
gagatcccggtgctgttcaccgtaacccggaccaacgaaaagctgcacatccctctcctgctgagccaatacggt

SEQ ID NO: 147595 - DNA, 75 bp, synthetic construct
  source 1..75: mol_type = other DNA
agaatttgctattcctttatgatgatgctcagtcaatttaccaaaaaaagaaagcattagactttacactgtcca

SEQ ID NO: 147596 - DNA, 75 bp, synthetic construct
  source 1..75: mol_type = other DNA
gtacgggtagtcgcaaacgggaagcggcgattattggcggtggtatcgccagcgcattgttgtcgctggcgctat

SEQ ID NO: 147597 - DNA, 75 bp, synthetic construct
  source 1..75: mol_type = other DNA
gtacgggcagcaacaaacaggaagcggcaattattggaggcggtattgccagcgcgttgttgtcactggcgctat

SEQ ID NO: 147598 - DNA, 75 bp, synthetic construct
  source 1..75: mol_type = other DNA
cgggctcgataaagaccagtacagcattctgtgggtggagcacaccgacaaggggcggctggaactgaatttcct

SEQ ID NO: 147599 - DNA, 75 bp, synthetic construct
  source 1..75: mol_type = other DNA
tggttgttttgccacctatatcatgaagcagggaggtgtactggttccccgtaaatatcacctcatcagaactgc

SEQ ID NO: 147600 - DNA, 75 bp, synthetic construct
  source 1..75: mol_type = other DNA
cggcggaagttgcgccggagtctgcactttcaaacctgatcactctgtatgttgccgataacgagcaggaacaac

SEQ ID NO: 147601 - DNA, 75 bp, synthetic construct
  source 1..75: mol_type = other DNA
ccgggcaaagctggcgcatgagcagcagcgctttaatccggacatggtcatactggcggacgttaacgcccagcc

SEQ ID NO: 147602 - DNA, 75 bp, synthetic construct
  source 1..75: mol_type = other DNA
cctgtctacccttgtcgctgcgcatatgagcatgtgccttgatgccgcttgtggtgatttgtatgccaccgatga

SEQ ID NO: 147603 - DNA, 75 bp, synthetic construct
  source 1..75: mol_type = other DNA
atgaactcattccgggctcgctggcgcgtatgctgtgcgccgactggtggtatcggaaattgtggaagatgcgtt

SEQ ID NO: 147604 - DNA, 75 bp, synthetic construct
  source 1..75: mol_type = other DNA
actctattaactacatggtgcctgtatgatggcagtttgctaacaacacctattgaagatgttgatcttggtggc

SEQ ID NO: 147605 - DNA, 75 bp, synthetic construct
  source 1..75: mol_type = other DNA
ttgcagccacgtttgtaactgaaaatcccggtagcgttgagaatgttgccgggccttattcgtggaatttgccca

SEQ ID NO: 147606 - DNA, 75 bp, synthetic construct
  source 1..75: mol_type = other DNA
gtgcatatctgaaatgtctggaagaactcgcggccggaaataatgaattcttgctggcaaaaacgcgactggaag

SEQ ID NO: 147607 - DNA, 75 bp, synthetic construct
  source 1..75: mol_type = other DNA
caacgtgcggacggaaaatgtgtccgaacacagtttgcaggtagcgatggtcgcccatgcgctggcagctatcaa

SEQ ID NO: 147608 - DNA, 75 bp, synthetic construct
  source 1..75: mol_type = other DNA
gggttgcgctggtatggcgtacgggtggctgagccgcaccatgacggtactgtgcactggcatctcatgtgtttc

SEQ ID NO: 147609 - DNA, 75 bp, synthetic construct
  source 1..75: mol_type = other DNA
tgtagaactggaagaaatcaggcagacatgggaaaaagtcgctgcagaaactatgcgacttgaagttataccacc

SEQ ID NO: 147610 - DNA, 75 bp, synthetic construct
  source 1..75: mol_type = other DNA
cctgcctttgagaagttgcgccgcaaaaagcgtcgccgcaagctagtgccttatgaactgatcccaccatcgctg

SEQ ID NO: 147611 - DNA, 75 bp, synthetic construct
  source 1..75: mol_type = other DNA
acagggtgacaaaaaagcaggtgcgccggtactggataacccgcggcttgatgcaatcctggctgctgctgatgc

SEQ ID NO: 147612 - DNA, 75 bp, synthetic construct
  source 1..75: mol_type = other DNA
tcagaaccgcttatgaaatcaacgaagagccgaccgcctatggcgatcacggcattcgtatttatggcatctggt

SEQ ID NO: 147613 - DNA, 75 bp, synthetic construct
  source 1..75: mol_type = other DNA
gataatgctgaatacgttaatgcctggcgtctctgcatcgtgttcagcaattccgcttctttggcattccggggc

SEQ ID NO: 147614 - DNA, 75 bp, synthetic construct
  source 1..75: mol_type = other DNA
gacagccaggctgaggctggtaaaaccgaaacggcggaaagggtacaaacaggaagttaacgagcagcagcgcca

SEQ ID NO: 147615 - DNA, 75 bp, synthetic construct
  source 1..75: mol_type = other DNA
ctatttgcgtgagacgattaagccatgcttggaacgactggagcatgtacgcgacagccagctatctgcatcttt

SEQ ID NO: 147616 - DNA, 75 bp, synthetic construct
  source 1..75: mol_type = other DNA
ctgaaaatttgaaccaacaagggaaagacaaatcagctgatggggataccagaacggacattacccgcatggatg

SEQ ID NO: 147617 - DNA, 75 bp, synthetic construct
  source 1..75: mol_type = other DNA
ccctgcgtctggatgtcatcccgcctgcgtttgagcaactccgtcggaaaagaaaccgccgtaaacccgtgctct

SEQ ID NO: 147618 - DNA, 75 bp, synthetic construct
  source 1..75: mol_type = other DNA
tttatggcatctggtcacccatttcagagggcaagatctgcactcatgcagtgaagtggaaaatggttcgtaagg

SEQ ID NO: 147619 - DNA, 75 bp, synthetic construct
  source 1..75: mol_type = other DNA
cgcggaaatgcgcagtgactgcgccgttttctacactatcacctgtccgtcgcgtttccattccacgctcaataa

SEQ ID NO: 147620 - DNA, 75 bp, synthetic construct
  source 1..75: mol_type = other DNA
atgccatcctggctgctgctgatgctggctgttttgccacctacattatgaggcagggcggcgtgctggttcctc

SEQ ID NO: 147621 - DNA, 75 bp, synthetic construct
  source 1..75: mol_type = other DNA
agttttgaaaacaagcgtgcggcgctggcagcctcccttgaggagatcatgaacaaagccgcagaggaaggccgc

SEQ ID NO: 147622 - DNA, 75 bp, synthetic construct
  source 1..75: mol_type = other DNA
agtctgagctgattaacccgcgcaaaggaacgccgacaagctacatagcgaaatacatcagtaagaacattgacg

SEQ ID NO: 147623 - DNA, 75 bp, synthetic construct
  source 1..75: mol_type = other DNA
tgctggatatctacgcgcaacgcgccgccaaagagggcttcgcgtttaaacacgatcgcgagcagtatcagttgt

SEQ ID NO: 147624 - DNA, 75 bp, synthetic construct
  source 1..75: mol_type = other DNA
ctgatcgaagaagggctagcaatgaagctggataacggtcgttttgcaccgggcatccagcttttgcagatcgct

SEQ ID NO: 147625 - DNA, 75 bp, synthetic construct
  source 1..75: mol_type = other DNA
gtggatctcaattgcggctgtccatcgaaaacggttaacggcagcggcggtggggcgacgttactcaaagatcct

SEQ ID NO: 147626 - DNA, 75 bp, synthetic construct
  source 1..75: mol_type = other DNA
cgccaacaccattatcattgaacgcgcggatcacttcggtctggcacagttgcaccagttgcgcggtcgcgtcgg

SEQ ID NO: 147627 - DNA, 75 bp, synthetic construct
  source 1..75: mol_type = other DNA
ggcgaatacgccacgcgcggcgcgttgctggatcttttcccgatgggcagcgacttgccttatcgtcttgatttt

SEQ ID NO: 147628 - DNA, 75 bp, synthetic construct
  source 1..75: mol_type = other DNA
aaaccatcggtttctcgctgtatatggagttgctggaaaacgccgtcgatgcactgaaagccggacgcgagccgt

SEQ ID NO: 147629 - DNA, 75 bp, synthetic construct
  source 1..75: mol_type = other DNA
gcaggcagaattaattgctattggttcacttgctggtacgtttattagcccgggatttggttctattgcaggggc

SEQ ID NO: 147630 - DNA, 75 bp, synthetic construct
  source 1..75: mol_type = other DNA
ggcgtcgctgtttttccggctgatacgcacggcctgccgtcagcgtcttgaggggcgggaactatgtcaaagctg

SEQ ID NO: 147631 - DNA, 75 bp, synthetic construct
  source 1..75: mol_type = other DNA
gtttcagccagttgctgcgtgacggcgcggatttccacaagatcgacaaagtgatggaaaaacagttcggctggc

SEQ ID NO: 147632 - DNA, 75 bp, synthetic construct
  source 1..75: mol_type = other DNA
gcaacggaattatttcagcatgttcgggtgttgaataattcccatgatattgcaagggctattcaggcaattgat

SEQ ID NO: 147633 - DNA, 75 bp, synthetic construct
  source 1..75: mol_type = other DNA
cggttgcactgcacgaatcaccggcaaacatcaaccgggcacttaacacgctcattgaagaagggttggctctga

SEQ ID NO: 147634 - DNA, 75 bp, synthetic construct
  source 1..75: mol_type = other DNA
cctccatgtctccctcaggtataggattatcatcccagtttggatccggcagaggtacatcaagtgcctcttcgt

SEQ ID NO: 147635 - DNA, 75 bp, synthetic construct
  source 1..75: mol_type = other DNA
atggtgaacatttcggcatgagtctttccgggttgctgaccttcggtggcattggtggccttgccgtcggtatgg

SEQ ID NO: 147636 - DNA, 75 bp, synthetic construct
  source 1..75: mol_type = other DNA
tgcacgggcagtaatgctgtttttggtgtgatcactcatgtcattaatgatgcccgaagtggggagtttgattat

SEQ ID NO: 147637 - DNA, 75 bp, synthetic construct
  source 1..75: mol_type = other DNA
tcgcaaaagaaaagtgcgaataaaactgcgaattcgcaaaaggagaaagtggcaaagagtaagccaccagcgggc

SEQ ID NO: 147638 - DNA, 75 bp, synthetic construct
  source 1..75: mol_type = other DNA
aaatttggcggtaatgtcaacgccgaacgtatcgctttactggcgatgtaccacgatgcctcagaagtgctcacc

SEQ ID NO: 147639 - DNA, 75 bp, synthetic construct
  source 1..75: mol_type = other DNA
tgggccgtccgcaggcatattcccgttatctgcgtgaaaccgtcaggccatgccttgaacggctggcgcgtgcgc

SEQ ID NO: 147640 - DNA, 75 bp, synthetic construct
  source 1..75: mol_type = other DNA
gaatggcttgcggcccaacaagatgtctatttaaagattatcgatattgtacagtcgcacggtgcggactttgct

SEQ ID NO: 147641 - DNA, 75 bp, synthetic construct
  source 1..75: mol_type = other DNA
gccgccgcgaagcactcggggaactgctcgcccgaatcaaaattgccccgcaacgcattatgcgtctcgatgagg

SEQ ID NO: 147642 - DNA, 75 bp, synthetic construct
  source 1..75: mol_type = other DNA
acacactaatccgcaacctcgcggaactgcatattggccagccggtggtccatctggagcacggtgtcggacgct

SEQ ID NO: 147643 - DNA, 75 bp, synthetic construct
  source 1..75: mol_type = other DNA
tgctgggcgagttaaccggcgctgcctgcgcgacgctggtagcggaaattgccgaacgtcacgccggaccggtgg

SEQ ID NO: 147644 - DNA, 75 bp, synthetic construct
  source 1..75: mol_type = other DNA
atgtcaagcgaggacaaaattatggcaacaccggactgggaggccatcgaatcggcataccgggccggagtcctt

SEQ ID NO: 147645 - DNA, 75 bp, synthetic construct
  source 1..75: mol_type = other DNA
tacatcacttcttaattccaaccttgtccggaagttgatcatggaaatgtctgatgaagacttcaatcaagttaa

SEQ ID NO: 147646 - DNA, 75 bp, synthetic construct
  source 1..75: mol_type = other DNA
aggagggcataaatacgagtatgacgataacggtaaaagaatgtactggaatgggcaaggacgtcggcctaaggc

SEQ ID NO: 147647 - DNA, 75 bp, synthetic construct
  source 1..75: mol_type = other DNA
tgctgaaaatttgaaccaacaagggaaagacaaatcagctgatggggataccagaacggacattacccgcatgga

SEQ ID NO: 147648 - DNA, 75 bp, synthetic construct
  source 1..75: mol_type = other DNA
tgcgtttgagaaactccgccggaaaagaaaccgccgcaaacctgtgccctatgaactcataccgggttcgctggc

SEQ ID NO: 147649 - DNA, 75 bp, synthetic construct
  source 1..75: mol_type = other DNA
actcgtggcaataactatccccttgctgaaaatttgaaccaacaagggaaagacaaatcagctgatggggacacc

SEQ ID NO: 147650 - DNA, 75 bp, synthetic construct
  source 1..75: mol_type = other DNA
cacgtttccattccacgctaaataacggtaggcccaacccgacctggacaaatgcgacggtaagacaaagcagtg

SEQ ID NO: 147651 - DNA, 75 bp, synthetic construct
  source 1..75: mol_type = other DNA
cacgtttccattctacgctcaataacggcagaccaaacccaacttggacaaatgcgacggtaagacaaagcagcg

SEQ ID NO: 147652 - DNA, 75 bp, synthetic construct
  source 1..75: mol_type = other DNA
gcgtggcggcagcattccatccggtgccggtttacgtattttttaccgtaaccagaggctgcaggaagatgacaa

SEQ ID NO: 147653 - DNA, 75 bp, synthetic construct
  source 1..75: mol_type = other DNA
cgacagcagctcgtctatgagctgaagtccagaggatttgatggtagcgagaaagaggtcgatttactccttcgc

SEQ ID NO: 147654 - DNA, 75 bp, synthetic construct
  source 1..75: mol_type = other DNA
aggtggatctgcttttgcgtggtggcagtatcccgtccggggccgggctgcgtttgttctatcgaaaccagcgcc

SEQ ID NO: 147655 - DNA, 75 bp, synthetic construct
  source 1..75: mol_type = other DNA
aaatgagtcaggatcaggtgaaacgcttgtctacccttgtcgctgcgcatatgagcatgtgccttgatgtagctt

SEQ ID NO: 147656 - DNA, 75 bp, synthetic construct
  source 1..75: mol_type = other DNA
cattcgtgaagaccgcgaggagctggggaataacacgggaccacgatttaagtctgagttgattaacccgcgcaa

SEQ ID NO: 147657 - DNA, 75 bp, synthetic construct
  source 1..75: mol_type = other DNA
tgctggctggtcaggcggtaaggcaaaagggggacaaaaaagcaggtgcgccggtattggataacccgcgccttg

SEQ ID NO: 147658 - DNA, 75 bp, synthetic construct
  source 1..75: mol_type = other DNA
gtggtgatttgtacgcctccgatgatgttaagccggaagaaatccgcaagacatgggaaaaggtggcagcagaaa

SEQ ID NO: 147659 - DNA, 75 bp, synthetic construct
  source 1..75: mol_type = other DNA
aagataggcaacgagaaatgcccggtggttgatacctggtggcagaccgaaaccggcggtttcatgattacccca

SEQ ID NO: 147660 - DNA, 75 bp, synthetic construct
  source 1..75: mol_type = other DNA
cggggaggaaccgtcaccagaactgtacgcagaagtccgcaactgggtgcgtaaagagattggcccgctggcgac

SEQ ID NO: 147661 - DNA, 75 bp, synthetic construct
  source 1..75: mol_type = other DNA
ctgccgcttcgccaataccctgctcgagctgggcattaaaaaaggtgatgtggtggcgatttatatgccgatggt

SEQ ID NO: 147662 - DNA, 75 bp, synthetic construct
  source 1..75: mol_type = other DNA
gtacggcccgctggcctgcggtgcgaccacgctgatgtttgaaggcgtaccgaactggccgacgcctgcccgtat

SEQ ID NO: 147663 - DNA, 75 bp, synthetic construct
  source 1..75: mol_type = other DNA
accggcggttatctggtgtacgcggcgctgacctttaaatatgtctttgattatcatccgggcgatatctactgg

SEQ ID NO: 147664 - DNA, 75 bp, synthetic construct
  source 1..75: mol_type = other DNA
caccagataccttctggggcgaacagggaaaaattctcgactggatcaaaccctaccagaaggtgaaaaacacct

SEQ ID NO: 147665 - DNA, 75 bp, synthetic construct
  source 1..75: mol_type = other DNA
cgccgttttctacactatcacctgtccgtcgcgtttccattccacgctaaataacggcagaccaaacccgacctg

SEQ ID NO: 147666 - DNA, 75 bp, synthetic construct
  source 1..75: mol_type = other DNA
attacccgcatggatgacaaggagttgcacgattacctgcacagtatgagcaaaaaagagcgccgggaactggca

SEQ ID NO: 147667 - DNA, 75 bp, synthetic construct
  source 1..75: mol_type = other DNA
gcatctccctatgtcagctatgaagctgtgatgcataaacgtgagcagtgccgtaagtcgctggagtttttccgt

SEQ ID NO: 147668 - DNA, 75 bp, synthetic construct
  source 1..75: mol_type = other DNA
gaagaaagcattattactgacgatgaacacccttttgtggcacatcgaccgtcagcggtgcagggggaagcaaga

SEQ ID NO: 147669 - DNA, 75 bp, synthetic construct
  source 1..75: mol_type = other DNA
gaagaaagcattattactgacgatgaacgcccttttgtggcacatcgaccgtcagcggtgcagagggaagcaaga

SEQ ID NO: 147670 - DNA, 75 bp, synthetic construct
  source 1..75: mol_type = other DNA
cctgtgttaaaggcctggagcttatcgcggaaatgcgtggtgactgcgccgttttctacaccatcacttgtccgt

SEQ ID NO: 147671 - DNA, 75 bp, synthetic construct
  source 1..75: mol_type = other DNA
tctcagcaccgagatgatcgagcacttcttccgttcgctctcttacaccatgggcgtgacgctacacctgaaaac

SEQ ID NO: 147672 - DNA, 75 bp, synthetic construct
  source 1..75: mol_type = other DNA
ccacaggaagtggttctgagcggttcgcatatcgataccgtggttaacggcggtaacctcgacgggcaattcggc

SEQ ID NO: 147673 - DNA, 75 bp, synthetic construct
  source 1..75: mol_type = other DNA
gtaatgcacagtggtgccgggcacgacgcgcaaattttcgcgcctcgcgtgccgacctgcatgattttcattccc

SEQ ID NO: 147674 - DNA, 75 bp, synthetic construct
  source 1..75: mol_type = other DNA
caacatcatcacgaaagatgacggtgttgttgaggccttaacagaggcgatccggaagaatatggcgactgaaca

SEQ ID NO: 147675 - DNA, 75 bp, synthetic construct
  source 1..75: mol_type = other DNA
agcgtactgacggtaaaacactgattctcagcaatgggagtaagtgggcaggccaagacccggacagcattcaga

SEQ ID NO: 147676 - DNA, 75 bp, synthetic construct
  source 1..75: mol_type = other DNA
gtagagagcctgttcaaagcgtttggccgcaccctgcgccaggccatccgcgtggaaggcgacaccctgccctcg

SEQ ID NO: 147677 - DNA, 75 bp, synthetic construct
  source 1..75: mol_type = other DNA
gtgacggcagaagaagttgatattctgctgcgtgaaggggaaaaactggcccccgtgatggcgaaaacgcgcatt

SEQ ID NO: 147678 - DNA, 75 bp, synthetic construct
  source 1..75: mol_type = other DNA
tttatggcatctggtcacccattgtacagggcaagatctgcactcatgcaatgaaatggaaaatggttcgtaagg

SEQ ID NO: 147679 - DNA, 75 bp, synthetic construct
  source 1..75: mol_type = other DNA
cagtatgagcaaaaaagagcgccgggaactggctgcaaggttacgcctggtgaaaccgaaacggcgtaaagacta

SEQ ID NO: 147680 - DNA, 75 bp, synthetic construct
  source 1..75: mol_type = other DNA
tagaagaaacgctgccctggctttcctcttttggcgctgacccaacgggtggaatgacccgtttactttattcgc

SEQ ID NO: 147681 - DNA, 75 bp, synthetic construct
  source 1..75: mol_type = other DNA
ttttgtgctgaatgagctgaaagccaaaggtctgtgccgcgattttctcgcccagcagcaagaccggggagacag

SEQ ID NO: 147682 - DNA, 75 bp, synthetic construct
  source 1..75: mol_type = other DNA
catgcgcctgtcgtagttaatgccgccgggatctgggggcaacatattgccgaatatgccgatctgcgcattcgc

SEQ ID NO: 147683 - DNA, 75 bp, synthetic construct
  source 1..75: mol_type = other DNA
agcgccgggaactggctgcaaggttacgcctggtgaaaccgaaacggcgtagagactacaaacagcgaattacag

SEQ ID NO: 147684 - DNA, 75 bp, synthetic construct
  source 1..75: mol_type = other DNA
tggctgagccgcatcatgacggtacagttcactggcacctgttgtgttttatgcgcaaaaaagccgccgcgccat

SEQ ID NO: 147685 - DNA, 75 bp, synthetic construct
  source 1..75: mol_type = other DNA
ttaaaccgaaacggcgtaaagactacaaacagcgaattacagagtatcagcgtcagcagctcgtctatgagctga

SEQ ID NO: 147686 - DNA, 75 bp, synthetic construct
  source 1..75: mol_type = other DNA
atggcatctggtcacccattgcagagggcaagatctgcactcatgcggtgaagtggaaaatggttcgtaaggccg

SEQ ID NO: 147687 - DNA, 75 bp, synthetic construct
  source 1..75: mol_type = other DNA
ccgtaagtcgctggagttttttcgttctcatgaactggtgaacgaagatggcgacacgctggatatggaagacgt

SEQ ID NO: 147688 - DNA, 75 bp, synthetic construct
  source 1..75: mol_type = other DNA
cggcagaccaaacccaacctggacaaatgcgacggtatccgcatccgtaaagggtcggcaaacggcgttgaactg

SEQ ID NO: 147689 - DNA, 75 bp, synthetic construct
  source 1..75: mol_type = other DNA
aaacgctggccaaaagtgcacagtgggcaacaaagcaatggccacagttttccggtgtggtcgcgctgacggcag

SEQ ID NO: 147690 - DNA, 75 bp, synthetic construct
  source 1..75: mol_type = other DNA
tgctgccaatggatgaatgccttgcccgctgtgcactggatatctctggtcgcccgcacctggaatataaagccg

SEQ ID NO: 147691 - DNA, 75 bp, synthetic construct
  source 1..75: mol_type = other DNA
aaagagacgcagattgacgtccaggtgtggctggatcgcgaaggtggcagcaagattaacaccggcgttggcttc

SEQ ID NO: 147692 - DNA, 75 bp, synthetic construct
  source 1..75: mol_type = other DNA
aagtttgccatccgtgaagaccgcgaggaactgggcaataacactgggccgcgttttaagtctgagttgattaac

SEQ ID NO: 147693 - DNA, 75 bp, synthetic construct
  source 1..75: mol_type = other DNA
ttctgattttggtcgttgtatttaatctttctttattattcattttattctgtttatacttattattacatgtca

SEQ ID NO: 147694 - DNA, 75 bp, synthetic construct
  source 1..75: mol_type = other DNA
acagcaaaatatcgtgctggatgaaatcatcgcctttggcgataacgataatgatgcggggatgctgcggatggt

SEQ ID NO: 147695 - DNA, 75 bp, synthetic construct
  source 1..75: mol_type = other DNA
cattttagcggtgtctattccattccgcctgatattagcggcgtcattggtgaagtggatttgagcggtgcgtta

SEQ ID NO: 147696 - DNA, 75 bp, synthetic construct
  source 1..75: mol_type = other DNA
acagacaactggcagagtatgctgaccgggcagccgaagccggaagagtctgcgaaaaacagtacgacactttga

SEQ ID NO: 147697 - DNA, 75 bp, synthetic construct
  source 1..75: mol_type = other DNA
atgatctgggcattcgtaaaagcatactggaaacagttggttatcatggcgatgcttgctgttctggtcatatca

SEQ ID NO: 147698 - DNA, 75 bp, synthetic construct
  source 1..75: mol_type = other DNA
ttgtcggcgctgggtcgtcagccgcagacaccggagttttgcttgccgacgtgttcagcaaatctctcgagagaa

SEQ ID NO: 147699 - DNA, 75 bp, synthetic construct
  source 1..75: mol_type = other DNA
ctgctgaaactgtataccgaagatgccgcagaagcgcgaggctggctgcccggcgggcaactgcacagcgatttg

SEQ ID NO: 147700 - DNA, 75 bp, synthetic construct
  source 1..75: mol_type = other DNA
tacatcatactttatataagtcataattttttattagctttcgttatttatgtcgcatcagcaattttaataaaa

SEQ ID NO: 147701 - DNA, 75 bp, synthetic construct
  source 1..75: mol_type = other DNA
aggaccaaagctgaggattggtgatcttgttgcttggttgcctgtgagttatgccgaagaattaacggataaaat

SEQ ID NO: 147702 - DNA, 75 bp, synthetic construct
  source 1..75: mol_type = other DNA
gtatctacgccggaaaagacgggtttgatgtcactgttgggaatcacactcagctcaatggtgcggtaattgcgt

SEQ ID NO: 147703 - DNA, 75 bp, synthetic construct
  source 1..75: mol_type = other DNA
aagctgatgaggacgtcgccgagaaagcactgcaagcgatgaaagttattccggggactatccgcgctcgtctgc

SEQ ID NO: 147704 - DNA, 75 bp, synthetic construct
  source 1..75: mol_type = other DNA
ggcgtgccggaagctaacgccaaagcacaccgtggcgtgtggaataaactggcggcgggatcttttgaagcgcgc

SEQ ID NO: 147705 - DNA, 75 bp, synthetic construct
  source 1..75: mol_type = other DNA
cggcttccatcatcgcactcgtggctatcttcaaatctttcttcggtcactatctggggacgctggaagggctga

SEQ ID NO: 147706 - DNA, 75 bp, synthetic construct
  source 1..75: mol_type = other DNA
aaacgaagaaatccggtctgatgggtaccggcggtattggtttcaccattggcagcagtaagacaacgcacgacc

SEQ ID NO: 147707 - DNA, 75 bp, synthetic construct
  source 1..75: mol_type = other DNA
ggaaagagcatcctggcatgagcgatgcacagttgcgggagaccccggaatacagagaggtcatgaaaggctacg

SEQ ID NO: 147708 - DNA, 66 bp, synthetic construct
  source 1..66: mol_type = other DNA
atgaataatgatgagctggccaccagacgtgcgcaggcgattgccgaagacaggtgtttctcgaaa

SEQ ID NO: 147709 - DNA, 75 bp, synthetic construct
  source 1..75: mol_type = other DNA
gtacagtaaaaagcaaagccccgcaagtgtcgttaccactcgcagggcttctaaccaccaacgatagaaagcgta

SEQ ID NO: 147710 - DNA, 75 bp, synthetic construct
  source 1..75: mol_type = other DNA
actgattctgatttggaaggttggagaccatccctcaccgcgtggcgatttatcgcgctttaatgttgacatgta

SEQ ID NO: 147711 - DNA, 75 bp, synthetic construct
  source 1..75: mol_type = other DNA
acatcaacggaaaggaggttacaggcaaactaaacgtagttgcagtaagtcgctttgatgctgttttcatcgtag

SEQ ID NO: 147712 - DNA, 75 bp, synthetic construct
  source 1..75: mol_type = other DNA
ggcatcagagaaaaactgattgaagatggtgttatacagtgcgaacagtgcccactgctatccgagtgggatgag

SEQ ID NO: 147713 - DNA, 75 bp, synthetic construct
  source 1..75: mol_type = other DNA
taataacccagcttgttattttaatcacgggaattaccttatttaaggtcttaggtggaatcagtcagagctggt

SEQ ID NO: 147714 - DNA, 75 bp, synthetic construct
  source 1..75: mol_type = other DNA
aagggcaaaggcaaagggcgtaagcctcgtggcaaacgcggctggctatggctgctgctaaaactggctatcgtt

SEQ ID NO: 147715 - DNA, 75 bp, synthetic construct
  source 1..75: mol_type = other DNA
attctggacagggctcgtttttatgggttacagaacgagcaaagcgctgatggaatcagattacttaccgtgacc

SEQ ID NO: 147716 - DNA, 75 bp, synthetic construct
  source 1..75: mol_type = other DNA
atgcaggatgacgggttaaatgatttgctggtgtcggtgaaaaaactgctggcggataattttccggatggtgtg

SEQ ID NO: 147717 - DNA, 75 bp, synthetic construct
  source 1..75: mol_type = other DNA
tgccagggcgtctgacctccaccgataagttacgtatcgaggaagctatgaaagatcatatcacacacccgcaag

SEQ ID NO: 147718 - DNA, 75 bp, synthetic construct
  source 1..75: mol_type = other DNA
tgactcggtggcccaggacgcggcagaaaaagccgccgtggaaggcattccggcactgaagaaacagcgtaagtt

SEQ ID NO: 147719 - DNA, 75 bp, synthetic construct
  source 1..75: mol_type = other DNA
tctacaacccgtggcgtaacccgaaactggcgctggagcgacgtaacctggtactacgtttgctgcaacagcaac

SEQ ID NO: 147720 - DNA, 75 bp, synthetic construct
  source 1..75: mol_type = other DNA
tgcttttcgcgtaaagtttaacggtagtaataactatctttatagtcttgttaccacagaagaacaaagcggtag

SEQ ID NO: 147721 - DNA, 75 bp, synthetic construct
  source 1..75: mol_type = other DNA
atgtttaccaacgtaaatgttgattgttgcaaaacaccaggatgtaaaaacctggggttgctgaatagccaggat

SEQ ID NO: 147722 - DNA, 75 bp, synthetic construct
  source 1..75: mol_type = other DNA
ggatggtttttactcatcgccatttcgacgctgacgacctggcagcatcattttattgatgtcatcacagggctg

SEQ ID NO: 147723 - DNA, 75 bp, synthetic construct
  source 1..75: mol_type = other DNA
ccttgtgccagggatgaggatacacgaaggcgtcagaacgaaaacattattaaccgcattacagagaagagccga

SEQ ID NO: 147724 - DNA, 75 bp, synthetic construct
  source 1..75: mol_type = other DNA
gctggcgattggtcagaacattgcactaaaacggagttaggcggtcggcttgaaagagagattacacaacttatt

SEQ ID NO: 147725 - DNA, 75 bp, synthetic construct
  source 1..75: mol_type = other DNA
tttttaatcgtgaacccttaccgcctgaaagtccgctctggcaacatccacgcgtgacgataacaccacatgtcg

SEQ ID NO: 147726 - DNA, 75 bp, synthetic construct
  source 1..75: mol_type = other DNA
ccagcgtcgtggagttgggcctacaggtggtggtgttatccgggatcgtctgggtagtgacgggcactctgaacc

SEQ ID NO: 147727 - DNA, 75 bp, synthetic construct
  source 1..75: mol_type = other DNA
ctgatcttccctctgctggtgccgttttattactggcgccgcccggcgatgcggcgacaaatgcagacgctgggg

SEQ ID NO: 147728 - DNA, 75 bp, synthetic construct
  source 1..75: mol_type = other DNA
ccggtggtctgacaggcggagatacacagagtgtggcgaacgcagctcaggtaggaaaacaactgttgagaataa

SEQ ID NO: 147729 - DNA, 75 bp, synthetic construct
  source 1..75: mol_type = other DNA
tgcaggtgatgcgttcccgtgctgccctgcaagagaaagctctcggcggggaatatccattcacgatagcaacct

SEQ ID NO: 147730 - DNA, 75 bp, synthetic construct
  source 1..75: mol_type = other DNA
ttttttgtttggcggtgcattaggtggcgcaacagatgcgacgcagcaacttatcacgatgaaaccgggcgaaac

SEQ ID NO: 147731 - DNA, 75 bp, synthetic construct
  source 1..75: mol_type = other DNA
ataacgggattagtgatggatttaaactctcgaaaggaatggcagaatatggggtgtcagcatcgacactagcta

SEQ ID NO: 147732 - DNA, 75 bp, synthetic construct
  source 1..75: mol_type = other DNA
gtaggaaacttgagagagcccttagactcgatctctgagcttgatattttcgagcagttttatgtttacgagaca

SEQ ID NO: 147733 - DNA, 75 bp, synthetic construct
  source 1..75: mol_type = other DNA
atcaccgccccgctacgcatgtcaggcgatctcagcggcactccggggattcgtttgataagcccatttgcggaa

SEQ ID NO: 147734 - DNA, 75 bp, synthetic construct
  source 1..75: mol_type = other DNA
gtggataaacaaaccctgcaggaaacagtgagccagattctggatgagatgcgcgagcgccctatcccactgggc

SEQ ID NO: 147735 - DNA, 75 bp, synthetic construct
  source 1..75: mol_type = other DNA
caaaaatatgatgggcgcgaaagagatttcgctaatgaagcccggctcgctgctgattaatgcctcgcgcggtac

SEQ ID NO: 147736 - DNA, 75 bp, synthetic construct
  source 1..75: mol_type = other DNA
caggtaaattaatcaagtactctgacaatggctcaacgctctctgcggtgaacttcccggaagtctcgctgccac

SEQ ID NO: 147737 - DNA, 75 bp, synthetic construct
  source 1..75: mol_type = other DNA
agatgcccttgccgaggctgtaaaccctgtggccagagtcataatagttaccgatgcgggtgttcttaccccctt

SEQ ID NO: 147738 - DNA, 75 bp, synthetic construct
  source 1..75: mol_type = other DNA
gcaactggaccgtattctactggctgtggtggatctcatacacccctggcgtagcaatgtttgtcacccgcgttt

SEQ ID NO: 147739 - DNA, 75 bp, synthetic construct
  source 1..75: mol_type = other DNA
cgggtcgctgaggatatgcgtcttgaaatgcatattgatactgatgaagcgaatgctgccggtattgatggaggc

SEQ ID NO: 147740 - DNA, 75 bp, synthetic construct
  source 1..75: mol_type = other DNA
agatgcatattgatactgacgaagccaacgcggcgggagcggataatccacagactattgcaatgctggtggcaa

SEQ ID NO: 147741 - DNA, 75 bp, synthetic construct
  source 1..75: mol_type = other DNA
cggaagctggctgagctggaaaaagcagaagaggagctggaggccctgcttatcaaagaagggttcgaggtatga

SEQ ID NO: 147742 - DNA, 75 bp, synthetic construct
  source 1..75: mol_type = other DNA
atgcagagcttgccaaagggaagatgtttcaccgtattcagataccagagaattgtcactggcgtgatgtattcg

SEQ ID NO: 147743 - DNA, 75 bp, synthetic construct
  source 1..75: mol_type = other DNA
ttcttgatccaaaagctggtgagagtgtctacgatcccgcctgtggtactggtggtatgttgctcgagactattc

SEQ ID NO: 147744 - DNA, 75 bp, synthetic construct
  source 1..75: mol_type = other DNA
acccaggagagctggcgctggcggtgacgctggagtcggtgacgctgccagccgatctggtgggctggctggacg

SEQ ID NO: 147745 - DNA, 75 bp, synthetic construct
  source 1..75: mol_type = other DNA
gtcagcgtctggacctctctggtgccggtagtgctgatggcgatgcgtgcgattgccgaaatgatcctgccgaaa

SEQ ID NO: 147746 - DNA, 75 bp, synthetic construct
  source 1..75: mol_type = other DNA
atgctggcagactgtggtggcgcacaacgtatcgccaccacgctgattgctaaatttggtaaaaaacacatccag

SEQ ID NO: 147747 - DNA, 75 bp, synthetic construct
  source 1..75: mol_type = other DNA
atgccgacacagcttctttccggtacggcgctggctgcggggattggttttataaacctgtttggtgcagtgggc

SEQ ID NO: 147748 - DNA, 75 bp, synthetic construct
  source 1..75: mol_type = other DNA
gggcttcatgtggattcccgtctcccgcgcaggactacgttgaagccgagcttgatttaaacgactactgtatcc

SEQ ID NO: 147749 - DNA, 75 bp, synthetic construct
  source 1..75: mol_type = other DNA
atgagtaccgtttatcaccgtccggcagccccttcaggcgatgacagttacgtgcgaccgttgtttgccgatcgt

SEQ ID NO: 147750 - DNA, 75 bp, synthetic construct
  source 1..75: mol_type = other DNA
tgagcaatatccttttagcaatcttggatcaatggttggagattcttggtggtatgccttttggcaagatgcagc

SEQ ID NO: 147751 - DNA, 75 bp, synthetic construct
  source 1..75: mol_type = other DNA
ggactgttttctgcggcgtcttatcaaaagaccgttcgggacaagtatgaaggcataccgaccacctccatttat

SEQ ID NO: 147752 - DNA, 75 bp, synthetic construct
  source 1..75: mol_type = other DNA
acctatctgttagggctatggaatgcagagatgcagttaaatgaaaaagggtattattttgccgtactggtgtta

SEQ ID NO: 147753 - DNA, 75 bp, synthetic construct
  source 1..75: mol_type = other DNA
gataagccgatcccggaaggtctgtacagcgcgaaaaccttcagcgaagaagagatgccgagctttggcgtcagc

SEQ ID NO: 147754 - DNA, 75 bp, synthetic construct
  source 1..75: mol_type = other DNA
ttagtgtaaagcataacgtctcggatctacacctgtgcagcgcctggcccgcacgatggcgcattcgcgggctaa

SEQ ID NO: 147755 - DNA, 75 bp, synthetic construct
  source 1..75: mol_type = other DNA
gttattcaaaccgggcagcaggtggggatgataacgtttcagcagagttatcagcagcgggtgaaagaagggcgc

SEQ ID NO: 147756 - DNA, 75 bp, synthetic construct
  source 1..75: mol_type = other DNA
atggataagaagcaagtaacggatttaaggtcggaactactcgattcacgttttggagctaagtcgatttctact

SEQ ID NO: 147757 - DNA, 75 bp, synthetic construct
  source 1..75: mol_type = other DNA
gtacgacctctctgaacgtctgcgtctgcgcggctggcaggttccggcttcactctcggcggtgaagccaccgac

SEQ ID NO: 147758 - DNA, 75 bp, synthetic construct
  source 1..75: mol_type = other DNA
ctcccgcccggcgggtcaggtgattgcacagtactatgaattcctgcgccttggtcgtgaaggctataccaaagt

SEQ ID NO: 147759 - DNA, 75 bp, synthetic construct
  source 1..75: mol_type = other DNA
ctgccaggctgaataacgagcaacggtcagcagtacgcgaacggctgtctgagcgtggagcaagaagactggaaa

SEQ ID NO: 147760 - DNA, 75 bp, synthetic construct
  source 1..75: mol_type = other DNA
atggataagaagcaagtaacggatttaaggtcggaactactcgattcacgttttggggctaagtctatttccact

SEQ ID NO: 147761 - DNA, 75 bp, synthetic construct
  source 1..75: mol_type = other DNA
atggataagaagcaagtaacggatttaaggtcggaactactcgattcacgttttggtgctaagtcaatttccact

SEQ ID NO: 147762 - DNA, 75 bp, synthetic construct
  source 1..75: mol_type = other DNA
ttttaccttgttgagcaaatagcagagctggaatcagaattaagtcagtcaatcaacgctgatgataccgctcag

SEQ ID NO: 147763 - DNA, 75 bp, synthetic construct
  source 1..75: mol_type = other DNA
ggtaacatgtccatcctcagtagttgttatggaagcctgtgctggtgcgcattttatggcccggcgtatcagcga

SEQ ID NO: 147764 - DNA, 75 bp, synthetic construct
  source 1..75: mol_type = other DNA
gcattcgaatgtggttacctgcgctctggcaaataaactggctcgaattgcctgggcaatcactactcagaaaaa

SEQ ID NO: 147765 - DNA, 75 bp, synthetic construct
  source 1..75: mol_type = other DNA
ctgccgataggtgatgctgtaataaaacggttgtctctcgtgttggctgaacacgaaatccccgaatatctgagc

SEQ ID NO: 147766 - DNA, 75 bp, synthetic construct
  source 1..75: mol_type = other DNA
gtatagcactggaggaaaatcgactctgttgggtatcagtaagcgaggtgataaaaatttacgccggttactggt

SEQ ID NO: 147767 - DNA, 75 bp, synthetic construct
  source 1..75: mol_type = other DNA
tttcctgctggaatttggaatcagcctgccgacaggggatgccgtaataaaacggttgtctctcgtattggctga

SEQ ID NO: 147768 - DNA, 75 bp, synthetic construct
  source 1..75: mol_type = other DNA
gtcactgcttgtaaagcggggcttccggtcagaattaaagatatcaacccgcagggcataaatcatgcgctgaag

SEQ ID NO: 147769 - DNA, 75 bp, synthetic construct
  source 1..75: mol_type = other DNA
ttagtgacttaattataagtggaataaatcctcatggttattgttcccttgtggttgacgtttcaaaccctttca

SEQ ID NO: 147770 - DNA, 75 bp, synthetic construct
  source 1..75: mol_type = other DNA
tataacgtgacggaagaaagaaaaatgaaactagaacgactggctataaatgccagtgtaaaactaggaaaaaca

SEQ ID NO: 147771 - DNA, 75 bp, synthetic construct
  source 1..75: mol_type = other DNA
gatcctcaccggaaaacaacttcgggcgaaacaggcattaaagctggggctggtggatgacgtcgttccgcactc

SEQ ID NO: 147772 - DNA, 75 bp, synthetic construct
  source 1..75: mol_type = other DNA
ggcacccagcgtttaccgcgcctgataggtgtcagcacagcattagagatgatcctcaccggaaaacaacttcgg

SEQ ID NO: 147773 - DNA, 75 bp, synthetic construct
  source 1..75: mol_type = other DNA
ggagctggcactggcgtgccacggtcgtatctgtacagacgatcctaaaaccgtgctcggtttgccggaagtaca

SEQ ID NO: 147774 - DNA, 75 bp, synthetic construct
  source 1..75: mol_type = other DNA
atatcttccgcaagcggtttgtgctggacaacaatggtcaatgaaactcaaagttcgtgcagttcatggccaact

SEQ ID NO: 147775 - DNA, 75 bp, synthetic construct
  source 1..75: mol_type = other DNA
ttattgatttatgcttccgctattattactgttataggttatataatttcccagattgaagatatctacctggga

SEQ ID NO: 147776 - DNA, 75 bp, synthetic construct
  source 1..75: mol_type = other DNA
tccgcagatcctacgtgataactaccttgttcggggtatttgcagttgctatgtttatctatgcaggatgggatg

SEQ ID NO: 147777 - DNA, 75 bp, synthetic construct
  source 1..75: mol_type = other DNA
agctgaccaaaacaaaaggcgccttcccgaatgaaaacagcctgttgaagttgctttacctagggcggatgaacg

SEQ ID NO: 147778 - DNA, 75 bp, synthetic construct
  source 1..75: mol_type = other DNA
gcataatttgcggaatttttccgttgctgattttgccccaattgcctgggacattaacccttgcgtttctgactc

SEQ ID NO: 147779 - DNA, 75 bp, synthetic construct
  source 1..75: mol_type = other DNA
aagtgtcattgaaccgaattgtagcctgcgtgcacagtatctggcgtcactacaaacaacgctgcaaccctatat

SEQ ID NO: 147780 - DNA, 75 bp, synthetic construct
  source 1..75: mol_type = other DNA
gagaaaatgaataccctgaaggcggagtttgcctcgcaggtgcgcaccattattaagcaacttcgcgaaaacaaa

SEQ ID NO: 147781 - DNA, 75 bp, synthetic construct
  source 1..75: mol_type = other DNA
gttgatggcggaaattcatgccttacccgtaccggttattgccgctatccacggcgcttgcctcggtggcgggct

SEQ ID NO: 147782 - DNA, 75 bp, synthetic construct
  source 1..75: mol_type = other DNA
gatcatcaccggaaaacaacttcgggcgaaacaggcggtaaagctggggttggtggatgacgtcgttccgcactc

SEQ ID NO: 147783 - DNA, 75 bp, synthetic construct
  source 1..75: mol_type = other DNA
aggtatatgtttcctggtattcggaatgtccgacctgtccgcaggcttaccagtacctgaacaattcttttgaac

SEQ ID NO: 147784 - DNA, 75 bp, synthetic construct
  source 1..75: mol_type = other DNA
cttgatggggggcggtattgcttatgttactgcttgtaaagcgggcttgccggtcagaattaaagatatcaaccc

SEQ ID NO: 147785 - DNA, 75 bp, synthetic construct
  source 1..75: mol_type = other DNA
aacttttggatgaggtaggaatcgacaccgggactaaaattattcctgtactggaagcaacttatggagagcgtt

SEQ ID NO: 147786 - DNA, 75 bp, synthetic construct
  source 1..75: mol_type = other DNA
ggagctggcgctggcgtgccacggtcgcgtttgtactgacgatcctaaaacggtgctcggtttgcctgaagtaca

SEQ ID NO: 147787 - DNA, 75 bp, synthetic construct
  source 1..75: mol_type = other DNA
agtatggttcacgttttaccccttgcgagcgtttagtcgagatgggtgcgcgtggggaaagtttttggaaaacaa

SEQ ID NO: 147788 - DNA, 75 bp, synthetic construct
  source 1..75: mol_type = other DNA
ggcaggggcgactctccgcaccgcaggttgctgaacggtgtgtgatgttgatgctgaatgaagcagtacgttgtc

SEQ ID NO: 147789 - DNA, 75 bp, synthetic construct
  source 1..75: mol_type = other DNA
cttgaggttgtcgagacagggttagcacagggcaccagtagcggctatgacgctgaagctcgagcctttggtgaa

SEQ ID NO: 147790 - DNA, 75 bp, synthetic construct
  source 1..75: mol_type = other DNA
gatcctcaccggcaagcagcttcgggcaaaacaggcgttaaagctggggctggtggatgacgtcgttccgcaatc

SEQ ID NO: 147791 - DNA, 75 bp, synthetic construct
  source 1..75: mol_type = other DNA
tctttaccgattggtgatatcgccgctcacgccacgcgacctgagcaagttattggcctgcatttcttcagtccg

SEQ ID NO: 147792 - DNA, 75 bp, synthetic construct
  source 1..75: mol_type = other DNA
tgacctacaccggtaactatgagttcccgcagccgctgcacgatgcgctggataaattccaggccgacaccggta

SEQ ID NO: 147793 - DNA, 75 bp, synthetic construct
  source 1..75: mol_type = other DNA
ggtaattgcacagtactatgaattcctgcgcctcggtcgtgaaggctataccaaagtacagaacgcctcttacca

SEQ ID NO: 147794 - DNA, 75 bp, synthetic construct
  source 1..75: mol_type = other DNA
atctgcagctatcgacctgcgttgcgtaaatatggttgctgacttgtggcatgcgcctgcgccgaaaaatggtca

SEQ ID NO: 147795 - DNA, 75 bp, synthetic construct
  source 1..75: mol_type = other DNA
aaatggactttgctgaactgttgctggaagactacaaagcctccctgaaatatctcagcgaccacccgaaactgc

SEQ ID NO: 147796 - DNA, 75 bp, synthetic construct
  source 1..75: mol_type = other DNA
acccgaaacgcatgattgaagcctgtgacgaaaacaccatcggcgtggtgccgactttcggcgtgacctacactg

SEQ ID NO: 147797 - DNA, 75 bp, synthetic construct
  source 1..75: mol_type = other DNA
gaattatatcttgatggcaacgctcgtcagaacctggccactttctgccagacctgggacgacgaaaatgtccat

SEQ ID NO: 147798 - DNA, 75 bp, synthetic construct
  source 1..75: mol_type = other DNA
ccggctacggtggcgatcggttcacttattgcagcgcttattttcgtgcccattggcgctgtgcaagccggagag

SEQ ID NO: 147799 - DNA, 75 bp, synthetic construct
  source 1..75: mol_type = other DNA
tggagtacatcatcctgacctttattgccctcaacggcagccggatgtggatcaacagcgcacgcgaaagaggtt

SEQ ID NO: 147800 - DNA, 75 bp, synthetic construct
  source 1..75: mol_type = other DNA
aactgaaagatggtgaagatccgggatacaccctgtatgacctctctgaacgtctgcgtctgcgcggctggcagg

SEQ ID NO: 147801 - DNA, 75 bp, synthetic construct
  source 1..75: mol_type = other DNA
actgaaagatggtgaagatccgggatacaccctgtacgacctctctgaacgtctgcgtctgcgcggctggcaggt

SEQ ID NO: 147802 - DNA, 75 bp, synthetic construct
  source 1..75: mol_type = other DNA
ggcaaaccaacggataaaccaaacctggtgtgcggtccggtacaaatctgctggcataaattcgcccgctactgg

SEQ ID NO: 147803 - DNA, 75 bp, synthetic construct
  source 1..75: mol_type = other DNA
ttcttggtctgtggttcctgctaccgctggggcaagacgtttcccatgtcgatttaaccggctgtgcgctggctc

SEQ ID NO: 147804 - DNA, 75 bp, synthetic construct
  source 1..75: mol_type = other DNA
gatgttgctggtgtgtaatacggtacaggtttctgtagggcaatttatgcgtgaagcggtgccattactgataag

SEQ ID NO: 147805 - DNA, 75 bp, synthetic construct
  source 1..75: mol_type = other DNA
tggagcgcgcaggtgtaacggttgccgggtttgtgacctccctgaccgataataaatacgtctttttattgatta

SEQ ID NO: 147806 - DNA, 75 bp, synthetic construct
  source 1..75: mol_type = other DNA
ttttgtgatttatcgcgaactgaaaattagccatgtatttactgcgttatctgagacggcgcgatccacagcatc

SEQ ID NO: 147807 - DNA, 75 bp, synthetic construct
  source 1..75: mol_type = other DNA
cgttacgggtgacacccaggcactgaagggcgagcgcgttctaattacgcctaatcacgtctcttttattgatgg

SEQ ID NO: 147808 - DNA, 75 bp, synthetic construct
  source 1..75: mol_type = other DNA
tcgtctacgctatgtggtggcaggcgcagaaaaactacaagaaagtaccaaacagctttggcaggataaatttgg

SEQ ID NO: 147809 - DNA, 75 bp, synthetic construct
  source 1..75: mol_type = other DNA
ccagtggtgattttccctgaaggacgcatcaccaccacaggctcgctgatgaaaatctacgatggcgcgggtttt

SEQ ID NO: 147810 - DNA, 75 bp, synthetic construct
  source 1..75: mol_type = other DNA
gacgaaaacaccatcggcgtggtgccgactttcggcgtgacctacaccggtaactatgagttcccgcaaccgctg

SEQ ID NO: 147811 - DNA, 75 bp, synthetic construct
  source 1..75: mol_type = other DNA
agaacatctcgattctgtcttacctggctaaccactttaacgcaccggttatcgcgtggatggctccgattatcg

SEQ ID NO: 147812 - DNA, 75 bp, synthetic construct
  source 1..75: mol_type = other DNA
aagatgaggttattgctcgtatcgcagctaaacacaatgcgactccggcacaagtgattctggcgtgggctatgg

SEQ ID NO: 147813 - DNA, 75 bp, synthetic construct
  source 1..75: mol_type = other DNA
tatatgattttctgacgctggaatcctgtcgtcatttttctcaggcggcaaaagagcgtaatctttcgcaacccg

SEQ ID NO: 147814 - DNA, 75 bp, synthetic construct
  source 1..75: mol_type = other DNA
tacctaaacttctgcactcactcaccaccttaggcggagactttatctatcatgttgaggctattgatgtcgtcc

SEQ ID NO: 147815 - DNA, 75 bp, synthetic construct
  source 1..75: mol_type = other DNA
ctgcgtctgcgcggctggcaggttccggccttcactcttggcggtgaagccaccgacatcgtggtgatgcgcatt

SEQ ID NO: 147816 - DNA, 75 bp, synthetic construct
  source 1..75: mol_type = other DNA
gatccgaactactcgattcacgttttggcgcaaagccgatttcgactatcgcagaatcaaaacgttttccgctgc

SEQ ID NO: 147817 - DNA, 75 bp, synthetic construct
  source 1..75: mol_type = other DNA
gcacagtactatgaattcctgcgcctcggtcgtgaaggctatacaaaagtacagaacgcctcctaacgcacgttc

SEQ ID NO: 147818 - DNA, 75 bp, synthetic construct
  source 1..75: mol_type = other DNA
gcacagtactatgaattcctgcgcctcggtcgtgaaggctatacaaaagtacagaacgcttcccaacgcacgttc

SEQ ID NO: 147819 - DNA, 75 bp, synthetic construct
  source 1..75: mol_type = other DNA
gctccgaactactcgattcacgttttggcgccaagccgatttcgactatcgcagaatcaaaacgttttccgctgc

SEQ ID NO: 147820 - DNA, 75 bp, synthetic construct
  source 1..75: mol_type = other DNA
gttccgaactactcgattcacgttttggcgcgaagccgatttcgactatcgcagaatcaaaacgatttccgctgc

SEQ ID NO: 147821 - DNA, 75 bp, synthetic construct
  source 1..75: mol_type = other DNA
gttccgaactactcgattcacgttttggcgcaaagccgatttcgactatcgcagaatcaaaacggtttccgctgc

SEQ ID NO: 147822 - DNA, 75 bp, synthetic construct
  source 1..75: mol_type = other DNA
acctggccactttctgccagacctgggacgacgagaatgtccataaattgatggatttgtcgataaagaaaaact

SEQ ID NO: 147823 - DNA, 75 bp, synthetic construct
  source 1..75: mol_type = other DNA
ttcaacgttgactacctgggtgggcaagattggtactttcgccatcaacttctcccgcccggcaggtcaggtgat

SEQ ID NO: 147824 - DNA, 75 bp, synthetic construct
  source 1..75: mol_type = other DNA
ccgttcgtcgccccggatatcgtctgggacttccgcctgccgcgtgtgaaatcgatcagtgcttcaggccataaa

SEQ ID NO: 147825 - DNA, 75 bp, synthetic construct
  source 1..75: mol_type = other DNA
gcacagtactatgaattcctgcgcctcggtcgtgaaggctatacaaaagtacagaacgcatccaatcgcacgttc

SEQ ID NO: 147826 - DNA, 75 bp, synthetic construct
  source 1..75: mol_type = other DNA
acctggccactttctgccagacctgggacgacgagaaggtccataaattgatggatttgtctataaagaaaaact

SEQ ID NO: 147827 - DNA, 75 bp, synthetic construct
  source 1..75: mol_type = other DNA
acctggccactttctgccagacctgggacgacgagaacgtccataaattgatggatttttccataaagaaaaact

SEQ ID NO: 147828 - DNA, 75 bp, synthetic construct
  source 1..75: mol_type = other DNA
cgtttgatgcgctgggcgcgaaagcgggtgattactacccaccagccctgcaaacgaaaattgacgaacttaacg

SEQ ID NO: 147829 - DNA, 75 bp, synthetic construct
  source 1..75: mol_type = other DNA
ccgtaatcactacttccgcagccataagaccatcaaccccacggggattatttcgattggtccgtggcaggatct

SEQ ID NO: 147830 - DNA, 75 bp, synthetic construct
  source 1..75: mol_type = other DNA
ccgcacgctgattatgcgtaaactcaaaggtctggaaccgtttatctccgtttccgtggtgaatccgctgatgct

SEQ ID NO: 147831 - DNA, 75 bp, synthetic construct
  source 1..75: mol_type = other DNA
cgcggctggcaggttccggccttcactctcggcggtgaagccaccgacatcgtggtgatgcgcattatgtgtcgt

SEQ ID NO: 147832 - DNA, 75 bp, synthetic construct
  source 1..75: mol_type = other DNA
tatcttgatggcaatgctcgtcagaacctggccactttctgccagacctgggacgacgacaatgtccacaagttg

SEQ ID NO: 147833 - DNA, 75 bp, synthetic construct
  source 1..75: mol_type = other DNA
tatcttgatggcaacgctcgtcagaacctggccactttctgccagacctgggacgacgaaaacgtccacaagttg

SEQ ID NO: 147834 - DNA, 75 bp, synthetic construct
  source 1..75: mol_type = other DNA
ccggcggtttgcttcaaactcaaagatggtgaagatccgggatacaccctgtacgacctctctgaacgtctgcgt

SEQ ID NO: 147835 - DNA, 75 bp, synthetic construct
  source 1..75: mol_type = other DNA
gcctgcaccgaaaaatggtcaggccgttggcaccaacaccattggttcttccgaggcctgtatgctcggcgggat

SEQ ID NO: 147836 - DNA, 75 bp, synthetic construct
  source 1..75: mol_type = other DNA
ggtccgaactactcgattcacgttttggcgcgaagccgatttcgactatcgcagaatcaaaacgttttccgctgc

SEQ ID NO: 147837 - DNA, 75 bp, synthetic construct
  source 1..75: mol_type = other DNA
tcttccgaggcctgtatgctcggcgggatggcgatgaaatggcctgcggccaagcgctgtcaccaatacactttt

SEQ ID NO: 147838 - DNA, 75 bp, synthetic construct
  source 1..75: mol_type = other DNA
cgttggcgcaagcgtatggaagctgcaggcaaaccaacggataaaccaaacctggtgtgcggtccggtacaaatc

SEQ ID NO: 147839 - DNA, 75 bp, synthetic construct
  source 1..75: mol_type = other DNA
taaggtcggaactactcgattcacgttttggtgcgaagtctatttccactatcgcagaatcaaaacgttttccgt

SEQ ID NO: 147840 - DNA, 75 bp, synthetic construct
  source 1..75: mol_type = other DNA
cgacacatcttcaggatgtaacgcatcaggttgatgaactgacaaaagcgggttgcgagcaaatctatcatgaac

SEQ ID NO: 147841 - DNA, 75 bp, synthetic construct
  source 1..75: mol_type = other DNA
ctgatccgcttccacggcatgtatcagcaggatgaccgcgacatccgcgccgaacgtgctgaacagaagctggaa

SEQ ID NO: 147842 - DNA, 75 bp, synthetic construct
  source 1..75: mol_type = other DNA
ggcagattttgtcgctaagcgtcttgctccggcattaccggcgaacgacggtaagcaaacccccatgcgcgggca

SEQ ID NO: 147843 - DNA, 75 bp, synthetic construct
  source 1..75: mol_type = other DNA
caccaaacagtggcaggcgatcgacaaatttgccggtgaaaacaccatctatggcagcattcgcctgaccaaccg

SEQ ID NO: 147844 - DNA, 75 bp, synthetic construct
  source 1..75: mol_type = other DNA
ggcttcggcgactttacggtgcgtgcgggcatcatttgcccggtgctcgatccggcgcgcgatttgtgggattaa

SEQ ID NO: 147845 - DNA, 75 bp, synthetic construct
  source 1..75: mol_type = other DNA
agtaggagctgttgcgaagcgcttcaatgtttctcgcatgactatttatcgctacacgacaaaaggcaaccattc

SEQ ID NO: 147846 - DNA, 75 bp, synthetic construct
  source 1..75: mol_type = other DNA
ccggcgcaatccagaccgccgtcatggacagtgctcagggctgggtggattccataaaatcagccctgcggcttg

SEQ ID NO: 147847 - DNA, 75 bp, synthetic construct
  source 1..75: mol_type = other DNA
gatcgtaaaaatgccaaaaccaaatacacgctggagcgcgtgggtgttgagacgtttaaagcggaagtggagcgt

SEQ ID NO: 147848 - DNA, 75 bp, synthetic construct
  source 1..75: mol_type = other DNA
gccgtctgccgggtggggtgatcaccactaaacagtggcaggcaattgataaattcgccggtgaaaacaccattt

SEQ ID NO: 147849 - DNA, 75 bp, synthetic construct
  source 1..75: mol_type = other DNA
tgttcattggcctgctgagccagcgtctggttcagctgatatgtccgcactgccgtcgcccctggcatgaggtgg

SEQ ID NO: 147850 - DNA, 75 bp, synthetic construct
  source 1..75: mol_type = other DNA
gacagcagccatattccgaccttcggtatgctgggctatcatccaaagcaggagcagaccatccgccgtattctg

SEQ ID NO: 147851 - DNA, 75 bp, synthetic construct
  source 1..75: mol_type = other DNA
ccttctgtaatgctgatgcggtatatctgagaaaccatgacggctgcccacactgctggcgtggtgtcacagggc

SEQ ID NO: 147852 - DNA, 75 bp, synthetic construct
  source 1..75: mol_type = other DNA
tttcaccgcaggtcacctggggcaccaatccaggtcaggtgatttccgtgaacgacaatattcccgatccggctt

SEQ ID NO: 147853 - DNA, 75 bp, synthetic construct
  source 1..75: mol_type = other DNA
tgttcgacgctcacgtagtgtacgaagccgaaaacgaaaccccgctgttatatatcgaccgccacctggtgcatg

SEQ ID NO: 147854 - DNA, 75 bp, synthetic construct
  source 1..75: mol_type = other DNA
aaaaccggtagcgcaggcggcaccgggcatgtggtggagttttgcggcgaagcaatccgtgatttaagcatggaa

SEQ ID NO: 147855 - DNA, 75 bp, synthetic construct
  source 1..75: mol_type = other DNA
gttcccggctctggcccggtaaaagcccaggcggaagcggaaggtctggacaaaatctttattgaagctggtttt

SEQ ID NO: 147856 - DNA, 75 bp, synthetic construct
  source 1..75: mol_type = other DNA
atggctaagacgttatacgaaaaattgttcgacgctcacgtagtctacgaagctgaaaacgaaacccctctgtta

SEQ ID NO: 147857 - DNA, 75 bp, synthetic construct
  source 1..75: mol_type = other DNA
gcatctggtcagcccggcaatggctgctgctgccgctgtgaccgggcatttcgccgacattcgcaatattaaata

SEQ ID NO: 147858 - DNA, 75 bp, synthetic construct
  source 1..75: mol_type = other DNA
atgtttaccaacgcaccaggatgcaaaaacttgggattgttgaatagccaggattatattgcacaaggcaaaaat

SEQ ID NO: 147859 - DNA, 75 bp, synthetic construct
  source 1..75: mol_type = other DNA
agcaataactatctttatatactggttaccgcagaagaacaaagcggtagagttgttgctatttcaaccaattac

SEQ ID NO: 147860 - DNA, 75 bp, synthetic construct
  source 1..75: mol_type = other DNA
gtcatccttttctgccatcgataaaccgcatgtcaccagctaacgttgcctcaacgttagattatctgaagcatc

SEQ ID NO: 147861 - DNA, 75 bp, synthetic construct
  source 1..75: mol_type = other DNA
caatccaggccaggtgatttccgtgaacgacaatattcccgatccggcttcgtttgccgatccggttgaacgcgc

SEQ ID NO: 147862 - DNA, 75 bp, synthetic construct
  source 1..75: mol_type = other DNA
aagtgacctcaccgcaggcgttcgatggtctgcgcgcccacggtcgcccggtacgtcagccgggcaaaaccttcg

SEQ ID NO: 147863 - DNA, 75 bp, synthetic construct
  source 1..75: mol_type = other DNA
atgtctggcgtgcattttccgcccgtgattattcaatggctgtttgtaaccttacaggaaacaagaaagcaaatg

SEQ ID NO: 147864 - DNA, 75 bp, synthetic construct
  source 1..75: mol_type = other DNA
ttaggtttgtttggcacggcaatcggcgccggggtgctgttcttccctatccgcgcaggttttggcggactaatt

SEQ ID NO: 147865 - DNA, 75 bp, synthetic construct
  source 1..75: mol_type = other DNA
gaacggtctgattctgaagttcggttataaaggcgacaaaaccaaagtgtcgctgggtaaactgaatactctcag

SEQ ID NO: 147866 - DNA, 75 bp, synthetic construct
  source 1..75: mol_type = other DNA
tgcggcgtccatcatcgcgctggttgctatcttcaaatctttcttcggtcactatctggggacgctggaaggtct

SEQ ID NO: 147867 - DNA, 75 bp, synthetic construct
  source 1..75: mol_type = other DNA
aaaacaaaatttaattatgaagtaattgttgccgacgatggaagtaaagaaaatatagaacaagtgattagaaag

SEQ ID NO: 147868 - DNA, 75 bp, synthetic construct
  source 1..75: mol_type = other DNA
tgcaacacaccatttcgattttttagcggaggtaatgtcgcttttgcgaaaaaatggcttttccgtgcaggatgg

SEQ ID NO: 147869 - DNA, 75 bp, synthetic construct
  source 1..75: mol_type = other DNA
ttaactggtcatgacggtatcctgatcaccgtctggctggggatttccatcatggttttctcctttaacttctcg

SEQ ID NO: 147870 - DNA, 75 bp, synthetic construct
  source 1..75: mol_type = other DNA
atggcggcgaaaccaggtacggtagggcgtattttgcctggtatggatgcgcgactgctggcggttccgggtatc

SEQ ID NO: 147871 - DNA, 75 bp, synthetic construct
  source 1..75: mol_type = other DNA
ctgggtctatctggaagatttaaaagcagatgtcaccactgccgacaaagtatggatcttcgctcatttgctgat

SEQ ID NO: 147872 - DNA, 75 bp, synthetic construct
  source 1..75: mol_type = other DNA
tttttggcacctcgaccttcctcggtcactacgcgcgctttgccaacccgtatgacttctatcgtctacgctatg

SEQ ID NO: 147873 - DNA, 75 bp, synthetic construct
  source 1..75: mol_type = other DNA
accttcctgtacttcttcgcaatttgtccgctgttgtggatttatggcgtcaccattaccaatacctttatgacc

SEQ ID NO: 147874 - DNA, 75 bp, synthetic construct
  source 1..75: mol_type = other DNA
ggcatgaaacggcgggggaagcaaaaaaaatggcatggggatatcgctacgtgaaaaaaaggcgttacggacttt

SEQ ID NO: 147875 - DNA, 75 bp, synthetic construct
  source 1..75: mol_type = other DNA
ctcctttgggctgacggtaggcctgtttacgccactgcttacaggtgcagaagtgttcctttatccaagcccgct

SEQ ID NO: 147876 - DNA, 75 bp, synthetic construct
  source 1..75: mol_type = other DNA
gagcgcaccctgcgccgtattctgcagcgccctgaaggtattatcacgctctcaggaccaacaggttcaggaaaa

SEQ ID NO: 147877 - DNA, 75 bp, synthetic construct
  source 1..75: mol_type = other DNA
cccgtggcttgaaggttataacgacaataaggacgagttctacctgttggtgttaattgccgccttgggtgggat

SEQ ID NO: 147878 - DNA, 75 bp, synthetic construct
  source 1..75: mol_type = other DNA
gcatcgtcctgttctcgcggcagtaatgacggtgatgatgctgtcactggccggtatcccaatgacgctgggctt

SEQ ID NO: 147879 - DNA, 75 bp, synthetic construct
  source 1..75: mol_type = other DNA
agcaggatgaccgcgatatccgcgccgaacgtgctgaacagaagctggaaccgcgtcatgcgatgctgctgcgct

SEQ ID NO: 147880 - DNA, 75 bp, synthetic construct
  source 1..75: mol_type = other DNA
gatcgtaaaaatgccaaaaccaaatacacgctggagcgcgtaggggttgagacgtttaaagcggaagttgaacgt

SEQ ID NO: 147881 - DNA, 75 bp, synthetic construct
  source 1..75: mol_type = other DNA
tggcatgacgtggcatccagccgcacggaggctgaacgacgtctggtagaaaaattctgtaacccggaccatgta

SEQ ID NO: 147882 - DNA, 75 bp, synthetic construct
  source 1..75: mol_type = other DNA
tgcacggtgggcgtcgtctgatgcacatccacgaaaaccgtccgggcgtgttaactgcgctgaacaaaatcttcg

SEQ ID NO: 147883 - DNA, 75 bp, synthetic construct
  source 1..75: mol_type = other DNA
tgcacggtgggcgtcgtctgatgcacatccacgaaaaccgtccgggtgtgctgactgcgctcaacaaaatttttg

SEQ ID NO: 147884 - DNA, 75 bp, synthetic construct
  source 1..75: mol_type = other DNA
gtatttaacgcaccgttctcaaatacgcgctctgttgcggagctggtgattggcgaactgctgctgctattgcgc

SEQ ID NO: 147885 - DNA, 75 bp, synthetic construct
  source 1..75: mol_type = other DNA
agcgcgggtggtatcgtggtgctgatctctgcactgttggtactggtgctgggtgtatggccacaaccgctgatt

SEQ ID NO: 147886 - DNA, 75 bp, synthetic construct
  source 1..75: mol_type = other DNA
tttctgcactgttggtactggtgctgggtgtatggccacaaccgctgattagtattgtgcggttagcaatgccgc

SEQ ID NO: 147887 - DNA, 75 bp, synthetic construct
  source 1..75: mol_type = other DNA
gtatgggtatggatgctgccgcaaccaattctttcgccaaggcatttcctggcgcaactaaactgaaacggagct

SEQ ID NO: 147888 - DNA, 75 bp, synthetic construct
  source 1..75: mol_type = other DNA
ccgattgaataacgagcaacggtcagcagtacgtgaacgtctctctgagcacggagcaaggcgactggaaaggta

SEQ ID NO: 147889 - DNA, 75 bp, synthetic construct
  source 1..75: mol_type = other DNA
taaataagcttatcccattgttggccgacatattaaattactcattatcatctgaattttcagaggaccatgtac

SEQ ID NO: 147890 - DNA, 75 bp, synthetic construct
  source 1..75: mol_type = other DNA
tctcgatctcaagcctgccacccgcaaccgccatctggcactcattaaagcggtgtttacctgggctatccgcat

SEQ ID NO: 147891 - DNA, 75 bp, synthetic construct
  source 1..75: mol_type = other DNA
gtgtaccggtatgtgataaggctttcgttcttctgacagaacagcgtcagcatctgggtgatgaaggctgggtat

SEQ ID NO: 147892 - DNA, 75 bp, synthetic construct
  source 1..75: mol_type = other DNA
tataaccaaattcaatgcctagttaaaaaaggattattaaataaagtaagaaaatcaggagtgtatcaatattta

SEQ ID NO: 147893 - DNA, 75 bp, synthetic construct
  source 1..75: mol_type = other DNA
atgaacacagaaatgtaaatatccaaataaagtctcttattgaaaaatacagcagtgagttggcgaaagtatcag

SEQ ID NO: 147894 - DNA, 75 bp, synthetic construct
  source 1..75: mol_type = other DNA
cctctgttagatgctccacgagcgcaagagctttccccaagccttgagcagtggacgctgttttatcagcgctta

SEQ ID NO: 147895 - DNA, 75 bp, synthetic construct
  source 1..75: mol_type = other DNA
agctctggcatcgtattgaagttctgaccgtccgggcaaatgccaggcaaaacctgatccgcccggtcaaagaag

SEQ ID NO: 147896 - DNA, 75 bp, synthetic construct
  source 1..75: mol_type = other DNA
actaaatacctcaaatacaaatgcagtcgtagtgagctgcctgctgattcagttattatgaaaacggcgaacaga

SEQ ID NO: 147897 - DNA, 75 bp, synthetic construct
  source 1..75: mol_type = other DNA
ttgaccaaagatagcacgcaagaacaaattaaatgcaatgattttaaccgccaattaagaaagtttatcaatgag

SEQ ID NO: 147898 - DNA, 75 bp, synthetic construct
  source 1..75: mol_type = other DNA
gaagatgttcactactacgccttagcaccatttagcacatatgtccctgaatttacaatgtattcagccaatgca

SEQ ID NO: 147899 - DNA, 75 bp, synthetic construct
  source 1..75: mol_type = other DNA
cgatctgatgtgtgaagccctactgggttataaagggcagcgggcctggaggccagctgaagacgaacaggggga

SEQ ID NO: 147900 - DNA, 75 bp, synthetic construct
  source 1..75: mol_type = other DNA
atggccaccaaacatataaatgatgagctctggaatcgcattgaggcgctgaccgtcaaagctaacgccaggcat

SEQ ID NO: 147901 - DNA, 75 bp, synthetic construct
  source 1..75: mol_type = other DNA
gattatgcctaataatatcgggggatttggtgatgtggaaaaggccagcaaagtctttgtccgaaacgagctaat

SEQ ID NO: 147902 - DNA, 75 bp, synthetic construct
  source 1..75: mol_type = other DNA
aaatcgcttcggtgaagttatcgcccttgagccagctctagcaaaatacacccgacgcggattagacctggatac

SEQ ID NO: 147903 - DNA, 75 bp, synthetic construct
  source 1..75: mol_type = other DNA
ccactttttacaatattcagtcaggaaatttccgcccgtgatttgattctgctgctgggaggtctgttccttatc

SEQ ID NO: 147904 - DNA, 75 bp, synthetic construct
  source 1..75: mol_type = other DNA
tccagcaaatcaccgcgaaggacgaattccttaacatcaagggtaccgcccgtgacgatatccttgcggctcacc

SEQ ID NO: 147905 - DNA, 75 bp, synthetic construct
  source 1..75: mol_type = other DNA
acaggttgaccgcgaaagtatgcaggcgctcgaaagagcgttgcagggcgcaagaggcggtggggcattcaaaaa

SEQ ID NO: 147906 - DNA, 75 bp, synthetic construct
  source 1..75: mol_type = other DNA
tcagccagatagcggcaaaggatgagtttaccggcatcaaggacgcaacgcgggatgatatgcttgccgcgcacc

SEQ ID NO: 147907 - DNA, 75 bp, synthetic construct
  source 1..75: mol_type = other DNA
tttgtgcaggactatctggtatttggtaacgcctacctggagaaacgctcgaaccgcttcggtgaagtgatcgcc

SEQ ID NO: 147908 - DNA, 75 bp, synthetic construct
  source 1..75: mol_type = other DNA
tgaggcacccaaaaaaaattccagtcaacttgttttaagtgctaccagtcatgaatacagaaatgtaaatattca

SEQ ID NO: 147909 - DNA, 75 bp, synthetic construct
  source 1..75: mol_type = other DNA
tgaggcaaccccaaagtcttcctgtcaacttgtttcaagtgctaccaaccatgaacacagaaatgtaaatatcca

SEQ ID NO: 147910 - DNA, 75 bp, synthetic construct
  source 1..75: mol_type = other DNA
ctcggtgctatcgtgcagattatgctgctggatattattttcagtctcgactcggtcattaccgccgtgggtctg

SEQ ID NO: 147911 - DNA, 75 bp, synthetic construct
  source 1..75: mol_type = other DNA
tctgtatatcggcacatcacaggtggacgacgctggcgtaaaagtcatacagcaaacactggcgggagccagaaa

SEQ ID NO: 147912 - DNA, 75 bp, synthetic construct
  source 1..75: mol_type = other DNA
tccagcagatcaccgcaaaagatgagtttatgaatgttaaggcggcatgcagcttgttctcgcgcagggcgacaa

SEQ ID NO: 147913 - DNA, 75 bp, synthetic construct
  source 1..75: mol_type = other DNA
gacaacgatgctgattgttgccttttcgtatgcggtgattgctttcctctgtacttacctggcgcagggtgcgat

SEQ ID NO: 147914 - DNA, 75 bp, synthetic construct
  source 1..75: mol_type = other DNA
aaggtaatagaaggttaactgccgtattagctaaatatcacttctcgccaacaaaagatgcgtcgtttaatttaa

SEQ ID NO: 147915 - DNA, 75 bp, synthetic construct
  source 1..75: mol_type = other DNA
acgattctgtactgcgtaaacaatctgccgtttggatacagcaatcccctaagtgttatgttcaaccagttactt

SEQ ID NO: 147916 - DNA, 75 bp, synthetic construct
  source 1..75: mol_type = other DNA
ggccgtgctgaagagcgtcaaaaagcgcttgcagaaacttatgcatctgtccgtcgcatgagcgatatggggatg

SEQ ID NO: 147917 - DNA, 75 bp, synthetic construct
  source 1..75: mol_type = other DNA
aactgggcgcatgggatacgctctctccgaaactggccccagcggaagatgttcgtggggcgctggcgctggtcg

SEQ ID NO: 147918 - DNA, 75 bp, synthetic construct
  source 1..75: mol_type = other DNA
gaagggcataacaatgcgacagtgaaagcattttatgattatttgaaagggccgcaggctgcggaaatctttaaa

SEQ ID NO: 147919 - DNA, 75 bp, synthetic construct
  source 1..75: mol_type = other DNA
cgtgtgatgcgctgttcagcatgaagaccgtcagcggtgagaagggggatatttattgcctcgcgaaacaccaga

SEQ ID NO: 147920 - DNA, 75 bp, synthetic construct
  source 1..75: mol_type = other DNA
atgggttttcttgaaacaattgctgaatctcacagattcgcaagcttaggttgctttgtgtttctggtgcttctg

SEQ ID NO: 147921 - DNA, 75 bp, synthetic construct
  source 1..75: mol_type = other DNA
tggctgccgccagcgtgctgcttgccgttgcaaatcaggcgcatgctggcgcgacgcttgatgccgtacagaatg

SEQ ID NO: 147922 - DNA, 75 bp, synthetic construct
  source 1..75: mol_type = other DNA
agacgcattcacgcaatcttattattcccgcccggctcattgcggcgaaataaccctctctttatctgctatacc

SEQ ID NO: 147923 - DNA, 75 bp, synthetic construct
  source 1..75: mol_type = other DNA
gcaggctgcgcagttattgacggagcatctcattcgcaatggacatcagcgtatcgcctggttgggagggcaaag

SEQ ID NO: 147924 - DNA, 75 bp, synthetic construct
  source 1..75: mol_type = other DNA
tgatggtactggcaacgttgccgggctgaatatctctgtcgcaactggcgtgctgcttggcgaatggtggcgtca

SEQ ID NO: 147925 - DNA, 75 bp, synthetic construct
  source 1..75: mol_type = other DNA
gttgcctgccgcactattccacaaattctcggctacgaaaccccaagtacctggctttcatttatgcctcaggtt

SEQ ID NO: 147926 - DNA, 75 bp, synthetic construct
  source 1..75: mol_type = other DNA
cgccatcaggatcatctcgctgtttatcaagcttcaatggttgcctgccgaactattccacaaattctcggctac

SEQ ID NO: 147927 - DNA, 75 bp, synthetic construct
  source 1..75: mol_type = other DNA
tacgaaaccccaagtacctggctttcatttatgcctcaggtttttgaatccgttaaagaagaatatttcacagtc

SEQ ID NO: 147928 - DNA, 75 bp, synthetic construct
  source 1..75: mol_type = other DNA
gtggggttgatattgtttttgaacctaatcagactgcttataataaactgattaatgaaatggcaatggataata

SEQ ID NO: 147929 - DNA, 75 bp, synthetic construct
  source 1..75: mol_type = other DNA
ccggacggcgcgatccacgcgatcgctgacgttctgggtattccggcaagcgatgttgaaggtgtggcaacgttc

SEQ ID NO: 147930 - DNA, 75 bp, synthetic construct
  source 1..75: mol_type = other DNA
ccggacggcgcgatccacgcgatcgctgatgttctgggtattcccgcaagcgatgtcgaaggcgtggctacattc

SEQ ID NO: 147931 - DNA, 75 bp, synthetic construct
  source 1..75: mol_type = other DNA
atgtacctctcaagaataaccttacataccggccagctttcgcctgcgcagttgctgcatctggtggatcgcggt

SEQ ID NO: 147932 - DNA, 75 bp, synthetic construct
  source 1..75: mol_type = other DNA
atccgatgaactgggtggattgtctggatgacccggcgtacggacgcgagatttatggcgagcaaaagccattca

SEQ ID NO: 147933 - DNA, 75 bp, synthetic construct
  source 1..75: mol_type = other DNA
tccgtcgcatgagtgatatggggatgtcaacagaagttattaagcaagctcttcagctttctgatgaacagattc

SEQ ID NO: 147934 - DNA, 75 bp, synthetic construct
  source 1..75: mol_type = other DNA
tcctttcttcggcaaataaaagaaagggtatccttgctattggcgcacatcctgacgatatagaattaggctgtg

SEQ ID NO: 147935 - DNA, 75 bp, synthetic construct
  source 1..75: mol_type = other DNA
gcaactgatccagttcagtagtgtggattatgcgggaatgctagcggtcaccgatcctgagttattcctgcaacg

SEQ ID NO: 147936 - DNA, 75 bp, synthetic construct
  source 1..75: mol_type = other DNA
aaagcgggcaagcgccacgatctgctgatggaggcgaaacggcaggtgagggggcaggcggaaggaagtgatgtc

SEQ ID NO: 147937 - DNA, 75 bp, synthetic construct
  source 1..75: mol_type = other DNA
atattgccaacgactttggcgagaaaagtctgctaatgcctggcggcgcggtgatcaacggcgacttcaacaatg

SEQ ID NO: 147938 - DNA, 75 bp, synthetic construct
  source 1..75: mol_type = other DNA
caaactgccgccagaagccaacctgatgggctttgcccactatctcgaagctctcgatttccagcgtgaaattgt

SEQ ID NO: 147939 - DNA, 75 bp, synthetic construct
  source 1..75: mol_type = other DNA
atgagcactcagtacgaaactcagggatacaccatcaacaatgccggacgccgccttgtggtcgacccgatcaca

SEQ ID NO: 147940 - DNA, 75 bp, synthetic construct
  source 1..75: mol_type = other DNA
cggcactggtctttctgataaatgcgttctcagctacggcgcattcccggatattgccaacgactttggcgagaa

SEQ ID NO: 147941 - DNA, 75 bp, synthetic construct
  source 1..75: mol_type = other DNA
taatcttggtttgatggcggcggagcgtgctggcgtgttgaaacgtaaggcgctgaaatatgcgttagggttgta

SEQ ID NO: 147942 - DNA, 75 bp, synthetic construct
  source 1..75: mol_type = other DNA
ttcgccagttgcagaatatgaatatggcgcagttacaggtggaaatcgcgaagcatttcccgtcgcgtctgggtt

SEQ ID NO: 147943 - DNA, 75 bp, synthetic construct
  source 1..75: mol_type = other DNA
tcatgaactgcgtcagtgtatgtccgaaagggctgaacccgacgcgtgccatcggccatatcaagtcgatgttgt

SEQ ID NO: 147944 - DNA, 75 bp, synthetic construct
  source 1..75: mol_type = other DNA
ccctggttgctcccggtaagcggtacgaataaccagcgttgcgtgaatcacatttctgaaccagataccgaaatt

SEQ ID NO: 147945 - DNA, 75 bp, synthetic construct
  source 1..75: mol_type = other DNA
actgccgtaaaacatggcagctacagttcacttacaccacctctcagcccggtacacaccagaaaattattgata

SEQ ID NO: 147946 - DNA, 75 bp, synthetic construct
  source 1..75: mol_type = other DNA
ggcacgaacaaccagcgttgtgtgaatcatatttctgaaccggataccgaaattccaccgggcttcagggggtaa

SEQ ID NO: 147947 - DNA, 75 bp, synthetic construct
  source 1..75: mol_type = other DNA
cgaaggaaattctcgttgagcattacgataatatcgagcaaaaaatcgaagatattgaccacgagattgccgatt

SEQ ID NO: 147948 - DNA, 75 bp, synthetic construct
  source 1..75: mol_type = other DNA
gaggcgttacgcaagataccttgcggctaccgggaaaacgggaacggaatttgttcagcgagcgacgacgttttt

SEQ ID NO: 147949 - DNA, 75 bp, synthetic construct
  source 1..75: mol_type = other DNA
aacctgaaaaacggcaatcttgccactgcctctaccgaaaaatgggagcctgcgacctggccgaaagagtgccgt

SEQ ID NO: 147950 - DNA, 75 bp, synthetic construct
  source 1..75: mol_type = other DNA
gtcctcagctacggtgcgttcccggatatcgctaacgactttggcgagaaaagtctgctgatgcctggcggtgcg

SEQ ID NO: 147951 - DNA, 75 bp, synthetic construct
  source 1..75: mol_type = other DNA
tgcggcgtctgcaccggcgtacacgccctggcttcggtttacgccattgaagatgctattggcatcaaagtgccg

SEQ ID NO: 147952 - DNA, 75 bp, synthetic construct
  source 1..75: mol_type = other DNA
gcgaccgttgagtcggtcgatcgcatgatgtcggcgttgaacctgccgctttccggcatccagtcaacgttgggc

SEQ ID NO: 147953 - DNA, 75 bp, synthetic construct
  source 1..75: mol_type = other DNA
ggattataattttatgccagcaattggaatatataacagtgagcaaagacaactgactgataaaggcggatatat

SEQ ID NO: 147954 - DNA, 75 bp, synthetic construct
  source 1..75: mol_type = other DNA
atgatgaaaaccattatgatttataaaaaattcagaaaaagaaaaatatctttatttatttctatgttctttata

SEQ ID NO: 147955 - DNA, 75 bp, synthetic construct
  source 1..75: mol_type = other DNA
tccgccgcaactgatgggggcgatgccgggcgaaaaaagtgcgtttggtgatgtggagaaggccgcgcgggttta

SEQ ID NO: 147956 - DNA, 75 bp, synthetic construct
  source 1..75: mol_type = other DNA
gcagcaaattataatcggtataaatcttacaattacaatgaacagtcgattaacagcctgtatttcagacatgat

SEQ ID NO: 147957 - DNA, 75 bp, synthetic construct
  source 1..75: mol_type = other DNA
tggtcattgtgttatccgttcttattggatcttcttccggatttgccagcaaatacaaccttgttgatattccgg

SEQ ID NO: 147958 - DNA, 75 bp, synthetic construct
  source 1..75: mol_type = other DNA
tgggtattacagatacaagttatgctgtcttaaattggtggatgaattacaataaatctaatggttacagcaaca

SEQ ID NO: 147959 - DNA, 75 bp, synthetic construct
  source 1..75: mol_type = other DNA
tgggtgaaggcagaagacagcccgctgggcggtttacggctggtgatttggttgccgctgtataagcggagttaa

SEQ ID NO: 147960 - DNA, 75 bp, synthetic construct
  source 1..75: mol_type = other DNA
cgcacgccgctgacgcgtctgcaactgggtacggcgttactgcgccgtcgtagcggtgaaagcaaggaactggag

SEQ ID NO: 147961 - DNA, 75 bp, synthetic construct
  source 1..75: mol_type = other DNA
tgcgtgatggcgaagataattaccaactttatctgattcgtccggccagcagttctcaatccgatttcattaact

SEQ ID NO: 147962 - DNA, 75 bp, synthetic construct
  source 1..75: mol_type = other DNA
aaacaacctttccgagagatttggtgatagagttcaatatcaacacattttccctgaaaactacaggcaatctgc

SEQ ID NO: 147963 - DNA, 75 bp, synthetic construct
  source 1..75: mol_type = other DNA
tagctgaatacacgctcaagcgaatgatctatgaaaaagcaaactataaccccaacgctgccatagacgtttcat

SEQ ID NO: 147964 - DNA, 75 bp, synthetic construct
  source 1..75: mol_type = other DNA
tatcttggaaacaaaaaaatcagtaacataactgaactattggaagccgtcaaaaaaccagcattaccaaaccag

SEQ ID NO: 147965 - DNA, 75 bp, synthetic construct
  source 1..75: mol_type = other DNA
tttacccgtaccaaacatggcgctaaccatctggcggaacagctcaataaagatggcatccgcagtgcggcgatc

SEQ ID NO: 147966 - DNA, 75 bp, synthetic construct
  source 1..75: mol_type = other DNA
tgaaaaaacacaatatcgaagctatgaattcactcatattaatggcacagacttaaccgagacagataacttata

SEQ ID NO: 147967 - DNA, 75 bp, synthetic construct
  source 1..75: mol_type = other DNA
taagccttacctgttgaataatggacaaaatccgccagctcgcgagcatttacagatgccagagcagcgcgaaaa

SEQ ID NO: 147968 - DNA, 75 bp, synthetic construct
  source 1..75: mol_type = other DNA
tgaacaggaggtgtcagtgggaaagcgaacagagaaaatacaatatcgtgattttgaattcagagccggtggaat

SEQ ID NO: 147969 - DNA, 75 bp, synthetic construct
  source 1..75: mol_type = other DNA
gatgaacgattagcatctttatataatttatccttacatcaaaataacacacactcaacaactttaacgacaact

SEQ ID NO: 147970 - DNA, 75 bp, synthetic construct
  source 1..75: mol_type = other DNA
gagacaaaaatctggtagcaatgtcagttcttctgaactggcaaaagcgagtattgagctaatcaaccaactcgt

SEQ ID NO: 147971 - DNA, 75 bp, synthetic construct
  source 1..75: mol_type = other DNA
cccgcgcgaggactatgaaacaaactgggaaggacgctttacgcttgccgacctcaacattcacggtaagcgagc

SEQ ID NO: 147972 - DNA, 75 bp, synthetic construct
  source 1..75: mol_type = other DNA
aatcatttcgagatttatggggagaacaggatggatttctcgaagttagattttatggacaatctcttggagttc

SEQ ID NO: 147973 - DNA, 75 bp, synthetic construct
  source 1..75: mol_type = other DNA
atggttagtaaaaattttagcaagctatctatagtattattcttttttctcagctctcctcttggatttgctgat

SEQ ID NO: 147974 - DNA, 75 bp, synthetic construct
  source 1..75: mol_type = other DNA
agccgcatgaccggtctgaatgaatcatcagtaatatcagaggaaacttataatgacagcaaacaaaaagaatca

SEQ ID NO: 147975 - DNA, 75 bp, synthetic construct
  source 1..75: mol_type = other DNA
tttggtgtctgaaatatattacagccgcatgacctgtctgcatgaatcatcagaaataatcagaggaaacttatg

SEQ ID NO: 147976 - DNA, 75 bp, synthetic construct
  source 1..75: mol_type = other DNA
aaactataatgccggctggagtggatgttatgaatcattatctgtatctttgagcattcctgtctatggctgggc

SEQ ID NO: 147977 - DNA, 75 bp, synthetic construct
  source 1..75: mol_type = other DNA
agggcggcctgttccagagacaggacagatactgaagttggatgaaaacgggaaaccaatagttaagcccaaagt

SEQ ID NO: 147978 - DNA, 75 bp, synthetic construct
  source 1..75: mol_type = other DNA
ataactgggctagtcaaaaatctaattttgcaatagtaaggcagttgtcttattccgatgtgttttctgaatatc

SEQ ID NO: 147979 - DNA, 75 bp, synthetic construct
  source 1..75: mol_type = other DNA
gaatggtaccggaatctctgcggggagtgataaaacgggggatgtggcccagaacggcgcgcgcgcgatcggcgg

SEQ ID NO: 147980 - DNA, 75 bp, synthetic construct
  source 1..75: mol_type = other DNA
gacgaccagcttgatccgatgatggatgccatcgatgagatgaaaaatggcaatggtccgttacgtatatctgaa

SEQ ID NO: 147981 - DNA, 75 bp, synthetic construct
  source 1..75: mol_type = other DNA
cggtaatgtgtatcgactgcgcaatcccggtgaaattctgttccctgagcgcatgccgagagagttcgtagagaa

SEQ ID NO: 147982 - DNA, 75 bp, synthetic construct
  source 1..75: mol_type = other DNA
acacacgactgatggacgtacagggttatatcgagtccggttacatcaagttgcccagcagcgcaccattcatca

SEQ ID NO: 147983 - DNA, 75 bp, synthetic construct
  source 1..75: mol_type = other DNA
cgttgtggaaacacaggaacatcaggaggtgggggctttccgtaaggtgaaaccgcttctgacatggtttcgtga

SEQ ID NO: 147984 - DNA, 75 bp, synthetic construct
  source 1..75: mol_type = other DNA
cctgggggcgctggcaccgagaaaatggtgcagagcatgatcaatgcattgcaggccgaagtcggtgagattact

SEQ ID NO: 147985 - DNA, 75 bp, synthetic construct
  source 1..75: mol_type = other DNA
atagcgatacgctggttgctttccagttcttactgaataaaaaagacgttactcacaccgttgctccgatgagtg

SEQ ID NO: 147986 - DNA, 75 bp, synthetic construct
  source 1..75: mol_type = other DNA
tcgcctcggaagcggattctctttatgaagagaatgagcgtttgcaggcggagattgatcagctcaatcgcacag

SEQ ID NO: 147987 - DNA, 75 bp, synthetic construct
  source 1..75: mol_type = other DNA
ggcattgctacttacgataccccgctttctgatcagcaaatgagtgagtacgacctgaagttattgcctcgcgag

SEQ ID NO: 147988 - DNA, 75 bp, synthetic construct
  source 1..75: mol_type = other DNA
cattaggattagaaacactaaaatgcattaagccactgcattcaatgggcggaactggtgaaagaagcggtccag

SEQ ID NO: 147989 - DNA, 75 bp, synthetic construct
  source 1..75: mol_type = other DNA
taagatgaaagcggagctgcgacaacagatcggcgatgtacaacaggtcttcgataaactctctgcaaaaatcga

SEQ ID NO: 147990 - DNA, 75 bp, synthetic construct
  source 1..75: mol_type = other DNA
aaatataaaaagtatttttattgacatgattactgcacaattcgatattactctaaatgaattgtacgcaatgca

SEQ ID NO: 147991 - DNA, 75 bp, synthetic construct
  source 1..75: mol_type = other DNA
gagtcgaaaatcagaatgcatatataaaaatatccaccgaaaatgatgtggacattttaggaggagatatacttt

SEQ ID NO: 147992 - DNA, 75 bp, synthetic construct
  source 1..75: mol_type = other DNA
gagggctgcttatactggattggtatgtcccccttaatattttattgctgattctcgttatgtgtgtctttttca

SEQ ID NO: 147993 - DNA, 75 bp, synthetic construct
  source 1..75: mol_type = other DNA
ttttacatgatcgatctgaaggataaatcggtaaggtcagggaatattatagcttttcatatgccaaaatcagtc

SEQ ID NO: 147994 - DNA, 75 bp, synthetic construct
  source 1..75: mol_type = other DNA
ggccggaagtcccatatagcgacgttgcagcaggtacagtgagtgaagccacgcgcaatgaaattaaacgtcgcg

SEQ ID NO: 147995 - DNA, 75 bp, synthetic construct
  source 1..75: mol_type = other DNA
caatacaatatttataaaaacgctttttaaaaatacctgtttttacaatgtcagagcgaaaaatgtctatcttga

SEQ ID NO: 147996 - DNA, 75 bp, synthetic construct
  source 1..75: mol_type = other DNA
ccaatgacagtaccgagaaacaagccagtgacagtatcgagaaacaagccaatgacagtaccgataaacaagcca

SEQ ID NO: 147997 - DNA, 75 bp, synthetic construct
  source 1..75: mol_type = other DNA
aatattagctgcatgtataccaattttactaacgctaatttaacaaaatgcaaactctttaatacaaacttttcg

SEQ ID NO: 147998 - DNA, 75 bp, synthetic construct
  source 1..75: mol_type = other DNA
agtaccgataaacaagccaagaacagtaccgagcaacaggacagtaccagttttaatgaagcccgtttaaagaaa

SEQ ID NO: 147999 - DNA, 75 bp, synthetic construct
  source 1..75: mol_type = other DNA
aaacaagccaataatagtaccgataaacaatccattgacagtaccgataaacaagtcaatgacagtaccgagaaa

SEQ ID NO: 148000 - DNA, 75 bp, synthetic construct
  source 1..75: mol_type = other DNA
gatacgatttttaaaaatgcctgttttttcaatgccaaagtgaataatgtttctcttaagaatgcatatctttac

SEQ ID NO: 148001 - DNA, 75 bp, synthetic construct
  source 1..75: mol_type = other DNA
cgccgggttgtatgcccagcgtctcgccgagcagggctacatcaccattaccgccgacgcggcttatcagggtgc

SEQ ID NO: 148002 - DNA, 75 bp, synthetic construct
  source 1..75: mol_type = other DNA
tgccgggttatatgcccaacgcctggcagaacacggatatattaccatcgccgccgatgctgcttatcagggggc

SEQ ID NO: 148003 - DNA, 75 bp, synthetic construct
  source 1..75: mol_type = other DNA
cgaacagaaagttattaccacaacgaagaaagctgtaccggtaaaacagacagtcacggctcccgtcataccatc

SEQ ID NO: 148004 - DNA, 75 bp, synthetic construct
  source 1..75: mol_type = other DNA
gcggcagtcatttttcgtgagcgttaaagatctgatggcctctggcacaaaaggtattccggagacacagaaata

SEQ ID NO: 148005 - DNA, 75 bp, synthetic construct
  source 1..75: mol_type = other DNA
cagtaacagcagcacagactattacctcacatggtgaaaaaagactcctgacaggttcagcaaagcggggggcat

SEQ ID NO: 148006 - DNA, 75 bp, synthetic construct
  source 1..75: mol_type = other DNA
ccagaagccaccagccagaaacgggaacaactggaaaccgagcgccagcgacgcgaacaggagcgcctgaaaagg

SEQ ID NO: 148007 - DNA, 75 bp, synthetic construct
  source 1..75: mol_type = other DNA
aaatcactggtggcctttccacaattgatggcattgatgggcgaaaacccgcaatgggtgcaaaacctgggcgat

SEQ ID NO: 148008 - DNA, 75 bp, synthetic construct
  source 1..75: mol_type = other DNA
caacaatttcaaccgtatcaccggtgagcatcttactgataagaatatggcatggcggcacaatccgaactaccg

SEQ ID NO: 148009 - DNA, 75 bp, synthetic construct
  source 1..75: mol_type = other DNA
tgagcagcgccaggcagtccgcgagaaaatgcagactaacccgcataaccagcagcaaagagaggcggcgcgtga

SEQ ID NO: 148010 - DNA, 75 bp, synthetic construct
  source 1..75: mol_type = other DNA
aaaaggacgccgctcgtcagcgttatcagtcggcctctcctgagcagcgccaggcggttcgcgagaaaatgcaga

SEQ ID NO: 148011 - DNA, 75 bp, synthetic construct
  source 1..75: mol_type = other DNA
accgtcgcgcgacagtcagcgtcaggcggcggcaagccagtttcagcaacgaacacacgccgcaccagccattac

SEQ ID NO: 148012 - DNA, 75 bp, synthetic construct
  source 1..75: mol_type = other DNA
ccaggcgttgcgcgagaaaatgcaagaccgcccaataacacagcagcaaagggaagcagcgcgtcagcgtattca

SEQ ID NO: 148013 - DNA, 75 bp, synthetic construct
  source 1..75: mol_type = other DNA
gaaaatatctttcagaatatgatcttactggtattgtctgcatgtataccaacttttcaaacgctaatttaataa

SEQ ID NO: 148014 - DNA, 75 bp, synthetic construct
  source 1..75: mol_type = other DNA
agaaatttatctcgcaaactttacttttgattctatgtataataagacagtagcattatataaatctttagttaa

SEQ ID NO: 148015 - DNA, 75 bp, synthetic construct
  source 1..75: mol_type = other DNA
ataccattggcatgttgatcactgccagtaccaatcctttctattcagaactggtgcgtggcgttgaacgcagct

SEQ ID NO: 148016 - DNA, 75 bp, synthetic construct
  source 1..75: mol_type = other DNA
aggggagtggcgtatcacatcgttccttctcttgtgcgtgaaattaaccctataaaagacttaagggcagttata

SEQ ID NO: 148017 - DNA, 75 bp, synthetic construct
  source 1..75: mol_type = other DNA
ttttaatcaagcccgtttaaagaaagaagtgaatagcagtttttccattccgggtttaacgtcttatcagccaac

SEQ ID NO: 148018 - DNA, 75 bp, synthetic construct
  source 1..75: mol_type = other DNA
aatttcacaggtacaaaaggttcgaatatcctatttgactacgcatggtttgacaatacgatatttatagatacg

SEQ ID NO: 148019 - DNA, 75 bp, synthetic construct
  source 1..75: mol_type = other DNA
atggacgccattcttacaggatatggagaagaagctgggcgtgaaggtgaacgccttctttgcccagactacgca

SEQ ID NO: 148020 - DNA, 75 bp, synthetic construct
  source 1..75: mol_type = other DNA
accaacaacaccgaaaacctcgacaagctgaaaacctccgcgccggagaagctgaaagaactgaaggtgatctgg

SEQ ID NO: 148021 - DNA, 75 bp, synthetic construct
  source 1..75: mol_type = other DNA
acgcattactcagcgccacagcacctgtccttaacgatattaactgttattatcaacttgcaggcgaactgcagt

SEQ ID NO: 148022 - DNA, 75 bp, synthetic construct
  source 1..75: mol_type = other DNA
gtcgtaaaagtcagagtttccagcttcgtttgccagcgcgaatgaaggaggagatcagacgcgtagctgaaatgg

SEQ ID NO: 148023 - DNA, 75 bp, synthetic construct
  source 1..75: mol_type = other DNA
tcgtttgccagcgcgaatgaaggaggagatcagacgcgtagctgaaatggatggaattctatcaactctgcgatt

SEQ ID NO: 148024 - DNA, 75 bp, synthetic construct
  source 1..75: mol_type = other DNA
cgatcaacaacctgaacgatctgctggcgaagcggaaagatctcaccttcggcaatggcgatcctaactccacct

SEQ ID NO: 148025 - DNA, 75 bp, synthetic construct
  source 1..75: mol_type = other DNA
catctatagttgcatgtcggaaaattcctcaggtgctgggatacgaaacaccaagtacgtggctgaactttgtgc

SEQ ID NO: 148026 - DNA, 75 bp, synthetic construct
  source 1..75: mol_type = other DNA
ggaacgcgcccgggggtttaccccataagcgctaacttaagggttgaaccatctgaagaatgcgacgcctcggtg

SEQ ID NO: 148027 - DNA, 75 bp, synthetic construct
  source 1..75: mol_type = other DNA
ctctgactctgagcgccgaactcaggcaatcttttacggttaccctcaaagtgggtatcccttattcgtccacct

SEQ ID NO: 148028 - DNA, 75 bp, synthetic construct
  source 1..75: mol_type = other DNA
caaataccggaaagaggtcttaaacagcccggaatttgaagcgttatggcagcgcattagtcaaaaaacattgta

SEQ ID NO: 148029 - DNA, 75 bp, synthetic construct
  source 1..75: mol_type = other DNA
agatattcttggtgttctacaggaaaaaaccggactgacaagacgcagtttaagcaccatcctgaaagagagtgg

SEQ ID NO: 148030 - DNA, 75 bp, synthetic construct
  source 1..75: mol_type = other DNA
ctcaaagatcagatgaataatcctgcgagatatatgcgctctacaaacataaatgatgtattaagcagtatataa

SEQ ID NO: 148031 - DNA, 75 bp, synthetic construct
  source 1..75: mol_type = other DNA
atggataagaagcaagtaacggatttaaggtcggaactactcgattcacgttttggcgccaagtcgatttccact

SEQ ID NO: 148032 - DNA, 75 bp, synthetic construct
  source 1..75: mol_type = other DNA
atggataagaagcaagtaacggatttaaggtcggaactactcgattcacgttttggcgcaaagtccatttcaact

SEQ ID NO: 148033 - DNA, 75 bp, synthetic construct
  source 1..75: mol_type = other DNA
ccaacggataaacctaatctggtgtgcggcccggtacaaatctgctggcataaattcgcccgttactgggatgtg

SEQ ID NO: 148034 - DNA, 75 bp, synthetic construct
  source 1..75: mol_type = other DNA
acttacctggcggatgaaatcgctaaactggggccatatgagttcatctgcaccggtcgcccggacgaaggtatc

SEQ ID NO: 148035 - DNA, 75 bp, synthetic construct
  source 1..75: mol_type = other DNA
ggatggcaatgaaatggcgttggcgcaaacgtatggaagccgcaggtaaaccgaccgataaacccaacctcgtgt

SEQ ID NO: 148036 - DNA, 75 bp, synthetic construct
  source 1..75: mol_type = other DNA
atggataagaagcaagtaacggatttaaggtcggaactactcgattcacgttttggcgcgaagtctatttctact

SEQ ID NO: 148037 - DNA, 75 bp, synthetic construct
  source 1..75: mol_type = other DNA
gatgcctgccgctgctttcgttatcctttactccggtgtgctcctgtttattctgtatttttgtttttctgccct

SEQ ID NO: 148038 - DNA, 75 bp, synthetic construct
  source 1..75: mol_type = other DNA
catcagagaggcagaacttccgccggcaaaggccagaaagctgctggttcgcattgcgaaatacggcctgatacc

SEQ ID NO: 148039 - DNA, 75 bp, synthetic construct
  source 1..75: mol_type = other DNA
agcaaaaaatcaggacagttgagcgttcaccggagttactggctcagtaccgcaaggttatgaaaacggtcattc

SEQ ID NO: 148040 - DNA, 75 bp, synthetic construct
  source 1..75: mol_type = other DNA
gacacgaaagtgaaatataccccactcacagcaaaagaacgcttcaccgctttacagtcaggggaagtggatttg

SEQ ID NO: 148041 - DNA, 75 bp, synthetic construct
  source 1..75: mol_type = other DNA
cgttgccgctgctgtattcggtgacgatacgaaagtgaaatataccccgctcactgcaaaagaacgcttcaccgc

SEQ ID NO: 148042 - DNA, 75 bp, synthetic construct
  source 1..75: mol_type = other DNA
cccgcgcatttctgggagccagcgatactgaatttgcccgcattctggaagcgcagctgcgcagcctgcattacg

SEQ ID NO: 148043 - DNA, 75 bp, synthetic construct
  source 1..75: mol_type = other DNA
taccaggagcgccgtccgtttaacttcatcgcccttgatgatctcaccagtgagcgtgtgttccttcagaacgaa

SEQ ID NO: 148044 - DNA, 75 bp, synthetic construct
  source 1..75: mol_type = other DNA
gcgaagatagcctgtggaactgcgcattttagtgctttaaaagcagaaaaaatcaatgcggcaaaatatgttcga

SEQ ID NO: 148045 - DNA, 75 bp, synthetic construct
  source 1..75: mol_type = other DNA
ctgtgctggccccagctcagggtgcactctcatttgaaggcgcaacaggttcaatgcctgtaaacccacagatac

SEQ ID NO: 148046 - DNA, 75 bp, synthetic construct
  source 1..75: mol_type = other DNA
catatcatgttttgcgagcggattaatgatggtattgaacgcgatccgcagcagttttttaaacgtgccaacagc

SEQ ID NO: 148047 - DNA, 75 bp, synthetic construct
  source 1..75: mol_type = other DNA
aaaaagccaatgagttgctgcggggcatgaagggcaccaacggtgagccgctgggcatccgcccgaccacccttg

SEQ ID NO: 148048 - DNA, 75 bp, synthetic construct
  source 1..75: mol_type = other DNA
ttcacgcgctgaccacctgtctgagcgccgcttatacccgtggtctgagtggtgtcaccccacaatggcagcgca

SEQ ID NO: 148049 - DNA, 75 bp, synthetic construct
  source 1..75: mol_type = other DNA
gtttccgctgacgcgccgacatgcgttgcagtatgtgcagccggggcttgcgctggtgggcgatgccgcgcatac

SEQ ID NO: 148050 - DNA, 75 bp, synthetic construct
  source 1..75: mol_type = other DNA
gcttttgttgcctataacgaaactcgtcgtttcagtaagacaccagaaaactttggtaagggtgaaattaaagct

SEQ ID NO: 148051 - DNA, 75 bp, synthetic construct
  source 1..75: mol_type = other DNA
acagcctgtttgatgttggcattatgctgattgcaggcgtggtgggctatttcatgcaaaaaggggggtatccgg

SEQ ID NO: 148052 - DNA, 75 bp, synthetic construct
  source 1..75: mol_type = other DNA
cggaggagtatggcccagccttcccagcaatcgtcgattgttataccagtccacccacgttagtgtggccagttc

SEQ ID NO: 148053 - DNA, 75 bp, synthetic construct
  source 1..75: mol_type = other DNA
tgcccgcagctacggcgaagcgtgggccagttatcctgtcctcaagcgttaccagatgcggcgcatggcggataa

SEQ ID NO: 148054 - DNA, 75 bp, synthetic construct
  source 1..75: mol_type = other DNA
aaggggggcgaagtgatccaggcgaagctggtgattggcgctgacggtgcaaattcgcaggtgcggcaaatggcg

SEQ ID NO: 148055 - DNA, 75 bp, synthetic construct
  source 1..75: mol_type = other DNA
aacagcgtaaagccatatcggccattgctcagcatttcggtgtgatgttcttttaccgcggccgggagccaattg

SEQ ID NO: 148056 - DNA, 75 bp, synthetic construct
  source 1..75: mol_type = other DNA
tggattataacctgcagtacagccattacaacggcacggtacggaaccagctggcggcagaccaggcgcagcagc

SEQ ID NO: 148057 - DNA, 75 bp, synthetic construct
  source 1..75: mol_type = other DNA
tcatcttagcgttggtgatcattgctgcgtgggtgctgatgttaaaaggaattcgggcaagaccgtgggggcagc

SEQ ID NO: 148058 - DNA, 75 bp, synthetic construct
  source 1..75: mol_type = other DNA
ggttctatcaccgcaattttgctcaaaattcccggaacacccgctgcagctgccaccgccattgacggttatgag

SEQ ID NO: 148059 - DNA, 75 bp, synthetic construct
  source 1..75: mol_type = other DNA
tacggctttatttcgcaggacgacctggcaaaacagttcctgaacgtttctgaagattttaaacccaatttttaa

SEQ ID NO: 148060 - DNA, 75 bp, synthetic construct
  source 1..75: mol_type = other DNA
cagtgttcgcccgttatcatacggctttatttcgcaggatgacctggcaaaacagttcctgaacgtttctgaaga

SEQ ID NO: 148061 - DNA, 75 bp, synthetic construct
  source 1..75: mol_type = other DNA
ggtcagaactactcgattcacgttttggtgcaaaggccatttcgactatcgcagaatcaaaacgctttccgctgc

SEQ ID NO: 148062 - DNA, 75 bp, synthetic construct
  source 1..75: mol_type = other DNA
gctcggaactactcgattcacgttttggtgcgaaggccatttcgactatcgcagaatcaaaacgctttccgctgc

SEQ ID NO: 148063 - DNA, 75 bp, synthetic construct
  source 1..75: mol_type = other DNA
gttccgaactactcgattcacgttttggtgctaaggccatttcgactatcgcagaatcaaaacgctttccgctgc

SEQ ID NO: 148064 - DNA, 75 bp, synthetic construct
  source 1..75: mol_type = other DNA
tccgctcagaactactcgattcacgttttggtgccaagccgatttctactatcgctgactcaaaacgatttccgc

SEQ ID NO: 148065 - DNA, 75 bp, synthetic construct
  source 1..75: mol_type = other DNA
tccgctcagaactactcgattcacgttttggtgccaagtcgatttccactatcgctgactcaaaacgatttccgc

SEQ ID NO: 148066 - DNA, 75 bp, synthetic construct
  source 1..75: mol_type = other DNA
gaactactcgattcacgttttggtgcgaagtctatttccactatcgcagaatcaaaacgttttccgctgcacgaa

SEQ ID NO: 148067 - DNA, 75 bp, synthetic construct
  source 1..75: mol_type = other DNA
acctggccactttctgccagacctgggacgacgagaatgtccataaattgatggatttatcgataaaaaaaaact

SEQ ID NO: 148068 - DNA, 75 bp, synthetic construct
  source 1..75: mol_type = other DNA
acctggccactttctgccagacctgggacgacgagaaagtccataaattgatggatttgtcgattaaaaaaaact

SEQ ID NO: 148069 - DNA, 75 bp, synthetic construct
  source 1..75: mol_type = other DNA
cataaattgatggatctgtcgattaataagaactggatcgataaagaagaatatccacaatctgccgccattgat

SEQ ID NO: 148070 - DNA, 75 bp, synthetic construct
  source 1..75: mol_type = other DNA
acctggccactttctgccagacctgggacgacgagaaggtccataaattgatggatttatcgattaaaaaaaact

SEQ ID NO: 148071 - DNA, 75 bp, synthetic construct
  source 1..75: mol_type = other DNA
acctggccactttctgccagacctgggacgacgagaatgtccataaattgatggatttgtcgatgaaaaaaaact

SEQ ID NO: 148072 - DNA, 75 bp, synthetic construct
  source 1..75: mol_type = other DNA
acctggccactttctgccagacctgggacgacgagaatgtccataaattgatggatttctcgatcaaaaaaaact

SEQ ID NO: 148073 - DNA, 75 bp, synthetic construct
  source 1..75: mol_type = other DNA
tttggtggttaccaggttaacccgtatgttggctttgaaatgggttacgactggttaggtcgtatgccgtacaaa

SEQ ID NO: 148074 - DNA, 75 bp, synthetic construct
  source 1..75: mol_type = other DNA
cgactgaagcgcagattaaaaataaacgccgtatctcacctttctggctgctgccattcatcgcgctaatgattg

SEQ ID NO: 148075 - DNA, 75 bp, synthetic construct
  source 1..75: mol_type = other DNA
gaaagttacggtattgatgctggtcagccgctcattcttcacggcgtgcaggtaggccaggttatcgatcgtaaa

SEQ ID NO: 148076 - DNA, 75 bp, synthetic construct
  source 1..75: mol_type = other DNA
actgaagctacaccgtgaacacatctcaaacaatattgaaaagctggtacagctatcacttgaaattgaagactt

SEQ ID NO: 148077 - DNA, 75 bp, synthetic construct
  source 1..75: mol_type = other DNA
atcgactttatgtcagcggacggtattgtcccaggccgcacgcctgttcgttatcagggggttgaggttggaaca

SEQ ID NO: 148078 - DNA, 75 bp, synthetic construct
  source 1..75: mol_type = other DNA
gaaggcggggcgaaagttcagctgaatggtagtggtctgaccgtacaggcatccccgctctccagagcattaaag

SEQ ID NO: 148079 - DNA, 75 bp, synthetic construct
  source 1..75: mol_type = other DNA
accgttgatcccagcgtcgttacgctgttacgggaaaatacccgcatcgaattacgtaatccgaaattatccctt

SEQ ID NO: 148080 - DNA, 75 bp, synthetic construct
  source 1..75: mol_type = other DNA
tttcgaagatgacgattgcaaagatggcaggacaaattatcagttcttatttcgagtctgaggaaaataaaactt

SEQ ID NO: 148081 - DNA, 75 bp, synthetic construct
  source 1..75: mol_type = other DNA
catgcaatattatttaaaaaaaatactgcaatgcccttgtgtgaacggattttattttttaacacatcaccatag

SEQ ID NO: 148082 - DNA, 75 bp, synthetic construct
  source 1..75: mol_type = other DNA
atggtagggcttctgtatcaagtaatccgctatcagtcaacttgttcaggggtatcatcaaatgtgaggtgtact

SEQ ID NO: 148083 - DNA, 75 bp, synthetic construct
  source 1..75: mol_type = other DNA
cgtatacaggctgcatgggatgccaagaaagaagctgctaaagctggtatcaaagtttctaaacgttgtcctgca

SEQ ID NO: 148084 - DNA, 75 bp, synthetic construct
  source 1..75: mol_type = other DNA
gagtgtgaatctctttaaaggtgttatccgttgttctgaatgtggtcatgctctgattatcacaggctttagcga

SEQ ID NO: 148085 - DNA, 75 bp, synthetic construct
  source 1..75: mol_type = other DNA
aggcgactcactccgcagacaatctaagatggtcactgattggcttaaggctcatcctgagtactaccttgacca

SEQ ID NO: 148086 - DNA, 75 bp, synthetic construct
  source 1..75: mol_type = other DNA
gaaagtcgcaatgtctggttatgtctgaggtgacggatggtggtttcaaaggtctgaaggatacaatctcggacc

SEQ ID NO: 148087 - DNA, 75 bp, synthetic construct
  source 1..75: mol_type = other DNA
caaaaaagttacttttatcgttagccgtttgcacggcgatgattgcgccaaatgccgttgccgataacgccatgc

SEQ ID NO: 148088 - DNA, 75 bp, synthetic construct
  source 1..75: mol_type = other DNA
aggaggcgaaggagaaaatccttgttgcggtggggaatatttccggtattgccagtgtcgatgatcaggtgaaaa

SEQ ID NO: 148089 - DNA, 75 bp, synthetic construct
  source 1..75: mol_type = other DNA
gtattgctgccgggtttgccggtaatgaagtgatgttttcggaagcgtatctgccgtatgcatggccggaagtga

SEQ ID NO: 148090 - DNA, 75 bp, synthetic construct
  source 1..75: mol_type = other DNA
tacctgctgcaaccgggcaaaactggcaggtactggtttccggttttggtcaggttgaacgtatcacactcagta

SEQ ID NO: 148091 - DNA, 75 bp, synthetic construct
  source 1..75: mol_type = other DNA
cactgaggaaaaaacggtcctggcttactgggatatggcatacgttaaaaaacggacctatggcgatagcgggaa

SEQ ID NO: 148092 - DNA, 75 bp, synthetic construct
  source 1..75: mol_type = other DNA
ctcaccgacaaaggcgtcacctttatcgttgccattgaaccacagcatcgcgaactggtaaaaggcgatagcaaa

SEQ ID NO: 148093 - DNA, 75 bp, synthetic construct
  source 1..75: mol_type = other DNA
aggcggcaaagtcaccggagaaatgaccgttgatcccagcgtcgtaacgctgttacgggaaaatacccgcatcga

SEQ ID NO: 148094 - DNA, 75 bp, synthetic construct
  source 1..75: mol_type = other DNA
caaaacctgcggcgccagatgatacttttggtttgtataaagatttagcccacagtcaacgtggcgtaattatta

SEQ ID NO: 148095 - DNA, 75 bp, synthetic construct
  source 1..75: mol_type = other DNA
tacaagagaccaccattaccgattctcgttacctcgatggcttaagtattattgtcgaagcgccggaggccggtt

SEQ ID NO: 148096 - DNA, 75 bp, synthetic construct
  source 1..75: mol_type = other DNA
gttgctggaagcatggaaaaagtatcgggtattgctgaaccgtgttgatacgtcaactgcacaggatattgaatg

SEQ ID NO: 148097 - DNA, 75 bp, synthetic construct
  source 1..75: mol_type = other DNA
cgatcgatatggccgtgccgtcgcgtaccatatctgtgaggatgattttccgttctctggtagtggacgatggga

SEQ ID NO: 148098 - DNA, 75 bp, synthetic construct
  source 1..75: mol_type = other DNA
gcgttacctagggatatctcgcgaggacgccagggcgctggcgcgtgacgttgaggtcgcgtggactgaatacgc

SEQ ID NO: 148099 - DNA, 75 bp, synthetic construct
  source 1..75: mol_type = other DNA
ttttatcgcggtaacgcgcgagcagacgatctcgttcgcaataacggtgtcgcgtcgaacgccgtgcagctgcac

SEQ ID NO: 148100 - DNA, 75 bp, synthetic construct
  source 1..75: mol_type = other DNA
cgtgaagtgctgcgtctggcgacctcgataaagcagggaacagtgacggcatccctgatgcttaaaaagcttgcc

SEQ ID NO: 148101 - DNA, 75 bp, synthetic construct
  source 1..75: mol_type = other DNA
gttacgtaattgtgttagcgacagcgtttatcaaatcattgaaagcgatatccataaagactggaatcttagtat

SEQ ID NO: 148102 - DNA, 75 bp, synthetic construct
  source 1..75: mol_type = other DNA
ctgataaaatatctttgcatgaacataaaatcgtcagttcgattgaaaataacggaatcaatcttacaaacttaa

SEQ ID NO: 148103 - DNA, 75 bp, synthetic construct
  source 1..75: mol_type = other DNA
ataaattccgtaataatctgaacaagaaatatagcatacaagatcgcatggccatttctaaagccctggaagcta

SEQ ID NO: 148104 - DNA, 75 bp, synthetic construct
  source 1..75: mol_type = other DNA
acgctgggtgccacactggttgtttgtttcagtatcggcctggcattgaccctcgtaacggttggagtgggtgcg

SEQ ID NO: 148105 - DNA, 75 bp, synthetic construct
  source 1..75: mol_type = other DNA
tacactcgggtttaccagcaatttgatggtgcgagctggatagatatcgaagaggctgaatatgcaacatgcaaa

SEQ ID NO: 148106 - DNA, 75 bp, synthetic construct
  source 1..75: mol_type = other DNA
aggtaaacgccttactgaacgacgcaaaacaaaaagctgctaaccctggaacgaatgaaaatgaacgtgctatgg

SEQ ID NO: 148107 - DNA, 75 bp, synthetic construct
  source 1..75: mol_type = other DNA
atcagggtaaaaaagatgcgtttaaatatcacaaagagttaatttcaaaattaatttcaaatagacagcccggtc

SEQ ID NO: 148108 - DNA, 75 bp, synthetic construct
  source 1..75: mol_type = other DNA
cggataacgcccaactggaacttaaatataaaaaaggcaaaacaccactcagccatcgcaattggccaggcgaac

SEQ ID NO: 148109 - DNA, 75 bp, synthetic construct
  source 1..75: mol_type = other DNA
atgacccgtaatcgtgctgaacgtcgccaccctatgatgcgattaaaaaaactcatcgtcgcgctgatgattgac

SEQ ID NO: 148110 - DNA, 75 bp, synthetic construct
  source 1..75: mol_type = other DNA
tccggcagggccgcagggggcagcaggcaggaatggtaatgtatccacagaaaaatatgcggttggctctttctt

SEQ ID NO: 148111 - DNA, 75 bp, synthetic construct
  source 1..75: mol_type = other DNA
gcagaagaggcagcaacccgggcagcagtccccggaccgaagggggacaggggggaacctggcgcacctggtgca

SEQ ID NO: 148112 - DNA, 75 bp, synthetic construct
  source 1..75: mol_type = other DNA
gaaacaggtccacagggaccgaagggcgataaaggtgacccgggcggaccgccggggccgaaaggtgacaccggc

SEQ ID NO: 148113 - DNA, 75 bp, synthetic construct
  source 1..75: mol_type = other DNA
tgacccacaccagtgactacaaagctttccagaacaaaactgtggtggagattctggatgaagtcttggctgaat

SEQ ID NO: 148114 - DNA, 75 bp, synthetic construct
  source 1..75: mol_type = other DNA
ctgctttcagtctgggtgctcccggatacgatgagcagaccatgacaacaaacttaacgttatttcaacgcattg

SEQ ID NO: 148115 - DNA, 75 bp, synthetic construct
  source 1..75: mol_type = other DNA
tcacgtattcgcccacgttctcgattgttcataatgccggaaacagtatcccggggacatggcgggcttttgtgt

SEQ ID NO: 148116 - DNA, 75 bp, synthetic construct
  source 1..75: mol_type = other DNA
agatgtgcgtaatgaaaaactcaaagcatgtcgcctcgcgaagaaatcattcctcaattctttccttgatggtgt

SEQ ID NO: 148117 - DNA, 75 bp, synthetic construct
  source 1..75: mol_type = other DNA
tggagcaaagcctatttttgcggatgtcgacgttgagaatggtaatatattagttagttctatagaggaaaaaat

SEQ ID NO: 148118 - DNA, 75 bp, synthetic construct
  source 1..75: mol_type = other DNA
agtggaaagaacatctcttgacctagatgttctgggatttaaatataatatgaataatgttactggtgttatagg

SEQ ID NO: 148119 - DNA, 75 bp, synthetic construct
  source 1..75: mol_type = other DNA
ggtaagaaagttaactcactgactgatgatcgggtactgaaagaagttatgagactgggggcgttacagaaaaaa

SEQ ID NO: 148120 - DNA, 75 bp, synthetic construct
  source 1..75: mol_type = other DNA
gggggcgttgcagaaaaaactctttatcgacggcaagcgtgtcggggacagagagtatgcggaggtgctgatcgc

SEQ ID NO: 148121 - DNA, 75 bp, synthetic construct
  source 1..75: mol_type = other DNA
aagatctggcatcagtcagggaaaaatcaataaaaaaatcggctgcgggaaaagcatctgttcaggccaggagaa

SEQ ID NO: 148122 - DNA, 75 bp, synthetic construct
  source 1..75: mol_type = other DNA
tttgagcacagcgagaacagccatatgctggtgctggcggatgccatcaatggtcataaagcgtgccctgactcg

SEQ ID NO: 148123 - DNA, 75 bp, synthetic construct
  source 1..75: mol_type = other DNA
gggcatggcgtcgcagagcgggatatttagccattcgttacagggggggccgaccaacggaaacatgctgcgctt

SEQ ID NO: 148124 - DNA, 75 bp, synthetic construct
  source 1..75: mol_type = other DNA
atgcgcagcacagcggccaggatcagcattttacctatgtcaccacgtttgaactgcaccccaccagcgaagttt

SEQ ID NO: 148125 - DNA, 75 bp, synthetic construct
  source 1..75: mol_type = other DNA
accccacaccaaaggcccgcagagcgccatcgtcaccggccctgcggggcaggaaatctggacagataaatatgg

SEQ ID NO: 148126 - DNA, 75 bp, synthetic construct
  source 1..75: mol_type = other DNA
cctgctgccaacctcccacttaaaccaatggtcggcaaagacctgtgcgtcaatatcgaactggacggtggcggc

SEQ ID NO: 148127 - DNA, 75 bp, synthetic construct
  source 1..75: mol_type = other DNA
gcggcggacctgtttggtgcgttgccggaaccgtcaggtctggttaaagccgcagtaactgctgcgcaggctgcc

SEQ ID NO: 148128 - DNA, 75 bp, synthetic construct
  source 1..75: mol_type = other DNA
aatgcagcgcttgtattacacaaggatggctcgattgagttttgcggaaaacaacttttactgcacaccagcgat

SEQ ID NO: 148129 - DNA, 75 bp, synthetic construct
  source 1..75: mol_type = other DNA
attcctttccggtggaaaagcggctggtggaaaattatccgcctcgagcctggcaggtgcagtacggtgaaacgg

SEQ ID NO: 148130 - DNA, 75 bp, synthetic construct
  source 1..75: mol_type = other DNA
tcagcgggctggtgacagcggcgcgggtggtgggccatgagggccgctcggtaacgtatgaattacgccttgagc

SEQ ID NO: 148131 - DNA, 75 bp, synthetic construct
  source 1..75: mol_type = other DNA
atcagtggcctggtaacggcggcgcgggtagtgggtcatgagggccgttcggtaacgtatgagttacgtattgag

SEQ ID NO: 148132 - DNA, 75 bp, synthetic construct
  source 1..75: mol_type = other DNA
acagttcctgctggatccgcgtcagctatccgtgggcgggtaaaggattcggcatgatccagatcccgcgtattg

SEQ ID NO: 148133 - DNA, 75 bp, synthetic construct
  source 1..75: mol_type = other DNA
acaaaaaccattgtcaaaaatgagaccatcagcgtgggagaagaccgtaatgccaccatcacaaaaaatgatggt

SEQ ID NO: 148134 - DNA, 75 bp, synthetic construct
  source 1..75: mol_type = other DNA
tgtggctatctgtccgctcggaacatcactggtggtggcgacaaagggtgagccttatttgttcagtggggtctc

SEQ ID NO: 148135 - DNA, 75 bp, synthetic construct
  source 1..75: mol_type = other DNA
agtgaattatataaagcgatgtatgaacgcgattttgccggtcaccgatttgccggtggaatgctcgacacctag

SEQ ID NO: 148136 - DNA, 75 bp, synthetic construct
  source 1..75: mol_type = other DNA
caggtcaataatgccggtgcggaagctcatcagacacaggcaagaaagcttcgcggcctgtattcctccaggtaa

SEQ ID NO: 148137 - DNA, 75 bp, synthetic construct
  source 1..75: mol_type = other DNA
agtttgccgttatcttgttcgaagataaaacgggcggcgcgtggtgtaagaaagtaactggtgcagaagcgcgat

SEQ ID NO: 148138 - DNA, 75 bp, synthetic construct
  source 1..75: mol_type = other DNA
ggtggaagattgccgtcattaatacgatggcattcgaaagtcttttcccttccggaaagaacctcgttttcctgt

SEQ ID NO: 148139 - DNA, 75 bp, synthetic construct
  source 1..75: mol_type = other DNA
tgtttgtctttaacccggcaggtatggatatccggcacctgagcacaccttttgactgcgcatgtgttgatctgg

SEQ ID NO: 148140 - DNA, 75 bp, synthetic construct
  source 1..75: mol_type = other DNA
tgctaaaactaaccggtgatgttttgaatgacgatccgcgcgatctgcaactactgcccattgccggacgcctga

SEQ ID NO: 148141 - DNA, 75 bp, synthetic construct
  source 1..75: mol_type = other DNA
gtggcaatttttggtacaaagcaagcgggtgtttattattcaacacctttatcaacagtaaatatattcggtagt

SEQ ID NO: 148142 - DNA, 75 bp, synthetic construct
  source 1..75: mol_type = other DNA
gcaggtgatggtatccggattcgggcaggtggaacgaataaccctgagtacatcaatgtcggagatgccggtatg

SEQ ID NO: 148143 - DNA, 75 bp, synthetic construct
  source 1..75: mol_type = other DNA
tgaaaaacaaacttgagggtaaaaataatagtcttcttgttgattatgttgcgaatgatggaaaacataataccc

SEQ ID NO: 148144 - DNA, 75 bp, synthetic construct
  source 1..75: mol_type = other DNA
tccgttttggtctggagtttgaaaaatccgcgtttggtaagtacaacgttgataatgctgtcaacgccaacttcc

SEQ ID NO: 148145 - DNA, 75 bp, synthetic construct
  source 1..75: mol_type = other DNA
ttctccggtaaggactggaaagtgacggcacgtgccggccttggctaccagtttgacctgcttacaaacggagaa

SEQ ID NO: 148146 - DNA, 75 bp, synthetic construct
  source 1..75: mol_type = other DNA
cgctgatgttggcgatatttcacagattattgatggcgcacgttatgacttccagctagatagtcaaacactgcg

SEQ ID NO: 148147 - DNA, 75 bp, synthetic construct
  source 1..75: mol_type = other DNA
atttaggcgcatggcggctacgaaataatacagtttacaatgaatccaattgggaatcgattagcaccagtttgc

SEQ ID NO: 148148 - DNA, 75 bp, synthetic construct
  source 1..75: mol_type = other DNA
caaaccctgggcagcaccctgaataaactggcgtcggtgatgacgctcactcgcgctactgccgacattcctgtt

SEQ ID NO: 148149 - DNA, 75 bp, synthetic construct
  source 1..75: mol_type = other DNA
accagcaatgtacaggagttatcactgtaccagaaaaatacaccacgggtatctataaagccacaatggattgtc

SEQ ID NO: 148150 - DNA, 75 bp, synthetic construct
  source 1..75: mol_type = other DNA
gaatggtgaactttttgatagtgtgcaaatgacaggtataaaacttgaaactgataccagtatgttgcctgagag

SEQ ID NO: 148151 - DNA, 75 bp, synthetic construct
  source 1..75: mol_type = other DNA
aacactcaatattcctctctctcgctggctgccagattcatgggcgatgtataacgtaaaccgttccgataaaag

SEQ ID NO: 148152 - DNA, 75 bp, synthetic construct
  source 1..75: mol_type = other DNA
ctagaggttttatcgaagcatttaaagaatgggttgaaggatgtcaaagagttacaaacaaaataccattgatac

SEQ ID NO: 148153 - DNA, 75 bp, synthetic construct
  source 1..75: mol_type = other DNA
gttaaatgatggcgaattgccagccgtgccaattaagccagtacatatttacggacggagtaacgacaatgaaaa

SEQ ID NO: 148154 - DNA, 75 bp, synthetic construct
  source 1..75: mol_type = other DNA
atggataagatggaaataaacgatcagtttgccgttattttgttcgaagataaaacaggcggcgcatggtgtaag

SEQ ID NO: 148155 - DNA, 75 bp, synthetic construct
  source 1..75: mol_type = other DNA
gcgtggtttgcccagcacaacgccgcgctggtagtcatgcgcccggaccgcttcgtggccgccatcgccattccg

SEQ ID NO: 148156 - DNA, 75 bp, synthetic construct
  source 1..75: mol_type = other DNA
tgaaactgaaacaccgactatatcgtctgcttatcaggcatgggcagagactcttttgtatggctttgataccgc

SEQ ID NO: 148157 - DNA, 75 bp, synthetic construct
  source 1..75: mol_type = other DNA
ctttgacgaaggccatgaatataacataaacggtcagggatttacatttaaaggagcaggaattgatatcggaaa

SEQ ID NO: 148158 - DNA, 75 bp, synthetic construct
  source 1..75: mol_type = other DNA
acgccttattcaacgaacgaatttttccagctgctgcttatccgcaactggcagcagtggcaggagcagaaggca

SEQ ID NO: 148159 - DNA, 75 bp, synthetic construct
  source 1..75: mol_type = other DNA
gtcgcgaaagctggtgcaaaacttctcggtgatgtggctgatcgtacgatgtctgcacgcgaaaaagtccgcgtt

SEQ ID NO: 148160 - DNA, 75 bp, synthetic construct
  source 1..75: mol_type = other DNA
gacagggccgacttttcggcctttatggagagaagtggctattatgatgacgagtcgatgcaggatgatattctt

SEQ ID NO: 148161 - DNA, 75 bp, synthetic construct
  source 1..75: mol_type = other DNA
gattacgatgctctgctcacgctgatacggggttttctgacgaccttaactgcggagaaagtcaacgcgtttagc

SEQ ID NO: 148162 - DNA, 75 bp, synthetic construct
  source 1..75: mol_type = other DNA
ttgtttgtgtagaaacggcttacgcttcagaaacgcaaaaagtgaccaaagaaaaacctgcacatctggcgcaat

SEQ ID NO: 148163 - DNA, 75 bp, synthetic construct
  source 1..75: mol_type = other DNA
atggcgtcgcgcgcggtgcctggcagctggatgaagaaagttccgctgtagtggtgctggataaggatacgtcac

SEQ ID NO: 148164 - DNA, 75 bp, synthetic construct
  source 1..75: mol_type = other DNA
gtctgcgtcgtaacgtgggcgaagccattgctgacttcaatatgattgaagaaggcgatcgcatcatggtttgcc

SEQ ID NO: 148165 - DNA, 75 bp, synthetic construct
  source 1..75: mol_type = other DNA
ctggcaaaaatgcttttcggttacgggctgctgcaactgctgtttatgctgcgtttgatgccgtggtatctctcg

SEQ ID NO: 148166 - DNA, 75 bp, synthetic construct
  source 1..75: mol_type = other DNA
tcgatgcaggatgatattcttattgacgtgataggtaacgtgtacaaagaaaccggagaactgactgaagatggc

SEQ ID NO: 148167 - DNA, 75 bp, synthetic construct
  source 1..75: mol_type = other DNA
gacagggccgacttttcggcctttatggacaggaatggctattatgatgacgagtcgatgcaggatgatattctt

SEQ ID NO: 148168 - DNA, 75 bp, synthetic construct
  source 1..75: mol_type = other DNA
gacagggccgacttttcggcctttatggatagcattggctattatgatgacgagtcgatgcaggatgatattctt

SEQ ID NO: 148169 - DNA, 75 bp, synthetic construct
  source 1..75: mol_type = other DNA
gacagggccgacttttcggcctttatggaaaggactggctattatgatgacgagtcgatgcaggatgatattctt

SEQ ID NO: 148170 - DNA, 75 bp, synthetic construct
  source 1..75: mol_type = other DNA
aatgtcacctacttcactagaacaacatgctgaaaaacaaaccgaagatggattttgcgataaagttcactcctc

SEQ ID NO: 148171 - DNA, 75 bp, synthetic construct
  source 1..75: mol_type = other DNA
atggcaagtggcttctgagtattgatgaaaaatttagtataagaaatgtatcgcgtatacctaataactcagtta

SEQ ID NO: 148172 - DNA, 75 bp, synthetic construct
  source 1..75: mol_type = other DNA
taattaccactcttgaacaagccgtagcattaattgagtctctaccaaccccaatgggtgacgtggaaaaatcga

SEQ ID NO: 148173 - DNA, 75 bp, synthetic construct
  source 1..75: mol_type = other DNA
tagaagggaaagtgagcattcgaaccctaactagaattcctgtaggaagattaaaaatttcagacaatgatttat

SEQ ID NO: 148174 - DNA, 75 bp, synthetic construct
  source 1..75: mol_type = other DNA
catgcgagacatttttccggcagactggatcatccaatgctgtttagaaacaggagtgtctctcgagtggttatc

SEQ ID NO: 148175 - DNA, 75 bp, synthetic construct
  source 1..75: mol_type = other DNA
gcaggtgtggcgctgttcggcgcaaattacctgttcgatggtcatgtcatcggcatgtttattttcccgtcgatt

SEQ ID NO: 148176 - DNA, 75 bp, synthetic construct
  source 1..75: mol_type = other DNA
atttttattaataatacttttggtgtgaataagtcattttttactaagcctaagcttgttaaagataaatgtttg

SEQ ID NO: 148177 - DNA, 75 bp, synthetic construct
  source 1..75: mol_type = other DNA
acacgggcaccacgatgcaggcggaaccaaaatcttcggattttggatctacctgatgagcgactgcattctgtt

SEQ ID NO: 148178 - DNA, 75 bp, synthetic construct
  source 1..75: mol_type = other DNA
gctctgctcacgttgatacgggattttctgaccaccttaaccgcggagaaagtcaacgcgtttagccagttccgt

SEQ ID NO: 148179 - DNA, 75 bp, synthetic construct
  source 1..75: mol_type = other DNA
tttaactcaattacaccagcaattttttggcggtgcattgaaatgtcatctgcgctgacacctcaatttgaaccc

SEQ ID NO: 148180 - DNA, 75 bp, synthetic construct
  source 1..75: mol_type = other DNA
ttcagctctataacttccctgttcatgatgcttcaatggcctatatgaaagggaagggaattcgtgataatgctg

SEQ ID NO: 148181 - DNA, 75 bp, synthetic construct
  source 1..75: mol_type = other DNA
gctatgcagatgatctcacgttctcgtctaatatccctgatgtactgaaagcagttccttcaacgcttgaggtct

SEQ ID NO: 148182 - DNA, 75 bp, synthetic construct
  source 1..75: mol_type = other DNA
agagcctttgattcaggtatcacccacttcgatttagccaacaattacggaccgcctccaggcagtgcggaagag

SEQ ID NO: 148183 - DNA, 75 bp, synthetic construct
  source 1..75: mol_type = other DNA
ccggcccgtacggctctggcggctcacgtaaatacctgctcgccagcctcgaccaaagcctgaagcgtatggggc

SEQ ID NO: 148184 - DNA, 75 bp, synthetic construct
  source 1..75: mol_type = other DNA
acgtgagctgaggaaaaagctacaacgcattgaaatggagaaggaaatattaaaaaaggctaccgcactcttgat

SEQ ID NO: 148185 - DNA, 75 bp, synthetic construct
  source 1..75: mol_type = other DNA
agtttaaacgcgaatccgctcaactggtggttgaccagacatacactgtggcagatgccgccaaagctatggatg

SEQ ID NO: 148186 - DNA, 75 bp, synthetic construct
  source 1..75: mol_type = other DNA
agtttaaacgcgaatccgctcaactggtcgttgaccagagatacactgtggcagatgccgccaaagctatggatg

SEQ ID NO: 148187 - DNA, 75 bp, synthetic construct
  source 1..75: mol_type = other DNA
agtttaaacgcgaatccgctcaactggtcgttgaccagatatacacagtggcagatgccgccaaagctatggatg

SEQ ID NO: 148188 - DNA, 75 bp, synthetic construct
  source 1..75: mol_type = other DNA
gcaaaggcttatccaacaaataaattgcctgatttacgtggtgagtttattcgtggttgggatgacgggcgcggt

SEQ ID NO: 148189 - DNA, 75 bp, synthetic construct
  source 1..75: mol_type = other DNA
ttggtttgggagaaggctctgcattacctgttggtgtccctgttccgtggccttccgccactccgccaacaggct

SEQ ID NO: 148190 - DNA, 75 bp, synthetic construct
  source 1..75: mol_type = other DNA
atgtgtaactgcttttccaaaaaccttggtttgggagaaggctctgcattacctgttggtgtccctgttccgtgg

SEQ ID NO: 148191 - DNA, 75 bp, synthetic construct
  source 1..75: mol_type = other DNA
tgacatttttgttcctgccattcggtgcagcggcgcataattttgttaccggcaaaccggtgacgccgatttata

SEQ ID NO: 148192 - DNA, 75 bp, synthetic construct
  source 1..75: mol_type = other DNA
ttgggagaaggctcagcattacccgttggtgtgcctgttccgtggccttcagccactccgccaacaggctggctg

SEQ ID NO: 148193 - DNA, 75 bp, synthetic construct
  source 1..75: mol_type = other DNA
ctgttggcgtacctgttccgtggccctcagccactccgccaacaggctggctgaaatgcaacggagcagcttttt

SEQ ID NO: 148194 - DNA, 75 bp, synthetic construct
  source 1..75: mol_type = other DNA
caaaaactggcgcaaacggcaaaacgttatctcggcaaaccgtatgactttagtttctcgtggagcgacgatcgc

SEQ ID NO: 148195 - DNA, 75 bp, synthetic construct
  source 1..75: mol_type = other DNA
aatacgttgttcgccgcgttgaaggcggactgagtgttgaacaacagcaaaaactggcgcaaacggcaaaacgtt

SEQ ID NO: 148196 - DNA, 75 bp, synthetic construct
  source 1..75: mol_type = other DNA
aggacggatattttgtaaatgtgcgcatcattaatgattcgcaaatatcgtcattattcgatgaacacgcggttg

SEQ ID NO: 148197 - DNA, 75 bp, synthetic construct
  source 1..75: mol_type = other DNA
cagcttctcatggagcgacgatcgccagtactgttcggaagtggtgtggaaggtttaccagaatgcgctgggaat

SEQ ID NO: 148198 - DNA, 75 bp, synthetic construct
  source 1..75: mol_type = other DNA
atcatctttcaaatttctcgctcatcgcaaagtaaagcaatccaactggcaacccattccgattacagccacacc

SEQ ID NO: 148199 - DNA, 75 bp, synthetic construct
  source 1..75: mol_type = other DNA
cccggtgaaatacaccccgctcaagcagtggatcgcccacggtgaagatggcaaatacattgttcgccgcgttga

SEQ ID NO: 148200 - DNA, 75 bp, synthetic construct
  source 1..75: mol_type = other DNA
cacctacacttaatatcccgttaccagaatattccaagaaaatattccaagtaattccaagtgtgatttttgtca

SEQ ID NO: 148201 - DNA, 75 bp, synthetic construct
  source 1..75: mol_type = other DNA
agtcaaatgaataaaaatgttattgatatgctgaaggaaagaaatattgaaacggttcttgaatttagagctgaa

SEQ ID NO: 148202 - DNA, 75 bp, synthetic construct
  source 1..75: mol_type = other DNA
tcatcgaagccaagctggacgcgctctacaacaaactggaactggtacagcagtaccgccatacaggaggtcgta

SEQ ID NO: 148203 - DNA, 75 bp, synthetic construct
  source 1..75: mol_type = other DNA
tggcggtgacaaccacactgctgtccggctgcacaggcaccaacaaacaactgccctcagatatgcagatgcccc

SEQ ID NO: 148204 - DNA, 75 bp, synthetic construct
  source 1..75: mol_type = other DNA
ggttgttgaccagaaatacacggtggcagatgcagccagcgctatggatgtcggcctttccacaatgacgcgatg

SEQ ID NO: 148205 - DNA, 75 bp, synthetic construct
  source 1..75: mol_type = other DNA
tgcaatacacactgaaaaaagattctggatctgactttcatcagataatgcatgaagtcagtgttccacttcata

SEQ ID NO: 148206 - DNA, 75 bp, synthetic construct
  source 1..75: mol_type = other DNA
cagggcaaaacaccaaaagcctctccgataacaccagaacaaatcgaaatacgtgagctgaggaaaagctacaac

SEQ ID NO: 148207 - DNA, 75 bp, synthetic construct
  source 1..75: mol_type = other DNA
agcgtcagggcaaaacaccaaaagcctctccgataacaccagaacaaatcgaaatacgtgagctgaggaaaaagc

SEQ ID NO: 148208 - DNA, 75 bp, synthetic construct
  source 1..75: mol_type = other DNA
atgctcactccaaaacaacgcaggtgctccaatgaaaaaagaaatttcagcgcagagtttaaacgcgaatccgct

SEQ ID NO: 148209 - DNA, 75 bp, synthetic construct
  source 1..75: mol_type = other DNA
aatggtcttttttccggaaccatttttacgattgacttcaacatcctgagccagatgggagtcgagttcagcggc

SEQ ID NO: 148210 - DNA, 75 bp, synthetic construct
  source 1..75: mol_type = other DNA
atggatatcggccttttcacaatgacaagatgggtcaaacaactgcgtgatgagcgtcagggcaaaacaccaaaa

SEQ ID NO: 148211 - DNA, 75 bp, synthetic construct
  source 1..75: mol_type = other DNA
atgcaccgggcgctggcgcgatctgaacctgtgtgtggtggtcgcagctctgtttgcactgaagattattctggt

SEQ ID NO: 148212 - DNA, 75 bp, synthetic construct
  source 1..75: mol_type = other DNA
ggtgtttgttaccacctgtttgattgccggtatcggcagtattgcgatggggatatttgctaacttacccgtggc

SEQ ID NO: 148213 - DNA, 75 bp, synthetic construct
  source 1..75: mol_type = other DNA
acgagagctgaagaaaaagctacaacgtattgaaatggaaaacgatattctaaaaaaggctactgtagattcaat

SEQ ID NO: 148214 - DNA, 75 bp, synthetic construct
  source 1..75: mol_type = other DNA
agagagcgccaggggattacgccctctgccacacccattactccagaccagcaacgtatccgcgagctggaaaag

SEQ ID NO: 148215 - DNA, 75 bp, synthetic construct
  source 1..75: mol_type = other DNA
gtgcactggacgctggcgtgagctgaacctgtgtgtggtcgtggtggcggcgctgtttgcgctgaaaatcatcct

SEQ ID NO: 148216 - DNA, 75 bp, synthetic construct
  source 1..75: mol_type = other DNA
cacccgatattagcggtgttattggtgaagttgatttaagtggcgcattatcgcttgagcttgccggtattattt

SEQ ID NO: 148217 - DNA, 75 bp, synthetic construct
  source 1..75: mol_type = other DNA
cgccagcaggtcagggaatccgcagagcgggaaaaagccggactctcacgtccggtgtggatagcgcaggcgtat

SEQ ID NO: 148218 - DNA, 75 bp, synthetic construct
  source 1..75: mol_type = other DNA
ggcctgacggtaaaacgccactacgccgttttgcggggtataacggcggcggtcccggcttcggtggccagctga

SEQ ID NO: 148219 - DNA, 75 bp, synthetic construct
  source 1..75: mol_type = other DNA
tcttcgggggattattcgtccgccacgggcgcgttttgatttttatcaggcgcgttcagcctggtcacgggccga

SEQ ID NO: 148220 - DNA, 75 bp, synthetic construct
  source 1..75: mol_type = other DNA
caggcgacatgggacagcgattcaacgcgtcttttccgtactcagttcaaaatggttagtccgaagcgcgtcagt

SEQ ID NO: 148221 - DNA, 75 bp, synthetic construct
  source 1..75: mol_type = other DNA
atgaaaataccatctttagtgggacctgacgggaaaacatcccttcgggaatacgcgggatatcatggtggtggt

SEQ ID NO: 148222 - DNA, 75 bp, synthetic construct
  source 1..75: mol_type = other DNA
ccttcctcggtttctggaacatttcccataaccttggcggcgcgggtgcggctggtgtggcgctgttcggcgcaa

SEQ ID NO: 148223 - DNA, 75 bp, synthetic construct
  source 1..75: mol_type = other DNA
gctttttccagagtaccggcggttcgtgcagttactccaccatcaccaaatggacgccgcgtcgtaagcgcggga

SEQ ID NO: 148224 - DNA, 75 bp, synthetic construct
  source 1..75: mol_type = other DNA
tgttgggctttagcgccagtatgggtagcggttcggtaagcctgttcctgatgattaccttctacgccttaagcg

SEQ ID NO: 148225 - DNA, 75 bp, synthetic construct
  source 1..75: mol_type = other DNA
tcgtccacaaaaaccgattgttgctgttatttatactcacagccacaccgaccactatggcggcgtgaaaggcat

SEQ ID NO: 148226 - DNA, 75 bp, synthetic construct
  source 1..75: mol_type = other DNA
gcgtgaagcctataaccagggcgactaccgctgggcctctgaactgctgaaacaggtgattgctgccaatccggg

SEQ ID NO: 148227 - DNA, 75 bp, synthetic construct
  source 1..75: mol_type = other DNA
ggcaaacgttacgtgaaagcgctgggcggttctgcccgtgtcatcaacctggcgcaagaagcgaacaagcaaggt

SEQ ID NO: 148228 - DNA, 75 bp, synthetic construct
  source 1..75: mol_type = other DNA
ggcgtgacgctggcaacgggcgacccgagcattattgcaccgactaaaactatcgtgagaactggcgagaagatg

SEQ ID NO: 148229 - DNA, 75 bp, synthetic construct
  source 1..75: mol_type = other DNA
caacgatcatcgcaccgaccaaaaccgttaccaaaaccggcgagaagatggttatcgacggtctggaattcgatt

SEQ ID NO: 148230 - DNA, 75 bp, synthetic construct
  source 1..75: mol_type = other DNA
tatcgtcagaactggcgagaagatgattatcgacggcctggagtttgacttcctgatgaccccaggcagcgaagc

SEQ ID NO: 148231 - DNA, 75 bp, synthetic construct
  source 1..75: mol_type = other DNA
tcttgaagccggctgcgtggtgttcgacctttccggcgcgtttcgtgttaacgacgccaccttctatgaaaaata

SEQ ID NO: 148232 - DNA, 75 bp, synthetic construct
  source 1..75: mol_type = other DNA
gtaattcagtgcgctctagaaacgggagtgtctctcgaatggttagtgtctggtgttggttctcctcgtcttaaa

SEQ ID NO: 148233 - DNA, 75 bp, synthetic construct
  source 1..75: mol_type = other DNA
acatgatgaaggctacttagcatttgacaagacgcttataccttccggattgaaaaaacctattggagttaccgc

SEQ ID NO: 148234 - DNA, 75 bp, synthetic construct
  source 1..75: mol_type = other DNA
atgggcaacggcgataacctcaacctgacgctgaacgatagtgtgcttaactaccggaaaacgctgcaaccgcaa

SEQ ID NO: 148235 - DNA, 75 bp, synthetic construct
  source 1..75: mol_type = other DNA
gttatcttcaccccgcatctgggcaatttcccgcgcggcattctcgaaaccattacctgccgcctgaaaccgggt

SEQ ID NO: 148236 - DNA, 75 bp, synthetic construct
  source 1..75: mol_type = other DNA
acgacgccaccttctatgaaaaatattacggctttacccatcagtatccggaactgctggaacaggcagcctacg

SEQ ID NO: 148237 - DNA, 75 bp, synthetic construct
  source 1..75: mol_type = other DNA
tcgggctaccgttctgcgatatcggttttgccgttcagggcgagcatctgattgtggtggcgaccgaagacaact

SEQ ID NO: 148238 - DNA, 75 bp, synthetic construct
  source 1..75: mol_type = other DNA
gaagtcagcctgcaaccatacggtgtctttacccatcgccatcaaccggagatcgctacacaccttggtgctgac

SEQ ID NO: 148239 - DNA, 75 bp, synthetic construct
  source 1..75: mol_type = other DNA
cattacctgccgcctgaaatcgggtgtgacccaggcgcaagtcgcgcaagtgttacagcaggcgtatgcccataa

SEQ ID NO: 148240 - DNA, 75 bp, synthetic construct
  source 1..75: mol_type = other DNA
actcagtaagaaaccacattttgcattcacaattcattattccggtttcttccaccatcgcaccggaaaagcgac

SEQ ID NO: 148241 - DNA, 75 bp, synthetic construct
  source 1..75: mol_type = other DNA
tgaagccaacaatgtacagctacagcggatttatggcacggcatgggccagcaaaaaacagcttgatggctggct

SEQ ID NO: 148242 - DNA, 75 bp, synthetic construct
  source 1..75: mol_type = other DNA
gaggtcaatacgcctgatgtcatggaccgcagcctgtgggaaatttccggtcactgggataattatcgtgatcat

SEQ ID NO: 148243 - DNA, 75 bp, synthetic construct
  source 1..75: mol_type = other DNA
taagtggggatcacaagcagaagtgctgtttatgccacatacctggccagtatggggtaatcaacatatcaatga

SEQ ID NO: 148244 - DNA, 75 bp, synthetic construct
  source 1..75: mol_type = other DNA
taacttctacaccctgcgtggcgcgaaaacccgtgataccgcgaagtggaccgattacctgaatgaaacgctgga

SEQ ID NO: 148245 - DNA, 75 bp, synthetic construct
  source 1..75: mol_type = other DNA
atgtgtatccaccttaacttaatgatttttaccaaaatcattaggggattcatcagtgcccagcgtggatttatc

SEQ ID NO: 148246 - DNA, 75 bp, synthetic construct
  source 1..75: mol_type = other DNA
ggttaatcagaattacgccaaatcattaccgtttagcgatcgtcaggattttgacgatgctcagcgtggatttat

SEQ ID NO: 148247 - DNA, 75 bp, synthetic construct
  source 1..75: mol_type = other DNA
gtgacgccgcctgccgcaaaagccgcacttgatctttacttccagcatcgtccgcaaaaaccgattgttgccgtt

SEQ ID NO: 148248 - DNA, 75 bp, synthetic construct
  source 1..75: mol_type = other DNA
ccgtgaagatctgcacgccgtgctgaccggacaagccaaaatggcggatctggtaaaagcgaagaaagccaaaat

SEQ ID NO: 148249 - DNA, 75 bp, synthetic construct
  source 1..75: mol_type = other DNA
gcaggtgcagtacggtgaaacagatttcgattttgttcagcgcctgatgcaggagtggggtatctactggtggtt

SEQ ID NO: 148250 - DNA, 75 bp, synthetic construct
  source 1..75: mol_type = other DNA
tggagagtgttgacgaagttcgcattatcactgatggacggattaattttatcgaaccatcgacagggctggaga

SEQ ID NO: 148251 - DNA, 75 bp, synthetic construct
  source 1..75: mol_type = other DNA
gggataaccagttcatgactttgctggagcagggacgcatacaggaactggatgccgtcagtaacgaagagcttt

SEQ ID NO: 148252 - DNA, 75 bp, synthetic construct
  source 1..75: mol_type = other DNA
gtgaccttgcacctgaaaacggcagaagggcagcgggaaacggtcaaagcccagtggctggtggcctgtgatggt

SEQ ID NO: 148253 - DNA, 75 bp, synthetic construct
  source 1..75: mol_type = other DNA
ctgatttggcgaccgttcatcagtcctcgacggatgtttactaccgtatccaaagcggcattgatggcgatcggg

SEQ ID NO: 148254 - DNA, 75 bp, synthetic construct
  source 1..75: mol_type = other DNA
agtgcatacaacagcgacagacggtagttatgcttgtgccagaggatatgtctgtcggatggttcagcaaggctc

SEQ ID NO: 148255 - DNA, 75 bp, synthetic construct
  source 1..75: mol_type = other DNA
gatggccgagccgtatgctgcagctcagcctgctgcactggaagagggggaacgccgtattgaggcgctggatcg

SEQ ID NO: 148256 - DNA, 75 bp, synthetic construct
  source 1..75: mol_type = other DNA
gggcgacgggcgcagtggccagcctgccggcgatggtcatccagcgggctaatccggggctgtatgacgccctga

SEQ ID NO: 148257 - DNA, 75 bp, synthetic construct
  source 1..75: mol_type = other DNA
aagaagggaaacagtaaaggctccatgctgctgatttggcgaccgttcatcagtcctcgacggatgtttactacc

SEQ ID NO: 148258 - DNA, 75 bp, synthetic construct
  source 1..75: mol_type = other DNA
gtcagtgcggtgaagtggccttgccagtaccgggaatgcgccagcgaatggcggcggggaaagcagaaattatcc

SEQ ID NO: 148259 - DNA, 75 bp, synthetic construct
  source 1..75: mol_type = other DNA
acgcgatgcgttttctcaccccaaaaggtcgctgttttgctgatattcagccaatgaccgatgaatttggctggc

SEQ ID NO: 148260 - DNA, 75 bp, synthetic construct
  source 1..75: mol_type = other DNA
aaccgaagaacagcttagcgagccgcagaatatgcgccagttactgagcaaagtgctgccgaacccggacaacgt

SEQ ID NO: 148261 - DNA, 75 bp, synthetic construct
  source 1..75: mol_type = other DNA
tttattaactgcaattaaaaataagcaaaatgatctgcaagcgatccatcataaatatgttccgattgcagtgaa

SEQ ID NO: 148262 - DNA, 75 bp, synthetic construct
  source 1..75: mol_type = other DNA
aaaatattcctgtctactacttctgtggcgaatcgcctctccgcgccgccatgattgtctttctcatgatgcagg

SEQ ID NO: 148263 - DNA, 75 bp, synthetic construct
  source 1..75: mol_type = other DNA
caaaagaaaccgaaattttcattctgttacatccaaagctctcactgcataacgaaatgccaaaaagatgagaaa

SEQ ID NO: 148264 - DNA, 75 bp, synthetic construct
  source 1..75: mol_type = other DNA
aggcgcaagccagacttaacgatgtgagagacgattttgtcgacctgacccagccagtgggcgagcaactcgcag

SEQ ID NO: 148265 - DNA, 75 bp, synthetic construct
  source 1..75: mol_type = other DNA
ctgcgcaaccgccagagccacccggagcactatgcaggttgcaccgtcgcgatgttcctcggatcctatcctctt

SEQ ID NO: 148266 - DNA, 75 bp, synthetic construct
  source 1..75: mol_type = other DNA
agccaggccgactttattgaatcctggctaaaggctgtgcgcgaccgggtgaacagtgagctgaacgccgggcat

SEQ ID NO: 148267 - DNA, 75 bp, synthetic construct
  source 1..75: mol_type = other DNA
gagatatgaaggcgaatatcacgagtggtgtgatgcgatttcatcttgtcaaaagttcggaattcagtatcagtc

SEQ ID NO: 148268 - DNA, 75 bp, synthetic construct
  source 1..75: mol_type = other DNA
gaccaccaccaccagtctcgcgtttcgtaaaatattcgcgcagttaaatctgcatgcagctgaggtggaaggcga

SEQ ID NO: 148269 - DNA, 75 bp, synthetic construct
  source 1..75: mol_type = other DNA
gaccaccaccaccagcctcgggtttcgtaaaatattcgcgcagttaaatctgcatgcaaccgaggtggaaggcga

SEQ ID NO: 148270 - DNA, 75 bp, synthetic construct
  source 1..75: mol_type = other DNA
tatcactgatggacggattaattttatcgaaccatcgacagggctggagaagaagggaaacagcaaaggttccat

SEQ ID NO: 148271 - DNA, 75 bp, synthetic construct
  source 1..75: mol_type = other DNA
gaggcagcgaaagcagacggtgacacttctttagccacctggatcaagcgagtactccgaaaagaattacagcaa

SEQ ID NO: 148272 - DNA, 75 bp, synthetic construct
  source 1..75: mol_type = other DNA
agtcctcgacggatgtttactaccgtatccaaaggggcattgatggcgatcgggcagggcgtcaggagggcggca

SEQ ID NO: 148273 - DNA, 75 bp, synthetic construct
  source 1..75: mol_type = other DNA
atgtctgccaaacatccggtcattgcggtaacaggatccagcggcgcggggaccaccaccaccagtctcgcgttt

SEQ ID NO: 148274 - DNA, 75 bp, synthetic construct
  source 1..75: mol_type = other DNA
atgaatactcgcgcaactcttcaggacgctttacgcctccttcgcaacctgatacgtaccggcgtcgtcgtcgaa

SEQ ID NO: 148275 - DNA, 75 bp, synthetic construct
  source 1..75: mol_type = other DNA
cggtcaggcagtctgacggtaacggccggagtgattaaggcgctgcaacgggatccggataatgctgcactgacc

SEQ ID NO: 148276 - DNA, 75 bp, synthetic construct
  source 1..75: mol_type = other DNA
cattcgttcaggtgtggtgactgaggtcgataccgcgcaggggctgtgccgcgtacaaagcggcgggatccagac

SEQ ID NO: 148277 - DNA, 75 bp, synthetic construct
  source 1..75: mol_type = other DNA
gaaatcgtggtgtgatttacttcgagattgtacagaatcattattatcgaatgaatgcacaatacaatgaaattc

SEQ ID NO: 148278 - DNA, 75 bp, synthetic construct
  source 1..75: mol_type = other DNA
taaagtactgcatacccataaacaccccggcgacagcggcggcaaaatccggtcaaacgtggtgagcaggttatc

SEQ ID NO: 148279 - DNA, 75 bp, synthetic construct
  source 1..75: mol_type = other DNA
atgccgggcagtgacccgcagacgaacggcgatttaagtgccgataaccccgcgccgtcggcgtcggcggatgcc

SEQ ID NO: 148280 - DNA, 75 bp, synthetic construct
  source 1..75: mol_type = other DNA
gcgacgcatctcgaactctaccgtcgttacccgtcgcttggcggcattgtccatacccactccactcatgctacc

SEQ ID NO: 148281 - DNA, 75 bp, synthetic construct
  source 1..75: mol_type = other DNA
ggcaacgtcagcgccattgaccgcgaacgcgggctggtggtgatcaagcccagcggcgtcgcctacgaaaccatg

SEQ ID NO: 148282 - DNA, 75 bp, synthetic construct
  source 1..75: mol_type = other DNA
atgcaaaagctaaaacagcaggtgtttgaagccaacatggatctgccgcgctacgggctggtgacctttacctgg

SEQ ID NO: 148283 - DNA, 75 bp, synthetic construct
  source 1..75: mol_type = other DNA
aaatcgctcgtgcgatccgcaaccttatccgcaccggcgttgtgacagacgttgaacccgttgaggggctttgtc

SEQ ID NO: 148284 - DNA, 75 bp, synthetic construct
  source 1..75: mol_type = other DNA
aggtgcagggcgagtatgaactgaacaccggcaaagtgattatcgaaacgctgggtgacgccgagccgctgcata

SEQ ID NO: 148285 - DNA, 75 bp, synthetic construct
  source 1..75: mol_type = other DNA
cacatcgacagctacctcatgaataaacacttcatgcgtaagcacggtcccaacgcctattacgggcagaagtaa

SEQ ID NO: 148286 - DNA, 75 bp, synthetic construct
  source 1..75: mol_type = other DNA
agttctcgacggatgtttactactgtatccaaagcggcattgatggcgatcgggcagggcgtcaggagggcagca

SEQ ID NO: 148287 - DNA, 75 bp, synthetic construct
  source 1..75: mol_type = other DNA
ggctattcgccccacacatgatctggccgcagcgggctttaacatgatgaataacctgccggttaccagtacatc

SEQ ID NO: 148288 - DNA, 75 bp, synthetic construct
  source 1..75: mol_type = other DNA
taaaaaatcaagcccggaattaaagaacttatcaggtcataaaatgagacattcctggaactatttctattcaag

SEQ ID NO: 148289 - DNA, 75 bp, synthetic construct
  source 1..75: mol_type = other DNA
ccgaatggcagcgccagaatccgctggatctgatcattactggctgccagagcagcgaagggcagaacgggcaaa

SEQ ID NO: 148290 - DNA, 75 bp, synthetic construct
  source 1..75: mol_type = other DNA
aactggcaagagcagagcaacgacgcggagcgacgctgattgatgggcaaacggtagcagaaaaagcgcaaaagc

SEQ ID NO: 148291 - DNA, 75 bp, synthetic construct
  source 1..75: mol_type = other DNA
cgttgattgatgggcaaacagcagaagaaaaagcacaaatactgtggcggggttatttgcgccagaggatgcagc

SEQ ID NO: 148292 - DNA, 75 bp, synthetic construct
  source 1..75: mol_type = other DNA
caaaaaattataaatataaaatcagcaagtaataggtttattgcaaagagaacctttagttatagagtacacgtt

SEQ ID NO: 148293 - DNA, 75 bp, synthetic construct
  source 1..75: mol_type = other DNA
atgaaaattttttgcgatgatggttctacaaatgtgaaacttgcctggtttgaaggcaagacgctgaaaagtgcg

SEQ ID NO: 148294 - DNA, 75 bp, synthetic construct
  source 1..75: mol_type = other DNA
ggcatgtgcaccgactggcttcagtggctgacccatcgtgccgggcgttcgcgcacatggtgggcaccttccgtg

SEQ ID NO: 148295 - DNA, 75 bp, synthetic construct
  source 1..75: mol_type = other DNA
gctatctcatgggatggtcaaaagattcaaagatgtcagaaaattataacttcaaacacatatcaataaaagaaa

SEQ ID NO: 148296 - DNA, 75 bp, synthetic construct
  source 1..75: mol_type = other DNA
tagttatagaatacacgttttttcacgctaccttaagtggttatgtggattagttcattcgtcaaaggggattca

SEQ ID NO: 148297 - DNA, 75 bp, synthetic construct
  source 1..75: mol_type = other DNA
aaaatagatgattttgatctcagagacaacactttaagtgtagtcagaagacatgattcaaaagaagatggaaga

SEQ ID NO: 148298 - DNA, 75 bp, synthetic construct
  source 1..75: mol_type = other DNA
acagctacgaagcttcgctaatggcgctgcacgatcgtgatgtctatcgcactatggcatgcggcatcgcgggcc

SEQ ID NO: 148299 - DNA, 75 bp, synthetic construct
  source 1..75: mol_type = other DNA
ggatcgacaaagaagaatatccgcaatctgcggccatcgacctgcgttgcgtaaacatggttgccgatctgtggc

SEQ ID NO: 148300 - DNA, 75 bp, synthetic construct
  source 1..75: mol_type = other DNA
tggagctgcgtgagatccctatgcgccccggtcagttgtttatggatccgaaacggatgattgaagcctgcgacg

SEQ ID NO: 148301 - DNA, 75 bp, synthetic construct
  source 1..75: mol_type = other DNA
ggcgaaatatggctttgatatctctcgcccggcgcagaatgcacaggaagcggtgcagtggctctacttcgctta

SEQ ID NO: 148302 - DNA, 75 bp, synthetic construct
  source 1..75: mol_type = other DNA
cgcgcaggtgtcgatcgtcacctcttccttgcagtatgaaaacgacgatctgatgcgtactgacttcaacagcga

SEQ ID NO: 148303 - DNA, 75 bp, synthetic construct
  source 1..75: mol_type = other DNA
cggccagaaaaccggtaacacgccggacggtcgccgcgccggaacaccgttcgcgccgggcgctaacccgatgca

SEQ ID NO: 148304 - DNA, 75 bp, synthetic construct
  source 1..75: mol_type = other DNA
actctggcatctgccagagcaacttactcaggtgcgctgggtctatctggaagatttaaaagcagatgtcaccac

SEQ ID NO: 148305 - DNA, 75 bp, synthetic construct
  source 1..75: mol_type = other DNA
acagatgccattgttgggtagcggcaaacctgacttcgtcacgttgaaaagctgggtagacgaagcggaacaaca

SEQ ID NO: 148306 - DNA, 75 bp, synthetic construct
  source 1..75: mol_type = other DNA
ttcgacgagcagggctttgtgcagattcagggccgcgcaaaacgctttgccaaaattgcaggcgaaatggtatcg

SEQ ID NO: 148307 - DNA, 75 bp, synthetic construct
  source 1..75: mol_type = other DNA
tgggatgtggagctgcgtgagatccctatgcgccccggtcagttgtttatggacccgaaacgcatgattgaagcc

SEQ ID NO: 148308 - DNA, 75 bp, synthetic construct
  source 1..75: mol_type = other DNA
tctgcgcggctggcaggttccggccttcactctcggcggtgaagccaccgacatcgtggtgatgcgcattatgtg

SEQ ID NO: 148309 - DNA, 75 bp, synthetic construct
  source 1..75: mol_type = other DNA
aaactggggccgtatgagttcatctgtacgggtcgcccggacgaaggcatcccggcggtttgcttcaaactgaaa

SEQ ID NO: 148310 - DNA, 75 bp, synthetic construct
  source 1..75: mol_type = other DNA
tcgcgtcgcggtattccgtgggtaactgtgttggtgatgaccactgcgctactgtttgcggtgtatctgaactac

SEQ ID NO: 148311 - DNA, 75 bp, synthetic construct
  source 1..75: mol_type = other DNA
tggttctcgttctttaaagtcgccaccattatcatcatgattgttgccggtttcggcatcatcatctgggggatt

SEQ ID NO: 148312 - DNA, 75 bp, synthetic construct
  source 1..75: mol_type = other DNA
cacggtgtgggtgtggattatgatcatgctgtcgcaaatcgccttccgtcgccgtttaccgccagaagaagttaa

SEQ ID NO: 148313 - DNA, 75 bp, synthetic construct
  source 1..75: mol_type = other DNA
tggttctcgttctttaaagttgccaccattatcatcatgattgtcgccggtttcggcatcatcatctgggggatt

SEQ ID NO: 148314 - DNA, 75 bp, synthetic construct
  source 1..75: mol_type = other DNA
tgcgcgcgctgggagaaatgtcggtacataatccggccgccagctctttctcgcgctatgcacaggaaaaccttg

SEQ ID NO: 148315 - DNA, 75 bp, synthetic construct
  source 1..75: mol_type = other DNA
cgcatctctctgtacgttggtttcgcgtggattgttgtgctgttgattggctggatgtttaaacgccgccacgac

SEQ ID NO: 148316 - DNA, 75 bp, synthetic construct
  source 1..75: mol_type = other DNA
cgacatcgtggtgatgcgcattatgtgtcgtcgcggcttcgaaatggactttgctgaactgttgctggaagacta

SEQ ID NO: 148317 - DNA, 75 bp, synthetic construct
  source 1..75: mol_type = other DNA
tcattccacgcatatggccgtgaaatggacagcgaatttgagtacatctttaccgatctgcgtaaaacccataat

SEQ ID NO: 148318 - DNA, 75 bp, synthetic construct
  source 1..75: mol_type = other DNA
gacgacgtgctggattacgacaaagtgatggacagcctcgatcacttcatggactggctggcggtgcagtacatc

SEQ ID NO: 148319 - DNA, 75 bp, synthetic construct
  source 1..75: mol_type = other DNA
tggttctcgttctttaaagtcgccaccatcatcatcatgattgtcgccggtttcggcatcatcatctgggggatt

SEQ ID NO: 148320 - DNA, 75 bp, synthetic construct
  source 1..75: mol_type = other DNA
aactatgagttcccgcagccgctgcacgatgcgctggataaattccaggccgacaccggtatcgacatcgacatg

SEQ ID NO: 148321 - DNA, 75 bp, synthetic construct
  source 1..75: mol_type = other DNA
gggtcggtacgattagcggagctggaagcggaagtgttgcagcgggtaatgcagcgtgggcattctgaacaaccg

SEQ ID NO: 148322 - DNA, 75 bp, synthetic construct
  source 1..75: mol_type = other DNA
ataaacaggctcgagataacaaccaaatgcataaaattgggaaaatggcagaagcgtttcgggtaatgactccaa

SEQ ID NO: 148323 - DNA, 75 bp, synthetic construct
  source 1..75: mol_type = other DNA
cagaatgcaaggaacatgcgactttgccgtattagaagaaaaatatcaacatttcggtaaaaaacctgaagacat

SEQ ID NO: 148324 - DNA, 75 bp, synthetic construct
  source 1..75: mol_type = other DNA
cctggccgccgagcaataatcgctattaccgccataatcgcgggcgcacgcacatcagcgcagaggggcaggcat

SEQ ID NO: 148325 - DNA, 75 bp, synthetic construct
  source 1..75: mol_type = other DNA
cttagcagtagaggagccaccagagttcttacctgagcatatcaatagtgcatatgaggaaggggcgaaatgttt

SEQ ID NO: 148326 - DNA, 75 bp, synthetic construct
  source 1..75: mol_type = other DNA
ttcttacagcaggatttcatgatatggatagtgatggcatcaagtctctttgtgtcgacaccttcccaaaatccg

SEQ ID NO: 148327 - DNA, 75 bp, synthetic construct
  source 1..75: mol_type = other DNA
aacaattaacgccggatacagagaatccacccataacactgtttttggttttaactgttccgcgtgcgctgagcc

SEQ ID NO: 148328 - DNA, 75 bp, synthetic construct
  source 1..75: mol_type = other DNA
gctaagctatcgcgtgaagccattatcgcgggcgggagtcactggcggctacatttgtgggtaatgtgcagcact

SEQ ID NO: 148329 - DNA, 75 bp, synthetic construct
  source 1..75: mol_type = other DNA
ccaattaacgggtaaaggccagcagtggttaactcgcaagctacttgatgctggtttgttaaaaccagtagcggc

SEQ ID NO: 148330 - DNA, 75 bp, synthetic construct
  source 1..75: mol_type = other DNA
attacatcaattcattagtaggtcaggagttcgttcaaggcgagaatgattgcaatttaattgcatgtaagatca

SEQ ID NO: 148331 - DNA, 75 bp, synthetic construct
  source 1..75: mol_type = other DNA
atcacacctcgcatcagaataaccatccacgcagcacctcccgataaccgcaaacgagatttggacaatctgccc

SEQ ID NO: 148332 - DNA, 75 bp, synthetic construct
  source 1..75: mol_type = other DNA
ggtgctgcccctgatgattttccatcagatccaattgatggtctgtgcggtgctggcgcgtcgatacaaacgcca

SEQ ID NO: 148333 - DNA, 75 bp, synthetic construct
  source 1..75: mol_type = other DNA
ttgaaaatctgactacggcagctattgccctgctgttctttatgcacggcgcaaaattgtcgcgtgaagcgatta

SEQ ID NO: 148334 - DNA, 75 bp, synthetic construct
  source 1..75: mol_type = other DNA
aataaaaacgagcaccttgcggacgctgtcgcatcgatttacaccggtatgcaaactgatcaattccgtcaggtt

SEQ ID NO: 148335 - DNA, 75 bp, synthetic construct
  source 1..75: mol_type = other DNA
accattggctcttccgaggcctgtatgctcggcgggatggcgatgaaatggcgttggcgcaagcgtatggaagcc

SEQ ID NO: 148336 - DNA, 75 bp, synthetic construct
  source 1..75: mol_type = other DNA
gtggggcaaaacctggtcgtggatctttcgacgcagatcttttgccataacgattacccggaaaccattacagac

SEQ ID NO: 148337 - DNA, 75 bp, synthetic construct
  source 1..75: mol_type = other DNA
gcgtctgcgcggttggcaggttccggccttcactctcggcggtgaagccaccgacatcgtggtgatgcgcattat

SEQ ID NO: 148338 - DNA, 75 bp, synthetic construct
  source 1..75: mol_type = other DNA
agctgcccgggcggtggtgaaggttctgggggataaatccatgcggacctgtggtgatgcaaaggcatgtaccag

SEQ ID NO: 148339 - DNA, 75 bp, synthetic construct
  source 1..75: mol_type = other DNA
ttgatggcaacgctcgtcagaacctggccactttctgccagacctgggacgacgataatgtccataagttgatgg

SEQ ID NO: 148340 - DNA, 75 bp, synthetic construct
  source 1..75: mol_type = other DNA
tgtgagcgaagcggtagcaatggctgaccgggtgttgttaattgaagagggaaaaattggtctggatttgacggt

SEQ ID NO: 148341 - DNA, 75 bp, synthetic construct
  source 1..75: mol_type = other DNA
gggtcggtgcgattagcggagctggaagcggaagttttgcaacgggtgatgcagcgtgggcactctgaacaaccg

SEQ ID NO: 148342 - DNA, 75 bp, synthetic construct
  source 1..75: mol_type = other DNA
acggcattatgactcgtgtggttaagcgcggtctgtcccggatgaaaaagcttttattagcacgtcatataaatg

SEQ ID NO: 148343 - DNA, 75 bp, synthetic construct
  source 1..75: mol_type = other DNA
atgatgtggtggtgcccactggcggcctgcgatgtttctgctcgtgatgtcaccgttactctgccggactaccct

SEQ ID NO: 148344 - DNA, 75 bp, synthetic construct
  source 1..75: mol_type = other DNA
cggcgtacagttgacgcgcaacggaacgattattccagcgaatagcactgtgtcattaggggcagtagggacttc

SEQ ID NO: 148345 - DNA, 75 bp, synthetic construct
  source 1..75: mol_type = other DNA
gtcctgaaccaactggatttacatattccggcaggtcagtttgtggcggtggtgggccgcagcggtggtggcaaa

SEQ ID NO: 148346 - DNA, 75 bp, synthetic construct
  source 1..75: mol_type = other DNA
actattgcgttaccacaggtgcgtaaaaattacccttttgaggggtttgtagagtggcatcggaaagaggttttt

SEQ ID NO: 148347 - DNA, 75 bp, synthetic construct
  source 1..75: mol_type = other DNA
ctttcatattgcgctcctactggcgattggcatatcggtaatagtgtcaatgactggtgtctggttgtccttttt

SEQ ID NO: 148348 - DNA, 75 bp, synthetic construct
  source 1..75: mol_type = other DNA
aggggcattcgtcgccggagtattctgtgcggtggcgacgggatacctgaaagacaacagccgaatcaagcaaga

SEQ ID NO: 148349 - DNA, 75 bp, synthetic construct
  source 1..75: mol_type = other DNA
gcccgcaccgacaccctcacaccttcgaactactgttgccattaaggggtcgtttcgtggtgctgaattttgacg

SEQ ID NO: 148350 - DNA, 75 bp, synthetic construct
  source 1..75: mol_type = other DNA
attgtcgtcttattcgcggtcgtgttcatcatgacgtttaccgttaccagcatcaacgcacgcacaaagggaaac

SEQ ID NO: 148351 - DNA, 75 bp, synthetic construct
  source 1..75: mol_type = other DNA
ttctggtcctgaaaggttgggcactgatgggagacgcgatgagtcatgcggtttttcctggtatcgtgcttgcgt

SEQ ID NO: 148352 - DNA, 75 bp, synthetic construct
  source 1..75: mol_type = other DNA
gggctgctgcatggcggtgcttccgtggtgctggccgaaagtattggctccgttgccggttatttatgtaccgaa

SEQ ID NO: 148353 - DNA, 75 bp, synthetic construct
  source 1..75: mol_type = other DNA
tccacgcccagtgaagctgacagataacgtgactgcgtttgatgcggtggaaattaataactggctggcagaacg

SEQ ID NO: 148354 - DNA, 75 bp, synthetic construct
  source 1..75: mol_type = other DNA
gctgggcgagaagattaccgcctttgatgcggtagagattaacaactggctggcagaacgtcggggaaaggtggc

SEQ ID NO: 148355 - DNA, 75 bp, synthetic construct
  source 1..75: mol_type = other DNA
atggggcttgatatctacatcgagacgcagccaaaaaacgatctgaataacgaggcatccagaaagcgggttgct

SEQ ID NO: 148356 - DNA, 75 bp, synthetic construct
  source 1..75: mol_type = other DNA
gtctggcagattgaaatcttcgatgagaaagggcgtttgtgctgttcgtcacgattgacgaccgctattttgtga

SEQ ID NO: 148357 - DNA, 75 bp, synthetic construct
  source 1..75: mol_type = other DNA
tggaagcactgaatgctatgggtgaaggaaacatggtggggttgctggatattcgctttgaacatattggtgatg

SEQ ID NO: 148358 - DNA, 75 bp, synthetic construct
  source 1..75: mol_type = other DNA
atgggcgcgaccaccttccgtaaacgcctggaaaaagcggggctggcaattgaagtaaaacattacgccatagaa

SEQ ID NO: 148359 - DNA, 75 bp, synthetic construct
  source 1..75: mol_type = other DNA
actaccgcacgactggtgtctgatgaggtggggaaaaatctctataaagaaagcgatgaaaatgacgcgcagatc

SEQ ID NO: 148360 - DNA, 75 bp, synthetic construct
  source 1..75: mol_type = other DNA
agaagagcgcgagatgctgccgctgtgttatcaggaaggcgtggcggtcattccgtggagtccgctggcgcgggg

SEQ ID NO: 148361 - DNA, 75 bp, synthetic construct
  source 1..75: mol_type = other DNA
agcgcagtcgcgtcagcaagcccgcaaatatgacgacggtagctggcaaaatacctttaaacaagggatcttgct

SEQ ID NO: 148362 - DNA, 75 bp, synthetic construct
  source 1..75: mol_type = other DNA
aaccggctggaaatttcgtcccggacgcgccacacgagagcgaaacgcccgcatcatctaccagtgaggtcaccc

SEQ ID NO: 148363 - DNA, 75 bp, synthetic construct
  source 1..75: mol_type = other DNA
tggaaggatgcggaaaatggcgctttcgcgccaggcgggcatgacatttacgttgatgagaagggcaacgtcacc

SEQ ID NO: 148364 - DNA, 75 bp, synthetic construct
  source 1..75: mol_type = other DNA
gagattaaagagattaaagcggtggctaaggaattaggtgttaaaggtttccgtaagctgagactatcccgcgag

SEQ ID NO: 148365 - DNA, 75 bp, synthetic construct
  source 1..75: mol_type = other DNA
tattgttgagcgagtggtggaaattgtcactgcggtgcaagagcattatccccttgcgctggctgtggtggcctg

SEQ ID NO: 148366 - DNA, 75 bp, synthetic construct
  source 1..75: mol_type = other DNA
tatcgacagcgcaccagctccgacgattgtcgtcttattcgcggttttgttcatcatgacgtttgccgttaccag

SEQ ID NO: 148367 - DNA, 75 bp, synthetic construct
  source 1..75: mol_type = other DNA
cactgccggaagaaagcagccgtcccatcattaaacgcgcgctggaaggcggcataaatttctttgataccgcca

SEQ ID NO: 148368 - DNA, 75 bp, synthetic construct
  source 1..75: mol_type = other DNA
ctgatatcgttagtgagcgttttgatgccggcgtcaggctaggtgagcaaatagctcaggatatgatcgccgtac

SEQ ID NO: 148369 - DNA, 75 bp, synthetic construct
  source 1..75: mol_type = other DNA
cgcaccgcactgccttttatccatatcaccactcatgtggaaccgttggaagatcccgcgtcaatgaacgaccaa

SEQ ID NO: 148370 - DNA, 75 bp, synthetic construct
  source 1..75: mol_type = other DNA
tcaacttcaggaggtagatccggttgcggcagcaaggattcatccaaatgatccacaaaggctttcccgggcact

SEQ ID NO: 148371 - DNA, 75 bp, synthetic construct
  source 1..75: mol_type = other DNA
tggaaacgccgctaccgctggacgatgaaccacaacctgcaccgcgtgctattccggaaaaccgcgtggcggcgg

SEQ ID NO: 148372 - DNA, 75 bp, synthetic construct
  source 1..75: mol_type = other DNA
cgactgtgcgttgctggagcgcgacggcaacatttcacttttatccttgccagtggcagaacgttggctgcgtca

SEQ ID NO: 148373 - DNA, 75 bp, synthetic construct
  source 1..75: mol_type = other DNA
cagtcaaaaagttaacaagaagatgtaccgcggcgcgctgaaaagcattctgtccgaactggtacgtcaggatcg

SEQ ID NO: 148374 - DNA, 75 bp, synthetic construct
  source 1..75: mol_type = other DNA
cgttgataacaacctgatttttaaatggctacgcctctggcaaagagaaggacgtattctcgtagaatgcctcca

SEQ ID NO: 148375 - DNA, 75 bp, synthetic construct
  source 1..75: mol_type = other DNA
gatccgccaggcctgcgaagacaaactgggggccgatcagcaaccggcatttgtgttgtatctggagatcgaccc

SEQ ID NO: 148376 - DNA, 75 bp, synthetic construct
  source 1..75: mol_type = other DNA
cactgaatcacaaacgcatcgtcagcttgcgtctggtttacattgtccagttggatttaaaaacagtactgatgg

SEQ ID NO: 148377 - DNA, 75 bp, synthetic construct
  source 1..75: mol_type = other DNA
ggtgtctgaaggcaaggtacgcggcgtctgccagccgctgcatcttgggcggcaaaatcagagctgggaaatcgt

SEQ ID NO: 148378 - DNA, 75 bp, synthetic construct
  source 1..75: mol_type = other DNA
atttctcttactcaaccagctttgaactgcatcccaccagcgaagtttaccgcccacaacgaaccctgagcaaac

SEQ ID NO: 148379 - DNA, 75 bp, synthetic construct
  source 1..75: mol_type = other DNA
gtgaaaacgccgccgggtggtctgttacaatctgttgatttacatccggcgataaaagccctgaaagatgagtga

SEQ ID NO: 148380 - DNA, 75 bp, synthetic construct
  source 1..75: mol_type = other DNA
atgaaagaatatcacggtgaaaagagatacaaagattacctgttaaagcgttacagcatttctcgtgaaggtcac

SEQ ID NO: 148381 - DNA, 75 bp, synthetic construct
  source 1..75: mol_type = other DNA
gattatgctcaagggataaaaaatattgatgcagagcttagggacgcagtcaataaggggtttaaaattattgac

SEQ ID NO: 148382 - DNA, 75 bp, synthetic construct
  source 1..75: mol_type = other DNA
atcaaaaacgtatgctgtatctgttcgttgaccagatcagaaaatctgatggcaccctacaggatagactggccc

SEQ ID NO: 148383 - DNA, 75 bp, synthetic construct
  source 1..75: mol_type = other DNA
cgtgatgccgttggggctgaagaattcgtgaaactgacaagggccgggattgtagctaccctcagtggcatgaaa

SEQ ID NO: 148384 - DNA, 75 bp, synthetic construct
  source 1..75: mol_type = other DNA
ttaatacaatcatttaaaggaaacaacaaactcattgaggattatgaaaaaatccttattggcatggcagacaat

SEQ ID NO: 148385 - DNA, 75 bp, synthetic construct
  source 1..75: mol_type = other DNA
acttattcacaggccagcagtgcggatttgctggcgctgatcgcgacgctccagcgggcgctggggataaggacg

SEQ ID NO: 148386 - DNA, 75 bp, synthetic construct
  source 1..75: mol_type = other DNA
gattatgctcaagggataaaaaatattgatgcagagctaagagatgcagtcaataagggattcgacattatcgac

SEQ ID NO: 148387 - DNA, 75 bp, synthetic construct
  source 1..75: mol_type = other DNA
gtgcggcttcctgccatgtggaattccattgcggtaaaatgacactggaaaatccttcaccagagctgctcacgg

SEQ ID NO: 148388 - DNA, 75 bp, synthetic construct
  source 1..75: mol_type = other DNA
atgaacattgtcgatcaacaaacttttcgcgatgcgatgtcctgcatgggcgcggcggtcaatatcatcaccacg

SEQ ID NO: 148389 - DNA, 75 bp, synthetic construct
  source 1..75: mol_type = other DNA
catcgcgccgtctttatccacttccactcagaccagagtcagtgccagttcctgcaaggtggagttccgtcacgg

SEQ ID NO: 148390 - DNA, 75 bp, synthetic construct
  source 1..75: mol_type = other DNA
gatgaaacagtttcaggctgccaataaccaaggtggcggcataaccttcgacgggatgaaggcatggcgtgctaa

SEQ ID NO: 148391 - DNA, 75 bp, synthetic construct
  source 1..75: mol_type = other DNA
ttgttcaggcaaacaatcaaggtggagtaacatttgatggcatgaaagcatggagagcgaaatttgctgatgcgg

SEQ ID NO: 148392 - DNA, 75 bp, synthetic construct
  source 1..75: mol_type = other DNA
ttcagctgttagaacattacggaagattacggaagaactaaaaaatgatcctcatcgtgttattgaggtaaaagg

SEQ ID NO: 148393 - DNA, 75 bp, synthetic construct
  source 1..75: mol_type = other DNA
tgttgacggttaatatgcatgctgccagcaaggctgatccacaaactgtggtggatgccagctatagcgtgacag

SEQ ID NO: 148394 - DNA, 75 bp, synthetic construct
  source 1..75: mol_type = other DNA
atgcctgtaaaagagcaaggtttttctctgctggaagtgttgattgctatggcgatcagtagcgtattgttgctg

SEQ ID NO: 148395 - DNA, 75 bp, synthetic construct
  source 1..75: mol_type = other DNA
gcggtatgagcgccacacagcttcctgcaccgacacgtgatagccagcgtcaggcggcagcaagtcagtttcaac

SEQ ID NO: 148396 - DNA, 75 bp, synthetic construct
  source 1..75: mol_type = other DNA
atgaaagtcatgcggaggacaatggcaggctatgccacgcacgcgaactttgccgggatcgtgatcgtgggactg

SEQ ID NO: 148397 - DNA, 75 bp, synthetic construct
  source 1..75: mol_type = other DNA
caaccgtagtaagggcaattgaagatcatttccgtacccgtggtctcagtgattaccctaatgtggatggtattg

SEQ ID NO: 148398 - DNA, 75 bp, synthetic construct
  source 1..75: mol_type = other DNA
ctttttccagtcgggctggtatggcgcattccgtgttgtgtctttccgtgataacggtcctgccggactccttaa

SEQ ID NO: 148399 - DNA, 75 bp, synthetic construct
  source 1..75: mol_type = other DNA
gatgtcaacggcggaatgagcgccacgcagctacctgctccaacacgcgacagccagcgtcaggcggcagcaagt

SEQ ID NO: 148400 - DNA, 75 bp, synthetic construct
  source 1..75: mol_type = other DNA
tatccccgccctgaaggacggggttttacggcgcaccggataaacattgctgcccttgttgggtctgcggtaacc

SEQ ID NO: 148401 - DNA, 75 bp, synthetic construct
  source 1..75: mol_type = other DNA
gttgaggctgagaaggttgatgatgagcttgataataagtttaagctcctcactgagcaacatattagacaaaac

SEQ ID NO: 148402 - DNA, 75 bp, synthetic construct
  source 1..75: mol_type = other DNA
tgaaggtagcagtcgaaccggcaagttgaatgatgaacaacgatcggcaatacgcgaacgcgtggcagaacgccc

SEQ ID NO: 148403 - DNA, 75 bp, synthetic construct
  source 1..75: mol_type = other DNA
taatttatattccaaactataacccctccgtagtttacggaagctgggaaaatacggcttatccacccgtttatt

SEQ ID NO: 148404 - DNA, 75 bp, synthetic construct
  source 1..75: mol_type = other DNA
acgtcaggcagcggcacagcggtttaatgaagctgaaaactatgggagctatgacgacttccgcgacttcagccg

SEQ ID NO: 148405 - DNA, 75 bp, synthetic construct
  source 1..75: mol_type = other DNA
tcgctatcatcggcgcagttgaactggatgatgcctcacaccagaaaaaacaccgtatccggcgcgatattctgc

SEQ ID NO: 148406 - DNA, 75 bp, synthetic construct
  source 1..75: mol_type = other DNA
gcagtgcgggcggggtggtgattaaagctggctcattaattgccgtgcttattttgcgacagaccaacaactata

SEQ ID NO: 148407 - DNA, 75 bp, synthetic construct
  source 1..75: mol_type = other DNA
atcccattactgaagtttttgttctctggtaaaccggttgttaagcgtgagaacgataaagcaccagcccgttaa

SEQ ID NO: 148408 - DNA, 75 bp, synthetic construct
  source 1..75: mol_type = other DNA
atatgagcggcaaggtggtggaaggggaatatcgcccgtcttccgacaccgcgacgcatctcgaactctaccgtc

SEQ ID NO: 148409 - DNA, 75 bp, synthetic construct
  source 1..75: mol_type = other DNA
accaaccttaaagccggtcgctgccgtgtgcagaccggcggcatgtgcaccgactggcttcagtggctgacccat

SEQ ID NO: 148410 - DNA, 75 bp, synthetic construct
  source 1..75: mol_type = other DNA
gctggaagtgcagaagggcggaacgatgcacggcaacattgaacataccggtggtgaactctcatcaaacggtaa

SEQ ID NO: 148411 - DNA, 75 bp, synthetic construct
  source 1..75: mol_type = other DNA
tgatgatcagtatcgtggcgtggatcctgcgttttgcgctgtttgcttacggcgacccgactccgttcggcaccg

SEQ ID NO: 148412 - DNA, 75 bp, synthetic construct
  source 1..75: mol_type = other DNA
tttcgcagatctctgaaaccctgttcattctgaccatcccgttcttcttaagccgctacggtattaagaacgtaa

SEQ ID NO: 148413 - DNA, 75 bp, synthetic construct
  source 1..75: mol_type = other DNA
tgaaagtcctgtattccatacaatgactattcaggaaagcggcggaacacgtaacgctatagaaaaaggtatttc

SEQ ID NO: 148414 - DNA, 75 bp, synthetic construct
  source 1..75: mol_type = other DNA
gaataagaaataatttagaaaattcagataaaacgaataaaaatttctcgatggttaagctatcgatactatttt

SEQ ID NO: 148415 - DNA, 75 bp, synthetic construct
  source 1..75: mol_type = other DNA
tggcctgtttgctggcaaaagaaggcaatgatctcccgattgatgcggcggtggttggtctctgcgccgtttatg

SEQ ID NO: 148416 - DNA, 75 bp, synthetic construct
  source 1..75: mol_type = other DNA
ggttctggccttcgcgttcatggcgatgttcaaatacaaacacgttcgtgtcccggcgggcacacagacggttaa

SEQ ID NO: 148417 - DNA, 75 bp, synthetic construct
  source 1..75: mol_type = other DNA
ctggaggatatccgcattcatttgcgcggtatcatgcacctgatggaaaaagacgcgacgccgaaatttggttcg

SEQ ID NO: 148418 - DNA, 75 bp, synthetic construct
  source 1..75: mol_type = other DNA
caggtccaacagcaaggaccgcggatcaatcagcttcgtgatttaggctggtggaagcaggccagcctggaagag

SEQ ID NO: 148419 - DNA, 75 bp, synthetic construct
  source 1..75: mol_type = other DNA
agcgaattaatcagcttcgtgatttgggctggtggaagcaagccagtctggaagagctggaggatatccgcattc

SEQ ID NO: 148420 - DNA, 75 bp, synthetic construct
  source 1..75: mol_type = other DNA
cacgtaaaagacaacgaaggtaaggccgttgccgggcgtttgtaccagcttgaaaccattgcccgcgttagcgaa

SEQ ID NO: 148421 - DNA, 75 bp, synthetic construct
  source 1..75: mol_type = other DNA
ccgtctgccgctgaacagtgtgccgcacgtaaaagacaacgaaggtaaggccgttgccgggcgtttgtaccagct

SEQ ID NO: 148422 - DNA, 75 bp, synthetic construct
  source 1..75: mol_type = other DNA
cacaccactgaattcctgcgcgaaggcatcaaacgggagaaattaagcgacgcacaaatccgtgagctggaagaa

SEQ ID NO: 148423 - DNA, 75 bp, synthetic construct
  source 1..75: mol_type = other DNA
gcagtcgcgtcagcaagcccgccaatatgacgacggcagctggcaaaatacctttaaacaagggattttgctcgc

SEQ ID NO: 148424 - DNA, 75 bp, synthetic construct
  source 1..75: mol_type = other DNA
gccgtatgagcgccgccagctggtcgcgcgcattgatgcgttaagtaccgagatcccggcacaggttcgcccact

SEQ ID NO: 148425 - DNA, 75 bp, synthetic construct
  source 1..75: mol_type = other DNA
tgccccgacggctgtggctggcagggctgccatgtctggcattgctaggttgcgtgcagaatcacaataagccag

SEQ ID NO: 148426 - DNA, 75 bp, synthetic construct
  source 1..75: mol_type = other DNA
tacagcgatgaaaaagtgctgcgccagctttccccgaaaacacagcaggatttgctatctgtcctggccccgctg

SEQ ID NO: 148427 - DNA, 75 bp, synthetic construct
  source 1..75: mol_type = other DNA
ttgaaaaagataacttatctatattcaagttctacctagcaagagctaggcgcattattccggcattacttgcat

SEQ ID NO: 148428 - DNA, 75 bp, synthetic construct
  source 1..75: mol_type = other DNA
tttgaatgcgtattcggatgggttgattgagagtgcttgtgaattagctaagcaaagaccagtgtacattatgcg

SEQ ID NO: 148429 - DNA, 75 bp, synthetic construct
  source 1..75: mol_type = other DNA
ttacgggttggtgacctttacctggggcaacgtcagcgctattgaccgtgaacgcgggctggtggtgatcaagcc

SEQ ID NO: 148430 - DNA, 75 bp, synthetic construct
  source 1..75: mol_type = other DNA
atatcccccaagcgcagcaatattaatattcacctgcaatgggtcgatacctggcttaaaaatattgtatttctt

SEQ ID NO: 148431 - DNA, 75 bp, synthetic construct
  source 1..75: mol_type = other DNA
ttgaagccaacatggatctgccgcgctatgggctggtgacctttacctggggcaacgtcagcgccattgaccgcg

SEQ ID NO: 148432 - DNA, 75 bp, synthetic construct
  source 1..75: mol_type = other DNA
gtacatgccccatcacatcctcaacatcaaagtattagagccttgcaaaccattatgcgtctcagtttgtctcat

SEQ ID NO: 148433 - DNA, 75 bp, synthetic construct
  source 1..75: mol_type = other DNA
accgttcgcctgggggaaagatgcccacgatgcggtgcataacgcggtggtgatggaagaagtggcgaaaatggc

SEQ ID NO: 148434 - DNA, 75 bp, synthetic construct
  source 1..75: mol_type = other DNA
gcatgggcgcaggcggggctggcgatcccggcgttaggcaccacgcacgccgactacttctttggcgacatcccg

SEQ ID NO: 148435 - DNA, 75 bp, synthetic construct
  source 1..75: mol_type = other DNA
cttctgaagtggcgtaataaaaatgttgattatggcaaacatactgaaggtacaaccggagatgatagtctgtac

SEQ ID NO: 148436 - DNA, 75 bp, synthetic construct
  source 1..75: mol_type = other DNA
agtggcctgtatgcgcagacgctggctgaacgggggtttgtcactctggcttttgacccttcatacacgggtgaa

SEQ ID NO: 148437 - DNA, 75 bp, synthetic construct
  source 1..75: mol_type = other DNA
tgcagtatggtgaagcgctggatgatctcttaactgcgattaaaaataaacaaaatgatttgcaagtgatgcacc

SEQ ID NO: 148438 - DNA, 75 bp, synthetic construct
  source 1..75: mol_type = other DNA
cacagctcaataatggaaaagcgctgtctgaagcagaaaacctgcttcaaagtatcagagactttgcagtcagta

SEQ ID NO: 148439 - DNA, 75 bp, synthetic construct
  source 1..75: mol_type = other DNA
tcagtgcttgctctgccgctgggaagctggaatgcgcattttgcgggttcaaagactgacgccttcgcaagaatt

SEQ ID NO: 148440 - DNA, 75 bp, synthetic construct
  source 1..75: mol_type = other DNA
tgttacatcgacagatgagtttatttcatgtcttaaacaaaccggaaataatgttgaggcaggtattgcaggagg

SEQ ID NO: 148441 - DNA, 75 bp, synthetic construct
  source 1..75: mol_type = other DNA
caatggcggtgctggagcctacaatgccagccatgacggtaaagccagcatcatcactaatgtcgctaatggcag

SEQ ID NO: 148442 - DNA, 75 bp, synthetic construct
  source 1..75: mol_type = other DNA
ccgccggtacccataatatccccggtgttcatggaagatggaggctatgagctgtttcacatcagcatacttgtc

SEQ ID NO: 148443 - DNA, 75 bp, synthetic construct
  source 1..75: mol_type = other DNA
accgttttgccactgaacttaagacctcttttctgaagctcacaatggatccgccggtacccataatatccccgg

SEQ ID NO: 148444 - DNA, 75 bp, synthetic construct
  source 1..75: mol_type = other DNA
atgcaaatcggtatcaaaaaaatcgccgcgctatacattgctaatgctgattacgataatgtcggtgatgccctg

SEQ ID NO: 148445 - DNA, 75 bp, synthetic construct
  source 1..75: mol_type = other DNA
cgtgggtcagttgaaagtaacggatgcgcaggtttcccagaatacccagagcattactaacctgaacaatcaggt

SEQ ID NO: 148446 - DNA, 75 bp, synthetic construct
  source 1..75: mol_type = other DNA
tgcacttaacggcattgccattggtagcaatgcgcaagtcattcatgtcaacagtattgcgataggtaatggttc

SEQ ID NO: 148447 - DNA, 75 bp, synthetic construct
  source 1..75: mol_type = other DNA
gccagccatgatggcaatgccagcaaaatcaccaacgttgcggctggtgatctctccacaaccagtaccgatgct

SEQ ID NO: 148448 - DNA, 75 bp, synthetic construct
  source 1..75: mol_type = other DNA
ggcgcaattgccatcggtcaagggaataaagctgacggcgcaaatgctatcgcgctgggtaatggtagtattaca

SEQ ID NO: 148449 - DNA, 75 bp, synthetic construct
  source 1..75: mol_type = other DNA
acgaacaccaccaacatcaccaacctgactgacgctgttgacagcctcggtgacgattccctgctgtggaacgct

SEQ ID NO: 148450 - DNA, 75 bp, synthetic construct
  source 1..75: mol_type = other DNA
tgtggagcagcggtttctccccttcagcaaggctttccagccccttatttaacatccgctttgcaccagctcctc

SEQ ID NO: 148451 - DNA, 75 bp, synthetic construct
  source 1..75: mol_type = other DNA
agttggacttattggtgctaccagtgatgaaattagagttgcaacaaaaaatattaaaatgattcatccacaact

SEQ ID NO: 148452 - DNA, 75 bp, synthetic construct
  source 1..75: mol_type = other DNA
tcctccaccagcagcgatgccattaacggttcacaactgtataccaccaacaagtacatcgctgatgcgctgggt

SEQ ID NO: 148453 - DNA, 75 bp, synthetic construct
  source 1..75: mol_type = other DNA
tggtgaaactggtcattcgtttcgcaccaatcggtatttttggtctggtagcttcaacgctggcaaccaccggtt

SEQ ID NO: 148454 - DNA, 75 bp, synthetic construct
  source 1..75: mol_type = other DNA
cttctctgctgctctggccgcagtagtcttcagctttgccttcccttctaccctgcacttgtccagtagcgcggg

SEQ ID NO: 148455 - DNA, 75 bp, synthetic construct
  source 1..75: mol_type = other DNA
gttggtgccctgaaagctgtagcgccgattctggtgctgatgctggtaatggcatctattgctaaccaccagcac

SEQ ID NO: 148456 - DNA, 75 bp, synthetic construct
  source 1..75: mol_type = other DNA
ttgacggtaaactcgttgaaacagaagagttagttattcacttcgaatataaagcaatgaaaaagggcactaagc

SEQ ID NO: 148457 - DNA, 75 bp, synthetic construct
  source 1..75: mol_type = other DNA
gatctgcccacagcgctgctgttgagcgtagtggcttctctgtgtgcctgtggcgcatccggcgtggcggggggg

SEQ ID NO: 148458 - DNA, 75 bp, synthetic construct
  source 1..75: mol_type = other DNA
cttctctgccgcccttactgcggttgtcttcagcttcgcgttcccttccacgttgcatttgtccaccagcgcagg

SEQ ID NO: 148459 - DNA, 75 bp, synthetic construct
  source 1..75: mol_type = other DNA
catgaagtgttatggcgtgtagggatgctggctggtggcttcgcggcgaacatgaccccagttgacacgggtttt

SEQ ID NO: 148460 - DNA, 75 bp, synthetic construct
  source 1..75: mol_type = other DNA
aaaggaaatcaccgataaaaagacgcacgaagttttatggcgcgtcggtatgctggctggtggcttcgcggctaa

SEQ ID NO: 148461 - DNA, 75 bp, synthetic construct
  source 1..75: mol_type = other DNA
gaggtggattttaaaggggttaagcaggcattagctaaaatgcattatacggttctggcggaatcaatatgttga

SEQ ID NO: 148462 - DNA, 75 bp, synthetic construct
  source 1..75: mol_type = other DNA
ggcttccatcgctaaccaccaacacgggcagaaaaccaatatccgccctattctgttcctctatctgctgggtac

SEQ ID NO: 148463 - DNA, 75 bp, synthetic construct
  source 1..75: mol_type = other DNA
accccttgctggtgtggtggaaaattcgtcgtaacccgttcccgctggtgctgctgtgcctgcgcgaaagcggcg

SEQ ID NO: 148464 - DNA, 75 bp, synthetic construct
  source 1..75: mol_type = other DNA
gatctgcccacggcgctgctgttgagcgtggtggcttctctgtgtgcctgtggcgcatccggcgtggcggggggg

SEQ ID NO: 148465 - DNA, 75 bp, synthetic construct
  source 1..75: mol_type = other DNA
ctactggtcttcttccaactacgatgcgacgattggcccaagacaacgctgccagcactattaccctgaagaatt

SEQ ID NO: 148466 - DNA, 75 bp, synthetic construct
  source 1..75: mol_type = other DNA
acgaaaccatcagtgaagatgaactacgccagcggctatcgcggatggggaccattgatcttcgcgtcgattatc

SEQ ID NO: 148467 - DNA, 75 bp, synthetic construct
  source 1..75: mol_type = other DNA
ccagcaggagtaccagcaggcgctgtggtacagcgccagtgcagaaagcctggcgctgagcgcgctcagtctgag

SEQ ID NO: 148468 - DNA, 75 bp, synthetic construct
  source 1..75: mol_type = other DNA
ttattgccggaccgtggatgctcaatctgttgctggattacgtccgcaccttgttcactaacctgccgtatatca

SEQ ID NO: 148469 - DNA, 75 bp, synthetic construct
  source 1..75: mol_type = other DNA
atgacacctgaatcggtcatgatgatgggaactgaagcgatgaaagtcgcgctggcactggctgccccactgttg

SEQ ID NO: 148470 - DNA, 75 bp, synthetic construct
  source 1..75: mol_type = other DNA
tgggaacagaagcgatgaaagtcgcgctggcgctggctgcgccattgctgctggtagcgctggtgaccggtctta

SEQ ID NO: 148471 - DNA, 75 bp, synthetic construct
  source 1..75: mol_type = other DNA
cgcgttttttcccactgccgcaggggcaaattgccgtcaccctgcgtgacgcccaggcctgctttaacctgaatg

SEQ ID NO: 148472 - DNA, 75 bp, synthetic construct
  source 1..75: mol_type = other DNA
cctgaaaaatgaacaacgtgtgcatctggcacagccgtgggcttctggccctcgttttttcccactgccgcaggg

SEQ ID NO: 148473 - DNA, 75 bp, synthetic construct
  source 1..75: mol_type = other DNA
agatatcaccgtgaatgagattgaactgacgatgaattcgttaattgtccgcatgggcccacaacacttttctgt

SEQ ID NO: 148474 - DNA, 75 bp, synthetic construct
  source 1..75: mol_type = other DNA
tggtacagcgccagtgcggaaagcctggcgctgagcgcgctcagtctgagcctgaaaaatgaaaagcgcgtgcat

SEQ ID NO: 148475 - DNA, 75 bp, synthetic construct
  source 1..75: mol_type = other DNA
tatcaaaaaatatgctcaaccaacttcctcaatgttgaaaatgaagcaaagaaaatgacaggtctgacaagcatc

SEQ ID NO: 148476 - DNA, 75 bp, synthetic construct
  source 1..75: mol_type = other DNA
ttttatggtattgaaaagctagatgaagaaacgattaaattttcagtattatcaacagcacttgctgatgagcgg

SEQ ID NO: 148477 - DNA, 75 bp, synthetic construct
  source 1..75: mol_type = other DNA
gcactaataagtacatcgctgatgcgctgggtggtgatgcagaagtcaacgctgacggtactatcactgcaccga

SEQ ID NO: 148478 - DNA, 75 bp, synthetic construct
  source 1..75: mol_type = other DNA
gaaaatttaaaggaagaaggcgaaagcactgggcaatttatcgtttcggcacttgaaggcgagatcaaacgccgc

SEQ ID NO: 148479 - DNA, 75 bp, synthetic construct
  source 1..75: mol_type = other DNA
ttcgggcgacacatagcccggagttttcaccggggacgtggtgtacacatccccgccatgaaaaacacgaccttc

SEQ ID NO: 148480 - DNA, 75 bp, synthetic construct
  source 1..75: mol_type = other DNA
cgctacgacaccaaagctgatggctctatcgactacagcaacatcactctcggtggcggcaatagcggtacgact

SEQ ID NO: 148481 - DNA, 75 bp, synthetic construct
  source 1..75: mol_type = other DNA
catcaacgtcgcggatggttctgaagcccatgatgcggtcactgttcgccagttgcaaaacgccattggtgcagt

SEQ ID NO: 148482 - DNA, 75 bp, synthetic construct
  source 1..75: mol_type = other DNA
tgggtaatggttctcagactacccgtggtgcgcagaccaactacactgcctacaacatggacgcgccgcagaact

SEQ ID NO: 148483 - DNA, 75 bp, synthetic construct
  source 1..75: mol_type = other DNA
gtactgcgcagtttatcgttacagccatgcgtggcgagatcaaacgccgccagcgccgccaggccaaagaatcag

SEQ ID NO: 148484 - DNA, 75 bp, synthetic construct
  source 1..75: mol_type = other DNA
actgggatatgaccggcgatgcggttgggccaaatatgattaatttctggaagaatgtcagtatcgctggcgcgt

SEQ ID NO: 148485 - DNA, 75 bp, synthetic construct
  source 1..75: mol_type = other DNA
atggcaacaaaagcagttaatgcaaaatccaaaaagcttgaggctcgagtaccacacgcaatagctgatgctgta

SEQ ID NO: 148486 - DNA, 75 bp, synthetic construct
  source 1..75: mol_type = other DNA
gtaccgcagggtttcttgtcactgctgcgaaaggcgaaatcaaacgccgccagcgccaaaaggcaaaagaagagc

SEQ ID NO: 148487 - DNA, 75 bp, synthetic construct
  source 1..75: mol_type = other DNA
caggcagttacacagcacattaaagcgatctatgaagaaggcgaacttgaacaaaacgcaacctgtaagtcttac

SEQ ID NO: 148488 - DNA, 75 bp, synthetic construct
  source 1..75: mol_type = other DNA
accccatgcaatagctgacgctgtagaaaatttaaaggaagaaggcgaaagcactgggcaatttatcgtttcggc

SEQ ID NO: 148489 - DNA, 75 bp, synthetic construct
  source 1..75: mol_type = other DNA
agtcgaattcatccagtttattccggtggtcgagcgcctggctgatgaaacagctgccagcgatggactgaaact

SEQ ID NO: 148490 - DNA, 75 bp, synthetic construct
  source 1..75: mol_type = other DNA
gcattgctaattgtcgttgtcgtaggtcgttctgtcagcctgcatcgtcagcaaatcaaagactggctggggcgt

SEQ ID NO: 148491 - DNA, 75 bp, synthetic construct
  source 1..75: mol_type = other DNA
acttgcaccaacagaaaaagcacggaaagcttttgaaaaacttaagattactcagcttaaagatattaatgttat

SEQ ID NO: 148492 - DNA, 75 bp, synthetic construct
  source 1..75: mol_type = other DNA
tcgatgctagcggtaaaccggggctgaattatttgtgtgccgggtatcagcgttatttccgccatctaccgccat

SEQ ID NO: 148493 - DNA, 75 bp, synthetic construct
  source 1..75: mol_type = other DNA
cttttcacgtgatggcgaaaccgagcggttccgattgtaatctgaactgtgactactgtttttatctcgaaaaac

SEQ ID NO: 148494 - DNA, 75 bp, synthetic construct
  source 1..75: mol_type = other DNA
ggcgatattcgaccactggatcaaacgcgacgtcggcaagattttcgtgatgaatatcgaatgggcgtttgccaa

SEQ ID NO: 148495 - DNA, 75 bp, synthetic construct
  source 1..75: mol_type = other DNA
gtttgaccgggtgcatatcggcctcgacttcttcgatgcctctatcaaccgcattgccgcgtgggtcattggtac

SEQ ID NO: 148496 - DNA, 75 bp, synthetic construct
  source 1..75: mol_type = other DNA
gtgtcagaattgatgattaagcgtgaacaaaatattcttattgttggaaattcttactcccgggtagataatttt

SEQ ID NO: 148497 - DNA, 75 bp, synthetic construct
  source 1..75: mol_type = other DNA
gaatagtgaagaacacataattatttttaattgtgttggatggcctgatttagggggggggcagcagtatcacag

SEQ ID NO: 148498 - DNA, 75 bp, synthetic construct
  source 1..75: mol_type = other DNA
gtattgccgcgtgggtcattggtacacgcaatatgaaaaaagccctgctgcgtgcgttgctggaacctaccgctg

SEQ ID NO: 148499 - DNA, 75 bp, synthetic construct
  source 1..75: mol_type = other DNA
cgccagcgtttgctggcagcactggatgaagtgatcagcgagaagctggatccggcgcaccatatcgacgccgtt

SEQ ID NO: 148500 - DNA, 75 bp, synthetic construct
  source 1..75: mol_type = other DNA
gggagctggcgaaacagcgtttcgcggcagtagggattgatgtcgaggaggcgctgcgccaacttgatcgtttac

SEQ ID NO: 148501 - DNA, 75 bp, synthetic construct
  source 1..75: mol_type = other DNA
cccatgaccagccgatctacgaaaacccatcgccggggaacaaagcgggcggtatcaccacgctggaagacaaat

SEQ ID NO: 148502 - DNA, 75 bp, synthetic construct
  source 1..75: mol_type = other DNA
cccttggctgtacccagaaagcgggttccagcgtcgtggttgacgtgctgcgttacggcgagcgtctgaaaacgc

SEQ ID NO: 148503 - DNA, 75 bp, synthetic construct
  source 1..75: mol_type = other DNA
gactactgtttttatctcgaaaaacaatccctttaccacgaaaagccagtcacgcatatggacgatgacacgctg

SEQ ID NO: 148504 - DNA, 75 bp, synthetic construct
  source 1..75: mol_type = other DNA
aaaaaagctcataagttgaaaatgaaaagattacaaagaatgcttaagaaaatggcatgtgaccgggtttcacca

SEQ ID NO: 148505 - DNA, 75 bp, synthetic construct
  source 1..75: mol_type = other DNA
cgttgagtttgccaacggtaagcaaacctgcaacgagcgtaacgacttccgcgaactggcgatcttcaaaagcgg

SEQ ID NO: 148506 - DNA, 75 bp, synthetic construct
  source 1..75: mol_type = other DNA
agtttggtctggagtgcggcggttctgacggtctttccggtattaccgccaacccaatgctcggtcgtttctctg

SEQ ID NO: 148507 - DNA, 75 bp, synthetic construct
  source 1..75: mol_type = other DNA
gaaatatggtgctggcaggaagataagtaacagcttccagactaacggcgtgctgctcgatgacgaatggtgtgc

SEQ ID NO: 148508 - DNA, 75 bp, synthetic construct
  source 1..75: mol_type = other DNA
atcttaaagcaatggctgatttgctggcgcacggtcgcccggccagcgacattatgcaggcgcatttgctggtgg

SEQ ID NO: 148509 - DNA, 75 bp, synthetic construct
  source 1..75: mol_type = other DNA
atatgcaccagcaaacaattgcagaaatgatcgattccccgcaacagcaggcgtttggtgaagataaattggtga

SEQ ID NO: 148510 - DNA, 75 bp, synthetic construct
  source 1..75: mol_type = other DNA
aacatcatgtcgactataacgtgctggtctgcgtcaaccgcaccagcgcgcagcaaccgttgcaggtttatgatt

SEQ ID NO: 148511 - DNA, 75 bp, synthetic construct
  source 1..75: mol_type = other DNA
gaactgacagaatggtcggtgcgccccgatgagttcggtgagtttctggtggcaatttttgaccactggatcaaa

SEQ ID NO: 148512 - DNA, 75 bp, synthetic construct
  source 1..75: mol_type = other DNA
gtggtggagcgcctggctgatgaaacagctgcccgcaatggactgaaattacatgcgcctggtgatattcagggg

SEQ ID NO: 148513 - DNA, 75 bp, synthetic construct
  source 1..75: mol_type = other DNA
ttatgctcggcattggtagttctcttagcagccatgatgtcatactgtatcgccatcccgctgggcctggcacgc

SEQ ID NO: 148514 - DNA, 75 bp, synthetic construct
  source 1..75: mol_type = other DNA
atggggcaaaccgacctgtgtcaacaacgtcgaaaccctgtgtaacgttccggcgatcctcgctaacggcgtgga

SEQ ID NO: 148515 - DNA, 75 bp, synthetic construct
  source 1..75: mol_type = other DNA
ccgaaatcattatatgcagtacaagatgcaatcaaaatgtcgacaccacacaatggtattgtattggactatttt

SEQ ID NO: 148516 - DNA, 75 bp, synthetic construct
  source 1..75: mol_type = other DNA
ctggtgcgaatggcgctaccacctcgtttcgcggcgcaggtggcactggagctaaagatggctttctcttcgcgc

SEQ ID NO: 148517 - DNA, 75 bp, synthetic construct
  source 1..75: mol_type = other DNA
aatcgtccgttgaaaggtgcgacaccggcggcgtcagatatacaggaagcgaaggaaattctcgtcgagcattac

SEQ ID NO: 148518 - DNA, 75 bp, synthetic construct
  source 1..75: mol_type = other DNA
atgaagttcagggcttgaaagaaaaagataaagctaccgataagaaagagaactttaaaaaagaattcagctttg

SEQ ID NO: 148519 - DNA, 75 bp, synthetic construct
  source 1..75: mol_type = other DNA
aattatcaagtgttaaatcttattaaaataaaatataataataaagttgatggtatatatatagatccaccttat

SEQ ID NO: 148520 - DNA, 75 bp, synthetic construct
  source 1..75: mol_type = other DNA
ggcgatcataacttacctaccgcctttaccgttgatgaagaagacggcgagattgttcgtagcctgaaaatccgc

SEQ ID NO: 148521 - DNA, 75 bp, synthetic construct
  source 1..75: mol_type = other DNA
caagaaattctatataccattaattcatccagttaccgggaaaccatgcgctatgccaccaaatggtttttctcg

SEQ ID NO: 148522 - DNA, 75 bp, synthetic construct
  source 1..75: mol_type = other DNA
ctgatgaaattaacgactatctggataataagctgaaggccaaaatccagtctgcgctggcggatgcaggaaatg

SEQ ID NO: 148523 - DNA, 75 bp, synthetic construct
  source 1..75: mol_type = other DNA
gccaacagattcgatttatatgcaaaagaaaatacgttcgacgttatctatatcaatggcgatcataacttacct

SEQ ID NO: 148524 - DNA, 75 bp, synthetic construct
  source 1..75: mol_type = other DNA
agacaagttgaaatatcagaagaaattaggcgtaacttgcgtagaactggttcaggttctactcgtgccgaatct

SEQ ID NO: 148525 - DNA, 75 bp, synthetic construct
  source 1..75: mol_type = other DNA
gtagaacgtcgcgcgtcgctttatgacgaaatcgacgatggcgacgacagccgcaaagaaccgacagccgtcgga

SEQ ID NO: 148526 - DNA, 75 bp, synthetic construct
  source 1..75: mol_type = other DNA
tggggttacagggggcgaaagttgtcccggcagttgttttttctattctgctggcgttgacaataatgtctttat

SEQ ID NO: 148527 - DNA, 75 bp, synthetic construct
  source 1..75: mol_type = other DNA
ggcatgtatttttatatggctgatgcggcgacctttactgattgcgcgactggaaaacgtttcatggtggcgaat

SEQ ID NO: 148528 - DNA, 75 bp, synthetic construct
  source 1..75: mol_type = other DNA
gtgtcagaattgatgattaaatgtgaaaacaatattcttattgttgggaactcttactcccgaattgatgttttt

SEQ ID NO: 148529 - DNA, 75 bp, synthetic construct
  source 1..75: mol_type = other DNA
actgaagtgcaactttaagactgtcgggaagttaacgggtaagaataatattgttgttgtaagttgtccgggaag

SEQ ID NO: 148530 - DNA, 75 bp, synthetic construct
  source 1..75: mol_type = other DNA
gttttgttgaagcatcaaggtttataagtgatttaaaaaaagaaccgggtaattattatttattgcttgagtttc

SEQ ID NO: 148531 - DNA, 75 bp, synthetic construct
  source 1..75: mol_type = other DNA
cctggccaggttccttgcccatttagtggggtcgggaaatcaaagttccggttccgtaaaaaggacctctttacc

SEQ ID NO: 148532 - DNA, 75 bp, synthetic construct
  source 1..75: mol_type = other DNA
ctataaactggaaacgaaacctgatcgtcgcctggctaggctgttttcttaccggtgccgccttcagcctggtaa

SEQ ID NO: 148533 - DNA, 75 bp, synthetic construct
  source 1..75: mol_type = other DNA
atctgctcgctggcgctgatcgctaacctgcaaaacaccgatgccgccgccggtatgaccaaagagctggcgcag

SEQ ID NO: 148534 - DNA, 75 bp, synthetic construct
  source 1..75: mol_type = other DNA
cctctctgttcctcgaaaaagacggaacctgggtgatgaatgagcgttatctcggtgctcgtgaagaaccttcct

SEQ ID NO: 148535 - DNA, 75 bp, synthetic construct
  source 1..75: mol_type = other DNA
aaccgccgacaagttggtacttaccgatagtaaaggtgagaagtcatattatcgggtgagaggcgatgcgctgga

SEQ ID NO: 148536 - DNA, 75 bp, synthetic construct
  source 1..75: mol_type = other DNA
accgacagcaaaggtgaaaagtcatattatcgggcgaaaggcgatgcgttggagatgctcgatcgtgaaggcaat

SEQ ID NO: 148537 - DNA, 75 bp, synthetic construct
  source 1..75: mol_type = other DNA
ccgtctgttttttctgccttacctgtttggccaggattttctgtatgtcgaagcgtctgtgtacgcgctggcgaa

SEQ ID NO: 148538 - DNA, 75 bp, synthetic construct
  source 1..75: mol_type = other DNA
tcactctgaatgttgaagagtgcgaccgtctgttttttctgccttacctgtttggccaggattttctgtatgtcg

SEQ ID NO: 148539 - DNA, 75 bp, synthetic construct
  source 1..75: mol_type = other DNA
tgaatgttgaagagtgcgacagtctctcctttctgccttacctgtttggccaggattttctgtatgccgaagcgt

SEQ ID NO: 148540 - DNA, 75 bp, synthetic construct
  source 1..75: mol_type = other DNA
ctgcaggagcggcactattactgattatgccgatagcggtatggatttctggctggcgttggcaaccaggggagc

SEQ ID NO: 148541 - DNA, 75 bp, synthetic construct
  source 1..75: mol_type = other DNA
gcaaattggtttgaccgcacggtcagcgccgatgccgcaggcatcattctgacttcccttgtgattaaccgccag

SEQ ID NO: 148542 - DNA, 75 bp, synthetic construct
  source 1..75: mol_type = other DNA
aataagttggagtcattaccggaatatgaaggcggattctggcacttcatccgcctgccggacggtggcggttac

SEQ ID NO: 148543 - DNA, 75 bp, synthetic construct
  source 1..75: mol_type = other DNA
tgtttcagccagaagcgcagattttcgggatgaatttaacgttaaacgtgaggtgtcctggcatgatgtgaccgt

SEQ ID NO: 148544 - DNA, 75 bp, synthetic construct
  source 1..75: mol_type = other DNA
gagggtaaaacgctgtccggcgtggcagagcgcctgatgagcctgtcgctgaccgacaaccggggatttgaggca

SEQ ID NO: 148545 - DNA, 75 bp, synthetic construct
  source 1..75: mol_type = other DNA
tcagttccgcattgctgaccgcgaagcgtatacgggggtacgtgcttactggcttgatcttaattacgggaaaaa

SEQ ID NO: 148546 - DNA, 75 bp, synthetic construct
  source 1..75: mol_type = other DNA
cttgtgattaaccgtcagttgtggctgtaccacgacagcggggatgcagggttgacacacctgtacaggatgcgt

SEQ ID NO: 148547 - DNA, 75 bp, synthetic construct
  source 1..75: mol_type = other DNA
atgcagtatgtgaatacatgcccggtcctgaatgttgaagagtgtgaccgcctgtcttttatgccgtacctgttc

SEQ ID NO: 148548 - DNA, 75 bp, synthetic construct
  source 1..75: mol_type = other DNA
attgattgaaagcctcatgactaaatacagctgttatgagcacagccagtcgacggaaatgcctgcttctatacc

SEQ ID NO: 148549 - DNA, 75 bp, synthetic construct
  source 1..75: mol_type = other DNA
atcctggagcatacgtgtaattttagatgctctgttattacaatggctttatactagaatgtgttctgtatatga

SEQ ID NO: 148550 - DNA, 75 bp, synthetic construct
  source 1..75: mol_type = other DNA
ggtcctgatgattttttgtttgatgtctgccggtttacagactgtattgagcctgatgattatgtgtattgtccg

SEQ ID NO: 148551 - DNA, 75 bp, synthetic construct
  source 1..75: mol_type = other DNA
cgtagcgtaagtacaacaatggaatatgtggaactcaaaatggatattgtgggcaaaacactggaagaagagttg

SEQ ID NO: 148552 - DNA, 75 bp, synthetic construct
  source 1..75: mol_type = other DNA
ggccgtacatatattgcttctgcgaacaatattgaaaagcgtaagctttatattcgtagcctgaccacaaaaaca

SEQ ID NO: 148553 - DNA, 75 bp, synthetic construct
  source 1..75: mol_type = other DNA
atgaaataccacgtcagtgtgtgactcctggtgattatgttattcataaaggaagaacgtatattgcttcggtaa

SEQ ID NO: 148554 - DNA, 75 bp, synthetic construct
  source 1..75: mol_type = other DNA
ctgtctgccctgctggcgcagacggaggaagtgagtgtgccgctggattcactgattaaatcaccgctgaatgtg

SEQ ID NO: 148555 - DNA, 75 bp, synthetic construct
  source 1..75: mol_type = other DNA
caattatgggattcgggatcaagatgaaactgctgcctcagacagaaaacccgttggtggaagcatcagttgcga

SEQ ID NO: 148556 - DNA, 75 bp, synthetic construct
  source 1..75: mol_type = other DNA
gggcctgaatcagtctgacgatccggctgagatcgccaaatacctgaaagcgaactccgtggataccgtgatggg

SEQ ID NO: 148557 - DNA, 75 bp, synthetic construct
  source 1..75: mol_type = other DNA
aaccgccagttgtggctgtaccacgacagcggggatgcaggactgacccagctttaccggatgcgcgatgcgcag

SEQ ID NO: 148558 - DNA, 75 bp, synthetic construct
  source 1..75: mol_type = other DNA
gttgccgcaaacggagaatccactggatgatgcttccgttcccggggagtccaaaaagaaaaaaacgcttactga

SEQ ID NO: 148559 - DNA, 75 bp, synthetic construct
  source 1..75: mol_type = other DNA
tggcacttcatccgcctgccggacggtggcggttacatgatgccggatggcgatcgtttccacatggtgaacggt

SEQ ID NO: 148560 - DNA, 75 bp, synthetic construct
  source 1..75: mol_type = other DNA
gaaaactggtttgaccgtaccgtgagtgctgatgccgcaggcatcatcctgacctcccttgtgattaaccgccag

SEQ ID NO: 148561 - DNA, 75 bp, synthetic construct
  source 1..75: mol_type = other DNA
tactctgatggtcgatgtggaatacaaatgcgagcagaccaactttgacacggtactgacctacgcgaagctgga

SEQ ID NO: 148562 - DNA, 75 bp, synthetic construct
  source 1..75: mol_type = other DNA
aatgagtggtttattagatgccgcagaaattacgttgataagtcacaaaactctagagagtcaattacgtgatgg

SEQ ID NO: 148563 - DNA, 75 bp, synthetic construct
  source 1..75: mol_type = other DNA
cgcgccaaaacctccaaccgtgctgaaaacccgctgctgcaggacgtcaataaaggctggctgcagaaaatccgc

SEQ ID NO: 148564 - DNA, 75 bp, synthetic construct
  source 1..75: mol_type = other DNA
attttagggaaacgctgaatacccgccgtgaaaaatcgtggcacaagaccaccgtcggggaagtggtgaaggaaa

SEQ ID NO: 148565 - DNA, 75 bp, synthetic construct
  source 1..75: mol_type = other DNA
gcgtctgaacggtgtggcagttgaagaactgtccagcaaattcaccgtagagccgtctgtacagcagactctgga

SEQ ID NO: 148566 - DNA, 75 bp, synthetic construct
  source 1..75: mol_type = other DNA
cacaccgggcgcagtgaaagtcggcaaaggtggcgaatatgccaacctggatgccgtggtgatggatgccgtcaa

SEQ ID NO: 148567 - DNA, 75 bp, synthetic construct
  source 1..75: mol_type = other DNA
attgattcggcggatgggttgccgatggtggtgtacaacattccggcgttaagcggcgttaaactgaccctggat

SEQ ID NO: 148568 - DNA, 75 bp, synthetic construct
  source 1..75: mol_type = other DNA
cgagcacaccattgataacagtggctttaccacgcagcttgagcttgaagccaaaatcccggaatggatagcaga

SEQ ID NO: 148569 - DNA, 75 bp, synthetic construct
  source 1..75: mol_type = other DNA
gagggtaaaacgctgtcaggcgtggcagagcgcctgatgagcctgtcactgaccgacaaccggggatttgaagcg

SEQ ID NO: 148570 - DNA, 75 bp, synthetic construct
  source 1..75: mol_type = other DNA
ggccagccgttgccatcgttcgccattacacgcagcagcggcgatcgccatcagttccgcattgctgaccgcgag

SEQ ID NO: 148571 - DNA, 75 bp, synthetic construct
  source 1..75: mol_type = other DNA
ctctggcgatctctatcagatggagcagatccgtcgtgaacatcctgatctggtgctctataacggttacgacga

SEQ ID NO: 148572 - DNA, 75 bp, synthetic construct
  source 1..75: mol_type = other DNA
attgattcagcggatggtttgccgatggtggtgtacaacattccggcgttaagtggcgttaaactgagcctggat

SEQ ID NO: 148573 - DNA, 75 bp, synthetic construct
  source 1..75: mol_type = other DNA
gcgcagggctgactcacctgtacaggatgcgcgatgcgcagttgtggagccacatcgaatttcaccccgaatgca

SEQ ID NO: 148574 - DNA, 75 bp, synthetic construct
  source 1..75: mol_type = other DNA
agcacaccattgataacagtggctttaccacgcagcttgagcttgaagccaaaatcccggaatggatagcagaaa

SEQ ID NO: 148575 - DNA, 75 bp, synthetic construct
  source 1..75: mol_type = other DNA
atgctgggcgcaatcaccacggtaaaaagcggtaatctgttattcatcatgcccggtggtggcgtgaacgcacag

SEQ ID NO: 148576 - DNA, 75 bp, synthetic construct
  source 1..75: mol_type = other DNA
gatgcgcgatgcgcagttgtggagccacatcgaatttcaccccgaatgtaacgcgatttacgcggcactggagtg

SEQ ID NO: 148577 - DNA, 75 bp, synthetic construct
  source 1..75: mol_type = other DNA
agagtataaggagctgcgagcggatataagcacgttaaaagaatggcgtgatcagatcaaaacaaggcgcactct

SEQ ID NO: 148578 - DNA, 75 bp, synthetic construct
  source 1..75: mol_type = other DNA
tgccgggatagcggcccgattgagaatattaagctcggctttagccataagctaaacctagtgcatgctatgttt

SEQ ID NO: 148579 - DNA, 75 bp, synthetic construct
  source 1..75: mol_type = other DNA
tggcgcgtggccgcgcggatttgtacccggaacagcccgccagcgtctacggctttaagtccacgatcgacagtg

SEQ ID NO: 148580 - DNA, 75 bp, synthetic construct
  source 1..75: mol_type = other DNA
gtcataagctggaatcaaccgtcagcggcgagctggctgggatcgccattgagcacgttgaccagactaacgaat

SEQ ID NO: 148581 - DNA, 75 bp, synthetic construct
  source 1..75: mol_type = other DNA
gtgaaacgccgcaaaccgtcaaaaccaaaaaaggagaaaagcagcagccgggaaggcgactatatggaaggtgcg

SEQ ID NO: 148582 - DNA, 75 bp, synthetic construct
  source 1..75: mol_type = other DNA
gtgattatatggaaggcgcggaaggcaatgtgtttgtgttacgcaagacttatcagaacgagcaggcagcaagac

SEQ ID NO: 148583 - DNA, 75 bp, synthetic construct
  source 1..75: mol_type = other DNA
tttaaacagccaatagatgatgcggaatggaccattacgactctgacacataccgtcagcccggataacggtttt

SEQ ID NO: 148584 - DNA, 75 bp, synthetic construct
  source 1..75: mol_type = other DNA
tgcggtcattacgctggcgctgggttggaaggggcagccgcttttccctaaagggtcattcacagtggacgagat

SEQ ID NO: 148585 - DNA, 75 bp, synthetic construct
  source 1..75: mol_type = other DNA
ctaaccattcgccagtgtggggagtaacagaatttatattctggaaactggcgcctaaaaaatgggggggaggag

SEQ ID NO: 148586 - DNA, 75 bp, synthetic construct
  source 1..75: mol_type = other DNA
aaattcttgaagaatacagaaggttcatgcaaactgaatgaactggtttctgtcgctgcgaacaacagactccac

SEQ ID NO: 148587 - DNA, 75 bp, synthetic construct
  source 1..75: mol_type = other DNA
atcgaagagatccagctgaccgttacggtagttatcccggaatccggcgacctgaactggggcggtattgaaggt

SEQ ID NO: 148588 - DNA, 75 bp, synthetic construct
  source 1..75: mol_type = other DNA
taacaaaatatgacgaccgcatgtttcgaattatgggcctgtggttgaaaaccaaattcagtaattggtttgatt

SEQ ID NO: 148589 - DNA, 75 bp, synthetic construct
  source 1..75: mol_type = other DNA
agttgctcgccgaccgctgaaaatggtgctggccgtggcgctggaaccgctgttaagtcgggctgccaataaact

SEQ ID NO: 148590 - DNA, 75 bp, synthetic construct
  source 1..75: mol_type = other DNA
atgttgctggctgtggcgctggaaccgctgttaagtcgggctgccaataaactggcgcagcgttataaaaggtga

SEQ ID NO: 148591 - DNA, 75 bp, synthetic construct
  source 1..75: mol_type = other DNA
cgcctaaagcattcatggatatgtttgaccatagaatgtattgcctgtcctatctcgcatggcaaaaaatgcatc

SEQ ID NO: 148592 - DNA, 75 bp, synthetic construct
  source 1..75: mol_type = other DNA
caatcagtatcggatccgcaggcgcagccagatactgttgcaggtgacattcctaagatagtgacagacttcctt

SEQ ID NO: 148593 - DNA, 75 bp, synthetic construct
  source 1..75: mol_type = other DNA
atgactatctctgttttagaccgtctgaaattgggtaaagagctatcagatttaatgcaggcgcagaaaaccgcg

SEQ ID NO: 148594 - DNA, 75 bp, synthetic construct
  source 1..75: mol_type = other DNA
tctggactgcttcactgttgaagtgggtgagaaatacaccgtcgacagtgaagcgaaaattgatatcaaaatggc

SEQ ID NO: 148595 - DNA, 75 bp, synthetic construct
  source 1..75: mol_type = other DNA
atataaacaataaacttggatttaatatttcaatcggttctggagtaaaaaaccataaagaacggtgcttttgta

SEQ ID NO: 148596 - DNA, 75 bp, synthetic construct
  source 1..75: mol_type = other DNA
aaaattacgttataatgatgatacacccaaagcgttcattaatattttcgatcacagaatgtattgcctgtctta

SEQ ID NO: 148597 - DNA, 75 bp, synthetic construct
  source 1..75: mol_type = other DNA
taaagtttttatatgcggcaaaccggccgcacggatgggcgataactgtgctcatgggggggtaattgtcagcgg

SEQ ID NO: 148598 - DNA, 75 bp, synthetic construct
  source 1..75: mol_type = other DNA
atatatataaagcaaagaaaaaaaatggaatatcaggaaaaaatctcaaatataaatgtgcttatgaaaggcttg

SEQ ID NO: 148599 - DNA, 75 bp, synthetic construct
  source 1..75: mol_type = other DNA
aagaagttcttaaaaaagaccctaacgattcattagaaagcgctgatattggcccgattttcagtgaagctatag

SEQ ID NO: 148600 - DNA, 75 bp, synthetic construct
  source 1..75: mol_type = other DNA
gccgcgaatcaaccgctggctgatatcagtgagatgcgcgtggtacagggaatggacgccgggctttatcaaaaa

SEQ ID NO: 148601 - DNA, 75 bp, synthetic construct
  source 1..75: mol_type = other DNA
ggtgctgttgtttattatgttaataccgttttaaataaaggttcagatattcttacctggtttatgctcggcgga

SEQ ID NO: 148602 - DNA, 75 bp, synthetic construct
  source 1..75: mol_type = other DNA
gggaccgatagcgggattctgtttaatggctgcaacacgctgacggccagtaacattactcttaccgggagcagt

SEQ ID NO: 148603 - DNA, 75 bp, synthetic construct
  source 1..75: mol_type = other DNA
tacatcaagcatcagctgctgtctatcgcgctcaacggtatgaccaagttccgcacccgcatcctgccgcagctg

SEQ ID NO: 148604 - DNA, 75 bp, synthetic construct
  source 1..75: mol_type = other DNA
aacttccggcccgtctcacttttgcattagcggcgttgattgcgttctatcgtggtgaacgtaatggtgaaacgt

SEQ ID NO: 148605 - DNA, 75 bp, synthetic construct
  source 1..75: mol_type = other DNA
acgaaagggctaaatatgattaactccccgtttactaaactgtggggcggctctagttactcacctactgattat

SEQ ID NO: 148606 - DNA, 75 bp, synthetic construct
  source 1..75: mol_type = other DNA
ctgatgaccgatacccattaaatggttttgctattgatggagtaaagtctggaaagcttgaggggagcaatattg

SEQ ID NO: 148607 - DNA, 75 bp, synthetic construct
  source 1..75: mol_type = other DNA
caccgctcaagaaggaaataatggtgatattcatgaggttaactttgaacaagtcgctgccatgttagtaggata

SEQ ID NO: 148608 - DNA, 75 bp, synthetic construct
  source 1..75: mol_type = other DNA
agtcaccgggcgtttccgtaacccgtacattaagcatcagttgctgtccattgcgctcaacggtatgaccaagtt

SEQ ID NO: 148609 - DNA, 75 bp, synthetic construct
  source 1..75: mol_type = other DNA
gggcaatccggtgggcagtctgccggagaagatgaagaaaaactgacgtggtttgaaaagaaagtgctgaaaccc

SEQ ID NO: 148610 - DNA, 75 bp, synthetic construct
  source 1..75: mol_type = other DNA
ctgcgtatcagtggcgaaattcctttcaaaaatccggagattctgaagcgtatctttgaactggccagcgctacc

SEQ ID NO: 148611 - DNA, 75 bp, synthetic construct
  source 1..75: mol_type = other DNA
ggctatcaaccttcgtgaagccacgttcaccggtcagattgatgccgtaccgcaggaggatcgccttgcctggca

SEQ ID NO: 148612 - DNA, 75 bp, synthetic construct
  source 1..75: mol_type = other DNA
ggatagcagatcaattgatgatggaaacgcaaagcaaggctacccaggcaagtacaacggctggcgcagtagcgg

SEQ ID NO: 148613 - DNA, 75 bp, synthetic construct
  source 1..75: mol_type = other DNA
ctggcaccggtgacgcaagcagcagcgccgcgaaagaaagcgatcagaagctgacgtggtttgaaagcaaggtat

SEQ ID NO: 148614 - DNA, 75 bp, synthetic construct
  source 1..75: mol_type = other DNA
ggcgatcaattttcgtgaggcaacttttaccggaacgctggacgcgccgcagcaggatggccgcatgtcctggct

SEQ ID NO: 148615 - DNA, 75 bp, synthetic construct
  source 1..75: mol_type = other DNA
cctcctgttccgctactgaaggcgtgatgcgtaatggcaaaagtactgccgggcatcaacgttatctctgctctc

SEQ ID NO: 148616 - DNA, 75 bp, synthetic construct
  source 1..75: mol_type = other DNA
aaaactcaaaggatttaaaacagccattgtaagtagcgatgaagcgccgccaggatgcaagggggggcaaagggc

SEQ ID NO: 148617 - DNA, 75 bp, synthetic construct
  source 1..75: mol_type = other DNA
acatgcatttctgactgcatggttaaagtcttcctcggtagtgatggtttacctgtaaaagcggagtcatggtga

SEQ ID NO: 148618 - DNA, 75 bp, synthetic construct
  source 1..75: mol_type = other DNA
cgccgcaaacagattattgaaacaatgcgtatggtcgggctgctaccggatcacgtcagttactatccgcatatg

SEQ ID NO: 148619 - DNA, 75 bp, synthetic construct
  source 1..75: mol_type = other DNA
gctgcatgaactcaccaaacggctgattgccgggcactttggcgaagcattgacagcggatgcgtggcgtaaaga

SEQ ID NO: 148620 - DNA, 75 bp, synthetic construct
  source 1..75: mol_type = other DNA
cagcagtctgtttgccggactttatgacctgctcaggatgcaacccggagaggcaccacgtgaaacagacccggt

SEQ ID NO: 148621 - DNA, 75 bp, synthetic construct
  source 1..75: mol_type = other DNA
gaccgaacccggaccgggccgggataaaatttacggtattgttcacggtgtcatgccatccatcggcgcggcagc

SEQ ID NO: 148622 - DNA, 75 bp, synthetic construct
  source 1..75: mol_type = other DNA
ggcttaccgtcatgacgttagtcaggcttttgccttacgctctattataaaaatcgctcagcaggtaaataaaga

SEQ ID NO: 148623 - DNA, 75 bp, synthetic construct
  source 1..75: mol_type = other DNA
gtacctttctacattgcagggcatcgtagtcatagctcccatcgaagccatagttctcatagatcttcgtctggt

SEQ ID NO: 148624 - DNA, 75 bp, synthetic construct
  source 1..75: mol_type = other DNA
gcaaccgtctcctcagccatcagaccacccggaccatcacggaagacagcgtcacccgtgagaagggctctctgc

SEQ ID NO: 148625 - DNA, 75 bp, synthetic construct
  source 1..75: mol_type = other DNA
gcagtaacctcacgctgacggcgcaggtgctggcgaacaccggcagcggactggtacaggctgccaccctgctgc

SEQ ID NO: 148626 - DNA, 75 bp, synthetic construct
  source 1..75: mol_type = other DNA
ggttattcctggtcgtgacattggcggtggcattagtatgcctgtcaatatcaacattcagaccacaaacggatt

SEQ ID NO: 148627 - DNA, 75 bp, synthetic construct
  source 1..75: mol_type = other DNA
actcaatgcgtcaattccgtcagtctatcgacggtggcgtgttgcgtgctgaagaattcaacagcctgttagaaa

SEQ ID NO: 148628 - DNA, 75 bp, synthetic construct
  source 1..75: mol_type = other DNA
caagcgcaaggaagagctaaatagcaacaacgagaagaaatttggccctacagttggtaaggtcatgacgtttgc

SEQ ID NO: 148629 - DNA, 75 bp, synthetic construct
  source 1..75: mol_type = other DNA
gtggcttaatattgtcgatcgtgatggtagtacattaacgctccctaaaaatcttcccattaaagaaggtattgc

SEQ ID NO: 148630 - DNA, 75 bp, synthetic construct
  source 1..75: mol_type = other DNA
gtgcctcagtagaggccttgacaagtacatctcttttacctttacgagacttgatcgttaaagcacgagaacaaa

SEQ ID NO: 148631 - DNA, 75 bp, synthetic construct
  source 1..75: mol_type = other DNA
tatcaatgagcttaaagtagaaattatgggccttgttgagcagttggatgatctttttggcgtgtcagatggcgt

SEQ ID NO: 148632 - DNA, 75 bp, synthetic construct
  source 1..75: mol_type = other DNA
cttgaacagcttttgaaaaagttcaggagcgtggtcaacgaacgtcgtgaagaatactatcaggagattggtgag

SEQ ID NO: 148633 - DNA, 75 bp, synthetic construct
  source 1..75: mol_type = other DNA
gtaaacgtatagcctatctgctgattggtaaaatcggtaacaccacgctgggtctgggttacgttacggtattcc

SEQ ID NO: 148634 - DNA, 75 bp, synthetic construct
  source 1..75: mol_type = other DNA
ctcctatggcggcatggttactcactatggcggcgcggcaggtccggtcatctttggcgtgggtaatcctggtgg

SEQ ID NO: 148635 - DNA, 75 bp, synthetic construct
  source 1..75: mol_type = other DNA
atgaataagaaatcgttatggaagctaatgatattagcgatcccatgtattattggttttatgccagctccggca

SEQ ID NO: 148636 - DNA, 75 bp, synthetic construct
  source 1..75: mol_type = other DNA
gtggcaatcgttgttatggcgaccatgctgctgctgggtatcgttacctgggaagacgtggttaaaaataaaggc

SEQ ID NO: 148637 - DNA, 75 bp, synthetic construct
  source 1..75: mol_type = other DNA
ttctcggcgtttaccttaagcgccgcatttgtgaccaccggtttaggtaaacgtattgcctatctgctgattggt

SEQ ID NO: 148638 - DNA, 75 bp, synthetic construct
  source 1..75: mol_type = other DNA
acattctggcgctgaaaatgatcaacgacattctgcacctgcaaattagctggggtggatgggcgctggccgccg

SEQ ID NO: 148639 - DNA, 75 bp, synthetic construct
  source 1..75: mol_type = other DNA
gctgggcttcacctttctctacgcgccaatgctgatgctggtgatctattcattcaacagctcgaagctggtgac

SEQ ID NO: 148640 - DNA, 75 bp, synthetic construct
  source 1..75: mol_type = other DNA
ggtgtgggccggttggtcaacgcgctggtacggcgagttattgcgtgataatgcgatgatgagtgcggtcggctt

SEQ ID NO: 148641 - DNA, 75 bp, synthetic construct
  source 1..75: mol_type = other DNA
acagatatcgacggtaatcgccagcattacgtttcatgcggactggaaacggccgaaggatttcgcagaatgcct

SEQ ID NO: 148642 - DNA, 75 bp, synthetic construct
  source 1..75: mol_type = other DNA
aactgggaccgatgaaaatccgcgaaaaaatgctgctcggtgtctttgtgctggcgctgctgggctggattttca

SEQ ID NO: 148643 - DNA, 75 bp, synthetic construct
  source 1..75: mol_type = other DNA
ggttgatgcacctgctgcgcatagcaacgtcgatgccagtgctgtagagcaagagtggcgtgcgatgacggatgt

SEQ ID NO: 148644 - DNA, 75 bp, synthetic construct
  source 1..75: mol_type = other DNA
acgtacagaaggtgaacaggagcaagcgcaatggcgtaagcaaattgcttcgttgataccggaaggcgttactgc

SEQ ID NO: 148645 - DNA, 75 bp, synthetic construct
  source 1..75: mol_type = other DNA
gtgaagctgaaatatgcccacgctggtggttataacccgccgattgtggtgattcacggtaatcaggtgaaagac

SEQ ID NO: 148646 - DNA, 75 bp, synthetic construct
  source 1..75: mol_type = other DNA
taggtaagtctacactcactaaccgtattcttggtgaagagcgcgttgttgtttatgacatgcctggcacgacgc

SEQ ID NO: 148647 - DNA, 75 bp, synthetic construct
  source 1..75: mol_type = other DNA
cggtcgtgcagaaattgaaggccgtgagtttatctgcattgataccggcgggattgatggcacagaagacggtgt

SEQ ID NO: 148648 - DNA, 75 bp, synthetic construct
  source 1..75: mol_type = other DNA
cgagtacgattgattgcttacttcatgacgtcattcattgttggcgttcttgccgctggactggtgggttcaaag

SEQ ID NO: 148649 - DNA, 75 bp, synthetic construct
  source 1..75: mol_type = other DNA
tgagagaaaacaggatggctggagcctatatggctatggcaccaggccaaataaaaatggatacagcctttacgc

SEQ ID NO: 148650 - DNA, 75 bp, synthetic construct
  source 1..75: mol_type = other DNA
ttgcgcgccatcggcgtgcgcttcgccgccgacgacttcggcaccggctattcctgcctgcaacatctgaaatgc

SEQ ID NO: 148651 - DNA, 75 bp, synthetic construct
  source 1..75: mol_type = other DNA
gccgattgtggtgattcacggtaatcaggtgaaagacctgcctgattcctacaagcgttacttgatgaactactt

SEQ ID NO: 148652 - DNA, 75 bp, synthetic construct
  source 1..75: mol_type = other DNA
cggtcgtgcagaaattgaaggccgcgagtttatttgtattgatactggcgggattgatggcaccgaagacggtgt

SEQ ID NO: 148653 - DNA, 75 bp, synthetic construct
  source 1..75: mol_type = other DNA
ggcggcgcggcaggtccggtcatctttggcgtgggttacaacgatattaaatcctggtggttggtcggtgcggta

SEQ ID NO: 148654 - DNA, 75 bp, synthetic construct
  source 1..75: mol_type = other DNA
gggctttatcgacttcgcccgtgtgcattttatttctgcattgcacggtagcggtgttggtaacctgtttgaatc

SEQ ID NO: 148655 - DNA, 75 bp, synthetic construct
  source 1..75: mol_type = other DNA
atcagtgcgtgaagcgtatgacagctctacccgtcgcgtaggcacgtctatgctgacgcgtatcatgactatggc

SEQ ID NO: 148656 - DNA, 75 bp, synthetic construct
  source 1..75: mol_type = other DNA
tgctaccgtggatggaagatatcgcgccgcaagaagaagtggatgaagacgcggaatattgggcgcaatttgaag

SEQ ID NO: 148657 - DNA, 75 bp, synthetic construct
  source 1..75: mol_type = other DNA
atgttgcgcattatcgatacagaaacctgcggtttgcagggagggatcgttgagattgcctctgttgatgtcatt

SEQ ID NO: 148658 - DNA, 75 bp, synthetic construct
  source 1..75: mol_type = other DNA
caattcctgctgaatatcactattgtcacatagcacttgcagccgcagcagctaacaacagaagtcctataggtg

SEQ ID NO: 148659 - DNA, 75 bp, synthetic construct
  source 1..75: mol_type = other DNA
atatccgacctgcaacacctcagactcccgctcgtcattggtatatgttgccaaattttacacctcgccatcaac

SEQ ID NO: 148660 - DNA, 75 bp, synthetic construct
  source 1..75: mol_type = other DNA
cagccggatatgtatggtggtgaagaaacatacagcggcgattacgaagaggatggcgatacccgtgatgctgcg

SEQ ID NO: 148661 - DNA, 75 bp, synthetic construct
  source 1..75: mol_type = other DNA
cgtaatccacgttatgacgagataaaagcgtcaattaaagcccgcgggctggacacggtaccaaaagtcacccgc

SEQ ID NO: 148662 - DNA, 75 bp, synthetic construct
  source 1..75: mol_type = other DNA
tttggcaagtatcgcggtaaggcggtttctgaagttgcagagcgcgatccgggctatctgcgatggttgtttaac

SEQ ID NO: 148663 - DNA, 75 bp, synthetic construct
  source 1..75: mol_type = other DNA
ggtgttaactgtacaggctcctgcagctggaaaatctacgttaaaaacggtctggtgacctgggaaacccaacag

SEQ ID NO: 148664 - DNA, 75 bp, synthetic construct
  source 1..75: mol_type = other DNA
ggtgttaactgtacaggctcctgcagctggaaaatctacgttaaaaacggtctggtcacctgggaaagccaacag

SEQ ID NO: 148665 - DNA, 75 bp, synthetic construct
  source 1..75: mol_type = other DNA
gttgcaggcgtggccttcccctactttggcggcattgaaaatccgcattttcgcagcgtaaaacacaatcctgtc

SEQ ID NO: 148666 - DNA, 75 bp, synthetic construct
  source 1..75: mol_type = other DNA
gtgtctggggtcggttatgggcggcggggcgttgaaagttgaggccactcacctacgcaaaattcctgttccaaa

SEQ ID NO: 148667 - DNA, 75 bp, synthetic construct
  source 1..75: mol_type = other DNA
gaaaccaacgcatatgattggcggttacgcgcagctggcctggggctttaactactacggcaccgtcggctctaa

SEQ ID NO: 148668 - DNA, 75 bp, synthetic construct
  source 1..75: mol_type = other DNA
ggtgttaactgtacaggctcctgcagctggaaaatctacgttaaaaagggtctggtcacctgggaaacccaacag

SEQ ID NO: 148669 - DNA, 75 bp, synthetic construct
  source 1..75: mol_type = other DNA
gctgcctggtggtttgcgtgggcatgaatacctggcgcgtcgggtaactgaaagcgaactggtacaacgcagtcc

SEQ ID NO: 148670 - DNA, 75 bp, synthetic construct
  source 1..75: mol_type = other DNA
atgaaaaaagcgggtcttctttttttggtgatgatggttattgccgttgtagctacgggtatcggctactggaaa

SEQ ID NO: 148671 - DNA, 75 bp, synthetic construct
  source 1..75: mol_type = other DNA
gcgacacaacgaaatctactgacgctgaaccgtgcttcagccgaggaaatccaggatcatcagtgtgagattttg

SEQ ID NO: 148672 - DNA, 75 bp, synthetic construct
  source 1..75: mol_type = other DNA
cgtgaagggttgccagttcattactcaacagtcagccgtatggaagatacgctgaaatatcttcacccgtggatt

SEQ ID NO: 148673 - DNA, 75 bp, synthetic construct
  source 1..75: mol_type = other DNA
aatctcaggagagccggtaacgcccgccccggataataccccacctgaaaaactggataaacagcacccccggca

SEQ ID NO: 148674 - DNA, 75 bp, synthetic construct
  source 1..75: mol_type = other DNA
gtcacccggataccggagagtgagccggatatctacatcttcagcgatggtggtaacactcgttatcagatcctg

SEQ ID NO: 148675 - DNA, 75 bp, synthetic construct
  source 1..75: mol_type = other DNA
tctgaggcaccggagtgtctgccggatacgggcgcagagccggaaccgaaaaactctgctcctggtgctgagcac

SEQ ID NO: 148676 - DNA, 75 bp, synthetic construct
  source 1..75: mol_type = other DNA
aacatctgcagaatgaagcgttccgtctggcctgggaactggctgaatcagccggctgtgctgaagagattgcca

SEQ ID NO: 148677 - DNA, 75 bp, synthetic construct
  source 1..75: mol_type = other DNA
ccgccgtcaccattttggtgagccggaaccggtggtggtaccgccgtcagtccgcgacagcggcacagggcagtc

SEQ ID NO: 148678 - DNA, 75 bp, synthetic construct
  source 1..75: mol_type = other DNA
ttaacggtactgaaagcccattgttgaccgatccgtcaacgcctaattttttctggttagcctggcaggcgcgtg

SEQ ID NO: 148679 - DNA, 75 bp, synthetic construct
  source 1..75: mol_type = other DNA
gctacgggctggcgatggtgcggcagagtgataattcatttgtattgctggcgacacaacgaaatctactgacgc

SEQ ID NO: 148680 - DNA, 75 bp, synthetic construct
  source 1..75: mol_type = other DNA
gatacagcgccgtccggaacacctgatgcacttcccgcatcggtgacgcattttgctgaaggacgggatgatatc

SEQ ID NO: 148681 - DNA, 75 bp, synthetic construct
  source 1..75: mol_type = other DNA
tatccttctgctggctctgcatacacttacgcccagaaatccattagcccgactgttggctttatggtgggttgg

SEQ ID NO: 148682 - DNA, 75 bp, synthetic construct
  source 1..75: mol_type = other DNA
cggcgctgattaacttcggtgcgctggtggcgttcaccttcgtgaacctgtccgttatctctcagttctggatcc

SEQ ID NO: 148683 - DNA, 75 bp, synthetic construct
  source 1..75: mol_type = other DNA
atgggtctagcctatatgcagccgatgacgctgtttgatacatttggtatcgtttcaggcctcacggatggtcat

SEQ ID NO: 148684 - DNA, 75 bp, synthetic construct
  source 1..75: mol_type = other DNA
gaatttggtctctcgaaaacaaaggtttctcttgaacaacacacatcactcacctttgatgctcaaaaccaagta

SEQ ID NO: 148685 - DNA, 75 bp, synthetic construct
  source 1..75: mol_type = other DNA
gactatcgtcgtgatgacgatatggcattgtggagttctgcagatctgacttattccattacatacgagatgtga

SEQ ID NO: 148686 - DNA, 75 bp, synthetic construct
  source 1..75: mol_type = other DNA
atgaaacatactgatatccgtgcggcagtgctggatgcactggagcagcataaacacggggcgacgctgtttgat

SEQ ID NO: 148687 - DNA, 75 bp, synthetic construct
  source 1..75: mol_type = other DNA
gattctggtattcattaccctcgcggcctgtgccagcgcaggttacagctactggcattcgcatcaggttgccgc

SEQ ID NO: 148688 - DNA, 75 bp, synthetic construct
  source 1..75: mol_type = other DNA
aggacagcaggcactcaaaggcatgaccaccactctggtactgggcaacgccttcgataaagagtactggtcgcc

SEQ ID NO: 148689 - DNA, 75 bp, synthetic construct
  source 1..75: mol_type = other DNA
cgaaatataccactgatctgtttagccttgatgtggcctataaccgtacccgtggcaaagacaccgataccggtg

SEQ ID NO: 148690 - DNA, 75 bp, synthetic construct
  source 1..75: mol_type = other DNA
gaaaccaaagatgcagagcgcgtgatcccgcgcgcaattttcctgaccgcgctgattggcggcatgatcttcatc

SEQ ID NO: 148691 - DNA, 75 bp, synthetic construct
  source 1..75: mol_type = other DNA
cccggcactggcagggatgattaccacgatggttcagcagggctatgactatcgtcgtgatgacgatatggcgtt

SEQ ID NO: 148692 - DNA, 75 bp, synthetic construct
  source 1..75: mol_type = other DNA
tgaagacaaagcgcagcaacgcgtcgtgccctccccggtcttctatgcgctggatacctttacggtcaatttggg

SEQ ID NO: 148693 - DNA, 75 bp, synthetic construct
  source 1..75: mol_type = other DNA
ctggcttcaaccgtgacgtccatgcctgcttataccagtaaggctttagttatcgataccagtccgatagaaaaa

SEQ ID NO: 148694 - DNA, 75 bp, synthetic construct
  source 1..75: mol_type = other DNA
tcattatcgatctctccggccgcgttattctggggcattgcctcggcatttgctgctgcattctataccacctat

SEQ ID NO: 148695 - DNA, 75 bp, synthetic construct
  source 1..75: mol_type = other DNA
acaagattatgttcacgctcatggcattggattgcaggcacttgggcaactaggatataccctgctgacggatta

SEQ ID NO: 148696 - DNA, 75 bp, synthetic construct
  source 1..75: mol_type = other DNA
ggagcttcttcggttcccgtaccagtgaaagcaacaagactgatattatggtgatgcttcaggtcagaaaggttg

SEQ ID NO: 148697 - DNA, 75 bp, synthetic construct
  source 1..75: mol_type = other DNA
cggcgtcaataactcgccaacccttatcaagcgtgatgtaacaaccgaagtcagccttgcagatggtgatattat

SEQ ID NO: 148698 - DNA, 75 bp, synthetic construct
  source 1..75: mol_type = other DNA
caccagaatggcaatatcggcaggacttgatcgtgaaggtgcgaaagaagcttacagcaatatttgtcgttttat

SEQ ID NO: 148699 - DNA, 75 bp, synthetic construct
  source 1..75: mol_type = other DNA
atttaataaacttatattagaggcatctaaaacccccacacaagatgaaattaaaatacttgagagaaggagtaa

SEQ ID NO: 148700 - DNA, 75 bp, synthetic construct
  source 1..75: mol_type = other DNA
gacgatcaccaggtagaaattcgcgaagcagataccaatcttcttatctggcgagcatgggattttgaaccggat

SEQ ID NO: 148701 - DNA, 75 bp, synthetic construct
  source 1..75: mol_type = other DNA
taagaaaaggaatttctgccgaattagatgataacgacttaaacataaacgcatctacaggaatccccgatctta

SEQ ID NO: 148702 - DNA, 75 bp, synthetic construct
  source 1..75: mol_type = other DNA
accgatgaacggcgcgagaccgtgcagcagcagctggtcagcgtgtttgagcgttacggcctgccggaccggatg

SEQ ID NO: 148703 - DNA, 75 bp, synthetic construct
  source 1..75: mol_type = other DNA
acgggtcgggctgaaggagatgcaggaagacggcagctacgaggtgtggtggtacagcacgaaagtgggggggat

SEQ ID NO: 148704 - DNA, 75 bp, synthetic construct
  source 1..75: mol_type = other DNA
ttgagtggcctgctattgtctctcaccattatccacctcagaattctttatatttcacaaacaaatagatcatgg

SEQ ID NO: 148705 - DNA, 75 bp, synthetic construct
  source 1..75: mol_type = other DNA
ggtaatcgtagccgctattgctattaagctgctgacgttcgttaacagccaggatttgggtagcctgtttggaat

SEQ ID NO: 148706 - DNA, 75 bp, synthetic construct
  source 1..75: mol_type = other DNA
aaaatcctaacttttcttaataaccaggacctgaacaccctgttcggttttttctcacggttacgcggaggaggg

SEQ ID NO: 148707 - DNA, 75 bp, synthetic construct
  source 1..75: mol_type = other DNA
gcgaaagtggaagtggttgaagctcaaagcgccaccacttcggaagagaaagccaccagccgcgaatacgcgaaa

SEQ ID NO: 148708 - DNA, 75 bp, synthetic construct
  source 1..75: mol_type = other DNA
tgttggccatctgtgtaccatttgcggtcagttgcgtgctggtttactccattcctgatttctctgatagcggta

SEQ ID NO: 148709 - DNA, 75 bp, synthetic construct
  source 1..75: mol_type = other DNA
atggaggcctgtggaggctctcagcactgggcacgggagctgacaaagctggggcataaagtccgcttgttacag

SEQ ID NO: 148710 - DNA, 75 bp, synthetic construct
  source 1..75: mol_type = other DNA
aagcgatatcgccaccgttgtgcaggcacaaaaagccggaaaaccgctggttgttgaagcctgggatcgcaccaa

SEQ ID NO: 148711 - DNA, 75 bp, synthetic construct
  source 1..75: mol_type = other DNA
gtgcagcgccaggtgcggcaaaacaagcacagcagccacccgcaggtggtcgtcgtgggatgcgttccggcccat

SEQ ID NO: 148712 - DNA, 75 bp, synthetic construct
  source 1..75: mol_type = other DNA
gatgcgctgtttcccaatcagtttgttaacgcgcgcatgttagtcgacaccgaacaaaacgccgtggtgatcccc

SEQ ID NO: 148713 - DNA, 75 bp, synthetic construct
  source 1..75: mol_type = other DNA
caggagctggatgcccaacaggcgctggtcagtgaaaccgaaggcaccattaaggctgatgaagcaagcgtcgcc

SEQ ID NO: 148714 - DNA, 75 bp, synthetic construct
  source 1..75: mol_type = other DNA
gaagcctgggatcgcaccaactcgaagaaattaagtgaaggcacgctgttaagtctcgataaccaaatcgatgcc

SEQ ID NO: 148715 - DNA, 75 bp, synthetic construct
  source 1..75: mol_type = other DNA
ttaacgcccgcatgttagtggacactgaacaaaacgccgtggtgatcccaaccgctgcactgcaaatgggtaacg

SEQ ID NO: 148716 - DNA, 75 bp, synthetic construct
  source 1..75: mol_type = other DNA
gggctatgagtatcgtcgtgatgacgatatggcgttatggagttctgcagatctgacttattccattacatacga

SEQ ID NO: 148717 - DNA, 75 bp, synthetic construct
  source 1..75: mol_type = other DNA
gagcttgatcagtggatggaaagccggatttatccggtgatgaatgcgatcccggcactggctggactgattacc

SEQ ID NO: 148718 - DNA, 75 bp, synthetic construct
  source 1..75: mol_type = other DNA
ggatttatccggtgatgagcgatatcccggcactatcagatcgggtagcagtgatgcattactgcatcaccgccc

SEQ ID NO: 148719 - DNA, 75 bp, synthetic construct
  source 1..75: mol_type = other DNA
cgatctgctgcgccatgttcctgggattactcttgatggtacgggacgcacgaatggtcaggatgtgaatatgcg

SEQ ID NO: 148720 - DNA, 75 bp, synthetic construct
  source 1..75: mol_type = other DNA
tgacagctatcgcggtagcagcgacggctacaaagatgtggatgccgacaaatggtcgtctcgtgcagggatgac

SEQ ID NO: 148721 - DNA, 75 bp, synthetic construct
  source 1..75: mol_type = other DNA
atgaaacatactgatatccgtgctgcagtgctggatgcactggagctgcatgaacacggggcgacgctgtttgat

SEQ ID NO: 148722 - DNA, 75 bp, synthetic construct
  source 1..75: mol_type = other DNA
atccggcgctactggtgctggcgacggctgcggggtccaacaccctcacccacattaatgatgcatctttctggt

SEQ ID NO: 148723 - DNA, 75 bp, synthetic construct
  source 1..75: mol_type = other DNA
acgatggtgcagcagggctatgagtatcgtcgcgatgacgatatggcgttatggagttctgctgatctgacttat

SEQ ID NO: 148724 - DNA, 75 bp, synthetic construct
  source 1..75: mol_type = other DNA
tcggtgcgggtggcgtgctgaagcagactatcatcgacaccggcattggcgacaccatcggcatgttgatgtccc

SEQ ID NO: 148725 - DNA, 75 bp, synthetic construct
  source 1..75: mol_type = other DNA
cctgaacccggacgatcgccgcgagcgcatcaagctcaccggtgaactgccaagcccactgaatccaccgccggg

SEQ ID NO: 148726 - DNA, 75 bp, synthetic construct
  source 1..75: mol_type = other DNA
tctgaaaaaacattacccggttaagaagggcatgttcgcgccggaacgtctggtgaaggcgctggacggcgtttc

SEQ ID NO: 148727 - DNA, 75 bp, synthetic construct
  source 1..75: mol_type = other DNA
taacatgcagcagatcggggcttccaaagcaggcaaggcgcaatccggcttcaattcgcttatgcagattggtgg

SEQ ID NO: 148728 - DNA, 75 bp, synthetic construct
  source 1..75: mol_type = other DNA
ctgatgctcgacccggacgtggtgattgccgatgaaccggtctccgcgctggacgtctcagtgcgtgcgcaggtg

SEQ ID NO: 148729 - DNA, 75 bp, synthetic construct
  source 1..75: mol_type = other DNA
ctgctgatcaacaccagcttaagcaaagaacagcgtcgggaaaaagccctgtcgatgatggcgaaagtcggcctg

SEQ ID NO: 148730 - DNA, 75 bp, synthetic construct
  source 1..75: mol_type = other DNA
gtcgatgatggcgaaagtcggcctgaaaaccgagcattatgaccgctatccgcatatgttctccggcggtcagcg

SEQ ID NO: 148731 - DNA, 75 bp, synthetic construct
  source 1..75: mol_type = other DNA
cctttcagccactggctgcgttctgacagtaaatctcagtggcgacatgccagtgccagttacagcatgtcacac

SEQ ID NO: 148732 - DNA, 75 bp, synthetic construct
  source 1..75: mol_type = other DNA
cagaagtaatgatagctataccaggaaaaaaaattacgcctggatgacctctaacaccagtatcgataacgaagg

SEQ ID NO: 148733 - DNA, 75 bp, synthetic construct
  source 1..75: mol_type = other DNA
ccaaacgtggcaaactgcaggtcaatatctcccagcaattaggcgagtacggttcgttttatttaagtggtagcc

SEQ ID NO: 148734 - DNA, 75 bp, synthetic construct
  source 1..75: mol_type = other DNA
tgattgtttatggctgtgcattcgatttcttcaatatttctggttcggtatttgtcgaacaggaagttgattcca

SEQ ID NO: 148735 - DNA, 75 bp, synthetic construct
  source 1..75: mol_type = other DNA
tggttatgccgtgctgccttatgccactgaatatcgggaaaacagagtggcgctggataccaataccctggctga

SEQ ID NO: 148736 - DNA, 75 bp, synthetic construct
  source 1..75: mol_type = other DNA
ggtatcgggaaaaacatgggggcattgggcgctctgtctgtggatatgacgcaggctaattccacacttcccgat

SEQ ID NO: 148737 - DNA, 75 bp, synthetic construct
  source 1..75: mol_type = other DNA
cgactttaacgtccgtgcagaacgcatgggctggctgccgtctgcgccgcagttaggcactaacccgctgactat

SEQ ID NO: 148738 - DNA, 75 bp, synthetic construct
  source 1..75: mol_type = other DNA
accgtgtcgctggcttctcgccaattccggcaatgtcgatggtttcttacgcatcgggtgcgcgctatctctcgc

SEQ ID NO: 148739 - DNA, 75 bp, synthetic construct
  source 1..75: mol_type = other DNA
tgaactgatcgccgcctctaacgtttacaccatcaaaaactacggcccggaccgcgtcgctggcttctcgccaat

SEQ ID NO: 148740 - DNA, 75 bp, synthetic construct
  source 1..75: mol_type = other DNA
cgcgctggatataaccgataatcctcgtcatttgcagattatggaactcgaggggcgcagcttccgcgcgtactg

SEQ ID NO: 148741 - DNA, 75 bp, synthetic construct
  source 1..75: mol_type = other DNA
aaattacaggccaaaaccaaccagtaacgcatatctcatatatgcagtcaatgaaataagagatgcagccttact

SEQ ID NO: 148742 - DNA, 75 bp, synthetic construct
  source 1..75: mol_type = other DNA
cgtgatttcggtgaaagcctgctggtttatcgtccgccgatcgacacccgttcggtgaaagaagtgatgggccag

SEQ ID NO: 148743 - DNA, 75 bp, synthetic construct
  source 1..75: mol_type = other DNA
gtttaaccttgaacgtggcaaaacgctggcagtagtaggcgaatctggctgcggtaaatcgaccctcggtcggtt

SEQ ID NO: 148744 - DNA, 75 bp, synthetic construct
  source 1..75: mol_type = other DNA
caagcccactgaatccaccgccgggttgcgccttcacgcccgctgtcgtcggcgcttcggcccctgcacccagtt

SEQ ID NO: 148745 - DNA, 75 bp, synthetic construct
  source 1..75: mol_type = other DNA
ctggcggtagtgggtgaatctggctgcggtaaatcgaccctcggtcggctgctgacgatgatcgaaacacctacc

SEQ ID NO: 148746 - DNA, 75 bp, synthetic construct
  source 1..75: mol_type = other DNA
tgtagccaaatctgttcgtcagtctgcatccccgacgtttgaactgttttatcaggagtatcagtccctggtatt

SEQ ID NO: 148747 - DNA, 75 bp, synthetic construct
  source 1..75: mol_type = other DNA
tacgcagaatgagtatttgtaaaagtccggcctggaaagatactcagcgaatactgaagcgcagcggactcgtgt

SEQ ID NO: 148748 - DNA, 75 bp, synthetic construct
  source 1..75: mol_type = other DNA
tgaaccaagatttgaacaacttttaacaaggctgagctttagaaaacaatcaatcctcagaaaacaacaatacag

SEQ ID NO: 148749 - DNA, 75 bp, synthetic construct
  source 1..75: mol_type = other DNA
cattacgccgccggaaaaactgaactttgccgagatagccacttataacgatcaccgcatggcgatgtgtttctc

SEQ ID NO: 148750 - DNA, 75 bp, synthetic construct
  source 1..75: mol_type = other DNA
tttgccgagatcgcgacatacaatgatcaccggatggcgatgtgtttctcgctggtggcgttgtcagatacacca

SEQ ID NO: 148751 - DNA, 75 bp, synthetic construct
  source 1..75: mol_type = other DNA
cgtttccagtcaattcctcaccgcactattaatgactgcgccgcttgcgccggaagatacagttattcgtattaa

SEQ ID NO: 148752 - DNA, 75 bp, synthetic construct
  source 1..75: mol_type = other DNA
gtgacaattcttgaccctaaatgtacggccaaaacatttccggattatttcgagcagttggcgcggattagccag

SEQ ID NO: 148753 - DNA, 75 bp, synthetic construct
  source 1..75: mol_type = other DNA
tgccgagcgtacgcgttgcgaaatcatcggcaatggtggcccattacatgctgaaggcgcgttggagttatttct

SEQ ID NO: 148754 - DNA, 75 bp, synthetic construct
  source 1..75: mol_type = other DNA
gggcgaccattagctggggcgatgattatattgcctgcacgcgtggtgaactgaacgctatcgacatggatatga

SEQ ID NO: 148755 - DNA, 75 bp, synthetic construct
  source 1..75: mol_type = other DNA
atgccctgacgcaacgctaccccgatgccagctacaaagagatgcatggtcggattgtgatgccgggaattgtct

SEQ ID NO: 148756 - DNA, 75 bp, synthetic construct
  source 1..75: mol_type = other DNA
ttgattctgaagaatgtcaccgcagtgcagttacacccggcgaaagtgcaggaaggcgttgatatcgccatcgaa

SEQ ID NO: 148757 - DNA, 75 bp, synthetic construct
  source 1..75: mol_type = other DNA
atgttgattctgaagaatgtcaccgcagtacagttacacccggcaaaagtacaggaaggcgtcgatatcgccatc

SEQ ID NO: 148758 - DNA, 75 bp, synthetic construct
  source 1..75: mol_type = other DNA
tcagcactatcaacaatttgtcgtaaaaggggggcagtcttaccagtctccgggtacttatttggtcgaaggcga

SEQ ID NO: 148759 - DNA, 75 bp, synthetic construct
  source 1..75: mol_type = other DNA
tagcacacggcaaaacagtattaaccaatctgctggatagcgatgacgtgcgccatatgctgaatgcattaacag

SEQ ID NO: 148760 - DNA, 75 bp, synthetic construct
  source 1..75: mol_type = other DNA
ctggtcggggcattgttaggtagcattgcctggtacactcggcctcgtcccgcacgtagcagacgctatgaataa

SEQ ID NO: 148761 - DNA, 75 bp, synthetic construct
  source 1..75: mol_type = other DNA
gataagaacctgcatgtcaaaggcaatgtgtccattgacggcaccggaagatcacaggggacgttcacgatgtcc

SEQ ID NO: 148762 - DNA, 75 bp, synthetic construct
  source 1..75: mol_type = other DNA
ttgtggtggaagaccgccgcagtcgcccgaccggactcactgccggagataccggcgtgtatcaccatgaggggc

SEQ ID NO: 148763 - DNA, 75 bp, synthetic construct
  source 1..75: mol_type = other DNA
ctgaccggcacacacgacgaactgaaaatgcagaatgtgcagctcaccggcatggacggcgaaacctttgatgat

SEQ ID NO: 148764 - DNA, 75 bp, synthetic construct
  source 1..75: mol_type = other DNA
ttcgatgtgacccaggcgaagagtacgctggcagaccaaagcgaacataaaggtcagtcatatcgttttctgtat

SEQ ID NO: 148765 - DNA, 75 bp, synthetic construct
  source 1..75: mol_type = other DNA
gacttctttgatgcctctatcaaccgcattgccgcgtgggtcattggtacacgcaatatgaaaaaagccctgctg

SEQ ID NO: 148766 - DNA, 75 bp, synthetic construct
  source 1..75: mol_type = other DNA
gcgctgcgccaacttgatcgtttacccgtttcaatgcactgctggcagggcgatgatgtttccggttttgaaaac

SEQ ID NO: 148767 - DNA, 75 bp, synthetic construct
  source 1..75: mol_type = other DNA
caaggcagaatctgtctacaacaatgctgcaaacggttgaggacagagctcccgtacttattacccgccagaacg

SEQ ID NO: 148768 - DNA, 75 bp, synthetic construct
  source 1..75: mol_type = other DNA
caacagtatgcagggtgatattcgctttgctgatgtgctggaaaaaaatgggtgcgaccatttgctggggcgatg

SEQ ID NO: 148769 - DNA, 75 bp, synthetic construct
  source 1..75: mol_type = other DNA
aaaggcactaccacgctacgcaatatttataactggcgcgtaaaagagacggatcgtctgtttgcgatggcgacc

SEQ ID NO: 148770 - DNA, 75 bp, synthetic construct
  source 1..75: mol_type = other DNA
tgaaccgcctgctgacgccgctgatgcgtcgtgtgcgcctgatgcttgcgcgcgctgttgttaacgtgattaacg

SEQ ID NO: 148771 - DNA, 75 bp, synthetic construct
  source 1..75: mol_type = other DNA
gaaattctgaaaggcctcagcgttaaaggtgaaagtgactttgcaggcaatatcagcgccccggatgccatcatc

SEQ ID NO: 148772 - DNA, 75 bp, synthetic construct
  source 1..75: mol_type = other DNA
gaacctgtaagccaaacttacaagttgcctcccctgtcatccagcgaagtaaacgacgcggcatggaaattacac

SEQ ID NO: 148773 - DNA, 75 bp, synthetic construct
  source 1..75: mol_type = other DNA
atgaagagaatcttacttgtggctgcaatggccttaacaggatgccaacagctcaatgatggcgtgagtaaagtc

SEQ ID NO: 148774 - DNA, 75 bp, synthetic construct
  source 1..75: mol_type = other DNA
atgcctgaccatgcgtcgcaaggacccgtgcgtcgtcccggactgctcggctggctcgcattgttacccggcgtg

SEQ ID NO: 148775 - DNA, 75 bp, synthetic construct
  source 1..75: mol_type = other DNA
gggctgattgatgggttggtaagacgcgacttacgacgattcggcgcaggccatgagtctggatttgtgtatcac

SEQ ID NO: 148776 - DNA, 75 bp, synthetic construct
  source 1..75: mol_type = other DNA
tactgcggcgggatggtctggctggattactactctggtattgatgatgcagttcttacctataagaaaggccag

SEQ ID NO: 148777 - DNA, 75 bp, synthetic construct
  source 1..75: mol_type = other DNA
tatctggccttggtgctgtttgcaaagactatgaagaaaatgcaatggcagcagaaaagaaatggactggcaaaa

SEQ ID NO: 148778 - DNA, 75 bp, synthetic construct
  source 1..75: mol_type = other DNA
atgaaattacggatagtgatgccactggtactgtctgctgccgcactaacaggatgccagcagctcaacgatggc

SEQ ID NO: 148779 - DNA, 75 bp, synthetic construct
  source 1..75: mol_type = other DNA
gctgaactcgacgccctggaagaaaaactggcgcagcttgagttccgccgtatgttctctggcgaatatgacagc

SEQ ID NO: 148780 - DNA, 75 bp, synthetic construct
  source 1..75: mol_type = other DNA
atgaaacaagggctggaagatgtttccggtctgctggaactggctgtagaagctgacgacgaagaaacctttaac

SEQ ID NO: 148781 - DNA, 75 bp, synthetic construct
  source 1..75: mol_type = other DNA
aaggttattggtgaggatgcggcaaaagagattgactttaaccgcgacaacgaattttcgtgcgattatcgcaat

SEQ ID NO: 148782 - DNA, 75 bp, synthetic construct
  source 1..75: mol_type = other DNA
atggctgcaagctggaaatttgataaatacgctaatttatctaataaggatgatgacggcatgaataaagaaagt

SEQ ID NO: 148783 - DNA, 75 bp, synthetic construct
  source 1..75: mol_type = other DNA
acagcaagaacatactattgattggggtttttgtaattattttttatatgttgacccgaaagaaaaagcacttgc

SEQ ID NO: 148784 - DNA, 75 bp, synthetic construct
  source 1..75: mol_type = other DNA
agtgaagttgttgatgaattaatcgaagacgaacgccgtgactgcgaaacgaaacaagaaaaaacggaatggaag

SEQ ID NO: 148785 - DNA, 75 bp, synthetic construct
  source 1..75: mol_type = other DNA
tgttgctgcaccgtttggcccggtcaacgtacaaaagcagcatccgcgtgaatacagcggtagccactggtgcgt

SEQ ID NO: 148786 - DNA, 75 bp, synthetic construct
  source 1..75: mol_type = other DNA
tcaggatgactgggatgccttcgaccgcgcggtcgacagtaattacggtgttgaccaggcagcggcaaacctgag

SEQ ID NO: 148787 - DNA, 75 bp, synthetic construct
  source 1..75: mol_type = other DNA
taccacaacacccaaaacggtattaacgctgatatcggtgccagcatggacctggatgacaactggacgctgggt

SEQ ID NO: 148788 - DNA, 75 bp, synthetic construct
  source 1..75: mol_type = other DNA
acagcgacatgccgatgctggtaatgctggaacctcgcgacgacggcagctacgttcccgggcgcatggtccgcg

SEQ ID NO: 148789 - DNA, 75 bp, synthetic construct
  source 1..75: mol_type = other DNA
cggcagaacagtcagcagctgccgcgcgcaaatgcgcccgaatataataaacccggagatgagcagcagaagtga

SEQ ID NO: 148790 - DNA, 75 bp, synthetic construct
  source 1..75: mol_type = other DNA
ccagcatcggcgcagaattcaacgcatggaaatgggcacaactgcgtgccggttatcgccagaacatggcatcaa

SEQ ID NO: 148791 - DNA, 75 bp, synthetic construct
  source 1..75: mol_type = other DNA
gctctttaaaacagccgatacaagctactgcggtggcatggtatggctggattactactctggtattgatgatac

SEQ ID NO: 148792 - DNA, 75 bp, synthetic construct
  source 1..75: mol_type = other DNA
aggatgccagcagctcaacgatggcgtgaatacagttaatggagcaatcagttcttcgttgtcttcagtaggtaa

SEQ ID NO: 148793 - DNA, 75 bp, synthetic construct
  source 1..75: mol_type = other DNA
tggtactgtctgctgccgcactaacaggatgccagcagctcaacgatggcgtgaatacagttaatggagcaatca

SEQ ID NO: 148794 - DNA, 75 bp, synthetic construct
  source 1..75: mol_type = other DNA
acctggggtctgctggagctggtcaactccgtggttgggctgattattgtgctgattattagcatggtagcgtaa

SEQ ID NO: 148795 - DNA, 75 bp, synthetic construct
  source 1..75: mol_type = other DNA
gaccatcatcgacaccggcattggcgacaccatcggcatgttgatgtcccacggcaatatctcgccctacatcat

SEQ ID NO: 148796 - DNA, 75 bp, synthetic construct
  source 1..75: mol_type = other DNA
gtggtcatgacatgcagtgggtgatgaacgcttttgaaagcgcggtgaagagcattgcaatggtgattctgatca

SEQ ID NO: 148797 - DNA, 75 bp, synthetic construct
  source 1..75: mol_type = other DNA
tatacaagatgtattaccaaagggattggctttaaataaaaataaattaaaaatatctccatgcataccaaagag

SEQ ID NO: 148798 - DNA, 75 bp, synthetic construct
  source 1..75: mol_type = other DNA
ataacgaaacacgactgtctagacatacaaaaaatttgctagaatggtatcttaaatcgtgtgaaaggcttcact

SEQ ID NO: 148799 - DNA, 75 bp, synthetic construct
  source 1..75: mol_type = other DNA
gtgagtgtaaagaaactaaatattaagggacgctgcgtttacactgcttcatgtttgaaggaaaaaataatactt

SEQ ID NO: 148800 - DNA, 75 bp, synthetic construct
  source 1..75: mol_type = other DNA
aggacgttgtcatgaatatcactgctactgttattcttgcgtttggtatgtcgatggatgcatttgctgcatcaa

SEQ ID NO: 148801 - DNA, 75 bp, synthetic construct
  source 1..75: mol_type = other DNA
gacggggctggcgtctgcggtcgccgctgtgctgctggtatcgtattttggttcagcacgttccgatctcggtgc

SEQ ID NO: 148802 - DNA, 75 bp, synthetic construct
  source 1..75: mol_type = other DNA
gtaactgtaaagaaaataaatatcaaaggacgttgtgtttacaacgcatcttgtttaaaagaaaaactaatactt

SEQ ID NO: 148803 - DNA, 75 bp, synthetic construct
  source 1..75: mol_type = other DNA
ggcgcgttacaatctctattttctcgacagcgtaaccatcggcaatactcaggcgatgcgtgctgcgcaaggtac

SEQ ID NO: 148804 - DNA, 75 bp, synthetic construct
  source 1..75: mol_type = other DNA
aagcggacatccgtgtgcagttcaatcgcgcaattgacctcgcgcgtcgcaacggttcgaccattgccattgggc

SEQ ID NO: 148805 - DNA, 75 bp, synthetic construct
  source 1..75: mol_type = other DNA
atgaaactgacaacacatcatctacgggcgggggccgcattattgctggcaggaattctgctggcaggttgcgac

SEQ ID NO: 148806 - DNA, 75 bp, synthetic construct
  source 1..75: mol_type = other DNA
aaaatttatcaggtagaacaaaatttaataaaatgttaccggaataattccgatatttgccctgaatcagaaata

SEQ ID NO: 148807 - DNA, 75 bp, synthetic construct
  source 1..75: mol_type = other DNA
cagtactttaattgatattaaagataaaatttatcaggtagaacaaaatttaataaaatgttctcggaataattc

SEQ ID NO: 148808 - DNA, 75 bp, synthetic construct
  source 1..75: mol_type = other DNA
ggagcgttacaatctttacttcctcgacagcgtaaccatcggtaatacccaggcgatgcgcgccgcgcaaggcac

SEQ ID NO: 148809 - DNA, 75 bp, synthetic construct
  source 1..75: mol_type = other DNA
taattcgccatcgtgtagacccggactacccttcttttgaggttgccacataccgcaacgaataccaatatggat

SEQ ID NO: 148810 - DNA, 75 bp, synthetic construct
  source 1..75: mol_type = other DNA
gggcttatgagtatagtgacgatagctggtatttacgatttcgttttttctggaccccggaatttaaacctcaaa

SEQ ID NO: 148811 - DNA, 75 bp, synthetic construct
  source 1..75: mol_type = other DNA
ccggatggcagtggtgctgctgtcggtgttggaaccttttcaggtaacgcgaccttctcctttacctacgaataa

SEQ ID NO: 148812 - DNA, 75 bp, synthetic construct
  source 1..75: mol_type = other DNA
atggcggcaagctggaagtttgataaatatgccaatttatctaataaagatgatgatggcatgaataaagaaagt

SEQ ID NO: 148813 - DNA, 75 bp, synthetic construct
  source 1..75: mol_type = other DNA
cgcgtttgcacttgccactaaggtaatgggtgaagacgcggcaaaagagattgactttagccgtgacagtgaatt

SEQ ID NO: 148814 - DNA, 75 bp, synthetic construct
  source 1..75: mol_type = other DNA
taggcgcaatgttccaccgcttccgtggtgatattcagccttttgaagtaaccacgttttcaagttattacgatt

SEQ ID NO: 148815 - DNA, 75 bp, synthetic construct
  source 1..75: mol_type = other DNA
ctgggccaggtagcgaaatacgccgggcaattacgcggtcgagtgaaacaacagttcgccacaatgggtgaacgt

SEQ ID NO: 148816 - DNA, 75 bp, synthetic construct
  source 1..75: mol_type = other DNA
aacttttacgttgatgcagatacatttaaatttaccgtggatcaacctacatgtagtaccattgctctggattca

SEQ ID NO: 148817 - DNA, 75 bp, synthetic construct
  source 1..75: mol_type = other DNA
aggtaaaacgactggctctgcttcaggcgtggctgtaaaagtgcattcgacttacgaaaatagcaaagtcttatt

SEQ ID NO: 148818 - DNA, 75 bp, synthetic construct
  source 1..75: mol_type = other DNA
ttaacgaccgcctggcgcagtcgctggcaaacaacgatcagaaagccattactgaaaccaccgaacagttaatca

SEQ ID NO: 148819 - DNA, 75 bp, synthetic construct
  source 1..75: mol_type = other DNA
ctgggtcaggtggcgaaatatgccgggcagttacgtggtcgggtaaaacagcagttcgctacaatgggtgaacgt

SEQ ID NO: 148820 - DNA, 75 bp, synthetic construct
  source 1..75: mol_type = other DNA
tactggcgcgactgttacgtgaaaagctggaatccctcctgccgctgcatctgggccaggtagcgaaatatgccg

SEQ ID NO: 148821 - DNA, 75 bp, synthetic construct
  source 1..75: mol_type = other DNA
cgctggcgcgtggacgtgcagaactctaccccgaaatgcatggcacggtaacaggatttaaaagcgagattgata

SEQ ID NO: 148822 - DNA, 75 bp, synthetic construct
  source 1..75: mol_type = other DNA
ataccccggtccaggtactgctgccgggtaataagaagaccgggcggttgtgggcgtatgttcgtgatgaccgca

SEQ ID NO: 148823 - DNA, 75 bp, synthetic construct
  source 1..75: mol_type = other DNA
ccgccgaacagctggagttgatacgcagcgccttccgggttatccggactgtacgtgaaaagcatgcctgtactc

SEQ ID NO: 148824 - DNA, 75 bp, synthetic construct
  source 1..75: mol_type = other DNA
cgccgggttcaacgagctgtatcgcaatggtgggataacggaagctgcctgctgggctcatgcccgccgaaagat

SEQ ID NO: 148825 - DNA, 75 bp, synthetic construct
  source 1..75: mol_type = other DNA
gtacctggtcggcaaaaagtgacaacgactacgcacagctggtgaaagacgtaaatgatgaacaactggcgctga

SEQ ID NO: 148826 - DNA, 75 bp, synthetic construct
  source 1..75: mol_type = other DNA
catgcccgccgaaagatccacgatgtgcacgtccgcatcccgtcagcactgacggaagaagccctgctccgttga

SEQ ID NO: 148827 - DNA, 75 bp, synthetic construct
  source 1..75: mol_type = other DNA
gacatctcttctgacgacatcttcctgctgaaacagcgcctggccgaacaggaagcgctgatccacgccctgcag

SEQ ID NO: 148828 - DNA, 75 bp, synthetic construct
  source 1..75: mol_type = other DNA
ttcagaacggagaactcaatgacaaggatctgattattttacctaagaaactggtaaagccaatgcaagtactta

SEQ ID NO: 148829 - DNA, 75 bp, synthetic construct
  source 1..75: mol_type = other DNA
aatggatggtggagaagaatggtacgctgtcgaaaaaatccagactgggcgaagcgttcagctatgtactgaatc

SEQ ID NO: 148830 - DNA, 75 bp, synthetic construct
  source 1..75: mol_type = other DNA
gcatttgccgtattgggtactgaacactggaaaatagcaacgtatgttgttccagcgattgtatcagttgtcatt

SEQ ID NO: 148831 - DNA, 75 bp, synthetic construct
  source 1..75: mol_type = other DNA
acggaagctgcctgctgggctcatgcccgccgaaagatccacgatgtgcacgtccgcaatcccgtcagcactgac

SEQ ID NO: 148832 - DNA, 75 bp, synthetic construct
  source 1..75: mol_type = other DNA
tcttcctgctgaaacagcgcctggccgaacaggaagcgctgatccacgccctgcaggaaaagctgagcagccggg

SEQ ID NO: 148833 - DNA, 75 bp, synthetic construct
  source 1..75: mol_type = other DNA
gcgctgacgtactatgcagatgatggctgggctgaggcggacaataacatcgctgaaaatgcgttgcggatggtc

SEQ ID NO: 148834 - DNA, 75 bp, synthetic construct
  source 1..75: mol_type = other DNA
ggttcagtggtgtcctgcaggcggatgcgtacgccgggttcaacgagctgtatcgcaatggtgggataacggaag

SEQ ID NO: 148835 - DNA, 75 bp, synthetic construct
  source 1..75: mol_type = other DNA
gcttcagcggtgtcctgcatgcggatgcgtacgccgggttcaacgagctgtatcgcaatggtgggataacggaag

SEQ ID NO: 148836 - DNA, 75 bp, synthetic construct
  source 1..75: mol_type = other DNA
gcttcagtggtgtcctgcacgcggatgcgtacgccgggttcaacgagctgtatcgcaatggtgggataacggaag

SEQ ID NO: 148837 - DNA, 75 bp, synthetic construct
  source 1..75: mol_type = other DNA
tcgagcaactgaaggccctgctgctcgcacagcaggctgttatcgtccgtctgtctggtgaaataaccggctatg

SEQ ID NO: 148838 - DNA, 75 bp, synthetic construct
  source 1..75: mol_type = other DNA
gtgagcagtgccctgaaagtgatccgcacagaacgggtaaaaaaagcctgtacaaaatgtgactgtattgttgaa

SEQ ID NO: 148839 - DNA, 75 bp, synthetic construct
  source 1..75: mol_type = other DNA
ggttcaggggtgtcctgcatgcggatgcgtacgccgggttcaacgagctgtatcgcaatggtgggataacggaag

SEQ ID NO: 148840 - DNA, 75 bp, synthetic construct
  source 1..75: mol_type = other DNA
ggcctgtatgcgtgaagcgcagaaaatggcggtcaacggtcatcgcgcggcagaagaagcgttccgttctggcat

SEQ ID NO: 148841 - DNA, 75 bp, synthetic construct
  source 1..75: mol_type = other DNA
gtacctgcgctgcacccgtattctccagccgggcatggtgttaaccattgaaccgggtatctacttcatcgaatc

SEQ ID NO: 148842 - DNA, 75 bp, synthetic construct
  source 1..75: mol_type = other DNA
atcggttatatcggtccggtgccggaacgtgcgctgcaactgggtattgaggccagcaacatcaacccgaaaggg

SEQ ID NO: 148843 - DNA, 75 bp, synthetic construct
  source 1..75: mol_type = other DNA
gattcagtggtgtcctgcaagcggatgcgtacgccgggttcaacgagctgtatcgcaatggtgggataacggaag

SEQ ID NO: 148844 - DNA, 75 bp, synthetic construct
  source 1..75: mol_type = other DNA
gattcagaggtgtcctgcatgcggatgcgtacgccgggttcaacgagctgtatcgcaatggtgggataacggaag

SEQ ID NO: 148845 - DNA, 75 bp, synthetic construct
  source 1..75: mol_type = other DNA
agtgcagcgcccgctgcgtcagacccgcacccgcaaaccgttccctgagtcactcccacgggatgagaagcggct

SEQ ID NO: 148846 - DNA, 75 bp, synthetic construct
  source 1..75: mol_type = other DNA
gttcttcggctctgaccatggtggtgagcggggagcgctactgtacagcctgatcgggacgtgcaaactgaatta

SEQ ID NO: 148847 - DNA, 75 bp, synthetic construct
  source 1..75: mol_type = other DNA
gccacggttcagatacgaagttcaatctgttcaatagccgccgtatcgacgccattgatgtgaccagcaaaacgg

SEQ ID NO: 148848 - DNA, 75 bp, synthetic construct
  source 1..75: mol_type = other DNA
accaaattcaatctgttcaacagccgccgtatcgatgccatcgacgtaaccagcaaaacggagccgcacccatga

SEQ ID NO: 148849 - DNA, 75 bp, synthetic construct
  source 1..75: mol_type = other DNA
gagttgatgcgcagcgccttccgggttatccggactgtacgtgaaaagcatgcctgtactcagtgcgatgccatc

SEQ ID NO: 148850 - DNA, 75 bp, synthetic construct
  source 1..75: mol_type = other DNA
ctgcaggaaaagctgatcaaccgggagcgcgaaatagaccatctgcaggcgcagctggataaactccgccggatg

SEQ ID NO: 148851 - DNA, 75 bp, synthetic construct
  source 1..75: mol_type = other DNA
gctggcccgcgtgctgacctcgaagtatgcagagcacaccccgctgtatcgccagtcagaaatatacggccggca

SEQ ID NO: 148852 - DNA, 75 bp, synthetic construct
  source 1..75: mol_type = other DNA
acgttgcctgttgccgaagaaactttacctctccaggcgcaacatcttgcgttactggataccctcagtgcgctg

SEQ ID NO: 148853 - DNA, 75 bp, synthetic construct
  source 1..75: mol_type = other DNA
atcttgcggggttcagtggtgtactgcaggcggatgcatacgccgggttcaacgagctgtaccgggatggccgga

SEQ ID NO: 148854 - DNA, 75 bp, synthetic construct
  source 1..75: mol_type = other DNA
ggcacctgcagtgtggttcgcttacagcccggacagaaaaggcatccatccgcagactcatcttgcctgcttcag

SEQ ID NO: 148855 - DNA, 75 bp, synthetic construct
  source 1..75: mol_type = other DNA
gccacggctcagatacgaaatttaatctgttcaacagccgccgtatcgatgccatcgacgtgaccagcaaaacgg

SEQ ID NO: 148856 - DNA, 75 bp, synthetic construct
  source 1..75: mol_type = other DNA
aaaccgttgttgaaatccctggaaagctggttgcgtgaaaagatgaagaccctgtcgcgacactcagagttggcg

SEQ ID NO: 148857 - DNA, 75 bp, synthetic construct
  source 1..75: mol_type = other DNA
gccgttcactgctgtcgggctgggtggatgcatgctgccggcagctgtctccgctggaagaggcgcttcatggct

SEQ ID NO: 148858 - DNA, 75 bp, synthetic construct
  source 1..75: mol_type = other DNA
aacgcgaaatagaccatctgcaggcacagctggataagctgcgccggatgaacatcggcagcagctctgaaaaag

SEQ ID NO: 148859 - DNA, 75 bp, synthetic construct
  source 1..75: mol_type = other DNA
ctgtcgcgacactcagaactggcgaaagcgttcgtatacgccctgaaccagtggccggcgctgacgtactatgca

SEQ ID NO: 148860 - DNA, 75 bp, synthetic construct
  source 1..75: mol_type = other DNA
ggttcagtcttcagtcaaagcagaagacaaaaactcgccggccccctttgtagtaatgccacctctatttcgttt

SEQ ID NO: 148861 - DNA, 75 bp, synthetic construct
  source 1..75: mol_type = other DNA
gctgtaccgccagtctgaaatgtacggccgccagggcgtggagctgagtcgttcactgctgtcgggctgggtgga

SEQ ID NO: 148862 - DNA, 75 bp, synthetic construct
  source 1..75: mol_type = other DNA
aacgcgaaatagaccatctgcaggcacagctggataagctgcgccggatgaacttcggcagccgctcagaaaaag

SEQ ID NO: 148863 - DNA, 75 bp, synthetic construct
  source 1..75: mol_type = other DNA
aacgcgaaatagaccatctgcaggcacagctggataagctgcgccggatgaacatcggcagctgctcggaaaaag

SEQ ID NO: 148864 - DNA, 75 bp, synthetic construct
  source 1..75: mol_type = other DNA
ttcctgccgtcgattatgctctctggctttatttttcagatcgacagtatgcccgcggtgatccgcgcggtgacg

SEQ ID NO: 148865 - DNA, 75 bp, synthetic construct
  source 1..75: mol_type = other DNA
gtaaaatccacgatgtgcacgttcgcaccccgtcagccctgacggaggaagcgctgaaacggatcggcgaactgt

SEQ ID NO: 148866 - DNA, 75 bp, synthetic construct
  source 1..75: mol_type = other DNA
gggtatcgcaggaccggggctgctggcccgcgtgctgatctcaaagtatgcagagcacaccccgctgtaccgcca

SEQ ID NO: 148867 - DNA, 75 bp, synthetic construct
  source 1..75: mol_type = other DNA
ctgctgctgtgtaagctgctcccctattacgtcctcggcatgctggcaatgctgctgtgtatgctggtgtcggta

SEQ ID NO: 148868 - DNA, 75 bp, synthetic construct
  source 1..75: mol_type = other DNA
caacgccaccgcgccaattcaggtgattaccgacggcagcgagccaaataccgccaactttgtgcagggttatgt

SEQ ID NO: 148869 - DNA, 75 bp, synthetic construct
  source 1..75: mol_type = other DNA
ctctacggagattacccgcacggaactgctgctgtgtaagctgatcccttattactttctcgggatgctggcgat

SEQ ID NO: 148870 - DNA, 75 bp, synthetic construct
  source 1..75: mol_type = other DNA
atggctaccgttactgttcattgtccgcgctgtaattccgataaagtttatcgacatggtcgtagttgttcccag

SEQ ID NO: 148871 - DNA, 75 bp, synthetic construct
  source 1..75: mol_type = other DNA
ggatgtatgggtagtcgatgcctcgcggttatcggtcgaagaaatacgctcaatcgcagaacggcacaaacagga

SEQ ID NO: 148872 - DNA, 75 bp, synthetic construct
  source 1..75: mol_type = other DNA
gcggattatcttggcctgattgagaagccgaaagcagaccgcaacgacctcgcaattgctcacatctccggaagc

SEQ ID NO: 148873 - DNA, 75 bp, synthetic construct
  source 1..75: mol_type = other DNA
tcggtatccgttattaccggatgcgcgactacagcaaccttgaccacgcggagattctggcacgcgttaaggagg

SEQ ID NO: 148874 - DNA, 75 bp, synthetic construct
  source 1..75: mol_type = other DNA
tttatcagaaagaggttcctccaggcccgtttgcgattacagatttgcagttggccggtggtggagcggatcttg

SEQ ID NO: 148875 - DNA, 75 bp, synthetic construct
  source 1..75: mol_type = other DNA
cagaggtgtgcggttgtttcgtgatatgcagatgttgcctaactcgaaacaaaattttacgccacgggtgcaggg

SEQ ID NO: 148876 - DNA, 75 bp, synthetic construct
  source 1..75: mol_type = other DNA
ttcaaccttaaacaactacattcataaaggaacagagccttcttttaaaatagcttgccttatctcagataaaga

SEQ ID NO: 148877 - DNA, 75 bp, synthetic construct
  source 1..75: mol_type = other DNA
atgaccagaaatgatgatgctttttcttttgtcgaccggggaaaagaaagtttcagagagcgtttagtaaagctg

SEQ ID NO: 148878 - DNA, 75 bp, synthetic construct
  source 1..75: mol_type = other DNA
tcgaatttccttatctggatgctaaaggcaggatagacacgcgccgacctttaatcgttggcgcggcgcaggatg

SEQ ID NO: 148879 - DNA, 75 bp, synthetic construct
  source 1..75: mol_type = other DNA
ccattgcgactggttaaggtaggagagaatgattatttgataagcaaccaaaaaggccagaagaacccactattg

SEQ ID NO: 148880 - DNA, 75 bp, synthetic construct
  source 1..75: mol_type = other DNA
taaacctgtacggttaggggaaatcatcactgactacactgacacgcttgacaggcgtctgaggaacggagaaga

SEQ ID NO: 148881 - DNA, 75 bp, synthetic construct
  source 1..75: mol_type = other DNA
aagacctggtagggcttcatggtttacctgccacaattcagggaattcaccaaaaagccaaaaggggcggatggc

SEQ ID NO: 148882 - DNA, 75 bp, synthetic construct
  source 1..75: mol_type = other DNA
gcaattgcggtgacggaaaagcttctcgtcaacagccagaagcagaaaaaatcccttatgcagcaattgcttacc

SEQ ID NO: 148883 - DNA, 75 bp, synthetic construct
  source 1..75: mol_type = other DNA
ttcacgaccaacgctgacggtttctaacctggacggtatggtcaccggaatggcggaagatttgcagagtctggt

SEQ ID NO: 148884 - DNA, 75 bp, synthetic construct
  source 1..75: mol_type = other DNA
ttcacgaccaactctgacggtttctaacctggacggtatggtcaccggaatggcggaagatatgcagagtctggt

SEQ ID NO: 148885 - DNA, 75 bp, synthetic construct
  source 1..75: mol_type = other DNA
ctacaactgaaaaatatctgactgaattaggattgaacagttcatccgcaagaatatatccaaaaaactcggttc

SEQ ID NO: 148886 - DNA, 75 bp, synthetic construct
  source 1..75: mol_type = other DNA
ttgttttatatgctttattccttttgctctatcttattgatataagtcgttataaattatctgggattgttgcag

SEQ ID NO: 148887 - DNA, 75 bp, synthetic construct
  source 1..75: mol_type = other DNA
tgccatccgcatggaaaaagtcggggccaaaatccgcgcctcccgcgaaatggccgaagtctgggcggcaaagct

SEQ ID NO: 148888 - DNA, 75 bp, synthetic construct
  source 1..75: mol_type = other DNA
tggcaggggcgggaatatcaggcatacccgattgacggcagtggctttgagatgaacgggaagggcagcagtgcc

SEQ ID NO: 148889 - DNA, 75 bp, synthetic construct
  source 1..75: mol_type = other DNA
gaatgaaaaaggggaggcggtcacctggcaggggcggcaatatcaggcatacccgattgacggcagcggttttga

SEQ ID NO: 148890 - DNA, 75 bp, synthetic construct
  source 1..75: mol_type = other DNA
cttctggatgtggattgccgcgtttatcggcatggcgacctcttttgcagaatgttcccttgcccagctttataa

SEQ ID NO: 148891 - DNA, 75 bp, synthetic construct
  source 1..75: mol_type = other DNA
attgtcagctactccgatgtgcagtccctgaacgacctgcagtgttttgtcaccctgccgggaagttatccggtg

SEQ ID NO: 148892 - DNA, 75 bp, synthetic construct
  source 1..75: mol_type = other DNA
ggtgcgtaacggcaaaagcactgccggacatcagcgctatcgctgctctcattgccgtaaaacatggcaactgca

SEQ ID NO: 148893 - DNA, 75 bp, synthetic construct
  source 1..75: mol_type = other DNA
atcgctgaaaatgcgttgcggatggtcagtctgggccgcaaaaactcttatgacctttgtcaaatattaagccca

SEQ ID NO: 148894 - DNA, 75 bp, synthetic construct
  source 1..75: mol_type = other DNA
caccgcctgtcatcaacgacgaacaatccacatcaacaccattaaccaccgctcaaacgatgacgttggctgcgg

SEQ ID NO: 148895 - DNA, 75 bp, synthetic construct
  source 1..75: mol_type = other DNA
gcgaagcattagcaggcgagacaactaccgacaaagcggccccccagttgctggtggcaacagataagcccacga

SEQ ID NO: 148896 - DNA, 75 bp, synthetic construct
  source 1..75: mol_type = other DNA
gccggcagagcagcggcttgctgaacgtcagcgaaaaacgaaaccgctgttgaaatccctggaaagctggttgcg

SEQ ID NO: 148897 - DNA, 75 bp, synthetic construct
  source 1..75: mol_type = other DNA
tatgtccttgatgtcatagccgactggccgataaaccgggtcggcgaactgctcccctggcgcgtagcactgccg

SEQ ID NO: 148898 - DNA, 75 bp, synthetic construct
  source 1..75: mol_type = other DNA
tgcatcatgtacttgatgtcatcgccgactggcctgtgaaccgggggggtgctctgctcccgtggcgggttactc

SEQ ID NO: 148899 - DNA, 75 bp, synthetic construct
  source 1..75: mol_type = other DNA
cccgctgtaccgccagtctgaaatgtacggccgccagggcgtggagctgagtcgttcactgctgtcgggctgggt

SEQ ID NO: 148900 - DNA, 75 bp, synthetic construct
  source 1..75: mol_type = other DNA
ctgctggaaaagctgaacgagcgtgaacgcgaaatagaccatctgcaggcacagctggataagctgcgtaagctg

SEQ ID NO: 148901 - DNA, 75 bp, synthetic construct
  source 1..75: mol_type = other DNA
tgcatcatgtacttgatgtcatcgccgactggcctgtgaaccgggtgggtgctctgctcccgtggcggggtactc

SEQ ID NO: 148902 - DNA, 75 bp, synthetic construct
  source 1..75: mol_type = other DNA
tgatcgacctcggagaatgggctgctgaagaaaaacgaatccccagcagcggtgatctttctgagagtgatgact

SEQ ID NO: 148903 - DNA, 75 bp, synthetic construct
  source 1..75: mol_type = other DNA
tgatcgacctcggagaatgggctgctgaagaaaaacgaatccccagcagtggcgatctttccgaaagcgatgact

SEQ ID NO: 148904 - DNA, 75 bp, synthetic construct
  source 1..75: mol_type = other DNA
aatacttgcgggatcaagtataaataatttaaaaggttcagatattgaatcaataaatattgatgctcctttaca

SEQ ID NO: 148905 - DNA, 75 bp, synthetic construct
  source 1..75: mol_type = other DNA
acagtcagcggcgatttagtctgggtcgaatttccttatctggatgctaaaggcaggatagacacgcgccgacct

SEQ ID NO: 148906 - DNA, 75 bp, synthetic construct
  source 1..75: mol_type = other DNA
catgctggctaatacctgcacctggacctatcgcggtgatgagtgcggttatcacggtccggctgtcgcggatga

SEQ ID NO: 148907 - DNA, 75 bp, synthetic construct
  source 1..75: mol_type = other DNA
atgaagaacatggtatttatcatgcacctttgcctgccataatttttgatgatttcacgactgatagtaagttcg

SEQ ID NO: 148908 - DNA, 75 bp, synthetic construct
  source 1..75: mol_type = other DNA
gtcgcagcgcctgttttgagtgccccgctgggttcccatgaatggcaacaatccttaagccaacatatttcactg

SEQ ID NO: 148909 - DNA, 75 bp, synthetic construct
  source 1..75: mol_type = other DNA
cctggcgacaccgctgaagcgtcagtccagccattaacaccgctggtagctgaagcccagagcaaagcggaagtc

SEQ ID NO: 148910 - DNA, 75 bp, synthetic construct
  source 1..75: mol_type = other DNA
ttggtggcgacagataaacttgtcatcaaagtcgagccgctggtcagcgatattcagaacgacgcgcaacaacca

SEQ ID NO: 148911 - DNA, 75 bp, synthetic construct
  source 1..75: mol_type = other DNA
gccaccagtctgctggcgatggggccgaaccgccagcgacgtgtctggtttttttatgacgaactggcttctttg

SEQ ID NO: 148912 - DNA, 75 bp, synthetic construct
  source 1..75: mol_type = other DNA
atcagcacaccgtcaccggtgaccgctgccgccagcccccacaccagacacagccactgcccaccgtcgccgcgc

SEQ ID NO: 148913 - DNA, 75 bp, synthetic construct
  source 1..75: mol_type = other DNA
atgattcgcttagcgcccttgattaccgctgacgttggtaacgccacattacctgaaggaaaagccagcgatgct

SEQ ID NO: 148914 - DNA, 75 bp, synthetic construct
  source 1..75: mol_type = other DNA
ttttgtatggtgcatgcattattaataatgtatatgctgaagagcaaaacattattcagaaatttgaagcccttc

SEQ ID NO: 148915 - DNA, 75 bp, synthetic construct
  source 1..75: mol_type = other DNA
gcagctggataaactccgccggatgacttcggcagtcgttccgaaaaagtctcccgccgtatcgcacaaatggaa

SEQ ID NO: 148916 - DNA, 75 bp, synthetic construct
  source 1..75: mol_type = other DNA
aagcgttcgcatacgccctgaaccagtggccggcgctgacgtactatgcgaacgatggctgggctgaggcggaca

SEQ ID NO: 148917 - DNA, 75 bp, synthetic construct
  source 1..75: mol_type = other DNA
ggtatcatttttgataacttgccgatgctttttgctatcggttctgccgtgggactggcttcagaatcgggtatt

SEQ ID NO: 148918 - DNA, 75 bp, synthetic construct
  source 1..75: mol_type = other DNA
tccggcaaacgcttcgtggctatcgcgacggcttttctttccttcatccttggcttgttactgccctatgtctgg

SEQ ID NO: 148919 - DNA, 75 bp, synthetic construct
  source 1..75: mol_type = other DNA
acagtgatgacggtctggcggaggcggacaataacacagcagaaagagcgcttcgtgccgtctgtctcgggaaaa

SEQ ID NO: 148920 - DNA, 75 bp, synthetic construct
  source 1..75: mol_type = other DNA
cagggtttgcaggaacactgaccaaacgacccggtgctgcttcattctaaggaatgtagtggtgagcgactcggg

SEQ ID NO: 148921 - DNA, 75 bp, synthetic construct
  source 1..75: mol_type = other DNA
atggatgcatgctgccggctgctgtctccgctggaagaggcgcttcatggctatgtcatgactgacggcaaactc

SEQ ID NO: 148922 - DNA, 75 bp, synthetic construct
  source 1..75: mol_type = other DNA
gtataagtgagctaaaaaagcaagctgtacagaaattaattgacaacgttgatcactcgcaagtgattgactatc

SEQ ID NO: 148923 - DNA, 75 bp, synthetic construct
  source 1..75: mol_type = other DNA
ccggtgaaaccgacatcgccctgcccggcccgctgccgttcatcctctcccgcacctatgaagtggtcaacaaaa

SEQ ID NO: 148924 - DNA, 75 bp, synthetic construct
  source 1..75: mol_type = other DNA
aaagctacctacgctatgtccttgacgtcatagccgactggccgataaaccgggtcagcgaactgcttccgtggc

SEQ ID NO: 148925 - DNA, 75 bp, synthetic construct
  source 1..75: mol_type = other DNA
gcgttcgcatacgccctgaaccagtggccggcgctgacgtactatgcagatgatggctgggctgaggcggacaat

SEQ ID NO: 148926 - DNA, 75 bp, synthetic construct
  source 1..75: mol_type = other DNA
agcgcgaaatagaccatctgcaggcgcagctggataaactccgccggatgaacttcggcagtcgttcaaaaaaag

SEQ ID NO: 148927 - DNA, 75 bp, synthetic construct
  source 1..75: mol_type = other DNA
ccgttccctgagtcactcccacgggatgagaagcggctgctgccgactgagccgggttgcccggagtgcggtggt

SEQ ID NO: 148928 - DNA, 75 bp, synthetic construct
  source 1..75: mol_type = other DNA
atgtaccggccgccgtggtgccaattcgcaccatccataatattgcgctgaacccaaacttcggtggcgaagtga

SEQ ID NO: 148929 - DNA, 75 bp, synthetic construct
  source 1..75: mol_type = other DNA
caggcgccggtgccttcaaaacccattgcacgcagttatgccggagcggggcttctggcccatgttgtcgctgga

SEQ ID NO: 148930 - DNA, 75 bp, synthetic construct
  source 1..75: mol_type = other DNA
agtggctgcgttacgtcattgaacatatccaggactggccggcaaaccgggtacgcgatctgttgccctggaaag

SEQ ID NO: 148931 - DNA, 75 bp, synthetic construct
  source 1..75: mol_type = other DNA
gcgtagcctgatgaatgacctgcgtccgctctctgaatgggtggttcaggagcagctacccgtgttgatggtggt

SEQ ID NO: 148932 - DNA, 75 bp, synthetic construct
  source 1..75: mol_type = other DNA
aactgttcttggcatcacaccagagatggccgggcaaggcggtaaatatgcgatggtggtggggatcccaacgct

SEQ ID NO: 148933 - DNA, 75 bp, synthetic construct
  source 1..75: mol_type = other DNA
cagcgccttccgggttatccggactgtacgtgaaaagcatgcctgtactcagtgcgatgccatcgtgcaggcccc

SEQ ID NO: 148934 - DNA, 75 bp, synthetic construct
  source 1..75: mol_type = other DNA
ccatcgagcggggtatcgccggcccggggctgctggcccgcgtgctgacctcaaagtatgcagagcacaccccgc

SEQ ID NO: 148935 - DNA, 75 bp, synthetic construct
  source 1..75: mol_type = other DNA
atggtgaccggaaaatcagagaagcaacaggtgattgcctttatcgattacgagaactgcagtaacctgacagaa

SEQ ID NO: 148936 - DNA, 75 bp, synthetic construct
  source 1..75: mol_type = other DNA
ctggctgcgtgaaaagatgaaaaccctgtcgcgtcactcggatacggcgaaagcgttcgcatacctgctgaaaca

SEQ ID NO: 148937 - DNA, 75 bp, synthetic construct
  source 1..75: mol_type = other DNA
gagctgagccgttcactgctgtcgggctgggtggatgcatgctgccggctgctgtctccgctggaagaggcgctt

SEQ ID NO: 148938 - DNA, 75 bp, synthetic construct
  source 1..75: mol_type = other DNA
tgcccgccgaaagatccacgatgtgcacgtccgcatcccgtcagcactgacggaagaagccctagagcagatcgg

SEQ ID NO: 148939 - DNA, 75 bp, synthetic construct
  source 1..75: mol_type = other DNA
accattaacaactccaatggtgctgtttcaatcggtaatggactcaatgtaactggcgatataagaaccaatgca

SEQ ID NO: 148940 - DNA, 75 bp, synthetic construct
  source 1..75: mol_type = other DNA
atgcagtcgaaccttatgattaatcatggcaaactgactacccagctactacaggccgtagccaaacaaactggt

SEQ ID NO: 148941 - DNA, 75 bp, synthetic construct
  source 1..75: mol_type = other DNA
aagctacctacgcaatgtacttgacgtcatagcagactggccgatgaaccgggtcagcgaactgctcccgtggcg

SEQ ID NO: 148942 - DNA, 75 bp, synthetic construct
  source 1..75: mol_type = other DNA
aacagctggagttgatgcgtagcgccttccgggttatccggacggtacgggaaaaacatgcctgtactcagtgcg

SEQ ID NO: 148943 - DNA, 75 bp, synthetic construct
  source 1..75: mol_type = other DNA
ggcttgctgaacgtcagcgaaaaacgaaaccgctgttgaaatccctggaaagctggttgcgtgaaaagatgaaga

SEQ ID NO: 148944 - DNA, 75 bp, synthetic construct
  source 1..75: mol_type = other DNA
cggcggcaaatgcaggcccgacgggtgttacagcagatgagtgatgaacggttgagggaaactgggttatgctgg

SEQ ID NO: 148945 - DNA, 75 bp, synthetic construct
  source 1..75: mol_type = other DNA
cggcggcaaatgcaggcccgacgggtgttacagcagatgagtgatgaacggttgagggaaattgggttacgctgg

SEQ ID NO: 148946 - DNA, 75 bp, synthetic construct
  source 1..75: mol_type = other DNA
actctggcaggcagtgaggcgttggcggcggcaaatgcaggcccgacgggtgttacagcagatgagtgatgaacg

SEQ ID NO: 148947 - DNA, 75 bp, synthetic construct
  source 1..75: mol_type = other DNA
cagaatttttgcggcttaaaagtcagcgatatcaaggctattactcagagtgcgattactgacaacgtgcaggat

SEQ ID NO: 148948 - DNA, 75 bp, synthetic construct
  source 1..75: mol_type = other DNA
tatggcaaactgactaatcagctactacaggctgtagccaaacaaactcgtgatggcgatacccaacaatggttc

SEQ ID NO: 148949 - DNA, 75 bp, synthetic construct
  source 1..75: mol_type = other DNA
cggcggcaaatgcaggcccgacgggtgttacagcagatgagtgatgaacggttgagggataatgggttaagctgg

SEQ ID NO: 148950 - DNA, 75 bp, synthetic construct
  source 1..75: mol_type = other DNA
gcactgacgtactatgcagatgatggctgggctgaagcagataacaacatcgccgaaaatgccctgcggatggtc

SEQ ID NO: 148951 - DNA, 75 bp, synthetic construct
  source 1..75: mol_type = other DNA
ttcggcgaatatttcactgtcaccagcaaatattggctgcccggcatctcctactggttggcttgaaacaggtga

SEQ ID NO: 148952 - DNA, 75 bp, synthetic construct
  source 1..75: mol_type = other DNA
cgcttacgcggatggtcagtctgggccgcaaaaactacctgttcttcggttcggatcatggaggagagcggggag

SEQ ID NO: 148953 - DNA, 75 bp, synthetic construct
  source 1..75: mol_type = other DNA
gcccgcgtgctgacctcgaagtatgcagagcacaccccgctgtatcgccagtcagaaatatacgaccggcaaggt

SEQ ID NO: 148954 - DNA, 75 bp, synthetic construct
  source 1..75: mol_type = other DNA
ccgggcgcttatggacgtacgttcgagacgaccgcaacgccggatcagcgctggcccccgcagtgtggttcgctt

SEQ ID NO: 148955 - DNA, 75 bp, synthetic construct
  source 1..75: mol_type = other DNA
catttgatggctcggccaatatcaaccttcctggtgtaaatacaactggtaaccagaacaccacggggaatgctg

SEQ ID NO: 148956 - DNA, 75 bp, synthetic construct
  source 1..75: mol_type = other DNA
aagctacctacgcaatgtacttgacgtcatagcggactggccgatgaaccgggtcagcgaactgctcccatggcg

SEQ ID NO: 148957 - DNA, 75 bp, synthetic construct
  source 1..75: mol_type = other DNA
aagctacctacgcaatgtacttgacgtcatagccgactggccgctgaaccgggtcagcgaactgctcccgtggcg

SEQ ID NO: 148958 - DNA, 75 bp, synthetic construct
  source 1..75: mol_type = other DNA
aagctacctacgcaatgtacttgacgtcatagctgactggccgatgaaccgggtcagcgaactgctcccttggcg

SEQ ID NO: 148959 - DNA, 75 bp, synthetic construct
  source 1..75: mol_type = other DNA
ctgatcgggacgtgcaaactgaatgacgtggatccagaaagctaccttcgccatgtgcttggcgtcatagcagac

SEQ ID NO: 148960 - DNA, 75 bp, synthetic construct
  source 1..75: mol_type = other DNA
aagctacctacgcaatgtacttgacgtcatagcggactggccggtgaaccgggtcagcgaactgctcccgtggcg

SEQ ID NO: 148961 - DNA, 75 bp, synthetic construct
  source 1..75: mol_type = other DNA
aagctacctacgcaatgtacttgacgtcatagcggactggccgctgaaccgggtcagcgaactgctcccctggcg

SEQ ID NO: 148962 - DNA, 75 bp, synthetic construct
  source 1..75: mol_type = other DNA
ccggtcgttatcggttctgttcgtgcccgtctggacagacttgatgagccgagcagcaacaaagtgctgccaatc

SEQ ID NO: 148963 - DNA, 75 bp, synthetic construct
  source 1..75: mol_type = other DNA
tacgtatcgttatcaacaaccaggttggtttcaccacctctaatccgctggatgcccgttctacaccgtactgta

SEQ ID NO: 148964 - DNA, 75 bp, synthetic construct
  source 1..75: mol_type = other DNA
gacctggtgtgctaccgccgtcatggccacaacgaagccgacgagccgagcgcaacccagccgctgatgtatcag

SEQ ID NO: 148965 - DNA, 75 bp, synthetic construct
  source 1..75: mol_type = other DNA
gttaagacagcttggcgagcattaggaaaaatcagttataaccataaggaaagtgaaaaagggaatgtcaaattt

SEQ ID NO: 148966 - DNA, 75 bp, synthetic construct
  source 1..75: mol_type = other DNA
tggaacgttatctgcaactttgtgctgagcaaaacatgcaggtgtgcgtaccgtctactccggcacaggtttacc

SEQ ID NO: 148967 - DNA, 75 bp, synthetic construct
  source 1..75: mol_type = other DNA
atgcagaacagcgctttgaaagcttggttggactcttcttacctctctggcgcaaaccagagctggatagaacag

SEQ ID NO: 148968 - DNA, 75 bp, synthetic construct
  source 1..75: mol_type = other DNA
ccgttccccgaatcacacccccgcgatgaaaaacggctgctgccggcagcgttatgctgcccggaatgtggaggc

SEQ ID NO: 148969 - DNA, 75 bp, synthetic construct
  source 1..75: mol_type = other DNA
tgaggttcgcttacagcccggacagaaaaggcatccatccgcagactcatcttgcttgcttcagcggtgtgctgc

SEQ ID NO: 148970 - DNA, 75 bp, synthetic construct
  source 1..75: mol_type = other DNA
gaagccctggagcagatcggtcagttgtacgccatagaggcggatataaggggaatgccggcagagcagcggctt

SEQ ID NO: 148971 - DNA, 75 bp, synthetic construct
  source 1..75: mol_type = other DNA
tgtctgaagaagccgtgctggcgtttgaatacggttatgccaccgcagaaccacgcactctgaccatctgggaag

SEQ ID NO: 148972 - DNA, 75 bp, synthetic construct
  source 1..75: mol_type = other DNA
tgcgcaggtggttatcgaccagttcatctcctctggcgaacagaaatggggccggatgtgtggtctggtaatgct

SEQ ID NO: 148973 - DNA, 75 bp, synthetic construct
  source 1..75: mol_type = other DNA
gcgcagctggataaactccgccggatgaacttcggcagtcgttccgaaaaagtctcccgccgtatcgcacaaatg

SEQ ID NO: 148974 - DNA, 75 bp, synthetic construct
  source 1..75: mol_type = other DNA
agtgcgatgccatcgtgcaggcacctgcaccttcgcggcccatcgagcggggtatcgccggaccgggctgctggc

SEQ ID NO: 148975 - DNA, 75 bp, synthetic construct
  source 1..75: mol_type = other DNA
gaacaggccgaatttttataccaagtgattccgacacctgaagagtatgatatctatgtaagcgaagaaaaatat

SEQ ID NO: 148976 - DNA, 75 bp, synthetic construct
  source 1..75: mol_type = other DNA
gtgttggattccaccaccttaagcattgagcaagtgattgaaaaagcgctacaatacgcgcgtcagaaattggct

SEQ ID NO: 148977 - DNA, 75 bp, synthetic construct
  source 1..75: mol_type = other DNA
aagctgagcaaccgggagcgcgaaatagaccatctgcaggcgcagctggataaactccgccggatgaacttcggc

SEQ ID NO: 148978 - DNA, 75 bp, synthetic construct
  source 1..75: mol_type = other DNA
gcagcatgagaccagacatgcgtacaacgcgcagggctggcgaaccgctgtataccggacagcctgcccgccgtg

SEQ ID NO: 148979 - DNA, 75 bp, synthetic construct
  source 1..75: mol_type = other DNA
cagtcagaaatatacggccggcaaggtcgtggagctgaggcgttcactgctgtcgggctgggtggatgcatgctg

SEQ ID NO: 148980 - DNA, 75 bp, synthetic construct
  source 1..75: mol_type = other DNA
ctatgagcctgtcatcaacgacagttatcaggcgctggttgagcactatggcacggttattatcccggcccgccc

SEQ ID NO: 148981 - DNA, 75 bp, synthetic construct
  source 1..75: mol_type = other DNA
aaaaaaacaatgtgaaaatccagatattattatcgttgatcattattcactcgattatgaatgggaattaataat

SEQ ID NO: 148982 - DNA, 75 bp, synthetic construct
  source 1..75: mol_type = other DNA
tgcaactatgttacataaagatacagtaatactggcaacggtactgtacgaaaattttgcttctcatcgactttt

SEQ ID NO: 148983 - DNA, 75 bp, synthetic construct
  source 1..75: mol_type = other DNA
agaaccgggcgattactggaacaactggctcagggacgtgttgatggcagctggctgaaatatctgaaacagttg

SEQ ID NO: 148984 - DNA, 75 bp, synthetic construct
  source 1..75: mol_type = other DNA
ctgaaggcaaaaccccatccggaactggcttaccgtgcagtcctggggctgctggctcttcagaaaaaatacggc

SEQ ID NO: 148985 - DNA, 75 bp, synthetic construct
  source 1..75: mol_type = other DNA
aacgatggcttcttgcccgcatccgtaatgaaaccttccacacgctcagggcgctgaatgcgcgccttcgggagt

SEQ ID NO: 148986 - DNA, 75 bp, synthetic construct
  source 1..75: mol_type = other DNA
catccgctggcggaaaatgacaggtggcggatgcgccagtccggcattctggctgccgccgggatgtatgccctg

SEQ ID NO: 148987 - DNA, 75 bp, synthetic construct
  source 1..75: mol_type = other DNA
tcacgcaatattgtgattcgttcaccatttgcctgtcgaaaggacttgggacgccagtcggctcgttactggtcg

SEQ ID NO: 148988 - DNA, 75 bp, synthetic construct
  source 1..75: mol_type = other DNA
catccgctggcggaaaatgacaggtggcgggatgcgccagtccggcattctggctgccgccgggatgtatgcgct

SEQ ID NO: 148989 - DNA, 75 bp, synthetic construct
  source 1..75: mol_type = other DNA
ttacccgaccgagccgcgccatgctcgaagcgatgatggccgccccggttggggacgacgtttatggagacgacc

SEQ ID NO: 148990 - DNA, 75 bp, synthetic construct
  source 1..75: mol_type = other DNA
cgcggatgtgatgcgtcaggacactaatatgctgtttgttcgcgtcggcgaagaaaatgctgccgcgttaggcga

SEQ ID NO: 148991 - DNA, 75 bp, synthetic construct
  source 1..75: mol_type = other DNA
attatctgtacgaagccggcggcgctgcggtactgggcagcattcaaccgcaacctatcgatgctgacgccgacg

SEQ ID NO: 148992 - DNA, 75 bp, synthetic construct
  source 1..75: mol_type = other DNA
cagtctgaaatgtacggccgccagggcgtggagctgagccgttcactgctgtcgggctgggtggatgcatgctgc

SEQ ID NO: 148993 - DNA, 75 bp, synthetic construct
  source 1..75: mol_type = other DNA
aagccctggtggcatggtgcatggttacgggctggcggcttcgcaactgcagcgtctgcgcgataaaaacattcc

SEQ ID NO: 148994 - DNA, 75 bp, synthetic construct
  source 1..75: mol_type = other DNA
tcagggcgtggagctgagctgtgccacactggggcgctggacaggtgctgttgctgaactgctggagccgctgta

SEQ ID NO: 148995 - DNA, 75 bp, synthetic construct
  source 1..75: mol_type = other DNA
aggcggatgcgtatgccgggttcaacgaactttaccgcgatggacaaataacggaagccgcctgctgggctcatg

SEQ ID NO: 148996 - DNA, 75 bp, synthetic construct
  source 1..75: mol_type = other DNA
gccgggttcaacgaactgtaccgggatggccggataacggaagccgcctgttgggctcacgcccgccgtaaaatc

SEQ ID NO: 148997 - DNA, 75 bp, synthetic construct
  source 1..75: mol_type = other DNA
gcagatgatggctgggctgaggcggacaataacatcgctgaaaatgcgttgcggatggtcagtctgggccgcaaa

SEQ ID NO: 148998 - DNA, 75 bp, synthetic construct
  source 1..75: mol_type = other DNA
gtcgagaatacgccgctgcctgctatctccgacatgagcatcggtcatgcgatggaattcttcaacaatctcaaa

SEQ ID NO: 148999 - DNA, 75 bp, synthetic construct
  source 1..75: mol_type = other DNA
tccgccaacttcgcctgcccaatttgcggctacagtatgcgtgaactggagccgcgactgttttcgtttaacaac

SEQ ID NO: 149000 - DNA, 75 bp, synthetic construct
  source 1..75: mol_type = other DNA
tgcgcgatctcggtaataccgtgattgtggtggagcacgacgaagacgcgattcgcgccgctgaccatgtgatcg

SEQ ID NO: 149001 - DNA, 75 bp, synthetic construct
  source 1..75: mol_type = other DNA
tctgaaatatacggccgccagggtgtggaactgagtcgttcactcctgtcgggctgggttgatgcatgttgccgg

SEQ ID NO: 149002 - DNA, 75 bp, synthetic construct
  source 1..75: mol_type = other DNA
gttgcgtcagacccgcacccgtaagccgttccctgaatcactaccccgtgacaaaaagcgactgttgcctgcggc

SEQ ID NO: 149003 - DNA, 75 bp, synthetic construct
  source 1..75: mol_type = other DNA
tgtttacctgcatcaccggggtttcaggttctggtaaatcgacgctgattaacgacacgctgttcccgattgccc

SEQ ID NO: 149004 - DNA, 75 bp, synthetic construct
  source 1..75: mol_type = other DNA
gttgaaatgcacttcctgccggatatttacgtaccgtgcgaccagtgcaaaggtaaacgctataaccgcgaaacg

SEQ ID NO: 149005 - DNA, 75 bp, synthetic construct
  source 1..75: mol_type = other DNA
tggtgacccatcttgacgtctcgcgtgaacaactggcggaaatcgccgcccactggcgcgctttcttagcccgtt

SEQ ID NO: 149006 - DNA, 75 bp, synthetic construct
  source 1..75: mol_type = other DNA
tggcggagcaactgcgtgcagcaggcgcagatgtgatgcgccaggacaccaatatgctgtttgtccgtgtcggtg

SEQ ID NO: 149007 - DNA, 75 bp, synthetic construct
  source 1..75: mol_type = other DNA
gcctgcccgacctgtgacggccttggcgtgcagcaatatttcgatcctgaccgcgtgatccagaatccggaactg

SEQ ID NO: 149008 - DNA, 75 bp, synthetic construct
  source 1..75: mol_type = other DNA
cgccgaaccggcaccgtatcgcgatattcaggggctggagcatttcgataaagtgatcgatatcgaccaaagccc

SEQ ID NO: 149009 - DNA, 75 bp, synthetic construct
  source 1..75: mol_type = other DNA
ggaactgcaaaagaaacataccattgaagtggtggttgatcgcttcaaggtgcgtgacgatcttacccaacgtct

SEQ ID NO: 149010 - DNA, 75 bp, synthetic construct
  source 1..75: mol_type = other DNA
ttcacgacctacgctgacggtttctaacctggacggtatggtcaccggaatggcggaagatatgcagagtctggt

SEQ ID NO: 149011 - DNA, 75 bp, synthetic construct
  source 1..75: mol_type = other DNA
ttttgaaacggccagaaaacttggtgcttcagatattcattttttaatttcagagtctattttcaaagttcgcat

SEQ ID NO: 149012 - DNA, 75 bp, synthetic construct
  source 1..75: mol_type = other DNA
gtagtctcgctgtctgagttacaggaagccggtcaggatgatgaaaataaaggtccgaaagaacgggttattcat

SEQ ID NO: 149013 - DNA, 75 bp, synthetic construct
  source 1..75: mol_type = other DNA
ccaacaacaagcactggataaagcgagtctgcgccgcctggttcagttcaatattcagcagggcatcgacggttt

SEQ ID NO: 149014 - DNA, 75 bp, synthetic construct
  source 1..75: mol_type = other DNA
gtctggtcgagcaggttgctaatgacctggatgcgattcttgaaaaagggatgcgcgaagctgtacgtccgttgt

SEQ ID NO: 149015 - DNA, 75 bp, synthetic construct
  source 1..75: mol_type = other DNA
cgcaattactgattgggatgatcagccagcgccttgtaccaactctgtgtccctcctgccgtattccatgggaaa

SEQ ID NO: 149016 - DNA, 75 bp, synthetic construct
  source 1..75: mol_type = other DNA
accagtttcttccctcaaagggaacaggatgcgcgcctgtccccacaattaatgcgaaaaataggaatatttggt

SEQ ID NO: 149017 - DNA, 75 bp, synthetic construct
  source 1..75: mol_type = other DNA
gagtgccacgctgggggaactggagaaagtgcccgaaatgttgcgcccggacaaacgactcccctgcgtaactgt

SEQ ID NO: 149018 - DNA, 75 bp, synthetic construct
  source 1..75: mol_type = other DNA
tgcctctgtccagcgtgtacttaagaaaatgctattgtcggggttaccttcagagtttgagcttgctgcagttgt

SEQ ID NO: 149019 - DNA, 75 bp, synthetic construct
  source 1..75: mol_type = other DNA
gacgagtatttaccagagtctttgcttgcgaaaggatatggggcaaaggcgtatgatatggaaggaacgtgcatc

SEQ ID NO: 149020 - DNA, 75 bp, synthetic construct
  source 1..75: mol_type = other DNA
aactgcaaaccgagtgcaacaaagtcattgatttgctgattaaaacaggcgtattccgtggcctgaaaacagttc

SEQ ID NO: 149021 - DNA, 75 bp, synthetic construct
  source 1..75: mol_type = other DNA
caattgaatggcgttattactggcaggtgaatatgcctgcttcaacagatgccacctggatgacctgttcagaca

SEQ ID NO: 149022 - DNA, 75 bp, synthetic construct
  source 1..75: mol_type = other DNA
ctgcctgttcagcgattgcagatctcactggtggatttggcattatctatatcagtccgttgaaggcattgatta

SEQ ID NO: 149023 - DNA, 75 bp, synthetic construct
  source 1..75: mol_type = other DNA
tgcagcaagttctggcgcacatgcacatactgtaggtattggtgcgcatacgcactccgttgcgattggttcaca

SEQ ID NO: 149024 - DNA, 75 bp, synthetic construct
  source 1..75: mol_type = other DNA
gtgctgacgcaacgaaaaaagggagcgcgaaaacgaaaggccgtggacgtaaggctgcgcagccggcgcctcagc

SEQ ID NO: 149025 - DNA, 75 bp, synthetic construct
  source 1..75: mol_type = other DNA
aacgggggcgcagtggcaaacctgcaggtggccacgtcagaaagctggcgcgacaaacagacgggggagatacgg

SEQ ID NO: 149026 - DNA, 75 bp, synthetic construct
  source 1..75: mol_type = other DNA
attactttaaccgccgcgcatgtggctgcttttgccagaagggcaacggatacatatgccgatgcggatggtggc

SEQ ID NO: 149027 - DNA, 75 bp, synthetic construct
  source 1..75: mol_type = other DNA
actcatagtgtcacaggcgcatcagcagtcagccagtggtcacaaaatgggtcagtacataaggtagtgtctgcg

SEQ ID NO: 149028 - DNA, 75 bp, synthetic construct
  source 1..75: mol_type = other DNA
ttgttatgcctggtggctggactgacagggggcgttatgcttatggaatgttctggcaatatcaaaacaataaac

SEQ ID NO: 149029 - DNA, 75 bp, synthetic construct
  source 1..75: mol_type = other DNA
tctgtacaccaccattatccgtggcctgaatgagaagggggaagcggtcagcgacgcgcgtctgattcgctcggt

SEQ ID NO: 149030 - DNA, 75 bp, synthetic construct
  source 1..75: mol_type = other DNA
aggcacaagcgtttgaagagaaactggcttccctgtctgtggtattacggaagtgcgtgacgggcgatgatatgc

SEQ ID NO: 149031 - DNA, 75 bp, synthetic construct
  source 1..75: mol_type = other DNA
gcacacttccggcgcgccttactttcgcattagcggcattgattgcgttctatcgtggtgagcgtaacggagaaa

SEQ ID NO: 149032 - DNA, 75 bp, synthetic construct
  source 1..75: mol_type = other DNA
ccgcgtgatggtcgtgattatgatccggatgtactgcagcaggcggtgaatgatggtcgcaaatattccgcagcc

SEQ ID NO: 149033 - DNA, 75 bp, synthetic construct
  source 1..75: mol_type = other DNA
tgatgcggtcgcaaatattccgcagccggcagacggtaaaagtctcaccccggatgatgtgcgtccgatgcttga

SEQ ID NO: 149034 - DNA, 75 bp, synthetic construct
  source 1..75: mol_type = other DNA
tccggcaaaactgacccgtctgctgttcgaacgctttagccatttcaacggtgcgctggataaaggttggatcat

SEQ ID NO: 149035 - DNA, 75 bp, synthetic construct
  source 1..75: mol_type = other DNA
gcgtattggtacatcaccatcgatccgcgcagcagtcaaactattgttgttgacgatggtgcgaaaaagcgagct

SEQ ID NO: 149036 - DNA, 75 bp, synthetic construct
  source 1..75: mol_type = other DNA
acctttggtcgttacggcgttgggggtatcactctcgcagaagctcgtgaacgacttggtgaagccaagcggatg

SEQ ID NO: 149037 - DNA, 75 bp, synthetic construct
  source 1..75: mol_type = other DNA
acgtcatcctggctgacagtacccgcgcaatgaaacaggcggtgatcgaccgtgacatacttccggttcttggca

SEQ ID NO: 149038 - DNA, 75 bp, synthetic construct
  source 1..75: mol_type = other DNA
agagttaatggcagaggcgttcagggggcaatttagaatagttattttgatatattcgctaaatcataaatttgc

SEQ ID NO: 149039 - DNA, 75 bp, synthetic construct
  source 1..75: mol_type = other DNA
agctgctgtcagagataaccccctctcttctacgtgagtattgcgacaagataaaagcgcgtggtgcgccagcga

SEQ ID NO: 149040 - DNA, 75 bp, synthetic construct
  source 1..75: mol_type = other DNA
agagcagcggttaaacttttgctgttaacgatggtacgtaaaagtgagcttactaacgcaacctggaacgagatc

SEQ ID NO: 149041 - DNA, 75 bp, synthetic construct
  source 1..75: mol_type = other DNA
gggcagtcccttgccaagtttggaccccacgatctgaggcgtacagcaagtaccttactccatgaagccggttac

SEQ ID NO: 149042 - DNA, 75 bp, synthetic construct
  source 1..75: mol_type = other DNA
atgaatatgatgcgatatgcaaaaaaccattcagaatcaactctgggaatatcacgttggactacttaggtggtt

SEQ ID NO: 149043 - DNA, 75 bp, synthetic construct
  source 1..75: mol_type = other DNA
ttgcccatgaacaaaaaggggtacgagctgtttataacaaggctgaatatcgtgagcagagggctgagatgctac

SEQ ID NO: 149044 - DNA, 75 bp, synthetic construct
  source 1..75: mol_type = other DNA
gtgcttaccgatacaaaattaaagaacctcaagccacaggacaaactgtacaaggtctccgatcgtgacgggctg

SEQ ID NO: 149045 - DNA, 75 bp, synthetic construct
  source 1..75: mol_type = other DNA
ctggattgacggggagcatacggatctgattccgttctccccgtcgaagtttgagaggtggatggaagacagtaa

SEQ ID NO: 149046 - DNA, 75 bp, synthetic construct
  source 1..75: mol_type = other DNA
cattaacggacgacgggaaacgctggtcattggtcagtatggtcgtgacggtatcagcctggcggaagcacgcga

SEQ ID NO: 149047 - DNA, 75 bp, synthetic construct
  source 1..75: mol_type = other DNA
tctgtcgcggtgattcccatctagtgttcgctaatagtcgcaaacggactgaaagcattgccgctacgcttggcg

SEQ ID NO: 149048 - DNA, 75 bp, synthetic construct
  source 1..75: mol_type = other DNA
accacttcaaaaactcatgggggcgggattatagttatttttaaagattttataaataactggtggaaatataac

SEQ ID NO: 149049 - DNA, 75 bp, synthetic construct
  source 1..75: mol_type = other DNA
gagttgtcattttccaagtcaatttttgatgatataaaaaccaaatatataacagatcccgaaacaaaacgaaac

SEQ ID NO: 149050 - DNA, 75 bp, synthetic construct
  source 1..75: mol_type = other DNA
cttttattggctcagagcgtggtatacagctgctttctctgcttaacagaattgaccatgtgctgggacgccagt

SEQ ID NO: 149051 - DNA, 75 bp, synthetic construct
  source 1..75: mol_type = other DNA
cgaaccagtgttaccggaccgtttgcctataccgcctcaatcatcggtctggttgctgccggggcaatgctgatt

SEQ ID NO: 149052 - DNA, 75 bp, synthetic construct
  source 1..75: mol_type = other DNA
tgtcggtgcaggtgcgatgttgatctttggcggtgatatgaacggattccttcgcactctgattttcatcgttct

SEQ ID NO: 149053 - DNA, 75 bp, synthetic construct
  source 1..75: mol_type = other DNA
gattcgtggtgccgagacgtttgcggtacataccgacagttatatgaaacacgtcatcctggctgacagtacccg

SEQ ID NO: 149054 - DNA, 75 bp, synthetic construct
  source 1..75: mol_type = other DNA
tcactatggttcgtaaaggcgaattcaccaatgcaacgtgggatgaaatagattttaaaaaatggacatggacaa

SEQ ID NO: 149055 - DNA, 75 bp, synthetic construct
  source 1..75: mol_type = other DNA
tggattaacggggagcatacggatctgattccgttctccccgtcgaagtttgagaagtggatggcgggggaataa

SEQ ID NO: 149056 - DNA, 75 bp, synthetic construct
  source 1..75: mol_type = other DNA
tcaagttgacattgaagccaataaattaacatatacaattttatttcctgatacggagttacctgttcaacttaa

SEQ ID NO: 149057 - DNA, 75 bp, synthetic construct
  source 1..75: mol_type = other DNA
ccgaaaaggtatagaaatattagttaagcagggagagctgttatcatcattgataaatgatcataaagaaaacaa

SEQ ID NO: 149058 - DNA, 75 bp, synthetic construct
  source 1..75: mol_type = other DNA
gcctttgtacagagtgtacaggaacgtgagtcagtgctggagatcgttgctgatgaagcaaaaggaaaactgaag

SEQ ID NO: 149059 - DNA, 75 bp, synthetic construct
  source 1..75: mol_type = other DNA
taaaccctcaatggccattggttcccatcaacggaaactgtcgaatcattggtgtggcagtagaaactaagttaa

SEQ ID NO: 149060 - DNA, 75 bp, synthetic construct
  source 1..75: mol_type = other DNA
catgggtggcctgcaggccgtacgtgcgccgttcttcccgccgaatgcattgctgatcacccgtctggataacct

SEQ ID NO: 149061 - DNA, 75 bp, synthetic construct
  source 1..75: mol_type = other DNA
aaatgcgagcagaccaactttgacacggtgctgacctacgcgaagctggacctgtgggcgaagtttcaggatttc

SEQ ID NO: 149062 - DNA, 75 bp, synthetic construct
  source 1..75: mol_type = other DNA
tttgatgttgatactccgtgtatttttaatacgcctgctaacaatgagagttatgaaaaatcattaaagcctgtg

SEQ ID NO: 149063 - DNA, 75 bp, synthetic construct
  source 1..75: mol_type = other DNA
gacgctgatggttgatgtggaatataaatgcgagcagaccaactttaacacggtgctgacctacgcgaagctgga

SEQ ID NO: 149064 - DNA, 75 bp, synthetic construct
  source 1..75: mol_type = other DNA
atgtttctggctatgcgttttttgcatagcggaaaaattacgctgtttgaacaagatgctgcgaaggatttcgtt

SEQ ID NO: 149065 - DNA, 75 bp, synthetic construct
  source 1..75: mol_type = other DNA
tatttctatgcatctactgcttactgtatgctgggtatattgcttaatcgaatttttaacgtttgttttcaaaca

SEQ ID NO: 149066 - DNA, 75 bp, synthetic construct
  source 1..75: mol_type = other DNA
ggcgcgcagtctcgcccgcagcagtccgctccggcagcgccgtctaacgagccgccgatggattttgatgacgac

SEQ ID NO: 149067 - DNA, 75 bp, synthetic construct
  source 1..75: mol_type = other DNA
atccggtcaggatcgctacaccacagaagtcgtggtgaacgttggcggcaccatgcagatgttgggtggtcgtca

SEQ ID NO: 149068 - DNA, 75 bp, synthetic construct
  source 1..75: mol_type = other DNA
acagtgaaaaactggctgccgatatgatcatcagtcagaaacgcatgggtggcctgcaggccgtgcgtgcgccgt

SEQ ID NO: 149069 - DNA, 75 bp, synthetic construct
  source 1..75: mol_type = other DNA
aacagttaaatgacgttgaaaaatggtttaagggtaaagaagaacaggttgatttaataattatagacgaggctc

SEQ ID NO: 149070 - DNA, 75 bp, synthetic construct
  source 1..75: mol_type = other DNA
aaaattgctgggttgtttctcatttagggttgaaccaaatatctagattcaatgagtttaaattgtttgatgctg

SEQ ID NO: 149071 - DNA, 75 bp, synthetic construct
  source 1..75: mol_type = other DNA
agcgcagattttcgggatgaatttaacgttaaacgtgaggtgtcctggcatgatgtgaccgttgagcgtgtggta

SEQ ID NO: 149072 - DNA, 75 bp, synthetic construct
  source 1..75: mol_type = other DNA
ctaccctgaaatgcatggcacggtgacaggctttaaaagtgacatcgacaatcaggactggattattgcaaaagc

SEQ ID NO: 149073 - DNA, 75 bp, synthetic construct
  source 1..75: mol_type = other DNA
atgctgggcgcaatcaccacagtaaaaagcggtaatctgttattcatcatgcccggtggtggcgtgaacgcgcag

SEQ ID NO: 149074 - DNA, 75 bp, synthetic construct
  source 1..75: mol_type = other DNA
ggctttaccactcagcttgagcttgaagcaaaaaatcccggaatggatagcggaaacagagtgagcaacttagaa

SEQ ID NO: 149075 - DNA, 75 bp, synthetic construct
  source 1..75: mol_type = other DNA
cattgacaacagcggctttaccactcagcttgagcttgaagcaaaaatcccggaatggatagcagaaacagagta

SEQ ID NO: 149076 - DNA, 75 bp, synthetic construct
  source 1..75: mol_type = other DNA
cattgataacagcggctttaccacgcagcttgagcttgaggcaaaaatcccggaatggatagcggaaacagagtg

SEQ ID NO: 149077 - DNA, 75 bp, synthetic construct
  source 1..75: mol_type = other DNA
caggaaaacagtgaaaaactggctgccgatatgatcatcagtcagaaacgcatgggaggcctgcaggccgtgcgt

SEQ ID NO: 149078 - DNA, 75 bp, synthetic construct
  source 1..75: mol_type = other DNA
caggaaaacagtgaaaaactggctgccgatatgataatcagtcagaaacgcatgggcggcctgcaggccgtgcgt

SEQ ID NO: 149079 - DNA, 75 bp, synthetic construct
  source 1..75: mol_type = other DNA
caggaaaacagtgaaaaactggcagccgatatgattatcagtcagaaacgcatgggcggcctgcaggccgtgcgt

SEQ ID NO: 149080 - DNA, 75 bp, synthetic construct
  source 1..75: mol_type = other DNA
tcagttccgcattgctgaccgcgaggcgtatacgggggtacgcgcctactggcttgatcttaattacgggaaaaa

SEQ ID NO: 149081 - DNA, 75 bp, synthetic construct
  source 1..75: mol_type = other DNA
gctgttgttttcactgttttaaatcttactcactggcttgacggcaccacgcagacttatatcatttggatgaat

SEQ ID NO: 149082 - DNA, 75 bp, synthetic construct
  source 1..75: mol_type = other DNA
caggaaaacagtgaaaaactggccgccgatatgattatcagtcagaaacgcatgggaggcctgcaggccgtgcgt

SEQ ID NO: 149083 - DNA, 75 bp, synthetic construct
  source 1..75: mol_type = other DNA
atcttccgctcaaaatgcaggtagcgaaggtggtaaaaatgcgccgggagaagcagaagattgtcccgcgatgtc

SEQ ID NO: 149084 - DNA, 75 bp, synthetic construct
  source 1..75: mol_type = other DNA
tcactggaaaaacgagcggaaaaaatacatgaactagaagaaaaagagcctagattgagtggcgctttaccctat

SEQ ID NO: 149085 - DNA, 75 bp, synthetic construct
  source 1..75: mol_type = other DNA
cctttccgtttcctgtttggcttgtacgagtcatcccactggctggtggtactggcaaacattcttatctgcggc

SEQ ID NO: 149086 - DNA, 75 bp, synthetic construct
  source 1..75: mol_type = other DNA
ataataaatttattgggtatagagtatcagtcacataaagtagacatagagccatttatacatgcagtatgggtt

SEQ ID NO: 149087 - DNA, 75 bp, synthetic construct
  source 1..75: mol_type = other DNA
acttcttttgatagctgtcgttcattgatatatttgcctggcggtgatgttttctatatttcagatatctataaa

SEQ ID NO: 149088 - DNA, 75 bp, synthetic construct
  source 1..75: mol_type = other DNA
tgaggctgaaacagattagcggactgatggagttgtttcaggaagaggatttcagcccggcatggacggttcgct

SEQ ID NO: 149089 - DNA, 75 bp, synthetic construct
  source 1..75: mol_type = other DNA
cagtgggagctgcactattgcttgtcatgccagtagccgtatggatttctggctggcgttggcaacctggagaac

SEQ ID NO: 149090 - DNA, 75 bp, synthetic construct
  source 1..75: mol_type = other DNA
gcgctttattatctccgggagctgaaccggcaacatatcgtggaacccgaccgcagtggtaagggaagtgctata

SEQ ID NO: 149091 - DNA, 75 bp, synthetic construct
  source 1..75: mol_type = other DNA
tgccgaatcaggcgcttacaatgtcacccgctctggcgacagctatattctggttaacttctataccggagtcgg

SEQ ID NO: 149092 - DNA, 75 bp, synthetic construct
  source 1..75: mol_type = other DNA
tagaactgacaccgcaggccctgacggcgttaagcaatgccggttttgttaagcgcagtcttaaggaactggaaa

SEQ ID NO: 149093 - DNA, 75 bp, synthetic construct
  source 1..75: mol_type = other DNA
gcttagccatgctggatgtggtgctcgaaatggatcagtcggttcagtcaaagcctcaggctatcaggactttgc

SEQ ID NO: 149094 - DNA, 75 bp, synthetic construct
  source 1..75: mol_type = other DNA
ttcaggcattaatccgaattcaggaacgcaataacaacggtggtgaattacgcgagtttatttgtacacgggtag

SEQ ID NO: 149095 - DNA, 75 bp, synthetic construct
  source 1..75: mol_type = other DNA
tcaagttgatattgaagccaataagttaacgtatacagtcttatttcctgatacggagttacccgttcagctcaa

SEQ ID NO: 149096 - DNA, 75 bp, synthetic construct
  source 1..75: mol_type = other DNA
aatacattaaaataagaaaaacaagaggcattgaagatcaaacaacaactacctctcaaagttggataattaatg

SEQ ID NO: 149097 - DNA, 75 bp, synthetic construct
  source 1..75: mol_type = other DNA
aaattaatggttggtggtattggtgattacaacatagaatgtacccccggtgttagaaatattatatcgtttgaa

SEQ ID NO: 149098 - DNA, 75 bp, synthetic construct
  source 1..75: mol_type = other DNA
atccggtcaggatcgctacaccactgaagtggtggtgaacgttggcggcaccatgcagatgctgggtggtcgtca

SEQ ID NO: 149099 - DNA, 75 bp, synthetic construct
  source 1..75: mol_type = other DNA
ataatttactttcatggaatgatttttataatactcatgcgtcaatatgggatacaatagcaaggcagcataaaa

SEQ ID NO: 149100 - DNA, 75 bp, synthetic construct
  source 1..75: mol_type = other DNA
caattatcacgtgacttcaatctggatttggatttatcagatgagaggaaacaaaattttaattttcatcatccc

SEQ ID NO: 149101 - DNA, 75 bp, synthetic construct
  source 1..75: mol_type = other DNA
catttgctaaaacaagtatctctgacagagaaaacaatatatatcctgttatttgtgattctcctgatcacttca

SEQ ID NO: 149102 - DNA, 75 bp, synthetic construct
  source 1..75: mol_type = other DNA
aattcaatggaactgtctgaatctcaattagctaatgggtattctaaccgccaatggccttcacaaaatccagtt

SEQ ID NO: 149103 - DNA, 75 bp, synthetic construct
  source 1..75: mol_type = other DNA
catgaatatagatgcaattatgtctgttattggcttggttcaatatacacgaatgataaaaacaaatgacaatat

SEQ ID NO: 149104 - DNA, 75 bp, synthetic construct
  source 1..75: mol_type = other DNA
atgattcatccaggttcttttttagataaagcaattaacaatacaagagataaaaatcctaatactgatgttaaa

SEQ ID NO: 149105 - DNA, 75 bp, synthetic construct
  source 1..75: mol_type = other DNA
taattcttttagtaaagatgtctgtcgtgaacaaaatagtgatatatataaaatattttttagaattgcgtcttt

SEQ ID NO: 149106 - DNA, 75 bp, synthetic construct
  source 1..75: mol_type = other DNA
acaaatttttaggcggaattttgactcttactaataatcgcgtatataatcctggcggtgtatctggtgcctcgc

SEQ ID NO: 149107 - DNA, 75 bp, synthetic construct
  source 1..75: mol_type = other DNA
gaaaccagtttaaccattgaaggtattcgtctggtggtggattgtgcccaggagcgtgtggcgcgttttgatccg

SEQ ID NO: 149108 - DNA, 75 bp, synthetic construct
  source 1..75: mol_type = other DNA
gaatacccgcctggaagtagttaccgaaggcgtgctgacgcggatgatccagcgtgacccggagttgagcggtgt

SEQ ID NO: 149109 - DNA, 75 bp, synthetic construct
  source 1..75: mol_type = other DNA
gttcgacaaccccaccaccgatatccgtaaggacagatgcagcaagtgcatgcgcgggtgtgagatgcgcggcat

SEQ ID NO: 149110 - DNA, 75 bp, synthetic construct
  source 1..75: mol_type = other DNA
tcttacctgaattacttgctgctctcgataccgcaccgcaggtgttattaagcgcgccgaccggagccgggaaat

SEQ ID NO: 149111 - DNA, 75 bp, synthetic construct
  source 1..75: mol_type = other DNA
gtgtcgtcgttgcccgttgctgccgtcttacctgagttacttgctgctctcgattgtgcatcgcaggtgttatta

SEQ ID NO: 149112 - DNA, 75 bp, synthetic construct
  source 1..75: mol_type = other DNA
ctcaacgcgttagccaggcatccatgacgcagcgtgccgggcgcgccgggcgtctggagccgggtatctgcctgc

SEQ ID NO: 149113 - DNA, 75 bp, synthetic construct
  source 1..75: mol_type = other DNA
gcaggagctgacggaccggtgggtggtggagcagatgtcagcgctgacggccatgacggcctcgtttgtgctggc

SEQ ID NO: 149114 - DNA, 75 bp, synthetic construct
  source 1..75: mol_type = other DNA
agcggtattttttctgcaatgagctgaatgaaaaaggggagccggtgacctggcaggggcggcaatatcaggcat

SEQ ID NO: 149115 - DNA, 75 bp, synthetic construct
  source 1..75: mol_type = other DNA
tgccacggtggtccgccgccgggtgtatgcgcgttttctggatgcggtgaactttgtggcaggcaatccggaggc

SEQ ID NO: 149116 - DNA, 75 bp, synthetic construct
  source 1..75: mol_type = other DNA
ctgtaacttgtgataattgcgggaatgttgttcttgttaatgccattatctcagggtgcttatctgctgacaata

SEQ ID NO: 149117 - DNA, 75 bp, synthetic construct
  source 1..75: mol_type = other DNA
tggcaggggcgtgaatatcaggcgtacccgattgagggcagcggctttgagatgaacgggaagggcagcagtgcc

SEQ ID NO: 149118 - DNA, 75 bp, synthetic construct
  source 1..75: mol_type = other DNA
cggaaggacagatgcagtaaatgcatgcgcgggtgtgaactgcgcaggaatgtcggcaactttggcggcttcctt

SEQ ID NO: 149119 - DNA, 75 bp, synthetic construct
  source 1..75: mol_type = other DNA
ttgctgggagaatatttccgcgatcgatttttacgattagtagatcaggcgcgacagcaaaaatttgaagtggct

SEQ ID NO: 149120 - DNA, 75 bp, synthetic construct
  source 1..75: mol_type = other DNA
tgatgaagaagaagcaacccgaacgtattttcccagcccgtggtcaggcctgatggaagcaaaggtcgatgcgtg

SEQ ID NO: 149121 - DNA, 75 bp, synthetic construct
  source 1..75: mol_type = other DNA
gcaataaacgagaaaaacatactgttccctggcgttatgtcattctgcgcctgcatgaagccgtacaggaaattg

SEQ ID NO: 149122 - DNA, 75 bp, synthetic construct
  source 1..75: mol_type = other DNA
ccctggctgagcgaggccgaccggcggctgcagataaaaagtgcactgtcctggtggctggtctgccggggggac

SEQ ID NO: 149123 - DNA, 75 bp, synthetic construct
  source 1..75: mol_type = other DNA
gtttgccgagcgcaaacaacgcgacccattcgactgggcagaaaaaaatctccaggaagtcgaacgcaataaacg

SEQ ID NO: 149124 - DNA, 75 bp, synthetic construct
  source 1..75: mol_type = other DNA
atcgacctgacggtacagggtggtgagcggtattttttctgtaatgagctgaatgaaaaaggggagccggtcacc

SEQ ID NO: 149125 - DNA, 75 bp, synthetic construct
  source 1..75: mol_type = other DNA
ccggcggctgcagataaaaagtgcactgtcctggtggctggtctgccggggggaaattcataaattccgctgtgt

SEQ ID NO: 149126 - DNA, 75 bp, synthetic construct
  source 1..75: mol_type = other DNA
cgacgctggaaacgtggctgctgccacatatgaccggagtgcattcactgcgaggtctgaaatcactcgatattt

SEQ ID NO: 149127 - DNA, 75 bp, synthetic construct
  source 1..75: mol_type = other DNA
actcgtttgacgtttttattgatgcccgcggacagcgtccgcttaaagtgaaagatattcctttccctgggctac

SEQ ID NO: 149128 - DNA, 75 bp, synthetic construct
  source 1..75: mol_type = other DNA
gtgcagaaattggagaggcgatggctcgggcggtcgtaaaacctgcatcccgtgcgcgtcggcgtctttcgtttg

SEQ ID NO: 149129 - DNA, 75 bp, synthetic construct
  source 1..75: mol_type = other DNA
ggacctgcagagcctggtgggggccacggtggtccgccgccgggtgtatgcgcgttttctggatgcggtgaattt

SEQ ID NO: 149130 - DNA, 75 bp, synthetic construct
  source 1..75: mol_type = other DNA
gatgaacggccggggcagcagtgccagaccgtcgctgacggtgtccaatctgttcggtctggtcaccgggatggc

SEQ ID NO: 149131 - DNA, 75 bp, synthetic construct
  source 1..75: mol_type = other DNA
cgcgcgttgaagatgtgcatcccatatcggaacggccacagtatttttctggtgatggtaaaagtggaaagatcc

SEQ ID NO: 149132 - DNA, 75 bp, synthetic construct
  source 1..75: mol_type = other DNA
tggcaggggcgtcagtatcaggcatacccgatagagggctgcggctttgagatgaacggcaagggcagcagtgcg

SEQ ID NO: 149133 - DNA, 75 bp, synthetic construct
  source 1..75: mol_type = other DNA
gttacttaggaaatttagaggggagataacagagaatagttccgttgttggtccgaatgctagcaacaagatagg

SEQ ID NO: 149134 - DNA, 75 bp, synthetic construct
  source 1..75: mol_type = other DNA
gtgctggccacaccgacggagacggacggggcgctgtttcccgatcgcattatgctggcgaatacctgtatgtgg

SEQ ID NO: 149135 - DNA, 75 bp, synthetic construct
  source 1..75: mol_type = other DNA
gctggcggattgaacagtgcagtgatctgacggcggtgagtgcgacatttgtgctggcggcccccacggagaccg

SEQ ID NO: 149136 - DNA, 75 bp, synthetic construct
  source 1..75: mol_type = other DNA
aaaaaatatgtcaatatttttgatggcatctccattagctatcaaaaatgttctgaggctgttctatacattggg

SEQ ID NO: 149137 - DNA, 75 bp, synthetic construct
  source 1..75: mol_type = other DNA
agaacaacaaaaaattgccgccgttctgtccgctgccgacaccgaaatctccacacttgagaaaaaactcgcctg

SEQ ID NO: 149138 - DNA, 75 bp, synthetic construct
  source 1..75: mol_type = other DNA
gctgacagccatgacggcctcgtttgtgctggctacaccgaccgagacggacggggcgctgtttcccggtcgtat

SEQ ID NO: 149139 - DNA, 75 bp, synthetic construct
  source 1..75: mol_type = other DNA
gctgacagccatgacggcctcgtttgtgctggcaacaccgaccgagacggacggggcgctgtttcccggtcgaat

SEQ ID NO: 149140 - DNA, 75 bp, synthetic construct
  source 1..75: mol_type = other DNA
gctgacagccatgacggcctcgtttgtgctggcaacaccgaccgagacggaaggggcgctgtttcccggtcgcat

SEQ ID NO: 149141 - DNA, 75 bp, synthetic construct
  source 1..75: mol_type = other DNA
gccacggtggtccgccgccgggtgtatgcgcgttttctggatgcggtgaattttgtggcaggtaatcctgaggca

SEQ ID NO: 149142 - DNA, 75 bp, synthetic construct
  source 1..75: mol_type = other DNA
gctgacagccatgacggcctcgtttgtgctggcgacaccgaccgagacggagggggcgctgtttcccggtcgcat

SEQ ID NO: 149143 - DNA, 75 bp, synthetic construct
  source 1..75: mol_type = other DNA
gctgacagccatgacggcctcgtttgtgctggcgacaccgaccgagacggacggggcgctgtttcccggtcggat

SEQ ID NO: 149144 - DNA, 75 bp, synthetic construct
  source 1..75: mol_type = other DNA
gaatgaaaaaggggagcggtcacctggcaggggcggcaatatcaggcatacccgattgacggcagtggctttgag

SEQ ID NO: 149145 - DNA, 75 bp, synthetic construct
  source 1..75: mol_type = other DNA
acggtgcgctgtttcccggtcgcatcatgctggcgaacacctgtatgtgggattaccggggcgatgaatgcgggt

SEQ ID NO: 149146 - DNA, 75 bp, synthetic construct
  source 1..75: mol_type = other DNA
cgaagctattcagtcgattttcacgcaactgacagaccatgcaaaaaccggatcgcgtcgcggccttcgctcatt

SEQ ID NO: 149147 - DNA, 75 bp, synthetic construct
  source 1..75: mol_type = other DNA
ccaacttcaccagggattatggcatttatttccaaacagaccggatgctgctcgtgattttctttttcatgttga

SEQ ID NO: 149148 - DNA, 75 bp, synthetic construct
  source 1..75: mol_type = other DNA
gtgctggcgacaccgacggagacggacggagcgctgtttcccggtcgcattatgctggcgaatacctgtatgtgg

SEQ ID NO: 149149 - DNA, 75 bp, synthetic construct
  source 1..75: mol_type = other DNA
atgcccgttttctggatgcggtgaatttcgttgcgggcaatccggaggcggacccggagcaggagctgagtgacc

SEQ ID NO: 149150 - DNA, 75 bp, synthetic construct
  source 1..75: mol_type = other DNA
aagggcagcagtgcctgcccgtcgctgacggtgtcgaatctgtttggtctggtcaccggaatggcggaggacctg

SEQ ID NO: 149151 - DNA, 75 bp, synthetic construct
  source 1..75: mol_type = other DNA
aagggcagcagtgcctgtccgtcgctgacggtgtcgaatctgttcggtctggtcaccggcatggcggaggacctg

SEQ ID NO: 149152 - DNA, 75 bp, synthetic construct
  source 1..75: mol_type = other DNA
gcggtcacctggcaggggcggcaatatcaggcatacccgattgacggcagtggctttgagatgaacgggaagggc

SEQ ID NO: 149153 - DNA, 75 bp, synthetic construct
  source 1..75: mol_type = other DNA
aagggcagcagtgccagaccgtcgatgacggtgtccaatctgttcggtctggtcaccgggatggcggaagacctg

SEQ ID NO: 149154 - DNA, 75 bp, synthetic construct
  source 1..75: mol_type = other DNA
ggacagatgcagcaagtgcatgcgcgggtgtgagatgcgcggcatggtggctaattttggcggtttcctttccat

SEQ ID NO: 149155 - DNA, 75 bp, synthetic construct
  source 1..75: mol_type = other DNA
gagtcggttaaatcagagcagtcaccgcgggtggtactctgggaaatcgacctgacggtacagggtggtgagcgg

SEQ ID NO: 149156 - DNA, 75 bp, synthetic construct
  source 1..75: mol_type = other DNA
aagggcagcagtgcctgaccgtcgctgacggtgtcgaatctgttgggtctggtcaccggtatggcggaggacctg

SEQ ID NO: 149157 - DNA, 75 bp, synthetic construct
  source 1..75: mol_type = other DNA
aaggacagatgcagcaagtgcatgcgcgggtgtgaactgcgcaggaatgtcggcaattttggcggtttcctttcc

SEQ ID NO: 149158 - DNA, 75 bp, synthetic construct
  source 1..75: mol_type = other DNA
cccgttttctggatgcggtgaatttcgttgcgggcaatccggaggcggacccggagcaggagctgagtgaccgct

SEQ ID NO: 149159 - DNA, 75 bp, synthetic construct
  source 1..75: mol_type = other DNA
ttaacatggcccgcttcatcaaaagccagacgctgaccctactggaaaaactgaatgaactggacgccgacgacc

SEQ ID NO: 149160 - DNA, 75 bp, synthetic construct
  source 1..75: mol_type = other DNA
tatcaaagatgcggagacttttggtgtgtgggctgagaaatggttacgcggttatcaaatggctgaatcgacgcg

SEQ ID NO: 149161 - DNA, 75 bp, synthetic construct
  source 1..75: mol_type = other DNA
ccgtttactgccaacgttaaatgaaaattcggcgcttcgccgttcaatggcgcagttgctgaacccgacgacgcc

SEQ ID NO: 149162 - DNA, 75 bp, synthetic construct
  source 1..75: mol_type = other DNA
aatatgagcctgcatgagctggaaaaaatgctggagcgtctgctggctcagaaacaacgtaaggagtaccgctga

SEQ ID NO: 149163 - DNA, 75 bp, synthetic construct
  source 1..75: mol_type = other DNA
actgagcgcggtcagtgcctcctttgtgctctccacaccgacggaaacggatggtgccgtttttccggggcgcat

SEQ ID NO: 149164 - DNA, 75 bp, synthetic construct
  source 1..75: mol_type = other DNA
caaagacttaagattatataaaggccatcagtttaaatttatatcaattgcaaaagatgctagtgatttaagaaa

SEQ ID NO: 149165 - DNA, 75 bp, synthetic construct
  source 1..75: mol_type = other DNA
aaaacccgacggcacagttggcgaaagagattattgcgcgcggcgaaattggtgaggtgatccacttctacggaa

SEQ ID NO: 149166 - DNA, 75 bp, synthetic construct
  source 1..75: mol_type = other DNA
ggctggaaagtctcgcgcgtgctggacaccatcgcactctcacaccagcaaggccgctggctgaacgtgaatgac

SEQ ID NO: 149167 - DNA, 75 bp, synthetic construct
  source 1..75: mol_type = other DNA
ttcccggcccaccctgacggtttctaacctggacggtatggtcaccgggatggcggaagagctgcagagtctggt

SEQ ID NO: 149168 - DNA, 75 bp, synthetic construct
  source 1..75: mol_type = other DNA
atcgctactttttctgtaatgagcagaacgaaaaaggtgagccggtcacctggcaggggcggcagtatcaggcat

SEQ ID NO: 149169 - DNA, 75 bp, synthetic construct
  source 1..75: mol_type = other DNA
tgatggccctaataaaaggattcttgaaaaagccatagctggaatgtcatctatcaaaatgtttaaaacaacaga

SEQ ID NO: 149170 - DNA, 75 bp, synthetic construct
  source 1..75: mol_type = other DNA
ttcccgacccaccctgacggtttctaacctgaacggtatggtcaccgggatggcggaagagctgcagagtctggt

SEQ ID NO: 149171 - DNA, 75 bp, synthetic construct
  source 1..75: mol_type = other DNA
agctgacagccatgacggcctcgtttgtgctggccacaccgaccgagacggacggggcgctgtttcccggtcgta

SEQ ID NO: 149172 - DNA, 75 bp, synthetic construct
  source 1..75: mol_type = other DNA
tgaatgaaaaaggggagccggtcacctggcaggggcggaagtaccaggcgtacccgattgatggcagcggctttg

SEQ ID NO: 149173 - DNA, 75 bp, synthetic construct
  source 1..75: mol_type = other DNA
cgcccgtcgctgacggtgtccaatctgttcggtctggtcaccgggatggcggaagacctgcagagtctggtgggg

SEQ ID NO: 149174 - DNA, 75 bp, synthetic construct
  source 1..75: mol_type = other DNA
ggtgctgtttttccggggcgcatcatgctggctaacacctgcacctggatctatcgcggtgatgagtgcggttat

SEQ ID NO: 149175 - DNA, 75 bp, synthetic construct
  source 1..75: mol_type = other DNA
tgggggccacggtggtccgccgccgggtgtatgcccgttttctggatgcggtgaatttggtagcgggcaatccgg

SEQ ID NO: 149176 - DNA, 75 bp, synthetic construct
  source 1..75: mol_type = other DNA
tgggggccacggtggtccgccgccgggtgtatgcccgttttctggatgcggtgaatttagtggcgggcaatccgg

SEQ ID NO: 149177 - DNA, 75 bp, synthetic construct
  source 1..75: mol_type = other DNA
gaatgaaagaggtgagccggttacctggcaggggcggcagtatcaggcatatcccattcaggggacgggatttga

SEQ ID NO: 149178 - DNA, 75 bp, synthetic construct
  source 1..75: mol_type = other DNA
ggaggacctgcagagcctggtgtgggccacggtggtccgccgccgggtgtatgcccgttttctggatgcggtgaa

SEQ ID NO: 149179 - DNA, 75 bp, synthetic construct
  source 1..75: mol_type = other DNA
tggcaggggcggcaatatcaggcatacccgattgacggcagtggctttgagatgaacggaagggcagcagtgcca

SEQ ID NO: 149180 - DNA, 75 bp, synthetic construct
  source 1..75: mol_type = other DNA
atgcaggatattcacgaagaaactcttaacgagtcggttaagtcagagcagtcaccgcgggtggtactctgggaa

SEQ ID NO: 149181 - DNA, 75 bp, synthetic construct
  source 1..75: mol_type = other DNA
aaacagttcaggacagcgtaagaaaaatgtttttagcctctattccagagcgtcagaatgaactggatgagttct

SEQ ID NO: 149182 - DNA, 75 bp, synthetic construct
  source 1..75: mol_type = other DNA
ggcagggttaagacgtaagatgcgaaaagcagccatggacagaaactatctcgcgtcagtccttgcggggagcgg

SEQ ID NO: 149183 - DNA, 75 bp, synthetic construct
  source 1..75: mol_type = other DNA
tggacgctggatatccatcttacgcagcccgatcgttggttgccgttactactggggcaagttccggcgatgatc

SEQ ID NO: 149184 - DNA, 75 bp, synthetic construct
  source 1..75: mol_type = other DNA
cctgctcaataccatgcaggatcgcggctggctgacgtgggaagcggaggtcgggcgcggtaaacgctcacgttt

SEQ ID NO: 149185 - DNA, 75 bp, synthetic construct
  source 1..75: mol_type = other DNA
cttttttttccacggctttatttttattggcaatcaaactaagtccattcattattttcttacagactaaagatc

SEQ ID NO: 149186 - DNA, 75 bp, synthetic construct
  source 1..75: mol_type = other DNA
aacacatctcgatttcttgaagcaatatggtgattttgaaaatggtattcctgttcacgatactattgccagagt

SEQ ID NO: 149187 - DNA, 75 bp, synthetic construct
  source 1..75: mol_type = other DNA
gcgatgtccctgatgaacttattgatttcacgtttgaatggaaaggtctgaagaaattatgcgtggcagtctcct

SEQ ID NO: 149188 - DNA, 75 bp, synthetic construct
  source 1..75: mol_type = other DNA
gctgggacaagttccggcgatgatcctgccgcgcgaatgggaaaccctcagtaactttgccagccatcccatcgg

SEQ ID NO: 149189 - DNA, 75 bp, synthetic construct
  source 1..75: mol_type = other DNA
tcaccgcttcactggcgtttctttttgcgtccaggagtccattttcatcatggtcgtgaactggaaatggacgac

SEQ ID NO: 149190 - DNA, 75 bp, synthetic construct
  source 1..75: mol_type = other DNA
tggtcgtgaactggaaatggacgatgtgatcgcctctttaaaacgaatcaatacgcttccgctctattcgcatat

SEQ ID NO: 149191 - DNA, 75 bp, synthetic construct
  source 1..75: mol_type = other DNA
cgcagtatgcgcggtctacgtatgaacaccctcggctggttcgattttaaatcagcgtggtttgcaccaccggat

SEQ ID NO: 149192 - DNA, 75 bp, synthetic construct
  source 1..75: mol_type = other DNA
ggctggctgacgtgggaagcggaagtcgggcgcggcaaacgctcgcgtttaacgttcctctataccgggctggcg

SEQ ID NO: 149193 - DNA, 75 bp, synthetic construct
  source 1..75: mol_type = other DNA
caagtcagagactggataagctatgtgctttcgccgaccaatctggtttatttcgccgaggaacagtaccagcaa

SEQ ID NO: 149194 - DNA, 75 bp, synthetic construct
  source 1..75: mol_type = other DNA
ttatttttttcgctgtaaaaggaaaccagggacggctaaataaagccttcgaggaaaaaatgccgctgaaagaat

SEQ ID NO: 149195 - DNA, 75 bp, synthetic construct
  source 1..75: mol_type = other DNA
cagaacaaaagaaagagccagaaatgacggtcagatattatatcagttctgctgatttaaccgcagagaagttcg

SEQ ID NO: 149196 - DNA, 75 bp, synthetic construct
  source 1..75: mol_type = other DNA
agacgtaagatgcgaaaagcagccatggacagaaactatctggcgtcagtccttgcggggagcgggctttcgtaa

SEQ ID NO: 149197 - DNA, 75 bp, synthetic construct
  source 1..75: mol_type = other DNA
agagcatgacagttacgcaatcagtgaaaagagtcacggcagagaagaaatccgtcttcatattgtttgcgatgt

SEQ ID NO: 149198 - DNA, 75 bp, synthetic construct
  source 1..75: mol_type = other DNA
attcaaggcagggttaagacgtaagatgcgaaaagcagccatggacaggaactatctggcgtcagtccttgcggg

SEQ ID NO: 149199 - DNA, 75 bp, synthetic construct
  source 1..75: mol_type = other DNA
atatcagttctgttgatttaaccgcagagaagttcgccacagcaatccgaaaccactggcacgtggagaataagc

SEQ ID NO: 149200 - DNA, 75 bp, synthetic construct
  source 1..75: mol_type = other DNA
aggggcggctaaataaagcctttgaggaaaaatttccgctgaaagaattaaataatccagagcatgacagttacg

SEQ ID NO: 149201 - DNA, 75 bp, synthetic construct
  source 1..75: mol_type = other DNA
gtatttctgttatccccgattacagacaagcctggaaagtggaacataaattgtcggatattctactgttgacta

SEQ ID NO: 149202 - DNA, 75 bp, synthetic construct
  source 1..75: mol_type = other DNA
cttatgacaagaatcgtagtaagggggtgattcatgtcattagtgcgttctcaacaatgcacagtctggtcatcg

SEQ ID NO: 149203 - DNA, 75 bp, synthetic construct
  source 1..75: mol_type = other DNA
cgttctcggattggggaaaaacggtcatcttgggctgaacgaaccgggagaaagcctgcaaccggcctgccatat

SEQ ID NO: 149204 - DNA, 75 bp, synthetic construct
  source 1..75: mol_type = other DNA
caggatgcgacagaacgttttctcacggctaaagtctctaccgctatcccggcttcgtttttatggctgcataac

SEQ ID NO: 149205 - DNA, 75 bp, synthetic construct
  source 1..75: mol_type = other DNA
gggacagattacagctgtagaaagtggcctggctgttgccgttctgacccagtgcagcgtgccacctcatctgca

SEQ ID NO: 149206 - DNA, 75 bp, synthetic construct
  source 1..75: mol_type = other DNA
cgatggataaacagcaggcatctgacgaaaaacatcgtcgcttccacgacaaagagtctgacttcctggcatttg

SEQ ID NO: 149207 - DNA, 75 bp, synthetic construct
  source 1..75: mol_type = other DNA
agatcacagctatccctgaacttcttaacatgttggatattaaaggaaaaattatcacaactgatgcgatgagtt

SEQ ID NO: 149208 - DNA, 75 bp, synthetic construct
  source 1..75: mol_type = other DNA
gtcattgcaattgatggaaaaacgctccggcactcttatgacaagagtcgccgcaggggagcgattcatgtcatt

SEQ ID NO: 149209 - DNA, 75 bp, synthetic construct
  source 1..75: mol_type = other DNA
atacccacgatactatcggcctgggctcaacggcccgacacatcagcccgttgagcaactggcgtcgctgcgtct

SEQ ID NO: 149210 - DNA, 75 bp, synthetic construct
  source 1..75: mol_type = other DNA
tgcgtttgagctatcagtttgagcccggcgcggatgctgacggtgtgaccgtgcatatcccgctgccgctactta

SEQ ID NO: 149211 - DNA, 75 bp, synthetic construct
  source 1..75: mol_type = other DNA
caggcgatggagcagattagcggttaacactgctatttgcctgataaatctaaaacccggtaagcatttagcgcc

SEQ ID NO: 149212 - DNA, 75 bp, synthetic construct
  source 1..75: mol_type = other DNA
ccggaaagctacgaacagaagcgtggcaactacaaagtgaaggcgtggccagcgctggtggatgagcgcgacagc

SEQ ID NO: 149213 - DNA, 75 bp, synthetic construct
  source 1..75: mol_type = other DNA
gtggcgatcaaactgtttgataatccgctggaacaaaagcaggcaatgtggaacggtcttcgccgtctactgctg

SEQ ID NO: 149214 - DNA, 75 bp, synthetic construct
  source 1..75: mol_type = other DNA
atgacggtatcgagcagagcggcttacatatctggagttttggtcagctgccggaaagctacgaacagaagcgtg

SEQ ID NO: 149215 - DNA, 75 bp, synthetic construct
  source 1..75: mol_type = other DNA
ttgaatggaaagggctgaagaaattatgcgtggcagtctcctttcggtccataatagcagaacaaaagaaagaac

SEQ ID NO: 149216 - DNA, 75 bp, synthetic construct
  source 1..75: mol_type = other DNA
tgcgtttgagctatcagtttgagcccggcgcggatgctgacggtgtgactgtgcatatcccgctgccgttactta

SEQ ID NO: 149217 - DNA, 75 bp, synthetic construct
  source 1..75: mol_type = other DNA
gtggaagagctggaacacaaatcacgtcgccgcgatattctggtggatgacgaaacgctgtttgagttttacgac

SEQ ID NO: 149218 - DNA, 75 bp, synthetic construct
  source 1..75: mol_type = other DNA
gctggcaatttatgcgtagcctgtacgatcaatttggttatttaccgctggcaacctttgaagtatggcgtgcac

SEQ ID NO: 149219 - DNA, 75 bp, synthetic construct
  source 1..75: mol_type = other DNA
aaaacagacaggcaacagttcgattacgtaaaagcgaagtgagatttgtcaggcaaaatccatcggcaggtttgt

SEQ ID NO: 149220 - DNA, 75 bp, synthetic construct
  source 1..75: mol_type = other DNA
gcacggtacaccgctcgaaaaaggctggccctttggctatgtatatgtgaaccagcgacaaaattgcgactgtgg

SEQ ID NO: 149221 - DNA, 75 bp, synthetic construct
  source 1..75: mol_type = other DNA
ctcatctgggccgcagcttccgccaggggcggcacatcctgcgcgtgctctactatcgtccgttgcgtaatctgc

SEQ ID NO: 149222 - DNA, 75 bp, synthetic construct
  source 1..75: mol_type = other DNA
caaagttgaaccaaggccttacgttcaaactgccgttctaaaaaagtatatacaggcttcaggcgtctgtatgcc

SEQ ID NO: 149223 - DNA, 75 bp, synthetic construct
  source 1..75: mol_type = other DNA
tacaaaaacagggaggtgattatttattcgcggtaaaaggaacccagggcggccaaataaagcctttgaggaaaa

SEQ ID NO: 149224 - DNA, 75 bp, synthetic construct
  source 1..75: mol_type = other DNA
aatgcgaacgctttaaagtctggctggaacgcccggttcttgatatcgacacggcgctggaacggctggtgaaag

SEQ ID NO: 149225 - DNA, 75 bp, synthetic construct
  source 1..75: mol_type = other DNA
ttctggcgcaggacaaaaagggcaaacttgtccaatgggaaaataaaggtggcgatgagttctccttgcaggatg

SEQ ID NO: 149226 - DNA, 75 bp, synthetic construct
  source 1..75: mol_type = other DNA
atgacagttacgcaattagtgaaaagagtcacggcagagaagaaatccgtcttcatattgtttgcgatgtccctg

SEQ ID NO: 149227 - DNA, 75 bp, synthetic construct
  source 1..75: mol_type = other DNA
cgtgtcgtggaaggcggtttctactatcgcactgccgagcactctgcccagcagtcgtcagaacgtctgcaaagc

SEQ ID NO: 149228 - DNA, 75 bp, synthetic construct
  source 1..75: mol_type = other DNA
gattgccggatcaagcgaaattatcagaagcgcaggccgagcagcttgaacaggcttaccagtctgcaatcggtg

SEQ ID NO: 149229 - DNA, 75 bp, synthetic construct
  source 1..75: mol_type = other DNA
cgcttacgcattcccccgaagcgcgttacatacgtgagatgttggtcaaacagcccaatccgatgaagctggatg

SEQ ID NO: 149230 - DNA, 75 bp, synthetic construct
  source 1..75: mol_type = other DNA
atggaacttaaaaaattgatggaacatatttctattattcccgattacagacaaacctggaaagtgaaacataaa

SEQ ID NO: 149231 - DNA, 75 bp, synthetic construct
  source 1..75: mol_type = other DNA
agagaagttcgccacagcaatccgaaaccactggcatgtggagaataagctgcactggcgtctggacgtggtaat

SEQ ID NO: 149232 - DNA, 75 bp, synthetic construct
  source 1..75: mol_type = other DNA
gtgattttgaaaatggtattcctgttcacgataccattgccagagttgtatcctgtatctgtcctgcgaaatttc

SEQ ID NO: 149233 - DNA, 75 bp, synthetic construct
  source 1..75: mol_type = other DNA
gctccggcattcttatgacaagagtcgccgcaggggagcgattcatgtcattagtgcgttctcaacaatgcacag

SEQ ID NO: 149234 - DNA, 75 bp, synthetic construct
  source 1..75: mol_type = other DNA
gatatagaggattttggggaaacacatctcgattttttgaagcaatatggtgattttgataatggtattcttgtt

SEQ ID NO: 149235 - DNA, 75 bp, synthetic construct
  source 1..75: mol_type = other DNA
tgagtgaaaagagtcacggcagagaagaaatccgtcttcacattgtttgcgatgtccctgatgaacttattgatt

SEQ ID NO: 149236 - DNA, 75 bp, synthetic construct
  source 1..75: mol_type = other DNA
gctggatcctgactcattttaaaacagtcagggaagttcgtgagcatattcaacaactgaacattgttccaactg

SEQ ID NO: 149237 - DNA, 75 bp, synthetic construct
  source 1..75: mol_type = other DNA
aataagctgcactggcgtctggacgtggtaatgaatgaagacgactgcaaaataagaaaaggaaatgcagcagaa

SEQ ID NO: 149238 - DNA, 75 bp, synthetic construct
  source 1..75: mol_type = other DNA
tgacaagagttgtcgcaggggagcgattcatgtcactagtgcgttctcaacaatgcacagtctggtcatcggaca

SEQ ID NO: 149239 - DNA, 75 bp, synthetic construct
  source 1..75: mol_type = other DNA
caatatggtgattttgaaaatggtattcctgttcacgataccattgccagagttgtatcctgtatcagtcctgca

SEQ ID NO: 149240 - DNA, 75 bp, synthetic construct
  source 1..75: mol_type = other DNA
atatagaggattttggggaaacacatctcgattttttgaagcaatatggtgattttgaaaatggtattcctgttc

SEQ ID NO: 149241 - DNA, 75 bp, synthetic construct
  source 1..75: mol_type = other DNA
atgaaaaagaaactgctcaaagcgaacccggcgctgtatctggacggtgagtttgccgcgccagaaaccagtcac

SEQ ID NO: 149242 - DNA, 75 bp, synthetic construct
  source 1..75: mol_type = other DNA
catcgccagagttgtatcctgtatcagtccttcaaaatttcacgagtgctttattaactggatgcgagattgcca

SEQ ID NO: 149243 - DNA, 75 bp, synthetic construct
  source 1..75: mol_type = other DNA
ctggtagtgggtagctcggttaaaggggcatcgcgttggatcgatctcggtttgctgcgtatccagcctgcggag

SEQ ID NO: 149244 - DNA, 75 bp, synthetic construct
  source 1..75: mol_type = other DNA
caaaatttcatgagtgctttattaactggatgcgtgactgccattcatcaaatgataaagacgtcattgcaattg

SEQ ID NO: 149245 - DNA, 75 bp, synthetic construct
  source 1..75: mol_type = other DNA
tctgcataaagcgattggcgctgtcctgagtgaaagaaatccggcgtctgcccttaatcatctcaaccatgcgtt

SEQ ID NO: 149246 - DNA, 75 bp, synthetic construct
  source 1..75: mol_type = other DNA
aggacggatgagaaatccaatgagattacagctatccctgaacttcttaacatgctggatattaaaggaaaaatc

SEQ ID NO: 149247 - DNA, 75 bp, synthetic construct
  source 1..75: mol_type = other DNA
ccataatagcagaacaaaagaaagagccagaaatgacggtcagatattatatcagttctgctgatttaaccgcag

SEQ ID NO: 149248 - DNA, 75 bp, synthetic construct
  source 1..75: mol_type = other DNA
gtcaataatagcagaacaaaagaaagagccagaaatgacggtcagatatcatatcagttctgctgatttaaccgc

SEQ ID NO: 149249 - DNA, 75 bp, synthetic construct
  source 1..75: mol_type = other DNA
ataatagcagaacaaaagaaagagccagaaatgacggtcagatattatatcagttctgatgatttaaccgcagag

SEQ ID NO: 149250 - DNA, 75 bp, synthetic construct
  source 1..75: mol_type = other DNA
aagacggatgagaaatctaatgagattacagctattcctgaacttcttaacatgatggatattaaaggaaaaatc

SEQ ID NO: 149251 - DNA, 75 bp, synthetic construct
  source 1..75: mol_type = other DNA
tttgcgccgttatttctggtgcagaaagttgggaagatatagaggatttcggggaaacacatctcgatttcttga

SEQ ID NO: 149252 - DNA, 75 bp, synthetic construct
  source 1..75: mol_type = other DNA
atggaacttaaaaaattgatggaacatatttctattattcccgattacagacaagcctggaaagtagagcataaa

SEQ ID NO: 149253 - DNA, 75 bp, synthetic construct
  source 1..75: mol_type = other DNA
catgtcattagtgcgttctcaacaatgcacagtctggtcatcggacagatcaagacggatgagaaatctaatgag

SEQ ID NO: 149254 - DNA, 75 bp, synthetic construct
  source 1..75: mol_type = other DNA
tgcgatgggttgcgagaaagatattgcagagaagatacagagacagggaggtgattatttagtcgctaaaaaagg

SEQ ID NO: 149255 - DNA, 75 bp, synthetic construct
  source 1..75: mol_type = other DNA
tacggcgtgatgcggatggtcgcggagctacaactgccgattaacgttatcggcgtgttggcaggttgtgaaaac

SEQ ID NO: 149256 - DNA, 75 bp, synthetic construct
  source 1..75: mol_type = other DNA
agctgcaactgccgattaacgttatcggcgtgctggcaggctgcgaaaacatgcctggcgggcgtgcctatcgtc

SEQ ID NO: 149257 - DNA, 75 bp, synthetic construct
  source 1..75: mol_type = other DNA
gaaagggctgacacgggaggagttgcaaaaaatcctccctgccggcgcagcacgtaatgcgctggattgtgcatt

SEQ ID NO: 149258 - DNA, 75 bp, synthetic construct
  source 1..75: mol_type = other DNA
gagattacagctatcccagaacttcttaacatgctggatattaaaggaaaaatcatcacaactgatgcgatggga

SEQ ID NO: 149259 - DNA, 75 bp, synthetic construct
  source 1..75: mol_type = other DNA
tggcggcgcgatccattacccattgcggtttatgaaagtacaagccttgctaaacgtagtgctatcaacgcacta

SEQ ID NO: 149260 - DNA, 75 bp, synthetic construct
  source 1..75: mol_type = other DNA
tcatgtcattagtgcgttctcaacaatgcacagtctggtcatcggacagatcaggacggatgagaaatccaatga

SEQ ID NO: 149261 - DNA, 75 bp, synthetic construct
  source 1..75: mol_type = other DNA
tgtccctgatgaacttattgattttacatttgaatggaaaggactgaaaaattatacgtggcagtctcctttcgg

SEQ ID NO: 149262 - DNA, 75 bp, synthetic construct
  source 1..75: mol_type = other DNA
aagaaattatgcgtggcagtctcctttcggtccataatagcagaacaaaagaaagaacccgaaatgacggtcaga

SEQ ID NO: 149263 - DNA, 75 bp, synthetic construct
  source 1..75: mol_type = other DNA
tgtgcgatgtgttaacttatgttgagcgttttgagccagaggcggtgattgacgtggcgacgttgacgggtgctt

SEQ ID NO: 149264 - DNA, 75 bp, synthetic construct
  source 1..75: mol_type = other DNA
gacgtggcgacgctgaccggtgcctgcgtgatcgcgctgggtcatcacattaccggtctgatggcgaaccataat

SEQ ID NO: 149265 - DNA, 75 bp, synthetic construct
  source 1..75: mol_type = other DNA
agctcgataagatcagtgatgggtacatcagcgccctgctgcgccggggcgaactggaaggaaaaccggggcaga

SEQ ID NO: 149266 - DNA, 75 bp, synthetic construct
  source 1..75: mol_type = other DNA
ctcctttcggtccataatagcagaacaaaagaaagagccagaaatgacggtcagatattatatcagttctgctga

SEQ ID NO: 149267 - DNA, 75 bp, synthetic construct
  source 1..75: mol_type = other DNA
atgcacagtctggtcatcggacagatcaagacggatgagaaatctaatgagattacagctatcccagaacttctt

SEQ ID NO: 149268 - DNA, 75 bp, synthetic construct
  source 1..75: mol_type = other DNA
cgcatcgaagatgttgtgctggtcaccccgcaaggcgcagaagtgctctacgccatgccgaaaacagtgttgctc

SEQ ID NO: 149269 - DNA, 75 bp, synthetic construct
  source 1..75: mol_type = other DNA
tgcactggcgtctggacgtggtaatgaatgaagacgactgcaaaataagaagaggaaacgcagcagaattatttt

SEQ ID NO: 149270 - DNA, 75 bp, synthetic construct
  source 1..75: mol_type = other DNA
cggcattcttatgataagagtcgccgcaggggagcgattcatgtcattagtgcgttctcaacaatgcacagtctg

SEQ ID NO: 149271 - DNA, 75 bp, synthetic construct
  source 1..75: mol_type = other DNA
tgacaagagtcgccgcaggggagcgattcatgtcattagtgcgttctcaacaatgcacagcctggtcatcggaca

SEQ ID NO: 149272 - DNA, 75 bp, synthetic construct
  source 1..75: mol_type = other DNA
attcatgtcattagttcgttctcaacaatgcacagtctggtcatcggacagatcaggacggatgagaaatccaat

SEQ ID NO: 149273 - DNA, 75 bp, synthetic construct
  source 1..75: mol_type = other DNA
ggcggctaaataaagcctttgaggaaaaatttccgctgaaagaattaaataatccagcgcatgacagttacgcaa

SEQ ID NO: 149274 - DNA, 75 bp, synthetic construct
  source 1..75: mol_type = other DNA
tctgatgctgggctgcatgttgtgtacctctcgtgccattagcgccgctttaccgctggtgccgcaggtcagttt

SEQ ID NO: 149275 - DNA, 75 bp, synthetic construct
  source 1..75: mol_type = other DNA
gaaacgccgcagaattattttcagggatacggcacatcgctattaatattttaacgaatgataaggttcaaggca

SEQ ID NO: 149276 - DNA, 75 bp, synthetic construct
  source 1..75: mol_type = other DNA
agatattatatcagttctgctgatttaaccgctgagaaattcgccacagcgatccgaaatcactggcacttggag

SEQ ID NO: 149277 - DNA, 75 bp, synthetic construct
  source 1..75: mol_type = other DNA
aggctgggaagatatagaggattttggggaaacacatcccgactcaacaatgcatagtctggtcctcggacagat

SEQ ID NO: 149278 - DNA, 75 bp, synthetic construct
  source 1..75: mol_type = other DNA
cgaggaagcctataccctcgatgaactggctgattatttgagcgcctcagcgcgtcgtagcatcgataaacatta

SEQ ID NO: 149279 - DNA, 75 bp, synthetic construct
  source 1..75: mol_type = other DNA
aatcgaaagacatgaagctgaagaaatcatggtgcatcaccgccgccacttggctgcgcgtgaagaagagattgc

SEQ ID NO: 149280 - DNA, 75 bp, synthetic construct
  source 1..75: mol_type = other DNA
cctataccctcgatgaactggctgattatctcgatttgagcgcctcagcgcgtcgtagcatcgataaacattacg

SEQ ID NO: 149281 - DNA, 75 bp, synthetic construct
  source 1..75: mol_type = other DNA
tgataaagaaaagaccacgcagacactgaaaatggtggcggaaaatggtcgttgggtcattgacgatattgtcag

SEQ ID NO: 149282 - DNA, 75 bp, synthetic construct
  source 1..75: mol_type = other DNA
tctgccgccagggggcaggttgatcagattatcgaacaggcgcttgaagatggcgttattgaaaggcacgaggcc

SEQ ID NO: 149283 - DNA, 75 bp, synthetic construct
  source 1..75: mol_type = other DNA
tcagggctggccagcattctcacagtggcttgatgccgtgattcagcgggtcgaaatgtacaacgcatcgcttcc

SEQ ID NO: 149284 - DNA, 75 bp, synthetic construct
  source 1..75: mol_type = other DNA
gcgttttgagccagaggcggtgattgacgtggcgacgttgacgggtgcttgtgtgatcgcgctgggccatcatat

SEQ ID NO: 149285 - DNA, 75 bp, synthetic construct
  source 1..75: mol_type = other DNA
acgcgctcaatatcgccgtgagaaccgcgccggacagctcggttaaggcgctgaaatatgccgccgcgattgaac

SEQ ID NO: 149286 - DNA, 75 bp, synthetic construct
  source 1..75: mol_type = other DNA
cgaattctcacagtggcttgatgccgtgattcagcgtgtcgaaatgtacaacgcatcgcttcccgttccgctttc

SEQ ID NO: 149287 - DNA, 75 bp, synthetic construct
  source 1..75: mol_type = other DNA
aagagctggatcgcgtggacttgtttagccgggcaatgcgtacctctgccgccagaggtcaggttgaccagatta

SEQ ID NO: 149288 - DNA, 75 bp, synthetic construct
  source 1..75: mol_type = other DNA
tgatccagcgtgtcgaaatgtacaatgcatcgcttcccgttccgctttcactggctgaatgtcgggctattggca

SEQ ID NO: 149289 - DNA, 75 bp, synthetic construct
  source 1..75: mol_type = other DNA
agtttggtgttcgcattgccggtaaagagcgtgctctcctcgcaaaatacatccagtttaatcagcctcacgcca

SEQ ID NO: 149290 - DNA, 75 bp, synthetic construct
  source 1..75: mol_type = other DNA
tcagggctggccggcattctcacaatggcttgatgcggtgattcagcgtgtcgaaatgtacaacgcatcgctccc

SEQ ID NO: 149291 - DNA, 75 bp, synthetic construct
  source 1..75: mol_type = other DNA
gaaccagccatatgcgcagcactggcttgcctttgacgtggaccggatgggagctgcgattgactggagcgaccg

SEQ ID NO: 149292 - DNA, 75 bp, synthetic construct
  source 1..75: mol_type = other DNA
cgttgaaaccgtgggagactcttggaattagccgcgcctggtattaccaactgaaaaaacgaggtcttgtagagt

SEQ ID NO: 149293 - DNA, 75 bp, synthetic construct
  source 1..75: mol_type = other DNA
cctgtgaacatgcggggatcgcaccggatattttatgcctcggtaaagccttaaccggcggcacgatgacgcttt

SEQ ID NO: 149294 - DNA, 75 bp, synthetic construct
  source 1..75: mol_type = other DNA
tttggtcgaaccggcaaactgtttgcttgtgaacatgcggggatcgcgccggacattttatgcctcggtaaagcc

SEQ ID NO: 149295 - DNA, 75 bp, synthetic construct
  source 1..75: mol_type = other DNA
tacagggcgattcggcagggctggccagcattctcacagtggcttgatgccgtgattcagcgtgtcgaaatgtac

SEQ ID NO: 149296 - DNA, 75 bp, synthetic construct
  source 1..75: mol_type = other DNA
tgacgccgaaaaatgctgaccgtgaacatatccgccgctcgctgtcgccagggggatttcgtccggtctattttt

SEQ ID NO: 149297 - DNA, 75 bp, synthetic construct
  source 1..75: mol_type = other DNA
tgaaattcgagtcctggagaaaaccaccgattccgcccgcattcatgttcgttttacgctgaccaatggcaacaa

SEQ ID NO: 149298 - DNA, 75 bp, synthetic construct
  source 1..75: mol_type = other DNA
ttcgtattgcgctgaccaatggcaacagcgaagagcaggatttggttttacagcggcgcgaagggctgtgggaaa

SEQ ID NO: 149299 - DNA, 75 bp, synthetic construct
  source 1..75: mol_type = other DNA
cgccgatgttactggccggtgacgaacacggtcacagccagcatggcaataacaatgcttactgtcaggataacc

SEQ ID NO: 149300 - DNA, 75 bp, synthetic construct
  source 1..75: mol_type = other DNA
gatcccggtcgagatccgtggcacttataaagccctggggcatccggtgatgatcaactatttgaaacagttggg

SEQ ID NO: 149301 - DNA, 75 bp, synthetic construct
  source 1..75: mol_type = other DNA
tataaagcactgggacatccggtgatggtcaactatttaaaacagttgggcattaccgcgctggaactactgccg

SEQ ID NO: 149302 - DNA, 75 bp, synthetic construct
  source 1..75: mol_type = other DNA
cagtttaagctgtttatccagcacggtgatttgcgtgcagaaccggttaaaggggaatttagtagttatggatta

SEQ ID NO: 149303 - DNA, 75 bp, synthetic construct
  source 1..75: mol_type = other DNA
aagagccaaaacggttgatcctaatcccggatggcgaacacattgatgctttttccgatcgtcacggcgatgttt

SEQ ID NO: 149304 - DNA, 75 bp, synthetic construct
  source 1..75: mol_type = other DNA
ttctcaaaattctgtttattctctttgttgctgctttctgcatttatttagtaccgcgcgtcgccatcaacttct

SEQ ID NO: 149305 - DNA, 75 bp, synthetic construct
  source 1..75: mol_type = other DNA
tgacctccagcagtgaagatgtggaagaatatataagcagaaatcatttcacggacaaacaaaaactggagattt

SEQ ID NO: 149306 - DNA, 75 bp, synthetic construct
  source 1..75: mol_type = other DNA
aagcctggcccttacataccccgtttgtgattgctcggggaagtcgcagtgaagcgcgcgtggtggtggttgaac

SEQ ID NO: 149307 - DNA, 75 bp, synthetic construct
  source 1..75: mol_type = other DNA
ccagcagtgcagcggcactatggcgagcaggggcaaagttgctgaaagtgaagctggataatcatcttatcagcg

SEQ ID NO: 149308 - DNA, 75 bp, synthetic construct
  source 1..75: mol_type = other DNA
cattttatggagattacaaccccggatgaatatgtgcttgcactttgtcccgtctgcgaaagctggtcgcacttt

SEQ ID NO: 149309 - DNA, 75 bp, synthetic construct
  source 1..75: mol_type = other DNA
atgggtgttatcagagcaaggcagtttataccgtactggcgctgaatctggaaggcaaaaaagaagtcctgggcc

SEQ ID NO: 149310 - DNA, 75 bp, synthetic construct
  source 1..75: mol_type = other DNA
gttgaagtcaatcgtaaaaatggttccggaaaaaagaccattaaagccccgactggcagctttgaactggcaact

SEQ ID NO: 149311 - DNA, 75 bp, synthetic construct
  source 1..75: mol_type = other DNA
gtgaacagtgcacgccttgtgctggccgccatcctgctgtttctggtagtggattttaccggacggctgatgtcg

SEQ ID NO: 149312 - DNA, 75 bp, synthetic construct
  source 1..75: mol_type = other DNA
taaatagaaaaataactccagaaaatactcctccaatgttgttatcatacagaaatgcagatttaacgcaagaaa

SEQ ID NO: 149313 - DNA, 75 bp, synthetic construct
  source 1..75: mol_type = other DNA
agtttactgatttgaaaaacaaaaaaattcaaggccatcaaaacacagttgccagtgtcatggattggtataatc

SEQ ID NO: 149314 - DNA, 75 bp, synthetic construct
  source 1..75: mol_type = other DNA
gcgtctcgcaaatcaacggctgcgcattttgtctggagatgcacagcaaagcattgcgcaaatccggtgtgccac

SEQ ID NO: 149315 - DNA, 75 bp, synthetic construct
  source 1..75: mol_type = other DNA
acgaacttagcccggcagtgtataacgcgctggtgcaggccaaaacggcgctggaaaatagtgcgctggatacca

SEQ ID NO: 149316 - DNA, 75 bp, synthetic construct
  source 1..75: mol_type = other DNA
ggcggaatcggtaaccgatattgccagaacccatgcggaagatgaggtttatcagcctttgcttgaatatttcag

SEQ ID NO: 149317 - DNA, 75 bp, synthetic construct
  source 1..75: mol_type = other DNA
aagaaaatttaccccaccgcccctatcacacggatgatctcgctttcggccttcgcatctccggcaaagggcgtg

SEQ ID NO: 149318 - DNA, 75 bp, synthetic construct
  source 1..75: mol_type = other DNA
tcagggctggcctgtattctcacagtggcttgatgccgtgatccagcgtgtcgaaatgtacaacgcatcgcttcc

SEQ ID NO: 149319 - DNA, 75 bp, synthetic construct
  source 1..75: mol_type = other DNA
cgttcgctgtgtgagaaactttgtgcggatgtgaactacagcggcctgatttgcaaaaatccgttccacctggaa

SEQ ID NO: 149320 - DNA, 75 bp, synthetic construct
  source 1..75: mol_type = other DNA
gtagcgttctgggaagcggataacgattgtgaatggatgttctcctacatgattggtaatgatggtttcctccac

SEQ ID NO: 149321 - DNA, 75 bp, synthetic construct
  source 1..75: mol_type = other DNA
aggatattaaagaagaattaccagcgtgcatcgatacagacaagaagctgaaagaagtaatcaactttggtgatg

SEQ ID NO: 149322 - DNA, 75 bp, synthetic construct
  source 1..75: mol_type = other DNA
aaagagagaagttctgatattcaaccgggaatagcctatgttcatgcttttcttgataatctggaaaagctcgga

SEQ ID NO: 149323 - DNA, 75 bp, synthetic construct
  source 1..75: mol_type = other DNA
ttttgtctggagatgcacagcaaagcattacgcaaatccggtgtgccacagcataaactcgacgcacttgcaggc

SEQ ID NO: 149324 - DNA, 75 bp, synthetic construct
  source 1..75: mol_type = other DNA
tatggcaatcgtggtctggcgttgctggacctgatcgaagagggcaacctggggctgatccgcgcggtagagtag

SEQ ID NO: 149325 - DNA, 75 bp, synthetic construct
  source 1..75: mol_type = other DNA
ttgacccggaacgtggtttccgcttctcaacatacgcaacctggtggattcgccagacgatgaacgggcgattat

SEQ ID NO: 149326 - DNA, 75 bp, synthetic construct
  source 1..75: mol_type = other DNA
cgttggcgagaaatcagccagcatattgagcattatgaccctgaatgtcgcggtatattgatacttggcctggac

SEQ ID NO: 149327 - DNA, 75 bp, synthetic construct
  source 1..75: mol_type = other DNA
ggatcgcgatcgtctgaccgcgctggtgatcctcggcattaaagatcaggacacctttcctctgatcttctaccg

SEQ ID NO: 149328 - DNA, 75 bp, synthetic construct
  source 1..75: mol_type = other DNA
cgacaggtgccagcgagttcactatccctgagctgaagatgctactactggaaggcgcacgtcaggcggcgcacg

SEQ ID NO: 149329 - DNA, 75 bp, synthetic construct
  source 1..75: mol_type = other DNA
tccgtgcggataacgccattgccgcagcgtgttattttgccggtcacttcctcatcgtccgctcgctgtatctct

SEQ ID NO: 149330 - DNA, 75 bp, synthetic construct
  source 1..75: mol_type = other DNA
aatcagcaagctggattacccgaacttctggcatcagggcaatctcaagctgcgtttgagttatcagtttgagcc

SEQ ID NO: 149331 - DNA, 75 bp, synthetic construct
  source 1..75: mol_type = other DNA
cgagaaattcgcgataccgccgatgcgctgaacaagctgaacttacgccataccgaaatcttgccgctttatgca

SEQ ID NO: 149332 - DNA, 75 bp, synthetic construct
  source 1..75: mol_type = other DNA
cactccccaaaggcagccgcaggtatttctctctcgccatgcttatcctgcccctgctcgagccaggaggatacg

SEQ ID NO: 149333 - DNA, 75 bp, synthetic construct
  source 1..75: mol_type = other DNA
ccagcatgggcgaactacgcagcctgggcgattccatcgctgttacggctgaacttgtggccggattcagtgagg

SEQ ID NO: 149334 - DNA, 75 bp, synthetic construct
  source 1..75: mol_type = other DNA
cactctggatttgttgttgctggctctgggcgttgatgccgtcgccgtggagtgcgacgtggttggcagctttag

SEQ ID NO: 149335 - DNA, 75 bp, synthetic construct
  source 1..75: mol_type = other DNA
cagcaggcgatcagaatcagcacctgccgctggcctccctgactggctctggtaaacatccggctgccgcacgcc

SEQ ID NO: 149336 - DNA, 75 bp, synthetic construct
  source 1..75: mol_type = other DNA
cagtgtcctgcaggaacaactgaccacgcttgctcagtcaatgccactgacgctggactggcaggaggtcagtaa

SEQ ID NO: 149337 - DNA, 75 bp, synthetic construct
  source 1..75: mol_type = other DNA
ttgctgaagcggcacaaaaagccgcagaggaacggatcacaccaccgtggctgagtatgccggaaaccggagatt

SEQ ID NO: 149338 - DNA, 75 bp, synthetic construct
  source 1..75: mol_type = other DNA
gttggggcttgaaccgaagaacacggcggtgcggagtccggagagtaacggcatagcagagagcttcgtgaaaac

SEQ ID NO: 149339 - DNA, 75 bp, synthetic construct
  source 1..75: mol_type = other DNA
tttgtgccgttatttctggtgcagaaggctgggaagatatagaggattttggggaaacacatctcgattttttga

SEQ ID NO: 149340 - DNA, 75 bp, synthetic construct
  source 1..75: mol_type = other DNA
attcgctgtaaaaggaaaccaggggcggctaaataaagcctttgaggaaaaatttccgctgaaagaattaaataa

SEQ ID NO: 149341 - DNA, 75 bp, synthetic construct
  source 1..75: mol_type = other DNA
gaacggtcttcgccgtctactgctgctgaatattccatcgccgatcaagtatttgcatgaaaagttaccgaacaa

SEQ ID NO: 149342 - DNA, 75 bp, synthetic construct
  source 1..75: mol_type = other DNA
cgattgagccgatttctcaggcgtctgccaaccagcgtaaaggccgctgtggtcgtgtgtcagaagggatctgta

SEQ ID NO: 149343 - DNA, 75 bp, synthetic construct
  source 1..75: mol_type = other DNA
ttaagctttttgataacccgcaggaacaacagcaggctatgtggcgtggtttgcgtcgcttgctgttgctgaaca

SEQ ID NO: 149344 - DNA, 75 bp, synthetic construct
  source 1..75: mol_type = other DNA
atcaatttttctgccgccatgttctggatgatgaaggggctggatgcccgccgggcatcatggcctaaagggagc

SEQ ID NO: 149345 - DNA, 75 bp, synthetic construct
  source 1..75: mol_type = other DNA
agtttctgaagcaaacagaagccaataatgttttcatcgccaaaaagaacatcaatttttctgccgccatgttct

SEQ ID NO: 149346 - DNA, 75 bp, synthetic construct
  source 1..75: mol_type = other DNA
ctggcaagcgccaatgtttgacgctatcggctatctggtgctggcggggctgtgcgcgtcattgttgggcgatgc

SEQ ID NO: 149347 - DNA, 75 bp, synthetic construct
  source 1..75: mol_type = other DNA
atttttgtccgttttccggtggtggacgaagccaaagaacgcgagcagcgtaaatttttacagcacgcacggacg

SEQ ID NO: 149348 - DNA, 75 bp, synthetic construct
  source 1..75: mol_type = other DNA
gatgataaagacgtcattgcaattgatggaaaaacgctccagcactcttatgacaagagtcgccgcaggggagcg

SEQ ID NO: 149349 - DNA, 75 bp, synthetic construct
  source 1..75: mol_type = other DNA
attcctgcctgaagaagcattcgatattgtggaagggtgcgatgtgatggttatgcctcggctggtaatgatgaa

SEQ ID NO: 149350 - DNA, 75 bp, synthetic construct
  source 1..75: mol_type = other DNA
ccggccggttgccggaacgccggtaaaaccagcttcacgtccggctgtatccggggggaatccggcaccctcatg

SEQ ID NO: 149351 - DNA, 75 bp, synthetic construct
  source 1..75: mol_type = other DNA
gggatcgcatagccaccgtctggatcgcgccctgggtggacagcgataacgctttccatcagcccggtcgtgtct

SEQ ID NO: 149352 - DNA, 75 bp, synthetic construct
  source 1..75: mol_type = other DNA
cagggtgcgccctgctgttatccggttgtgccggagtcaaaagcagtttcgactgcgatgccacaacgtctgata

SEQ ID NO: 149353 - DNA, 75 bp, synthetic construct
  source 1..75: mol_type = other DNA
aggcttctggcgcattacagaaaaaccagaacggcgcagatattccgggaaaagataccttcaccaaaaatattg

SEQ ID NO: 149354 - DNA, 75 bp, synthetic construct
  source 1..75: mol_type = other DNA
gaaaggtgagtttgataacctggcaggtagcggcgaaccattgatactggatgatgattctcatgtgccaccgga

SEQ ID NO: 149355 - DNA, 75 bp, synthetic construct
  source 1..75: mol_type = other DNA
cagagatgccgaaatatttgtcacaagaaaaactggtaacaatggttatgaagatgggatgatttatgaatgtaa

SEQ ID NO: 149356 - DNA, 75 bp, synthetic construct
  source 1..75: mol_type = other DNA
tggtggcaatgacgccgcaaccgctggagtgcgtttttctcgcggactccggctccgtagcggtagaagtggcga

SEQ ID NO: 149357 - DNA, 75 bp, synthetic construct
  source 1..75: mol_type = other DNA
gccgaaatggttgccgatgtgcgcgtgctgggggcaattggcgtagtcgaaaccactcgtccggtgaatatggca

SEQ ID NO: 149358 - DNA, 75 bp, synthetic construct
  source 1..75: mol_type = other DNA
atgcgcatgtaccatccggaatggttaaaacgaatccgcaaaatgtgcgatcgcgaaggtatcttgctgattgcc

SEQ ID NO: 149359 - DNA, 75 bp, synthetic construct
  source 1..75: mol_type = other DNA
ccgccctatattattcgcccggaacagttgcagcgcctgaccgcagcggttaatcgagcagtacaggatgaaaca

SEQ ID NO: 149360 - DNA, 75 bp, synthetic construct
  source 1..75: mol_type = other DNA
gctacgcgagcaactcacaccagcccgtaacgccgaactggttgccgatgtccgcgtgctgggcgcaataggcgt

SEQ ID NO: 149361 - DNA, 75 bp, synthetic construct
  source 1..75: mol_type = other DNA
cctgcgaacatgcagatatcgcgccggatattttatgcctcggtaaagctttaaccggcggcacgatgactcttt

SEQ ID NO: 149362 - DNA, 75 bp, synthetic construct
  source 1..75: mol_type = other DNA
tgtgcggctgattggaccaaactgcccgggaatcatcacaccgggtgagtgtaaaatcggcattatgcccggtga

SEQ ID NO: 149363 - DNA, 75 bp, synthetic construct
  source 1..75: mol_type = other DNA
ttccggggactaactttattgatgcgctgcgtttattcgaaaatgatccgcaaacagacgcggtaattatgatcg

SEQ ID NO: 149364 - DNA, 75 bp, synthetic construct
  source 1..75: mol_type = other DNA
cagcattcgccacgcttaacgcgcggtctgccggagcgagaagacagcctggaagagtcttactgggatcgttaa

SEQ ID NO: 149365 - DNA, 75 bp, synthetic construct
  source 1..75: mol_type = other DNA
atgttcatcgaaactatcctctcacagtctttattagttatactttagctaccataacatatatgatagctgata

SEQ ID NO: 149366 - DNA, 75 bp, synthetic construct
  source 1..75: mol_type = other DNA
agaatctctgcgtcgattacccgggttcccgggtcgtcaataatgtcagctttacattaggcaatgagcgcctgg

SEQ ID NO: 149367 - DNA, 75 bp, synthetic construct
  source 1..75: mol_type = other DNA
aggaaaacgcatggggcacgccggagccattatttctggcggtagcggcagtgcggaggataaattccgggcgtt

SEQ ID NO: 149368 - DNA, 75 bp, synthetic construct
  source 1..75: mol_type = other DNA
tcagagttttacaccacaacccgcaaaccctctgcgggagatgttggtgcatatacgcaggcagaatgtaactca

SEQ ID NO: 149369 - DNA, 75 bp, synthetic construct
  source 1..75: mol_type = other DNA
ccccgagcacttccagcggtggcggaactactaatgcacaatttacttatataaaccatggcgcagattacgccc

SEQ ID NO: 149370 - DNA, 75 bp, synthetic construct
  source 1..75: mol_type = other DNA
atgtatgagaaatcaggtcatgcaattacggggcttggcattgtcggtgaagttgatggcgatgatccggcagta

SEQ ID NO: 149371 - DNA, 75 bp, synthetic construct
  source 1..75: mol_type = other DNA
atgaaatttcccggtaaacgtaaatccaaacattacttccctgtaaatgcacgcgatccgctgcttcagcaattc

SEQ ID NO: 149372 - DNA, 75 bp, synthetic construct
  source 1..75: mol_type = other DNA
gcatttgctttagggcagacaggaagcactgttggaaatgacaaagctgttggatggaactcaaatagcggcgtt

SEQ ID NO: 149373 - DNA, 75 bp, synthetic construct
  source 1..75: mol_type = other DNA
ccatccgtgtaacaacaccaagcacttccagcggtggcggaatcactaacgctcaattcacttatattaatcatg

SEQ ID NO: 149374 - DNA, 75 bp, synthetic construct
  source 1..75: mol_type = other DNA
tgtacgtgatgctgtggcgcattgatgccggagattatgccggggcgctggagatcgggcgtcatgccctgcgtc

SEQ ID NO: 149375 - DNA, 75 bp, synthetic construct
  source 1..75: mol_type = other DNA
gctgatgatgtatatcaatatcgacaccattcattatcccaatcatttttatattgaaaatgccaagcctggcga

SEQ ID NO: 149376 - DNA, 75 bp, synthetic construct
  source 1..75: mol_type = other DNA
taggtcgtttagggccaaaaaatgcgttcgcgttcagcgaagagacgtggattaaagggctggaaaacaaaggtt

SEQ ID NO: 149377 - DNA, 75 bp, synthetic construct
  source 1..75: mol_type = other DNA
aatgatttgatagccagggaggcgaatgttctgtttgtagtgcttgattccctgcgttttgatattgcggttcag

SEQ ID NO: 149378 - DNA, 75 bp, synthetic construct
  source 1..75: mol_type = other DNA
acgcgttatcaagaaaattggacatcattaatgctgccacttcccatcgggatttacgttccccaccagggaacc

SEQ ID NO: 149379 - DNA, 75 bp, synthetic construct
  source 1..75: mol_type = other DNA
cagacaggtttatcgacttagcccaaactccgcaacgcaggaacgcatccggatggcagaaaaagcgctgaaaca

SEQ ID NO: 149380 - DNA, 75 bp, synthetic construct
  source 1..75: mol_type = other DNA
caccagtgctgtaaggcaaattaccctagtttgtccagactgcgaaatacctcaattgctacctgagggagatag

SEQ ID NO: 149381 - DNA, 75 bp, synthetic construct
  source 1..75: mol_type = other DNA
agtaacgcgctggcggcgttgctggaccatgaaggcgtaatggcggatattcgtggtatcacactgtcaaataat

SEQ ID NO: 149382 - DNA, 75 bp, synthetic construct
  source 1..75: mol_type = other DNA
gtcggtaaacgcttttcggagataatcaatgaagttccagcagaactgctggagaagtgggatgcgcaggaataa

SEQ ID NO: 149383 - DNA, 75 bp, synthetic construct
  source 1..75: mol_type = other DNA
gccgaaacgaccgcaaagatcatcgcagagccacagcaaatcagcgatcggaacgacgcactgaaacgcctgcga

SEQ ID NO: 149384 - DNA, 75 bp, synthetic construct
  source 1..75: mol_type = other DNA
gtcggaaaacgcttctcggaggtaataaatgaaattccagtagaactgctggaaaaatgggatgcgctggagtaa

SEQ ID NO: 149385 - DNA, 75 bp, synthetic construct
  source 1..75: mol_type = other DNA
cgcgctgctggaaacgttgtgcgccacgtacccgaacgccatccacccgcaactgctcgcgactgaagatatcac

SEQ ID NO: 149386 - DNA, 75 bp, synthetic construct
  source 1..75: mol_type = other DNA
atgcacgagaaacgctgaatgaccaggcaccggacttttcgcgtctgacacaactgctgaccctgttgccggggg

SEQ ID NO: 149387 - DNA, 75 bp, synthetic construct
  source 1..75: mol_type = other DNA
ctcttattatatttttacttgttatattcgcttttgtatccatcatatacatcataagaactccagccagactta

SEQ ID NO: 149388 - DNA, 75 bp, synthetic construct
  source 1..75: mol_type = other DNA
ctggttattaatgaggtgccggaagtggcacaaacctaccttcagcactggcagtcgcgctgggacggaggaacg

SEQ ID NO: 149389 - DNA, 75 bp, synthetic construct
  source 1..75: mol_type = other DNA
ctgtttttttggagtttctctgctctgatgagtttctgccgggaaagagattaaacaaaaatgaagaagagaata

SEQ ID NO: 149390 - DNA, 75 bp, synthetic construct
  source 1..75: mol_type = other DNA
agaggaactgttatcgcagggagccacacagcgtgtgctggacgcgactcagctttaccttggtgagattggtta

SEQ ID NO: 149391 - DNA, 75 bp, synthetic construct
  source 1..75: mol_type = other DNA
aaagcttcatgactaatattagcagttggatacaaataactctttgtatcatagtattctctcaatttcttaagg

SEQ ID NO: 149392 - DNA, 75 bp, synthetic construct
  source 1..75: mol_type = other DNA
tgcgtgctgtttcgtaagcacattccgatgaataaatattttctcaaacagcagctagcctgggtgccttttctt

SEQ ID NO: 149393 - DNA, 75 bp, synthetic construct
  source 1..75: mol_type = other DNA
atgaaaacagcgatatgggtggtggtgtatttaacgatgtgttttctgcttttcaccggatggatgttcgccttt

SEQ ID NO: 149394 - DNA, 75 bp, synthetic construct
  source 1..75: mol_type = other DNA
aatgtcgttactggaaccctctgaatttcggcatatccatttactgtaaacaatacctacctgaaaaacagttga

SEQ ID NO: 149395 - DNA, 75 bp, synthetic construct
  source 1..75: mol_type = other DNA
cctcgttatcacgaaagttggacatcattaatgctgccacttctcatcgggatttacgctcccctccggggaacc

SEQ ID NO: 149396 - DNA, 75 bp, synthetic construct
  source 1..75: mol_type = other DNA
aatagttctacaattaaggatgctattggtatttggccagctgcaatgttatttttggcagtagttttcttaatt

SEQ ID NO: 149397 - DNA, 75 bp, synthetic construct
  source 1..75: mol_type = other DNA
agaaaatctgcacttttatcatcgcgatggcgataccgcacaatgtctggaagccctggcgcaggccgggcttgc

SEQ ID NO: 149398 - DNA, 75 bp, synthetic construct
  source 1..75: mol_type = other DNA
aaagcctagatttaaaatacctctttatcttgtgaaaaataataccgatctgttccgtgtgtattattatattgt

SEQ ID NO: 149399 - DNA, 75 bp, synthetic construct
  source 1..75: mol_type = other DNA
gatttgtacaaaaggtgatcggaaagtggtactgcactccagggaataccattcctgttgagagcatgtcccacc

SEQ ID NO: 149400 - DNA, 75 bp, synthetic construct
  source 1..75: mol_type = other DNA
cgcagttccacttgaggcttacgcacgagttgcacgctaagattaagcagcgtgcaaaaatgaataacaggtcta

SEQ ID NO: 149401 - DNA, 75 bp, synthetic construct
  source 1..75: mol_type = other DNA
ggctatcgagacgatgcggaacgcatcgctgatgagcaatcagagcttgttaagaagatggtgtttgatacgctg

SEQ ID NO: 149402 - DNA, 75 bp, synthetic construct
  source 1..75: mol_type = other DNA
tcgtctttgctaactctggacggccctaacggttatggtaaaacaagcatattcgacgcaatcgaactattgctt

SEQ ID NO: 149403 - DNA, 75 bp, synthetic construct
  source 1..75: mol_type = other DNA
tcatattgattgacgacccgtcgcaatcactggatgaagtaaacgttgcttcgttgaccgatctactccgttgcg

SEQ ID NO: 149404 - DNA, 75 bp, synthetic construct
  source 1..75: mol_type = other DNA
ctgtggtgctgactgggaagatcacaaattaatggcagatgctattgaagcaagaactaagcagatctctgaatc

SEQ ID NO: 149405 - DNA, 75 bp, synthetic construct
  source 1..75: mol_type = other DNA
gcagataacggttgcgcctggtaatggtattgaacaggccacacactggatgccactacaagaaccgccgcaggg

SEQ ID NO: 149406 - DNA, 75 bp, synthetic construct
  source 1..75: mol_type = other DNA
atgactgaattaaccaaagaatggctacagaacacgattaccggaattgagtcatcacgggatgaaataccgttc

SEQ ID NO: 149407 - DNA, 75 bp, synthetic construct
  source 1..75: mol_type = other DNA
agccaacctgtaagccaaacttacaacttgccagaattaatcgaaggcatggaagtttccattgatgtaagcact

SEQ ID NO: 149408 - DNA, 75 bp, synthetic construct
  source 1..75: mol_type = other DNA
aaccagacacaggctatctcacgcaggaagaaattgccttactgcttgctgctcttgacggcgacaacaaaaaga

SEQ ID NO: 149409 - DNA, 75 bp, synthetic construct
  source 1..75: mol_type = other DNA
gctatgtgttagcggctgactttaaaaacaactacccaccaaacatccccaacactcaggtcggcgtatatggcg

SEQ ID NO: 149410 - DNA, 75 bp, synthetic construct
  source 1..75: mol_type = other DNA
tcaccgcgcctccatgcttcagggtagccaacctgtaagccaaacttacaacttgccagaattaatcgaaggcat

SEQ ID NO: 149411 - DNA, 75 bp, synthetic construct
  source 1..75: mol_type = other DNA
agcgtttcattcggcaaaaaggttttgaggccgctttggcattacaagcaggtaacggcactagcttgccagagg

SEQ ID NO: 149412 - DNA, 75 bp, synthetic construct
  source 1..75: mol_type = other DNA
ttttccttggtcaaagatgtatcgccgcaattgtacacagtgactggacactcgctccgccacacatggaatcgt

SEQ ID NO: 149413 - DNA, 75 bp, synthetic construct
  source 1..75: mol_type = other DNA
agagtggaccaactctgggaaatcctatctccaaagggggatatcataaaattttttccgtagtcaggtctatat

SEQ ID NO: 149414 - DNA, 75 bp, synthetic construct
  source 1..75: mol_type = other DNA
gaaaccacagagcgcctgcaatgtcatgcgcgtgcaacgctgaatgatcatgccccggacttttcgcgtcttaca

SEQ ID NO: 149415 - DNA, 75 bp, synthetic construct
  source 1..75: mol_type = other DNA
cccgccgcctgctggcacgcagtaaagatatccgcatcctggttgtcctgctgcgttgccgtatccagcaggcag

SEQ ID NO: 149416 - DNA, 75 bp, synthetic construct
  source 1..75: mol_type = other DNA
agcgtttcattcagcaaaaaggttttgaggccgccttggcattacaagagggaaacggcactcgcttgccaaagg

SEQ ID NO: 149417 - DNA, 75 bp, synthetic construct
  source 1..75: mol_type = other DNA
cagttgatgctcaaagccattgaggaaagagcccagataattgctgataccttgagcactgatggtaaaaaatta

SEQ ID NO: 149418 - DNA, 75 bp, synthetic construct
  source 1..75: mol_type = other DNA
catcattaaaatgggagcttcagtcattacggttgagcaggcacgtacgttgaaggggtggctgccgaatcggct

SEQ ID NO: 149419 - DNA, 75 bp, synthetic construct
  source 1..75: mol_type = other DNA
aagctttatgagctgccagaattcgaatcgtctgaattcactaagatcaatctgcgcgataataatttccttgat

SEQ ID NO: 149420 - DNA, 75 bp, synthetic construct
  source 1..75: mol_type = other DNA
gattcagagtggaatcctttttcaattgatgtgcagcgccgcaatcggctgatgatcttgcttctgtatcatctg

SEQ ID NO: 149421 - DNA, 75 bp, synthetic construct
  source 1..75: mol_type = other DNA
tggtgttccatgtggatatctcatgcattgcacaggctgaattccggcggttatttcatggtgttcagtgactgg

SEQ ID NO: 149422 - DNA, 75 bp, synthetic construct
  source 1..75: mol_type = other DNA
gactgcgttcgactacagcgaaggcggcctcacaattggcgcagatggtgttcagggctacggtttgtccatcga

SEQ ID NO: 149423 - DNA, 75 bp, synthetic construct
  source 1..75: mol_type = other DNA
agacaaccgagggaaacccgagaaacgtatcgcggcggaggattgtccagactgcccagattgcggtagcccgat

SEQ ID NO: 149424 - DNA, 75 bp, synthetic construct
  source 1..75: mol_type = other DNA
tatcgaagtgcagtgtgggcgtcacctctttgcagcttctggtaagaccccggccaaacaaggctggaaggttct

SEQ ID NO: 149425 - DNA, 75 bp, synthetic construct
  source 1..75: mol_type = other DNA
tatctacccgagagccaaaaggaagacattccggacattctccaggcgctcattttgtccgatcagaacgtctct

SEQ ID NO: 149426 - DNA, 75 bp, synthetic construct
  source 1..75: mol_type = other DNA
aaatagtcgcccacaacaattgttcatttatttttctcgtgttgatgcttttgctaaccgagtaaatctggcgat

SEQ ID NO: 149427 - DNA, 75 bp, synthetic construct
  source 1..75: mol_type = other DNA
gttgagggcttcgctgttatttgggttgttaagagggcaaattgcctctgatcactttccggttggcttcattcc

SEQ ID NO: 149428 - DNA, 75 bp, synthetic construct
  source 1..75: mol_type = other DNA
agacgaacaggagcgcaaatctgctattgacgctgtcaataacgctatctgcgagacaacttatttatcaaacct

SEQ ID NO: 149429 - DNA, 75 bp, synthetic construct
  source 1..75: mol_type = other DNA
cagttttggcattgtgctggtgagcggtattttcaccgccttcctgctttcgccgctggctatgcccgataaaaa

SEQ ID NO: 149430 - DNA, 75 bp, synthetic construct
  source 1..75: mol_type = other DNA
tgaaggggttaaaagtagcgcattgttgcaggaaatcgccagctattacccttgcggcattgcctgggttgatcg

SEQ ID NO: 149431 - DNA, 75 bp, synthetic construct
  source 1..75: mol_type = other DNA
tgttaaccggcttgttgctggtggcgttggcagtaattgcctgcggcgcagtggcccgcctcggctggcgaaaag

SEQ ID NO: 149432 - DNA, 75 bp, synthetic construct
  source 1..75: mol_type = other DNA
tgaaaagatgttctggtgtaaagggaaagttgtcgtcatggggatggggaaatcggggcacatcgggcgcaaaat

SEQ ID NO: 149433 - DNA, 75 bp, synthetic construct
  source 1..75: mol_type = other DNA
agccaacaggcgaagcaggatatctccaccctgggcgtggctacgctgctgggggtgatattgctgattgtggcg

SEQ ID NO: 149434 - DNA, 75 bp, synthetic construct
  source 1..75: mol_type = other DNA
agcaggcgtggggagcgtttttctggcagcatcgcaacggcctgattgaccccaacacccgcgcccgcctgcaaa

SEQ ID NO: 149435 - DNA, 75 bp, synthetic construct
  source 1..75: mol_type = other DNA
gatgttaatgtcagtaaagtcagcgtaaataatataaattgtgagttaattgtgaaaattacaatctcaggtgtt

SEQ ID NO: 149436 - DNA, 75 bp, synthetic construct
  source 1..75: mol_type = other DNA
tgttccgcagaacttaatccaggctattgtcgatgccaatactacccgaaaagactttgttgcggaggatatatt

SEQ ID NO: 149437 - DNA, 75 bp, synthetic construct
  source 1..75: mol_type = other DNA
ataatattatcttttccccagaatttttacgtgaaggtaaagctctttatgacaacctatatccatctcgtatag

SEQ ID NO: 149438 - DNA, 75 bp, synthetic construct
  source 1..75: mol_type = other DNA
aagcagattatcgaaggggtatgcctggatccgcgtatcggcaaccactacaacaacccgtcctttggctatggc

SEQ ID NO: 149439 - DNA, 75 bp, synthetic construct
  source 1..75: mol_type = other DNA
aagtggatatgcttaaccagaagatctctccgattgtggataaagagattcaggaatatctggcagaaaaaccgt

SEQ ID NO: 149440 - DNA, 75 bp, synthetic construct
  source 1..75: mol_type = other DNA
gaaggcgcaattaagaaagatatccccactttatttactgactccactgaagcagaagccattaagctttttgcc

SEQ ID NO: 149441 - DNA, 75 bp, synthetic construct
  source 1..75: mol_type = other DNA
atggcatctttgtcaagcatgggtgaaaaatttcgcctgattcgtgaagcagaaggtatgacccgccaggagttt

SEQ ID NO: 149442 - DNA, 75 bp, synthetic construct
  source 1..75: mol_type = other DNA
acgcgcagggaactaaaacacctggtgtcgtttggttttcttcgcgcccataaggggaaaggctatcaactggct

SEQ ID NO: 149443 - DNA, 75 bp, synthetic construct
  source 1..75: mol_type = other DNA
ctaaagcagtatatcagcatagcgcgaacgctaaccctcatctagcgcccggttctggtgttcagaataccatct

SEQ ID NO: 149444 - DNA, 75 bp, synthetic construct
  source 1..75: mol_type = other DNA
gaaggcgctataaaaaaagatattccaatattgttaacggatagcactgaagctgaagccattaaactttttgca

SEQ ID NO: 149445 - DNA, 75 bp, synthetic construct
  source 1..75: mol_type = other DNA
gattgcgaacattcagaaggtacttgatgtaggctttgactctgtgcatttcgattgtggagcaccggtcgttga

SEQ ID NO: 149446 - DNA, 75 bp, synthetic construct
  source 1..75: mol_type = other DNA
tattcgcatatcgtgacagccagacaaaagctcgggtaatagctcaaatacttcataacggcagcacctatgccc

SEQ ID NO: 149447 - DNA, 75 bp, synthetic construct
  source 1..75: mol_type = other DNA
gcaattgatcagctgggcatttcagaaatgggtcgcattgcaagagatcttacacatttcattatcaatagtttg

SEQ ID NO: 149448 - DNA, 75 bp, synthetic construct
  source 1..75: mol_type = other DNA
agaaatcatgtctgtaattgtggttgtcttattactgacccttacgttgatagccattttttcggcaattgatca

SEQ ID NO: 149449 - DNA, 75 bp, synthetic construct
  source 1..75: mol_type = other DNA
gagataagggcataataaaaaaagtaccaagtcggaattctatacttaaatattcaaaaaacagatctcctttta

SEQ ID NO: 149450 - DNA, 75 bp, synthetic construct
  source 1..75: mol_type = other DNA
acagcatgttggggtggaggattttcccgccgatctcaaattttactggctgcattttgaggttaaagcgccgga

SEQ ID NO: 149451 - DNA, 75 bp, synthetic construct
  source 1..75: mol_type = other DNA
cgctggagtttattgtgctgctgattttgcagcagctcacccgtgacgcgcgtcttgatgaacaggccgatggcg

SEQ ID NO: 149452 - DNA, 75 bp, synthetic construct
  source 1..75: mol_type = other DNA
gcaaggcggctggagtcatgggaaattatctttgtcgaaaaaggtcgattaacgattcaggaagaagaacggata

SEQ ID NO: 149453 - DNA, 75 bp, synthetic construct
  source 1..75: mol_type = other DNA
cggcgaatcaacggggtgattttgccgaaaatgccgctattaatgccggacttaacattgctacgcatggcctga

SEQ ID NO: 149454 - DNA, 75 bp, synthetic construct
  source 1..75: mol_type = other DNA
gtgaaagaaaccagtgagcgtggcgtaaaacttacccaaccaattgagcgaggcggcgaaaaaatcacgtatgtg

SEQ ID NO: 149455 - DNA, 75 bp, synthetic construct
  source 1..75: mol_type = other DNA
ttcaccactgttaacggccgaagaagaagtttatttgcgcgtcgcgcactgcgtggagatgtcgcctctcgccgc

SEQ ID NO: 149456 - DNA, 75 bp, synthetic construct
  source 1..75: mol_type = other DNA
gcgccaacagaaacatcaccattctccggtgatgccgctgcagcaacaaatcctgcggttcatgccgcagaggca

SEQ ID NO: 149457 - DNA, 75 bp, synthetic construct
  source 1..75: mol_type = other DNA
aatctgcagaaaagctaattagctcaccagaattccagaaagcagcaaggctggcagtaaaacaagcaccagaaa

SEQ ID NO: 149458 - DNA, 75 bp, synthetic construct
  source 1..75: mol_type = other DNA
ctaactggcagaacgctgaacggtgatgtttctcgcaaagcaactacagcactacaggcaatgtcgaaaggcgat

SEQ ID NO: 149459 - DNA, 75 bp, synthetic construct
  source 1..75: mol_type = other DNA
gccgatgcgcgccgccgcgtgggcaataaagtcgcgttgcagggcaatatggacccgtcgatgctgtacgcgccg

SEQ ID NO: 149460 - DNA, 75 bp, synthetic construct
  source 1..75: mol_type = other DNA
aacgcggtgcgtaccattcgtcgcgaactgaaaggcgaagtgccgctgattggtttttccggcagcccgtggacg

SEQ ID NO: 149461 - DNA, 75 bp, synthetic construct
  source 1..75: mol_type = other DNA
cggcgaaggccatgtctttaacctcggccatggaattcatcaggatgtgccgccagaacatgcaggcgtgtttgt

SEQ ID NO: 149462 - DNA, 75 bp, synthetic construct
  source 1..75: mol_type = other DNA
cattaccgccctgaccggacaaagcgtcgatcaaaaatggtttgtagtttacggcgactccccacagcaaacatt

SEQ ID NO: 149463 - DNA, 75 bp, synthetic construct
  source 1..75: mol_type = other DNA
tgatcgcaaaagcacctttgatgagttgttcgcgctttaccgctacgtcttaaccggcttgttgctggtggcgct

SEQ ID NO: 149464 - DNA, 75 bp, synthetic construct
  source 1..75: mol_type = other DNA
aaaaacgccgagctggcgtgcgaagtcaccttgcagccgctacgtcgctatccgctggacgcggcgattctgttt

SEQ ID NO: 149465 - DNA, 75 bp, synthetic construct
  source 1..75: mol_type = other DNA
acgccatgccggtgaaggttgatgaatggctggcaagccccgccagtgaaggctggcgtctgctgtggctgacgc

SEQ ID NO: 149466 - DNA, 75 bp, synthetic construct
  source 1..75: mol_type = other DNA
aggcgaagcaggatatctcaaccctgggcgtggcaacgctgctgggggtgatattactgattgtggcggtgttcc

SEQ ID NO: 149467 - DNA, 75 bp, synthetic construct
  source 1..75: mol_type = other DNA
aatggcgccggagatgcgcggcaaggtcatgctgtttggtcattgggataacgaacgcgagattcccgatccgta

SEQ ID NO: 149468 - DNA, 75 bp, synthetic construct
  source 1..75: mol_type = other DNA
aacaaaagcactgcaaaatgccgggctgacggcggtgaatccggatctcaacgccatgccagtgaacgttgatga

SEQ ID NO: 149469 - DNA, 75 bp, synthetic construct
  source 1..75: mol_type = other DNA
ggacaaagcgtcgatcaaaaatggtttgtagtttacggcgactccccacagcaaacattgcggcgactggagaaa

SEQ ID NO: 149470 - DNA, 75 bp, synthetic construct
  source 1..75: mol_type = other DNA
gaattgttcgcactttaccgttatgtgttaaccggcttgttgctggtggcgctggcagtaattgcctgcggcgca

SEQ ID NO: 149471 - DNA, 75 bp, synthetic construct
  source 1..75: mol_type = other DNA
ggccatacccagccgcgtcgcctggcggcaagaacggtggcgaaccgtattgcagaagagctgaaaacggagccg

SEQ ID NO: 149472 - DNA, 75 bp, synthetic construct
  source 1..75: mol_type = other DNA
ccgcacgctgaacgaaaatcagaaagttgaattttctattgagcaggggcaacgtggtcccgcggcagcgaacgt

SEQ ID NO: 149473 - DNA, 75 bp, synthetic construct
  source 1..75: mol_type = other DNA
tatgcgttttgatgatatcgatttgctgcgtctctccgcacgcgaacggcgcaagctggttggtcacaacgtgtc

SEQ ID NO: 149474 - DNA, 75 bp, synthetic construct
  source 1..75: mol_type = other DNA
gcgtgttccagtcgcacagcggacggcgcattgtgctggcgaccaacgtcgcggaaacctcgctgaccgtaccgg

SEQ ID NO: 149475 - DNA, 75 bp, synthetic construct
  source 1..75: mol_type = other DNA
accaggttgaggagagcgggtttgaatggcagatccccggtctgcgccgcgaactggtgattgctctgattaaat

SEQ ID NO: 149476 - DNA, 75 bp, synthetic construct
  source 1..75: mol_type = other DNA
gaacgcagcctgaatatcgattttctgctcggctatttgaaagagttgctgccgcggcgtcctgacctaaaaatc

SEQ ID NO: 149477 - DNA, 75 bp, synthetic construct
  source 1..75: mol_type = other DNA
cagcagaactatctgtttttggaggctgccgatccggataacgatctcacgcaggaacgattgctggttaagctt

SEQ ID NO: 149478 - DNA, 75 bp, synthetic construct
  source 1..75: mol_type = other DNA
atttcgttcgcagttggatattttatttgcttgcgtatggaatcaagatataaattattatcaacatatcactga

SEQ ID NO: 149479 - DNA, 75 bp, synthetic construct
  source 1..75: mol_type = other DNA
ctgggcggagggtgtcctggctgccggaggcgcacagcaggatgacgtgctgatgtatgtgatgctgtggcgcat

SEQ ID NO: 149480 - DNA, 75 bp, synthetic construct
  source 1..75: mol_type = other DNA
ggatattccaacggttccggcagagttatttaccaagtttcaggtgagtttttactcagacccggttgatgctgt

SEQ ID NO: 149481 - DNA, 75 bp, synthetic construct
  source 1..75: mol_type = other DNA
gggttccattatcggcaccgccattgcggttttattagtgggatatttgcaacaaggtttgcaaatggcaggagt

SEQ ID NO: 149482 - DNA, 75 bp, synthetic construct
  source 1..75: mol_type = other DNA
tcccatcgtctttcttgatgaataccaggacaccacctatgcccagtatgacatgctgctaacggcattcgatgg

SEQ ID NO: 149483 - DNA, 75 bp, synthetic construct
  source 1..75: mol_type = other DNA
tgccgaactgaacgatacggtggtggatattgcgaagcaggtcgagcaaatcctcacagcggtgttcaatatcaa

SEQ ID NO: 149484 - DNA, 75 bp, synthetic construct
  source 1..75: mol_type = other DNA
ctgaacgacacggtggtggatattgcgaagcaggtcgagcaaatccttacggcagtgttcaatatcaacaaacgt

SEQ ID NO: 149485 - DNA, 75 bp, synthetic construct
  source 1..75: mol_type = other DNA
ggtggttgtatcggttataaggttcgttttagcgatcacgtaagcgacaatacgatggtcaaactgatgactgac

SEQ ID NO: 149486 - DNA, 75 bp, synthetic construct
  source 1..75: mol_type = other DNA
atgagcggtaccgaagccgccgaactgctgcgccgtgaagccactcgctttgagaatgaatcacaggagctgcac

SEQ ID NO: 149487 - DNA, 75 bp, synthetic construct
  source 1..75: mol_type = other DNA
cgtgctgctgacagatgccaaaaaagaagaacgcaaagaccgtgcactcgccgtttcaatccgtcttgaggcgct

SEQ ID NO: 149488 - DNA, 75 bp, synthetic construct
  source 1..75: mol_type = other DNA
gccattttccaggagatggcaaaagaaattgaccaggcggcagggaaagtcctgctacgtgaagcggcgcgtccg

SEQ ID NO: 149489 - DNA, 75 bp, synthetic construct
  source 1..75: mol_type = other DNA
agctaccgaaaatctgtatggagctggggcgcggtattaaagggctgatcggccatacccagccgcgtcgcctgg

SEQ ID NO: 149490 - DNA, 75 bp, synthetic construct
  source 1..75: mol_type = other DNA
ctggaaaaactggcggttgatccgcatcgtgaccgtgcccaaatgctgaaagttgaaaacgtccagcaggcatgg

SEQ ID NO: 149491 - DNA, 75 bp, synthetic construct
  source 1..75: mol_type = other DNA
tacagcgcgtatcagccgctacagctatcgcaccaaagtgcagcgtttgccgattgaacccatttcgcaggcgtc

SEQ ID NO: 149492 - DNA, 75 bp, synthetic construct
  source 1..75: mol_type = other DNA
ttgcgccaggtagtaaaagagcttggcattccggttaacagcgaaccggcggagtatcgcgaaattcacatcgct

SEQ ID NO: 149493 - DNA, 75 bp, synthetic construct
  source 1..75: mol_type = other DNA
agtcgaaaacgtccagcaggcatggcagcagtggatcaacaaactgccgccagcacgtcgtgaagatgaagacgt

SEQ ID NO: 149494 - DNA, 75 bp, synthetic construct
  source 1..75: mol_type = other DNA
tcacctgaaaatcaccttccgcgtggtggacgacaaaaataagaagctaaaagaagggcgctcattacaggatct

SEQ ID NO: 149495 - DNA, 75 bp, synthetic construct
  source 1..75: mol_type = other DNA
acggtcaaaaaagcggaaatcaaggtggagctgctgccgaaatacgtcgcctgggcagagggtgtcctggctgcc

SEQ ID NO: 149496 - DNA, 75 bp, synthetic construct
  source 1..75: mol_type = other DNA
tatctgaaattgctccaacagtttgggaatgtgcagataataatattaaatataaactaggtgttgcgcttgatg

SEQ ID NO: 149497 - DNA, 75 bp, synthetic construct
  source 1..75: mol_type = other DNA
aacggcttcaaacggctgggcgacacgctgcgatatttgcaggcgattgaaaaacgactggaaaaactggcggtt

SEQ ID NO: 149498 - DNA, 75 bp, synthetic construct
  source 1..75: mol_type = other DNA
gtcatggctgggtgatgccgttgggtaaccgcaacgtgcagaccgtgctggcagaggaaatagcagacgccgcgc

SEQ ID NO: 149499 - DNA, 75 bp, synthetic construct
  source 1..75: mol_type = other DNA
gaaacgcagcagaattattttcagggatacggcacattgctattagtcttttgacgaatgagcaggtattctagg

SEQ ID NO: 149500 - DNA, 75 bp, synthetic construct
  source 1..75: mol_type = other DNA
atgcacagtctggttctcgggcagattaggacggatgagaaatctaatgagattacagctattcctgaacttctt

SEQ ID NO: 149501 - DNA, 75 bp, synthetic construct
  source 1..75: mol_type = other DNA
accacggatgaacaggccagcgcctataaactgacgccgctcggtcgccagctctcgcagttgcctgtcgaccca

SEQ ID NO: 149502 - DNA, 75 bp, synthetic construct
  source 1..75: mol_type = other DNA
tacggcgcgtatcagccgctacagctatcgcaccaaagtgcagcgtttgccgattgagcccatttcgcaggcgtc

SEQ ID NO: 149503 - DNA, 75 bp, synthetic construct
  source 1..75: mol_type = other DNA
ctgagccgcagacgctgaacatcagtgtgtgtgatgaagagggcaactgtacccgcagcacggtgtcgtcagcag

SEQ ID NO: 149504 - DNA, 75 bp, synthetic construct
  source 1..75: mol_type = other DNA
cgaatggcaggatatctacacccagttgcgccaggtggtgaaagaactcggcattccggtgaacagcgaaccggc

SEQ ID NO: 149505 - DNA, 75 bp, synthetic construct
  source 1..75: mol_type = other DNA
tctggacggaagaaggctttgctgcgctgcatgaaaaagtgcgtgccgaactgaacgacacggtggtggatattg

SEQ ID NO: 149506 - DNA, 75 bp, synthetic construct
  source 1..75: mol_type = other DNA
tttttgacgccgtagacgaactgagccaggaaagccctggcgacattctgatctttatgagcggcgagcgggaaa

SEQ ID NO: 149507 - DNA, 75 bp, synthetic construct
  source 1..75: mol_type = other DNA
agacctgcatcgtgcacctgatccgcaacagcctggactatgcgggctggaaggaccgcaaggggcactgttgca

SEQ ID NO: 149508 - DNA, 75 bp, synthetic construct
  source 1..75: mol_type = other DNA
agtggagccgcgcgtctcagcactggaaggcggcgatgaaccagttcgcgataatctacgaagaccgattcacgc

SEQ ID NO: 149509 - DNA, 75 bp, synthetic construct
  source 1..75: mol_type = other DNA
ttcttgaaatgctggatgactaccgctggcgactggtggaaccgtttgaattctggctcacggacgagccggaag

SEQ ID NO: 149510 - DNA, 75 bp, synthetic construct
  source 1..75: mol_type = other DNA
gcagcttgatccccgctgcggtgtgaaaaaagaaaagcagcagctggagcgcagactgcgcaatgacagccgcta

SEQ ID NO: 149511 - DNA, 75 bp, synthetic construct
  source 1..75: mol_type = other DNA
acggtgaaaaaggcggaaatcaaggtggaactgctgccgaaatattccgcctgggcggagggcgtgctggctgcc

SEQ ID NO: 149512 - DNA, 75 bp, synthetic construct
  source 1..75: mol_type = other DNA
atatgccggaccagtcacgggcgcgtctgcataaagcgattggcgctgtcctgagtgaaagcaacccggcttccg

SEQ ID NO: 149513 - DNA, 75 bp, synthetic construct
  source 1..75: mol_type = other DNA
cgtcgcgggctgatgtatatggccgtgaggctgtttggtcgcgggagctatgacagaaaaaatacagcgaagagt

SEQ ID NO: 149514 - DNA, 75 bp, synthetic construct
  source 1..75: mol_type = other DNA
tactggagctgctggacaattatcgctggcggctgatggagcctttcgaattctggctcacggataacccgcagg

SEQ ID NO: 149515 - DNA, 75 bp, synthetic construct
  source 1..75: mol_type = other DNA
atcgcctgcgcgttcaggctgaacatgccgcccgtgagggcggcagtgttcgccacgcgtcgggctatgacctga

SEQ ID NO: 149516 - DNA, 75 bp, synthetic construct
  source 1..75: mol_type = other DNA
gattattcatgactggctgtatgacaatgccctgcgcacgaaggcggaagcggacaggatatttctggatgcgat

SEQ ID NO: 149517 - DNA, 75 bp, synthetic construct
  source 1..75: mol_type = other DNA
ctggcggctggttgagccgtttgaattctggctgacggataacccggatgatgtgatttatgttccggagggata

SEQ ID NO: 149518 - DNA, 75 bp, synthetic construct
  source 1..75: mol_type = other DNA
cgccttctctggtcagtgttcccgccacatggtcgttatgcgaaagccgccattattcacgactggctgtatgat

SEQ ID NO: 149519 - DNA, 75 bp, synthetic construct
  source 1..75: mol_type = other DNA
aaatacggagacgataacggcaaccatcctcaaactaatgaatatggtctgattagcaatgtcacacactggatg

SEQ ID NO: 149520 - DNA, 75 bp, synthetic construct
  source 1..75: mol_type = other DNA
tcggcgagctaaattggagaactagttttcctttactggttacgtgtgagatcggcgttatacctgcttattacg

SEQ ID NO: 149521 - DNA, 75 bp, synthetic construct
  source 1..75: mol_type = other DNA
aatatagagctttcacgtatttatcaggaaatatcttggatgacgtaactcactggatgccgctaccagaaccgc

SEQ ID NO: 149522 - DNA, 75 bp, synthetic construct
  source 1..75: mol_type = other DNA
tggttggcgaaaccgacagataagcggcatctgtcagagctaacaaaaatctggtgggagctgaaaggcaagtat

SEQ ID NO: 149523 - DNA, 75 bp, synthetic construct
  source 1..75: mol_type = other DNA
cggatttgccgaaggggcaggctacgcatgtcatgcgtcatacatttgccacacactttatgatgaatggcggaa

SEQ ID NO: 149524 - DNA, 75 bp, synthetic construct
  source 1..75: mol_type = other DNA
tcttaatccgctaagaggtggtactgaagccgagagtgtccacagtagagtaacgtttaagggctttcagtggta

SEQ ID NO: 149525 - DNA, 75 bp, synthetic construct
  source 1..75: mol_type = other DNA
gatcgcattgttccggcagcaaccgacgaatcgctggcagaaattagccagcatctggccgtgaatgatccctgt

SEQ ID NO: 149526 - DNA, 75 bp, synthetic construct
  source 1..75: mol_type = other DNA
atgaagacaattgcctccgttacgctcccgcatcatgtacacgctccacgctacgatcgccagcagttgcaatca

SEQ ID NO: 149527 - DNA, 75 bp, synthetic construct
  source 1..75: mol_type = other DNA
gaaattaaagtaccagtcacatggacgaccataaaatccatctgggataaaggtattgcgtattttgcagcagaa

SEQ ID NO: 149528 - DNA, 75 bp, synthetic construct
  source 1..75: mol_type = other DNA
cggtgagcgaatctctgtacgtcatattgcggtgaaagaatcagaagtgatcgactggcaggatcatatactcaa

SEQ ID NO: 149529 - DNA, 75 bp, synthetic construct
  source 1..75: mol_type = other DNA
gtgagcaagattaactatcaagcactgcgtgaaaaggcagagaaagcaacatgtggcgagtggtcgctcgaatat

SEQ ID NO: 149530 - DNA, 75 bp, synthetic construct
  source 1..75: mol_type = other DNA
acttacaacttgccagaattaatcgaaggcatggaagtttccattgatgtaagcacttgtgatgctgatttaggt

SEQ ID NO: 149531 - DNA, 75 bp, synthetic construct
  source 1..75: mol_type = other DNA
gatgatagccattgcactggcgaatcaaccgcgtctgctgattgctgacgaaccgaccaactcaatggagccaac

SEQ ID NO: 149532 - DNA, 75 bp, synthetic construct
  source 1..75: mol_type = other DNA
tggattgaaaaaccagcagaccgaagaagaattaccgaacttttagaacgttggtggatatatcacggcaagatg

SEQ ID NO: 149533 - DNA, 75 bp, synthetic construct
  source 1..75: mol_type = other DNA
agggggaactgtatctggtcgacgagagcgggcaagatgtttgtttccgcattgaattaccgtcgtcgaaaaaca

SEQ ID NO: 149534 - DNA, 75 bp, synthetic construct
  source 1..75: mol_type = other DNA
gaagactgggatgtcctgctgacggatgtttttcataaaagctggccgctggcctccgatccttctcaacaaatg

SEQ ID NO: 149535 - DNA, 75 bp, synthetic construct
  source 1..75: mol_type = other DNA
tgtttaagatcccagaccccatcaccgttgatgagttttcccgccgcacaggtaagaccgaatcagccgtaagaa

SEQ ID NO: 149536 - DNA, 75 bp, synthetic construct
  source 1..75: mol_type = other DNA
aaagcgatttgtggcgtcaataaagataactggcgtgttaccgctgaccgtatgcgttttgatgacatcgatctg

SEQ ID NO: 149537 - DNA, 75 bp, synthetic construct
  source 1..75: mol_type = other DNA
ggcatctgtctgaattaacaaaagtctggtgggatctgaaaggcaagcatgaagaacacggaaaatccaatttgg

SEQ ID NO: 149538 - DNA, 75 bp, synthetic construct
  source 1..75: mol_type = other DNA
ccgttccgtgaggttaagcggttacgtgaagctgttacggaaatggcttttttgtccagtgaagagattacgcgg

SEQ ID NO: 149539 - DNA, 75 bp, synthetic construct
  source 1..75: mol_type = other DNA
aaccaacaaaccgcgaaccgttccgatatccgaggagctggcaacaatgatcacatcaggaaagcgtggctatct

SEQ ID NO: 149540 - DNA, 75 bp, synthetic construct
  source 1..75: mol_type = other DNA
atgagcgtactggataatctttactccaatgcggtgcactacggggctgaatccggtaacatttgccttcgcagc

SEQ ID NO: 149541 - DNA, 75 bp, synthetic construct
  source 1..75: mol_type = other DNA
ctggagatggagcgtagctaccgtcagtattgcgtgctggatgaccctacgcttgcgaaggtttatcaaagccag

SEQ ID NO: 149542 - DNA, 75 bp, synthetic construct
  source 1..75: mol_type = other DNA
gaaaaagaatcagaacgtacttatttcggtgaatttcgatagtgatctggttgagccgctaatatgctccgcacg

SEQ ID NO: 149543 - DNA, 75 bp, synthetic construct
  source 1..75: mol_type = other DNA
cagaagctatgggaagtccattcttcacaaaacccacacacacttatcaaaaattcatgtaatccaacctttaaa

SEQ ID NO: 149544 - DNA, 75 bp, synthetic construct
  source 1..75: mol_type = other DNA
tttgcattacctgagcaattagcaagagaagagtcgccagcccagactcaggccgggaataataaccatgaataa

SEQ ID NO: 149545 - DNA, 75 bp, synthetic construct
  source 1..75: mol_type = other DNA
gaaagaaatccagcagttcaatcaactacaacgcaccatcaccattcttgataacgatctcctgcaactggtcgc

SEQ ID NO: 149546 - DNA, 75 bp, synthetic construct
  source 1..75: mol_type = other DNA
gcaaaaaatcaaaagaggaaaaacctttaatgggctaatttcttatttattaaaacctgcttcgcaccacaagtc

SEQ ID NO: 149547 - DNA, 75 bp, synthetic construct
  source 1..75: mol_type = other DNA
ttaggtgaatgctatgtgaatattcctatgagatggatagaaacaatcccctatattgattcaattgttagcata

SEQ ID NO: 149548 - DNA, 75 bp, synthetic construct
  source 1..75: mol_type = other DNA
ctggacagcgaatgtcgcttctaccgggaaaatgaacgggttctcattctcataccgcgatattgctttcaaagc

SEQ ID NO: 149549 - DNA, 75 bp, synthetic construct
  source 1..75: mol_type = other DNA
ttttggctttatcactcctgatgatggcagcaaagacgttttcgtccatttcaccgccatccagagcaatgaatt

SEQ ID NO: 149550 - DNA, 75 bp, synthetic construct
  source 1..75: mol_type = other DNA
cgcacgctataccggaagcacctttcggcgcggagatgcaacgattaagccgggtaatggtattgagcaagcaac

SEQ ID NO: 149551 - DNA, 75 bp, synthetic construct
  source 1..75: mol_type = other DNA
cgcacagtgcactgggatatcgttctccacgggaatatctgcggcggcgaaccagtaatgggttaagcgataaaa

SEQ ID NO: 149552 - DNA, 75 bp, synthetic construct
  source 1..75: mol_type = other DNA
gaaagaaatccagcagttcaatcagctacagcgcaccatcaccattcttgataacgatctcctgcaactggtcgc

SEQ ID NO: 149553 - DNA, 75 bp, synthetic construct
  source 1..75: mol_type = other DNA
cgatatcgagtccgccgggccgctgctgtgtggtggtatcacggtctttaaaccactgttgatgcaccatatcac

SEQ ID NO: 149554 - DNA, 75 bp, synthetic construct
  source 1..75: mol_type = other DNA
gctggtaactctccggtaactccggatagttggataagctgtagtgatcgaatgcctgaaaagggccagaacgtg

SEQ ID NO: 149555 - DNA, 75 bp, synthetic construct
  source 1..75: mol_type = other DNA
tttcgctcaataatagcagaacaaaagaaagagcccgaaatgacggtcagatattatatcagttctgctgattta

SEQ ID NO: 149556 - DNA, 75 bp, synthetic construct
  source 1..75: mol_type = other DNA
aattatgcgtggcagtctcctttcggtccataatagcagaacaaaagaaagagctcgaaatgacggtcagatatt

SEQ ID NO: 149557 - DNA, 75 bp, synthetic construct
  source 1..75: mol_type = other DNA
agccaaacttcgatgtaaatggcaactctccggtaactccggatggttggataagctgtagtgagctaatgccga

SEQ ID NO: 149558 - DNA, 75 bp, synthetic construct
  source 1..75: mol_type = other DNA
gatataaatggcaactctccggtaactccggatggttgggttatagtgccgaagaaactaaccgctgagaacggc

SEQ ID NO: 149559 - DNA, 75 bp, synthetic construct
  source 1..75: mol_type = other DNA
cacaactgatgcgatgggatgccagaaagatattgcagagaagatacaaaaacagggcggtgattatttattcgc

SEQ ID NO: 149560 - DNA, 75 bp, synthetic construct
  source 1..75: mol_type = other DNA
cactcttatgacaagagtcgccgcaggggagcgattcatgtcattagtgcgttctcaacaatgcatagtctggtc

SEQ ID NO: 149561 - DNA, 75 bp, synthetic construct
  source 1..75: mol_type = other DNA
agcatctcagcttggcaaaagctattcctggacagctttacaggacaaactcgattatcagccggaacgcgataa

SEQ ID NO: 149562 - DNA, 75 bp, synthetic construct
  source 1..75: mol_type = other DNA
ggggtaagagcttcgctggtgtagtgctttacgcattaaaaccagcttctcatcataaaaaagatccgatagtga

SEQ ID NO: 149563 - DNA, 75 bp, synthetic construct
  source 1..75: mol_type = other DNA
taagtgcagagttcaatgcgacgaagcttctacgttcagatgtcagtaaacctgtttggcacaattctctgcgtc

SEQ ID NO: 149564 - DNA, 75 bp, synthetic construct
  source 1..75: mol_type = other DNA
tacatcctcctggttcaggacgcagagccaaacttcgatgtaaatggcaactctccggtaactccggatggttgg

SEQ ID NO: 149565 - DNA, 75 bp, synthetic construct
  source 1..75: mol_type = other DNA
aaatggcggcttactagtctttttgacggtgtgcagattggcccgtggcgggtgtgtcttgcgccactatcaccc

SEQ ID NO: 149566 - DNA, 75 bp, synthetic construct
  source 1..75: mol_type = other DNA
tgcgtgaggcggcagaaaaagcaacgtgtggtgagtggtcgctcgaatatggagagagccgatttgatggtgatg

SEQ ID NO: 149567 - DNA, 75 bp, synthetic construct
  source 1..75: mol_type = other DNA
ctgaatgtgtccgcctcttttctggcaaaagaaggcgtcgaattgtcctttcagggcaatatcacggagttttta

SEQ ID NO: 149568 - DNA, 75 bp, synthetic construct
  source 1..75: mol_type = other DNA
gaaaacgatatgaacgaaaaacagttcggtcagttgatggacgccatcaacaaaaccggcgaacgcctggacaaa

SEQ ID NO: 149569 - DNA, 75 bp, synthetic construct
  source 1..75: mol_type = other DNA
ctgttaccgcgctcggtttaccgatagcatttgtgctggcggcgttgattctggtgtatctatttgataggcaac

SEQ ID NO: 149570 - DNA, 75 bp, synthetic construct
  source 1..75: mol_type = other DNA
cgatgacattactggcaatatgttgtgggcgagacgtggcaatgaatttgtgacggtaaaatcgctaaacgaaca

SEQ ID NO: 149571 - DNA, 75 bp, synthetic construct
  source 1..75: mol_type = other DNA
tggcaatttcaaaggtagatggggcagagaaccccacctataacatcgatgttgtgttttttaatgggaccagtt

SEQ ID NO: 149572 - DNA, 75 bp, synthetic construct
  source 1..75: mol_type = other DNA
aaattgatttattacgcggcacagcaggttaaatcagaacttacgtgtgctgaggcagttgatgagagagaacag

SEQ ID NO: 149573 - DNA, 75 bp, synthetic construct
  source 1..75: mol_type = other DNA
tttcccagggcgaaaccattcgcatgggaagtatggaagagctttgcttcacattacagtcagatgacgagatag

SEQ ID NO: 149574 - DNA, 75 bp, synthetic construct
  source 1..75: mol_type = other DNA
caccatctggcagacactgctcacattatatggtggcggtatcggggacggatcatattccctgtattccctatt

SEQ ID NO: 149575 - DNA, 75 bp, synthetic construct
  source 1..75: mol_type = other DNA
gcgaacgttttgctcgcaacgtactggggcgtgcgcatgccaccggtgaagtggacgatagcaaatttaacgtgc

SEQ ID NO: 149576 - DNA, 75 bp, synthetic construct
  source 1..75: mol_type = other DNA
gcagaatattccacgggcttgcggatgggtgacaccgccgaacaaatggcgaaaacctacggcattactcgcgaa

SEQ ID NO: 149577 - DNA, 75 bp, synthetic construct
  source 1..75: mol_type = other DNA
atggtggtgttggtcgcgggtattctgtgggctgtctcgttaggcgcaattgatgaatgggttgcttcgccattg

SEQ ID NO: 149578 - DNA, 75 bp, synthetic construct
  source 1..75: mol_type = other DNA
aaaaatggttgaatggcaaagaaacgctggaaacatcagataatcttgcctggcaatcggccttcaccagtatgg

SEQ ID NO: 149579 - DNA, 75 bp, synthetic construct
  source 1..75: mol_type = other DNA
ctttttaccaccttcaacctgattaacgagctggatgatgtcagccctggtggttatcgctggactcaggcggtg

SEQ ID NO: 149580 - DNA, 75 bp, synthetic construct
  source 1..75: mol_type = other DNA
ataagattagcaattgatagtgcattgaaagaaataagaatgattgcaatttccgatctggaaattaagcatcat

SEQ ID NO: 149581 - DNA, 75 bp, synthetic construct
  source 1..75: mol_type = other DNA
taacttgaaagcgcgcctcaagaagacaggtgatactataaagcctggcaatatagacactaacgtaactcttaa

SEQ ID NO: 149582 - DNA, 75 bp, synthetic construct
  source 1..75: mol_type = other DNA
ttgcaagagtggcgcatgaaaagctactttcaattttaacggagtgcggcatagagaagacggcaggcacttgcc

SEQ ID NO: 149583 - DNA, 75 bp, synthetic construct
  source 1..75: mol_type = other DNA
accgctggcgaaattgtgcgatgaagtgttgttcgatttaaaaattatggacgcgactcaggcgcgggatgtggt

SEQ ID NO: 149584 - DNA, 75 bp, synthetic construct
  source 1..75: mol_type = other DNA
tggcggtggtgtcacgctttctggcggcgaagtgttaatgcaggcggaatttgcgacccgttttttacagcgact

SEQ ID NO: 149585 - DNA, 75 bp, synthetic construct
  source 1..75: mol_type = other DNA
atgacatcatccgccggacagcgcatcagctgtaacgttgtggaaacgcgccgcgatgatgtggcgcgcattttc

SEQ ID NO: 149586 - DNA, 75 bp, synthetic construct
  source 1..75: mol_type = other DNA
tcaccacccacagtctttatgcctggataaaggcatatggcccggattcctcaaccaataaagtccagtcagacg

SEQ ID NO: 149587 - DNA, 75 bp, synthetic construct
  source 1..75: mol_type = other DNA
gaacatattgacgcgggaataacgcttgccgatgcggtgaattttctggtggaaaagtacgaactggttcgtatc

SEQ ID NO: 149588 - DNA, 75 bp, synthetic construct
  source 1..75: mol_type = other DNA
aggtgccggtttcgtcacgtctgtcgcccgtaatggtgtggcagcagcttttaacatatctgctggagcaccatt

SEQ ID NO: 149589 - DNA, 75 bp, synthetic construct
  source 1..75: mol_type = other DNA
atgcctataattttatcgccagcgattttcatcgtccgctggtggtcgctggtttcgaaccccttgatctactgc

SEQ ID NO: 149590 - DNA, 75 bp, synthetic construct
  source 1..75: mol_type = other DNA
atgccgaccaccgccatcacgttgcaacaggcgaaagcgcgcgatgtgcagaatttttactttttctgccagcat

SEQ ID NO: 149591 - DNA, 75 bp, synthetic construct
  source 1..75: mol_type = other DNA
ggttgttgatcgtggtcattctgtttccagtgttgcaacacgtctcgatatcgccactcacagtctttacgcctg

SEQ ID NO: 149592 - DNA, 75 bp, synthetic construct
  source 1..75: mol_type = other DNA
agtaatgattaacgctttcggttttgcggttcaacagatgatggttaatcattccatcgcagaaataacttctat

SEQ ID NO: 149593 - DNA, 75 bp, synthetic construct
  source 1..75: mol_type = other DNA
atgaaacgccgccaaaagttactcacgaagacctggtgaaaaacaggcctcgctcccctgtcagaccacctatac

SEQ ID NO: 149594 - DNA, 75 bp, synthetic construct
  source 1..75: mol_type = other DNA
attttttgcgctcccaacccaaagcctgtcactatggggcgcgtatttcagaccggcgtcgagcgtgtgctcttt

SEQ ID NO: 149595 - DNA, 75 bp, synthetic construct
  source 1..75: mol_type = other DNA
acgccagaccgcgaagcagaattaaaacaaattctcgaacaggatgacgcagataaacgcatcagcaccgcagcg

SEQ ID NO: 149596 - DNA, 75 bp, synthetic construct
  source 1..75: mol_type = other DNA
acgctaccgctgcatttcccacccgtgtcattgccagatgactcattacctcgtacgcgcgcttggcgtgaagac

SEQ ID NO: 149597 - DNA, 75 bp, synthetic construct
  source 1..75: mol_type = other DNA
ggctcctctgagatggaagacttcttcctgatttcccggtggggtggtgtctgcgtgaatgccgaaaaagaccgt

SEQ ID NO: 149598 - DNA, 75 bp, synthetic construct
  source 1..75: mol_type = other DNA
ggtgtacaaggtgctggcatagtaaaaaaaggatatagttatagacctggagtcgccataaaactacgtcctttt

SEQ ID NO: 149599 - DNA, 75 bp, synthetic construct
  source 1..75: mol_type = other DNA
ctgcaaaaacagctcgatgttcctgttttgctctctaacgtattgattacaaggctggctgcagaattactgatg

SEQ ID NO: 149600 - DNA, 75 bp, synthetic construct
  source 1..75: mol_type = other DNA
ccgcaagcgggcgaagaaactattctcacattactcaatgataatcagttggctcaggtttcgcgtcgaaaaata

SEQ ID NO: 149601 - DNA, 75 bp, synthetic construct
  source 1..75: mol_type = other DNA
cggtcagaataatacgttcccgtattttacgggcgaagacacaatgtcattaacgccactcagtgcgtttgtgcg

SEQ ID NO: 149602 - DNA, 75 bp, synthetic construct
  source 1..75: mol_type = other DNA
gttatctggcggatattttgcaaaccgtgttgcctgacgttgcctggcataacaatattcgcgccgagctgtggc

SEQ ID NO: 149603 - DNA, 75 bp, synthetic construct
  source 1..75: mol_type = other DNA
atgaaaattaccgtattgggatgcggtgccttagggcaattatggcttacagcactttgcaaacagggtcatgaa

SEQ ID NO: 149604 - DNA, 75 bp, synthetic construct
  source 1..75: mol_type = other DNA
attcctttctttgtgaatcgggtagggccaaaaaatgcattacttatcggtgttgtgattatggcgttgcgtatc

SEQ ID NO: 149605 - DNA, 75 bp, synthetic construct
  source 1..75: mol_type = other DNA
gccggtggttaaccagaacctgaaagtcgccatctttgttgatggtaccagtatcaaccttatcaacggcagcac

SEQ ID NO: 149606 - DNA, 75 bp, synthetic construct
  source 1..75: mol_type = other DNA
aagcgtctttactcgggtgataaattaaccgtaagttgggaaattggtgataccgaaggcgacgtggatcttggg

SEQ ID NO: 149607 - DNA, 75 bp, synthetic construct
  source 1..75: mol_type = other DNA
tcccttcgcagcgaccggcgcgcggatgattacccagacattgcatgaacttcgccgtcgcggcggtggatttgg

SEQ ID NO: 149608 - DNA, 75 bp, synthetic construct
  source 1..75: mol_type = other DNA
cgtagtgagatccccgccgaagtgattgaacaactggtctttggtcaggttgtgcaaatgccagaggctcccaat

SEQ ID NO: 149609 - DNA, 75 bp, synthetic construct
  source 1..75: mol_type = other DNA
gccgattacgcaaagctgcgcccggcgtttgatcgcaaacacggaacggtaacggcggcaaacagtacgccgctg

SEQ ID NO: 149610 - DNA, 75 bp, synthetic construct
  source 1..75: mol_type = other DNA
gttaataacagcattcatattctgttaagccgcgacggcggttttgaagagatgttgttccatattctgcaacgg

SEQ ID NO: 149611 - DNA, 75 bp, synthetic construct
  source 1..75: mol_type = other DNA
cccgttgcgcgtggcgatcgctatgccgtggtgccatttttacgccgctgggcgctgttatatcactgccggatt

SEQ ID NO: 149612 - DNA, 75 bp, synthetic construct
  source 1..75: mol_type = other DNA
gatgttgttccacattctgcaacgacctgtagcgcgtggcgatcgctatgcggtggtgccatttttacgccgctg

SEQ ID NO: 149613 - DNA, 75 bp, synthetic construct
  source 1..75: mol_type = other DNA
actggcaggttattgtgtggcacctgtggcgctggctgaagacagtgcctgggtcgacagcggcgaaaccaatat

SEQ ID NO: 149614 - DNA, 75 bp, synthetic construct
  source 1..75: mol_type = other DNA
gatggatgtgattggtctggatattcacaactttacccgcacggttgctgaagacggcaagctggaaatccacac

SEQ ID NO: 149615 - DNA, 75 bp, synthetic construct
  source 1..75: mol_type = other DNA
tgaccttaaaaatggcacaatgttgtatgtccgtatctatccaggcaacattatggatgttatcggttttgacat

SEQ ID NO: 149616 - DNA, 75 bp, synthetic construct
  source 1..75: mol_type = other DNA
atgactaaaaaaacacttttttcccccgaagtccgtcaacgggcagttcgtatggttctggaaagtcagggcgaa

SEQ ID NO: 149617 - DNA, 75 bp, synthetic construct
  source 1..75: mol_type = other DNA
gctacatgcaggataaactcaacgcgcgtttgatggggatgacgccgactggcaacggtcgccgtgaatcctacg

SEQ ID NO: 149618 - DNA, 75 bp, synthetic construct
  source 1..75: mol_type = other DNA
tggcgattgatgacgaaggcacaccaggtcaatacaacgtgttgattgagaacgggatcctgaaaggttacatgc

SEQ ID NO: 149619 - DNA, 75 bp, synthetic construct
  source 1..75: mol_type = other DNA
gtctgaaagagctggagcgtgaaaatcgtgaactgcgccgcagtaacgatatccttcgccaggcttccgcttatt

SEQ ID NO: 149620 - DNA, 75 bp, synthetic construct
  source 1..75: mol_type = other DNA
tggaacgtgaaaatcgtgaactgagccgcagtaacgatatccttcgccaggcttccacttattttgcgaaggcgg

SEQ ID NO: 149621 - DNA, 75 bp, synthetic construct
  source 1..75: mol_type = other DNA
accagcgctgaacgtcagcgtctgaaagagctggaacgtgaaaatcgtgaactgcgccgcagtaacgatatcctt

SEQ ID NO: 149622 - DNA, 75 bp, synthetic construct
  source 1..75: mol_type = other DNA
atggcatctatgcgccgaatttcggtggcggtcaggtagatattacttccggtaaatttgtcttctccacgtcag

SEQ ID NO: 149623 - DNA, 75 bp, synthetic construct
  source 1..75: mol_type = other DNA
tatgctgccgggtaaatcgacgccgcaggaaattattgaatccgttgagtatggcatctatgcgccgaatttcgg

SEQ ID NO: 149624 - DNA, 75 bp, synthetic construct
  source 1..75: mol_type = other DNA
agaagatggcaaacgcgaacgcggtgccagtggtggcggcggtcgttttggttatgagttcttccttgccgatct

SEQ ID NO: 149625 - DNA, 75 bp, synthetic construct
  source 1..75: mol_type = other DNA
tcagcctgctggcgctggaacagagtgcgcaagcggcgcgtaccattgtgcgtgacaacggcgatggcaaagtac

SEQ ID NO: 149626 - DNA, 75 bp, synthetic construct
  source 1..75: mol_type = other DNA
cgcgtacaagaagtgactgccagcctcagcggcgtttatgaattaattctggttgcggccaccgacggcacgctg

SEQ ID NO: 149627 - DNA, 75 bp, synthetic construct
  source 1..75: mol_type = other DNA
ctgcaaagcatgagccgtgaagagaagctggatatcctgcgtcgcgtcgataaggttgcccgcgaagcggacaag

SEQ ID NO: 149628 - DNA, 75 bp, synthetic construct
  source 1..75: mol_type = other DNA
catctggcatttttcactaatacagcacctgtggattgtcgccagatccgcattgaagatgcgtccagcggagta

SEQ ID NO: 149629 - DNA, 75 bp, synthetic construct
  source 1..75: mol_type = other DNA
gccggaaaaataccggcttaagccagagtgtgatgccagtccgacacaacccgaagccgtggtagaagtcaccac

SEQ ID NO: 149630 - DNA, 75 bp, synthetic construct
  source 1..75: mol_type = other DNA
gccgcagtaacgatatccttcgccaggcttcagcttcttttgcgaaggcggagttcgaccgcctctggaaaaaat

SEQ ID NO: 149631 - DNA, 75 bp, synthetic construct
  source 1..75: mol_type = other DNA
aaaacaacgcatgaagctggttacgctaataatggagtgctatgacttagctggaatagtgcctcatgatcgagc

SEQ ID NO: 149632 - DNA, 75 bp, synthetic construct
  source 1..75: mol_type = other DNA
caacaacaactgagccgccgcccatttctgcgctggagcttccacaacctgaagcatcggcactaacccccagta

SEQ ID NO: 149633 - DNA, 75 bp, synthetic construct
  source 1..75: mol_type = other DNA
gttaccacttgaagtaaaaacaggagctcgccccgattacaaccatgcggggcagcaggcccgcgagctaaaacg

SEQ ID NO: 149634 - DNA, 75 bp, synthetic construct
  source 1..75: mol_type = other DNA
gttccattgctccaaagaatggctgtacgccggagactctgcgtgtctgggttcgccagtatgagcgggataccg

SEQ ID NO: 149635 - DNA, 75 bp, synthetic construct
  source 1..75: mol_type = other DNA
gttccattgctccaaagaatggctgtacgcctgagactctgcgtgtctgggttcgccaggatgagcgggataccg

SEQ ID NO: 149636 - DNA, 75 bp, synthetic construct
  source 1..75: mol_type = other DNA
tatggttctggaaagtcagagcgaatatgactcacaatgggcgacaatttgttctattgctccaaagattggctg

SEQ ID NO: 149637 - DNA, 75 bp, synthetic construct
  source 1..75: mol_type = other DNA
ccacccgatcgaggtgaataacgaaatcattaaccatgtgttgattgcctgcgccgccgccgatgcgcgtcatga

SEQ ID NO: 149638 - DNA, 75 bp, synthetic construct
  source 1..75: mol_type = other DNA
gccgcagtaacgatatccttcgccaggcttccgcttattttgcgaggcggagttcgaccgcctctggaaaaaatg

SEQ ID NO: 149639 - DNA, 75 bp, synthetic construct
  source 1..75: mol_type = other DNA
gttccattgctccaaagattggctgtacgccggagactctgcgtgtctgggttcgccaggatgagcgggataccg

SEQ ID NO: 149640 - DNA, 75 bp, synthetic construct
  source 1..75: mol_type = other DNA
tgggcgtgctctgttatttcctgccggtggaatactgggttattccattactggctcatctggcaattcagatta

SEQ ID NO: 149641 - DNA, 75 bp, synthetic construct
  source 1..75: mol_type = other DNA
agtcagggcgaatatgactcacaatgggcgacaatttgttccattgctccaaagattggctgtacgccggagact

SEQ ID NO: 149642 - DNA, 75 bp, synthetic construct
  source 1..75: mol_type = other DNA
gaatctcctcattttcaggacttgtttttatttttcgccaatatgttattgcactatcaccaatttatgaatccc

SEQ ID NO: 149643 - DNA, 75 bp, synthetic construct
  source 1..75: mol_type = other DNA
tacgccggagactctgcgtgtctgggtacgacagcatgaggggataccgggggcggtgatggagggctcaccacc

SEQ ID NO: 149644 - DNA, 75 bp, synthetic construct
  source 1..75: mol_type = other DNA
tggaacgtgaaaatcgtgaactgcgccgcagtaacgatatccttcgccagacttccgcttcttttgcgaaggcgg

SEQ ID NO: 149645 - DNA, 75 bp, synthetic construct
  source 1..75: mol_type = other DNA
cacgccgcttacgcaatcaaatgattctgatggcaatcctgatggtcattgtcccaacgcttactattggttata

SEQ ID NO: 149646 - DNA, 75 bp, synthetic construct
  source 1..75: mol_type = other DNA
cgatctccggcaaaatccagacggtgcgcagagaggcgaaatgtctgcactgcgcgaaatgtttgcgtgatgcgg

SEQ ID NO: 149647 - DNA, 75 bp, synthetic construct
  source 1..75: mol_type = other DNA
ttgctacccgttttttacagcggctgcggttgtggggtgtgtcatgcgccattgaaactgccggagacgcgccag

SEQ ID NO: 149648 - DNA, 75 bp, synthetic construct
  source 1..75: mol_type = other DNA
ttgctggtgagcgaaggcgtcaacgtaattcctcgtttgccgctgattcccggttacacgctcactaaagaaaat

SEQ ID NO: 149649 - DNA, 75 bp, synthetic construct
  source 1..75: mol_type = other DNA
atgatggagaaattaatatttttgcgctcccaacccaaagcctgtcactatgggcgcgtatttcagaccggcgtc

SEQ ID NO: 149650 - DNA, 75 bp, synthetic construct
  source 1..75: mol_type = other DNA
aaagagcgcatacaccacatattgaacccctgcctccggatcaccataccgctgcagattacttacgccagtttg

SEQ ID NO: 149651 - DNA, 75 bp, synthetic construct
  source 1..75: mol_type = other DNA
tggtgaaaaacaggcctcgctcccctgtcagaccacctatacccgcaaccgccaaaacgccagacctccctgaac

SEQ ID NO: 149652 - DNA, 75 bp, synthetic construct
  source 1..75: mol_type = other DNA
aagatgaaaacagcgcgaaagattacgctgaaatcaaaccgtacaccccagcctggggtgagcaaattaccggcg

SEQ ID NO: 149653 - DNA, 75 bp, synthetic construct
  source 1..75: mol_type = other DNA
cattatgaatatccccggttcagaagtgaccggtatgcgcggcggcattcataactcggtcacccgcgtttgccc

SEQ ID NO: 149654 - DNA, 75 bp, synthetic construct
  source 1..75: mol_type = other DNA
tacaccaacgttcacgagttaattccgtggcgcacgctgtcgggacgccagcagctctatcaggatcatccctgg

SEQ ID NO: 149655 - DNA, 75 bp, synthetic construct
  source 1..75: mol_type = other DNA
actgattatccgcgtacccgccctgacctgcccaaccatgaacctcgcggctgccctcgcggcgcaagttactcc

SEQ ID NO: 149656 - DNA, 75 bp, synthetic construct
  source 1..75: mol_type = other DNA
aacttcctgacgccgcaccagaaatggggcattcactcaacctacagtgaaaacctgctaatgctgacgctctct

SEQ ID NO: 149657 - DNA, 75 bp, synthetic construct
  source 1..75: mol_type = other DNA
gccgataccgcccataaaacgcatgggcgctcgatgattatcctcggtgctggcgtcaaccactggtatcacatg

SEQ ID NO: 149658 - DNA, 75 bp, synthetic construct
  source 1..75: mol_type = other DNA
gttcgccagaatgagcgggataccgggggcggtgagggtggactccccaccgctgaacgtctgcttctgaaatac

SEQ ID NO: 149659 - DNA, 75 bp, synthetic construct
  source 1..75: mol_type = other DNA
ggggcggtgatggagggctcaccaccgctgaacgtcagcgtctaaagagctggaacgtgaaaatcgtgaactgcg

SEQ ID NO: 149660 - DNA, 75 bp, synthetic construct
  source 1..75: mol_type = other DNA
accgggggcggtgatggtgggctcaccagcgctgaacgtcagcgtctgaaagagctggaacgtgaaaaatcgtga

SEQ ID NO: 149661 - DNA, 75 bp, synthetic construct
  source 1..75: mol_type = other DNA
tgcggcggtcgatccggcgtgggaatcacgcagcgactgggaaatctacaaaggtatcgccaaagcattttcgca

SEQ ID NO: 149662 - DNA, 75 bp, synthetic construct
  source 1..75: mol_type = other DNA
atgccagtcaatatagcggtcatctgattgatttcaacgtccgtgctgaacgcatgggctggctcccctcctcgc

SEQ ID NO: 149663 - DNA, 75 bp, synthetic construct
  source 1..75: mol_type = other DNA
atgctgccactcctttagttagttggaatagaattttgaatctgagtgaaaaaattgactcacattctatagagc

SEQ ID NO: 149664 - DNA, 75 bp, synthetic construct
  source 1..75: mol_type = other DNA
gtcagaaaaaattcttatttcaggaagaaagtgtatggtaccttcctgaactcgctgatgcccctcgtggaacaa

SEQ ID NO: 149665 - DNA, 75 bp, synthetic construct
  source 1..75: mol_type = other DNA
cgttaaggccgctctgtgtttcatttcataatgaggaagttgattttcataagaatgaaatccttctcataaaaa

SEQ ID NO: 149666 - DNA, 75 bp, synthetic construct
  source 1..75: mol_type = other DNA
tccggctgggacgtgcgatccgttttcccgtggctgaggtggaagcctgggaaaaacagcacatcacaaatacac

SEQ ID NO: 149667 - DNA, 75 bp, synthetic construct
  source 1..75: mol_type = other DNA
aattaacgaccgtgcgttatcccattgcttcgatggcaaaattagctactgaactggccttgcagggcgcagcag

SEQ ID NO: 149668 - DNA, 75 bp, synthetic construct
  source 1..75: mol_type = other DNA
tgcttcaatggctaaattagccaccgaactggccttgcaggggcagcaggcaatattgatcctcgtgccagccac

SEQ ID NO: 149669 - DNA, 75 bp, synthetic construct
  source 1..75: mol_type = other DNA
actctgacaattcatcctgtcacagctcccctcgaaaacgtctcccgctggctcactacggcacagataacatac

SEQ ID NO: 149670 - DNA, 75 bp, synthetic construct
  source 1..75: mol_type = other DNA
caaccccgcattgaagcggagatcgcactggtgttgaaccgcgatttgcccgcaaccgatatcaccttcgacgaa

SEQ ID NO: 149671 - DNA, 75 bp, synthetic construct
  source 1..75: mol_type = other DNA
gcgcaggggcgtcgcgtggtagggcgtaaagtgggcctgacgcatccgaaagtgcagcaacaactgggcgttgat

SEQ ID NO: 149672 - DNA, 75 bp, synthetic construct
  source 1..75: mol_type = other DNA
tctggctggcacgcaaaatggccagcctgggagaaccgctgcgcgccggagatatcattcttaccggggcattag

SEQ ID NO: 149673 - DNA, 75 bp, synthetic construct
  source 1..75: mol_type = other DNA
tattcctactgttgttatggggaatgctccgtttgatataggttcttattcatttgaagatttgcttgaggataa

SEQ ID NO: 149674 - DNA, 75 bp, synthetic construct
  source 1..75: mol_type = other DNA
atgtctgatctgtttacgcgaatgtgttgccggatggacgtggcgaccgttcgggtgatgggcaaacaggcggag

SEQ ID NO: 149675 - DNA, 75 bp, synthetic construct
  source 1..75: mol_type = other DNA
cggtccggcacagcgtccggcaggattagatctgaaaaactgcgcgatgaaaatgacgcgcaacaacgaagaggt

SEQ ID NO: 149676 - DNA, 75 bp, synthetic construct
  source 1..75: mol_type = other DNA
cgaatatgcgtagtgagatcggcaatctggaagcgcgtcttgaacaggcaaacacactgcgcaaatccgcagaag

SEQ ID NO: 149677 - DNA, 75 bp, synthetic construct
  source 1..75: mol_type = other DNA
ctgtggcatggggcaaaggccagagacattcccgctaatgtatgacggaagagaagctattgcctatatccatga

SEQ ID NO: 149678 - DNA, 75 bp, synthetic construct
  source 1..75: mol_type = other DNA
agcgcgggtgtctggaccgacgggatcggaaatacatccggggtggtgccggggaaagctatcacggaacggcag

SEQ ID NO: 149679 - DNA, 75 bp, synthetic construct
  source 1..75: mol_type = other DNA
tgctgcgtgtggagcgggcactggaaaggtgtgtgaagcaacagccaccgcagaaggtgtatgacgctgcggtgt

SEQ ID NO: 149680 - DNA, 75 bp, synthetic construct
  source 1..75: mol_type = other DNA
tgctgcgtgtggagcgggcactggaaaggtgtgtgaagcaacagccaccacagaaggtgtatgacgctacggtgt

SEQ ID NO: 149681 - DNA, 75 bp, synthetic construct
  source 1..75: mol_type = other DNA
agcgcgggtgtctggaccgacggcattggtaatacatcgggcgtcatcccgggcaaaaccattacggaacgacag

SEQ ID NO: 149682 - DNA, 75 bp, synthetic construct
  source 1..75: mol_type = other DNA
tcgtggtgaatatgtccgccaggcgcattttccagatagcgatgcagataatcccgatacatgggatgtgcacaa

SEQ ID NO: 149683 - DNA, 75 bp, synthetic construct
  source 1..75: mol_type = other DNA
ggcagcaggcaatattgatcctcgtgccagccactgttttatgccgacgttagtgcgtcgccattctgtcgcaac

SEQ ID NO: 149684 - DNA, 75 bp, synthetic construct
  source 1..75: mol_type = other DNA
tgcttataacgacaatatggccgctggcgcactgacagcattaaaagataatggcattgcgattccgttacatct

SEQ ID NO: 149685 - DNA, 75 bp, synthetic construct
  source 1..75: mol_type = other DNA
cacctgaaacaccggcaatggtggcaggcctgtgaccagctcacccgctgggtgtttgtgaatggtgagcgtaat

SEQ ID NO: 149686 - DNA, 75 bp, synthetic construct
  source 1..75: mol_type = other DNA
cctcccagcggatcgccgacgcccgtatctcctatgccggacgtggcgcgttaagcgacgccaatgccgcaggct

SEQ ID NO: 149687 - DNA, 75 bp, synthetic construct
  source 1..75: mol_type = other DNA
caatccaaccattatttatcgtccctatagttttatggccaaaatcagcgacgtggagcggggacattttctgac

SEQ ID NO: 149688 - DNA, 75 bp, synthetic construct
  source 1..75: mol_type = other DNA
gctgctttgccagttggaaataccagagcgcttttccacatgtactctggacagctacaagccggttgggaagga

SEQ ID NO: 149689 - DNA, 75 bp, synthetic construct
  source 1..75: mol_type = other DNA
atgagcgtatgaagccgaccatcctgatcagcaaccagacaagggaagagctggcagcattcatcggcgagcgcg

SEQ ID NO: 149690 - DNA, 75 bp, synthetic construct
  source 1..75: mol_type = other DNA
ggtgcgtgctggtgagtaaaaccacgcccacgccgcagccaggcagtgatgaaatcaatcgcgcttatgaagagg

SEQ ID NO: 149691 - DNA, 75 bp, synthetic construct
  source 1..75: mol_type = other DNA
atgtgtgaaggatatgttgaaaaaccactctatttgttaatcgccgaatggatgatggctgaaaatcggtgggtg

SEQ ID NO: 149692 - DNA, 75 bp, synthetic construct
  source 1..75: mol_type = other DNA
cgcaaatctatgcgcgtctgcggcataacagtcgggaaaaattagtggccctgaggaagacgccgcgtattccag

SEQ ID NO: 149693 - DNA, 75 bp, synthetic construct
  source 1..75: mol_type = other DNA
gccggattgggttagcttcaaaaaataaaaatgggactgaggatcttggtattatgcagattaatacaggagcat

SEQ ID NO: 149694 - DNA, 75 bp, synthetic construct
  source 1..75: mol_type = other DNA
taaaaaaattgaagacattatcgataaaagggattctattttagatctttttgactcaaagaaaatatcattagt

SEQ ID NO: 149695 - DNA, 75 bp, synthetic construct
  source 1..75: mol_type = other DNA
ttctcgaatatattgtggagactatgtttaagtctattgctagaatctggccaaccgttcctactgtcaaattct

SEQ ID NO: 149696 - DNA, 75 bp, synthetic construct
  source 1..75: mol_type = other DNA
ttaatgaaagagcctgatgatgaggttctcgaatatattgtggagactatgtttaagtctattgctagaatctgg

SEQ ID NO: 149697 - DNA, 75 bp, synthetic construct
  source 1..75: mol_type = other DNA
cgtggcggcagccatgtgcatgtctttagcccgaacggtgaaatggtgagttttacctataacgaccatgtaatg

SEQ ID NO: 149698 - DNA, 75 bp, synthetic construct
  source 1..75: mol_type = other DNA
gtatacgccaggagcgctgcgcggcggcagccatgtgcatgtctttagcccgaacggagaaagggtgagctttac

SEQ ID NO: 149699 - DNA, 75 bp, synthetic construct
  source 1..75: mol_type = other DNA
atgcctgacagtaaaatcgaaccagttaaaagagcaacagctgaattagcaattattgctgctgcttgggcattt

SEQ ID NO: 149700 - DNA, 75 bp, synthetic construct
  source 1..75: mol_type = other DNA
gtcattggtacgtctctgacatttagcctgtacctgaaaggagcacaattaattggcggtccaaaagccagcatt

SEQ ID NO: 149701 - DNA, 75 bp, synthetic construct
  source 1..75: mol_type = other DNA
gcacgttgccagtggtcggctggagtatgctcattggtggtctgatcctgttgcccttttatgccggacaaggaa

SEQ ID NO: 149702 - DNA, 75 bp, synthetic construct
  source 1..75: mol_type = other DNA
aaccatagaaaaatcaaatgcggctacggcaacggtactacagttcctctcgccaacaattattgtggcgtggtt

SEQ ID NO: 149703 - DNA, 75 bp, synthetic construct
  source 1..75: mol_type = other DNA
tctgcggacgctaaaaataataccctgcaagttactttcgagcattcaccacaagagtcgaaaacaaaaaaagac

SEQ ID NO: 149704 - DNA, 75 bp, synthetic construct
  source 1..75: mol_type = other DNA
atggaatttaaagatttaccaaaagaaatccagacaattgctgcaacgacactcagtgatagcctggtggaaatt

SEQ ID NO: 149705 - DNA, 75 bp, synthetic construct
  source 1..75: mol_type = other DNA
gtgataaaatcttttctattattaacaatcataaagatgccattagcctgctgattttttccgtggttggcgcgc

SEQ ID NO: 149706 - DNA, 75 bp, synthetic construct
  source 1..75: mol_type = other DNA
ggatgcggagcgtcttgaaggcactgccggaggaaacagcgtttccaccctgatgcagaacgccggcgtcaagat

SEQ ID NO: 149707 - DNA, 75 bp, synthetic construct
  source 1..75: mol_type = other DNA
cagcagagcatgatcctcgcccgtgacctcggtcaccgggttaacgggacggacgaggaggcactggaagtcaaa

SEQ ID NO: 149708 - DNA, 75 bp, synthetic construct
  source 1..75: mol_type = other DNA
ctgaagtgtgacgaccccagcgaagaccgtgaggagacagcccgctttcttggtgcgtggaattacacacgcatc

SEQ ID NO: 149709 - DNA, 75 bp, synthetic construct
  source 1..75: mol_type = other DNA
ttgagctgtgcagaaccattaagtagcgcgctactctctttgctgttgctggggatcacgttcacattaccggac

SEQ ID NO: 149710 - DNA, 75 bp, synthetic construct
  source 1..75: mol_type = other DNA
gtcattggtacgtccctgacatttagtctgtacctgaaaggagcacaattaattggcggtccaaaagccagcatt

SEQ ID NO: 149711 - DNA, 75 bp, synthetic construct
  source 1..75: mol_type = other DNA
ttgcctttttatgccagacaaggaacaaactttgtcgttaacggcagtttgattctggcgttttttatttggtgg

SEQ ID NO: 149712 - DNA, 75 bp, synthetic construct
  source 1..75: mol_type = other DNA
aaagaggagctggtgcgtgacgtcagccgtttctactcgtcatcgcacgaccgtttcacttacggctccagtttc

SEQ ID NO: 149713 - DNA, 75 bp, synthetic construct
  source 1..75: mol_type = other DNA
ctgagtgtatcgaactgcgtctttccagcactcgccaggaaaccgggcgcttcaaggcgctgcgcgtttctggtc

SEQ ID NO: 149714 - DNA, 75 bp, synthetic construct
  source 1..75: mol_type = other DNA
ccaaatgaatggctggatctcggtggcttaagctcactttctgctgaagagtactttggtgccagcctttggcag

SEQ ID NO: 149715 - DNA, 75 bp, synthetic construct
  source 1..75: mol_type = other DNA
atttagttgatggccaggtgtttgaatatagccgcaacgcttttaatactgatgactataaatttaccctgatag

SEQ ID NO: 149716 - DNA, 75 bp, synthetic construct
  source 1..75: mol_type = other DNA
cattacaaacagagtttggcgtcagccgggttacggtgcgtcaggctttgcgccagctagtcgagcagcagatcc

SEQ ID NO: 149717 - DNA, 75 bp, synthetic construct
  source 1..75: mol_type = other DNA
ttcaccgatatccgccaggctgcgaacggttttcacgcctgcggcttccagagcagcgaatttctcatccgcagt

SEQ ID NO: 149718 - DNA, 75 bp, synthetic construct
  source 1..75: mol_type = other DNA
gagctaccgtaatctgatccgctttgcgcgtcgcaataaccttagcgtctccgccagcccacaggatatcggtgt

SEQ ID NO: 149719 - DNA, 75 bp, synthetic construct
  source 1..75: mol_type = other DNA
gtactttggtgccagcctttggcagctctataagagtatcgattccccatacaaagcggtgctgaaaacactgct

SEQ ID NO: 149720 - DNA, 75 bp, synthetic construct
  source 1..75: mol_type = other DNA
acaatgctgataaccgtgataacggtggcatgccgcgtcgctctcgccgctcgcctcgtcacctgcgcgtaagtg

SEQ ID NO: 149721 - DNA, 75 bp, synthetic construct
  source 1..75: mol_type = other DNA
ccaaccgttcaggttggtatctgtataaccgcgcgccaaatattgagtcgatcatcagccatcagccgctggaat

SEQ ID NO: 149722 - DNA, 75 bp, synthetic construct
  source 1..75: mol_type = other DNA
ttactgaatacctgacggcgattgaagatttcacccgtctggatttagtacgtcgctgcttctatttaaaagtgt

SEQ ID NO: 149723 - DNA, 75 bp, synthetic construct
  source 1..75: mol_type = other DNA
tcgtggaacgaagtgcgtacgctgcacttcaacggcgagcagtcgatgatcgaagccctgaaaaccattctcggc

SEQ ID NO: 149724 - DNA, 75 bp, synthetic construct
  source 1..75: mol_type = other DNA
cgttggatcaatacggcaacctggcggcagccacgtccacggggggaatgactaacaaattacccggtcgggtcg

SEQ ID NO: 149725 - DNA, 75 bp, synthetic construct
  source 1..75: mol_type = other DNA
cctgcgtgatggatggcaacaccctgaaagccggtgctgtggcgggcgtcagtcatctgcgtaatccggttcttg

SEQ ID NO: 149726 - DNA, 75 bp, synthetic construct
  source 1..75: mol_type = other DNA
ggggcagaaaattttgcgtttgctcatgacatggagcgcgtctcgccggagattttctccacgccgttgcgttat

SEQ ID NO: 149727 - DNA, 75 bp, synthetic construct
  source 1..75: mol_type = other DNA
ggtgaaaccttatgttgcgaaagttgatgaggttacaggacaggtatcaattgtttcagcagtgggcgacgataa

SEQ ID NO: 149728 - DNA, 75 bp, synthetic construct
  source 1..75: mol_type = other DNA
ggctgccacgtccacggggggaatgaccaataaattacctggtcgggtcggcgacagcccgctggttggcgccgg

SEQ ID NO: 149729 - DNA, 75 bp, synthetic construct
  source 1..75: mol_type = other DNA
gtgacagcccgcttgtcggtgccgggtgctacgccaataacgccagcgtggcggtttcttgtaccggtacgggcg

SEQ ID NO: 149730 - DNA, 75 bp, synthetic construct
  source 1..75: mol_type = other DNA
tcctacaggctcgcatgcacctcactcggggcggaaaaggttgaggtcttgcgtgccgctttcaggtcgcgatat

SEQ ID NO: 149731 - DNA, 75 bp, synthetic construct
  source 1..75: mol_type = other DNA
cgtcaaaagtgaggcggataatttaggtttagcaccgtcatgctcgtctactgttgttctggttgttggtgatgc

SEQ ID NO: 149732 - DNA, 75 bp, synthetic construct
  source 1..75: mol_type = other DNA
ttattaaacgttttatgcgtaacgaacataaagcagtagaagaggttattgattcccccctttcggaagtcgcga

SEQ ID NO: 149733 - DNA, 75 bp, synthetic construct
  source 1..75: mol_type = other DNA
tgctggaggagtgtccactgtttaatgccggtattggcgccgtctttacgcgtgatgaaacccacgagctggatg

SEQ ID NO: 149734 - DNA, 75 bp, synthetic construct
  source 1..75: mol_type = other DNA
tgtttattgatgcgcgtaacctcggcaccatgattagccgcacaactaaagagttaacgacggaagatattgcca

SEQ ID NO: 149735 - DNA, 75 bp, synthetic construct
  source 1..75: mol_type = other DNA
cgcaaagcaagatgatattgcggtgatcatagacacggccctttctactatagagaaacgcaatgcgtcgctaac

SEQ ID NO: 149736 - DNA, 75 bp, synthetic construct
  source 1..75: mol_type = other DNA
gaacgacgtgaactcgatgccgggatctggcgaatggcgacagaaccaccgacaggttttaccagcttacggttg

SEQ ID NO: 149737 - DNA, 75 bp, synthetic construct
  source 1..75: mol_type = other DNA
tttatgccgcgccgccggataaccgggtcagagatcttgataatatcccaaaatgcctttttgacagccttactt

SEQ ID NO: 149738 - DNA, 75 bp, synthetic construct
  source 1..75: mol_type = other DNA
gattgtttattaaggtacgcgagcgcgaagacctgttaccggatattgacgaatacgcgactaatatgtggggtg

SEQ ID NO: 149739 - DNA, 75 bp, synthetic construct
  source 1..75: mol_type = other DNA
agaacgtctggctgcatttatctacaatctgtcccgtcgttttgcccaacgcggcttctctcctcgtgaattccg

SEQ ID NO: 149740 - DNA, 75 bp, synthetic construct
  source 1..75: mol_type = other DNA
tgttacaatgccgcccgtttacactgactgggattttttgcagcgagtttgccagcaggtgggattttcaccggt

SEQ ID NO: 149741 - DNA, 75 bp, synthetic construct
  source 1..75: mol_type = other DNA
ttatgcggcgattcctcagggaaaatcctaacgttgacgttctttttcgcgaaaagatgcccgcgatgcaaatgg

SEQ ID NO: 149742 - DNA, 75 bp, synthetic construct
  source 1..75: mol_type = other DNA
gcaacaatcaggatgttgaacgcatcacccgaagagtcgagggactggatgtcgaggtgttttgcccccgctata

SEQ ID NO: 149743 - DNA, 75 bp, synthetic construct
  source 1..75: mol_type = other DNA
ttggtaatacgtcgggcgtcattcccggcaaaaccattacggaacgacaggcagcagaagggcttatctccaacg

SEQ ID NO: 149744 - DNA, 75 bp, synthetic construct
  source 1..75: mol_type = other DNA
ttggtaatacatcgggcgtcattcccggcaaaaccatcacggaacgacaggcagcggaagggctgatctccaacg

SEQ ID NO: 149745 - DNA, 75 bp, synthetic construct
  source 1..75: mol_type = other DNA
ccataaccactatgttactggtatcagccagtcatgcctcagtgctgccgaaacttcctgagtcgtttaaatatg

SEQ ID NO: 149746 - DNA, 75 bp, synthetic construct
  source 1..75: mol_type = other DNA
ccataaccactatgttactggtatcagctagtcatgcctcagtgctaccgaaacttcccgagtcgtttaaatatg

SEQ ID NO: 149747 - DNA, 75 bp, synthetic construct
  source 1..75: mol_type = other DNA
ccgggcgggaaacgaattaagtaatctcttggcacaaaggacaagcggcaagctcaggagttgcacgacaagcga

SEQ ID NO: 149748 - DNA, 75 bp, synthetic construct
  source 1..75: mol_type = other DNA
gcggcaacaaaggcgcggcattaaccacctttatcagtctggcgggtagctatctggttctgatgccgaacaacc

SEQ ID NO: 149749 - DNA, 75 bp, synthetic construct
  source 1..75: mol_type = other DNA
atcagctaatcagtcttggtgataaatatgaaggggtgactgcccagccggttgagtttagcgaaaatggggtta

SEQ ID NO: 149750 - DNA, 75 bp, synthetic construct
  source 1..75: mol_type = other DNA
gcatccggcttcggtggttgccctcaatgcgcgggcactgcaggagattttcagcgataaccgtcagcgggtcag

SEQ ID NO: 149751 - DNA, 75 bp, synthetic construct
  source 1..75: mol_type = other DNA
agcgcgaacaggaagaagtacaagtgcagccgatggtgactgaggtccctgtcgccgccgctgccgaacctgttg

SEQ ID NO: 149752 - DNA, 75 bp, synthetic construct
  source 1..75: mol_type = other DNA
atcacgtactgcgcgtgcgtaaaggcgaagaaacgccaaccttaagctacatgctgccgaagctgcatgaagaag

SEQ ID NO: 149753 - DNA, 75 bp, synthetic construct
  source 1..75: mol_type = other DNA
cgtgcgcaccgctggcgtcggcaaatctgctgaggcgctgcaatgggatttaagcttccgtctgaaacactggga

SEQ ID NO: 149754 - DNA, 75 bp, synthetic construct
  source 1..75: mol_type = other DNA
tttggcaggaaagagagcacatgttgaagacctaattaaaaagaataatggactgatttccagcggaatcacaaa

SEQ ID NO: 149755 - DNA, 75 bp, synthetic construct
  source 1..75: mol_type = other DNA
aaaagctatatcttatagggatgataatggtgcaaaacttaaaattatttctgaagaaatgcttttcgatgcatt

SEQ ID NO: 149756 - DNA, 75 bp, synthetic construct
  source 1..75: mol_type = other DNA
gttaaaggtaaatacatcactatcgaaaataacgatgcgctggctcaacttgccggtcatacgcgcaacgtcgcc

SEQ ID NO: 149757 - DNA, 75 bp, synthetic construct
  source 1..75: mol_type = other DNA
cagtaatgataagttccgggtccggcggggacgggaagcgctctctgcactgatgcaaaacagactggcggttga

SEQ ID NO: 149758 - DNA, 75 bp, synthetic construct
  source 1..75: mol_type = other DNA
tgtggttcatacacaggagccactgttaccggaaccggaattaacaacgcccggtcgatgtatctgctgccggca

SEQ ID NO: 149759 - DNA, 75 bp, synthetic construct
  source 1..75: mol_type = other DNA
gcatccggcctcggtagttgctctcaatgcacgggcactgcaggagattttcagcgataaccgtcagcgggtcag

SEQ ID NO: 149760 - DNA, 75 bp, synthetic construct
  source 1..75: mol_type = other DNA
gttattaatgctattaatatgggagaagccagagagctattcctgggactggtagattattttaagcaggaaaaa

SEQ ID NO: 149761 - DNA, 75 bp, synthetic construct
  source 1..75: mol_type = other DNA
ggctgcgtaagcgccatctcagcgatacctcccagcgcggtgataaccgttttgtgcgcgtgagctgggatgaag

SEQ ID NO: 149762 - DNA, 75 bp, synthetic construct
  source 1..75: mol_type = other DNA
actctggaagtggaggcgcaggagcgtgccgagtatttatcgcggcatgatgaattaaccggcctgccaaaccgg

SEQ ID NO: 149763 - DNA, 75 bp, synthetic construct
  source 1..75: mol_type = other DNA
ggtgaatgttaaatgggcatgggacagccagaaccttggtgaatcgctttacacgaattaccagtatgaaggcgt

SEQ ID NO: 149764 - DNA, 75 bp, synthetic construct
  source 1..75: mol_type = other DNA
tcgcaactggcgcaggccaccagctcacatacgaccatcgtggaaattgaaaaattcaccggtccgatagaaaag

SEQ ID NO: 149765 - DNA, 75 bp, synthetic construct
  source 1..75: mol_type = other DNA
aaaatcgaacgctcccacggcgggccaggttcgcagaagtatccactgcatctgcaatcggtgcatcctgattat

SEQ ID NO: 149766 - DNA, 75 bp, synthetic construct
  source 1..75: mol_type = other DNA
aagctctggacatgttctatgaagagctggaacgggtgcaaaaaacctatggccccagcgccttactgaccgcca

SEQ ID NO: 149767 - DNA, 75 bp, synthetic construct
  source 1..75: mol_type = other DNA
tagtgctgactcgcgttttatgatcgacgcagacggcactgaagatattccgttgaacaataaacgcgcggtaac

SEQ ID NO: 149768 - DNA, 75 bp, synthetic construct
  source 1..75: mol_type = other DNA
ttggccctcaaacccctatatctcctcaattatattgattatattgatgatgaagattatcgtcggcggatcctg

SEQ ID NO: 149769 - DNA, 75 bp, synthetic construct
  source 1..75: mol_type = other DNA
cgccgcttctttaagatcgcgttaccgcttatcgctccggtgagtttctttctgctggtggttaatctggtgtac

SEQ ID NO: 149770 - DNA, 75 bp, synthetic construct
  source 1..75: mol_type = other DNA
taagtagtttttcaggagaaaccagtggcatagtaaagaaaaattttattattaccgcggcgttgctgagcagtc

SEQ ID NO: 149771 - DNA, 75 bp, synthetic construct
  source 1..75: mol_type = other DNA
gtgccatcaatgtggtgcgccatcgcagtgatgtaaacccacaacgtctggtgctgttcgggcagagtattggcg

SEQ ID NO: 149772 - DNA, 75 bp, synthetic construct
  source 1..75: mol_type = other DNA
tctctatctctccggtacatcacagcgggacagctactattctctgaatgccagttggaacggttcattcactgc

SEQ ID NO: 149773 - DNA, 75 bp, synthetic construct
  source 1..75: mol_type = other DNA
cggtgacgtatggatggaagccgacgagaacctgaacacgcttatcgattatcgttttgaaaaatctttccgtgc

SEQ ID NO: 149774 - DNA, 75 bp, synthetic construct
  source 1..75: mol_type = other DNA
ttatgtttgattatcgcgggtttggtaaatcaaaaggcacgctgtcccaggccggattgctggacgatacgcaaa

SEQ ID NO: 149775 - DNA, 75 bp, synthetic construct
  source 1..75: mol_type = other DNA
gtgctgttcgggcagagtattggcggggcgaatattctggatgttattggtcagggtgatcgtgaaggcatacgt

SEQ ID NO: 149776 - DNA, 75 bp, synthetic construct
  source 1..75: mol_type = other DNA
ttttccggctcagcaatggcaggtttatggaagagccgtgcatctggttcagcggattctgcagccagggggacg

SEQ ID NO: 149777 - DNA, 75 bp, synthetic construct
  source 1..75: mol_type = other DNA
ccgctatcagcccggagccgcacaacacatcagacagcatgcgccgcaggacgaagcgcttcaccgtattgctga

SEQ ID NO: 149778 - DNA, 75 bp, synthetic construct
  source 1..75: mol_type = other DNA
aaaatacagccaggatctggcggcgaaaccacgttggttagtgttcaataagatcgatctgctggataaggcaga

SEQ ID NO: 149779 - DNA, 75 bp, synthetic construct
  source 1..75: mol_type = other DNA
gctgctggtatcgcgtatcaaggtgatggcgcggctggatattgccgaaaagcgcgtaccgcaggatggccgtat

SEQ ID NO: 149780 - DNA, 75 bp, synthetic construct
  source 1..75: mol_type = other DNA
gaacagcaaaaccattgtgctgtggggctccgatttgctgaaaaaccagcaagcgaactggtggtgcccggatca

SEQ ID NO: 149781 - DNA, 75 bp, synthetic construct
  source 1..75: mol_type = other DNA
tatctggggcgcgagcatgtgaagcacattgcggttaacccgcaaactgacgtgccgctgcaactggcgctggcg

SEQ ID NO: 149782 - DNA, 75 bp, synthetic construct
  source 1..75: mol_type = other DNA
actgacgaagaaaaacgcctgctgggaattaccgacgcccgtaccgtcactctgtaccatccgcagggctgcccc

SEQ ID NO: 149783 - DNA, 75 bp, synthetic construct
  source 1..75: mol_type = other DNA
tccagtctgacgggcgtgatggcgcagcggctggttcgcacgctgtgtcccgactgccgccaggccctgcctgcc

SEQ ID NO: 149784 - DNA, 75 bp, synthetic construct
  source 1..75: mol_type = other DNA
tgaggacttttttactctcgcagaagaactgccggaaacggaagatctgctggaaagtgacgacgatgcgccgat

SEQ ID NO: 149785 - DNA, 75 bp, synthetic construct
  source 1..75: mol_type = other DNA
ccgttgccggtcagtccgtccggtcgtgaactgcgcggctatgatgccatgacggcggcttatgcccatgccaga

SEQ ID NO: 149786 - DNA, 75 bp, synthetic construct
  source 1..75: mol_type = other DNA
tggcagtgatacagcactggataaatacgtcgaacgactgacagccagacgcaacggcggacagggtgtttccac

SEQ ID NO: 149787 - DNA, 75 bp, synthetic construct
  source 1..75: mol_type = other DNA
agatatgttcagcgcctgacagcgaaacgtaatggcggacagggtgtttccacgctggcgtggtgccacggagaa

SEQ ID NO: 149788 - DNA, 75 bp, synthetic construct
  source 1..75: mol_type = other DNA
tcttctgccgtaacagcaacagttccgtctcagccaaatgaaggtgcagaggaagtttcaggtcgtcccgtagct

SEQ ID NO: 149789 - DNA, 75 bp, synthetic construct
  source 1..75: mol_type = other DNA
gccaggacgaaggctaagaatcttaaggccataccgctgtcctattttgaagctcatgcggaacttaaagcgacc

SEQ ID NO: 149790 - DNA, 75 bp, synthetic construct
  source 1..75: mol_type = other DNA
taattcatgtcgcccgtcgggaattgcaactcgacgatgacacttaccgcgcctttctggtgcagtgcacaggca

SEQ ID NO: 149791 - DNA, 75 bp, synthetic construct
  source 1..75: mol_type = other DNA
gacgtaatggtggtcagggggtttccacgctgacctggtgttatggggaatcgttgcagattgtgctcgaaacgc

SEQ ID NO: 149792 - DNA, 75 bp, synthetic construct
  source 1..75: mol_type = other DNA
ggcagcctgagttcacagataaaacactctccaggaaacccggggcggttcacattgattacgactggaaagcat

SEQ ID NO: 149793 - DNA, 75 bp, synthetic construct
  source 1..75: mol_type = other DNA
aatgatggaggcgggacgtgtgttaaatcgtacaaacatgactcagattgcatcttataaacgcaataattttaa

SEQ ID NO: 149794 - DNA, 75 bp, synthetic construct
  source 1..75: mol_type = other DNA
gagaaggtgtataaaatctggcagcagatggcagaagacggttttattaccgatggcggtgatgtggcgctggat

SEQ ID NO: 149795 - DNA, 75 bp, synthetic construct
  source 1..75: mol_type = other DNA
ttttaaggggcatgtcacaccacgcgagaagatttacaaaatctggcagcagatgtttcttgacggtttcgtctc

SEQ ID NO: 149796 - DNA, 75 bp, synthetic construct
  source 1..75: mol_type = other DNA
tatgttccagaccatcttgggggcagtgatggtggtcgccggtattatcgtcggcgtggcgaccggctggaccgg

SEQ ID NO: 149797 - DNA, 75 bp, synthetic construct
  source 1..75: mol_type = other DNA
atggcgcgtttaaccacgattcgattgtacggtgtgctgggagcccggtttggccgtgttcacaggctggcggtg

SEQ ID NO: 149798 - DNA, 75 bp, synthetic construct
  source 1..75: mol_type = other DNA
gcgctatcattcaacggctggtggagatccgcgcgcaacaggcaacattacttggcttccctcattatgccgcat

SEQ ID NO: 149799 - DNA, 75 bp, synthetic construct
  source 1..75: mol_type = other DNA
ggttcaggctaccacgacgctgatttataagatctaccgcgaaggctttaccgggctggatctggcttcgtctgc

SEQ ID NO: 149800 - DNA, 75 bp, synthetic construct
  source 1..75: mol_type = other DNA
tcgtcacgctgtttcatgacagctactatctcgactccttctggacgacgataaaattcagcacctttgtcaccg

SEQ ID NO: 149801 - DNA, 75 bp, synthetic construct
  source 1..75: mol_type = other DNA
ccttgcgatgggtaacccggtcgcgcttctttatggtgaacgcgaggttggcggcgccatcatcagtgccggcat

SEQ ID NO: 149802 - DNA, 75 bp, synthetic construct
  source 1..75: mol_type = other DNA
cgttgttcctcggtggggttattcagctgctttcaccgcagccatcaggcatagccagtaaacaaagcgcagata

SEQ ID NO: 149803 - DNA, 75 bp, synthetic construct
  source 1..75: mol_type = other DNA
gcaaggctacccagtgcctctgctttatggtaagcgtcgaatcggcggagcgattatttctgccggaatttatgt

SEQ ID NO: 149804 - DNA, 75 bp, synthetic construct
  source 1..75: mol_type = other DNA
gaactcaaagcgacaagtaaaacatctctggattttagctcatatattattgaggctataagggagaagcttgaa

SEQ ID NO: 149805 - DNA, 75 bp, synthetic construct
  source 1..75: mol_type = other DNA
caaacacctgatttcaacaatactattctggcactggagcagagtggggaactgctgacccgcgtcaccagcgtt

SEQ ID NO: 149806 - DNA, 75 bp, synthetic construct
  source 1..75: mol_type = other DNA
gttatgccacgctttcggggactaacacgccacgtgattttgttgaattcccttcgcaaatcaacgaacactggg

SEQ ID NO: 149807 - DNA, 75 bp, synthetic construct
  source 1..75: mol_type = other DNA
ttgcactccgttatcagtaagcctacgctatggaacacctcgcgttcaggagaagaaaatgacaacaatgaatcc

SEQ ID NO: 149808 - DNA, 75 bp, synthetic construct
  source 1..75: mol_type = other DNA
gagggttggtgcgactgtgataaatgtaagtcgatgatttttcataaagagaaaaatatttatgtttgcctctcc

SEQ ID NO: 149809 - DNA, 75 bp, synthetic construct
  source 1..75: mol_type = other DNA
aagagttacaacaacgcttcgaaaagcaattactacctgactggggaggttatcaggatgccgaggaatgggaaa

SEQ ID NO: 149810 - DNA, 75 bp, synthetic construct
  source 1..75: mol_type = other DNA
ttgcagcattttttcttcttacgccacttattattcttatcttaagaaaactctttggtgatgctgccaacttac

SEQ ID NO: 149811 - DNA, 75 bp, synthetic construct
  source 1..75: mol_type = other DNA
atgaaacgctttccgctatttcttttattcaccctgttcaccctgttcaccctgttcaccctgttcacgctgtcc

SEQ ID NO: 149812 - DNA, 75 bp, synthetic construct
  source 1..75: mol_type = other DNA
tgaaccagcattctggactgtactggagcggatgtatttttccagtgaagatatctttcgtgtatctccgctttt

SEQ ID NO: 149813 - DNA, 75 bp, synthetic construct
  source 1..75: mol_type = other DNA
cctgaatgccctgaaccagtcgagggttggtgcgactgtgataaatgtaagtcgatgatttttcataaagagaaa

SEQ ID NO: 149814 - DNA, 75 bp, synthetic construct
  source 1..75: mol_type = other DNA
gcgcgcgatatgctgcaaatgttactcaatttcctgccagaagttcgtaacaaggtagaagagcagctagttgga

SEQ ID NO: 149815 - DNA, 75 bp, synthetic construct
  source 1..75: mol_type = other DNA
ctgtcaacgatgaacgtaagctggcaatgacggtcatggccgttgatgataaccccgcaaacctgaagcttatcg

SEQ ID NO: 149816 - DNA, 75 bp, synthetic construct
  source 1..75: mol_type = other DNA
ggaattttgtcatcacaaacaaaacacgcttttgcctgtaaccgatgaaagtaagctggcaatgacagtcatggc

SEQ ID NO: 149817 - DNA, 75 bp, synthetic construct
  source 1..75: mol_type = other DNA
gcttacttattggttaatagatgctttttttgctttcaataagtatgactggatgcttgagtcgggagacaatat

SEQ ID NO: 149818 - DNA, 75 bp, synthetic construct
  source 1..75: mol_type = other DNA
ccctggataccgcaaccagtgcgttcttctctcaccgcgacccggcaatggtggaatggctgactggccgcaaac

SEQ ID NO: 149819 - DNA, 75 bp, synthetic construct
  source 1..75: mol_type = other DNA
gtaaggttattaagtgtgcagaacacaaaaaggctttagatgaaaaagcaatcaaacttaagaaaaacgttattg

SEQ ID NO: 149820 - DNA, 75 bp, synthetic construct
  source 1..75: mol_type = other DNA
acaggttgtggatgggactgcagcaaacggagcgtgggcgttgacggagcaaagctacggcaaacatggcgactt

SEQ ID NO: 149821 - DNA, 75 bp, synthetic construct
  source 1..75: mol_type = other DNA
gaatatcaaagggactttcacccaagacaacgggcacctggttttacagggacatcctgtcatccatgcatttaa

SEQ ID NO: 149822 - DNA, 75 bp, synthetic construct
  source 1..75: mol_type = other DNA
acagtaaagttgctggctgtttaatcgcggtttctgaactcacaaaaaagaagaataaaaaaaaggttaaggtac

SEQ ID NO: 149823 - DNA, 75 bp, synthetic construct
  source 1..75: mol_type = other DNA
tttcaataatgaccccgacacagaatagttatccagtcactatcggcgcaggtggggccggtggtgttagtgcaa

SEQ ID NO: 149824 - DNA, 75 bp, synthetic construct
  source 1..75: mol_type = other DNA
taacgggcggcggtggcggagggggcggctgtaaggctatatccaataatgaaacgtttttcggtgctggcggcg

SEQ ID NO: 149825 - DNA, 75 bp, synthetic construct
  source 1..75: mol_type = other DNA
acccggtgcgtctgcacctgcaaaacggcggcagctggcgtcacctggcgctgggcgtggctggctggatgcgtt

SEQ ID NO: 149826 - DNA, 75 bp, synthetic construct
  source 1..75: mol_type = other DNA
atcccgcttaccgtttctcgattgccccgatgcttgactggacggacagacattgccgttatttcttgcgtctgc

SEQ ID NO: 149827 - DNA, 75 bp, synthetic construct
  source 1..75: mol_type = other DNA
gaagcgcgcgggtacgatgaaatcaacctgaatgtcggctgcccgtctgaccgggtacagaacgggatgtttggc

SEQ ID NO: 149828 - DNA, 75 bp, synthetic construct
  source 1..75: mol_type = other DNA
tattcaccctgttcacgctgtccaccgttccggcccaggccgatattatcgatgacaccattggcaatattcagc

SEQ ID NO: 149829 - DNA, 75 bp, synthetic construct
  source 1..75: mol_type = other DNA
tttgttgatggggccgcaggctttggccagttaaccgaggactttaaagttcatggcgaattgcgcgatctgtca

SEQ ID NO: 149830 - DNA, 75 bp, synthetic construct
  source 1..75: mol_type = other DNA
atgccagcagaatcacacactgtttatcccgcttaccgtttctcgattgccccgatgctcgactggacggacaga

SEQ ID NO: 149831 - DNA, 75 bp, synthetic construct
  source 1..75: mol_type = other DNA
tggttgccgactgcgtgaaagcgatgcgcgatgtggtgtcgattccggtgacggtgaaaacgcgtattggcatcg

SEQ ID NO: 149832 - DNA, 75 bp, synthetic construct
  source 1..75: mol_type = other DNA
cagcatggatatcaccgtcacccggaacagtccgactgctcaggcaatgacagccgatgcggaagccgcagtcag

SEQ ID NO: 149833 - DNA, 75 bp, synthetic construct
  source 1..75: mol_type = other DNA
aaagataaaatcacggaccgggaaatggaaattatccgcatgacggcccagggaatgcacctaaatcgattgcca

SEQ ID NO: 149834 - DNA, 75 bp, synthetic construct
  source 1..75: mol_type = other DNA
aatacatctggtctccccatgacgcctacttctataaaggactatctgaactgattgtggatatcgacagattaa

SEQ ID NO: 149835 - DNA, 75 bp, synthetic construct
  source 1..75: mol_type = other DNA
tcaagaagtaatctcatgggctgagagaaatcgattgtatggatttactaatgaatttggcctcgatggtcatat

SEQ ID NO: 149836 - DNA, 75 bp, synthetic construct
  source 1..75: mol_type = other DNA
gcactggcagccagcgacagtcaggagaatccggaagtatgccccacaggagcatgaactccatcgtatcgcgga

SEQ ID NO: 149837 - DNA, 75 bp, synthetic construct
  source 1..75: mol_type = other DNA
cctgcaggcggtgcaaaagcgtaacttctggcaactgcaggctgaaatccaccacaggggacgctactgccatcc

SEQ ID NO: 149838 - DNA, 75 bp, synthetic construct
  source 1..75: mol_type = other DNA
gtacagcatggatatcacggttacccggaacagtccgactggtcaggcaatgacaaccgatgcggaagccgcagt

SEQ ID NO: 149839 - DNA, 75 bp, synthetic construct
  source 1..75: mol_type = other DNA
acgagtacgactggctgacctcagatgacgccgtggatgaggcgcttctcatcaacggatacaccttcaccgaag

SEQ ID NO: 149840 - DNA, 75 bp, synthetic construct
  source 1..75: mol_type = other DNA
atgaactccatcgtatcgcggatgccctgcaggcggtgcagaaacgtaacttctggcaattacaggctgaaatcc

SEQ ID NO: 149841 - DNA, 75 bp, synthetic construct
  source 1..75: mol_type = other DNA
cctgcagtcggtacagaagcgtaacttctggcagttacaggctgaaatcagtcaccggggacgttactgccatcc

SEQ ID NO: 149842 - DNA, 75 bp, synthetic construct
  source 1..75: mol_type = other DNA
ttctggcaactgcaggctgaaatccaccaccggggacgctactgccatccgtacagcatggatatcactgttacc

SEQ ID NO: 149843 - DNA, 75 bp, synthetic construct
  source 1..75: mol_type = other DNA
agcggattctgcagccagggggacggagcctgttttgaagggcgctggcactggcagccagcggcaccccggaaa

SEQ ID NO: 149844 - DNA, 75 bp, synthetic construct
  source 1..75: mol_type = other DNA
atcgaagggccatccacccagtgcctcgccggtaagcgcctggcctatgtcgaaccaaactccgcagcagcgcaa

SEQ ID NO: 149845 - DNA, 75 bp, synthetic construct
  source 1..75: mol_type = other DNA
aatggcaacatcgacattctggtagaaaaacgtgcgctgagtaataccaaagtacagattgaagtgcagatccgt

SEQ ID NO: 149846 - DNA, 75 bp, synthetic construct
  source 1..75: mol_type = other DNA
gtaacgctactggcgcattcttctcacgataaaggactggaattaacgctcaatattaagagcgacgtgcccgat

SEQ ID NO: 149847 - DNA, 75 bp, synthetic construct
  source 1..75: mol_type = other DNA
ctctcgactggcaactggcactgcgccaggctgcaggaaaaaacgatctggcgcgcgatatgctgcaaatgttgc

SEQ ID NO: 149848 - DNA, 75 bp, synthetic construct
  source 1..75: mol_type = other DNA
tgtacgctggatattttaagcgaaacaccgctggaagtggtttatagcccaacgttctccgcgctgcctcctgca

SEQ ID NO: 149849 - DNA, 75 bp, synthetic construct
  source 1..75: mol_type = other DNA
gtactaaagaagaagatttggagccggagctgctggaactgttggacgagatggataatgtagcgcgcgaagcca

SEQ ID NO: 149850 - DNA, 75 bp, synthetic construct
  source 1..75: mol_type = other DNA
gtgagctgcatcgtatcgcggatgccctgcaggcggtccagaaacgtaacttctggcagttacaggctgaaatca

SEQ ID NO: 149851 - DNA, 75 bp, synthetic construct
  source 1..75: mol_type = other DNA
gtgaccttcatcgtatcgcggatgccctgcaggcggttcagaaacgtaacttctggcagttacaggctgaaatca

SEQ ID NO: 149852 - DNA, 75 bp, synthetic construct
  source 1..75: mol_type = other DNA
gtgaactacatcgtatcgcggatgccctgcaggcggtgcagaaacgtaacttctggcagttacaggctgaaatca

SEQ ID NO: 149853 - DNA, 75 bp, synthetic construct
  source 1..75: mol_type = other DNA
tcgcatgagctgcgtacaccgttgaatggcgttattggttttacccgcctgacgttgaaaacagaattaacacca

SEQ ID NO: 149854 - DNA, 75 bp, synthetic construct
  source 1..75: mol_type = other DNA
taaatccgagtttctggcaaatatgtcacacgagctgcgtacaccactgaatggtgttattggctttacccgcct

SEQ ID NO: 149855 - DNA, 75 bp, synthetic construct
  source 1..75: mol_type = other DNA
attacaaaaaattgctgatgctaacatcgatcttctaaataaaaagttagaaagtatttacatagcagacaaaaa

SEQ ID NO: 149856 - DNA, 75 bp, synthetic construct
  source 1..75: mol_type = other DNA
ttcacgggcaagatgctgaacacgaaggaaggcccgattacggtctcggacgaccaagccacggacatcgagttt

SEQ ID NO: 149857 - DNA, 75 bp, synthetic construct
  source 1..75: mol_type = other DNA
gaatttctttaccctcgcagaggaactacctgaaactgaagaccttctggaaagtgacgacgatgtccccatcat

SEQ ID NO: 149858 - DNA, 75 bp, synthetic construct
  source 1..75: mol_type = other DNA
cgattgagcgttccattcacactaaggacaattggtgaggcagaatttgaacagcgtcttaatgcattatggcag

SEQ ID NO: 149859 - DNA, 75 bp, synthetic construct
  source 1..75: mol_type = other DNA
ccggaggaaatcagggagggattattaacgttagagggttttatcacacagttaataacgctgtatgaagatttt

SEQ ID NO: 149860 - DNA, 75 bp, synthetic construct
  source 1..75: mol_type = other DNA
gctttacagtgcacttatgatgatcgtttccggattagcctgggccgcctattccgtcagggggagggcgggcta

SEQ ID NO: 149861 - DNA, 75 bp, synthetic construct
  source 1..75: mol_type = other DNA
ataccaccaagctaagaaagacggcacattagaggcattgccggacgagctgcagccctatgcagagcaggtatt

SEQ ID NO: 149862 - DNA, 75 bp, synthetic construct
  source 1..75: mol_type = other DNA
cttccgcctggggggagcgcgtggtgctgcgactgctggacaaaaaacaggcccgcctgacgctggagcgtctgg

SEQ ID NO: 149863 - DNA, 75 bp, synthetic construct
  source 1..75: mol_type = other DNA
catcaaactgatcaacgctatgctggcagaggcgattaaagaaggcgcttcggatatccacatcgagacatttga

SEQ ID NO: 149864 - DNA, 75 bp, synthetic construct
  source 1..75: mol_type = other DNA
cagtttcagccgtcggtttagcctggtggcatggtgcgaagcgtcgctggagatcctccacgttcatccgctatc

SEQ ID NO: 149865 - DNA, 75 bp, synthetic construct
  source 1..75: mol_type = other DNA
aataaccgcgttgggatgaccttcgcccgtggtctgcgggcgattttacgccaggaccctgatgtcgtgatggtt

SEQ ID NO: 149866 - DNA, 75 bp, synthetic construct
  source 1..75: mol_type = other DNA
agatcctccatgtgcatccgttgtcgctctctgttttgcaggagctgcagcgggggctgaacgcgtcttttacgc

SEQ ID NO: 149867 - DNA, 75 bp, synthetic construct
  source 1..75: mol_type = other DNA
cagcgggactcttccgaagctcgccagctgatggaagatctcggttccgccgaggacttttttaccctcgctgaa

SEQ ID NO: 149868 - DNA, 75 bp, synthetic construct
  source 1..75: mol_type = other DNA
ccagaccccttactcgccttctctacaccaatcttaataccgccagaactgacagtgtttccctgcagtctgtcg

SEQ ID NO: 149869 - DNA, 75 bp, synthetic construct
  source 1..75: mol_type = other DNA
acgccctgctaaatacaaatatacagatgaaaacggtaatgaacagacttggacgggtcagggccgtactcctaa

SEQ ID NO: 149870 - DNA, 75 bp, synthetic construct
  source 1..75: mol_type = other DNA
ctaaagccaaatcgacccgcgctcctcgtccagctaaatacaaatatacagatgaaaacggtaatgagcagactt

SEQ ID NO: 149871 - DNA, 75 bp, synthetic construct
  source 1..75: mol_type = other DNA
ggcgtgctttcttcaccggatgacctggacaaggttgccgaagccgatcttgctgccttgcgtaagaaactggga

SEQ ID NO: 149872 - DNA, 75 bp, synthetic construct
  source 1..75: mol_type = other DNA
tgggtttctaaatatcgtttcattgatccagcgtgtggagagtgactcagaaaaaattgcattaaattgcctgtt

SEQ ID NO: 149873 - DNA, 75 bp, synthetic construct
  source 1..75: mol_type = other DNA
ccaaacccctttcccgcctcgtctacaccaatcttaaaacagcgagaactgacagtgtgtcagcgccaatgatat

SEQ ID NO: 149874 - DNA, 75 bp, synthetic construct
  source 1..75: mol_type = other DNA
ggctactcgagatcgcatgtgagaattacttcgtctacatcaaacgcctttccgccaacgataccggcgcaacag

SEQ ID NO: 149875 - DNA, 75 bp, synthetic construct
  source 1..75: mol_type = other DNA
gcaggttattacccaacaggcgtaaccagtccagatgaccaacttttagaacgccgccgtattgaatatgatctc

SEQ ID NO: 149876 - DNA, 75 bp, synthetic construct
  source 1..75: mol_type = other DNA
ttgggcctgccagtgaaatacttggtgtactcgcatcaaggccaaaaatctctcaaaaggaatatgttattccgg

SEQ ID NO: 149877 - DNA, 75 bp, synthetic construct
  source 1..75: mol_type = other DNA
ttgctcgcaggtctgtttggtagtgccattaccgggatgatggctgccctgcccgtaagttggatccagatgctg

SEQ ID NO: 149878 - DNA, 75 bp, synthetic construct
  source 1..75: mol_type = other DNA
aagccttccgccagaaactgttagaagacggtatcgatcctacagaactactcgcttccgttggttcatcccagc

SEQ ID NO: 149879 - DNA, 75 bp, synthetic construct
  source 1..75: mol_type = other DNA
cgccaccacccagcctacggaaaaagaagaagagtgggatccggcaatctggctggaagaactggctacccttcc

SEQ ID NO: 149880 - DNA, 75 bp, synthetic construct
  source 1..75: mol_type = other DNA
ggccgggcggttatgccctggtatttactgactggcgacaattaccagctttaaccgatgcgtttcaggccagtg

SEQ ID NO: 149881 - DNA, 75 bp, synthetic construct
  source 1..75: mol_type = other DNA
tattgatgccttaatcactgacccgccttacagttcgggcgcgacacacaaggccggacgcaccaaccagggcag

SEQ ID NO: 149882 - DNA, 75 bp, synthetic construct
  source 1..75: mol_type = other DNA
gtcaacgtgcgagcgatgaattagcctccatacaggcggttatcgataagcagcagggcgggtttagcgcgcagc

SEQ ID NO: 149883 - DNA, 75 bp, synthetic construct
  source 1..75: mol_type = other DNA
cgtgctggggggaaaagctcccgtattatggcgtcggttcctttcgatgggaatccctgcttctttagcctcgaa

SEQ ID NO: 149884 - DNA, 75 bp, synthetic construct
  source 1..75: mol_type = other DNA
gttgcatcccctggtgttggcctaccatttacaactggtacaaactatctgcgcagagcaggaacaatacgactc

SEQ ID NO: 149885 - DNA, 75 bp, synthetic construct
  source 1..75: mol_type = other DNA
gtgtggcagcgatatctggctcaggaaaaagtagaagaagactcattgtacgccgcgctttataacttagctggg

SEQ ID NO: 149886 - DNA, 75 bp, synthetic construct
  source 1..75: mol_type = other DNA
caacaaggcgcgtcttgcagcaagcggagtacatgagaagcaatgaggccaaactagcgcagattgccctgataa

SEQ ID NO: 149887 - DNA, 75 bp, synthetic construct
  source 1..75: mol_type = other DNA
tactgactggcgacaactaccagctttaaccgatgcgtttcaggccagtggctttacatggcgcggcattattgc

SEQ ID NO: 149888 - DNA, 75 bp, synthetic construct
  source 1..75: mol_type = other DNA
agcggaatatcgtgtattagtcagtcacctgatcgctacttttgaacaggcattacagcaaatcagtgtaagcag

SEQ ID NO: 149889 - DNA, 75 bp, synthetic construct
  source 1..75: mol_type = other DNA
atgctattttcatgactctactggataacactaatttgatacaactggtcgcagctatcgacccagattatttgg

SEQ ID NO: 149890 - DNA, 75 bp, synthetic construct
  source 1..75: mol_type = other DNA
cctcgatccttttatgtggtcagggacaacgggtgtggctgcactgaaagcaggacgcaaatttattggtataga

SEQ ID NO: 149891 - DNA, 75 bp, synthetic construct
  source 1..75: mol_type = other DNA
ccatgcaaaatatctgaacggcgagaaccttcaccgctttgatgggttcgcgggtgaaaacatggacgcccgttc

SEQ ID NO: 149892 - DNA, 75 bp, synthetic construct
  source 1..75: mol_type = other DNA
gatgacctgaaggccatcagcaaattcaaggatctcacgcctccgcgcttcagcgatgttgtcagccgtcaggat

SEQ ID NO: 149893 - DNA, 75 bp, synthetic construct
  source 1..75: mol_type = other DNA
gcacgctggacctgattgagcggcggcgcgacagcattcatgcgctgttatccacgctgttgctctcccagggga

SEQ ID NO: 149894 - DNA, 75 bp, synthetic construct
  source 1..75: mol_type = other DNA
cgccgaactggatctcgaaggccccgtcttctcgctgcgcggaattgataaccgtagctattattggatcaggga

SEQ ID NO: 149895 - DNA, 75 bp, synthetic construct
  source 1..75: mol_type = other DNA
tggttatctctattcagagggcgagattatttatctcgccggtacgccattcgagcggttactcgatattcaacg

SEQ ID NO: 149896 - DNA, 75 bp, synthetic construct
  source 1..75: mol_type = other DNA
gacatccacattgaaacttatgaaaaaacaatgtcgatccgttttcgcatcgacggcgttttgcggacaatttta

SEQ ID NO: 149897 - DNA, 75 bp, synthetic construct
  source 1..75: mol_type = other DNA
tacaccgcaatatacggtgatgaaaacccgccagtcaccggaaggctgtgagtcaggcaattattactacattgc

SEQ ID NO: 149898 - DNA, 75 bp, synthetic construct
  source 1..75: mol_type = other DNA
atgatgacgctggcggggaaaaatctccgccttttccagccggtccccggaaagagcacaaaggatgtcgccgcc

SEQ ID NO: 149899 - DNA, 75 bp, synthetic construct
  source 1..75: mol_type = other DNA
agtcatcccgtacctttcatgccggtatactgactctgccgagtctggctgaaatacggaaagccgtttgtagcc

SEQ ID NO: 149900 - DNA, 75 bp, synthetic construct
  source 1..75: mol_type = other DNA
aacattttagtctgtatattgatgggtataagcgggttagcaagatgcgagatcaggcgttttgggagcttgttt

SEQ ID NO: 149901 - DNA, 75 bp, synthetic construct
  source 1..75: mol_type = other DNA
cagccaaaagcgaagcgggaaaccaaaaagcctgcggctaaaagcaaaccggcagcgaagaaaagaaccacgaca

SEQ ID NO: 149902 - DNA, 75 bp, synthetic construct
  source 1..75: mol_type = other DNA
gcaagccagaagcaaacagcaccgaaacccagacggcaaagccgccagcccagccaaaagcgaagcgggaaacca

SEQ ID NO: 149903 - DNA, 75 bp, synthetic construct
  source 1..75: mol_type = other DNA
ccacgccagccgtgagccgtcgcagcttgaaatgacggcatacgaaaccatgcttcaccgcctgcgactggataa

SEQ ID NO: 149904 - DNA, 75 bp, synthetic construct
  source 1..75: mol_type = other DNA
cccatgacttacggcgtacagccagcaccttgctacatgaggccgggtacaatactgactggattgagaagagcc

SEQ ID NO: 149905 - DNA, 75 bp, synthetic construct
  source 1..75: mol_type = other DNA
ctttggtgcttggggcgaaaagtggctgcgcggctatcaaatggctgacgttacccgcgatatgcgtcgagctac

SEQ ID NO: 149906 - DNA, 75 bp, synthetic construct
  source 1..75: mol_type = other DNA
tcaggcaaacaagatccgctggcgtatctggagcgtatccgtctggcgatgaaagcgggtaacacaggcctggtg

SEQ ID NO: 149907 - DNA, 75 bp, synthetic construct
  source 1..75: mol_type = other DNA
tcactcaaagtacgtatggcgctcggcaattttttcccactggatgagggggtaaggcgttcttatcacacagcc

SEQ ID NO: 149908 - DNA, 75 bp, synthetic construct
  source 1..75: mol_type = other DNA
atggattgacggggagcatacggatctgattccgttctccccgtcgaagtttgagaagtggatggcgggggaata

SEQ ID NO: 149909 - DNA, 75 bp, synthetic construct
  source 1..75: mol_type = other DNA
tgccattggtgctatgggcactatgaaaatggctttaaaactggtgcttatcactatggttcgtaagggcgaatt

SEQ ID NO: 149910 - DNA, 75 bp, synthetic construct
  source 1..75: mol_type = other DNA
atgcatttctgatatcgcgtaaacattcagtgaaagtcagtaatgttatctgcttgagtggcaccgacggtaaat

SEQ ID NO: 149911 - DNA, 75 bp, synthetic construct
  source 1..75: mol_type = other DNA
atgtttctgaaaacagaacaatttgaatataacggcgtgtctgtcacgctttccgaactgtctgcgctgcagcgt

SEQ ID NO: 149912 - DNA, 75 bp, synthetic construct
  source 1..75: mol_type = other DNA
atggtgacatcagagagtagccagagtagcggcattgttgcggataatggtcaggtttacctcagcggaatgcct

SEQ ID NO: 149913 - DNA, 75 bp, synthetic construct
  source 1..75: mol_type = other DNA
cagcgccgggcgtatcgatgcggtggcatttgtcgagagtatcccattctccgagacgcgtggttatgtgaagaa

SEQ ID NO: 149914 - DNA, 75 bp, synthetic construct
  source 1..75: mol_type = other DNA
gcatttgtcgagagtattccattctccgagacgcgcggttatgtgaagaacgtgctggcttatgacgcttactac

SEQ ID NO: 149915 - DNA, 75 bp, synthetic construct
  source 1..75: mol_type = other DNA
caaccggagcgaccgattttacccgtcaaatggcggcggtggcgtttgccagtgtggcgcggcaggatgctgaaa

SEQ ID NO: 149916 - DNA, 75 bp, synthetic construct
  source 1..75: mol_type = other DNA
tgatggcagctccggtgtgggctgtggtgatgcttctgcggttgcccggcacaccaccacagcccacaccggagc

SEQ ID NO: 149917 - DNA, 75 bp, synthetic construct
  source 1..75: mol_type = other DNA
taccctgcttgggctgggaagcgtgctgatggctaccggtgccgtaacaacagcggtggggttgggaatattaat

SEQ ID NO: 149918 - DNA, 75 bp, synthetic construct
  source 1..75: mol_type = other DNA
aatctcagatgaaaatcttgtgtgaatcaaaaaatgttaataatgttcctgggttgcttttagctctacaaaatg

SEQ ID NO: 149919 - DNA, 75 bp, synthetic construct
  source 1..75: mol_type = other DNA
gctatatcattaattagtatttttattatgtctggttgtgctgtgcataatgatgagacaagtatcggtaaattt

SEQ ID NO: 149920 - DNA, 75 bp, synthetic construct
  source 1..75: mol_type = other DNA
aatcccgtaggaggaagtatgtgggtcgacattgaggctccggaaggagtgacggagaaggattatcaattcctg

SEQ ID NO: 149921 - DNA, 75 bp, synthetic construct
  source 1..75: mol_type = other DNA
atggttcgcggtgctggcttgaaactagaacgtgaaattctaaaacaaatcgttactgaagtaccacataaagat

SEQ ID NO: 149922 - DNA, 75 bp, synthetic construct
  source 1..75: mol_type = other DNA
aaaattaataatataattaaagaatgtaagattggtattcatgatatatcaaggacagagttggatgatcatagt

SEQ ID NO: 149923 - DNA, 75 bp, synthetic construct
  source 1..75: mol_type = other DNA
atggttagcggctttgttatcatgctatcaacagaaaaagataaatcatctttatcttttgccattaaaagaatc

SEQ ID NO: 149924 - DNA, 75 bp, synthetic construct
  source 1..75: mol_type = other DNA
ggatactggagtgtgcacctcaatctgaggtcctgttttttattgttatttattcaataatgaatcttcaaaaat

SEQ ID NO: 149925 - DNA, 75 bp, synthetic construct
  source 1..75: mol_type = other DNA
cgaaacattttcatcccctcaattattaagcaaagctattgtaattcaggaaaacaaggggacaaataatattaa

SEQ ID NO: 149926 - DNA, 75 bp, synthetic construct
  source 1..75: mol_type = other DNA
tatatgcccagaaaaggtagcagaatacctaagcgagttcagcggaaaacatttcctcgatgtatataattatta

SEQ ID NO: 149927 - DNA, 75 bp, synthetic construct
  source 1..75: mol_type = other DNA
ggataagttcgacaagaaacgctatatgttactggcaattactgatcttgaccctccatctccgaacagcttttg

SEQ ID NO: 149928 - DNA, 75 bp, synthetic construct
  source 1..75: mol_type = other DNA
atgtatgaagaattttaagacggatatctatttcgtctccacgttcgaaccgtcaacaaaatcggtcgatttgct

SEQ ID NO: 149929 - DNA, 75 bp, synthetic construct
  source 1..75: mol_type = other DNA
tgaacagcatctggcagcagacttcgagcagtcatgggatgatcctgtttgggtctgcggtagcaatggaagtgg

SEQ ID NO: 149930 - DNA, 75 bp, synthetic construct
  source 1..75: mol_type = other DNA
caactggttgctgcggagagtgtgttgtctggtggagtaatcaccgagggcaaagtccgtacactggcccagctt

SEQ ID NO: 149931 - DNA, 75 bp, synthetic construct
  source 1..75: mol_type = other DNA
ggcaatagtactgatttagctgaactttaccggaactggcgcgggcacgacccgaagattgagccgatgctggat

SEQ ID NO: 149932 - DNA, 75 bp, synthetic construct
  source 1..75: mol_type = other DNA
ttactatggtgatcataccaatgggatcgcctggcgtttaatctctcagggcgagatgtatcttactgacaatat

SEQ ID NO: 149933 - DNA, 75 bp, synthetic construct
  source 1..75: mol_type = other DNA
gctcctgcatgagagacgttaacttgtggggatgcccttatcgaatgaagtgccaagcattgaaaccctgtgagc

SEQ ID NO: 149934 - DNA, 75 bp, synthetic construct
  source 1..75: mol_type = other DNA
gcaactctggttattttgaaacgctggtactgcgcgctgattaaattaaccgggcaaactcatcccatctatctg

SEQ ID NO: 149935 - DNA, 75 bp, synthetic construct
  source 1..75: mol_type = other DNA
tgggcaaacacatcccatctatctgactacagatgtcgtacgtagcgcaatggatactctgagtgcagcttcccg

SEQ ID NO: 149936 - DNA, 75 bp, synthetic construct
  source 1..75: mol_type = other DNA
ctgtttgggtctgcggcagcaatggtagtggctggttacgtggtaatggcaaaaataaattacgctttgatgaaa

SEQ ID NO: 149937 - DNA, 75 bp, synthetic construct
  source 1..75: mol_type = other DNA
ggcgtcatttgctgacggtctatttgaagatgttgctgccgcctttgaagaaatccgcaccgcagaaggaccaga

SEQ ID NO: 149938 - DNA, 75 bp, synthetic construct
  source 1..75: mol_type = other DNA
atttggcctgacgaatgccaacgaaccctgtacacacgcctggatggaaaatggcaaacgctaccaagttaacta

SEQ ID NO: 149939 - DNA, 75 bp, synthetic construct
  source 1..75: mol_type = other DNA
cctgcgtgccgttgacatcgatgatcaacgaggcgacgtctcatctggatgttggtcaacaacggctaaatctga

SEQ ID NO: 149940 - DNA, 75 bp, synthetic construct
  source 1..75: mol_type = other DNA
tggctggtgtatacggtacgttgctggaagacaacaacctcagttatagcgtgcaaaccggctatgccgggggag

SEQ ID NO: 149941 - DNA, 75 bp, synthetic construct
  source 1..75: mol_type = other DNA
ggatcgttatcgtgcttttaatttcggtatcgggaaaaatatgggggcactgggcgctctgtctgtggatatgac

SEQ ID NO: 149942 - DNA, 75 bp, synthetic construct
  source 1..75: mol_type = other DNA
taacagtagcgacagttcatcaggtagcaaaaataaatggcagcatatcaatacctggcttgagcgagacataat

SEQ ID NO: 149943 - DNA, 75 bp, synthetic construct
  source 1..75: mol_type = other DNA
accagcgaaacacacaatgcttgcatattcgtaagcatcgtttggctgttttttttgtccggctcgttgtcgcct

SEQ ID NO: 149944 - DNA, 75 bp, synthetic construct
  source 1..75: mol_type = other DNA
ggctatggcaatgccaatattggttatagccatagtgatgatattaaacagttttattacggtatcagcggtggc

SEQ ID NO: 149945 - DNA, 75 bp, synthetic construct
  source 1..75: mol_type = other DNA
ggaggtgggcagcaacgggacgctggatgtgcacaacggaggagtgctccgtggcacgaccattttgctggataa

SEQ ID NO: 149946 - DNA, 75 bp, synthetic construct
  source 1..75: mol_type = other DNA
tcagaagagaagagttgctcttctgagcactcacgcaagaagtatatcgtcttgcatgtcatatgcaatattaaa

SEQ ID NO: 149947 - DNA, 75 bp, synthetic construct
  source 1..75: mol_type = other DNA
cggtaatgccagtggtaattttttgctggatattcaaaacaccggtcgggagccggtatccgcaggtattccact

SEQ ID NO: 149948 - DNA, 75 bp, synthetic construct
  source 1..75: mol_type = other DNA
gagtcagacagcaaccggaagttacagtggaagacgccatcagaaccggtgcttttgtggtggcgatgtccctgt

SEQ ID NO: 149949 - DNA, 75 bp, synthetic construct
  source 1..75: mol_type = other DNA
gatctcgtcagaaccggcgcttttctggtagcgatgtccctgtggcataaccatccgcagaagacaaagatgccg

SEQ ID NO: 149950 - DNA, 75 bp, synthetic construct
  source 1..75: mol_type = other DNA
gctcctttctgatctggcaaaaatcatggctcagatgtccatgatgcaggcagttaaggggattggttcggcgtt

SEQ ID NO: 149951 - DNA, 75 bp, synthetic construct
  source 1..75: mol_type = other DNA
cagcattcaactgattggtattggtaatgagttgggagagtttgatttttacagacaaatttatcctgtgacagg

SEQ ID NO: 149952 - DNA, 75 bp, synthetic construct
  source 1..75: mol_type = other DNA
gctaatactcaggagattttgctggagagggatattcagcgtactcttgctaacacctttcctaatgaacatccg

SEQ ID NO: 149953 - DNA, 75 bp, synthetic construct
  source 1..75: mol_type = other DNA
tggctaactaatcagcaaagcggctgtagtgttcttattgttcgccatggattatcagaatctggagaacagtag

SEQ ID NO: 149954 - DNA, 75 bp, synthetic construct
  source 1..75: mol_type = other DNA
ccgcaattccggcggtaatggcttataaccgcctcaaccagcgcgtaaacaaactggaactgaattacgacaact

SEQ ID NO: 149955 - DNA, 75 bp, synthetic construct
  source 1..75: mol_type = other DNA
taccggttcacttatatggtctattgtgcaatatgccagaaattagtgcaatcgcaagaaaatataatctgttga

SEQ ID NO: 149956 - DNA, 75 bp, synthetic construct
  source 1..75: mol_type = other DNA
cgcacgtttggcatttatttgtagtaagaatcgctaatcgtgaaaaattccagtcatacttattagagaagggta

SEQ ID NO: 149957 - DNA, 75 bp, synthetic construct
  source 1..75: mol_type = other DNA
cctatttacaataatagagaaggtgtgggatatttatcaattttcaataaactacactcttcaaaattttgggcg

SEQ ID NO: 149958 - DNA, 75 bp, synthetic construct
  source 1..75: mol_type = other DNA
ccgtgttccggctattattaaatatggtaaacatcttccacagggaatggtttcagatacgcctgtttatggtct

SEQ ID NO: 149959 - DNA, 75 bp, synthetic construct
  source 1..75: mol_type = other DNA
tgatcggccttgcagtttgcacagggaatgcttttaatccagccgtagccgccgagactaaacaacccaatttag

SEQ ID NO: 149960 - DNA, 75 bp, synthetic construct
  source 1..75: mol_type = other DNA
ttcgcccgctttagccagaacccggcttaccacacccaactgtcacagccgatcgaaaccgtgatgctggcgctc

SEQ ID NO: 149961 - DNA, 75 bp, synthetic construct
  source 1..75: mol_type = other DNA
cctggaccttcaccctgcgtgatgacgtgaaattctccaacggcgaaccgtttgatgcagaggcggcggcagaaa

SEQ ID NO: 149962 - DNA, 75 bp, synthetic construct
  source 1..75: mol_type = other DNA
cactcatgatagaaacaatatttttaaatgagaaaggaaccttcattaaatttaacaaagtagacgacaaactta

SEQ ID NO: 149963 - DNA, 75 bp, synthetic construct
  source 1..75: mol_type = other DNA
tagctaaaaaatatattgaagaaatcaagaatccactaatttcactgcctgtaattgctggcaatgaaatgtctc

SEQ ID NO: 149964 - DNA, 75 bp, synthetic construct
  source 1..75: mol_type = other DNA
tgggtcacaccaaaaatatgtaaatcaatatattggtgtgaatagtcgattagatgaaattcaagcagctatgct

SEQ ID NO: 149965 - DNA, 75 bp, synthetic construct
  source 1..75: mol_type = other DNA
aattattgcaattacagaaaataatctggtgcctgtatttgttgagccggattataatacttataatttagatcc

SEQ ID NO: 149966 - DNA, 75 bp, synthetic construct
  source 1..75: mol_type = other DNA
cacccatccatgcagaaaatacactcattacattacactataaaaaagaaatcatttccttatttctggaaacca

SEQ ID NO: 149967 - DNA, 75 bp, synthetic construct
  source 1..75: mol_type = other DNA
gtatggtaagtttttaaaatataaaactgatattgataatgattctctaatgaaagccggtaatgctgccaactt

SEQ ID NO: 149968 - DNA, 75 bp, synthetic construct
  source 1..75: mol_type = other DNA
ttatggctcaagcaaaaagtataaccatatctataaaggagttaacagccgtcttgatgaactacaggcggcaat

SEQ ID NO: 149969 - DNA, 75 bp, synthetic construct
  source 1..75: mol_type = other DNA
cgccagtatggtcgccagttgaatatcgtgcttgcactgttgctggtctattgcgcggtacgcattttctattaa

SEQ ID NO: 149970 - DNA, 75 bp, synthetic construct
  source 1..75: mol_type = other DNA
agtattagcaataactgaaaataatctggtgcctgtattaactgagccagatcctttaacatttaacttaagtgc

SEQ ID NO: 149971 - DNA, 75 bp, synthetic construct
  source 1..75: mol_type = other DNA
tgaagcaggcaacactgcaaatggtggctcccggtatcgcagaagcgttgattgccacggcaatcggtctgttcg

SEQ ID NO: 149972 - DNA, 75 bp, synthetic construct
  source 1..75: mol_type = other DNA
aagagcttggaaggaaatggggaaaataaaggatggtgatgaggttattgtgcaagcaaatacctacatagcatc

SEQ ID NO: 149973 - DNA, 75 bp, synthetic construct
  source 1..75: mol_type = other DNA
gaactatggctcaaataagaaatatgaaaacatatataaaggattaaatagtcggttggatgaaatgcaggctgc

SEQ ID NO: 149974 - DNA, 75 bp, synthetic construct
  source 1..75: mol_type = other DNA
ttgattgtaatgctgctgtgcgcggggatttcgttttcactggcggtgatcgacccggctgcggtacgtctgcta

SEQ ID NO: 149975 - DNA, 75 bp, synthetic construct
  source 1..75: mol_type = other DNA
cctgtgatgaagcgccccgggcggaggataaatgctacaccaaagggcgacttcgggatgagttcaggatgaagc

SEQ ID NO: 149976 - DNA, 75 bp, synthetic construct
  source 1..75: mol_type = other DNA
cagactgctgccgcacatagcgatccggttgactggcagaacgctattgctgtatatcatctgaaactgctgcag

SEQ ID NO: 149977 - DNA, 75 bp, synthetic construct
  source 1..75: mol_type = other DNA
tcttaggtatcactttaactcacaggtgtccagtaaatatgaacaggatcccagtaatcattatcaatggtttcc

SEQ ID NO: 149978 - DNA, 75 bp, synthetic construct
  source 1..75: mol_type = other DNA
gaataaaagatatgagtccttatgatgccattcgtgattttacgatggaataccctacacacatatatgatttgg

SEQ ID NO: 149979 - DNA, 75 bp, synthetic construct
  source 1..75: mol_type = other DNA
tatcagtgagcaggctctctgcggcgcaccattatggacagatgtggcgcggcaactgcgtcatgctatcggggg

SEQ ID NO: 149980 - DNA, 75 bp, synthetic construct
  source 1..75: mol_type = other DNA
gtgcatggtatcagtgagcaggctctctgcggcgcaccatcatggacagatgtggcgcggcaactgcgtcatgct

SEQ ID NO: 149981 - DNA, 75 bp, synthetic construct
  source 1..75: mol_type = other DNA
cgccatcgaggcgcaggccgctgccgtgcatggtatcgatgagccggcactcagcggcgcaccatcctggccaga

SEQ ID NO: 149982 - DNA, 75 bp, synthetic construct
  source 1..75: mol_type = other DNA
ggcctgcgtctttccgtcctgtcccggcttaacagcaccagtggccggatggcacggcgggcacacgactggctg

SEQ ID NO: 149983 - DNA, 75 bp, synthetic construct
  source 1..75: mol_type = other DNA
gatgtttatttagtatgcacgggagctactcaagattatcgattccctggatattttaatgaattgatggttttg

SEQ ID NO: 149984 - DNA, 75 bp, synthetic construct
  source 1..75: mol_type = other DNA
ttggtaatgagcagggggagtttgatttttacagacaagtttatccagtgacaggtggagagcaccaggttgaag

SEQ ID NO: 149985 - DNA, 75 bp, synthetic construct
  source 1..75: mol_type = other DNA
tggtttatcagaatctggagagcagcagtattcaatgatacatatgcgcccaagagatggtaacgatttcataga

SEQ ID NO: 149986 - DNA, 75 bp, synthetic construct
  source 1..75: mol_type = other DNA
cagtaaaaaagatatcacccgtctgggctttcgttcgtcgctgctgcaagcgagctttaactacgaaaggatgca

SEQ ID NO: 149987 - DNA, 75 bp, synthetic construct
  source 1..75: mol_type = other DNA
ggtaaacatctaccacagggaatggtttcagatacacccgtttatggtctggactggatgcctactttagcgaaa

SEQ ID NO: 149988 - DNA, 75 bp, synthetic construct
  source 1..75: mol_type = other DNA
gacgaccctggttgccggaattgtgttgatcaaatccggtactcgtaaagcacgtaaacctgcacaggagatgaa

SEQ ID NO: 149989 - DNA, 75 bp, synthetic construct
  source 1..75: mol_type = other DNA
atgaatgaaatacgtagtaaccctgtaaaatttctggaagagcatttaattcttaatccacagcgctatgcccat

SEQ ID NO: 149990 - DNA, 75 bp, synthetic construct
  source 1..75: mol_type = other DNA
tacgaaaggatgcaggcgggcggttttacctgggcgatgttgccgatcctgaaaaagatttataaggacgacaaa

SEQ ID NO: 149991 - DNA, 75 bp, synthetic construct
  source 1..75: mol_type = other DNA
tagtattcggcattggtctgatgctggtactgacaacgaccgcaggttcagacacattcactgcattagcaatgc

SEQ ID NO: 149992 - DNA, 75 bp, synthetic construct
  source 1..75: mol_type = other DNA
caacggtcaatattaaaacaaatagaaaaatatagtgatttcccttatgttgttaattattatagaaataggctt

SEQ ID NO: 149993 - DNA, 75 bp, synthetic construct
  source 1..75: mol_type = other DNA
tggacccacgtcggttattcagtcggcgtgaaggcgatcgataaagtgcgagagaactcgcagatgattgcccgt

SEQ ID NO: 149994 - DNA, 75 bp, synthetic construct
  source 1..75: mol_type = other DNA
gccagccagggaaacctgctggggccgattctatttttcgccgtttacctgcttatctttttcctgcgcgtcggc

SEQ ID NO: 149995 - DNA, 75 bp, synthetic construct
  source 1..75: mol_type = other DNA
acttcctgcgggtgaaaaaagcgcatccggtgctgttaatcggcgtgacgtttgttctttctattgtttgttctg

SEQ ID NO: 149996 - DNA, 75 bp, synthetic construct
  source 1..75: mol_type = other DNA
gcagcggcgcttaatcgtccactggttgcactgtatggcccgagcagcccggacttcacaccgccgctttcccat

SEQ ID NO: 149997 - DNA, 75 bp, synthetic construct
  source 1..75: mol_type = other DNA
tccggcaaaacgctggccgcactaccactacgcggaactggcgaaacagctcattgatgaaggttatcaggtggt

SEQ ID NO: 149998 - DNA, 75 bp, synthetic construct
  source 1..75: mol_type = other DNA
gcggcggcgctcaatcgtccgctggttgccctgtatggaccaagcagcccggacttcacaccaccgctatcccat

SEQ ID NO: 149999 - DNA, 75 bp, synthetic construct
  source 1..75: mol_type = other DNA
cggagacgacggcagcagcatggccgccggttttatgcagtgggagaacgcattcttcccgtggaccctgaacta

SEQ ID NO: 150000 - DNA, 75 bp, synthetic construct
  source 1..75: mol_type = other DNA
tcggcaccgttaacggcatcagcctccgttaacgtgtcagccgataaaacggagagtcagcgtattcgtgaaact

SEQ ID NO: 150001 - DNA, 75 bp, synthetic construct
  source 1..75: mol_type = other DNA
cagagcttgatcgacattactccccagcgcgtactggaagaactcaacgctctattgttacaagaggaagcctga

SEQ ID NO: 150002 - DNA, 75 bp, synthetic construct
  source 1..75: mol_type = other DNA
ggtatttctgtttcgaagcacgagaatttctcgaaactggagatgaggccgcgcgcttagctggtaacgcacctt

SEQ ID NO: 150003 - DNA, 75 bp, synthetic construct
  source 1..75: mol_type = other DNA
tgaccggcgacaacggcgcgggaaaatcgacactgttacgcatcatggcgggtcttcttcccccatcttccggta

SEQ ID NO: 150004 - DNA, 75 bp, synthetic construct
  source 1..75: mol_type = other DNA
attcataactgtgcggtgctgggattatttgctctggaaaacattaccatggcagaaatgttcggctgtaaaaac

SEQ ID NO: 150005 - DNA, 75 bp, synthetic construct
  source 1..75: mol_type = other DNA
cctacgtcttacccaactccttcaaatccgcgttagtgcctttcttcgcggggatccctcatcgcaccggctggc

SEQ ID NO: 150006 - DNA, 75 bp, synthetic construct
  source 1..75: mol_type = other DNA
acgtgatggcaccggcctggtgccgtccgttattatcgcggatgccggaagttaacgaagccatccctatgcccc

SEQ ID NO: 150007 - DNA, 75 bp, synthetic construct
  source 1..75: mol_type = other DNA
ctgggaacggcaaagccgctggaagaatatctacaggattacgaaataaaaaaggctaccttcggcttgccctga

SEQ ID NO: 150008 - DNA, 75 bp, synthetic construct
  source 1..75: mol_type = other DNA
attggtaagcgcggcatgacgtatgcgcaaggcatggcggcacaaatgacggcggcagtgtctatcggccttgcc

SEQ ID NO: 150009 - DNA, 75 bp, synthetic construct
  source 1..75: mol_type = other DNA
cgcctggattgccccctaccgttcaacgcgcgattaaacgggcacaaaatcatctggagaaatatctgcgcaaac

SEQ ID NO: 150010 - DNA, 75 bp, synthetic construct
  source 1..75: mol_type = other DNA
cgtccggcacgacagaaattagccagcaggataaatatgtcactcagaggattgctaaagccttggctctggtgg

SEQ ID NO: 150011 - DNA, 75 bp, synthetic construct
  source 1..75: mol_type = other DNA
ggttaaacaatttttcgaatttaatattcttagtagcctcgaacactatctatgcgaagagatattctatgttaa

SEQ ID NO: 150012 - DNA, 75 bp, synthetic construct
  source 1..75: mol_type = other DNA
cattcacatgtctaattttgattatgcttacaggatgttgaagtcggatttacactgtaacggtaaggacattga

SEQ ID NO: 150013 - DNA, 75 bp, synthetic construct
  source 1..75: mol_type = other DNA
tttctgaatatgacttgaacgaaatattgaatgccagtcaagataataagttagttctttttattggtgctggtt

SEQ ID NO: 150014 - DNA, 75 bp, synthetic construct
  source 1..75: mol_type = other DNA
gtttaccatcaccgaatgcgatgaatcgacaccggtaacggcgtccgttcctgccagcgcgcctgccgataaaac

SEQ ID NO: 150015 - DNA, 75 bp, synthetic construct
  source 1..75: mol_type = other DNA
gcgaaaccatgatcgctaaagcaggcgacgtgatgtttatcccgaaaggctccagcatcgaatttggtacgacat

SEQ ID NO: 150016 - DNA, 75 bp, synthetic construct
  source 1..75: mol_type = other DNA
tcgaccccggtaacggcgtccgttcccgccagcgtgccagccgataaaaccgaaagccagcgcatccgcgaaacc

SEQ ID NO: 150017 - DNA, 75 bp, synthetic construct
  source 1..75: mol_type = other DNA
tgacggcagtacccgcgcggatcaccccggccccctcgggagaacgactgaacatcgaatactttccacccacgc

SEQ ID NO: 150018 - DNA, 75 bp, synthetic construct
  source 1..75: mol_type = other DNA
ttgctgtatgtcttgtctccccgcttacccgggcagctgatctgggtacatggggcgacctgtggcccatacagg

SEQ ID NO: 150019 - DNA, 75 bp, synthetic construct
  source 1..75: mol_type = other DNA
gaaagccgtataccagcaggttatcagtaaataccctggtactgatggcgctaaacaggcgcaaaaacgtctgaa

SEQ ID NO: 150020 - DNA, 75 bp, synthetic construct
  source 1..75: mol_type = other DNA
agtttgcacgtgatgccatacccgataaagacacgcggggcggcgaggtgtatctcctttccggcccgacgatta

SEQ ID NO: 150021 - DNA, 75 bp, synthetic construct
  source 1..75: mol_type = other DNA
ggtggaaatcgccacaattgcgcatatcgccaagcgagaccgcgatgaaactttcactctcacctcccccttatg

SEQ ID NO: 150022 - DNA, 75 bp, synthetic construct
  source 1..75: mol_type = other DNA
tccccctggccagcgcccgcctgctgtcagacaaagtctcccgtgagctttatccggtggtgcatgttggggatg

SEQ ID NO: 150023 - DNA, 75 bp, synthetic construct
  source 1..75: mol_type = other DNA
ttccttcacaactgttattacctgatgcgccgcgtcaggggattatcgttaaccttgccgagctgcgtctttatt

SEQ ID NO: 150024 - DNA, 75 bp, synthetic construct
  source 1..75: mol_type = other DNA
ctctactctaatctcgaagagctgacgcgaatggcgaaaatggtcagcgatatgctgtttctcgcccaggccgat

SEQ ID NO: 150025 - DNA, 75 bp, synthetic construct
  source 1..75: mol_type = other DNA
tgccagactaccgatcgccaggtacaggttaccgtcgaaaaccccggtacgcccattccgcccgaacacttaccg

SEQ ID NO: 150026 - DNA, 75 bp, synthetic construct
  source 1..75: mol_type = other DNA
cgttttcgctggcaacccgcctgaccttttttatcagcctggccaccatcgcggcgtttttcgcctttgcctgga

SEQ ID NO: 150027 - DNA, 75 bp, synthetic construct
  source 1..75: mol_type = other DNA
atagtgaaatcaattgttgtcgcgcataaaggcacggttgcggtaacgtcggaagcgcaggggacaaggtttatt

SEQ ID NO: 150028 - DNA, 75 bp, synthetic construct
  source 1..75: mol_type = other DNA
ccaacagtaaatctcaatggtagtgcatttttttgcaatctccttctgacgctattttttgtcgccatctgtcat

SEQ ID NO: 150029 - DNA, 75 bp, synthetic construct
  source 1..75: mol_type = other DNA
gaacaacacgacgcgattcatgcccggaaagcattactttaaaattgaaaaaaacgaattacgcgagtttaagaa

SEQ ID NO: 150030 - DNA, 75 bp, synthetic construct
  source 1..75: mol_type = other DNA
atgcagtttaaggtttatgcctataaaagagagagccgctatcgtctgttcgtggatgtgcagagtgacatcatc

SEQ ID NO: 150031 - DNA, 75 bp, synthetic construct
  source 1..75: mol_type = other DNA
atagtgaaatcaattgttgtcgcgcataaaggcacggttgcagtaacttcagatgcgcgcggaacaaggtttgtt

SEQ ID NO: 150032 - DNA, 75 bp, synthetic construct
  source 1..75: mol_type = other DNA
gtggcggtaataatagcggcccaaattcagagctgaacatttaccagtacggtggcggtaactctgcacttgctc

SEQ ID NO: 150033 - DNA, 75 bp, synthetic construct
  source 1..75: mol_type = other DNA
ttgcagcaatcgtattttccggtagcgctctggcaggtgttgttcctcagtacggcggcggcggtaaccacggtg

SEQ ID NO: 150034 - DNA, 75 bp, synthetic construct
  source 1..75: mol_type = other DNA
attatgcttacgaaagcgaccttaaagacgccattgaattaatggagaacttcaactctattaaaaatagtgaca

SEQ ID NO: 150035 - DNA, 75 bp, synthetic construct
  source 1..75: mol_type = other DNA
tcttgccttagttgccattcctgaggttttcgccggttgcagcatttcgggaaatgggggaaatccggcaaaaat

SEQ ID NO: 150036 - DNA, 75 bp, synthetic construct
  source 1..75: mol_type = other DNA
ctttaaaagcacgttacatcaaaacgggtagcgttaaaagtggtcgcgttaattctgtcgctaccttcgaagtgt

SEQ ID NO: 150037 - DNA, 75 bp, synthetic construct
  source 1..75: mol_type = other DNA
gcaacaatgtaatggtatttgattcagactatacagccattcaaaaaacgacgttgaatcaaaatattactattc

SEQ ID NO: 150038 - DNA, 75 bp, synthetic construct
  source 1..75: mol_type = other DNA
gcagtctggagtttgagcagtaccactgcaatattcgctgttcagggcggaatgatgggaactggatgggcggat

SEQ ID NO: 150039 - DNA, 75 bp, synthetic construct
  source 1..75: mol_type = other DNA
tcaggttgcgggcgatccgctgatgctgcgtcgggcattaagcaacctgctttctaatgccctgcgttatacgcc

SEQ ID NO: 150040 - DNA, 75 bp, synthetic construct
  source 1..75: mol_type = other DNA
tggaaacgcgtgtggggcagaaaatccctaacccaacctggacgcctactgcaggcattcgtcaacgttcgctgg

SEQ ID NO: 150041 - DNA, 75 bp, synthetic construct
  source 1..75: mol_type = other DNA
ctgcgtgacgaactggagctggtgaaaggcgcgtctaatgagttcgacaaagagctgttccttgcgggcgaaatc

SEQ ID NO: 150042 - DNA, 75 bp, synthetic construct
  source 1..75: mol_type = other DNA
caatttattctgctggcgggagtcgggcatgcgacgctgaatgaaggggtaacggcgaaaatccatcagactaat

SEQ ID NO: 150043 - DNA, 75 bp, synthetic construct
  source 1..75: mol_type = other DNA
gtttgtgtggatgactaaactcgaatgggcgataggtgcggtagtgctggtgatcatcagcctgcttgcgactct

SEQ ID NO: 150044 - DNA, 75 bp, synthetic construct
  source 1..75: mol_type = other DNA
ggggtaattggcggcttagtaaatggcgcaagatctatttttatcgacgatctgccgattgtaaatgaagacggt

SEQ ID NO: 150045 - DNA, 75 bp, synthetic construct
  source 1..75: mol_type = other DNA
acggcagttggggactatcgtaatgtgatactgaattgggtcaatccagattcggtagaccttgatcacattaat

SEQ ID NO: 150046 - DNA, 75 bp, synthetic construct
  source 1..75: mol_type = other DNA
gttctgatgaaaacaatgtatcgaactggcaatcggcgcgtgtaaccgaagagcaatacgaaatcgttaatgttg

SEQ ID NO: 150047 - DNA, 75 bp, synthetic construct
  source 1..75: mol_type = other DNA
ctgtatggatgatgagtcgagtcagttattgtacagtttggtccatgagaatgttagtggttgggtacgaggatt

SEQ ID NO: 150048 - DNA, 75 bp, synthetic construct
  source 1..75: mol_type = other DNA
cgaagacgtgaagagtgggggactaataaaatcaatctcaccccaggtgcttgtactcatatagtgaacattctg

SEQ ID NO: 150049 - DNA, 75 bp, synthetic construct
  source 1..75: mol_type = other DNA
gacaggcaaaattacgtcttctgaacttggccaggctttacttgaggaaatcgactcaaaagtatctcaggaggc

SEQ ID NO: 150050 - DNA, 75 bp, synthetic construct
  source 1..75: mol_type = other DNA
tctgacgaaatattcaaggaactattaaatacaagccgtgcagaagttatctggatctctgtggaaaaagttttg

SEQ ID NO: 150051 - DNA, 75 bp, synthetic construct
  source 1..75: mol_type = other DNA
ggtcccgcttatattcaataccaggcagaagacagcaaggcaaggaatcaacgagtaaattatcttttaggtgat

SEQ ID NO: 150052 - DNA, 75 bp, synthetic construct
  source 1..75: mol_type = other DNA
gcggctggtgaagacgatgtgattttttgtgatccgccgtatgaaccgcttccggatacagagggatttaccagc

SEQ ID NO: 150053 - DNA, 75 bp, synthetic construct
  source 1..75: mol_type = other DNA
tacctctattaattgcaggttcaggtggcaaaaaaagtagcaaaagctctagtcgcacaccagttgaagcagacg

SEQ ID NO: 150054 - DNA, 75 bp, synthetic construct
  source 1..75: mol_type = other DNA
ggaccaacctacatccagtatcaatctgaagacagtaaagccaggaaccagcgggttaattacctattgaaagac

SEQ ID NO: 150055 - DNA, 75 bp, synthetic construct
  source 1..75: mol_type = other DNA
gcaagttcgtggattggcattcaattcactgatcgacttcacgatcccgcaaccattctggcaaattaataattc

SEQ ID NO: 150056 - DNA, 75 bp, synthetic construct
  source 1..75: mol_type = other DNA
agagagcctgaaagaagagtctgacagtgtttttatgcgggtgattaaagaaagcctctggcaggaactggcgga

SEQ ID NO: 150057 - DNA, 75 bp, synthetic construct
  source 1..75: mol_type = other DNA
atgaacaagattgctcaatattaccgtgaactggtcgcgtcactgagcgaacgcctgcgcaatggcgaacgtgat

SEQ ID NO: 150058 - DNA, 75 bp, synthetic construct
  source 1..75: mol_type = other DNA
tggctacacaataacaagggaagactcactcgtggctgcaaccctgcttactcaaaatctattcacacatggtta

SEQ ID NO: 150059 - DNA, 75 bp, synthetic construct
  source 1..75: mol_type = other DNA
ctgaatacggcgacgctggtcaaggataagattgccgaattccagcggaacatgccgcagggatacgacatcgca

SEQ ID NO: 150060 - DNA, 75 bp, synthetic construct
  source 1..75: mol_type = other DNA
taccgcttcttattgccggtgctggtggcaagaaaagtaaaagctccagccgtaccccggttgaagctgatgata

SEQ ID NO: 150061 - DNA, 75 bp, synthetic construct
  source 1..75: mol_type = other DNA
ctggctggccttccgggatgtcggccttgcgtggtggcaactgaatatcctgttcacctttgctgttgtcatgca

SEQ ID NO: 150062 - DNA, 75 bp, synthetic construct
  source 1..75: mol_type = other DNA
aatatgctcgggcgttgtgcattccctctttttgcactggtcagtgggggtaatctggcgggtaaaaccttacgt

SEQ ID NO: 150063 - DNA, 75 bp, synthetic construct
  source 1..75: mol_type = other DNA
tgcaagcaccacctttacacatgctggtcttggggatagcgaaacgtggtattactgggttcgagcatcgaacaa

SEQ ID NO: 150064 - DNA, 75 bp, synthetic construct
  source 1..75: mol_type = other DNA
ctgatgctgactcggcgttgtcgtctcagatcaccaagctgacctctcaatacaaagaggatattaaagcggctg

SEQ ID NO: 150065 - DNA, 75 bp, synthetic construct
  source 1..75: mol_type = other DNA
gttatcggtggcctggtaaatggcgcaaagtcgatcttcatcgacgatttaccgatcttgaatgaagatggctct

SEQ ID NO: 150066 - DNA, 75 bp, synthetic construct
  source 1..75: mol_type = other DNA
tggatgactttaagcgtcggcgtatcatccacagtttgcgccacactttcatcacagaagcggcgaaaacaaaca

SEQ ID NO: 150067 - DNA, 75 bp, synthetic construct
  source 1..75: mol_type = other DNA
ttaaaacgtggcaaccgctactgccttcatttcagactaccttcaggcggtttgttccgtgtgtctctgggctgc

SEQ ID NO: 150068 - DNA, 75 bp, synthetic construct
  source 1..75: mol_type = other DNA
tggacacgagctatcccgcattggtcaaacgcaagtatatatacacgaatttaacgtctctgctttgcttccggt

SEQ ID NO: 150069 - DNA, 75 bp, synthetic construct
  source 1..75: mol_type = other DNA
gaagcggtcagtgctgctcctgcggatcaggacacagcaatgctgctgagtcttttttcagcagatgagtccgaa

SEQ ID NO: 150070 - DNA, 75 bp, synthetic construct
  source 1..75: mol_type = other DNA
cagaggcactgttatcaccagagcacagggagctgaggctcaggcaggtctgggataacaatccgatgccccgtg

SEQ ID NO: 150071 - DNA, 75 bp, synthetic construct
  source 1..75: mol_type = other DNA
aatcagatattatatctactataattttttctattttaatgctggctataggctgcgctattggcctctatggtg

SEQ ID NO: 150072 - DNA, 75 bp, synthetic construct
  source 1..75: mol_type = other DNA
agctacggttattacactcaagcagaaatgcgaaaattggtatgccacttcgcgactttggatggttggaataaa

SEQ ID NO: 150073 - DNA, 75 bp, synthetic construct
  source 1..75: mol_type = other DNA
aggggaggtgcttggtgatactttcacaactgatggtccagctttgtcggaagactctgttattgaacgtcttag

SEQ ID NO: 150074 - DNA, 75 bp, synthetic construct
  source 1..75: mol_type = other DNA
tactcggttataccgaacaaaaagtgaaattccgtgcgctgtttctggagctgtttttccgccgtacggtgaatt

SEQ ID NO: 150075 - DNA, 75 bp, synthetic construct
  source 1..75: mol_type = other DNA
ttatcggtcagcttcaactcattctaaaacaatacgttggtgtgtctcaggcctttataggtgaaaatgtgacac

SEQ ID NO: 150076 - DNA, 75 bp, synthetic construct
  source 1..75: mol_type = other DNA
aacacaagtatatatacatgagtttaacgttgcagctttgcttccggtcatagacggtatcgattggcttaaatg

SEQ ID NO: 150077 - DNA, 75 bp, synthetic construct
  source 1..75: mol_type = other DNA
agttatagaaaaacttagtagccaatttgatcttacaggaatggaggatgagatcgattatctagcttcagaata

SEQ ID NO: 150078 - DNA, 75 bp, synthetic construct
  source 1..75: mol_type = other DNA
tggcgagccttcgcgtattagctgtgttgtgcacattggcgacggcgaatttaccgatatcgaacggaaagcgga

SEQ ID NO: 150079 - DNA, 75 bp, synthetic construct
  source 1..75: mol_type = other DNA
caaattaacgccctttcggtcattgaatttccgggtcatccacgcgcttttggcatgattcggtcatcagcgctt

SEQ ID NO: 150080 - DNA, 75 bp, synthetic construct
  source 1..75: mol_type = other DNA
ggctgcgcggagaaaaccccgatagcgccgggcccattgtcatcggtgctgacgggattggggacgtgatgtgct

SEQ ID NO: 150081 - DNA, 75 bp, synthetic construct
  source 1..75: mol_type = other DNA
taatagaaccattcgttggtggcggttccgtatttacgaatgcaggatttcgccacaacctgcttaatgatatta

SEQ ID NO: 150082 - DNA, 75 bp, synthetic construct
  source 1..75: mol_type = other DNA
gcggctgacggcgaaaaatgccgatattagcggtaacgtgaatgcgaactccgggacgctcaacaacgtcacgat

SEQ ID NO: 150083 - DNA, 75 bp, synthetic construct
  source 1..75: mol_type = other DNA
ctcgcggatgtcccggtgaatcagagtatcgccattacaggttcagtggatcagttcggtcgcgctcagccagtg

SEQ ID NO: 150084 - DNA, 75 bp, synthetic construct
  source 1..75: mol_type = other DNA
caggaacaatcagagatgcagcaacaacaggctgagaaaccgacgacaccagacagcagtgaaggttcagaggac

SEQ ID NO: 150085 - DNA, 75 bp, synthetic construct
  source 1..75: mol_type = other DNA
cctgcatctgtatactgtacctgacagagcagggagttataaagctgtaagcggatatctggttaaaagccgtta

SEQ ID NO: 150086 - DNA, 75 bp, synthetic construct
  source 1..75: mol_type = other DNA
tgacaacgttccagacgtaccaatattgcaagatattgaacattacgaaattccacgcgataagcggcgtgatat

SEQ ID NO: 150087 - DNA, 75 bp, synthetic construct
  source 1..75: mol_type = other DNA
gaagatgaagtggtttgggaacgggccactgaaaactacctggtgcgtgttactgaactccctgagcgggatttc

SEQ ID NO: 150088 - DNA, 75 bp, synthetic construct
  source 1..75: mol_type = other DNA
aactgatcaaatgtggataccctgatgacctgaccattgagtaccgtcttgggtactgtcagggtgatggagtgg

SEQ ID NO: 150089 - DNA, 75 bp, synthetic construct
  source 1..75: mol_type = other DNA
gggcgcctctgcggaagagcaggccgcacagggggcggcctggcatgcagtgattttctggtcagccctgtttta

SEQ ID NO: 150090 - DNA, 75 bp, synthetic construct
  source 1..75: mol_type = other DNA
gaattcctaatataataaccttttttgtggaaaataatacacttcccgaaattaaagagattaataatctttgcc

SEQ ID NO: 150091 - DNA, 75 bp, synthetic construct
  source 1..75: mol_type = other DNA
tgctggcgaaagccccggaagagtccgagtatctgaatttcattgccgatgccgcaagcacgctacaaagcgatg

SEQ ID NO: 150092 - DNA, 75 bp, synthetic construct
  source 1..75: mol_type = other DNA
taatcgaatagccaaagctataatatcagtagaagaattttataaaaaatattcccaagtccatctcgatttgtt

SEQ ID NO: 150093 - DNA, 75 bp, synthetic construct
  source 1..75: mol_type = other DNA
ctacacaataacaagggaagactcactcgtggctgcaaccctgcttactcaaaatctattcacacatggttacgt

SEQ ID NO: 150094 - DNA, 75 bp, synthetic construct
  source 1..75: mol_type = other DNA
ccttgagccgtagtgctaaaagaattcctaaaaagacaaaaattatatataagaatctacgcccaattataaaaa

SEQ ID NO: 150095 - DNA, 75 bp, synthetic construct
  source 1..75: mol_type = other DNA
ctgttattcagaaggcagtacaaagtagtgctgaagggacagcgcgcgtccagtcattgctggcaattaaggcga

SEQ ID NO: 150096 - DNA, 75 bp, synthetic construct
  source 1..75: mol_type = other DNA
ccattatgaaagagctgaactcctcatacacgaacaagctgtatgacattgcgtttgagaccatctacatggtga

SEQ ID NO: 150097 - DNA, 75 bp, synthetic construct
  source 1..75: mol_type = other DNA
aaagcccgaatcgctgccgatctctgcaagggccgggtatctttcgactgtgattgtggacgccatcaatactgg

SEQ ID NO: 150098 - DNA, 75 bp, synthetic construct
  source 1..75: mol_type = other DNA
ggcaggctcataaaactaaattcaagagcacggtacccggcattacctatgctcagctggtggcgcagtccacca

SEQ ID NO: 150099 - DNA, 75 bp, synthetic construct
  source 1..75: mol_type = other DNA
tgtttactgcaaaagtgacggaagcgtacttgtctttattagcgcatggcgcgaaagcgaccgtggcaaaatatt

SEQ ID NO: 150100 - DNA, 75 bp, synthetic construct
  source 1..75: mol_type = other DNA
tgccatacaactggcgggaatgccggggttgaatggcataccgcatgtgggcaaaaaagcggtactggttatgtg

SEQ ID NO: 150101 - DNA, 75 bp, synthetic construct
  source 1..75: mol_type = other DNA
cagcctcctgcggggcattgctgacgggcgcgttgccgtctgtcagtcatgcggctgctgaaaaccgcccgccaa

SEQ ID NO: 150102 - DNA, 75 bp, synthetic construct
  source 1..75: mol_type = other DNA
tgccgaagtacgactacaacaacccatttggtgcgctgcataagtgtgagctgtgtaaccagaaaggtgtggagc

SEQ ID NO: 150103 - DNA, 75 bp, synthetic construct
  source 1..75: mol_type = other DNA
agcgggcgctaacgtccacgtaattgatgttggtattgatactgctgagcctatccccgggcttatcaacatgcg

SEQ ID NO: 150104 - DNA, 75 bp, synthetic construct
  source 1..75: mol_type = other DNA
cgggatcctgaagaagtggttgggattggcgcaaacctgccgacagataaactggctaataaaattgatgttgtg

SEQ ID NO: 150105 - DNA, 75 bp, synthetic construct
  source 1..75: mol_type = other DNA
gtgctggcagcacaagcgggcgctaacgtccacgtagttgatgttggtattgatagtgctgagcctatccccggg

SEQ ID NO: 150106 - DNA, 75 bp, synthetic construct
  source 1..75: mol_type = other DNA
tcctgtataaaggatttattggtatcgacggtattagtctgacggtaggcgaagtgacgccaacccgtttctgcg

SEQ ID NO: 150107 - DNA, 75 bp, synthetic construct
  source 1..75: mol_type = other DNA
tcgatccacaaactcaggcagtggtagatacggtagaacgtgtgctggcaatgcgtgagcaggccttgaatcaat

SEQ ID NO: 150108 - DNA, 75 bp, synthetic construct
  source 1..75: mol_type = other DNA
gaagtcacgccaacgcgtttttgcgtccatttaattccggaaacactggaacgcactacccttgggaagaaaaaa

SEQ ID NO: 150109 - DNA, 75 bp, synthetic construct
  source 1..75: mol_type = other DNA
tcgatccgcaaacccaggcggtggtggatacggtggaacgtgtactggcggcgcgggaaaacgctatgaatcagc

SEQ ID NO: 150110 - DNA, 75 bp, synthetic construct
  source 1..75: mol_type = other DNA
attgaaatcgatccacaaactcaggcagtggtagatacggtagaacgtgtactggcggcacgagaaaatgccatg

SEQ ID NO: 150111 - DNA, 75 bp, synthetic construct
  source 1..75: mol_type = other DNA
catgttgattggtgggcgctatttgctgcgtccggtattccgctttattgcggcttctggcgttcgggaagtgtt

SEQ ID NO: 150112 - DNA, 75 bp, synthetic construct
  source 1..75: mol_type = other DNA
attggcgggcgctatttactgcgtccggtattccgttttattgcagcttctggcgtgcgggaagtgttcaccgcc

SEQ ID NO: 150113 - DNA, 75 bp, synthetic construct
  source 1..75: mol_type = other DNA
ggtaggtggcattggtctggcgatgtcttcaaccgcaatggcgttgcaactgatgcgtgagaaagggatgaatcg

SEQ ID NO: 150114 - DNA, 75 bp, synthetic construct
  source 1..75: mol_type = other DNA
gcttcagtatgatgtttctaatgtatgccctgacggcagcgtacatcagcggcgctggtgaattgttggcctcca

SEQ ID NO: 150115 - DNA, 75 bp, synthetic construct
  source 1..75: mol_type = other DNA
tggttcagcgcttctggcgtagccagtggcgagggattacgcaccggaaaccgttgtttgcctttacggcgaaaa

SEQ ID NO: 150116 - DNA, 75 bp, synthetic construct
  source 1..75: mol_type = other DNA
ctgcgggtgcagaggccgcagagtcaatcgtcattacctgtaacgaaccggaagacaccatgaagctggtggaga

SEQ ID NO: 150117 - DNA, 75 bp, synthetic construct
  source 1..75: mol_type = other DNA
atgaaatgaatctggaccgggcattgctaccgatcctttttcgttcgaaccggtcaacagtgtggaagtatttaa

SEQ ID NO: 150118 - DNA, 75 bp, synthetic construct
  source 1..75: mol_type = other DNA
caaggtcaataaaaacgtcctggaatatctaaaaaaacactatccggatgaagaccaaaaaaacatgaataaagg

SEQ ID NO: 150119 - DNA, 75 bp, synthetic construct
  source 1..75: mol_type = other DNA
ggaaagggtgggtgtatacccaacacaaggtcaataaaaacgtcctggaatatctaaaaaaacactatccggatg

SEQ ID NO: 150120 - DNA, 75 bp, synthetic construct
  source 1..75: mol_type = other DNA
tgatgcgcgaaaaagggatgaatcgcagcgaatccgggcagttgggcttctcggtgttgctgtttcaggatttgg

SEQ ID NO: 150121 - DNA, 75 bp, synthetic construct
  source 1..75: mol_type = other DNA
agcccaggtgctgttaagcgcggcattactggcgggactattgatgctaacccatttctcatggcaggcggcggt

SEQ ID NO: 150122 - DNA, 75 bp, synthetic construct
  source 1..75: mol_type = other DNA
ggcacaggtgctgttaagctcggcgttgctggcaggattattgatgctgacccatttctcatggcaggcggcggt

SEQ ID NO: 150123 - DNA, 75 bp, synthetic construct
  source 1..75: mol_type = other DNA
ggatatgcaccattttcgaggctacatggctcttaatagcctgaaatatgcaggtgtgacagaaacagaattact

SEQ ID NO: 150124 - DNA, 75 bp, synthetic construct
  source 1..75: mol_type = other DNA
ggatatgaatcattttcgtggctacatggctcttaacagtctgaaatatgcaggtgtgacagagacagaattact

SEQ ID NO: 150125 - DNA, 75 bp, synthetic construct
  source 1..75: mol_type = other DNA
agactatcacttatttaagtgatattggttgtctggagattcagggggccagtctagtgagaaacatcataagag

SEQ ID NO: 150126 - DNA, 75 bp, synthetic construct
  source 1..75: mol_type = other DNA
cagcaatatgtctcttcggaaaaagacggaaaggcgactggctggtcagcattttatgttgatggcaaatgggtt

SEQ ID NO: 150127 - DNA, 75 bp, synthetic construct
  source 1..75: mol_type = other DNA
acgctgtggggtgctgctgccgggctcagcaccaccagtggccatgtttccggttcgttcactgccggactgcct

SEQ ID NO: 150128 - DNA, 75 bp, synthetic construct
  source 1..75: mol_type = other DNA
atgtcaatgaatagccttcaatatgcaggcgtgcgagaaaccgaattacttctgcttgataaagtaaacattgac

SEQ ID NO: 150129 - DNA, 75 bp, synthetic construct
  source 1..75: mol_type = other DNA
agatattccggtctatttgttggttcagatacaaaatcattgtattcgtacatttacagccaaagttctggcccg

SEQ ID NO: 150130 - DNA, 75 bp, synthetic construct
  source 1..75: mol_type = other DNA
ctgacgcggggttcaaagtgccttggtacaaagaggttgaggcgcatggttggttttggctaagccgtattcgcg

SEQ ID NO: 150131 - DNA, 75 bp, synthetic construct
  source 1..75: mol_type = other DNA
gcatcagcgactggacaggtatttcaatgtcggcaaccgctggcgtgctgttgttcacttttgttgccggtggcg

SEQ ID NO: 150132 - DNA, 75 bp, synthetic construct
  source 1..75: mol_type = other DNA
atgtgttcgaaaaactggaagactgctatttcagccagtgcaagaaaaatactggcaaacaagagaagagcacca

SEQ ID NO: 150133 - DNA, 75 bp, synthetic construct
  source 1..75: mol_type = other DNA
cttcggcaacggcggcaggaaattccgcgaaggccgcaaaaacgtctgagacgaatgcggataacagcgcacagg

SEQ ID NO: 150134 - DNA, 75 bp, synthetic construct
  source 1..75: mol_type = other DNA
gaaaagctggaagactgctatttcagacaaaaggatccgtcagcgccagcttcatgccagaaaagttacgacacg

SEQ ID NO: 150135 - DNA, 75 bp, synthetic construct
  source 1..75: mol_type = other DNA
atagcagagattacactgctgtggatattaatgggataaatcatacggataaggctataaattatttacacatca

SEQ ID NO: 150136 - DNA, 75 bp, synthetic construct
  source 1..75: mol_type = other DNA
cgtcccgtgctgccgggaatgttgtcggtggtatcctgggagcattcagcccgattggcagtgagacgtcggaaa

SEQ ID NO: 150137 - DNA, 75 bp, synthetic construct
  source 1..75: mol_type = other DNA
aaaatccttatgtagcataattaactatttctttcctaaaaataacatgcaattaacaggcgattgtacaatatt

SEQ ID NO: 150138 - DNA, 75 bp, synthetic construct
  source 1..75: mol_type = other DNA
tcctcgctggatgcaggaacgttcctggtttggctatacggaagggttcagggaactggtgctgaagaaaaacct

SEQ ID NO: 150139 - DNA, 75 bp, synthetic construct
  source 1..75: mol_type = other DNA
tcagttgggatcgttgggctatcaatgtaaaaccgcgaatgatggcgtcgatgcgcttaatgtacttagcaagaa

SEQ ID NO: 150140 - DNA, 75 bp, synthetic construct
  source 1..75: mol_type = other DNA
cgatttgtgaaaaactgatcagcatgatggacggcgatatctcggtagattcagaaccgggaatgggcagccagt

SEQ ID NO: 150141 - DNA, 75 bp, synthetic construct
  source 1..75: mol_type = other DNA
gtgtttaaaccgctggatacagaagaagtctgttacgataattccatttattatactgacagtgtgttgggacag

SEQ ID NO: 150142 - DNA, 75 bp, synthetic construct
  source 1..75: mol_type = other DNA
agtacagcaggttccagcgaaatatcagtttgaagtaaacggtgaaatgcaatactggacggggagagggcgtaa

SEQ ID NO: 150143 - DNA, 75 bp, synthetic construct
  source 1..75: mol_type = other DNA
aaggccaccaatgccaccctgaaatccgtctcccaccagaacgaactgctgctggagcaggctgtaaggaaaaaa

SEQ ID NO: 150144 - DNA, 75 bp, synthetic construct
  source 1..75: mol_type = other DNA
cggcgcgaggcaatggcaattatagcgcgctgggatctggcggatcagcttgatggacagagggacgcggcatga

SEQ ID NO: 150145 - DNA, 75 bp, synthetic construct
  source 1..75: mol_type = other DNA
gttctatcgtccggataaacgtgaaattgtcctggtggcggataacatccctgacgggcggaccgttcgcgagaa

SEQ ID NO: 150146 - DNA, 75 bp, synthetic construct
  source 1..75: mol_type = other DNA
cctgtgatgataattcgttatctcaggagtttcagttactgccttctactaatggtaatgtgcttataagaagta

SEQ ID NO: 150147 - DNA, 75 bp, synthetic construct
  source 1..75: mol_type = other DNA
atgtgtccttccccgctagctggatattcctctgcgcggcgtgaagtatttgctgttgagttttttctctatatc

SEQ ID NO: 150148 - DNA, 75 bp, synthetic construct
  source 1..75: mol_type = other DNA
tatatcgcgttattgatgcccgctcaggcgattcactattttatgttgtcgccctacagcgtggtgatggacgtt

SEQ ID NO: 150149 - DNA, 75 bp, synthetic construct
  source 1..75: mol_type = other DNA
cgcaacgccactacctggcgtaaagcgacgcaattattactcctggcgatcaatatttatattgccctcaccttc

SEQ ID NO: 150150 - DNA, 75 bp, synthetic construct
  source 1..75: mol_type = other DNA
ggtacgctttctgaattaatcggcgatctcgggaaaaaactgtttggtcggcaatttgcccttccccgctggctg

SEQ ID NO: 150151 - DNA, 75 bp, synthetic construct
  source 1..75: mol_type = other DNA
attaccttccgtccatgccgccgcgatgctgttgctggtcgcttttatcatcatcagtctgttgctgaaaaaagc

SEQ ID NO: 150152 - DNA, 75 bp, synthetic construct
  source 1..75: mol_type = other DNA
cttataccaggattacgcgtggaattttgtcgcgtaaatggcctgcgaggaccaacagcggcaaatgtttatctc

SEQ ID NO: 150153 - DNA, 75 bp, synthetic construct
  source 1..75: mol_type = other DNA
tcctcgctggatgcaggaacgctcctggtttggctatacggaagggttccgggaactggtgctgaagaaaaatct

SEQ ID NO: 150154 - DNA, 75 bp, synthetic construct
  source 1..75: mol_type = other DNA
atcattcgcgatctggcggataaatacggcaaaactccagcacagattgtcatccgctggcatctggataacggc

SEQ ID NO: 150155 - DNA, 75 bp, synthetic construct
  source 1..75: mol_type = other DNA
aaagacgaactcggcgaaattgcaaaactcgatcagggcaagcgtctcggtcccgatcctgaccagttcggcggc

SEQ ID NO: 150156 - DNA, 75 bp, synthetic construct
  source 1..75: mol_type = other DNA
aatcctggagcccattagcgcaaggagggaaaggcgttttcgatcagaaagtcattcgcgatctggcagataaat

SEQ ID NO: 150157 - DNA, 75 bp, synthetic construct
  source 1..75: mol_type = other DNA
ttttcatgatttatatatcaaggatatgttgacaagaaatatagagtcaggacgatcttttgatgactatagtgt

SEQ ID NO: 150158 - DNA, 75 bp, synthetic construct
  source 1..75: mol_type = other DNA
tgccgggcttttttgtcagcaggagcagagcaaacagcatgacgattgcagaacgtcttatacagaaaggtttcg

SEQ ID NO: 150159 - DNA, 75 bp, synthetic construct
  source 1..75: mol_type = other DNA
atctcggtaacaaactgtttggtcggcaatgtgtccttccccgctggctggatattcctctgcgcggcgtgaagt

SEQ ID NO: 150160 - DNA, 75 bp, synthetic construct
  source 1..75: mol_type = other DNA
gtcaggctaaagctgtggctacgttactgcagaaaatagaccaggccagaacaccggttgtcacgggtgttgctc

SEQ ID NO: 150161 - DNA, 75 bp, synthetic construct
  source 1..75: mol_type = other DNA
atttatctgttcctcgatattatcggcggaatgcttggtccggtaattggtgtgatgatggcgcattattttgtg

SEQ ID NO: 150162 - DNA, 75 bp, synthetic construct
  source 1..75: mol_type = other DNA
tcgtcgcctttgcggcctacgccttattaaagaaacgtacaacagcagaaaaaacaggagaacaaaaaaccatag

SEQ ID NO: 150163 - DNA, 75 bp, synthetic construct
  source 1..75: mol_type = other DNA
ataaatatgacgagtatttaccagagactttgcttgctacagggtatggggcacaggcgtatgatacagaaggaa

SEQ ID NO: 150164 - DNA, 75 bp, synthetic construct
  source 1..75: mol_type = other DNA
tacgtctcggggtttttgccgccattattttggggctcgtaggaaccgggttcggaatctaccagctcgtgaaag

SEQ ID NO: 150165 - DNA, 75 bp, synthetic construct
  source 1..75: mol_type = other DNA
ccttggttctggcaagcatgaagacaaggttgaggctgacatccagaaggccaagagctatggcgttaacgggac

SEQ ID NO: 150166 - DNA, 75 bp, synthetic construct
  source 1..75: mol_type = other DNA
ccacggttactccgaaactgaatggagtggctggcccggcattccaggtcataaaagacagtctgacactggggc

SEQ ID NO: 150167 - DNA, 75 bp, synthetic construct
  source 1..75: mol_type = other DNA
gcgatatgctggatgcagggggaattcgatatgacgaatgccagttacgcccagcagccagcagcatttcttgca

SEQ ID NO: 150168 - DNA, 75 bp, synthetic construct
  source 1..75: mol_type = other DNA
atgaaaaaaagaatttttcaagggaaaaccccctgtgttaatgcacatcctattgataataaggttaattatggg

SEQ ID NO: 150169 - DNA, 75 bp, synthetic construct
  source 1..75: mol_type = other DNA
gttaacatgaatgcctcaggctacgaaatcacccgtacccgcgatgcaatcaacaacgtggaagcttactttgag

SEQ ID NO: 150170 - DNA, 75 bp, synthetic construct
  source 1..75: mol_type = other DNA
cttagcaccatcgagtatgcaccggtgtggatcatcatggcggtcgcgctggcgttaggtatcggtacgatgatt

SEQ ID NO: 150171 - DNA, 75 bp, synthetic construct
  source 1..75: mol_type = other DNA
atcgacaaagtggtgaaaatgcctggcgtcactgcggatgatcagcgtctgttgaagaaattgaagtccgatatg

SEQ ID NO: 150172 - DNA, 75 bp, synthetic construct
  source 1..75: mol_type = other DNA
ttattgcagatgaatttgtgaccggtctggttggtgacagagtaagccagagctttgcaagagaaaacattattg

SEQ ID NO: 150173 - DNA, 75 bp, synthetic construct
  source 1..75: mol_type = other DNA
ctcagcactattgagtacgcgccgatttggataatcatggcggtcgcactggcgttgggtatcggtacaatgatc

SEQ ID NO: 150174 - DNA, 75 bp, synthetic construct
  source 1..75: mol_type = other DNA
tgttcaacttcctgggtgttttgctgggtggtcttagtgttgcctatgccattgtgcatatgctaccgacagact

SEQ ID NO: 150175 - DNA, 75 bp, synthetic construct
  source 1..75: mol_type = other DNA
cgttaaaacgatgctgccaggcaatatggaaagctacgagccgttaagcgtgagtcagcgcagccagctgcgccg

SEQ ID NO: 150176 - DNA, 75 bp, synthetic construct
  source 1..75: mol_type = other DNA
ggtgatggatgcgttaaacctgcgtgaagtgaccaagattttctcctcgctgattgtctccccaattgtcggtct

SEQ ID NO: 150177 - DNA, 75 bp, synthetic construct
  source 1..75: mol_type = other DNA
cggaagtgtctagattatccgtggcgattcatagcttgagctactctcacttcaacaacgacctgtctgcaacca

SEQ ID NO: 150178 - DNA, 75 bp, synthetic construct
  source 1..75: mol_type = other DNA
gacgatcagcgcctgttgaagaaactgaagtccgacatgcttagcaccatcgagtatgcgccggtgtggatcatc

SEQ ID NO: 150179 - DNA, 75 bp, synthetic construct
  source 1..75: mol_type = other DNA
atggatattctggaagtccagtcgtgagcacatgcttcagggcaaaggcgaacctggtaaacaagtatgtgaatt

SEQ ID NO: 150180 - DNA, 75 bp, synthetic construct
  source 1..75: mol_type = other DNA
gaccaacttcgaacactatctgcaacagcatccggaactgccgcagaaattgattgcgatggaacccccgttgcc

SEQ ID NO: 150181 - DNA, 75 bp, synthetic construct
  source 1..75: mol_type = other DNA
gttcaccgtcaacaaccccacgccgtattacgtgattatcagcaatgccagcacacagaaaaatggtaatccggc

SEQ ID NO: 150182 - DNA, 75 bp, synthetic construct
  source 1..75: mol_type = other DNA
aacacactgcagattgcgctgcagacgcgtatcaaactgttctggcgaccgaaggcgctggagaacaccagcatg

SEQ ID NO: 150183 - DNA, 75 bp, synthetic construct
  source 1..75: mol_type = other DNA
ccgtacttcgtggttatcagtaacgccagcgcgcagaaaaacggcaatccggcagcgggattttctcccatggtg

SEQ ID NO: 150184 - DNA, 75 bp, synthetic construct
  source 1..75: mol_type = other DNA
cccccgaaactctggaaaatttaattgaaagctttgtgttacgtgaaggcaccgattatggtgaacatgagcgta

SEQ ID NO: 150185 - DNA, 75 bp, synthetic construct
  source 1..75: mol_type = other DNA
caaacgccagctacagtgcggagaagcggtgctggtatggtcggagctgcacgaaacggtcaatatcatgccgcg

SEQ ID NO: 150186 - DNA, 75 bp, synthetic construct
  source 1..75: mol_type = other DNA
cgtaataacgatcctaaacttccttatctggctcaaagctggattgaagatgacaaaggtaacaagatcagctcg

SEQ ID NO: 150187 - DNA, 75 bp, synthetic construct
  source 1..75: mol_type = other DNA
ggcgcgcgactttcgctgatctttaaatgcaacggcaatagttgccaggtggatgcagagcagagccgcaaaggc

SEQ ID NO: 150188 - DNA, 75 bp, synthetic construct
  source 1..75: mol_type = other DNA
ccaggtgaaggtgcaggggatgcctgacatcaacaaactgccagccgatcgcgaaagcatgttctatttcaatgt

SEQ ID NO: 150189 - DNA, 75 bp, synthetic construct
  source 1..75: mol_type = other DNA
agacgggctgtgcgtctacggctgtagtgaagttcctgagcgtcctgctgctgggcgtcctcgtaagcctcactt

SEQ ID NO: 150190 - DNA, 75 bp, synthetic construct
  source 1..75: mol_type = other DNA
ggtgctgacctacatcaacgactacggcgcgcgcctgccgctgatcttccgctgtgaaggggacacctgcaaggt

SEQ ID NO: 150191 - DNA, 75 bp, synthetic construct
  source 1..75: mol_type = other DNA
acatatcagccgcattatgcatacaacatcaacattcctgtgcgccacaacgatcctgaaagcatcgataatatt

SEQ ID NO: 150192 - DNA, 75 bp, synthetic construct
  source 1..75: mol_type = other DNA
tcaggtaaaagtccagggaatgccggatatcagcaagttacctgccgatcgtgagagcatgttctactttaatgt

SEQ ID NO: 150193 - DNA, 75 bp, synthetic construct
  source 1..75: mol_type = other DNA
ctggtcgtctctgcaaccgtgcggtcaccatcgccgacagtccggcacgggtgaaaacaggcgcgttgctgagta

SEQ ID NO: 150194 - DNA, 75 bp, synthetic construct
  source 1..75: mol_type = other DNA
gtggcagacagccccgcccgcgtcgcaaccggcgcagtcaccgcgctggggagcgacggcctgccggtcgacggg

SEQ ID NO: 150195 - DNA, 75 bp, synthetic construct
  source 1..75: mol_type = other DNA
tacaggccagttttgggcgttttatctggtttgcccttgctgtgggtgggccggaaaaggacgaagcgtggagcg

SEQ ID NO: 150196 - DNA, 75 bp, synthetic construct
  source 1..75: mol_type = other DNA
tctgaaaaccaccacgcgtccgacagataaagacggtatgcccgttgatctggatactctgcaggcactggcagg

SEQ ID NO: 150197 - DNA, 75 bp, synthetic construct
  source 1..75: mol_type = other DNA
gtggtacgcacctgggaagtgccgctgcaaatcaccatcagtctgttactggatgccagcctggaggccgcagca

SEQ ID NO: 150198 - DNA, 75 bp, synthetic construct
  source 1..75: mol_type = other DNA
ctgggggaaggtgacagccagctgaaaagtgatgttctggcggcgcaggcaaatgctggccagaactggtgggga

SEQ ID NO: 150199 - DNA, 75 bp, synthetic construct
  source 1..75: mol_type = other DNA
gagcgacggcctgccggtcgacgggacgggggccgaaattgatctggccgtgttgcagtccttgcaggcgaaccg

SEQ ID NO: 150200 - DNA, 75 bp, synthetic construct
  source 1..75: mol_type = other DNA
gggccgatagttgctcacatattttctagccattatgagagctacgatttacacattgccgagttaaccaataaa

SEQ ID NO: 150201 - DNA, 75 bp, synthetic construct
  source 1..75: mol_type = other DNA
cgataatcctgaatacgccataccgctaaaagtgacgattagcattggcgctgtggtgactcagggaaatgcgtt

SEQ ID NO: 150202 - DNA, 75 bp, synthetic construct
  source 1..75: mol_type = other DNA
cgtggttatcacctggcaggacgaaaagacggtcagcatcagcattgttgtccgcccttacgcctgccctaaaac

SEQ ID NO: 150203 - DNA, 75 bp, synthetic construct
  source 1..75: mol_type = other DNA
tcgcctgtgtaacagcgccgtcaccattgctgacagtccggcacgtgtggcaaccgggcccctgtccgcactgaa

SEQ ID NO: 150204 - DNA, 75 bp, synthetic construct
  source 1..75: mol_type = other DNA
aaccctgcgtgttgccgataaagcggcgcgtcgtgtacgtctgctggctatcagcaaaattgcggatcgctcact

SEQ ID NO: 150205 - DNA, 75 bp, synthetic construct
  source 1..75: mol_type = other DNA
acgaatgagggccgacaggaagcaaagctgaaaggaagtcaaatttggaccgcaggcgtaccgtggacaggaacg

SEQ ID NO: 150206 - DNA, 75 bp, synthetic construct
  source 1..75: mol_type = other DNA
ttaccgataaggcatccggcagttcaacagaccgggaagggctggatttgctgaggatgaaggtggaggaaggtg

SEQ ID NO: 150207 - DNA, 75 bp, synthetic construct
  source 1..75: mol_type = other DNA
gctcaccatattccccgcattattttcaccagttcaacctctgtctatggcgatacgcaaggcatagtaaaagaa

SEQ ID NO: 150208 - DNA, 75 bp, synthetic construct
  source 1..75: mol_type = other DNA
agacggcagatatgttgatgcggaatatccggtacgtcaggaggtttacgacgcgtttaaaggcgtgatgaaagc

SEQ ID NO: 150209 - DNA, 75 bp, synthetic construct
  source 1..75: mol_type = other DNA
ctcgaacatgtgtcgatgctgtagatgatgaagtttgtgattctaacagttacgaagttattagccgtgctgatt

SEQ ID NO: 150210 - DNA, 75 bp, synthetic construct
  source 1..75: mol_type = other DNA
aaatgaaaggtattaagtttggccgtaaacgctcagtggacagaggttctgtgctggcgttgcaccagaaaggta

SEQ ID NO: 150211 - DNA, 75 bp, synthetic construct
  source 1..75: mol_type = other DNA
tcgccggatgatggcggaagctgtcatctctggcttgggcgtggcgttccgcctgccgttaaccgtcgccgctga

SEQ ID NO: 150212 - DNA, 75 bp, synthetic construct
  source 1..75: mol_type = other DNA
tattactccggatgacgggggcagttgctgtgtgcatctgcgccgtcatccggggcaatcagccagcagtccggg

SEQ ID NO: 150213 - DNA, 75 bp, synthetic construct
  source 1..75: mol_type = other DNA
tattcgtcatacgtggtgccgatatctctgtccatatggcgcgttaatggggctcgtctcgctattatccccctt

SEQ ID NO: 150214 - DNA, 75 bp, synthetic construct
  source 1..75: mol_type = other DNA
gagtggcattgatagctatctgcttcgcatggagcctgagttagtttgcgattctgacgatctggatgccctgat

SEQ ID NO: 150215 - DNA, 75 bp, synthetic construct
  source 1..75: mol_type = other DNA
aaataaattaactaatgagattccggattataaaccacaacatgtgcttgatgatttgaaaatgatgatagctag

SEQ ID NO: 150216 - DNA, 75 bp, synthetic construct
  source 1..75: mol_type = other DNA
tatcaacaagccagcagtccctcgatattcagatcaaggggcttaaagaggcgggggtgaaagccagtcgcatat

SEQ ID NO: 150217 - DNA, 75 bp, synthetic construct
  source 1..75: mol_type = other DNA
ttgattaatctggcgctggtaattaagttgaatgaaaaaaatgatttgtgtgaaaggtggcataaaagaatcgtt

SEQ ID NO: 150218 - DNA, 75 bp, synthetic construct
  source 1..75: mol_type = other DNA
acctactgcctggtatgtcaccacttgcgcaggtttacagtggtcatcagtttggcgtctgggcgggccaactgg

SEQ ID NO: 150219 - DNA, 75 bp, synthetic construct
  source 1..75: mol_type = other DNA
gggaaacggtggagccaggcgcgatgctgatgcgtgtggcaccaagtcatctgcgctttggtcatttcgaacatt

SEQ ID NO: 150220 - DNA, 75 bp, synthetic construct
  source 1..75: mol_type = other DNA
ggcaaaaacaaaatgcgggtgagaggtggctttaagtcagccagtgatgcgcgtaagtacattgattcacatcgt

SEQ ID NO: 150221 - DNA, 75 bp, synthetic construct
  source 1..75: mol_type = other DNA
attatctggcgaaagaagagcaaaaagacgggctgtgtgcctacggctgcaatgaagttcctgaacgtcctgctg

SEQ ID NO: 150222 - DNA, 75 bp, synthetic construct
  source 1..75: mol_type = other DNA
accgaatgagatttatcggctggctgataatgcgctttataatgcgaaagaggctgggcgtaataaggttgttat

SEQ ID NO: 150223 - DNA, 75 bp, synthetic construct
  source 1..75: mol_type = other DNA
attcgtcattactggtcacatcttgaagatgatgaggacaaataccgtctctggtttagcgatgttgtcgcacgt

SEQ ID NO: 150224 - DNA, 75 bp, synthetic construct
  source 1..75: mol_type = other DNA
ttgtcaccatttgttgccgtagatgccctgaatgaggccctggacagctatcagcaggttttgttgacgcattat

SEQ ID NO: 150225 - DNA, 75 bp, synthetic construct
  source 1..75: mol_type = other DNA
ttgcaacagtgccgcaaaccgtatatttaccgataaggcatccggcagttcaacagaccgggaagggctggattt

SEQ ID NO: 150226 - DNA, 75 bp, synthetic construct
  source 1..75: mol_type = other DNA
accgcgtcgttaattgctaactggcagacagtcggctttgcacatggcgtgatgaacactgacaatatgtcaatt

SEQ ID NO: 150227 - DNA, 75 bp, synthetic construct
  source 1..75: mol_type = other DNA
cgaaatcctttcagcgacagagatgatgattatgtcagccgtccaccggactggggcaaacggctggaagtcagc

SEQ ID NO: 150228 - DNA, 75 bp, synthetic construct
  source 1..75: mol_type = other DNA
ttacgatttggtcattttgaacatttttactatcgccgggagccggaaaaagttcgccagttggctgacttcgcc

SEQ ID NO: 150229 - DNA, 75 bp, synthetic construct
  source 1..75: mol_type = other DNA
gaagtggtcatgcgtaatggtcaaatcctgctgtatgcggggggctcaggctttcttgatggtatcgggaagggc

SEQ ID NO: 150230 - DNA, 75 bp, synthetic construct
  source 1..75: mol_type = other DNA
aatacgccggacatgctgaagcagctgcaggacttcagggtaggggacaccgtcgatccgacgaccggacaggtc

SEQ ID NO: 150231 - DNA, 75 bp, synthetic construct
  source 1..75: mol_type = other DNA
tggcttccagcttgaaacgctggaagaagcccgcgcgaaagcggctgcacgcaagaaacaaaatcaaccatcagt

SEQ ID NO: 150232 - DNA, 75 bp, synthetic construct
  source 1..75: mol_type = other DNA
cgctgcgggcgtggcgttttcgcacggcgcgaacgacgggcagaaagggatcggcctggtgatgctggtactggt

SEQ ID NO: 150233 - DNA, 75 bp, synthetic construct
  source 1..75: mol_type = other DNA
gccggtataccattcggccgccacacagcacgcattcgagcgggtcacgactcaggaactgtttcaccatttgtg

SEQ ID NO: 150234 - DNA, 75 bp, synthetic construct
  source 1..75: mol_type = other DNA
gcagaaagtgagactgcaattagatcttacagagagcttgctaaaaaaggcctcaagacatttatatacgaggcg

SEQ ID NO: 150235 - DNA, 75 bp, synthetic construct
  source 1..75: mol_type = other DNA
gccactgaagagcagactatggcaatgttgcagcaaaagtacctcacagccaagtatggcctcgctgaagttaag

SEQ ID NO: 150236 - DNA, 75 bp, synthetic construct
  source 1..75: mol_type = other DNA
atcctgagcttgctgcttcaattaaaactgaaattgacagcttagatgcaaaaatcaacgaagccaaagctgatg

SEQ ID NO: 150237 - DNA, 75 bp, synthetic construct
  source 1..75: mol_type = other DNA
gcgatgtcttcggggtacacggtgtttgtggcattgtcggctgtatcatgaccgggatttttgccgccagttcgc

SEQ ID NO: 150238 - DNA, 75 bp, synthetic construct
  source 1..75: mol_type = other DNA
aatgggtcttatcgggcgcgacctgaaaggctctcaggatcgtatccgtgagctggaagaagaaaataaactcct

SEQ ID NO: 150239 - DNA, 75 bp, synthetic construct
  source 1..75: mol_type = other DNA
gtcgtcgtcagctcgctctgtttatcgcgcttgttctgggtatcggcgcgggtggggccggaacctggatgatat

SEQ ID NO: 150240 - DNA, 75 bp, synthetic construct
  source 1..75: mol_type = other DNA
aacaggagaggccattaataatacgacttccgggcaaacaatcacagtacctgtggcgttgaactctttaggcaa

SEQ ID NO: 150241 - DNA, 75 bp, synthetic construct
  source 1..75: mol_type = other DNA
ccttcacggcgtaaagtcattccgttcctgaaaatgatgcatcaggaaacgggctcgatgctcaaagcgatcctt

SEQ ID NO: 150242 - DNA, 75 bp, synthetic construct
  source 1..75: mol_type = other DNA
ggaaaacatttctttaagttggaagggaatgaactacgtgagtttaagcacagactatctttaagcgagtctgtt

SEQ ID NO: 150243 - DNA, 75 bp, synthetic construct
  source 1..75: mol_type = other DNA
gtttttgatgcgcacccatcggctggggctggtctttttcgccgtcgccattgtcgccatttacgggcaaacctt

SEQ ID NO: 150244 - DNA, 75 bp, synthetic construct
  source 1..75: mol_type = other DNA
atgatgaccagctacgttatcggtcaggcgatgaaagcaggtaaatttaaagaaacggatttagtgaccatcggt

SEQ ID NO: 150245 - DNA, 75 bp, synthetic construct
  source 1..75: mol_type = other DNA
gccaggcaatgaaagcgggtaaatttaaagaaactgatttagtgaccatcggtaatgacgcctgggctaccggta

SEQ ID NO: 150246 - DNA, 75 bp, synthetic construct
  source 1..75: mol_type = other DNA
aaccgtaacggtttactgtgggacaacagcctgaatgtcgacggcatcaaaaccggtcatactgacaaggcgggt

SEQ ID NO: 150247 - DNA, 75 bp, synthetic construct
  source 1..75: mol_type = other DNA
aacatgctattgcacaaggtcaatgctggaaaagcaactggcggttaagtgaagaggaagcaatggcggcgcggg

SEQ ID NO: 150248 - DNA, 75 bp, synthetic construct
  source 1..75: mol_type = other DNA
atcccacctcttttgctgattctcaggcaattattgaattccgacaaaaattagcttcagaaatcaacaagctgc

SEQ ID NO: 150249 - DNA, 75 bp, synthetic construct
  source 1..75: mol_type = other DNA
gcgtcagtaaagaagaccagaacctgctgaaaaaacttcgcagcgatatgttaagcaccattgagtacgctccgg

SEQ ID NO: 150250 - DNA, 75 bp, synthetic construct
  source 1..75: mol_type = other DNA
acgcactacagccggacagagcaggtcagtttgccgacgccctggagaaatacgctgccggtctggcaaccgcac

SEQ ID NO: 150251 - DNA, 75 bp, synthetic construct
  source 1..75: mol_type = other DNA
ctcggcgcaggcgctggataacgcactacagccggacagagcagctcagtttgccgacgccctggagaaatacgc

SEQ ID NO: 150252 - DNA, 75 bp, synthetic construct
  source 1..75: mol_type = other DNA
gacccgcatacgccgccgacacccgccgccaaaccaccttcatttgtacccgatgcctttaccaatccggactat

SEQ ID NO: 150253 - DNA, 75 bp, synthetic construct
  source 1..75: mol_type = other DNA
cgacagtgaaatccgcgtcatcaacaagtgcggtgagccgtggtttgtagcaaaagatgtttgtgatgctttaaa

SEQ ID NO: 150254 - DNA, 75 bp, synthetic construct
  source 1..75: mol_type = other DNA
gagctgggtaacatcccctacgcgccgatcgccaccgaaattccgttcgaacagattaaaccggtgaaaccttaa

SEQ ID NO: 150255 - DNA, 75 bp, synthetic construct
  source 1..75: mol_type = other DNA
acttccgcgcagtgctcgataaccgtcaacgtcacgcctggctggagctggcaaaccagattgttgatgtcaaag

SEQ ID NO: 150256 - DNA, 75 bp, synthetic construct
  source 1..75: mol_type = other DNA
taacaaataacgacagccttactgaggatgaagaaaccacatggtcactgcctggtgctgtggtcggttttatct

SEQ ID NO: 150257 - DNA, 75 bp, synthetic construct
  source 1..75: mol_type = other DNA
ctccctcatcctctggacagaacgcggcgcagcccgtcacgcaaaaatgctcgaaaccgatcaggcgtgggaagt

SEQ ID NO: 150258 - DNA, 75 bp, synthetic construct
  source 1..75: mol_type = other DNA
ggcattattccgcgaactgtatccggcgctaaagcacattcaatcaaactattctggcaggtgctacgactacgg

SEQ ID NO: 150259 - DNA, 75 bp, synthetic construct
  source 1..75: mol_type = other DNA
taaaggttcagtcccgcacaaattccgcaaatgggtgacagctgaagttttgccatccattcgtaaaacggggtc

SEQ ID NO: 150260 - DNA, 75 bp, synthetic construct
  source 1..75: mol_type = other DNA
tctgaccattacccagcacggcggcggtaacggcgcagatgttggccaaggttctgatgacagctcaatcgatct

SEQ ID NO: 150261 - DNA, 75 bp, synthetic construct
  source 1..75: mol_type = other DNA
gttgaccaaactgcatctaactccagcgtcaacgtaactcaggttggctttggtaacaatgctacagcccatcag

SEQ ID NO: 150262 - DNA, 75 bp, synthetic construct
  source 1..75: mol_type = other DNA
ttttaacgtcatcccggacccgactacccgcgcggttgcgtttgaaactggcgatatcgacctgctgtacggaaa

SEQ ID NO: 150263 - DNA, 75 bp, synthetic construct
  source 1..75: mol_type = other DNA
ggcaacgggtctgcgttttggacaggcaggaaactcaggtctgattcaaaccttccttgctggttatttagtgca

SEQ ID NO: 150264 - DNA, 75 bp, synthetic construct
  source 1..75: mol_type = other DNA
atgaaaagtatagcaaaggcacaaaacgatttcaccatcttcaaatttggcgacagtgaaattcgcgtcattaac

SEQ ID NO: 150265 - DNA, 75 bp, synthetic construct
  source 1..75: mol_type = other DNA
aagccgacaatgcgtttatgatgatttgtactgcgctggtgctgtttatgactattccggggattgccctgtttt

SEQ ID NO: 150266 - DNA, 75 bp, synthetic construct
  source 1..75: mol_type = other DNA
atgggcgacagaatagggcgtaaaaaagtgctctttattaccatcaccatgatggggatctgtaccaccttaatt

SEQ ID NO: 150267 - DNA, 75 bp, synthetic construct
  source 1..75: mol_type = other DNA
tttctgcaccatgacggaatcctggtatccgatcgccattatgatcatggcatattcagtgattggtttaatctc

SEQ ID NO: 150268 - DNA, 75 bp, synthetic construct
  source 1..75: mol_type = other DNA
gcttcggcaaagaggcgtttaaaccgcacaacctgccgatggtctttaccgggactgccattctctatatcggtt

SEQ ID NO: 150269 - DNA, 75 bp, synthetic construct
  source 1..75: mol_type = other DNA
cggcgtgacgcctgcctgtggttacattggggttggcggcgcgttgattatcggcgtggtagctggtctggcggg

SEQ ID NO: 150270 - DNA, 75 bp, synthetic construct
  source 1..75: mol_type = other DNA
cgccgcaatcgccggtctggtgggcgcgtatctgataggcaaacgcgtgggcttcggcaaagaggcgtttaaacc

SEQ ID NO: 150271 - DNA, 75 bp, synthetic construct
  source 1..75: mol_type = other DNA
atggctgatacttcgtacagtcccgatctgtttcgcccacattatggcgggggggaatccgacaatgatattcac

SEQ ID NO: 150272 - DNA, 75 bp, synthetic construct
  source 1..75: mol_type = other DNA
gaccagtcaattttgcaccatcaacctcgtcccaacctactcaggcgggataattactgtccgaatggaccttga

SEQ ID NO: 150273 - DNA, 75 bp, synthetic construct
  source 1..75: mol_type = other DNA
ttctacctgcgccagcatggcgaggaaaaaggccgccagattgcctgtgcgttactggaagatttaatggaagcc

SEQ ID NO: 150274 - DNA, 75 bp, synthetic construct
  source 1..75: mol_type = other DNA
ctttacccggatggctatttctaaagaaattggtggtcttatcgcttccggttttggtcctatcctggcgggtat

SEQ ID NO: 150275 - DNA, 75 bp, synthetic construct
  source 1..75: mol_type = other DNA
atctattgaggccagagcgaacaattccactcagggatatgtctatctgcagtactcatttacaaatgacgaaat

SEQ ID NO: 150276 - DNA, 75 bp, synthetic construct
  source 1..75: mol_type = other DNA
ctgcaaccaatgtttaacccgcttacggataatgttgtctcgctcgacctgaccacggggagcgaagaggatgca

SEQ ID NO: 150277 - DNA, 75 bp, synthetic construct
  source 1..75: mol_type = other DNA
tcatctctgatgtggaagagcagtatgcaaagcgtattgcattaacagcgttacagagcgaagagccggttggta

SEQ ID NO: 150278 - DNA, 75 bp, synthetic construct
  source 1..75: mol_type = other DNA
tatggttgatgccaaccaggcaatgttatcgctggggacttcaggcgtttattttgcggtgagcgaaggtttcct

SEQ ID NO: 150279 - DNA, 75 bp, synthetic construct
  source 1..75: mol_type = other DNA
cgcagcgttatgctgcttatcagccacggcgtgaaacgttccgtcgtctctatcagcaacttctgccgctaatgg

SEQ ID NO: 150280 - DNA, 75 bp, synthetic construct
  source 1..75: mol_type = other DNA
gggtactgtcgtatcacgaactggctaagatttggcttgctattgaaagaagccgtgcgtctacgtcaaataagc

SEQ ID NO: 150281 - DNA, 75 bp, synthetic construct
  source 1..75: mol_type = other DNA
gaaaaacatattgtaaaacaagacattacaacaacaagaaaaacaggtgaggagcaggacgggaataacaaaaag

SEQ ID NO: 150282 - DNA, 75 bp, synthetic construct
  source 1..75: mol_type = other DNA
agctggcatcgagccgtgggcatgggtcgttaataacagcctggcagctgctcaaccgtcttcgcctttcctgaa

SEQ ID NO: 150283 - DNA, 75 bp, synthetic construct
  source 1..75: mol_type = other DNA
tcagactataagcactttggaaatgcaattcataaaataattagctccgtagagacttatcaaaactactcccaa

SEQ ID NO: 150284 - DNA, 75 bp, synthetic construct
  source 1..75: mol_type = other DNA
tatcgcacctgcaggttcctcacaaattgcttttttaaaaacaaccataccaataatatatctatcggatacaac

SEQ ID NO: 150285 - DNA, 75 bp, synthetic construct
  source 1..75: mol_type = other DNA
aaatccgcgccggatggtcagcacggcgtgaatctcgtccatctggaagatgttgtctctgctattacgctttta

SEQ ID NO: 150286 - DNA, 75 bp, synthetic construct
  source 1..75: mol_type = other DNA
aatctgctgcgtaacccttatttttgccgggtaatttgcgttaacgacggctccacggacaataccgaagcggtc

SEQ ID NO: 150287 - DNA, 75 bp, synthetic construct
  source 1..75: mol_type = other DNA
atggcgctggtttccgcctgtatcatcgatccgggtgtgtacttcgccatgaacagcccgatggcggtgctggct

SEQ ID NO: 150288 - DNA, 75 bp, synthetic construct
  source 1..75: mol_type = other DNA
cgaacgcaaggctattgaaaaagcaacagtagtatctttcccatctaaatgggcaatggatttttgcaggaatta

SEQ ID NO: 150289 - DNA, 75 bp, synthetic construct
  source 1..75: mol_type = other DNA
ctgagccaaattagcgaagaaacaatagagtccttagttccgatgatatcgaataatatgaaaccaatttcccga

SEQ ID NO: 150290 - DNA, 75 bp, synthetic construct
  source 1..75: mol_type = other DNA
aacaaatgatatggtgcaagagcatgttaccaactttactaaagaactgtttgggtatattgcaaatggtatagg

SEQ ID NO: 150291 - DNA, 75 bp, synthetic construct
  source 1..75: mol_type = other DNA
tagtggcggtggacaatcgcagggtggcgccagtggaggaaaaagtggctctaatctgagtggcaaggcaagggg

SEQ ID NO: 150292 - DNA, 75 bp, synthetic construct
  source 1..75: mol_type = other DNA
aaccgtggcttctgggtcttcgtgaatgacattttccatcacagccaaggtaacggtgccggtgttgctgacttg

SEQ ID NO: 150293 - DNA, 75 bp, synthetic construct
  source 1..75: mol_type = other DNA
tacgcctcggggttattgccgccattattttgggactcgcaggaaccgggttcggcatttaccagctcgtgaaag

SEQ ID NO: 150294 - DNA, 75 bp, synthetic construct
  source 1..75: mol_type = other DNA
gcctctgttgtcactggtgttggtgctgatctggatgcgttccgggagtgcctcggctcaggaaagtacgaagac

SEQ ID NO: 150295 - DNA, 75 bp, synthetic construct
  source 1..75: mol_type = other DNA
tgaaagaagccgtgcgtctacgtcaaataagctccttcatcagatgcttatgctgtggggggcgaggctctcaga

SEQ ID NO: 150296 - DNA, 75 bp, synthetic construct
  source 1..75: mol_type = other DNA
caaccagctgcgccagttagcctattacgggcaatgtcgggttattgccgtccagtatcggctggcaccggaaca

SEQ ID NO: 150297 - DNA, 75 bp, synthetic construct
  source 1..75: mol_type = other DNA
atgaggcgtcaggttatcgatagctgctcaattatgagtatccagccgcgtgactttggttctcgttcagaagtt

SEQ ID NO: 150298 - DNA, 75 bp, synthetic construct
  source 1..75: mol_type = other DNA
aggtggaggaagtggcagcaacagcggaggaagcagtggttctaatttaagtggtaaggcaaggggcagtcgcgg

SEQ ID NO: 150299 - DNA, 75 bp, synthetic construct
  source 1..75: mol_type = other DNA
cgtatttgggttgttaatgagcctctttacaaaaatgatttccggtcttaacggcagcgaaggctttgatgcctt

SEQ ID NO: 150300 - DNA, 75 bp, synthetic construct
  source 1..75: mol_type = other DNA
tatttgacataattgatgatctgataaatatgatggttgataccaacgtaacaaccatcattgcaaccgtcacac

SEQ ID NO: 150301 - DNA, 75 bp, synthetic construct
  source 1..75: mol_type = other DNA
ggagtttaattactcaactgaaattactgatttcatgaaagcgatatatttcctgtatctcaatcgtcatggtta

SEQ ID NO: 150302 - DNA, 75 bp, synthetic construct
  source 1..75: mol_type = other DNA
actgatttcatgaaagcggtatattttctgtatctcaatcgtcatggttaccgtgggttatgtcgttataacaag

SEQ ID NO: 150303 - DNA, 75 bp, synthetic construct
  source 1..75: mol_type = other DNA
ggcgatgttgaaggcgggggatgtggtgtattgcgatccgccgtatgacggtacgttttccagctatcacactga

SEQ ID NO: 150304 - DNA, 75 bp, synthetic construct
  source 1..75: mol_type = other DNA
gaaataaaaccgccattatgtccgaactgaaaaaacaccttcctgctggcccgcgactggttgaacctttcgcgg

SEQ ID NO: 150305 - DNA, 75 bp, synthetic construct
  source 1..75: mol_type = other DNA
ctttcagcgagtggcacagaatatatcagggatccttgtccgtgtccctcagacactgcagcgtaaataccctga

SEQ ID NO: 150306 - DNA, 75 bp, synthetic construct
  source 1..75: mol_type = other DNA
gtgtattgcgatccgccttatgacggtgcgttttccggctatcacactgacggcttcactgaagatgaccagtat

SEQ ID NO: 150307 - DNA, 75 bp, synthetic construct
  source 1..75: mol_type = other DNA
gtaattataaaaatccgtatttccctgaaaaagaaattcgcgcatttgcagagaaagcccagcgggcaacgttta

SEQ ID NO: 150308 - DNA, 75 bp, synthetic construct
  source 1..75: mol_type = other DNA
tattttcagtccccggtgaaaatgcgccgggtaacacaaaataaaaacgccattgtgctggcaaaaacacataat

SEQ ID NO: 150309 - DNA, 75 bp, synthetic construct
  source 1..75: mol_type = other DNA
tgaaagacctgaaagccagctacgtgctgaacagcagtgagcttcatgcgccgctgcaaaagaatcaggtcgttg

SEQ ID NO: 150310 - DNA, 75 bp, synthetic construct
  source 1..75: mol_type = other DNA
cgtgtccaacagcgacacgtccctgacccgttcgctttatcgtaattttacccgccatcgcatcactgcaaagcg

SEQ ID NO: 150311 - DNA, 75 bp, synthetic construct
  source 1..75: mol_type = other DNA
ggaaagcacttctttaaagctgttggtgatgaactcagaaatttgcgactagttttaaacgagtcgcaaaatttg

SEQ ID NO: 150312 - DNA, 75 bp, synthetic construct
  source 1..75: mol_type = other DNA
atggcctcgacgccggatgaaaaaggtttcattgagctgcatattggcgcttctgaaatcaacctttacgcgaaa

SEQ ID NO: 150313 - DNA, 75 bp, synthetic construct
  source 1..75: mol_type = other DNA
ctgaaatttttaatgtcgatatacgcactattgatcgctggcaaactcaggggctccctcagatatctggtggag

SEQ ID NO: 150314 - DNA, 75 bp, synthetic construct
  source 1..75: mol_type = other DNA
tgatgcacgatccggatgcaatttaccgttccgcgacagaaagaaatgcggttgtgatgctgcttgatgccgtgg

SEQ ID NO: 150315 - DNA, 75 bp, synthetic construct
  source 1..75: mol_type = other DNA
gcgcagagggaagctgatattaaaaacgaaaaactccgtaaagagatcgaggatttgagggctgccagcgaatca

SEQ ID NO: 150316 - DNA, 75 bp, synthetic construct
  source 1..75: mol_type = other DNA
ctagcggcagagtattaaaagagctggaagactggcttcatcaattgccggggacgtcggtggatattctgcgtc

SEQ ID NO: 150317 - DNA, 75 bp, synthetic construct
  source 1..75: mol_type = other DNA
cggctcgatccgcagctggtctgtgaggctgatgaccttgatgctttaatgaatgttgacgcgctggtcattacg

SEQ ID NO: 150318 - DNA, 75 bp, synthetic construct
  source 1..75: mol_type = other DNA
atgagcaccatcctgaaatgggcgggaaataaaacggccattatggcagaactgaaaaaataccttcctgctggc

SEQ ID NO: 150319 - DNA, 75 bp, synthetic construct
  source 1..75: mol_type = other DNA
gaaataaaaccgccataatgtccgaactgaaaaagcatcttcctgctggcccacgactggttgaacctttcgcgg

SEQ ID NO: 150320 - DNA, 75 bp, synthetic construct
  source 1..75: mol_type = other DNA
tgaaaaagaaattcgcacatttgcagagaaagcccagcgggcaacgtttatctgcgcaagctttgatgaaacgct

SEQ ID NO: 150321 - DNA, 75 bp, synthetic construct
  source 1..75: mol_type = other DNA
cgacagtaacaacgcttatatggcggaagaactcttccacgggaaggcggaaaacgacctgaacgtgatgaagga

SEQ ID NO: 150322 - DNA, 75 bp, synthetic construct
  source 1..75: mol_type = other DNA
tgacggtgaactttaaccgtcgtggtgagcagggggcgctgatgaactcgctgtacatgttcgctaacgccagca

SEQ ID NO: 150323 - DNA, 75 bp, synthetic construct
  source 1..75: mol_type = other DNA
tttgcgttgagtgtgaagcgccaattccgccagcacgccgccgtgccattccgggtgcagctttgcattacctgt

SEQ ID NO: 150324 - DNA, 75 bp, synthetic construct
  source 1..75: mol_type = other DNA
acgtagcggtggtgccagtggcatgttaggtacagctcgtctgcttggtcagagtagcggcgcggctctggtggc

SEQ ID NO: 150325 - DNA, 75 bp, synthetic construct
  source 1..75: mol_type = other DNA
cctgcgtgaagcccttttttctctggcggcgattgaagaagaactggtaccagcgaaagcctgttctggtctgcg

SEQ ID NO: 150326 - DNA, 75 bp, synthetic construct
  source 1..75: mol_type = other DNA
ccgttctggtgccgtaacgtgctcagcccgtcgaagctgcgggaaaaatgggatgagctttccctgcgcttatcg

SEQ ID NO: 150327 - DNA, 75 bp, synthetic construct
  source 1..75: mol_type = other DNA
ggctaaattccctgaaggaagcacgtgataaaaataataaaataatttattcctcagggcttagttgttttcaac

SEQ ID NO: 150328 - DNA, 75 bp, synthetic construct
  source 1..75: mol_type = other DNA
gcagactcagcaaaattgctgataacacaggtaagctggttgatgagacgaaaaaacgcattggccccggtgata

SEQ ID NO: 150329 - DNA, 75 bp, synthetic construct
  source 1..75: mol_type = other DNA
ccgggtatccttctttaaggacatcgccggggaagaggctttcacatcgtttatggcactcgttgatgcggcggg

SEQ ID NO: 150330 - DNA, 75 bp, synthetic construct
  source 1..75: mol_type = other DNA
gatgcagcagttaagcacccggcttgaacgcctgaatgaatcgcgcacacgggaaattcagaaaatgcgggagct

SEQ ID NO: 150331 - DNA, 75 bp, synthetic construct
  source 1..75: mol_type = other DNA
cgtaaggtcggtgggcgtaatgaaagcaatatctaccgccttaatgtggaaaaactcgaagcagcagctgaggcg

SEQ ID NO: 150332 - DNA, 75 bp, synthetic construct
  source 1..75: mol_type = other DNA
taaacaaatctgcgagatgtacagccgcgtcagtcgcgatccgttctggtgccgtaacgtgctcagcccgtcgaa

SEQ ID NO: 150333 - DNA, 75 bp, synthetic construct
  source 1..75: mol_type = other DNA
gataattataccatggggctaaattcctggaagatagctcctaacgaacgtggtgataaaaaaggtgtcccaggg

SEQ ID NO: 150334 - DNA, 75 bp, synthetic construct
  source 1..75: mol_type = other DNA
cccttgtatcttccttggggatcatacaggcgatagatttagtactatttttggtgataaatatatccttacttt

SEQ ID NO: 150335 - DNA, 75 bp, synthetic construct
  source 1..75: mol_type = other DNA
gaaacaactccttaagccatgaatataagcattcagataaagttaacaatcatcaacaccatggcgaggttgata

SEQ ID NO: 150336 - DNA, 75 bp, synthetic construct
  source 1..75: mol_type = other DNA
tcacgacatcctgaggcggtggtgtacagcgctgcaaagcggcagtggggcagccaggacgatttaacctgcgcc

SEQ ID NO: 150337 - DNA, 75 bp, synthetic construct
  source 1..75: mol_type = other DNA
cctgttccggtctgcgtcaggtactggaaaacgtgatgctcgaccgcccggaatactggcaaagccactaccacg

SEQ ID NO: 150338 - DNA, 75 bp, synthetic construct
  source 1..75: mol_type = other DNA
gtgattgaccactttgccattctgaaagttggcccggcgctgactttcgccctgcgtgaggccctgttttctctg

SEQ ID NO: 150339 - DNA, 75 bp, synthetic construct
  source 1..75: mol_type = other DNA
cacaccggatgccgcccgcgccacgctggaagcccatcgtcacgcctttgaaaagcaggggctgaacgccatctg

SEQ ID NO: 150340 - DNA, 75 bp, synthetic construct
  source 1..75: mol_type = other DNA
catcgagcgtaacgccattgcggcagtgaaagcggtaaatgctgcacgtatggcgctgcgccgtaccagcgagcc

SEQ ID NO: 150341 - DNA, 75 bp, synthetic construct
  source 1..75: mol_type = other DNA
tataagatgaacgcctcgatttctggtgccgaagtgggttgccagggtgaagttggcgtggcgtgctctatggcg

SEQ ID NO: 150342 - DNA, 75 bp, synthetic construct
  source 1..75: mol_type = other DNA
accgaaggcgtgttgccaggcaaactgcgcgttccacgccgcgctgcggcactgcgccggatgctggttagccag

SEQ ID NO: 150343 - DNA, 75 bp, synthetic construct
  source 1..75: mol_type = other DNA
ggttttagcgaattaaacgacgcagaagatcaggctgaacgtttccaggaacaggttaacgctaaagctgcaggt

SEQ ID NO: 150344 - DNA, 75 bp, synthetic construct
  source 1..75: mol_type = other DNA
ttcaagcgtcgtgcctttgacgagtgctatgcctggcttgaccttgtggccgagaagtacggcagaacgcgtggc

SEQ ID NO: 150345 - DNA, 75 bp, synthetic construct
  source 1..75: mol_type = other DNA
ataatatcattttatttgattatactaataacctataatgtgaatgttttatcaaacatatcagcgttccgagat

SEQ ID NO: 150346 - DNA, 75 bp, synthetic construct
  source 1..75: mol_type = other DNA
caaccaacgccgagggcgctcattatcaaccatattcaggacatcctggcgcagtaccacacagcctgtggaggc

SEQ ID NO: 150347 - DNA, 75 bp, synthetic construct
  source 1..75: mol_type = other DNA
gtgaaatatctgatagaaatggtgagacagcacaaagagggcaaaacaaatgggatttatgccgtttgctccgcg

SEQ ID NO: 150348 - DNA, 75 bp, synthetic construct
  source 1..75: mol_type = other DNA
gctaacgataaatcccgtcaaacgtttgttgtccgttcaaaaattctggccgctatccgtcagttcatggtcgcg

SEQ ID NO: 150349 - DNA, 75 bp, synthetic construct
  source 1..75: mol_type = other DNA
gcatactgcccggcagcacgatgaaaggcgcgtttgtgtcgctcagcccgttaccgtctgaaccaccgatacagg

SEQ ID NO: 150350 - DNA, 75 bp, synthetic construct
  source 1..75: mol_type = other DNA
ggggaagcgctgcgggcaacccgcgtgtgcctgaacgcctggctgaaagatcgcgggcacaccgccaatcaggaa

SEQ ID NO: 150351 - DNA, 75 bp, synthetic construct
  source 1..75: mol_type = other DNA
gaaacccgctttgcccgccaggaaaaaggcggcaggaaaagaaacgggcgcgcagcggtatacccgactcagaca

SEQ ID NO: 150352 - DNA, 75 bp, synthetic construct
  source 1..75: mol_type = other DNA
tgcgcgatgcgttgaacagtggtgatacggcagctctggcagagtggagcgctccgattcaggcgcgtcgtcact

SEQ ID NO: 150353 - DNA, 75 bp, synthetic construct
  source 1..75: mol_type = other DNA
ctgcacagccccatcgacctgagcgtggaaacgcgtcttgatgcagaagtgaaaagctggtttgccttcgccctg

SEQ ID NO: 150354 - DNA, 75 bp, synthetic construct
  source 1..75: mol_type = other DNA
cttgctgcacaccctgagttagcaaacgatgaagttgctctgcaagaagtgaatgctgcattgttcaaagagtat

SEQ ID NO: 150355 - DNA, 75 bp, synthetic construct
  source 1..75: mol_type = other DNA
ttattcaggtcgatggtctgaatcgtggtggtattgcgggggatgcaaacacgggtaatgtggggggcggaaacc

SEQ ID NO: 150356 - DNA, 75 bp, synthetic construct
  source 1..75: mol_type = other DNA
atcagagttgaaaaaatatcgacctgatatttttgaagtatgcgaagaagccatatcggcatcatctaaagattt

SEQ ID NO: 150357 - DNA, 75 bp, synthetic construct
  source 1..75: mol_type = other DNA
gctgtgcattgcatattgctcatcagaaaagccaaaacctccctctcgagaggcaacaaattctcagtacgatta

SEQ ID NO: 150358 - DNA, 75 bp, synthetic construct
  source 1..75: mol_type = other DNA
gtgcgggcgaaagcagaaaaagaagccgcagagatgcaggcggcggctatcgttgagttagccgaagctacacgt

SEQ ID NO: 150359 - DNA, 75 bp, synthetic construct
  source 1..75: mol_type = other DNA
atttccggggcggttcaggttgaactgaccgtgcgggcgaaagcagaaaaagaagccgcagagatgcaggcggcg

SEQ ID NO: 150360 - DNA, 75 bp, synthetic construct
  source 1..75: mol_type = other DNA
gatatatacgatatatgtgaaaaaacagtttcttcttcctaccatgatcttgattttatacgactttcgaaagat

SEQ ID NO: 150361 - DNA, 75 bp, synthetic construct
  source 1..75: mol_type = other DNA
gctgttgtattcagccctaaaaagcgccagtggggaacgcaggatgatttgacctgcgcacagtggctctggaaa

SEQ ID NO: 150362 - DNA, 75 bp, synthetic construct
  source 1..75: mol_type = other DNA
ccttatccgaactgcgccacagcctgagtgcgagcgaggcgatgatgtggatggagttcgacagggtatccccgc

SEQ ID NO: 150363 - DNA, 75 bp, synthetic construct
  source 1..75: mol_type = other DNA
gaaaagggggaaacgcagttgtccgtttcggtacgggcccgccgggatctggaagccgatgttgagttgttcatt

SEQ ID NO: 150364 - DNA, 75 bp, synthetic construct
  source 1..75: mol_type = other DNA
gatgtacagccgcgtcagtcgtgacccgttctggtgccgtaacgtcctcagcccatcgaaattgcgggaaaaatg

SEQ ID NO: 150365 - DNA, 75 bp, synthetic construct
  source 1..75: mol_type = other DNA
gcgtcagttgcctctgatcgttccattattccgccaggtactaccttgctggcagaagtgccgttgctggataat

SEQ ID NO: 150366 - DNA, 75 bp, synthetic construct
  source 1..75: mol_type = other DNA
cttaacgttgcgaagcttcaggcagcggcattttctcaactgtcagattctgacccgtcaaaatctgacgcatca

SEQ ID NO: 150367 - DNA, 75 bp, synthetic construct
  source 1..75: mol_type = other DNA
atgaaacgaattgcgtttgtgggtgccgtcggggcaggaaaaacaacgttatttaatgcgttgcaggggaattat

SEQ ID NO: 150368 - DNA, 75 bp, synthetic construct
  source 1..75: mol_type = other DNA
aaagatgatgagacaccgttatccgttgcggagcgcgcccgccgaaatctggaagcggatgttgaactgttcatc

SEQ ID NO: 150369 - DNA, 75 bp, synthetic construct
  source 1..75: mol_type = other DNA
acgaacccgcgctggttctggaactgccgcaggcgtggctggatgcgtacaaacccgcttacgatgctctgcagg

SEQ ID NO: 150370 - DNA, 75 bp, synthetic construct
  source 1..75: mol_type = other DNA
cgctgtcaacgatggcggggtttcgtcataagacagtggtggtaccggaatgggacggcgctacggtagtgctga

SEQ ID NO: 150371 - DNA, 75 bp, synthetic construct
  source 1..75: mol_type = other DNA
tgatacgccgggtgaatattttaaccatccccgctggtatcacgccttaattaccacgctacaggatgtagacat

SEQ ID NO: 150372 - DNA, 75 bp, synthetic construct
  source 1..75: mol_type = other DNA
gacgggcttcgaagagccgattttcgagctaaacagccacgacccgcaaagcgtgcagcaactggtggattatct

SEQ ID NO: 150373 - DNA, 75 bp, synthetic construct
  source 1..75: mol_type = other DNA
aatgagctgaaagagaagctcgaagcgatggaaggcgtgcagtttaagcagttcaattccatcaccgattaccat

SEQ ID NO: 150374 - DNA, 75 bp, synthetic construct
  source 1..75: mol_type = other DNA
cgcgttttgttcagcagttcggtaatcaactggcgaaactggagccgatggtttcagtattgcagagcgaccctg

SEQ ID NO: 150375 - DNA, 75 bp, synthetic construct
  source 1..75: mol_type = other DNA
cttatccccgacctgaccttgttgcatttccgtaacaccacggaagccggggctaccagcggttcgcgagataaa

SEQ ID NO: 150376 - DNA, 75 bp, synthetic construct
  source 1..75: mol_type = other DNA
atcaggagctggaagcacgcattgcctctctttccgatagcgtgtctaacgcccgtgaagagcggatggcactgc

SEQ ID NO: 150377 - DNA, 75 bp, synthetic construct
  source 1..75: mol_type = other DNA
gatattattcgtaccgatgatccggtggaagctatcgagcagatggaaatcgaactcagccgtctgaccgaagaa

SEQ ID NO: 150378 - DNA, 75 bp, synthetic construct
  source 1..75: mol_type = other DNA
ttcatgtggttggtttacgtggctttgcgccgcagcttccagaaatgcttccaggggctgacgaagcgtcttccc

SEQ ID NO: 150379 - DNA, 75 bp, synthetic construct
  source 1..75: mol_type = other DNA
cggtgaggccatcggtactggtatgtcgattttggtgatggtggtacagagctgggaggatgaatcacgccgtct

SEQ ID NO: 150380 - DNA, 75 bp, synthetic construct
  source 1..75: mol_type = other DNA
caattagggcaagcaaactcagcagtcagccgtgcggtaaaaaagctggaaatgaaacttggcgtcagcctactt

SEQ ID NO: 150381 - DNA, 75 bp, synthetic construct
  source 1..75: mol_type = other DNA
cgtgcggtaagtacgcgcatccgggcttttatcgatttccttagcgagcatgtaaaaactgaggtgtactggcaa

SEQ ID NO: 150382 - DNA, 75 bp, synthetic construct
  source 1..75: mol_type = other DNA
gccacctggcagaacaggttcagccgctgcggatgcgcttaagcgaactggaacagcgtctgcgcgagcagcaag

SEQ ID NO: 150383 - DNA, 75 bp, synthetic construct
  source 1..75: mol_type = other DNA
cgttgagcgccgcttacaccgtcgtgagctggcttatctctccgctgatgatttgcgttccatgtcggataaggc

SEQ ID NO: 150384 - DNA, 75 bp, synthetic construct
  source 1..75: mol_type = other DNA
ttcacgtagtcggcctgcgcggctttgcgcctcagcttcctgaaacgcttccaggaagtgacgaagcgccttctc

SEQ ID NO: 150385 - DNA, 75 bp, synthetic construct
  source 1..75: mol_type = other DNA
ctgttctatcaccgagcacgaagggcgcattattcagagccgttcggaagattcgatcattaatgagatcgaagc

SEQ ID NO: 150386 - DNA, 75 bp, synthetic construct
  source 1..75: mol_type = other DNA
tttatccggatatttgtccgcatatggacactaaccacgaaccgacgatcaacctctatcgccgtgcgcgcgatc

SEQ ID NO: 150387 - DNA, 75 bp, synthetic construct
  source 1..75: mol_type = other DNA
aatctctatcgccgtgcgcgtgatctgaaaggcattaaaaagatcctgattgcctctggtgtgcgttatgacatc

SEQ ID NO: 150388 - DNA, 75 bp, synthetic construct
  source 1..75: mol_type = other DNA
aatcagttacaacgcacgggtacagtgctcagcgaaaaacaacaaaagctgatgcagcagttaagcacccggctt

SEQ ID NO: 150389 - DNA, 75 bp, synthetic construct
  source 1..75: mol_type = other DNA
ttggctctgaaacgcagttcaccgctggagatgccgccagtggacaggcatttcttgcaatggctggcttcacac

SEQ ID NO: 150390 - DNA, 75 bp, synthetic construct
  source 1..75: mol_type = other DNA
cctttgaacggtttggtcctgtttttgacgcaatcggaagcgggatcagccaggtgtttaactggtttaaatcgc

SEQ ID NO: 150391 - DNA, 75 bp, synthetic construct
  source 1..75: mol_type = other DNA
accagcagcagcgtattcagtttgagcaggcgaaagagggcgttacggcgctgaaccgcattctgccgcgtctca

SEQ ID NO: 150392 - DNA, 75 bp, synthetic construct
  source 1..75: mol_type = other DNA
ttaacctcccgtgaacagaaactggcgatcagttcccgcagcgtggcgaacatcattcgcaaaaccattcagcgc

SEQ ID NO: 150393 - DNA, 75 bp, synthetic construct
  source 1..75: mol_type = other DNA
cgtgattactttgagatgcgcgagcaggtagtgaccgcgaaagcgggctggtgtgcagtcatgcgcatggtgaaa

SEQ ID NO: 150394 - DNA, 75 bp, synthetic construct
  source 1..75: mol_type = other DNA
acgccaggcgcgcgtgctgccgcttaatgagctgaaagacaagctcgaggcgatggaaggcgtgcagtttaagca

SEQ ID NO: 150395 - DNA, 75 bp, synthetic construct
  source 1..75: mol_type = other DNA
agctgcagatccgtctggaagagcaaaacgaagtagtggcggaagccattgagcgccaggaagaaaacgaagcgc

SEQ ID NO: 150396 - DNA, 75 bp, synthetic construct
  source 1..75: mol_type = other DNA
ttcacgtagtcggtctgcgtggttttgcaccgcaactccctgaaacgcttccaggaactgacgaagcgccttccc

SEQ ID NO: 150397 - DNA, 75 bp, synthetic construct
  source 1..75: mol_type = other DNA
ttgaacgcgaacggcaggcgcttgcgcgtgtaacgcgggcgcgtgagcggtattcgcgcgcgcaggaaaccgcgg

SEQ ID NO: 150398 - DNA, 75 bp, synthetic construct
  source 1..75: mol_type = other DNA
aattcatgttcatctgcataacgttgttacacagaatccccgcgaactggcgaaactggtcggcgaaatggtcag

SEQ ID NO: 150399 - DNA, 75 bp, synthetic construct
  source 1..75: mol_type = other DNA
gcagaattcgacggtaaagagaacgaagaactggaagcgctgaacatcgaagtcgccgttgctgggcgcatgatg

SEQ ID NO: 150400 - DNA, 75 bp, synthetic construct
  source 1..75: mol_type = other DNA
caggacgatatctcggactatgtggcttctaacgttaaagatacgcttagccgtctgaatggcgtcggtgacgta

SEQ ID NO: 150401 - DNA, 75 bp, synthetic construct
  source 1..75: mol_type = other DNA
ggctgaacgcacagcaaaggttatggccaacaaccttgacggcgatctgaaatcactcggcagtgcatgggaagg

SEQ ID NO: 150402 - DNA, 75 bp, synthetic construct
  source 1..75: mol_type = other DNA
gttcgttggtttgcagacgcttgttgcggcggctggttcaggagagctgcaaaaactgaccagagaattgcaggg

SEQ ID NO: 150403 - DNA, 75 bp, synthetic construct
  source 1..75: mol_type = other DNA
gacccgcgtggtggttgacgtgtacggctcgctctctctgaccggtaaaggccaccacactgatatcgccattat

SEQ ID NO: 150404 - DNA, 75 bp, synthetic construct
  source 1..75: mol_type = other DNA
gtcaggaaaccgggctgtcactctctggcctgatgatgaaaaacgagctggcgctgcacagcaaagaagagctgg

SEQ ID NO: 150405 - DNA, 75 bp, synthetic construct
  source 1..75: mol_type = other DNA
cgcggcggaaatcgctatggagcataacctcggcctgacttgtgatccggtcgccggacaggtacaggtgccgtg

SEQ ID NO: 150406 - DNA, 75 bp, synthetic construct
  source 1..75: mol_type = other DNA
ggcgctgttcagtccggttggattgattgctgctgcgtttgtggctgcggcggttctcatctggaaatactggga

SEQ ID NO: 150407 - DNA, 75 bp, synthetic construct
  source 1..75: mol_type = other DNA
cgaaactggtcggtgaaatggtcagggcagaggtggaacggcgtgctcgtgccggacgtggcagtttttacgata

SEQ ID NO: 150408 - DNA, 75 bp, synthetic construct
  source 1..75: mol_type = other DNA
aactattaggcgcaagcccggcgcaggtgtgcatcgcggcggaaatcgccatggagcacaacctcggtctgacgt

SEQ ID NO: 150409 - DNA, 75 bp, synthetic construct
  source 1..75: mol_type = other DNA
caacgtcaatagcataacccgcaatgcgacgctctatgacgcgttgaaagcgatgaagttcgccgatttcgccgt

SEQ ID NO: 150410 - DNA, 75 bp, synthetic construct
  source 1..75: mol_type = other DNA
cagaatgaaacgcccggatttgtcgatgacattacctgggattttatcagcaacgttaatagcataacccgtaat

SEQ ID NO: 150411 - DNA, 75 bp, synthetic construct
  source 1..75: mol_type = other DNA
tgtatgccgatatcacgcacttttcccagtactggcattacctgaacgaacaggatgaaacgcccggatttgccg

SEQ ID NO: 150412 - DNA, 75 bp, synthetic construct
  source 1..75: mol_type = other DNA
cgtgcggtaagtacgcgcatccgggcttttatcgatttccttagcgagcatgtaaaaacagctcccggaaaagct

SEQ ID NO: 150413 - DNA, 75 bp, synthetic construct
  source 1..75: mol_type = other DNA
atctgattgaaagaaaagtggatgtcgcgattcgtgctggtacgttgacagactccagtctgcgagccaggccgt

SEQ ID NO: 150414 - DNA, 75 bp, synthetic construct
  source 1..75: mol_type = other DNA
tgccgttaattaagccatttcgtgaacgctatccggaagtgactttgtcgttagtctcttccgaaaccattatta

SEQ ID NO: 150415 - DNA, 75 bp, synthetic construct
  source 1..75: mol_type = other DNA
tcatagcgttaaccactacaccaacagcgtcggcaaaatcctcggttccacaggacgatatttactgatctatgc

SEQ ID NO: 150416 - DNA, 75 bp, synthetic construct
  source 1..75: mol_type = other DNA
ttccagattgcctgccacgaagaaacctttggcctggataaactctacgaactgtgcgaaatcgcccgtgaagag

SEQ ID NO: 150417 - DNA, 75 bp, synthetic construct
  source 1..75: mol_type = other DNA
ttatgctgcgggtctggaactgttcgaccgccgtctgccggagctgatgtctctgctgcgcgatgacgacatcct

SEQ ID NO: 150418 - DNA, 75 bp, synthetic construct
  source 1..75: mol_type = other DNA
ctaatgggtttaatttgtctcaagcccagatatatcacattcaatatgcaggggcttgttcatggaatacttttt

SEQ ID NO: 150419 - DNA, 75 bp, synthetic construct
  source 1..75: mol_type = other DNA
catcaggctactggagtgtcgttataacgcggcagaggctggttgtgcttacgaaagcattgataataagttgcg

SEQ ID NO: 150420 - DNA, 75 bp, synthetic construct
  source 1..75: mol_type = other DNA
tcgccagttctctatcaccatcgtttcggcaatggcgctttctgttctggtggcattgattcttacccctgcgtt

SEQ ID NO: 150421 - DNA, 75 bp, synthetic construct
  source 1..75: mol_type = other DNA
acgtcagcgaactggatgcgcgccagcgatatccgctggccatccgttcaccggaacaggtcgccgccacgggcg

SEQ ID NO: 150422 - DNA, 75 bp, synthetic construct
  source 1..75: mol_type = other DNA
gggcttcggttttaatcccggtcgggtggcatggcaaccggagctggaaaaatacgattaccgcagcgcccgcca

SEQ ID NO: 150423 - DNA, 75 bp, synthetic construct
  source 1..75: mol_type = other DNA
cattggcggccctggatgaagcgccaagggaagaagtcagccaggtatttatttcgccgctgggtgatcaatcga

SEQ ID NO: 150424 - DNA, 75 bp, synthetic construct
  source 1..75: mol_type = other DNA
gaagttgccggaccctgcagatgaaggcgcattacagaaatggaggtctgttctaccgttcttcaagagatggct

SEQ ID NO: 150425 - DNA, 75 bp, synthetic construct
  source 1..75: mol_type = other DNA
tatcttactttcagaccttaacggttgtagaaaaatacttagaaatgcaaaacgatttctaaatggacatacaca

SEQ ID NO: 150426 - DNA, 75 bp, synthetic construct
  source 1..75: mol_type = other DNA
gtccatatcgccccgccggaagccacactgcagtgtatggctcggcggagaattttatcggtcgtgtccgggttg

SEQ ID NO: 150427 - DNA, 75 bp, synthetic construct
  source 1..75: mol_type = other DNA
tccaccagctgattctggcaggcttccacgcccacggtatcgatatgccattcccgcccttccagatgcgtctgg

SEQ ID NO: 150428 - DNA, 75 bp, synthetic construct
  source 1..75: mol_type = other DNA
ctgctggagctgaccaagttgaaagtctccaacgggcaactggaagatgcgctgaaagaagtgaatgaagcgacg

SEQ ID NO: 150429 - DNA, 75 bp, synthetic construct
  source 1..75: mol_type = other DNA
agtgccgatttgccgaaagatatcgtcgcgcaattcaaaattaaccgcgagctgtcggcggcgttgaatcaacag

SEQ ID NO: 150430 - DNA, 75 bp, synthetic construct
  source 1..75: mol_type = other DNA
ggtaaacagttcgtcgatgatctggtcgaaaaaggcttactggatagcgttactcgcgttgccgtggacgtttat

SEQ ID NO: 150431 - DNA, 75 bp, synthetic construct
  source 1..75: mol_type = other DNA
aacgctggattattgatcgttacaacatcacgcagtcattgcgcagtgactgcgacggggagagccagcgaattg

SEQ ID NO: 150432 - DNA, 75 bp, synthetic construct
  source 1..75: mol_type = other DNA
ttggcgggctggtcggcttctcaatgattggtattgagtggtcgaaattgcagtggctggtcgccgcgctcggtg

SEQ ID NO: 150433 - DNA, 75 bp, synthetic construct
  source 1..75: mol_type = other DNA
atgacggtcccgttttccgggggcgctatattgatgagctcagcgccgcacggagcagaatgctccatatgcacc

SEQ ID NO: 150434 - DNA, 75 bp, synthetic construct
  source 1..75: mol_type = other DNA
ccacatactgctggaacgaacccggtacagagaaaatatccatgatgcagaatgtattcgtgaaatccacgaagc

SEQ ID NO: 150435 - DNA, 75 bp, synthetic construct
  source 1..75: mol_type = other DNA
cccctgcagcaaaatgttgtactaccggttaatttatttccggataatgtaaaaataagtatcagacagacaaac

SEQ ID NO: 150436 - DNA, 75 bp, synthetic construct
  source 1..75: mol_type = other DNA
taatacaataatcacagatttttataactcgtgtttgaaaccagttgcactagagttaaaaattgatattgaaat

SEQ ID NO: 150437 - DNA, 75 bp, synthetic construct
  source 1..75: mol_type = other DNA
ccgtgaaactaaagtagataagctcattggagctttgggtgtgctgtggcaacaaaacccagaggaacgtattgt

SEQ ID NO: 150438 - DNA, 75 bp, synthetic construct
  source 1..75: mol_type = other DNA
cggcggcgatgattacccgcaaagccggtccggcgctggcggcaggctgcacgatggtgctgaagcccgccagtc

SEQ ID NO: 150439 - DNA, 75 bp, synthetic construct
  source 1..75: mol_type = other DNA
attccggctggcgtgtttaacgtggtcaccggttcggcgggcgcggtcggtaatgaactgaccagcaacccgctg

SEQ ID NO: 150440 - DNA, 75 bp, synthetic construct
  source 1..75: mol_type = other DNA
acgccgggcaaacctgcgtctgcgccaaccgcctgtatgtgcaggacggcgtgtatgaccgctttgccgaaaaat

SEQ ID NO: 150441 - DNA, 75 bp, synthetic construct
  source 1..75: mol_type = other DNA
acatggttttacaccgatgacgcagccgtcacaaaagagtggctgcgggcacattgtgacgatgtggaagtgatc

SEQ ID NO: 150442 - DNA, 75 bp, synthetic construct
  source 1..75: mol_type = other DNA
tcagctacgccgcctcttttattgagtggtttgccgaagaaggcaaacgcatttatggcgacaccattcccggtc

SEQ ID NO: 150443 - DNA, 75 bp, synthetic construct
  source 1..75: mol_type = other DNA
cgaacggcgacaagctgggtagcgtgcccaaaatgggcgctgatgaaacccgcgccgctatcgacgccgccaacc

SEQ ID NO: 150444 - DNA, 75 bp, synthetic construct
  source 1..75: mol_type = other DNA
gaagaagtggtgtacatcataacggagacagtgagaaaaacggcgatgcaaatcacctggagagggatgtatcag

SEQ ID NO: 150445 - DNA, 75 bp, synthetic construct
  source 1..75: mol_type = other DNA
agtcagatgcgttttacggggctgaagcggggttaccgactggcagagctggtcctgatgcatgagcgactggca

SEQ ID NO: 150446 - DNA, 75 bp, synthetic construct
  source 1..75: mol_type = other DNA
atgactggcgatgagttcatggaaaggttctcctggcatgtggcggataaggggttccgtatggtgaggtactac

SEQ ID NO: 150447 - DNA, 75 bp, synthetic construct
  source 1..75: mol_type = other DNA
ataatcgggtacggtgaaaacggcgaacgctggctggtggaccgctataacatccgccagtccctgcgttgtgat

SEQ ID NO: 150448 - DNA, 75 bp, synthetic construct
  source 1..75: mol_type = other DNA
atgcttccccgttttgccgatatttttcagcagggaaaccgctggcttaactggctggagaaacaaccggaaggg

SEQ ID NO: 150449 - DNA, 75 bp, synthetic construct
  source 1..75: mol_type = other DNA
tcttacctgaaaaagccgccggtgccaatgagccgtctggaacactatgccggtcaggatgaaactggtctgcgt

SEQ ID NO: 150450 - DNA, 75 bp, synthetic construct
  source 1..75: mol_type = other DNA
cgttacaacagccaccgcacaaaacgggaagaatacctggtgatgagtggagatgagttcatggaaaggttctcg

SEQ ID NO: 150451 - DNA, 75 bp, synthetic construct
  source 1..75: mol_type = other DNA
atgcttccccgttttgccgatatttttcagcagggaaaccgctgggttaactggctggagaagcagccggaaggg

SEQ ID NO: 150452 - DNA, 75 bp, synthetic construct
  source 1..75: mol_type = other DNA
cggctggaatgtcaacatatccagggtgatggataacgccacacatgtggcggtgtacttcggctcttacctgaa

SEQ ID NO: 150453 - DNA, 75 bp, synthetic construct
  source 1..75: mol_type = other DNA
ccccgactgcccgtggcagcatattgtgttcacacttccctgccagtactggcccctgatattccacaacaggtg

SEQ ID NO: 150454 - DNA, 75 bp, synthetic construct
  source 1..75: mol_type = other DNA
gtggctggaatgtcaacgtatcccgggtgatggataacgccacgcatgtggcggtgtactttggctcttacctga

SEQ ID NO: 150455 - DNA, 75 bp, synthetic construct
  source 1..75: mol_type = other DNA
tggcatgtagcagataaggggttccgtatggtgaggtactacggtttcctgagtccgtcgaaacggcggttactg

SEQ ID NO: 150456 - DNA, 75 bp, synthetic construct
  source 1..75: mol_type = other DNA
ttgcagtctgactccgcacgcctgaaagcgctcgtcgatgaactggaactggcgcagctgtccgccaataaccgc

SEQ ID NO: 150457 - DNA, 75 bp, synthetic construct
  source 1..75: mol_type = other DNA
attggcgcgccgctggtcgcaattctcgccgctgcggtgggttatctggcaacggcgcaagctctgctggcaagg

SEQ ID NO: 150458 - DNA, 75 bp, synthetic construct
  source 1..75: mol_type = other DNA
gccggtatcccgctgtatctcaacaaagaaggtagtggtgacaacattgccaaccatatgttgtggaacatgatg

SEQ ID NO: 150459 - DNA, 75 bp, synthetic construct
  source 1..75: mol_type = other DNA
gatgatgctgaccagcaaagagacgattttgccgctgtttggcgcgttgattctggtcggttgcagtatttactc

SEQ ID NO: 150460 - DNA, 75 bp, synthetic construct
  source 1..75: mol_type = other DNA
ctcgttggtgctcgacaatccggcgccggaagcttttctggtggatctgcaacaggggattcagattttcgagtt

SEQ ID NO: 150461 - DNA, 75 bp, synthetic construct
  source 1..75: mol_type = other DNA
attggcgcgccgctggttgccattctggcatccgcggtcggttacctggcaacagcgcaggcgctattagcgaga

SEQ ID NO: 150462 - DNA, 75 bp, synthetic construct
  source 1..75: mol_type = other DNA
gtaatccagaaaccaatcagcgcgttcttgatcatattccggcaaaccgttggggcgatactcaggatttaatgg

SEQ ID NO: 150463 - DNA, 75 bp, synthetic construct
  source 1..75: mol_type = other DNA
aaatgattgaaaaacagggtgttgaggtgggcttcatgcaggtggatatcaccgcagaaggcgcgccgcagaaga

SEQ ID NO: 150464 - DNA, 75 bp, synthetic construct
  source 1..75: mol_type = other DNA
gcaactgcttatcacagatgttctcgaaaaaacttatgcgttgcagtcagacccttcgcgacggatgcccattct

SEQ ID NO: 150465 - DNA, 75 bp, synthetic construct
  source 1..75: mol_type = other DNA
tggcctggtgcctcagttggggggcgtacgccgcgacggcccccgatagcaaacaaatcacccaagaactggagc

SEQ ID NO: 150466 - DNA, 75 bp, synthetic construct
  source 1..75: mol_type = other DNA
cgtggcttgtcggtccggaggagcgttcagggctgacaacatcacgggcgctgccggaaaggaaagaaaaacgcc

SEQ ID NO: 150467 - DNA, 75 bp, synthetic construct
  source 1..75: mol_type = other DNA
acaggcggtttaactttttccgcgttttatgatacgccagcaggtccgtcagtggtgctgtgcgctgcgctgctg

SEQ ID NO: 150468 - DNA, 75 bp, synthetic construct
  source 1..75: mol_type = other DNA
gagaatgggtgaaaaaatggtttctgttccccatacggtgaatgacttcatttccagaagtgctttgttttttta

SEQ ID NO: 150469 - DNA, 75 bp, synthetic construct
  source 1..75: mol_type = other DNA
tgtcgcttatgttgatgggacggcaggcaatattgagatcccggagaaattactgaataccgggtcgctgggcgg

SEQ ID NO: 150470 - DNA, 75 bp, synthetic construct
  source 1..75: mol_type = other DNA
gcgttcaggatggtggcacttataacatcacgatggccaatggctactcactggttcagggaagtacggcgcggc

SEQ ID NO: 150471 - DNA, 75 bp, synthetic construct
  source 1..75: mol_type = other DNA
tgtatttggcatttgggctttatgcggaagtagtattattcactttattagaccccaactggatcaaggtatttt

SEQ ID NO: 150472 - DNA, 75 bp, synthetic construct
  source 1..75: mol_type = other DNA
atgttcaccagctatcggttgcctgtcatgccagagttgacggtcggcggtggtgttaactggcaaaatcgcgtg

SEQ ID NO: 150473 - DNA, 75 bp, synthetic construct
  source 1..75: mol_type = other DNA
tggaatttgaactcaacggcgcaattaccgacaactggcagctgacatttggcgcaacgcgctatattgcagagg

SEQ ID NO: 150474 - DNA, 75 bp, synthetic construct
  source 1..75: mol_type = other DNA
tctaatcagcagcaatctatttccggcgtcaacctcgacgaagagtacggcaacctgcaacgttttcaacagtat

SEQ ID NO: 150475 - DNA, 75 bp, synthetic construct
  source 1..75: mol_type = other DNA
ggcgttaaatacggcaagtaataatatctccagctataacgttgccggatatacccgccaaaccactattatggc

SEQ ID NO: 150476 - DNA, 75 bp, synthetic construct
  source 1..75: mol_type = other DNA
gcaaactatggcattttcggatacctttctgctaatcagtggtctgttatttatcgcatttttgttggttcctgc

SEQ ID NO: 150477 - DNA, 75 bp, synthetic construct
  source 1..75: mol_type = other DNA
ccagacgcgcaatacgctcgggcaactggcgctggcatttgccgaggctttcaatacccaacataacaagggatt

SEQ ID NO: 150478 - DNA, 75 bp, synthetic construct
  source 1..75: mol_type = other DNA
gtcgaaaatcgacaatatgctttctggcagcacgacctcgctggcaacacagatgcaggatttcttcaccagtct

SEQ ID NO: 150479 - DNA, 75 bp, synthetic construct
  source 1..75: mol_type = other DNA
tgagcggacttaacgcggctcaggcggcgttaaatacggcgagtaataatatttccagctataacgttgccggat

SEQ ID NO: 150480 - DNA, 75 bp, synthetic construct
  source 1..75: mol_type = other DNA
tggaagtgctgaataccgggcatccaggaacggttacgacagcgcatgctaatagcagtttacatggttatgctc

SEQ ID NO: 150481 - DNA, 75 bp, synthetic construct
  source 1..75: mol_type = other DNA
attatttttggtggaaccggttcgggaaaaacaacttttgctaaagcaattgttgatgtttacccgtcaaatcgt

SEQ ID NO: 150482 - DNA, 75 bp, synthetic construct
  source 1..75: mol_type = other DNA
caaacagtttgttgaggcggcgcagccgctggaagccatcagcggaaaagtgaacgactttctcgcccatatcga

SEQ ID NO: 150483 - DNA, 75 bp, synthetic construct
  source 1..75: mol_type = other DNA
actcaatggttgaagatttgggcgatgatgttctggcaagagggtatctagaacaatctggtgtgacagaacggt

SEQ ID NO: 150484 - DNA, 75 bp, synthetic construct
  source 1..75: mol_type = other DNA
ccacattgccgaaaccagcgatttaggccagcacggacgaagcgcgcaatatcaatatatcgccgacctgatgcg

SEQ ID NO: 150485 - DNA, 75 bp, synthetic construct
  source 1..75: mol_type = other DNA
atcaatatatcgctgacctgatgcgtaaatatcagggcaaccgcagcaaaatcgccgacctgttaggcattaccc

SEQ ID NO: 150486 - DNA, 75 bp, synthetic construct
  source 1..75: mol_type = other DNA
cccggtgcatctgctgccttatctcgcctgggcattttccgttgaccgctgggatcgcaactggccggaagagac

SEQ ID NO: 150487 - DNA, 75 bp, synthetic construct
  source 1..75: mol_type = other DNA
agcggcaaccgtccttttagccgcattaatgagtatgggcggcgcagtcggtgttgccgccagtctggcaaccgc

SEQ ID NO: 150488 - DNA, 75 bp, synthetic construct
  source 1..75: mol_type = other DNA
taatgggcaacccggtgcaaaatgtcggtcgctgcctggggacagccgaagtgaatgccaaatattacccgcata

SEQ ID NO: 150489 - DNA, 75 bp, synthetic construct
  source 1..75: mol_type = other DNA
ccgattaccagcgtcagttgatggacggttttcaggaagggctgcaaaaagggtttgctcagggaatgaccgaag

SEQ ID NO: 150490 - DNA, 75 bp, synthetic construct
  source 1..75: mol_type = other DNA
cggttttcaggaagggctgcaaaaaggctttgctcagggaatgaccgaaggtcaggagcagggctttagcgaagg

SEQ ID NO: 150491 - DNA, 75 bp, synthetic construct
  source 1..75: mol_type = other DNA
tttacgatacgccggcgggtccgtcggtggtgctatgtgcggcactgttatttattctcagtatgatgaaaaagc

SEQ ID NO: 150492 - DNA, 75 bp, synthetic construct
  source 1..75: mol_type = other DNA
gctgacctatgaagagcgcggcagtgacggaaaatggcgaaaaccgggcaggggcgctaacgaagcgtttgacct

SEQ ID NO: 150493 - DNA, 75 bp, synthetic construct
  source 1..75: mol_type = other DNA
gaaggggataaatataaatcagaggctgacgttaaaagtcatgacatcatgtttggtgtgacttataacttctga

SEQ ID NO: 150494 - DNA, 75 bp, synthetic construct
  source 1..75: mol_type = other DNA
tgcgattggcgtggtcatcgtggtggctattttgttctggcaatggcgcaatttgctgtcgatgacgattagccc

SEQ ID NO: 150495 - DNA, 75 bp, synthetic construct
  source 1..75: mol_type = other DNA
gcggatatgctggtggtgcagatgaccgaaaccaaggcgcgtgagcattccagaacgcgtctttccaggacgttt

SEQ ID NO: 150496 - DNA, 75 bp, synthetic construct
  source 1..75: mol_type = other DNA
gcgggctgattgcccctgagcagaaacgcgaactgaataaccaggggatctggcttcgtgaaggtgaacgggcgg

SEQ ID NO: 150497 - DNA, 75 bp, synthetic construct
  source 1..75: mol_type = other DNA
gctggccctccgcaccggactgggcacagcgggaaacgtggctcgtcttcccgcaggagcgttctggtgaaacgg

SEQ ID NO: 150498 - DNA, 75 bp, synthetic construct
  source 1..75: mol_type = other DNA
tgccgcaggtccactgggttcatttgttgtctggcgtcgtatgtcatattttggcgatacgctggctcacgcgtc

SEQ ID NO: 150499 - DNA, 75 bp, synthetic construct
  source 1..75: mol_type = other DNA
tgacctgttgtggtgagaggggtaatacatatcatattatttcagcagataagggatatgacgggattatacaga

SEQ ID NO: 150500 - DNA, 75 bp, synthetic construct
  source 1..75: mol_type = other DNA
atggagaagataaacaggggaaaagatacagaaagatgtattgcccttattgattatgagaactgcagtaatctg

SEQ ID NO: 150501 - DNA, 75 bp, synthetic construct
  source 1..75: mol_type = other DNA
atgaaaaagattattgcggtttcagcgcttgctgtggtgggcatgttttcaggctgggccctggctgatagaggc

SEQ ID NO: 150502 - DNA, 75 bp, synthetic construct
  source 1..75: mol_type = other DNA
tttctcctctaacgaggaagcggcaaaaatacttgatagcgaattcggcgataaattattaacagatcttgacag

SEQ ID NO: 150503 - DNA, 75 bp, synthetic construct
  source 1..75: mol_type = other DNA
ctgttcaaagtctaagcctggggatattattagcaagttgtagccttttttcatcctcccttaatgcagaagtca

SEQ ID NO: 150504 - DNA, 75 bp, synthetic construct
  source 1..75: mol_type = other DNA
gctgcagaaactggttgatgaaaaacacggtcaggtggtttctgtcggtaaaattgccgacatctacgccaactg

SEQ ID NO: 150505 - DNA, 75 bp, synthetic construct
  source 1..75: mol_type = other DNA
gtattcttggctcgcgtaatgattacgcaggtgtcgaaaaactcggatataaccgtgcgattaaccgtaaaaaat

SEQ ID NO: 150506 - DNA, 75 bp, synthetic construct
  source 1..75: mol_type = other DNA
tattactaatctgcatggtcgggatctgattagtgaagttgatatattgggtaatgaaataacgctgcgcccctg

SEQ ID NO: 150507 - DNA, 75 bp, synthetic construct
  source 1..75: mol_type = other DNA
gatttggcgtgagggcgtttacctttcccactctgcccacgcgtggctgagctgttgtgaaggatactggttaac

SEQ ID NO: 150508 - DNA, 75 bp, synthetic construct
  source 1..75: mol_type = other DNA
catttgccagcgattagataaaaacaccttaaaatggctgccgctggaaagcgaactacgctggaaattaggaat

SEQ ID NO: 150509 - DNA, 75 bp, synthetic construct
  source 1..75: mol_type = other DNA
atgaacggtgaactggatatggcactgacagccctgccagtagaagaaagcggcctgacaacgttatcgctgttt

SEQ ID NO: 150510 - DNA, 75 bp, synthetic construct
  source 1..75: mol_type = other DNA
accggacgaacggggcgacgggcgcaggcttcgggtgatgttcctctctggcttcttcagactgatgccctgaaa

SEQ ID NO: 150511 - DNA, 75 bp, synthetic construct
  source 1..75: mol_type = other DNA
ggtactggccgtgtccgcactgcggggaatattttcagccggtgatggataacatgaccggataccggaataacc

SEQ ID NO: 150512 - DNA, 75 bp, synthetic construct
  source 1..75: mol_type = other DNA
ctacgaaaagatctgctggccgtcagcacctgactgggcacaacgggaaacgtggcttgtcggtccggaggggcg

SEQ ID NO: 150513 - DNA, 75 bp, synthetic construct
  source 1..75: mol_type = other DNA
atgggcggataaatacaaaggcggtgacaaaagtgatacggtttttggcgcaggccttgcggtgggatacgattt

SEQ ID NO: 150514 - DNA, 75 bp, synthetic construct
  source 1..75: mol_type = other DNA
cgcttgcaatggcaggcatgttttcggcccagactctggctgatgagaataaaacaggcttttatgtgaccggta

SEQ ID NO: 150515 - DNA, 75 bp, synthetic construct
  source 1..75: mol_type = other DNA
ccggcacttccgcctgtcagaaaaaggaaacgaaaaaaaatggcacccgatgaggacaacccctgggtgacttcc

SEQ ID NO: 150516 - DNA, 75 bp, synthetic construct
  source 1..75: mol_type = other DNA
gagtgatgccgccagtgggcagagctttctggcaatggctggttttactccgcaggccattcaggccgcattgcc

SEQ ID NO: 150517 - DNA, 75 bp, synthetic construct
  source 1..75: mol_type = other DNA
agtttgcttaatgtggactaatcctgaattagcacgaggcccttattcccccgggtttggtgtaaaagacacttt

SEQ ID NO: 150518 - DNA, 75 bp, synthetic construct
  source 1..75: mol_type = other DNA
aaagaatattttcatctaatgataatttcaaatttttagactcatctaaaaaaatgaagcaaggcaaaagcctgg

SEQ ID NO: 150519 - DNA, 75 bp, synthetic construct
  source 1..75: mol_type = other DNA
ttttgattgcagccgggattggtctggtagtccagaacacgctgatggtgcccaccccccagccctcctctacca

SEQ ID NO: 150520 - DNA, 75 bp, synthetic construct
  source 1..75: mol_type = other DNA
atgatgcattgcttgaaaaagatatcagcagtgataaggcggtaatcgctgcatgcagtaatggacaggcagcca

SEQ ID NO: 150521 - DNA, 75 bp, synthetic construct
  source 1..75: mol_type = other DNA
gcagttccggaaaactggtcctgaagaacagccttgccggcggcaataccaccgtaaccggaacggatgtctcac

SEQ ID NO: 150522 - DNA, 75 bp, synthetic construct
  source 1..75: mol_type = other DNA
tgagcattattccggtggtgcaacatgggatatccgaaagccgtatatagataaagttctggttattagttcctc

SEQ ID NO: 150523 - DNA, 75 bp, synthetic construct
  source 1..75: mol_type = other DNA
gtttgccgattgttgctgtatttgatactggggtcagtaatgcagcaacagctttgtcaccctggatagtgggaa

SEQ ID NO: 150524 - DNA, 75 bp, synthetic construct
  source 1..75: mol_type = other DNA
gtccactcagatggaattagagcacttgacgcgactaactggatcaaaaatcaattatccaaccagttgccaatt

SEQ ID NO: 150525 - DNA, 75 bp, synthetic construct
  source 1..75: mol_type = other DNA
acggaaagacgttattatggtgcaggaagaccacaaggtgttttggaatcattatatgatagtgatgatagcttc

SEQ ID NO: 150526 - DNA, 75 bp, synthetic construct
  source 1..75: mol_type = other DNA
tcggtcgtaacggaaaagtcaagcataaaaattatgcggtaaaacatgcacttgagagaatccgctattatctaa

SEQ ID NO: 150527 - DNA, 75 bp, synthetic construct
  source 1..75: mol_type = other DNA
ggtacacgacaaggtttattatattgacggtggagttaagacagaagaacgtgatgaatttaagaaaatggcgga

SEQ ID NO: 150528 - DNA, 75 bp, synthetic construct
  source 1..75: mol_type = other DNA
gacaaaactgaaaattaactgtcttttccttcgttataccgatgaggaatgtagcgcggttaaggggagagaata

SEQ ID NO: 150529 - DNA, 75 bp, synthetic construct
  source 1..75: mol_type = other DNA
tccagtgatgatagtaactatacggagccttcagaaaatcagtcatcagttgataaattagctgctgatagagcc

SEQ ID NO: 150530 - DNA, 75 bp, synthetic construct
  source 1..75: mol_type = other DNA
ctatcgcacatttaatttacaaaaaaaatccggtggttttagacccatccttgctccccggaaattcattaaaac

SEQ ID NO: 150531 - DNA, 75 bp, synthetic construct
  source 1..75: mol_type = other DNA
gacaggcttgggtgcggatctacgagcaattaaatattggttcgatgtccagtaatgaggccagcacaccaccca

SEQ ID NO: 150532 - DNA, 75 bp, synthetic construct
  source 1..75: mol_type = other DNA
acaagagattgaagaagagttacagcgttatctggatacagctactcccggtgagatcatttttctatgcggaag

SEQ ID NO: 150533 - DNA, 75 bp, synthetic construct
  source 1..75: mol_type = other DNA
tgcgcaggtcactatggctggttccatcgtcaccctcaccggggacaaagggccagtcatggggtgtatcggcat

SEQ ID NO: 150534 - DNA, 75 bp, synthetic construct
  source 1..75: mol_type = other DNA
atgtcattttctgtgcaggaaaccctgttctcgcttttgcagcacaatgcgatttcaggacacgaaaacgctgtc

SEQ ID NO: 150535 - DNA, 75 bp, synthetic construct
  source 1..75: mol_type = other DNA
tatcaccctgcataacggcagcgttatcagcgggaacaacgtgcagcttgcgggcggcaatatcaccaacagcgg

SEQ ID NO: 150536 - DNA, 75 bp, synthetic construct
  source 1..75: mol_type = other DNA
atcttaatgactaccgggctgaatatcgaatggtcgacattcatggcttctctgttggtcggcaccattggcatc

SEQ ID NO: 150537 - DNA, 75 bp, synthetic construct
  source 1..75: mol_type = other DNA
aaagccacgcagctgtgtccacggtgacagcgggcgataacttcctccttgttgccggtcgtgatattgccagtc

SEQ ID NO: 150538 - DNA, 75 bp, synthetic construct
  source 1..75: mol_type = other DNA
cgaaatgatgctgcttgacgcgaagttaatacctgttgacgtcggatttgaaaaggaccttggatatccatgcgc

SEQ ID NO: 150539 - DNA, 75 bp, synthetic construct
  source 1..75: mol_type = other DNA
gttgggtattataactggcagcgtacaccttatgaccgcccgatttacaccacgtctactggtgctacaggaaat

SEQ ID NO: 150540 - DNA, 75 bp, synthetic construct
  source 1..75: mol_type = other DNA
atagccacgcagcagtgtccacggtgacggcgggcgataacctcctccttgttgctggtcgtgatattgccagtc

SEQ ID NO: 150541 - DNA, 75 bp, synthetic construct
  source 1..75: mol_type = other DNA
acctgggggcggtggtgtccttcaaagggtattatggtgatctggcaatcgtggtggcaaaaacgtcctatgtgg

SEQ ID NO: 150542 - DNA, 75 bp, synthetic construct
  source 1..75: mol_type = other DNA
gttgctatggagccattaaggatgcacaggcgttgtctgaaggggtggtggcttcttcccgttacccgaaacact

SEQ ID NO: 150543 - DNA, 75 bp, synthetic construct
  source 1..75: mol_type = other DNA
acggttttaaactgttccgtgaaaaactggatacccgccgtggctccaaatctgagctggaaacggcactgaaag

SEQ ID NO: 150544 - DNA, 75 bp, synthetic construct
  source 1..75: mol_type = other DNA
acccggcctaccgtcgtctgcgtatcatcactgataacctcaaacaggaagagcacgccattgtccgggtggaag

SEQ ID NO: 150545 - DNA, 75 bp, synthetic construct
  source 1..75: mol_type = other DNA
cagtcagcccgcacagattccgacacaccatcgcgactaacctgatgcgtttgccggatcgtaatctgaagatgg

SEQ ID NO: 150546 - DNA, 75 bp, synthetic construct
  source 1..75: mol_type = other DNA
agtgaaagatctgggcgcagtggtgtccttcaaggggtattacggcgatctggccattgtggtggcgaaaacgtc

SEQ ID NO: 150547 - DNA, 75 bp, synthetic construct
  source 1..75: mol_type = other DNA
tgttacggtgccattcaggatgcgcaggcgttgtccgaaggtgtggtggcttcttcccgttacccgaaacactgg

SEQ ID NO: 150548 - DNA, 75 bp, synthetic construct
  source 1..75: mol_type = other DNA
aggcattatgcgatccaacgtgaaattaggcgatctggtgaaagagggcgatgtgattgcctggattggtgagca

SEQ ID NO: 150549 - DNA, 75 bp, synthetic construct
  source 1..75: mol_type = other DNA
cgatcgcgcttgggccgggctttaccgcaggtaaagattgtcatgcggtgattgaaacgaatcgtgggcactggt

SEQ ID NO: 150550 - DNA, 75 bp, synthetic construct
  source 1..75: mol_type = other DNA
gactggctgtggtcggcggctttaaaattggtgatatcgatccccgtggtgaaacggctgatttcaccagcgttt

SEQ ID NO: 150551 - DNA, 75 bp, synthetic construct
  source 1..75: mol_type = other DNA
cgattttggctaatctaagcgcgattgagcgcattgaaccttgggatgagaataggaaggttccaggaggcactg

SEQ ID NO: 150552 - DNA, 75 bp, synthetic construct
  source 1..75: mol_type = other DNA
cattgatatcaggcgctcattttttaaatgacaatcatccatggattcctgatacaaaatctaaaatccatgatg

SEQ ID NO: 150553 - DNA, 75 bp, synthetic construct
  source 1..75: mol_type = other DNA
gtgatggggaacagtggtcgttcatcgagccattatctaattttaatgttggtaggacggcagaaaaagatagga

SEQ ID NO: 150554 - DNA, 75 bp, synthetic construct
  source 1..75: mol_type = other DNA
gaaacccgttcttccacattccttacaacccacgagatcttactggggtagaaacgaagggtgggggtgggaagt

SEQ ID NO: 150555 - DNA, 75 bp, synthetic construct
  source 1..75: mol_type = other DNA
caggtactctgccctggagcctgttaagaacaccttacaaaaacggcacggtcattaccgccacggattattatt

SEQ ID NO: 150556 - DNA, 75 bp, synthetic construct
  source 1..75: mol_type = other DNA
ggctcttcaggctaaaacaacgttgagagcgaatgaaccggccttaatggagcctttacctgtaactattgtagt

SEQ ID NO: 150557 - DNA, 75 bp, synthetic construct
  source 1..75: mol_type = other DNA
atggggttatttaccacgcgtcagttactcgggtacaccgagcagaaagtgaaatttcgtgcgctgtttcttgag

SEQ ID NO: 150558 - DNA, 75 bp, synthetic construct
  source 1..75: mol_type = other DNA
tctgccggaaggcacactgattcttggaaacactcaggtggagggtgtccgttgttatggcgcaatccaggataa

SEQ ID NO: 150559 - DNA, 75 bp, synthetic construct
  source 1..75: mol_type = other DNA
tgctggacaaaattaccggaaaaacgccggtggcggcctatgtctccccggttgttgaaggaaaagtgctgcgtc

SEQ ID NO: 150560 - DNA, 75 bp, synthetic construct
  source 1..75: mol_type = other DNA
aattattttcagagcagttggaattactaaaatcatgccaacattttttattcaacataaactctttgcctggct

SEQ ID NO: 150561 - DNA, 75 bp, synthetic construct
  source 1..75: mol_type = other DNA
atctggtgccccctgtagttctcgcgtaaatatcacctcactttctacttttaccaaaggaaatttagttgtcga

SEQ ID NO: 150562 - DNA, 75 bp, synthetic construct
  source 1..75: mol_type = other DNA
ggctacgtcaagccgaaacacgaatttaattaccagcaggcggttgagcgccttcccggtgaagatccggctcag

SEQ ID NO: 150563 - DNA, 75 bp, synthetic construct
  source 1..75: mol_type = other DNA
agcgtttttgcgctgccatacaagcgcgtgccacatccggcctatggcaatgcccgtattccggcttacgaaatg

SEQ ID NO: 150564 - DNA, 75 bp, synthetic construct
  source 1..75: mol_type = other DNA
caccatgtattacaccgggaaaaacccgctggcgaagattggttataagagcgaagacgtcttcgtaccgaaggg

SEQ ID NO: 150565 - DNA, 75 bp, synthetic construct
  source 1..75: mol_type = other DNA
ttcggcgttaccgcaggcaacatggactcgatgatcaaccgttacactgccgatcgccgtttgcgtcatgacgat

SEQ ID NO: 150566 - DNA, 75 bp, synthetic construct
  source 1..75: mol_type = other DNA
gggttaaaaatagtaatccagcagaacggtggggaaaacctgaggaactggtaggaacagccatatttctgtcct

SEQ ID NO: 150567 - DNA, 75 bp, synthetic construct
  source 1..75: mol_type = other DNA
catacgccaatggcgacccagcgccagacacctgccggagcaaagaaagcgccacccgcgcaatctcgcccggtg

SEQ ID NO: 150568 - DNA, 75 bp, synthetic construct
  source 1..75: mol_type = other DNA
tgcgtgaagctcgtcgccagaaccgcaatacccgtccggcgttgactaaacatacgccgatggcgacccagcgtc

SEQ ID NO: 150569 - DNA, 75 bp, synthetic construct
  source 1..75: mol_type = other DNA
ggtcgtgtgcagggtgacagcgggctgacgctcatactgctgagtgccctgaccaatcaggccagcggtgtgctt

SEQ ID NO: 150570 - DNA, 75 bp, synthetic construct
  source 1..75: mol_type = other DNA
gccagcgttaatgcggcaaaaggcagcgagaaaggtaacggtactgagtggactgaaaccacaatagacagcggt

SEQ ID NO: 150571 - DNA, 75 bp, synthetic construct
  source 1..75: mol_type = other DNA
gacctgctaaatttaaagtagtatattcgatagatggaggtcgcccgattgaaaaagtatttaacaatgcacccg

SEQ ID NO: 150572 - DNA, 75 bp, synthetic construct
  source 1..75: mol_type = other DNA
tttgttaccttctttcgagaaagtaaaggcagataaagtgctgtacgctcatgcttcgcgtattttgcaccacga

SEQ ID NO: 150573 - DNA, 75 bp, synthetic construct
  source 1..75: mol_type = other DNA
atgtgtggatcaacccgcctgctattccgctttctaccgaagagatggacagcgtttttgcgctgccgtacaagc

SEQ ID NO: 150574 - DNA, 75 bp, synthetic construct
  source 1..75: mol_type = other DNA
ctcgctcagcggcgcgggccagctggttgcactcggtaacctgacgctgaagctcacacgtggtttgaccgcaca

SEQ ID NO: 150575 - DNA, 75 bp, synthetic construct
  source 1..75: mol_type = other DNA
tgccgttgcctcagcgatacggtgcgattttaaccattgttattggtatctcgatggccgtccttgatggcgcca

SEQ ID NO: 150576 - DNA, 75 bp, synthetic construct
  source 1..75: mol_type = other DNA
tggtgaaacccgcgtgttacgtccgggctacgtcaagccgaagcacttagcatggctttctgaggctttcgtgta

SEQ ID NO: 150577 - DNA, 75 bp, synthetic construct
  source 1..75: mol_type = other DNA
tttataatgggagactagtgacaagactagcaagaaaaattggcatatatgatcgtcttttatcattaaaacaaa

SEQ ID NO: 150578 - DNA, 75 bp, synthetic construct
  source 1..75: mol_type = other DNA
tgcctgtgtgagtggtttacgtatcactcagccacgatccagggcatataaaaaagcgcgtcgatcaggacgcgc

SEQ ID NO: 150579 - DNA, 75 bp, synthetic construct
  source 1..75: mol_type = other DNA
ccgctccgcgcgaacgtagcggtggggccagtggcatgttaggaacggctcgtctactgggtcagagtagtggcg

SEQ ID NO: 150580 - DNA, 75 bp, synthetic construct
  source 1..75: mol_type = other DNA
cgccagctttctcttcccgtaccgctgctaccggtggatttactgcgtatcccgctgttttcactttctatttgc

SEQ ID NO: 150581 - DNA, 75 bp, synthetic construct
  source 1..75: mol_type = other DNA
ggcatcaagcgcctgggtatttattaccgggataaaaacggtgaggaaatagcgctaactgacgctgaagaaaaa

SEQ ID NO: 150582 - DNA, 75 bp, synthetic construct
  source 1..75: mol_type = other DNA
atttttatccaaatttgaaaagccgacccgtgaacaaattcagcaaatgcagaatgaagcgcttgaaggtctgga

SEQ ID NO: 150583 - DNA, 75 bp, synthetic construct
  source 1..75: mol_type = other DNA
ggagccatcagtaaataaaaagtatttgccctattcttatcacctcaatgattacgtgatttcgatggaaaacgg

SEQ ID NO: 150584 - DNA, 75 bp, synthetic construct
  source 1..75: mol_type = other DNA
tctattttgtggtttaaacaagggatggcagggtttggcgaactggtgtccagcgtgcgttggtggactctaatc

SEQ ID NO: 150585 - DNA, 75 bp, synthetic construct
  source 1..75: mol_type = other DNA
ccgcagtcatgacgtacctctgcgcgcgttggctggcccgatttgcggagcgattctgctcgttattggcgcctg

SEQ ID NO: 150586 - DNA, 75 bp, synthetic construct
  source 1..75: mol_type = other DNA
aacagaccgtaagaaagatgcgatttatttgttttccacgcaagagccaaatgacgcgctcgcaagcagcattgg

SEQ ID NO: 150587 - DNA, 75 bp, synthetic construct
  source 1..75: mol_type = other DNA
ggccatccctgtggcaggtgtggggcttatccgtccacctcgtccaccacagccaccactggcggaacgtgaaat

SEQ ID NO: 150588 - DNA, 75 bp, synthetic construct
  source 1..75: mol_type = other DNA
cacggccatggtcactaaccgcgatctgccctgtcttattgcccgcaatggccgggacgatctaaccgtggatgc

SEQ ID NO: 150589 - DNA, 75 bp, synthetic construct
  source 1..75: mol_type = other DNA
gggttcggaagtattcctgtcgctggttgaccagtatgaagccccatacccggaaaatctgcgccatatcaccat

SEQ ID NO: 150590 - DNA, 75 bp, synthetic construct
  source 1..75: mol_type = other DNA
ccgctggcgtggaacgtgtttcacggtcataacctgctgcacgaatattttgcctgcccggagcgcttttatttt

SEQ ID NO: 150591 - DNA, 75 bp, synthetic construct
  source 1..75: mol_type = other DNA
ctgcgcacctttggtgaactgacgttcagtcagcttgcagggctgaacaagctaccattttatctctgcggcgag

SEQ ID NO: 150592 - DNA, 75 bp, synthetic construct
  source 1..75: mol_type = other DNA
ttctcgcagatgacgctgcacagtatgcaacgtgggaaaattatgacctggccggtcagagccggactacgggga

SEQ ID NO: 150593 - DNA, 75 bp, synthetic construct
  source 1..75: mol_type = other DNA
acaagaaattgaagaagagttacagcgttatctggatacagcgacttccggtgagatcatctttctatgtggaag

SEQ ID NO: 150594 - DNA, 75 bp, synthetic construct
  source 1..75: mol_type = other DNA
attctcaagaaaaatacagcccatacaacttgtttcgatatctatttaaaagtaggacaagatccgctagatccg

SEQ ID NO: 150595 - DNA, 75 bp, synthetic construct
  source 1..75: mol_type = other DNA
ccatatggctatccgtgctgctattgactcattcttgtcagcgcaacaggaaggccagcgtccttaccgcaacga

SEQ ID NO: 150596 - DNA, 75 bp, synthetic construct
  source 1..75: mol_type = other DNA
tcgatatcactcacagcacgacggagcagcacctggtggtggacagaacccatccgctcgactatgaggtgtttt

SEQ ID NO: 150597 - DNA, 75 bp, synthetic construct
  source 1..75: mol_type = other DNA
gaacgttactcagaaatctggcacttgcatagaaattacacagcagatccggagcaaaaaagatcactgaatcgc

SEQ ID NO: 150598 - DNA, 75 bp, synthetic construct
  source 1..75: mol_type = other DNA
cgttatctggatgttgctaagcccggtgaaatcatctttttgtgcggcagtagtggtgatggaaagtccgaaatt

SEQ ID NO: 150599 - DNA, 75 bp, synthetic construct
  source 1..75: mol_type = other DNA
cagacagtggggcttatcagtgacattgggagtcaggtggcggatatcacgcgtacacagggagaactgaatgcg

SEQ ID NO: 150600 - DNA, 75 bp, synthetic construct
  source 1..75: mol_type = other DNA
tggcttcgacattacagtgggcagacatacccaactggatggtgcggtgattgcctccactgccacaccggataa

SEQ ID NO: 150601 - DNA, 75 bp, synthetic construct
  source 1..75: mol_type = other DNA
agcgcggcaacgcaggcccacaacagcggcaaaattctttccggcggtgagctgacgttcaccacgccggactac

SEQ ID NO: 150602 - DNA, 75 bp, synthetic construct
  source 1..75: mol_type = other DNA
caggtatcgcagcggaagacaacatcactgtccgggccgggcgcgacgttaatctgctggcggaagagtccgtga

SEQ ID NO: 150603 - DNA, 75 bp, synthetic construct
  source 1..75: mol_type = other DNA
tcagtgcctgtggtgcgaatactgtgctgtgtgcaaatgaagttagtatctgggttgcggaaatggtcgctggcg

SEQ ID NO: 150604 - DNA, 75 bp, synthetic construct
  source 1..75: mol_type = other DNA
taaagtacacccggtagttcaggctggcggtgatgttagctttatccggggttatactttaagcggaactataga

SEQ ID NO: 150605 - DNA, 75 bp, synthetic construct
  source 1..75: mol_type = other DNA
ccggaactggcacatctgctgaaatcaacagaaaaagacccggcagtaaacgccattgctcacgccattctgggc

SEQ ID NO: 150606 - DNA, 75 bp, synthetic construct
  source 1..75: mol_type = other DNA
tcgatgtcacccacagtacgacggagcagcacctggtggtggacaagacccatccgctggattatgaggtgttct

SEQ ID NO: 150607 - DNA, 75 bp, synthetic construct
  source 1..75: mol_type = other DNA
cgcctgccgccggactggctgatccaccagacaaatgcgacacagttcagcctgttctgtaccccggtaatcaac

SEQ ID NO: 150608 - DNA, 75 bp, synthetic construct
  source 1..75: mol_type = other DNA
atgggtgtgatcgaatttctgttagcgttggcgcaggatatgatcctcgccgccattcctgcggtcggctttgcg

SEQ ID NO: 150609 - DNA, 75 bp, synthetic construct
  source 1..75: mol_type = other DNA
cgggagtatcaggtgctgctaatgctgctatccaatatggaacaagcaaaactggtgaggttaaattatctgatg

SEQ ID NO: 150610 - DNA, 75 bp, synthetic construct
  source 1..75: mol_type = other DNA
tgccagtggcgatgtggctggcgcggctgctggagctggtgccgggaagaacgttgttgagaataactcgctcag

SEQ ID NO: 150611 - DNA, 75 bp, synthetic construct
  source 1..75: mol_type = other DNA
tttaatccaaagattgctctggcactactggatgaacgggaaagaaaccagcaatacatcaaatcacgcgaccag

SEQ ID NO: 150612 - DNA, 75 bp, synthetic construct
  source 1..75: mol_type = other DNA
atggaaaggagaacccggtggtgtgattgcggaatgtcatgttaactgcctggttgaaacagatgttcaggctta

SEQ ID NO: 150613 - DNA, 75 bp, synthetic construct
  source 1..75: mol_type = other DNA
catcaacaccatagcaaggttgataaaacacatcgttcaaagatagttgaaattgataaactggataatgattcg

SEQ ID NO: 150614 - DNA, 75 bp, synthetic construct
  source 1..75: mol_type = other DNA
gaaggagcgcatcctgaaagtggtttcgatgaagatttccaaatggaacagcaggccaatgctgaattcatcgcc

SEQ ID NO: 150615 - DNA, 75 bp, synthetic construct
  source 1..75: mol_type = other DNA
aagcttatggcgcttcacaagtggttttgggaacaaagtgaagccgagcgcgctgctggcattcgcatcaaagga

SEQ ID NO: 150616 - DNA, 75 bp, synthetic construct
  source 1..75: mol_type = other DNA
tcgcaaatatgcaccgattgacgaaaagcttatggcgcttcacaagtggttttgggaacaaagtgaagccgagcg

SEQ ID NO: 150617 - DNA, 75 bp, synthetic construct
  source 1..75: mol_type = other DNA
cacatctgattcagcctacctttattactgaatatccggcagaagtgtcaccgctggcccgccgtaatgaggtta

SEQ ID NO: 150618 - DNA, 75 bp, synthetic construct
  source 1..75: mol_type = other DNA
cacatctgattcagcctacctttattactgaatatccggcagaagtatcgccgctggcccgccgtaatgaggtta

SEQ ID NO: 150619 - DNA, 75 bp, synthetic construct
  source 1..75: mol_type = other DNA
cacatctgattcagcctaccttaattactgaatatccggcagaagtttcgccgctggcccgccgtaatgaggtta

SEQ ID NO: 150620 - DNA, 75 bp, synthetic construct
  source 1..75: mol_type = other DNA
atatgcaccgattgacgaaaagcttatggagcttcacaagtggttttgggaacaaagtgaagccgagcgcgctgc

SEQ ID NO: 150621 - DNA, 75 bp, synthetic construct
  source 1..75: mol_type = other DNA
aaaacattctggtcatgcaggctgcgattatcgaatggcaggcaactggcgacgctaagagcggactggcatgga

SEQ ID NO: 150622 - DNA, 75 bp, synthetic construct
  source 1..75: mol_type = other DNA
cacatctgattcagcctaccttgattactgaatatccggcagaagtttcaccgctggcccgccgtaatgaggtta

SEQ ID NO: 150623 - DNA, 75 bp, synthetic construct
  source 1..75: mol_type = other DNA
tgcgctgataaccttaaacataacaaggtattgcatgacgggtgattctgtaattccgccaaacagggttatcga

SEQ ID NO: 150624 - DNA, 75 bp, synthetic construct
  source 1..75: mol_type = other DNA
attgcagaatgtcatgttaactgcctggttgaaacagatgctcaggcttatgcaaacgctgaattcatagcagag

SEQ ID NO: 150625 - DNA, 75 bp, synthetic construct
  source 1..75: mol_type = other DNA
tgcgtgaggcggcagagaaagcaactaaaggaagctacagcgtagggcatacatctgttaacaagcacggcaatt

SEQ ID NO: 150626 - DNA, 75 bp, synthetic construct
  source 1..75: mol_type = other DNA
atatggggcactttggtaagttcccgattcgcctggcatggtttaccgtcgtactgccttctttaacccttaact

SEQ ID NO: 150627 - DNA, 75 bp, synthetic construct
  source 1..75: mol_type = other DNA
gaataagtattttgttgcgctgatcctgattgctttcctttgtgtcgatattccattgttcaccgctaacctcga

SEQ ID NO: 150628 - DNA, 75 bp, synthetic construct
  source 1..75: mol_type = other DNA
gtactgacgtctattctttcaactaccgtggcgcgtcagaactggcactggaataagtattttgttgcgctgatc

SEQ ID NO: 150629 - DNA, 75 bp, synthetic construct
  source 1..75: mol_type = other DNA
acaaacgctgagtacctagtgcgtaaatttgctgaagctgaggccaatcaggctgctgtcttggcgttactggat

SEQ ID NO: 150630 - DNA, 75 bp, synthetic construct
  source 1..75: mol_type = other DNA
aagtaaagcgatggaatgattcccgcgccgctggcattcgcatcaaaggagacgcaggagagcaaagcgatgaaa

SEQ ID NO: 150631 - DNA, 75 bp, synthetic construct
  source 1..75: mol_type = other DNA
tgcgtgaagcggcagaaaaagcaacgtgtggtgagtggtcgctcgaatatggagagggccgatttgatggtgatg

SEQ ID NO: 150632 - DNA, 75 bp, synthetic construct
  source 1..75: mol_type = other DNA
ttcagaggttagagccgagtggaatcagcgagcaaaggaggcaaccagtgagcgaaattaattaccaggaactgc

SEQ ID NO: 150633 - DNA, 75 bp, synthetic construct
  source 1..75: mol_type = other DNA
gcgagaatgcatacatccgcaaccggtacaaagaactggacctgttaatcgggaaaaacattctggtcatgcagg

SEQ ID NO: 150634 - DNA, 75 bp, synthetic construct
  source 1..75: mol_type = other DNA
cgctaagagcggactggcatggatttataacacactgtttggccctggcgaattgccggacgaatctgagaaaga

SEQ ID NO: 150635 - DNA, 75 bp, synthetic construct
  source 1..75: mol_type = other DNA
gctggatgagattggcggtattgctgtcgaaacggtaaccgaagatgcgcatacttctctgcgtttgcaccgtcg

SEQ ID NO: 150636 - DNA, 75 bp, synthetic construct
  source 1..75: mol_type = other DNA
cgaccacgtaccaacgcgatcgttcctgcaaatgaccatgggctggttcctgaaagaaaaacagctggcgatgat

SEQ ID NO: 150637 - DNA, 75 bp, synthetic construct
  source 1..75: mol_type = other DNA
cgacgctcggctgtttctggatgatcctggcctggatttgcgttactctgcgttcctcagccgtttcacccgcta

SEQ ID NO: 150638 - DNA, 75 bp, synthetic construct
  source 1..75: mol_type = other DNA
gctgcgtctctattcatctcaatcataagttgcttgataaagcgcgagtaatgcagttgaaagatgctggactgc

SEQ ID NO: 150639 - DNA, 75 bp, synthetic construct
  source 1..75: mol_type = other DNA
agcgctgatcgtacggcggatgccggggcgcttctcggcgctaatgttgattgtgctgtcgctgaccgtttcttg

SEQ ID NO: 150640 - DNA, 75 bp, synthetic construct
  source 1..75: mol_type = other DNA
gccggggcgcggcggttgatcctcggtatcatcgtcaccttctcgctgattctggcgttaatctgcgttactcag

SEQ ID NO: 150641 - DNA, 75 bp, synthetic construct
  source 1..75: mol_type = other DNA
gcttttccctcctgaccggttcaatgaatgctgtcagactcctgccagcactatggggaatggtgacgggttccg

SEQ ID NO: 150642 - DNA, 75 bp, synthetic construct
  source 1..75: mol_type = other DNA
taaatcgctgctgtcaccgatggagtccagcaaggaaacgctggataaatgtaccagtgctggcgagatattcgg

SEQ ID NO: 150643 - DNA, 75 bp, synthetic construct
  source 1..75: mol_type = other DNA
tataggctccaatatcctcacacagttcaacctgacagccgatcaaatggaccgggtgggcgatacgctgacagc

SEQ ID NO: 150644 - DNA, 75 bp, synthetic construct
  source 1..75: mol_type = other DNA
cttctcaccggacccgtttgaacgcaacctgggacgtttccgtaaaacaccgaacgaaggcacgctgttctatgg

SEQ ID NO: 150645 - DNA, 75 bp, synthetic construct
  source 1..75: mol_type = other DNA
gtcaacgccatgttccacttcttgtcgggcattccacgactgatcttcctgactgcgccgctggcgttcctgctg

SEQ ID NO: 150646 - DNA, 75 bp, synthetic construct
  source 1..75: mol_type = other DNA
gtggaggaagagtatgtcgattgggtgatctcgcgaccgtacatcttcctcgtactgctcaacctggttggtgtc

SEQ ID NO: 150647 - DNA, 75 bp, synthetic construct
  source 1..75: mol_type = other DNA
tgcggcagcacgtccgtttattacccatcacaacgcgctggatctcgacatgtacctgcgtattgcgccggaact

SEQ ID NO: 150648 - DNA, 75 bp, synthetic construct
  source 1..75: mol_type = other DNA
aattggcatcatccagattgatgaaccggcgctacgcgaaggtttaccgctgcgtcgcagcgactgggatgccta

SEQ ID NO: 150649 - DNA, 75 bp, synthetic construct
  source 1..75: mol_type = other DNA
ctgctgggtaacgttccggcgcgtcatcagaataaagacggttcggtggatatcgacaccctgttccgtattggt

SEQ ID NO: 150650 - DNA, 75 bp, synthetic construct
  source 1..75: mol_type = other DNA
tggcttaccgccgacagccggtctgggaattggtatcgaccgtatggtaatgctgttcaccaacagccataccat

SEQ ID NO: 150651 - DNA, 75 bp, synthetic construct
  source 1..75: mol_type = other DNA
cgatgatgcaggtgatcccaggcggcgcggcggcgcgtccgtttatcacccatcacaatgcgctggatctcgaca

SEQ ID NO: 150652 - DNA, 75 bp, synthetic construct
  source 1..75: mol_type = other DNA
atgtctgaacaacacgcacagggcgctgacgcggtagtcgatcttaataatgagctgaaaacgcgtcgtgagaag

SEQ ID NO: 150653 - DNA, 75 bp, synthetic construct
  source 1..75: mol_type = other DNA
tcgtcgcccatcgtggcggcggtaaactggccccggagaacaccctggcggcaatcgacgtgggggcaaaatacg

SEQ ID NO: 150654 - DNA, 75 bp, synthetic construct
  source 1..75: mol_type = other DNA
aacgtaccagcaacggctggggcgtcgcgggtgaactgaactggcaggatttactgcgcgtggatgcaggcagtt

SEQ ID NO: 150655 - DNA, 75 bp, synthetic construct
  source 1..75: mol_type = other DNA
gcggaacgctgccgcgaacatgggatgatggcgaatatcgaaatcaaacccaccacgggcactgagccattaacg

SEQ ID NO: 150656 - DNA, 75 bp, synthetic construct
  source 1..75: mol_type = other DNA
gcaagtgctggcagaactggcaaaacgcggcattgagtgggtacagatcgacgaacccgcgctggtactggaact

SEQ ID NO: 150657 - DNA, 75 bp, synthetic construct
  source 1..75: mol_type = other DNA
gaagccaccgattgtcattggtgatattagccgcccggcaccgattaccgtggagtgggcgaagtatgcgcaatc

SEQ ID NO: 150658 - DNA, 75 bp, synthetic construct
  source 1..75: mol_type = other DNA
caaaaatgtgaagaactggtgctgttgcgcgatgcgctcaatagcggtgatacgtctgcgctggcagcgtggagc

SEQ ID NO: 150659 - DNA, 75 bp, synthetic construct
  source 1..75: mol_type = other DNA
ttgaccgcgatcctgcgcaaattaccagtgagatgattgcgcaatacgaagatgccagcggtaaaaaactctatc

SEQ ID NO: 150660 - DNA, 75 bp, synthetic construct
  source 1..75: mol_type = other DNA
ggtaatcgtgctctggcaaatatctggcaaagcgaagatcacacgttgatcgatatgggcgacgatgatttcacc

SEQ ID NO: 150661 - DNA, 75 bp, synthetic construct
  source 1..75: mol_type = other DNA
cacgttgcggttttccgttgccagcgcgcaaaagcgcaatgtgctgatcccggagggcacccgcgccagcgcggc

SEQ ID NO: 150662 - DNA, 75 bp, synthetic construct
  source 1..75: mol_type = other DNA
caaaattaccggaaaaacgccggtggcggcctatgtctccccgatcgttgaaggaaaagtgctgcgccatcgtgg

SEQ ID NO: 150663 - DNA, 75 bp, synthetic construct
  source 1..75: mol_type = other DNA
aattgataagctggataaacattcgcaaatagataacgattttggcctgcatatcatctatttcctgcaacatgg

SEQ ID NO: 150664 - DNA, 75 bp, synthetic construct
  source 1..75: mol_type = other DNA
caagtggattacgccattgaagccaacatcactatttatcgtgaccaggatgccaactcgataaaggacagtgcc

SEQ ID NO: 150665 - DNA, 75 bp, synthetic construct
  source 1..75: mol_type = other DNA
caggaagtccgttatcgtcaacgttatctggacctcatcgctaacgataaatcccgtcaaacgtttgttgtccgt

SEQ ID NO: 150666 - DNA, 75 bp, synthetic construct
  source 1..75: mol_type = other DNA
tgattcagcctaccttgattacggaatatccggcagaagtctccccgctggcgcgtcgtaaggatgttaacccgg

SEQ ID NO: 150667 - DNA, 75 bp, synthetic construct
  source 1..75: mol_type = other DNA
tgattcagcctaccttgattacggaatatccggcagaagtttccccgctggcgcggcgtaacgatgttaacccgg

SEQ ID NO: 150668 - DNA, 75 bp, synthetic construct
  source 1..75: mol_type = other DNA
cgtcgccatttatttgctggctggatgcctgatttccgcaatgaccgctttgttgatgaaagacagtcaacgcgc

SEQ ID NO: 150669 - DNA, 75 bp, synthetic construct
  source 1..75: mol_type = other DNA
gcttacaggaccaggaagtccgttatcgtcaacgttatctggatctgatcgctaacgataaatcccgtcaaactt

SEQ ID NO: 150670 - DNA, 75 bp, synthetic construct
  source 1..75: mol_type = other DNA
ttctgttcgccataatcctgagttcacaatgatggaactctacatggcgtatgcggattaccacgatttgattga

SEQ ID NO: 150671 - DNA, 75 bp, synthetic construct
  source 1..75: mol_type = other DNA
caatcgtggcgaaatccatatcgtcgaacctgatttggcgagtgtagtaaaaactgccgtagaaggtggtttttt

SEQ ID NO: 150672 - DNA, 75 bp, synthetic construct
  source 1..75: mol_type = other DNA
gggaatactgctgcagatgggatccgttgttacggagccattcaggatgcgcaggcgttgtccgaaggtgtggtg

SEQ ID NO: 150673 - DNA, 75 bp, synthetic construct
  source 1..75: mol_type = other DNA
tcaaccaacacgcggttgataccatcaatcgtggcgaaatccatatcgtcgaacctgatttggcgagtgtagtaa

SEQ ID NO: 150674 - DNA, 75 bp, synthetic construct
  source 1..75: mol_type = other DNA
caatcgtggcgaaatccatatcgtcgagcctgatttggcgagtgtggtaaaaactgccgtagaaggtggtttttt

SEQ ID NO: 150675 - DNA, 75 bp, synthetic construct
  source 1..75: mol_type = other DNA
ttattcgcactgcccgggaagtgaatgatcacaaacctttttgggtaattgatcaggtgaaagcgacggtagctg

SEQ ID NO: 150676 - DNA, 75 bp, synthetic construct
  source 1..75: mol_type = other DNA
agctgggatatcgtccgcgtttttcgatggagcaaggtattgcaatcacaggacagtggctgaaggaacatggca

SEQ ID NO: 150677 - DNA, 75 bp, synthetic construct
  source 1..75: mol_type = other DNA
gtggcgcaggtcgtttcgatcatttcgttgagtggtatatttacctgcataagcgtaccatatcagatatctcaa

SEQ ID NO: 150678 - DNA, 75 bp, synthetic construct
  source 1..75: mol_type = other DNA
gctctacgatttattaaatacgagagacatgatcttgaatgagttgcatcaacatgtttttttaaaggacgatgc

SEQ ID NO: 150679 - DNA, 75 bp, synthetic construct
  source 1..75: mol_type = other DNA
gttccttcaaggccgtcagggagaagctggatacccgtcgcggctctcattccgagctggagacagcggtaaaag

SEQ ID NO: 150680 - DNA, 75 bp, synthetic construct
  source 1..75: mol_type = other DNA
ctgagcgcgcaaaaggccattgcagagctgggatatcgtccgcgtttttcgatggagcaaggtattgcaatcaca

SEQ ID NO: 150681 - DNA, 75 bp, synthetic construct
  source 1..75: mol_type = other DNA
aggggtattacggcgatctggccattgtggtggcgaaaacgtcttatatagcagaagacggtatcgaaaaacgtt

SEQ ID NO: 150682 - DNA, 75 bp, synthetic construct
  source 1..75: mol_type = other DNA
gcaaccggtacaaagaactggacctgttaatcgggaaaaacattctggtcatgcaggctgccattatcgaatggc

SEQ ID NO: 150683 - DNA, 75 bp, synthetic construct
  source 1..75: mol_type = other DNA
agccgcagagaagcgcaacgcaaaattacaaagcgagaatgcatacatccgcaaccggtacaaagaactggacct

SEQ ID NO: 150684 - DNA, 75 bp, synthetic construct
  source 1..75: mol_type = other DNA
tggtcatgcaggctgcgattatcgaatggcaggcaactggcgacgctaaaagcggactggcatggatttataaca

SEQ ID NO: 150685 - DNA, 75 bp, synthetic construct
  source 1..75: mol_type = other DNA
aaacacgaagacatggcttcattcgcatatgaaaataaaaaattgaaaaaaactcttcactttattagatacgag

SEQ ID NO: 150686 - DNA, 75 bp, synthetic construct
  source 1..75: mol_type = other DNA
tattggatctgccacccatgagacgcgttatggcatggccgcctgtgccgtggataatttgattgatgcgttaca

SEQ ID NO: 150687 - DNA, 75 bp, synthetic construct
  source 1..75: mol_type = other DNA
caagtgtatcgcagaactggaaaaaatcgccactgactatgcactgaaatttcagaaagcccaggacgcattaaa

SEQ ID NO: 150688 - DNA, 75 bp, synthetic construct
  source 1..75: mol_type = other DNA
gttgtttgcgccgattatgctgacctggtttttgattctggcggggctggggttacgtagcattattgccaaccc

SEQ ID NO: 150689 - DNA, 75 bp, synthetic construct
  source 1..75: mol_type = other DNA
atgtgggcggtgcatttcttccttgaatacaaaacggtttcttttattgcattaggggcagtggtgctgtcgatt

SEQ ID NO: 150690 - DNA, 75 bp, synthetic construct
  source 1..75: mol_type = other DNA
atatgggacactttggtaagttccctattcgtctggcgtggttcactgtcgtattaccttccttaactcttaatt

SEQ ID NO: 150691 - DNA, 75 bp, synthetic construct
  source 1..75: mol_type = other DNA
ctctgcgtaccgaagacgcgccatatgtccataacgtccgtcgggtacagattgaacaactgtcgcccactttct

SEQ ID NO: 150692 - DNA, 75 bp, synthetic construct
  source 1..75: mol_type = other DNA
tggaattgcggtgaccggaacgatggtgctgacgtctattctttcaaccaccgtggcgcgtcagaactggcactg

SEQ ID NO: 150693 - DNA, 75 bp, synthetic construct
  source 1..75: mol_type = other DNA
ctcatcctcggtaaacgaccgtggtacttacgtctgcgcggcaaactgtacttgctgctgcaacgtaatgctctg

SEQ ID NO: 150694 - DNA, 75 bp, synthetic construct
  source 1..75: mol_type = other DNA
agaatcgaatcacatgctaacacttgataaccacgatccattaagtggcattcctggctataaaagtattccggt

SEQ ID NO: 150695 - DNA, 75 bp, synthetic construct
  source 1..75: mol_type = other DNA
cattaccaaacgtcccaccaacgactggcacggttcgctgtcgttatacaccaaccagccggaaagtagcgaaga

SEQ ID NO: 150696 - DNA, 75 bp, synthetic construct
  source 1..75: mol_type = other DNA
catcccgaaatatactatcaataactcgcttaactggaccatcacccaggcgttttctgccagcgtcaactggac

SEQ ID NO: 150697 - DNA, 75 bp, synthetic construct
  source 1..75: mol_type = other DNA
ggataatgttctgacgccgttacgtgtttatgaatcgggtgcgctggaatgtttactggagaaatataaacccgc

SEQ ID NO: 150698 - DNA, 75 bp, synthetic construct
  source 1..75: mol_type = other DNA
agcgaaaacggcaccctgtccgaacgccggcgggctgccgcgaataaaatgcgtatgaccggcaatctgagtcgg

SEQ ID NO: 150699 - DNA, 75 bp, synthetic construct
  source 1..75: mol_type = other DNA
atgaaagaccgatttaaaggtttgcatggcgatctctttacgccagccgccgacctggtactcacgtcacctgcc

SEQ ID NO: 150700 - DNA, 75 bp, synthetic construct
  source 1..75: mol_type = other DNA
ttgataatagtgttatggggctaaattccctgaagaaagcacttgataaaaataacaaaataatttattcctcag

SEQ ID NO: 150701 - DNA, 75 bp, synthetic construct
  source 1..75: mol_type = other DNA
atggatattcagtgtactcttgctaacacctttcctaatgaacatccggaagcctttattttgattccttcagtg

SEQ ID NO: 150702 - DNA, 75 bp, synthetic construct
  source 1..75: mol_type = other DNA
gttaatcgctattgtagggtttgttgctggcaaagttatttttgctgataatgtagtgtttaggcgaagaatgta

SEQ ID NO: 150703 - DNA, 75 bp, synthetic construct
  source 1..75: mol_type = other DNA
gcgtctgaactggaataccaatgccacatggatgatcacttcggagcaaaaagacaccggtaatcctctgtcggt

SEQ ID NO: 150704 - DNA, 75 bp, synthetic construct
  source 1..75: mol_type = other DNA
atcgtggccggggataacgttatcgggcaaaccgcttcaggcgcatatatcctcaagtggcagaatggcgggaaa

SEQ ID NO: 150705 - DNA, 75 bp, synthetic construct
  source 1..75: mol_type = other DNA
agttgggatattaattctccggtcggtacgaaaaacgcagccgggcatgaaggggtacgtaacaaagatattaac

SEQ ID NO: 150706 - DNA, 75 bp, synthetic construct
  source 1..75: mol_type = other DNA
agattacccgcctgctggagaaattaaatcgaaattatgccgacaaaattacgatttatccggaatttcatcagc

SEQ ID NO: 150707 - DNA, 75 bp, synthetic construct
  source 1..75: mol_type = other DNA
tcgctcccaccgttcaccagattgcccgcggcctcatggctaaggctctggcctcactggcaagcgagggcgcgt

SEQ ID NO: 150708 - DNA, 75 bp, synthetic construct
  source 1..75: mol_type = other DNA
gaattttatatggctattttcttgagcaactattttctgtagcgactggtcgtctcgataaacttctctcagtgg

SEQ ID NO: 150709 - DNA, 75 bp, synthetic construct
  source 1..75: mol_type = other DNA
atggggggcgagtgcctgcgggtgaactatcgtgaatgccagcacctgggcggcttgcccgcggtggcgcttccg

SEQ ID NO: 150710 - DNA, 75 bp, synthetic construct
  source 1..75: mol_type = other DNA
actggcaccgtttctcgacccggacggcaatctccccggctggtttgcccttgaactgatggcgcaaaccgtcgg

SEQ ID NO: 150711 - DNA, 75 bp, synthetic construct
  source 1..75: mol_type = other DNA
gatgatgttatgttgagaaatataaacccaacttattctcaagcagcaattccttttttaattgttaaagatata

SEQ ID NO: 150712 - DNA, 75 bp, synthetic construct
  source 1..75: mol_type = other DNA
gtaatacagatagacatcaagaaaattgggggtttgtcttttcacctttagccagcgagtgtcagcttgcaccat

SEQ ID NO: 150713 - DNA, 75 bp, synthetic construct
  source 1..75: mol_type = other DNA
ccttctggacgaaacggtgatgagccgtaagcctgaaaagagcaaggaaggagaggagccggacgttgatgaagg

SEQ ID NO: 150714 - DNA, 75 bp, synthetic construct
  source 1..75: mol_type = other DNA
cctcctggacgaaacggtgatgagccgtaagcctgaaaaaaacggggaaagtggggcgccggacgttgatgaagg

SEQ ID NO: 150715 - DNA, 75 bp, synthetic construct
  source 1..75: mol_type = other DNA
tcagcgcagcaaactgaccaatcagctggtgcagacggtaagggggtatatccgcgaatgcctgcaatggatgat

SEQ ID NO: 150716 - DNA, 75 bp, synthetic construct
  source 1..75: mol_type = other DNA
cttacagcttactgatgctgagttctggcagatagagcttttgagaataccggtaattgtgagcgaacaggcgga

SEQ ID NO: 150717 - DNA, 75 bp, synthetic construct
  source 1..75: mol_type = other DNA
cgctggtggctgagccgatagcaagagagctgggcgggtatattttttcgcagtctgtacctggcaagttaatca

SEQ ID NO: 150718 - DNA, 75 bp, synthetic construct
  source 1..75: mol_type = other DNA
tcggggagttatgccaacgtatgcaagcagcaggtcatcaacaaggctatccagcttgagcaaaccgacgaggtt

SEQ ID NO: 150719 - DNA, 75 bp, synthetic construct
  source 1..75: mol_type = other DNA
tttctttttattttatgtttactaatgatattaggatttcgaaatgatgaaaagcacgctaaaaaaaatatatag

SEQ ID NO: 150720 - DNA, 75 bp, synthetic construct
  source 1..75: mol_type = other DNA
gtcagtgatgttcctgtgctggcctgtggcacttcctttatatgtcgattatatcggtgatgcaggcagaaggag

SEQ ID NO: 150721 - DNA, 75 bp, synthetic construct
  source 1..75: mol_type = other DNA
cttgcgccgacctccagcaccgtcaataccctgatgatgggtgacgcgctggcgatggctgtcatgcaggcgcgc

SEQ ID NO: 150722 - DNA, 75 bp, synthetic construct
  source 1..75: mol_type = other DNA
ttctctgcgtacggtagatgataacggctggtttggcgaagtcaacgcttcaggagagattcatgttcaggcgac

SEQ ID NO: 150723 - DNA, 75 bp, synthetic construct
  source 1..75: mol_type = other DNA
tcgcggatggaagtaagcgcatagcagaactggaggagcgggaaatactgctcccggaacgtagcagcatgcttc

SEQ ID NO: 150724 - DNA, 75 bp, synthetic construct
  source 1..75: mol_type = other DNA
tgcgtgaggcggcacagaacgcgaaagatttaggtgggattaagaattacaagcgaggtgagcaagctgttgccg

SEQ ID NO: 150725 - DNA, 75 bp, synthetic construct
  source 1..75: mol_type = other DNA
cgccagcgtgatggatgcgatgctggaactcagccgcaccggtctggggctggtggcggtatgtgacgctcaaca

SEQ ID NO: 150726 - DNA, 75 bp, synthetic construct
  source 1..75: mol_type = other DNA
agcggacaaacgacggaagaatagcggcacttgccgcaggcgtaaaatttggcaggaagaagcatccacgaacgc

SEQ ID NO: 150727 - DNA, 75 bp, synthetic construct
  source 1..75: mol_type = other DNA
gggacggttgattgctatggcgtccggtgtgaaattcggacgtaagccccacctgaaatcggactcggccatggc

SEQ ID NO: 150728 - DNA, 75 bp, synthetic construct
  source 1..75: mol_type = other DNA
ataccctgatgatgggcgacgcgctggcgatggcggtcatgcaggcgcgtggttttaatgaagaagattttgccc

SEQ ID NO: 150729 - DNA, 75 bp, synthetic construct
  source 1..75: mol_type = other DNA
gcgtctttaccgacggcgatttacgtcgctggctggttggcggcggcgcactcaccacgccagttaatgaagcga

SEQ ID NO: 150730 - DNA, 75 bp, synthetic construct
  source 1..75: mol_type = other DNA
ataccctgatgatgggcgacgcactagcgatggcagtcatgcaggcgcgcggatttaatgaagaagattttgccc

SEQ ID NO: 150731 - DNA, 75 bp, synthetic construct
  source 1..75: mol_type = other DNA
ttcgaagcacagcacgatgattacaacaaaatcatggtcaaagcccttgccgaccgtttagccgaagcctttgcg

SEQ ID NO: 150732 - DNA, 75 bp, synthetic construct
  source 1..75: mol_type = other DNA
acgcctcgcgcaccgttggcgtcgtggcggcactgctttccgatactcagcgtgacgactttgtcgctcgtaccc

SEQ ID NO: 150733 - DNA, 75 bp, synthetic construct
  source 1..75: mol_type = other DNA
aacgcgtacccatgtgatcaacgtcagccaccatctgcgccaacagaccgaaaaaaccggcttcgctaactactg

SEQ ID NO: 150734 - DNA, 75 bp, synthetic construct
  source 1..75: mol_type = other DNA
atacttgtacataaaagacaatcacttttcgggtttattactcttccattcgctatatataaaacggtaagtcaa

SEQ ID NO: 150735 - DNA, 75 bp, synthetic construct
  source 1..75: mol_type = other DNA
tcggtttcgggttggtacttcagtcatccagacagcaagtattacgcggtggcgcaaattcagcgcgatcaggtt

SEQ ID NO: 150736 - DNA, 75 bp, synthetic construct
  source 1..75: mol_type = other DNA
aaaaggtctgaagtgtatccagggcaaaggcattgttaactctatttcgatgaaagaaggcgtcgacgcctttat

SEQ ID NO: 150737 - DNA, 75 bp, synthetic construct
  source 1..75: mol_type = other DNA
gcgggcttcctgaatatcgtcggcggttgctgcggcaccacgccacaacatattgcggctatgagccgtgcagtg

SEQ ID NO: 150738 - DNA, 75 bp, synthetic construct
  source 1..75: mol_type = other DNA
gcggaaatcaactttgcggcggcgaaactggcgcgcgcctgtgctgacgagtggactgcccgcacgccggagaaa

SEQ ID NO: 150739 - DNA, 75 bp, synthetic construct
  source 1..75: mol_type = other DNA
attggactttcggggcttatcacgccgtcgctggacgagatggttaacgtggcgaaagagatggagcgtcagggg

SEQ ID NO: 150740 - DNA, 75 bp, synthetic construct
  source 1..75: mol_type = other DNA
ggcggcgctgctttctgacactcagcgtgatgattttgtcgctcgtacccgtaaagagtacgaaaccgtacgtat

SEQ ID NO: 150741 - DNA, 75 bp, synthetic construct
  source 1..75: mol_type = other DNA
tatcggcgcgtgtgaagacatcaaacgtgaactgccgcacgcgctgatttccggcggcgtttctaacgtttcgtt

SEQ ID NO: 150742 - DNA, 75 bp, synthetic construct
  source 1..75: mol_type = other DNA
agtcaatccgagcatcaggcagttcaatggcagctggaagttcaggtgcgttaaatgcatcatttgtatacactg

SEQ ID NO: 150743 - DNA, 75 bp, synthetic construct
  source 1..75: mol_type = other DNA
aggttaatggccaagaggatagtaaacttgtcaaaactatatcaggcgactcctttgaaattccagtaaccattg

SEQ ID NO: 150744 - DNA, 75 bp, synthetic construct
  source 1..75: mol_type = other DNA
tgcgcagtgccggaattatcagcaagccgggagtcaggcggtcagactgggggtcagagggcgatggagagaggc

SEQ ID NO: 150745 - DNA, 75 bp, synthetic construct
  source 1..75: mol_type = other DNA
ggctggtgctgtgctgggtaccgcgctggctatcaagatgagcgcctacattctggttgcgccggtagcggcggc

SEQ ID NO: 150746 - DNA, 75 bp, synthetic construct
  source 1..75: mol_type = other DNA
gtgccagtggtacttccatgtcgtctggtgtatcaggcacgctttcggctcagttcacatacactgcaacatatc

SEQ ID NO: 150747 - DNA, 75 bp, synthetic construct
  source 1..75: mol_type = other DNA
tttgcagtgctgacgacgaaagccacggcaaaccacatccggcagtttacctctccgcactacgaaaattacgcc

SEQ ID NO: 150748 - DNA, 75 bp, synthetic construct
  source 1..75: mol_type = other DNA
atggaggcagctattgcccgtgccaaagagagcaggctagaacagcaacagactaatgcggaaccagaaaaaacg

SEQ ID NO: 150749 - DNA, 75 bp, synthetic construct
  source 1..75: mol_type = other DNA
gcggaaccagaagaacaggttgatccgcgcaaagccgccgtcgaagccgctattgcccgtgccaaagcgcgcaag

SEQ ID NO: 150750 - DNA, 75 bp, synthetic construct
  source 1..75: mol_type = other DNA
gaagccgctattgcccgagccaaagcgcgcaaacgggaacagcaacaggctaatgcggagccagaagaacaggtc

SEQ ID NO: 150751 - DNA, 75 bp, synthetic construct
  source 1..75: mol_type = other DNA
gccgggagtcaggcggtcagactgggggtcagagggcgatggagagaggctgccggagcatggcgtcgggcggca

SEQ ID NO: 150752 - DNA, 75 bp, synthetic construct
  source 1..75: mol_type = other DNA
atggactcagacgaagttcacgaaatgcgcagtgccggaattatcagcaagccgggagtcaggcggtcagactgg

SEQ ID NO: 150753 - DNA, 75 bp, synthetic construct
  source 1..75: mol_type = other DNA
ccagaagaacaggtcgatccgcgcaaagccgccgtcgaagccgctattgcccgtgccaaagcgcgcaagctggaa

SEQ ID NO: 150754 - DNA, 75 bp, synthetic construct
  source 1..75: mol_type = other DNA
ccagatctcaggcaatatgcgcgcgaaaatggcatatgttcgaaagaacatagcggaactggttatcaagtatgg

SEQ ID NO: 150755 - DNA, 75 bp, synthetic construct
  source 1..75: mol_type = other DNA
cgggaacgaaagcggaactgattgcactactgaccaacggcaaaaatgacatttcggagccaacgctgcgtcgct

SEQ ID NO: 150756 - DNA, 75 bp, synthetic construct
  source 1..75: mol_type = other DNA
cgtgaagttacacagtgctttaatacaataatgattctacccgagttgcatttacttgcgctcactgttgattta

SEQ ID NO: 150757 - DNA, 75 bp, synthetic construct
  source 1..75: mol_type = other DNA
gggaacaatccaaagccttgcatatagcaaaaataatgcttgaatccggagtccctcttgcggacatcatgcgtt

SEQ ID NO: 150758 - DNA, 75 bp, synthetic construct
  source 1..75: mol_type = other DNA
cctatccctattcgctgtgttggctggattgtttcgccgatcccaacctggcaaggcagctttatgcctctgcat

SEQ ID NO: 150759 - DNA, 75 bp, synthetic construct
  source 1..75: mol_type = other DNA
ctggagaaaacaacatacatccagacgtatgcgcagcttatgcggttgcgtaatggtggcagcctgaaatcaaat

SEQ ID NO: 150760 - DNA, 75 bp, synthetic construct
  source 1..75: mol_type = other DNA
ttgcagattatgaattaaaaatgattcagtacctgaaaaaaaagtacaagataaaaaatataacaacaccaaaaa

SEQ ID NO: 150761 - DNA, 75 bp, synthetic construct
  source 1..75: mol_type = other DNA
ttggtgatgttgcgttccggtgaattttctaaatcaccagttcgggtttcattttgcccgttctgtggtgaaagt

SEQ ID NO: 150762 - DNA, 75 bp, synthetic construct
  source 1..75: mol_type = other DNA
gtgggtaaatcaaaatgccaggtttatggcaacaagatagaaccgtgtacggcactggcaaactcccttgagcat

SEQ ID NO: 150763 - DNA, 75 bp, synthetic construct
  source 1..75: mol_type = other DNA
gtgaatgaatcaaaatgccaggtttatggcaacaagatagaaccgtgtacggcactggcaaaatcccttgagcat

SEQ ID NO: 150764 - DNA, 75 bp, synthetic construct
  source 1..75: mol_type = other DNA
ataaaaaatataacaacaccaaaaaaatacaactgggttaataagaaaatttcgaaattagggatggataatgca

SEQ ID NO: 150765 - DNA, 75 bp, synthetic construct
  source 1..75: mol_type = other DNA
ttgcagattatgaattaaaaatgatccagtacctgaaaaaaaagtacaagataaaaaacataacgacaccaaaaa

SEQ ID NO: 150766 - DNA, 75 bp, synthetic construct
  source 1..75: mol_type = other DNA
gaaatccccttatggatttatgagaaaggttttatttttgattacaaccgtatttcgcacgccagtagctggcat

SEQ ID NO: 150767 - DNA, 75 bp, synthetic construct
  source 1..75: mol_type = other DNA
ggtaatagctggaatattgagacgcccaataaattattctctgactatgtagggagaatagaaatgaatcaaaat

SEQ ID NO: 150768 - DNA, 75 bp, synthetic construct
  source 1..75: mol_type = other DNA
tgcccctggtgctggcgacatttacgttcatcttcttgcagacattctccagtcagcctgcaggttatagctatt

SEQ ID NO: 150769 - DNA, 75 bp, synthetic construct
  source 1..75: mol_type = other DNA
tgctacggcgaaaagacagcaccgtgctgctctggagcttaaccgcattcctgaattgcttcaccgtatcgatca

SEQ ID NO: 150770 - DNA, 75 bp, synthetic construct
  source 1..75: mol_type = other DNA
tgccttgcacacaccgaccgttaccggctggtagtgtcgtcagcgtcgatgctgacggtgcagtggagtgggaaa

SEQ ID NO: 150771 - DNA, 75 bp, synthetic construct
  source 1..75: mol_type = other DNA
ttacgctcgtatgttgtcactactcaatatacctcaccatctggaatcgtatcgtcaggtgctttctggtcagta

SEQ ID NO: 150772 - DNA, 75 bp, synthetic construct
  source 1..75: mol_type = other DNA
agctgactgcagcaaggatcgccgctgctctggggatgtacatccggaaaggcgatgggcagagctatgaaccgg

SEQ ID NO: 150773 - DNA, 75 bp, synthetic construct
  source 1..75: mol_type = other DNA
caatgctttaataccatcatgctaatgcctgcagaaaaaatattaattcttacgattgatttatctatccttcca

SEQ ID NO: 150774 - DNA, 75 bp, synthetic construct
  source 1..75: mol_type = other DNA
gatttctggtgagggtggtttaggtgctgattgtgccgattatttattatttttcgtatatgcgattgcgttgct

SEQ ID NO: 150775 - DNA, 75 bp, synthetic construct
  source 1..75: mol_type = other DNA
tcagcgtcgatgctgacggtgcagtggagtgggaaacagtaaaacggttgaccgttcgcggttcgcatgagtcca

SEQ ID NO: 150776 - DNA, 75 bp, synthetic construct
  source 1..75: mol_type = other DNA
gccttcatgatgatccataagccatggggattcagtggcggggatgctgaggatatgcgcagttatgccgatttg

SEQ ID NO: 150777 - DNA, 75 bp, synthetic construct
  source 1..75: mol_type = other DNA
caaggcaatttttttaccgatgaggaatagtgatattatgggaaatgatagattgccagatgaattgcgagtcag

SEQ ID NO: 150778 - DNA, 75 bp, synthetic construct
  source 1..75: mol_type = other DNA
attcaatttgtatttccaaatcgacgcttgaaggattgcgcaccgaaactggataccgtaacgcgaccttatcag

SEQ ID NO: 150779 - DNA, 75 bp, synthetic construct
  source 1..75: mol_type = other DNA
agtaactggttcggcttttcagatgccgtcgatgccgtggttgacagaattgctgatttagaagctaaacagtca

SEQ ID NO: 150780 - DNA, 75 bp, synthetic construct
  source 1..75: mol_type = other DNA
agcaactcatcagcgagcgtgatcatgctgagtctgctttagctgatatgtattttgcagcaaccggggataggc

SEQ ID NO: 150781 - DNA, 75 bp, synthetic construct
  source 1..75: mol_type = other DNA
tgcagcagagaacgcagataaagatcagttgcgacgccaccaactaatgattgaaacgcgcaagtggctactggc

SEQ ID NO: 150782 - DNA, 75 bp, synthetic construct
  source 1..75: mol_type = other DNA
ctgatgagatcctcgatatagctgatgatgctaagaacgttgataaagaccaactacgccgccaccaactgatga

SEQ ID NO: 150783 - DNA, 75 bp, synthetic construct
  source 1..75: mol_type = other DNA
tgcagcagagaacactgataaagatcaattgcgccgccatcaactgatgattgaaacgcgtaaatggttactggc

SEQ ID NO: 150784 - DNA, 75 bp, synthetic construct
  source 1..75: mol_type = other DNA
aagatgtgtctattccgaccgtggaagaactgctggctgcgcacaatccgtgggcgaaagtcgttccgaacgatc

SEQ ID NO: 150785 - DNA, 75 bp, synthetic construct
  source 1..75: mol_type = other DNA
cgtgaaaatccgccagtcgaaaccggagcatggaaagacgctgttgactgggtgctcaaagaggcttgccaggtt

SEQ ID NO: 150786 - DNA, 75 bp, synthetic construct
  source 1..75: mol_type = other DNA
agattgaagggcttcgaaaactggttgctgaacttgaggagacaaaatcaaaactcaacgagcagcgtgaatatt

SEQ ID NO: 150787 - DNA, 75 bp, synthetic construct
  source 1..75: mol_type = other DNA
aaacaggtgcatggaaagatgctgttgactgggtactcaaagaggcttgtcaggttgtaaacattcgcatcaaag

SEQ ID NO: 150788 - DNA, 75 bp, synthetic construct
  source 1..75: mol_type = other DNA
tgctgaacttgaggagacaaaatcaaaactcaacgagcagcgtgaatattacgaaggtgttatctcggatggaag

SEQ ID NO: 150789 - DNA, 75 bp, synthetic construct
  source 1..75: mol_type = other DNA
actgtaccgtaagcctgatgttgatgtcgttgggtggtttattcgctaatgatcttgttgattgggtatccgttg

SEQ ID NO: 150790 - DNA, 75 bp, synthetic construct
  source 1..75: mol_type = other DNA
aaggcgctcgcactaatgacgcccgtggaatatattttaaaagagaataaaaattgcaatatgtggtggacccat

SEQ ID NO: 150791 - DNA, 75 bp, synthetic construct
  source 1..75: mol_type = other DNA
agcacccaacgccattctatacctgttaattttccctgcgatgttcacctttaaatgccggaatgctgctcgcaa

SEQ ID NO: 150792 - DNA, 75 bp, synthetic construct
  source 1..75: mol_type = other DNA
accctacttccagacgcgccgcgcgaaggcattgtgatcaacattgcggagctgcgtctctattactacccgccg

SEQ ID NO: 150793 - DNA, 75 bp, synthetic construct
  source 1..75: mol_type = other DNA
ttggtgatgttgcgttccggtgagttttctaaatcacctattcgagtctcattttgcccattctgtggtgaaagt

SEQ ID NO: 150794 - DNA, 75 bp, synthetic construct
  source 1..75: mol_type = other DNA
tctaccgctattgcgctggccttcttcggcgtggggtccatggtatcggccctggttctccccagactcctcgac

SEQ ID NO: 150795 - DNA, 75 bp, synthetic construct
  source 1..75: mol_type = other DNA
catctttgccggaacgctgatgaacagcggcggtattgcgatacgtttgattaacctcgcccaggtaatggttgg

SEQ ID NO: 150796 - DNA, 75 bp, synthetic construct
  source 1..75: mol_type = other DNA
aatcccggtgaccttacccacctgggatgaagtgattggtcgggatgtgaaagcagaagattttaacggttggtt

SEQ ID NO: 150797 - DNA, 75 bp, synthetic construct
  source 1..75: mol_type = other DNA
gtagcagcatgcttcatcgaacagattttcacgatgattaccaaacggtaatggcatacaaagtttctgaagtca

SEQ ID NO: 150798 - DNA, 75 bp, synthetic construct
  source 1..75: mol_type = other DNA
aaatccgccagtcgaaaccggagcatggaaagacgctgttgactgggtgctcaaagaggcttgccaggttgtaaa

SEQ ID NO: 150799 - DNA, 75 bp, synthetic construct
  source 1..75: mol_type = other DNA
ggtacgaatgccgatttcggcattggcatgcgggtaagttctggctgtattcgactgcgcgatgatgatattaaa

SEQ ID NO: 150800 - DNA, 75 bp, synthetic construct
  source 1..75: mol_type = other DNA
atgactcaggaaaaattgggagtgcttgcgggtattgaagaagaaacagcgcgttctcgcgtatcccaatacgaa

SEQ ID NO: 150801 - DNA, 75 bp, synthetic construct
  source 1..75: mol_type = other DNA
ccaggctacgggctaaactcactcaggaaaaattgggggtattggccggaattgaagaagccacagcttactccc

SEQ ID NO: 150802 - DNA, 75 bp, synthetic construct
  source 1..75: mol_type = other DNA
atgtttatattgagaaataaaagaaaagagtcaggtttgtcactgattgaagcgtcattagtgattattttatct

SEQ ID NO: 150803 - DNA, 75 bp, synthetic construct
  source 1..75: mol_type = other DNA
acagagaatacctatggattctggcaaggaccccaactattccagataaagtaaaagcagactatgtgcgaaccg

SEQ ID NO: 150804 - DNA, 75 bp, synthetic construct
  source 1..75: mol_type = other DNA
ggtcggtctgctgattggcattttagccgggtactacggcggctggctggaacgcgtgctgatgcgttttactga

SEQ ID NO: 150805 - DNA, 75 bp, synthetic construct
  source 1..75: mol_type = other DNA
accgaaggcgtttccctgcgcgatatcgtcaccatcgccaccgtgctggtcgccagtagcacagtgaccaaagat

SEQ ID NO: 150806 - DNA, 75 bp, synthetic construct
  source 1..75: mol_type = other DNA
gattatcgtcacccgcgtcagcgacaacggcgatattgcccatgacgtgcgccaccagttgctggcaagcccgtc

SEQ ID NO: 150807 - DNA, 75 bp, synthetic construct
  source 1..75: mol_type = other DNA
tggctgcgaaaactggccgtatggtacaaagcaaccacgttactgttactcaaactaaacgcgccactggtgctg

SEQ ID NO: 150808 - DNA, 75 bp, synthetic construct
  source 1..75: mol_type = other DNA
agcgtcaattgcaacatgcgcgtattctggggattgggtatgccgtaccgggcttccttaaagccgatggtcgta

SEQ ID NO: 150809 - DNA, 75 bp, synthetic construct
  source 1..75: mol_type = other DNA
atgcaactgcatgaaaaccaccccacgaagcgggcgggcgaggcggggaaagcactgcgcgctggcggtggtgct

SEQ ID NO: 150810 - DNA, 75 bp, synthetic construct
  source 1..75: mol_type = other DNA
atgcaactgcatgaaaaccacctcatgaagcgggcaggcgaggcggggaaagcactgcgcgctggcggtggtgct

SEQ ID NO: 150811 - DNA, 75 bp, synthetic construct
  source 1..75: mol_type = other DNA
caagcaccgagtcgtcagcactggctcggcactgacagttacgggcgagacctactttcacgtttaatctacggc

SEQ ID NO: 150812 - DNA, 75 bp, synthetic construct
  source 1..75: mol_type = other DNA
aaccgatttgaacgtggtctggaacaggtcagcgccacttatgggaaacggaacgacggagggattagtgtactt

SEQ ID NO: 150813 - DNA, 75 bp, synthetic construct
  source 1..75: mol_type = other DNA
agttagccgcgcagtctgtcgcaggcaaaatcgtcgcactggaaaatatgattgataagaaagccatgagagaac

SEQ ID NO: 150814 - DNA, 75 bp, synthetic construct
  source 1..75: mol_type = other DNA
tttagatgaccagtccataaagccttttatcgcagaaatagtctgtggagaaggaatatcaaatttttggaaaga

SEQ ID NO: 150815 - DNA, 75 bp, synthetic construct
  source 1..75: mol_type = other DNA
gcgctaaatacaccgtcagctcctgcaatgattcaacaaattgttacacaggagtggatggcaaatgataaggca

SEQ ID NO: 150816 - DNA, 75 bp, synthetic construct
  source 1..75: mol_type = other DNA
ctttttgggcactatcattcgagtttgatcgtttatggcgaaacaccggaaaaggcggttaataatggtgccaga

SEQ ID NO: 150817 - DNA, 75 bp, synthetic construct
  source 1..75: mol_type = other DNA
gggaatggattctcatggtttcggcatggcttcggtgcgttttatttgtggcactcaggacagccacaaagagct

SEQ ID NO: 150818 - DNA, 75 bp, synthetic construct
  source 1..75: mol_type = other DNA
tgaaagaggagttattagtaatattggagtttttggtggagaaaggatcagttgttggctatatgtcacgggaaa

SEQ ID NO: 150819 - DNA, 75 bp, synthetic construct
  source 1..75: mol_type = other DNA
ggggtattttcgacaaatactataatcagcttccagatgaagctcaagaaactgaagccgataagacgtggaggc

SEQ ID NO: 150820 - DNA, 75 bp, synthetic construct
  source 1..75: mol_type = other DNA
cagcgagcaacaggtcagttgggaaaccattccgctgatcgagcctatcagcttaagtctcggctacaagctggt

SEQ ID NO: 150821 - DNA, 75 bp, synthetic construct
  source 1..75: mol_type = other DNA
attttcatcaacggcataaaggctgatgaagcggatattccggcggataaactgatggccctgccctccagcgaa

SEQ ID NO: 150822 - DNA, 75 bp, synthetic construct
  source 1..75: mol_type = other DNA
acgccgatcttaatgccgggttgatcaatcaggcgcaggcacaaacccgacgtaaagatgttgccagcgaggccg

SEQ ID NO: 150823 - DNA, 75 bp, synthetic construct
  source 1..75: mol_type = other DNA
accgggaaaaacgtgtatgttcttgaaaatcccgacgaagttaaatgcctgattgaacaggctcagaaggacact

SEQ ID NO: 150824 - DNA, 75 bp, synthetic construct
  source 1..75: mol_type = other DNA
acccatttttaccgtcagtacggtacacatgatggcacggtcattgaactggataccgggaaaaacgtgttcgtt

SEQ ID NO: 150825 - DNA, 75 bp, synthetic construct
  source 1..75: mol_type = other DNA
cgcagttgcataaccgtttgtcgtcgatggcaccgcgcctggcggaagatttaagcgcggcgctgaattacagcc

SEQ ID NO: 150826 - DNA, 75 bp, synthetic construct
  source 1..75: mol_type = other DNA
cggagcagatgagaatactggcagagcggttgtcgtacagccgtccggccctgtgtggccaggtcgtggtcatgc

SEQ ID NO: 150827 - DNA, 75 bp, synthetic construct
  source 1..75: mol_type = other DNA
tttcttcactcctttctgcatcttcaggtatcaattggcgcgataatctttacgacgcttcatttcgtggcgttc

SEQ ID NO: 150828 - DNA, 75 bp, synthetic construct
  source 1..75: mol_type = other DNA
gattgaaaccgccgggccggggacgctgatccatccgcagttcggtgaaatgcagggctgtattgacgggcaggt

SEQ ID NO: 150829 - DNA, 75 bp, synthetic construct
  source 1..75: mol_type = other DNA
gcgccacaaaatggctggtgaatgccctggtggatattaaggcaaaagcaggctggctgattgtggtcagtggtc

SEQ ID NO: 150830 - DNA, 75 bp, synthetic construct
  source 1..75: mol_type = other DNA
tggtattgtctgtcttcccgtcgcggtgccccggagaaggctggcgatgacggtctgccgcctgaatattttcag

SEQ ID NO: 150831 - DNA, 75 bp, synthetic construct
  source 1..75: mol_type = other DNA
cccctggcggggcgggctgtcgtgaacggagccagcggagctgtctccgccctggcgggcttccatccctgacgc

SEQ ID NO: 150832 - DNA, 75 bp, synthetic construct
  source 1..75: mol_type = other DNA
aggaacaacaaaattcttttaagtggctggcgacattactggaagaaaaatatgctggtaaaattaccatttcgg

SEQ ID NO: 150833 - DNA, 75 bp, synthetic construct
  source 1..75: mol_type = other DNA
gaatcacgcaaccccaaatggtcccaggaacaacaaaattcttttaagtggctggcgacattactggaagaaaaa

SEQ ID NO: 150834 - DNA, 75 bp, synthetic construct
  source 1..75: mol_type = other DNA
cggggtatgcgtgttctggtgccatcatcactggcaacggccatgatacagcacggaacggctgagtatgcgtga

SEQ ID NO: 150835 - DNA, 75 bp, synthetic construct
  source 1..75: mol_type = other DNA
acagaacaggatgaaacagcgcaaccacccacgcgggaaaaacttaccatcatacgcgaatcgctgaatgcggcg

SEQ ID NO: 150836 - DNA, 75 bp, synthetic construct
  source 1..75: mol_type = other DNA
ttgcacctggcatgaagagttcagtgtttgtgccggatcagttaattgccggtacgctgcaactggtcactgaca

SEQ ID NO: 150837 - DNA, 75 bp, synthetic construct
  source 1..75: mol_type = other DNA
ggtgatttatccccgtgcagaaactctgttacccggagcaaccaccgatgtctgggtaatggtcggacagacgga

SEQ ID NO: 150838 - DNA, 75 bp, synthetic construct
  source 1..75: mol_type = other DNA
agcagagggggcgtagtaatccttgtataccggagtgaagagaaaaatgagcgagatcaactatcaagaacttcg

SEQ ID NO: 150839 - DNA, 75 bp, synthetic construct
  source 1..75: mol_type = other DNA
accaggggatccatctcgcgtaattagcagaggtgacgttgtaattcttgtataccggagtgaagagaaaaatga

SEQ ID NO: 150840 - DNA, 75 bp, synthetic construct
  source 1..75: mol_type = other DNA
ttcgattgaagtggcccacggcgatggtttgcagggttccagctttaactatggtttcggtgcgcatagcgacct

SEQ ID NO: 150841 - DNA, 75 bp, synthetic construct
  source 1..75: mol_type = other DNA
ctggaaaatatgattgataagaaagccatgagagaacgtttatccgtggcattaaccgaattaggcgcactgtaa

SEQ ID NO: 150842 - DNA, 75 bp, synthetic construct
  source 1..75: mol_type = other DNA
gcgaagagaaaagtttcaccgacaatttcagcgttaacccgctgcaactgcccggcgagcgcacgattttgtgta

SEQ ID NO: 150843 - DNA, 75 bp, synthetic construct
  source 1..75: mol_type = other DNA
gtttgtcagcgtcgtcacgcccacctggaaccgcggcgcattcctgccgtacctgctctacatgtaccgctatca

SEQ ID NO: 150844 - DNA, 75 bp, synthetic construct
  source 1..75: mol_type = other DNA
aaagcatatacaagcagatattcacatatctattgccattgataatttaaaaaaacaggggattattctcgataa

SEQ ID NO: 150845 - DNA, 75 bp, synthetic construct
  source 1..75: mol_type = other DNA
tcgctgctgctgtttgccgcgcgtggacacaaagttcgctcacgcgtaaacaatgcgctgtggtcgcgggaatct

SEQ ID NO: 150846 - DNA, 75 bp, synthetic construct
  source 1..75: mol_type = other DNA
acattattgctggcaatcagtgccttctcgttgtgtctgctgggaactttccttgtgcgctccggcgtgctggta

SEQ ID NO: 150847 - DNA, 75 bp, synthetic construct
  source 1..75: mol_type = other DNA
gcgtcattgcgaagtggcggcagcacgttatggcctgagcgcagtagatattctggtggaactgggcaaacgtcg

SEQ ID NO: 150848 - DNA, 75 bp, synthetic construct
  source 1..75: mol_type = other DNA
tggcgacccactgcactgaagcggatgtgtcggcccagcatattcagtatgcgcgtgagcttggcatggataccg

SEQ ID NO: 150849 - DNA, 75 bp, synthetic construct
  source 1..75: mol_type = other DNA
aatgcgccacggggtttgggtagaacataacaccttaattgatgccgaactggtgacgactttttacgaaggaga

SEQ ID NO: 150850 - DNA, 75 bp, synthetic construct
  source 1..75: mol_type = other DNA
gcgttgatggcgttgttagcctaccgtaacaacccggaataccgtaagaaggttgaagacgcgattaatcagcaa

SEQ ID NO: 150851 - DNA, 75 bp, synthetic construct
  source 1..75: mol_type = other DNA
ggggatgaaaggcaaggatgatttcgtcaagattctggcgctgaatgaagcttccgccatcacggctggcagtag

SEQ ID NO: 150852 - DNA, 75 bp, synthetic construct
  source 1..75: mol_type = other DNA
catcgatgctgcccgcaaaaaataccagccgtggtggcagtttggggaaggctactccaccgaaaacgaagagtg

SEQ ID NO: 150853 - DNA, 75 bp, synthetic construct
  source 1..75: mol_type = other DNA
aaagcgcgcaagctggaacagcaacaacaggctaatgcggaaccagaagaacaggttgatccacgcaaagccgcc

SEQ ID NO: 150854 - DNA, 75 bp, synthetic construct
  source 1..75: mol_type = other DNA
gcccgcgccaaagcacgcaagctggaacagcaacaggccaatgcggaaccagaagaacaggtcgatccgcgcaaa

SEQ ID NO: 150855 - DNA, 75 bp, synthetic construct
  source 1..75: mol_type = other DNA
gccaaagcacgcaagctggaacagcaacaggctaatgcggagccagaagaacagattgatccgcgcaaagcggca

SEQ ID NO: 150856 - DNA, 75 bp, synthetic construct
  source 1..75: mol_type = other DNA
aggccgcaaaagagatacagcgtgccgcccgtgcccgggaaacgctcggtattcgtgcagagcgtgagatccggc

SEQ ID NO: 150857 - DNA, 75 bp, synthetic construct
  source 1..75: mol_type = other DNA
gtaaacctgttggccaaacttttcagtagtgaatcagcaacaagggcgaaaagcatcacgattgatggaaagggt

SEQ ID NO: 150858 - DNA, 75 bp, synthetic construct
  source 1..75: mol_type = other DNA
ggaataacccggaataccgaaagcaggtcgaaactgaaatcagtcagcaacgcaccctgccggaaggtcagcgcg

SEQ ID NO: 150859 - DNA, 75 bp, synthetic construct
  source 1..75: mol_type = other DNA
cttcagtgatggcgggctggaggggcgcaaagccggtcttgagcagatgaaaagcagcatccgtaacgcggtgac

SEQ ID NO: 150860 - DNA, 75 bp, synthetic construct
  source 1..75: mol_type = other DNA
gcatcacccagccggaatacctcacgcactggggaccacctgccagccccattaatttcaccacacaactggtgc

SEQ ID NO: 150861 - DNA, 75 bp, synthetic construct
  source 1..75: mol_type = other DNA
gaagcgatgaccgcagcggctctgacatgggccgggatcaaaatcctgaccgggggtaaacccggtggcaaggct

SEQ ID NO: 150862 - DNA, 75 bp, synthetic construct
  source 1..75: mol_type = other DNA
tgcacgatctctgcgccatcgcctggctggtgcgcccggacttattcaccctcaagccgtgttttgtcgcggtag

SEQ ID NO: 150863 - DNA, 75 bp, synthetic construct
  source 1..75: mol_type = other DNA
ggcaaaccagccaatgtacaggtagcattggatctggatgtaaaaggcttccagcagtgggtagctgaggtgctg

SEQ ID NO: 150864 - DNA, 75 bp, synthetic construct
  source 1..75: mol_type = other DNA
gatgcgtcttatgttcatggcgaatccggcatggatggttatgacttcgttgagcacaatcgaaaaccactggag

SEQ ID NO: 150865 - DNA, 75 bp, synthetic construct
  source 1..75: mol_type = other DNA
cattcatagaagccagcaaagagcagggcaaaaccaacggcaagatggtgatcgctacagtgaagggtgacgtcc

SEQ ID NO: 150866 - DNA, 75 bp, synthetic construct
  source 1..75: mol_type = other DNA
tcggtttcgggttggtacttcagccacccggacagcaagtattatgcggtagcgcaaattcagcgcgaccaggtt

SEQ ID NO: 150867 - DNA, 75 bp, synthetic construct
  source 1..75: mol_type = other DNA
aaaaaaccggcttcgctaactactgtctcgctgacttcgttgcgccgaagctttctggtaaagcagattacatcg

SEQ ID NO: 150868 - DNA, 75 bp, synthetic construct
  source 1..75: mol_type = other DNA
atctctgcgccatcgcctggctggtgcgcccggacttattcaccctcaagccgtgttttgtcgcggtagaaactc

SEQ ID NO: 150869 - DNA, 75 bp, synthetic construct
  source 1..75: mol_type = other DNA
tatcgctgccgatccagaagcggctgcctgtgtcttccgtagcggcatcgaaatcgtcatgtgcggtctggatgt

SEQ ID NO: 150870 - DNA, 75 bp, synthetic construct
  source 1..75: mol_type = other DNA
ggctaatgcggagccagaagaacaggttgatccgcgcaaagctgccgtcgaagcggctattgcacgcgccaaagc

SEQ ID NO: 150871 - DNA, 75 bp, synthetic construct
  source 1..75: mol_type = other DNA
ggcaaaccagccaatgtacaggtggcattggatctgaatgtaaaaggcttccaacagtgggtggctgatttgctg

SEQ ID NO: 150872 - DNA, 75 bp, synthetic construct
  source 1..75: mol_type = other DNA
ggttgttgatatcgacggttgcctgggcaaaccttcaaacgtgcaggtggcgctggatctggatgtaagaggctt

SEQ ID NO: 150873 - DNA, 75 bp, synthetic construct
  source 1..75: mol_type = other DNA
atgccctgatgcgtgcgcctgagcctgttaccctggtggccatcggcccgttaaccaatattgcgctgttacttt

SEQ ID NO: 150874 - DNA, 75 bp, synthetic construct
  source 1..75: mol_type = other DNA
aagacattgattccattgccggatgcgatgctggcgcatcttatccggcctacaggtgccaccttccaaaggtcg

SEQ ID NO: 150875 - DNA, 75 bp, synthetic construct
  source 1..75: mol_type = other DNA
actcgcgtcgatgaactgcgcgagcgcggggtccgggcggtattaggcaacgcggcgaatgaagaaattatgcaa

SEQ ID NO: 150876 - DNA, 75 bp, synthetic construct
  source 1..75: mol_type = other DNA
gttgctgatactaaactggcaccggaactggcggagctgggcgttattctgctgatgttcggcgtcggcctgcat

SEQ ID NO: 150877 - DNA, 75 bp, synthetic construct
  source 1..75: mol_type = other DNA
cggaagacagacccgcgctatttgccgctcaatttgcattgtcgcattcatgctggctggtgacttatccgctgg

SEQ ID NO: 150878 - DNA, 75 bp, synthetic construct
  source 1..75: mol_type = other DNA
ggctttggtgcatacgtgggctaccactcatatgttgtcgaacttgaaatgaaaccaaagggcatgttttctaaa

SEQ ID NO: 150879 - DNA, 75 bp, synthetic construct
  source 1..75: mol_type = other DNA
aagcaattgcggatgatatgaaagatcccacgtcggtgatgtttaggaaagataagtttgtcaggactgatcatg

SEQ ID NO: 150880 - DNA, 75 bp, synthetic construct
  source 1..75: mol_type = other DNA
ccgcgaatatgttttatccggcctccctgcgtgccgtttacgagactaccggaaactggcctgtggatggtatag

SEQ ID NO: 150881 - DNA, 75 bp, synthetic construct
  source 1..75: mol_type = other DNA
cgcattattacgtctgcgcaacaagcagacatcactgtggctgatggaagccacgtcattaacttttgtgccaat

SEQ ID NO: 150882 - DNA, 75 bp, synthetic construct
  source 1..75: mol_type = other DNA
cctgtttgaaacgctgctgggcgcggaagacgccattatctccgacgcactgaaccacgcgtctattattgatgg

SEQ ID NO: 150883 - DNA, 75 bp, synthetic construct
  source 1..75: mol_type = other DNA
tcgattatgcttaacccggtgctgttcgcgctgctggagaaatatctggcgaagaccgaaacgctggaagagcag

SEQ ID NO: 150884 - DNA, 75 bp, synthetic construct
  source 1..75: mol_type = other DNA
atcggttggttgattgtggaagacctggtcatggttctgacgctggtattgctgcccgcagtagcaggaatgatg

SEQ ID NO: 150885 - DNA, 75 bp, synthetic construct
  source 1..75: mol_type = other DNA
ctggaactgctggaaacgccaccggcgggggaaggggggacgggggaaacggtggttgccggatgtaaaatatga

SEQ ID NO: 150886 - DNA, 75 bp, synthetic construct
  source 1..75: mol_type = other DNA
gattagcgccaaagtcttccgttcgttcttcgataacccgcaaatggcgttagcgaaagataatgagcaaagcat

SEQ ID NO: 150887 - DNA, 75 bp, synthetic construct
  source 1..75: mol_type = other DNA
cgggtgtggctggcatctgcgtgataccacgcaggttccttccactatgaaggtcatgatcctggactcaggcga

SEQ ID NO: 150888 - DNA, 75 bp, synthetic construct
  source 1..75: mol_type = other DNA
ggcgaaaaacatcgtcaaagcggttgaacgttgtgggctgaaagttgaccaactgatatttgccggtctggcatc

SEQ ID NO: 150889 - DNA, 75 bp, synthetic construct
  source 1..75: mol_type = other DNA
gcgcatctccacgcgatctggtcactatggcggccaaagctaaacaaacatttggactgacagatgacgacctcc

SEQ ID NO: 150890 - DNA, 75 bp, synthetic construct
  source 1..75: mol_type = other DNA
ttcaccacacaactggtgctcgatggtcaggtcgtggcggaggcagtgaacaaatacaaccttcaggacggtaac

SEQ ID NO: 150891 - DNA, 75 bp, synthetic construct
  source 1..75: mol_type = other DNA
tcgttccgacgaagaacagacgtcgaccacaacggatactccggcaacacctgcacgcgtctccaccacgctggg

SEQ ID NO: 150892 - DNA, 75 bp, synthetic construct
  source 1..75: mol_type = other DNA
tatcacattggctatgactcaggtgcagaatcacaatacgaaagcgatgtagaggccatccgcactgctggagtc

SEQ ID NO: 150893 - DNA, 75 bp, synthetic construct
  source 1..75: mol_type = other DNA
atgtcctggattatcttagttattgctggtctgctggaagtggtatgggccgttggcctgaaatatacccacggc

SEQ ID NO: 150894 - DNA, 75 bp, synthetic construct
  source 1..75: mol_type = other DNA
caaatcgtcgccttcccgcaggaagggattttgtcgtatcccaacggtgaagcgttgctggaagaggcgctacgc

SEQ ID NO: 150895 - DNA, 75 bp, synthetic construct
  source 1..75: mol_type = other DNA
tattgaactggatatcgactggccagaatcgaatgacgacttttggaaagatggtgaagaaggtgcttatgcgat

SEQ ID NO: 150896 - DNA, 75 bp, synthetic construct
  source 1..75: mol_type = other DNA
cgaaatctacgaaagcgttattaaccgtattcgtactgagttcccgcacgccgacgacatcaccatgctgggcgg

SEQ ID NO: 150897 - DNA, 75 bp, synthetic construct
  source 1..75: mol_type = other DNA
gacattcgtcacatcattattggtaacgaaggtgcactgtgctatatcactgaagttacagtgaaaatcttcaaa

SEQ ID NO: 150898 - DNA, 75 bp, synthetic construct
  source 1..75: mol_type = other DNA
ctgaacatttggatgagcgccggttgatggtccagtggtgggctgactatcttgatgagataaaaatcatttaca

SEQ ID NO: 150899 - DNA, 75 bp, synthetic construct
  source 1..75: mol_type = other DNA
gtaagttggcagcattacccgctgaaagttcatgatttaaatgaagatgcggaatttgatgagaacggagttgag

SEQ ID NO: 150900 - DNA, 75 bp, synthetic construct
  source 1..75: mol_type = other DNA
aagcctttaactctgccgttgacaaccggctggcagaactgacaatgaacaaactttacgatcgcgcgccggctt

SEQ ID NO: 150901 - DNA, 75 bp, synthetic construct
  source 1..75: mol_type = other DNA
cgcagcattcaatggtgccataaccggtggcagggctgatgtcagtatgcataatgcactgtggactctgggtgg

SEQ ID NO: 150902 - DNA, 75 bp, synthetic construct
  source 1..75: mol_type = other DNA
ttgacccggaacgtggtttccgcttctcaacatacgcaacttggtggattcgccagacgatcgaacgggcgatta

SEQ ID NO: 150903 - DNA, 75 bp, synthetic construct
  source 1..75: mol_type = other DNA
gcactgcgtggagatgttgcctctcgccgccggatgatcgagagtaacttgcgtctggtggtaaaaattgcccgc

SEQ ID NO: 150904 - DNA, 75 bp, synthetic construct
  source 1..75: mol_type = other DNA
gccgattcacatcgtaaaggagctgaacgtttacctgcgaaccgcacgcgagttgtcccataagctggaccacga

SEQ ID NO: 150905 - DNA, 75 bp, synthetic construct
  source 1..75: mol_type = other DNA
cagaactggtttacggtgctgtatccggtaaacagtttgcatggaaggaccaggggatgcatctgtccatgaagg

SEQ ID NO: 150906 - DNA, 75 bp, synthetic construct
  source 1..75: mol_type = other DNA
ttggtttcagtaacgttacgccagtaatcagcacggaaaaaacgaatgatgccacaaaatgggtgctgacaggat

SEQ ID NO: 150907 - DNA, 75 bp, synthetic construct
  source 1..75: mol_type = other DNA
gctgaccctctctgaggcgctggaaagttttaaagctgcgggtgaagactttgcggtaatcatgaacgagtacgc

SEQ ID NO: 150908 - DNA, 75 bp, synthetic construct
  source 1..75: mol_type = other DNA
gtttgagtccggtgcctatatcgatttgattggtaaatatattcaccatgacaatgattacacaggtaactttgc

SEQ ID NO: 150909 - DNA, 75 bp, synthetic construct
  source 1..75: mol_type = other DNA
gttcagataacagcctgaatgcctgctttatgaagaatccgtctcagggacaggccctgaatattcccttggtca

SEQ ID NO: 150910 - DNA, 75 bp, synthetic construct
  source 1..75: mol_type = other DNA
ggttacagtgataattacacccatgttcaggtcggctttgacaaaaaacatgaactggacggagtggacctgttt

SEQ ID NO: 150911 - DNA, 75 bp, synthetic construct
  source 1..75: mol_type = other DNA
tatactgtattaccgtgatggtgccctagaacgtcagtatgagtccgttaataatcacgggcggtgggctaagca

SEQ ID NO: 150912 - DNA, 75 bp, synthetic construct
  source 1..75: mol_type = other DNA
ctagaacgtcagtatgagtccgttaatcatcacgggcggtgggctaagcagcactaccgtccttctcaggttctt

SEQ ID NO: 150913 - DNA, 75 bp, synthetic construct
  source 1..75: mol_type = other DNA
atatcgggaaaaatactcgtaatctgagcattggcgtacatgcgtactgctcgtggacataccttaatggctcgc

SEQ ID NO: 150914 - DNA, 75 bp, synthetic construct
  source 1..75: mol_type = other DNA
ggtgtcgcgattggcgctcacccgagttttcccgacagggaaaattttggtcgcagcgccatgcagctgccgcca

SEQ ID NO: 150915 - DNA, 75 bp, synthetic construct
  source 1..75: mol_type = other DNA
atggcaatgcaaagaagggcatgggcaactgactgacgggattctggctttgcctgccatttcggctacggtatg

SEQ ID NO: 150916 - DNA, 75 bp, synthetic construct
  source 1..75: mol_type = other DNA
tttaatcagctcgacagccacgatactgcgcgatttaaaacgctgctcggtcgggatgttgcgcgcctgcccctg

SEQ ID NO: 150917 - DNA, 75 bp, synthetic construct
  source 1..75: mol_type = other DNA
tgtataccgattgattgatccgagggacggaagcaccttctatgtagggaaaggcaaaggtaaccgcgtatttgc

SEQ ID NO: 150918 - DNA, 75 bp, synthetic construct
  source 1..75: mol_type = other DNA
gtggatgatgatgagttactgaataataaactcaggcaacttcgagagatcagacttgctggtcttgatgtgatc

SEQ ID NO: 150919 - DNA, 75 bp, synthetic construct
  source 1..75: mol_type = other DNA
tgcccacccgcctggatgttgaagtgaacggctttaatgtcacgaacggtgcaatagtgatccacacccaacgcc

SEQ ID NO: 150920 - DNA, 75 bp, synthetic construct
  source 1..75: mol_type = other DNA
ccatcaccgctcgcgatcatgatgacgttcaacagcatgttgataccgtattctgcaagaacggtgatatcacga

SEQ ID NO: 150921 - DNA, 75 bp, synthetic construct
  source 1..75: mol_type = other DNA
cccggcttaactaacatcatgaacggtgctggcagtaatgagttcggtgctgcacacataaaagaattaatcgct

SEQ ID NO: 150922 - DNA, 75 bp, synthetic construct
  source 1..75: mol_type = other DNA
ccacctaaaatagcaaatctttatcttggaaaaaaaataccagatgaattaagaaaaaaaggagctatgtccccg

SEQ ID NO: 150923 - DNA, 75 bp, synthetic construct
  source 1..75: mol_type = other DNA
accagccagtctgtaaccgacgcagaccgccgcattgtgcgcgaatcagtgcgtccctattcagtggtgaaccca

SEQ ID NO: 150924 - DNA, 75 bp, synthetic construct
  source 1..75: mol_type = other DNA
ctgccgttccttgaagcgattcgccagttggctgttgatattggtcgtgaacacgcgctgttcatgcacctgacc

SEQ ID NO: 150925 - DNA, 75 bp, synthetic construct
  source 1..75: mol_type = other DNA
tttagggcagatatgactgagaccctcaatttgagtgtctcagggaactaccagaaaacaatacgcattttctcc

SEQ ID NO: 150926 - DNA, 75 bp, synthetic construct
  source 1..75: mol_type = other DNA
gttgtcaccactcagaccttcctcagccaacagccgcaaaatgatttcgataaaacaataacctacagcgctggt

SEQ ID NO: 150927 - DNA, 75 bp, synthetic construct
  source 1..75: mol_type = other DNA
attgccatataaccaaaagcctgattgccgtctccgaactggcccgcaggggcaggggtacctgtaaaagccatc

SEQ ID NO: 150928 - DNA, 75 bp, synthetic construct
  source 1..75: mol_type = other DNA
gtgaacaaggtcaaagatgactccactggttcagataaggctccagtgtggatcaaccagaacgaggatgtgaac

SEQ ID NO: 150929 - DNA, 75 bp, synthetic construct
  source 1..75: mol_type = other DNA
atgaaactactttctaaatttttttcattaattaattttttattattcaaagttgaaatttcacctctatgctcc

SEQ ID NO: 150930 - DNA, 75 bp, synthetic construct
  source 1..75: mol_type = other DNA
ttagatataagcttttatgtggtgatgagactaatttaaaataccgtgattatctaaaaattttctcaccaagat

SEQ ID NO: 150931 - DNA, 75 bp, synthetic construct
  source 1..75: mol_type = other DNA
tttcttgccagctccatgctcactgataatggtttagctacgcaggattatgcaaactggcccacgcacacgata

SEQ ID NO: 150932 - DNA, 75 bp, synthetic construct
  source 1..75: mol_type = other DNA
ggcgcgagcaatccttgccagagaaacggcgcatgtaaaattccaaccgtggcaggatgataagtggagcagggt

SEQ ID NO: 150933 - DNA, 75 bp, synthetic construct
  source 1..75: mol_type = other DNA
gcgcgatgaaagtgtttttaatcttttacatcatctgtgtactgctgacctggctggtctatggtcggcggaagt

SEQ ID NO: 150934 - DNA, 75 bp, synthetic construct
  source 1..75: mol_type = other DNA
tgctctatctcgccaccttcggttcatttatcggtttttccgctggttttgccatgctggcgaaaactcagttcc

SEQ ID NO: 150935 - DNA, 75 bp, synthetic construct
  source 1..75: mol_type = other DNA
actggaaaaagttgcttatcgtgttgatgcttgctgctcttgtcatcggaggtgtggttgcctggaatgtacacg

SEQ ID NO: 150936 - DNA, 75 bp, synthetic construct
  source 1..75: mol_type = other DNA
gctctacagtgacggccgggttcagattggtaagaacggtacgctttccctgagcggcacgccggaaaatggcgc

SEQ ID NO: 150937 - DNA, 75 bp, synthetic construct
  source 1..75: mol_type = other DNA
gcgctttggactggagtttgagaaatcagcctttggtaaatacaatgtggataacgcgataaacgcgagtttccg

SEQ ID NO: 150938 - DNA, 75 bp, synthetic construct
  source 1..75: mol_type = other DNA
tgaagaataaagtggcggagcatccgcactcgaaattcctcgtctgtaatgaagatatcgatcacattatcggtt

SEQ ID NO: 150939 - DNA, 75 bp, synthetic construct
  source 1..75: mol_type = other DNA
ttgtcagcactgaccgaaaaaatggaaaacacattctggtctcctgaatacaccgattaccatcgaatctcactt

SEQ ID NO: 150940 - DNA, 75 bp, synthetic construct
  source 1..75: mol_type = other DNA
attggaaacagctgcttatcgtgttgatgcttgctgctctgttcatcgtcggagtggttgcctggaatatacacg

SEQ ID NO: 150941 - DNA, 75 bp, synthetic construct
  source 1..75: mol_type = other DNA
gagcatggaaagacgctgttgactgggtgctcaaagaggcttgccaggctgtaaacattggcatcaaaggagagt

SEQ ID NO: 150942 - DNA, 75 bp, synthetic construct
  source 1..75: mol_type = other DNA
ggtgcctccagcgaagcggcactggaacaattacacgctgatttcagaagtgccgggctgaatgaggtgttgcca

SEQ ID NO: 150943 - DNA, 75 bp, synthetic construct
  source 1..75: mol_type = other DNA
agtatcgtgaatatgaacaattctctgtggtgcattactggaaactcaacaacaggaatgctgaacgccaggaat

SEQ ID NO: 150944 - DNA, 75 bp, synthetic construct
  source 1..75: mol_type = other DNA
aaaggaacccccggcaatctgtacagccgcaatctgaatggacaaacatcctactatattctgaaatccgccacc

SEQ ID NO: 150945 - DNA, 75 bp, synthetic construct
  source 1..75: mol_type = other DNA
caggtcatacagggcgatttcgattcccccgtaaatcctgtttccgggctgggaccgctgaaatggacatatgac

SEQ ID NO: 150946 - DNA, 75 bp, synthetic construct
  source 1..75: mol_type = other DNA
cgtaacagccgggttcagtctgaagaaaagagtgccttccgtaccctgacggttaatacacttgatgccacgggc

SEQ ID NO: 150947 - DNA, 75 bp, synthetic construct
  source 1..75: mol_type = other DNA
atgaagaagcgtttttccgacgaacagatcatcagtatcctcctcgaagctaaagccggggtttctgcccgtgag

SEQ ID NO: 150948 - DNA, 75 bp, synthetic construct
  source 1..75: mol_type = other DNA
cgagctgattcgtgcaggcaagcaatatggtctgacaacgcgcgaggaagtgtttgccgatcgcggttatcaggc

SEQ ID NO: 150949 - DNA, 75 bp, synthetic construct
  source 1..75: mol_type = other DNA
aagaacaggcgctgatgcaaacgctggagatggtgcaaaacggtagagttaaaagtatctccggggagtgggcga

SEQ ID NO: 150950 - DNA, 75 bp, synthetic construct
  source 1..75: mol_type = other DNA
accgcaacccaggttcagggtaaagccctctcttataacaacatcgccgataccgatgcggcgctggagtgcgtg

SEQ ID NO: 150951 - DNA, 75 bp, synthetic construct
  source 1..75: mol_type = other DNA
cccgcatggatgggctggagcccggcatacgcccgtcagcgccggggcggtaaaattctccagaagagcggtcga

SEQ ID NO: 150952 - DNA, 75 bp, synthetic construct
  source 1..75: mol_type = other DNA
atgagttacgccatcaggtatgacattggtgactttgagcgttcactcggtgaactcattaaaaagctggaaaac

SEQ ID NO: 150953 - DNA, 75 bp, synthetic construct
  source 1..75: mol_type = other DNA
ctccttccatgagtctctctttgtcattaaatttacccgccagagcgaacttatcgccacaggcacaggcagtga

SEQ ID NO: 150954 - DNA, 75 bp, synthetic construct
  source 1..75: mol_type = other DNA
cgctacgtgctgttggtggtcattctggtgggatcggccttaactggcacgctcatctgggaatggatcaacccc

SEQ ID NO: 150955 - DNA, 75 bp, synthetic construct
  source 1..75: mol_type = other DNA
atggccgccgcgagcgccttgataagcgccgcttcgttttccgggtcagcaaacgccgtcgcctcatcgagcacc

SEQ ID NO: 150956 - DNA, 75 bp, synthetic construct
  source 1..75: mol_type = other DNA
ggagtggcgattggcgcccacccagggtttcctgacagggaaaattttggccgcagtaccatgcaactgacgccg

SEQ ID NO: 150957 - DNA, 75 bp, synthetic construct
  source 1..75: mol_type = other DNA
acaactggcagacgccatcgccagagcggtttacgcttgcgatccggcattgattctcgttggactggcgggaag

SEQ ID NO: 150958 - DNA, 75 bp, synthetic construct
  source 1..75: mol_type = other DNA
ggagatggtgcaacacggcagagtcaaaagtatcaccggcgaatgggcaacggtcacggcgcaaacagtctgcct

SEQ ID NO: 150959 - DNA, 75 bp, synthetic construct
  source 1..75: mol_type = other DNA
tggtgttgatggcaggtttcaccgccggtaatgaaaaaggcgaactggtggtacttggacgcaacggttccgact

SEQ ID NO: 150960 - DNA, 75 bp, synthetic construct
  source 1..75: mol_type = other DNA
taatattaatgttatccctgccagccatttccgctgagcattcggacatgaaaatgtcagatatgcactcatcgg

SEQ ID NO: 150961 - DNA, 75 bp, synthetic construct
  source 1..75: mol_type = other DNA
catgaaagacatgcatgacaaaatgatggctgccgtaaatgagcccgatcccgacaaggcttttgcgaaaggcat

SEQ ID NO: 150962 - DNA, 75 bp, synthetic construct
  source 1..75: mol_type = other DNA
tgcggtgttgccaactcgaaggcactgctcaccaatgtacatggccttaatctggaaaactggcaggaagaactg

SEQ ID NO: 150963 - DNA, 75 bp, synthetic construct
  source 1..75: mol_type = other DNA
gtttctgcgttccacaaagcgactgtgcacgcgctgaacgggcgatgcaggaagagttctaccttgaactaaaag

SEQ ID NO: 150964 - DNA, 75 bp, synthetic construct
  source 1..75: mol_type = other DNA
gacgatctctttgccgcgcgcgtggcgaaggcccgtgatgaaggaaaagttttgcgctatgttggcaatattgat

SEQ ID NO: 150965 - DNA, 75 bp, synthetic construct
  source 1..75: mol_type = other DNA
gactacgacgccattattaaagagatagatgccaatgaaggctccctgactctggaaactcgctttgaccttgcc

SEQ ID NO: 150966 - DNA, 75 bp, synthetic construct
  source 1..75: mol_type = other DNA
ggtcttgatttcaaacgcgtgaacggcggtctgctggttcaggatcgcgatctggggatggtcggtgcagaagaa

SEQ ID NO: 150967 - DNA, 75 bp, synthetic construct
  source 1..75: mol_type = other DNA
gtgtactccgcgaaaatcgccggcattaaagctgccgatgaaggtctggaagtcaaaggttcctcgatggcttct

SEQ ID NO: 150968 - DNA, 75 bp, synthetic construct
  source 1..75: mol_type = other DNA
tggtcactatgatggtgagctgatgcgagctgtacatgagtacaacaactggtgtgtagaagcaggcgagaaacc

SEQ ID NO: 150969 - DNA, 75 bp, synthetic construct
  source 1..75: mol_type = other DNA
agaatctgtattacaggtatatcaacaatttataaatgaaataaaaagtttttcagctaagcaaggagttaacgc

SEQ ID NO: 150970 - DNA, 75 bp, synthetic construct
  source 1..75: mol_type = other DNA
gacgcttgcaacccgtttcgaccttgccatcaaagcctttgaacataccgccgcctacgacagcatgattgccaa

SEQ ID NO: 150971 - DNA, 75 bp, synthetic construct
  source 1..75: mol_type = other DNA
tgccaattatccctcatgggtgctgtggttgaatcatgcgcaatggttcggtattccgctaccgatgtggttgtt

SEQ ID NO: 150972 - DNA, 75 bp, synthetic construct
  source 1..75: mol_type = other DNA
ctggggctgtggatattgctggagaaaacgccgctcggtaaatccatttacctgattgggtctaacgaacgagca

SEQ ID NO: 150973 - DNA, 75 bp, synthetic construct
  source 1..75: mol_type = other DNA
gcttcggaacggcggctagtgcaacgaattacaagtatgacagtgcaagtaagtcatactcttttgataccacaa

SEQ ID NO: 150974 - DNA, 75 bp, synthetic construct
  source 1..75: mol_type = other DNA
aacggtactaactctgacagtgacctgacctccatccagtccgaaatccagcagcgtctgagtgaaattgaccgt

SEQ ID NO: 150975 - DNA, 75 bp, synthetic construct
  source 1..75: mol_type = other DNA
ggctctagcgggtacccagcctcaagctggtaatttaaaggaagtcacaacggtgaaagggaagggggctattga

SEQ ID NO: 150976 - DNA, 75 bp, synthetic construct
  source 1..75: mol_type = other DNA
gctaacgcctgttcactggtgatggcgtgggtggcgactcagtatccaccgggtattgctacggttgtcgctacg

SEQ ID NO: 150977 - DNA, 75 bp, synthetic construct
  source 1..75: mol_type = other DNA
cgaaactcaaaagatgatgggggcaaaaaacagaggtgtattaaagatgggcagaaatatgtcagcagcacgtac

SEQ ID NO: 150978 - DNA, 75 bp, synthetic construct
  source 1..75: mol_type = other DNA
gctgaattacttaaaaatagaggaatcaaagtttggtacgatgaattttctttaggatggggtagcagtttgcga

SEQ ID NO: 150979 - DNA, 75 bp, synthetic construct
  source 1..75: mol_type = other DNA
gcggtatacgcttgcgatccggcattgattctcgtcgggctggcaggaagcgagctgattcgtgcaggcaagcaa

SEQ ID NO: 150980 - DNA, 75 bp, synthetic construct
  source 1..75: mol_type = other DNA
ccgccgatcccctgaaagctctggacgaagccatcagctccatcgacaaattccgctcctccctcggtgcggtgc

SEQ ID NO: 150981 - DNA, 75 bp, synthetic construct
  source 1..75: mol_type = other DNA
taactttaaacaccattgatgttacttatgatgattatgcgaacggtgttgacgatgccaagcaaacagatcagt

SEQ ID NO: 150982 - DNA, 75 bp, synthetic construct
  source 1..75: mol_type = other DNA
accggtactaactccgactccgacctggcttctattcaggacgaaatcaaatcccgtctggacgaaattgaccgc

SEQ ID NO: 150983 - DNA, 75 bp, synthetic construct
  source 1..75: mol_type = other DNA
ctgcagcgactaaagatgatttggtcgctgcatcagtttcagctgcggtaggtaatgaatacactgtctctgctg

SEQ ID NO: 150984 - DNA, 75 bp, synthetic construct
  source 1..75: mol_type = other DNA
accactctggtccagccgctgctgtacaatctactattactactgcggatggaacttcaatagttctggcaggtt

SEQ ID NO: 150985 - DNA, 75 bp, synthetic construct
  source 1..75: mol_type = other DNA
ctgcagcgactactgatacacttaagctggctggtttcaccgctggtgcaactcctgctgctgacggtactgtga

SEQ ID NO: 150986 - DNA, 75 bp, synthetic construct
  source 1..75: mol_type = other DNA
tggcgttgaccggcgcagtgattatcactgtgctctacgccctggcaggaaagcgattattttgcagttgggtct

SEQ ID NO: 150987 - DNA, 75 bp, synthetic construct
  source 1..75: mol_type = other DNA
aattcattccatagtcaatgggttgagtctggggcctttatacgtgaaaagatcaacgacgactcaattctcctc

SEQ ID NO: 150988 - DNA, 75 bp, synthetic construct
  source 1..75: mol_type = other DNA
atctgaagaaaattgactcagatacgctggggctgaatggttttaacgtgaatggttccggtacgatagccaata

SEQ ID NO: 150989 - DNA, 75 bp, synthetic construct
  source 1..75: mol_type = other DNA
gcgcgtttgcgtgacgaactgaacttctcaatttttgttgatacgccgctggatatctgcctgatgcgtcgtatt

SEQ ID NO: 150990 - DNA, 75 bp, synthetic construct
  source 1..75: mol_type = other DNA
aagaacgcgttaagaccaactatgaccatccgagcgcgatggatcacagtctgctgcttgagcatttacaagcgt

SEQ ID NO: 150991 - DNA, 75 bp, synthetic construct
  source 1..75: mol_type = other DNA
tctgatgctaacggtaagttgtacgttaaagttgccggttcagataaacccgctgaaaatggttattatgaagtt

SEQ ID NO: 150992 - DNA, 75 bp, synthetic construct
  source 1..75: mol_type = other DNA
aatcttattccttcaatgccaatggtctgacgggcgcaaataccgcaactgcactcaaaggttacttggggacag

SEQ ID NO: 150993 - DNA, 75 bp, synthetic construct
  source 1..75: mol_type = other DNA
tctgaacaacaataatggtgcagcggctgttaaatccacaattactacagctgataacacttcgattgtactgaa

SEQ ID NO: 150994 - DNA, 75 bp, synthetic construct
  source 1..75: mol_type = other DNA
tattgccagtaccctttatcgtgaattacgtgagcaagtcggtgatgaacacatcggcgtaattcccgaagactg

SEQ ID NO: 150995 - DNA, 75 bp, synthetic construct
  source 1..75: mol_type = other DNA
ctgctagtgcagggcattgacccaaaagtcgaacagaaagaagttcaggccgagaattcgggggcatatacattc

SEQ ID NO: 150996 - DNA, 75 bp, synthetic construct
  source 1..75: mol_type = other DNA
ggagcgatgatgcaattgaacgtcagttaagccacacagaacgtaataatgtgcgtgcggcttatattcatactt

SEQ ID NO: 150997 - DNA, 75 bp, synthetic construct
  source 1..75: mol_type = other DNA
cgacattaccccgccttaccctctagcaggttgcctgagtttcttgctcgtcttgctgcatatcgtggccgtgta

SEQ ID NO: 150998 - DNA, 75 bp, synthetic construct
  source 1..75: mol_type = other DNA
ttttccggggggcatttattcagcaactggcgaatggccgctggcatgttctgaggcgtcttcctgaagcgcgtt

SEQ ID NO: 150999 - DNA, 75 bp, synthetic construct
  source 1..75: mol_type = other DNA
tggtattgtggaacccggccctgcccctggtgctggcgacatttacgttcatcttcttgcagacattctccagtc

SEQ ID NO: 151000 - DNA, 75 bp, synthetic construct
  source 1..75: mol_type = other DNA
gcatgggtttaggacgatggcacgtggtgcgctgggtgagtcagggttatggagtgatgatgctatagaacgcca

SEQ ID NO: 151001 - DNA, 75 bp, synthetic construct
  source 1..75: mol_type = other DNA
aatggtgcagtggtgggctgattatctagatgctattcagataaatttcatcactccgtacgattatggaaggtc

SEQ ID NO: 151002 - DNA, 75 bp, synthetic construct
  source 1..75: mol_type = other DNA
gttaagccactcagaacgtaataatgtgcgtgcggcatatattcatacctccgagcatttggatgagcggcgtct

SEQ ID NO: 151003 - DNA, 75 bp, synthetic construct
  source 1..75: mol_type = other DNA
actcaaatccagccagtgatatggccggtgcgctatcgacaaccaaagcgcgacattaccccgctttaccctcca

SEQ ID NO: 151004 - DNA, 75 bp, synthetic construct
  source 1..75: mol_type = other DNA
gatggttttgttagagcagcttaagcagattagtggcgataaagagctgctgttccctggagatcatgacgcaac

SEQ ID NO: 151005 - DNA, 75 bp, synthetic construct
  source 1..75: mol_type = other DNA
ctacaaaatggccgatggtggcggtttgtatcttgaggtttcggccaaaggttccaaatactggcgcatgaaata

SEQ ID NO: 151006 - DNA, 75 bp, synthetic construct
  source 1..75: mol_type = other DNA
atgacacgaaaaccgaagtttgcgggcacgggtttagaacgatggcccgtggtgcgttgggcgagtccggattat

SEQ ID NO: 151007 - DNA, 75 bp, synthetic construct
  source 1..75: mol_type = other DNA
ttacgggtattcgcgcccaaccacaccagagcttcagaaacagaaatcacgactgaaactgttcactcaggcaat

SEQ ID NO: 151008 - DNA, 75 bp, synthetic construct
  source 1..75: mol_type = other DNA
ccacaggccgacggttcggtaatgtcgctggcgaatgccgcatggatttgggtgccattactggcgattgccact

SEQ ID NO: 151009 - DNA, 75 bp, synthetic construct
  source 1..75: mol_type = other DNA
aaacggtgcgtcagcgcgtccggatattgaaggccagcccgtcaggaaaaatgtatgcccgtatccggattaacc

SEQ ID NO: 151010 - DNA, 75 bp, synthetic construct
  source 1..75: mol_type = other DNA
tcaggatgtatgttgtttatgttatcgcatttattatcctctttttattgttcttctgttcagcaataaataaaa

SEQ ID NO: 151011 - DNA, 75 bp, synthetic construct
  source 1..75: mol_type = other DNA
tgcgtttgattcttgccttcccgttcacattactgactgctgcagatatcagtatcagcctgtattcatggtgta

SEQ ID NO: 151012 - DNA, 75 bp, synthetic construct
  source 1..75: mol_type = other DNA
cgcggatttgcaatgataagcgcctcgtgttatctgtggctgcctttaccctttctaatctccttgtttcctccg

SEQ ID NO: 151013 - DNA, 75 bp, synthetic construct
  source 1..75: mol_type = other DNA
tatcactggaagcagagccggttgcagtaaacgacgacatggcttacgcattccatcatgcactgtcagactcat

SEQ ID NO: 151014 - DNA, 75 bp, synthetic construct
  source 1..75: mol_type = other DNA
aaccaggtgaaggggatcccctttcacctggtgaaagaacgtgtccggctactgaaagccggccctgacggaaaa

SEQ ID NO: 151015 - DNA, 75 bp, synthetic construct
  source 1..75: mol_type = other DNA
ctgaggcgtcttcctgaagcgcgttttgcaacagggcatgaccatcagggcaggccaagaaaaaatcgtcttcct

SEQ ID NO: 151016 - DNA, 75 bp, synthetic construct
  source 1..75: mol_type = other DNA
tttgaagatgcccgcgaccgcatcattgctgcggaaatgccgaaacagctggggtatgcactgaaacaacaactg

SEQ ID NO: 151017 - DNA, 75 bp, synthetic construct
  source 1..75: mol_type = other DNA
ggtgcgctggcgcgttctgcaggtggtgcattatctgaccgtctgggcggaactcgtgtcactctggtgaacttt

SEQ ID NO: 151018 - DNA, 75 bp, synthetic construct
  source 1..75: mol_type = other DNA
aaccacgtaaaagggatccccctgaaaacggtgcgtcagcgcgtccgggtattgaaggccagcccgtcaggaaaa

SEQ ID NO: 151019 - DNA, 75 bp, synthetic construct
  source 1..75: mol_type = other DNA
tgaaattgagggggcatttttatttgaaactatcgcaaggcaatggcacgcaagtaatctaacctggagcgaaga

SEQ ID NO: 151020 - DNA, 75 bp, synthetic construct
  source 1..75: mol_type = other DNA
cgagaactcgggggcatatactttcgaaaccattgctcgtgaatggcatgccagcaacaagcgctggagtgaaga

SEQ ID NO: 151021 - DNA, 75 bp, synthetic construct
  source 1..75: mol_type = other DNA
gttgagccattcagagcgtaataatgtacgtgctgcttatattcacacctctgaacatttggatgaacgtcgatt

SEQ ID NO: 151022 - DNA, 75 bp, synthetic construct
  source 1..75: mol_type = other DNA
ttgcggaaaagttttcccgtaacatttacggcaccaccaaagggcagcttcgacaggctattctgtggcaggatc

SEQ ID NO: 151023 - DNA, 75 bp, synthetic construct
  source 1..75: mol_type = other DNA
caagggatgctgttgaacggcagatgagccaccaagagcgaaactccgttcgtgctgcctacattcataaagcag

SEQ ID NO: 151024 - DNA, 75 bp, synthetic construct
  source 1..75: mol_type = other DNA
ggacgatacccggaattcgtaagcctattcccggcgtaaaacactctgagcgtgggatgaagatgaaaactgaac

SEQ ID NO: 151025 - DNA, 75 bp, synthetic construct
  source 1..75: mol_type = other DNA
ctattggtgcagggcattgatccaaaagccgaacagaaagaagctcatgccgagaattcgggggcatatactttc

SEQ ID NO: 151026 - DNA, 75 bp, synthetic construct
  source 1..75: mol_type = other DNA
agcaaagcgcgacgaagctaaaaaactattggtgcagggcattgatccaaaagccgaacagaaagaagctcatgc

SEQ ID NO: 151027 - DNA, 75 bp, synthetic construct
  source 1..75: mol_type = other DNA
cgacattaccccgctttaccctctagccgattccctgagtttcttgcacgtcttgctgcatatcgtggccgtgta

SEQ ID NO: 151028 - DNA, 75 bp, synthetic construct
  source 1..75: mol_type = other DNA
ctgagcatttggatgaacgtcgtttgatggtacagtggtgggccgattatcttgaaaaaaacactgttgattata

SEQ ID NO: 151029 - DNA, 75 bp, synthetic construct
  source 1..75: mol_type = other DNA
gatggtgcagtggtgggctgattatcttcaagctaacactattaatcctgtatcccccttcgattttgccaagaa

SEQ ID NO: 151030 - DNA, 75 bp, synthetic construct
  source 1..75: mol_type = other DNA
gaaactatcgctcgtgaatggcatgccagtaacaagcgctggagtgaggaccatagagcgcgcgttcttcgctat

SEQ ID NO: 151031 - DNA, 75 bp, synthetic construct
  source 1..75: mol_type = other DNA
acattgttcctctcagtcggcaggctatgatgttgttagagcagttaaagcaaattagcggtaatcaggatctgc

SEQ ID NO: 151032 - DNA, 75 bp, synthetic construct
  source 1..75: mol_type = other DNA
aacacgacgtcgctcagcgcctacaacagcgcgtcacggccattatgcgttatgccgtgcagaacgattacatag

SEQ ID NO: 151033 - DNA, 75 bp, synthetic construct
  source 1..75: mol_type = other DNA
ctacggtgacgcttgctcaggcacgagcaaagcgtgatgaagctaaaaagctgttagtgcagggcattgacccaa

SEQ ID NO: 151034 - DNA, 75 bp, synthetic construct
  source 1..75: mol_type = other DNA
acagcgtgtaacggccattatgcgttatgctgtacaaaacgattacatcgactcaaatccggccagtgatatggc

SEQ ID NO: 151035 - DNA, 75 bp, synthetic construct
  source 1..75: mol_type = other DNA
tgaaattgagggggcatatttatttgaaactatcgcaaggcaatggcacgcaagtaaccttacttggagcgaaga

SEQ ID NO: 151036 - DNA, 75 bp, synthetic construct
  source 1..75: mol_type = other DNA
tatgccgtacagaacgattatatcgactcaaacccagccagtgatatggctggggctttatcgacagttaaaaca

SEQ ID NO: 151037 - DNA, 75 bp, synthetic construct
  source 1..75: mol_type = other DNA
gcgggcggtggagaagggcagactgcaatcaaaatggccgagcgtgggcatcaggttattttatgcgatctttct

SEQ ID NO: 151038 - DNA, 75 bp, synthetic construct
  source 1..75: mol_type = other DNA
gctggcggtggtgaagggcagacggcgatcaaaatggccgggcgtgggcatcaggtcattttatgcgatctttct

SEQ ID NO: 151039 - DNA, 75 bp, synthetic construct
  source 1..75: mol_type = other DNA
gctggcggtggagaagggcagaccgcaatcaaaatggccgagcgcgggcatcaggtcattttatgcgatctttct

SEQ ID NO: 151040 - DNA, 75 bp, synthetic construct
  source 1..75: mol_type = other DNA
agcaaaacgcgatgaagctaaaaagcttttagtacagggcatagacccaaaagtcgtacaaaaagaagcccaggc

SEQ ID NO: 151041 - DNA, 75 bp, synthetic construct
  source 1..75: mol_type = other DNA
gtgtcgaataacgctttacaaacaattattaacgcccggttaccaggcaaagaggggctgtggcagattcatctg

SEQ ID NO: 151042 - DNA, 75 bp, synthetic construct
  source 1..75: mol_type = other DNA
gatgtctacgacggtgagtaacttgacgagcgatgttaacaccgcaatcgactttgttcttgaagggcatttgta

SEQ ID NO: 151043 - DNA, 75 bp, synthetic construct
  source 1..75: mol_type = other DNA
gcgcgaagtcgcctgggagcagcattatccggatcgtggacgcgaaccgctggcaggcgttcatgcttactacga

SEQ ID NO: 151044 - DNA, 75 bp, synthetic construct
  source 1..75: mol_type = other DNA
tcagtaagaaagcaggtattgataacgccacggtcgctatttacggttgtgacaatttcgtgattgataatattg

SEQ ID NO: 151045 - DNA, 75 bp, synthetic construct
  source 1..75: mol_type = other DNA
taacattgagatgaagcgtgcgtcgctggagttacacaacaaaccgcaacacctttttatgcgaaatatcaaggt

SEQ ID NO: 151046 - DNA, 75 bp, synthetic construct
  source 1..75: mol_type = other DNA
cgcattcgatctgattttcgccaacgcctcgttgcaatggttgcctgatcattacgaactgtttccacatcttgt

SEQ ID NO: 151047 - DNA, 75 bp, synthetic construct
  source 1..75: mol_type = other DNA
ccagactgccagttcgtggaagcagacatccgcaactggcaaccggaacaggcactcgatctgatttttgctaat

SEQ ID NO: 151048 - DNA, 75 bp, synthetic construct
  source 1..75: mol_type = other DNA
tcttacgcgctaccatcagatgctggaagagcagtatccactgcaggaggatggtcaaatactgctggcatttcc

SEQ ID NO: 151049 - DNA, 75 bp, synthetic construct
  source 1..75: mol_type = other DNA
ggcggcactcgcgccaatatcatcatcgcattcgctatcttcctgtttattggcattattcgtggctggatttcg

SEQ ID NO: 151050 - DNA, 75 bp, synthetic construct
  source 1..75: mol_type = other DNA
gctgtttattgccacgctgacctggtttgagtttcgccgtgtgcgctttaacttcaatgtcttctttttcattgc

SEQ ID NO: 151051 - DNA, 75 bp, synthetic construct
  source 1..75: mol_type = other DNA
gtgacttttgagcagaaaaaagcccgggccattgccctgatggacagcaaaaagatgtggcggagcaattatgcc

SEQ ID NO: 151052 - DNA, 75 bp, synthetic construct
  source 1..75: mol_type = other DNA
aacgacagtgatattttgatctccgaccacatcatcgagcgcatcaactgtactaacggaaaaatcaactggggc

SEQ ID NO: 151053 - DNA, 75 bp, synthetic construct
  source 1..75: mol_type = other DNA
accctttatgccgttctggcaggtcacggtgctgatggggggcttatggggcatttcctggggatgtgcaatgtg

SEQ ID NO: 151054 - DNA, 75 bp, synthetic construct
  source 1..75: mol_type = other DNA
gtgacctttgagcagaaaaaagcccgggccattgccctgatggccagcaaaaagatgtggcagagcaattatgct

SEQ ID NO: 151055 - DNA, 75 bp, synthetic construct
  source 1..75: mol_type = other DNA
cgatcaggtaacacggattgcgaacacgccagcgtttatcaaaggcgtcacgaatctgcgcggcgttattgtgcc

SEQ ID NO: 151056 - DNA, 75 bp, synthetic construct
  source 1..75: mol_type = other DNA
aacgaccgtgatattttgatatctgaccatgtcatcgagcgcatcaactgtactaacggcaaaatcaactggggc

SEQ ID NO: 151057 - DNA, 75 bp, synthetic construct
  source 1..75: mol_type = other DNA
ggcaaagaacgagacgctactgtcgctggtaaatgttcatgcggtgaatgaaaaaggacaaagttcagtcgatat

SEQ ID NO: 151058 - DNA, 75 bp, synthetic construct
  source 1..75: mol_type = other DNA
tgatttcaatacattgaaaaaagaagaatccgaaacttatttgaatgaaaatgttattgttatgacaataagttt

SEQ ID NO: 151059 - DNA, 75 bp, synthetic construct
  source 1..75: mol_type = other DNA
atctatgttttcttctcgagcaacttctttaagcagatggtgaacctggggatcagcgatatcaacaccaaagat

SEQ ID NO: 151060 - DNA, 75 bp, synthetic construct
  source 1..75: mol_type = other DNA
atacccactcgctggcggaagtatttatcaacagcgacggagtaccgactctgggcgaagggaacgccgactgcc

SEQ ID NO: 151061 - DNA, 75 bp, synthetic construct
  source 1..75: mol_type = other DNA
ccgcagctgccggagtgcattctgcacgaacttaccgagcgcctgctggctatcccgcgaaccactcatgtggag

SEQ ID NO: 151062 - DNA, 75 bp, synthetic construct
  source 1..75: mol_type = other DNA
atgctatcaccatcttctgtaaatttggggtgttcatggaattctttaaccagaaacctgacttgcctgataatc

SEQ ID NO: 151063 - DNA, 75 bp, synthetic construct
  source 1..75: mol_type = other DNA
cggtaaacactttattatccgaaatattaaggcacgaaatatcaccccggaatttagtaagaaagcgggaattga

SEQ ID NO: 151064 - DNA, 75 bp, synthetic construct
  source 1..75: mol_type = other DNA
tgaaaatatcaacaccggcatcttcattcctcctggcaaaacgttacacatccttggaagcctgcgcggcaacgg

SEQ ID NO: 151065 - DNA, 75 bp, synthetic construct
  source 1..75: mol_type = other DNA
atctttttatgcgtaatatcaatgtgatgcaggaatcctcagttggaccagcattgagcatgaactttgacatgc

SEQ ID NO: 151066 - DNA, 75 bp, synthetic construct
  source 1..75: mol_type = other DNA
cagcgaacagcttaacgccctttccaccggcaccgccgttgcgccggaagcgggtgcaacgctgattttacaggt

SEQ ID NO: 151067 - DNA, 75 bp, synthetic construct
  source 1..75: mol_type = other DNA
ctagactgaaaatcaaacgcgccttgcaagatattatcgaacaagatttaggtctggctttaaacgtagaacaaa

SEQ ID NO: 151068 - DNA, 75 bp, synthetic construct
  source 1..75: mol_type = other DNA
ggctcgctgatttatgccggttttaccctggggatgaccgttggacgcttcaccggcggttggttcatcgaccgt

SEQ ID NO: 151069 - DNA, 75 bp, synthetic construct
  source 1..75: mol_type = other DNA
aatgctggttgtactggcgctggttattctcgcggctattgtcgcgaaagccgtcgccaaacccgataccaaaac

SEQ ID NO: 151070 - DNA, 75 bp, synthetic construct
  source 1..75: mol_type = other DNA
ctcagacgtttgacaagaaagtctcagatgccgcggtggcggatattcagcataccgccagcgaggcggagaaaa

SEQ ID NO: 151071 - DNA, 75 bp, synthetic construct
  source 1..75: mol_type = other DNA
cggtggattatggtgagaaatctgctgtcagcgataaaccgcttctgccctatattccgtcggccagttttgcgc

SEQ ID NO: 151072 - DNA, 75 bp, synthetic construct
  source 1..75: mol_type = other DNA
agaaatgcagtaaaaaaaggagtctcgcactcctctccagaaaactccagggctgtaagttgtattaaaaagctg

SEQ ID NO: 151073 - DNA, 75 bp, synthetic construct
  source 1..75: mol_type = other DNA
accgtctgctggaagaggtcgagcaaaagctggcgacggaaataacgtcccgtcaattattcgcggtgagctgga

SEQ ID NO: 151074 - DNA, 75 bp, synthetic construct
  source 1..75: mol_type = other DNA
ctttctaatctcctggtatcctcaggagcacatctgatctaccgggtgttattctttatcctggcaattcttatt

SEQ ID NO: 151075 - DNA, 75 bp, synthetic construct
  source 1..75: mol_type = other DNA
cagcgaccagtgccggacagaaatatcgcttttactcaattattatgaaaattaatcttccgttcatacactggc

SEQ ID NO: 151076 - DNA, 75 bp, synthetic construct
  source 1..75: mol_type = other DNA
gctgggcttcccgctgaccatttctgccgccagcgataccggccccgatgcaccaacccgcgtcagtgtggtagc

SEQ ID NO: 151077 - DNA, 75 bp, synthetic construct
  source 1..75: mol_type = other DNA
aggagtttaatcagctccaagatgaactcaaagaccagctggaaaaccgggagaatgaaacccggcgttccttat

SEQ ID NO: 151078 - DNA, 75 bp, synthetic construct
  source 1..75: mol_type = other DNA
ttgtcgaatggcgttatcctcgcagatgaagtgggactagggaaaaccattgaggccagcctgattttggcgcaa

SEQ ID NO: 151079 - DNA, 75 bp, synthetic construct
  source 1..75: mol_type = other DNA
aacccggaagatccagaatcggtgctgactgaaatggcgaaagcaatcccgctgcgtcgcctcgccgatccgctg

SEQ ID NO: 151080 - DNA, 75 bp, synthetic construct
  source 1..75: mol_type = other DNA
atgagcgatgaagatcgcgatttccatattgatatcaatattaaaggtgtatggaacgtcacgaaggcggtgctg

SEQ ID NO: 151081 - DNA, 75 bp, synthetic construct
  source 1..75: mol_type = other DNA
cattgcccgccagtcgaacccggaagatccagaatcggtgctgactgaaatggcgaaagcaatcccgatgcgtcg

SEQ ID NO: 151082 - DNA, 75 bp, synthetic construct
  source 1..75: mol_type = other DNA
gaaaacccggattacaaaattataccgacttataaaggcaactacgaagagagtttaagtgcggggatcgcagca

SEQ ID NO: 151083 - DNA, 75 bp, synthetic construct
  source 1..75: mol_type = other DNA
atcgagcgctgcattgcgcgacatcccgatgtggagcagtcagtggtggtggcagtgggtaattctcaacatcgt

SEQ ID NO: 151084 - DNA, 75 bp, synthetic construct
  source 1..75: mol_type = other DNA
gcaacgatacccaagtgaaggtgaatggttaccgtatcgaactgggggaaatcgagcgctgcattgcgcgacatc

SEQ ID NO: 151085 - DNA, 75 bp, synthetic construct
  source 1..75: mol_type = other DNA
atgaatcaacaactctcctggcgcgccatcgtcggctacagcctcggtgacgtcgccaataacttcgccttcgca

SEQ ID NO: 151086 - DNA, 75 bp, synthetic construct
  source 1..75: mol_type = other DNA
tcactcaggtgtttgaagcctatgtcgaacaggaaaaagataaggcgctggcaaccttgtgcagcgaagagcgac

SEQ ID NO: 151087 - DNA, 75 bp, synthetic construct
  source 1..75: mol_type = other DNA
ggataacggtattcaggtatcacagcagatgctgcaggaacttaatctcggggatacggtgcctgccatacagac

SEQ ID NO: 151088 - DNA, 75 bp, synthetic construct
  source 1..75: mol_type = other DNA
tttcctcctaaggaagaggatggatgtactccacctcctgaaatcaggttgcaccgtgttgcctctgtctcaatg

SEQ ID NO: 151089 - DNA, 75 bp, synthetic construct
  source 1..75: mol_type = other DNA
gcacaccctgtttatgcacctgacgctggtgccgtacatggcagcgtcaggtgaagtcaaaaccaaaccgactca

SEQ ID NO: 151090 - DNA, 75 bp, synthetic construct
  source 1..75: mol_type = other DNA
cgtaaagaacgccgcggtgactatctcggcgcaaccgtacaggttattccgcacatcactaacgctatcaaagag

SEQ ID NO: 151091 - DNA, 75 bp, synthetic construct
  source 1..75: mol_type = other DNA
gccgaatattatcggctgcctgctgtggccgccgttttacttcctgccggggattctggcgggtgcggcgatcga

SEQ ID NO: 151092 - DNA, 75 bp, synthetic construct
  source 1..75: mol_type = other DNA
aaatccagtacacaatatcacggcagcatgctcggcaacccgtttggcgacctggcatttaaccgatcgttttga

SEQ ID NO: 151093 - DNA, 75 bp, synthetic construct
  source 1..75: mol_type = other DNA
cgccattgctaatgcccagacttcacagcaagacgaaagcacgctggtggttaccgccagtaaacaatcttcccg

SEQ ID NO: 151094 - DNA, 75 bp, synthetic construct
  source 1..75: mol_type = other DNA
gttgaaggccaggagacctatctggaagagacatactatcaccgtttcaatccacctcagggattctgcttacag

SEQ ID NO: 151095 - DNA, 75 bp, synthetic construct
  source 1..75: mol_type = other DNA
tgtttctccggatgacgggggcagctgttatctctggctcaaccgtgggcacccccccgccgttaaccggcgacg

SEQ ID NO: 151096 - DNA, 75 bp, synthetic construct
  source 1..75: mol_type = other DNA
cgctgtggcggcatcattgagaaaaccacgctgtcatctcgcccgttttactggtgtccgggctgccagcactag

SEQ ID NO: 151097 - DNA, 75 bp, synthetic construct
  source 1..75: mol_type = other DNA
aaccgtcagtttgcaggattactgctcgatcaggcgtttcggctgggcttggcaattatttgcgggtggagatcc

SEQ ID NO: 151098 - DNA, 75 bp, synthetic construct
  source 1..75: mol_type = other DNA
cgggccgggggttatatcaaatggcaacctacgcaatgacctgcccctgtccctctttacccgtctgcgcgatat

SEQ ID NO: 151099 - DNA, 75 bp, synthetic construct
  source 1..75: mol_type = other DNA
ggcacaaacgctatagacaacctggtacttattcagaattcaccataccattcagcactgtcgaaagcacaatcc

SEQ ID NO: 151100 - DNA, 75 bp, synthetic construct
  source 1..75: mol_type = other DNA
tttcagatggcgcgaatgcgtgcgctggagctggcgcgcccgctgctgcgtagcaccaataatggcatcacggcg

SEQ ID NO: 151101 - DNA, 75 bp, synthetic construct
  source 1..75: mol_type = other DNA
tgtctggtgctggttgccgggctggccagcgttaaggccgccgacagttttttctatcggattggtcagcgcatg

SEQ ID NO: 151102 - DNA, 75 bp, synthetic construct
  source 1..75: mol_type = other DNA
atgtaaagattggctgtaatactcgtttggatgaatcattttttttagaactgtttgatgtaaataaagaccgac

SEQ ID NO: 151103 - DNA, 75 bp, synthetic construct
  source 1..75: mol_type = other DNA
attttacctacgcagacctaaatcaaatactggcaggatacgaacgcctttctgcggcctcagagtatgcaataa

SEQ ID NO: 151104 - DNA, 75 bp, synthetic construct
  source 1..75: mol_type = other DNA
gctaagtagtcattatgatgactacagtttacatattgccgagttaacaaatgaaaatggtcaggtagtctggaa

SEQ ID NO: 151105 - DNA, 75 bp, synthetic construct
  source 1..75: mol_type = other DNA
ttgaggaagttgttccacgatcaacctatctgatggtaatgattgctttattttttatcgatactgttgcattta

SEQ ID NO: 151106 - DNA, 75 bp, synthetic construct
  source 1..75: mol_type = other DNA
gcaaattattgaggggcgtttgacaagcagtgttgtccaaaatgacattgcaatctattatttgtttcgtcagat

SEQ ID NO: 151107 - DNA, 75 bp, synthetic construct
  source 1..75: mol_type = other DNA
ccgcccttgccggggtggacagtacgattgttgaagtgatgggcatcagtgcgcagttcacctccggtgcacagc

SEQ ID NO: 151108 - DNA, 75 bp, synthetic construct
  source 1..75: mol_type = other DNA
aaatgagtcccaaatatatcccgcacaaagagagcttgtcagttgcttaatctgtggagattattcttctttttg

SEQ ID NO: 151109 - DNA, 75 bp, synthetic construct
  source 1..75: mol_type = other DNA
aaacgccttattgcgtcatgattatggatatcgaccacttcaaaaaagtcaacgacacctgggggcatccggttg

SEQ ID NO: 151110 - DNA, 75 bp, synthetic construct
  source 1..75: mol_type = other DNA
agcgtggcggcgaagttcagggggtttttgacgatccggagtcgctggggtttgccagtagtgggatccgtattg

SEQ ID NO: 151111 - DNA, 75 bp, synthetic construct
  source 1..75: mol_type = other DNA
cacaattgttgaagtgatgggtatcagtgcgcagttcacctccggtacacagcgtggcggggaagttcatggcgt

SEQ ID NO: 151112 - DNA, 75 bp, synthetic construct
  source 1..75: mol_type = other DNA
aacgtggcggcgaagttcagggggtttttgacgatccggagtcgctgggttttgccggtggcggggtccgtattg

SEQ ID NO: 151113 - DNA, 75 bp, synthetic construct
  source 1..75: mol_type = other DNA
gtaattgctttctgtgccgtgctgtataatatctctctgttatttatgagcaggtatagtgtgtccacttggtat

SEQ ID NO: 151114 - DNA, 75 bp, synthetic construct
  source 1..75: mol_type = other DNA
ttttgcataagcctgatttttattttggggggggtggtagttgctcacatgctaagtagtcattatgagaactac

SEQ ID NO: 151115 - DNA, 75 bp, synthetic construct
  source 1..75: mol_type = other DNA
ttgaggaggttgttcctcgatcaacctatctaacggttatgattgctttattttttatcgatactgttgtattta

SEQ ID NO: 151116 - DNA, 75 bp, synthetic construct
  source 1..75: mol_type = other DNA
ctatggtgatatgccctgtggtgtggttttatctttgccctgaacatattatctcagacattgttaacgactggc

SEQ ID NO: 151117 - DNA, 75 bp, synthetic construct
  source 1..75: mol_type = other DNA
atgaccaccgaggattacatcgagaaatgtggtggcctgacgcagaaatcgggtaacgccagaattatcgtcatt

SEQ ID NO: 151118 - DNA, 75 bp, synthetic construct
  source 1..75: mol_type = other DNA
cgaaagcagcattcccgtaacggaagcgttgagctgggcgcgccctaagcctggcgcgactcacattacgattat

SEQ ID NO: 151119 - DNA, 75 bp, synthetic construct
  source 1..75: mol_type = other DNA
atgaacaaacttgaccgtgatatccgcgacccgatggaactgctcgatgaagttgagaacgagctgaaaatcggc

SEQ ID NO: 151120 - DNA, 75 bp, synthetic construct
  source 1..75: mol_type = other DNA
ttgccattatttctcacccggacgccggtaagactaccatcaccgagaaggtgctgctgttcggacaggccattc

SEQ ID NO: 151121 - DNA, 75 bp, synthetic construct
  source 1..75: mol_type = other DNA
agagctgttccttgcgggcgaaatcaccccggtattctttggtactgcgctgggtaacttcggcgtcgatcatat

SEQ ID NO: 151122 - DNA, 75 bp, synthetic construct
  source 1..75: mol_type = other DNA
actgagtgttattgtttctggattttatcttctctggactgagtggccagtaataaaatatcacctggacagcac

SEQ ID NO: 151123 - DNA, 75 bp, synthetic construct
  source 1..75: mol_type = other DNA
aggaggtagaattctctacgcatgagattcatgtggagaaaacagcaacttctgtggaacccttggttttaaaag

SEQ ID NO: 151124 - DNA, 75 bp, synthetic construct
  source 1..75: mol_type = other DNA
cctcgaaacgctgacccgcaccatcactgaaaccagcgagcaacaggtcagttgggaaaccattccgctcattga

SEQ ID NO: 151125 - DNA, 75 bp, synthetic construct
  source 1..75: mol_type = other DNA
ttctctgacactattttcgtggtcggtacgcgcctgctgaccaaaaagggcggcgatatcaaagattttgccgac

SEQ ID NO: 151126 - DNA, 75 bp, synthetic construct
  source 1..75: mol_type = other DNA
aaaatgaatatgcgaattatcagcgccaaagatcacggtgactctttccgtaccctggaaagcggtcgtcgttgc

SEQ ID NO: 151127 - DNA, 75 bp, synthetic construct
  source 1..75: mol_type = other DNA
ccgaaaaacctgaacatgaatttcgaactgtcagacgaaatgaaagcactgttcaaagaaccgaatgacaaggca

SEQ ID NO: 151128 - DNA, 75 bp, synthetic construct
  source 1..75: mol_type = other DNA
cggcgagcaagtgcgtgataacttccgcccggataccgactatctgctgactatctccaacgatgcgtggtttgg

SEQ ID NO: 151129 - DNA, 75 bp, synthetic construct
  source 1..75: mol_type = other DNA
gctacgatacctacaacaccatcatcacgctgggtaaaggtgcaccgtacagctacgaatcagccgatcgctata

SEQ ID NO: 151130 - DNA, 75 bp, synthetic construct
  source 1..75: mol_type = other DNA
attattcggtgcctgcggaacgctggccttctctccttacgatgtctggcctgcggcgattatttcgctgatggg

SEQ ID NO: 151131 - DNA, 75 bp, synthetic construct
  source 1..75: mol_type = other DNA
tagcaccaacaacggcattacggcggtgattggtccgcagggtgagattcaggcgatgatcccgcaattcacccg

SEQ ID NO: 151132 - DNA, 75 bp, synthetic construct
  source 1..75: mol_type = other DNA
tgtcggtaaatggtattgagcttactgcggctatttgctacgagatcattctcggcgagcaagtgcgcgataact

SEQ ID NO: 151133 - DNA, 75 bp, synthetic construct
  source 1..75: mol_type = other DNA
tgggccttatatccaaccgccgctgtcggtgaatggtattgagcttactgcggctatttgctacgagatcattct

SEQ ID NO: 151134 - DNA, 75 bp, synthetic construct
  source 1..75: mol_type = other DNA
ccgtgcggcgggtggtggagccgttcggcttcctgatacgcattattgagtggtggcagactggagaaacaccgg

SEQ ID NO: 151135 - DNA, 75 bp, synthetic construct
  source 1..75: mol_type = other DNA
gcgaacctgcagcgggatttctgatctgcaggtgccactgcgtgacttgtggaatcctgcgacctgtccggtcag

SEQ ID NO: 151136 - DNA, 75 bp, synthetic construct
  source 1..75: mol_type = other DNA
aatcgggcttgtcagactgtatctgaaggcagtttttattctgacagtggtgagcgttgttttctcgtatctttc

SEQ ID NO: 151137 - DNA, 75 bp, synthetic construct
  source 1..75: mol_type = other DNA
tgggcgttttcggtcgacaggtgggatgaaaagtggccggaagcgaccaaacgcgccgttattcgcgatgcctat

SEQ ID NO: 151138 - DNA, 75 bp, synthetic construct
  source 1..75: mol_type = other DNA
taaggcagtcagtgatggtgccaaagcctcggatgaatggctgacagatcagatgtcgccgggtgctgttcgtgc

SEQ ID NO: 151139 - DNA, 75 bp, synthetic construct
  source 1..75: mol_type = other DNA
ctgtgtacccgtatttccctgaaaccatagccgtgggcggtgatgattacaccggggcggcaatccatttaattg

SEQ ID NO: 151140 - DNA, 75 bp, synthetic construct
  source 1..75: mol_type = other DNA
tgatgagcctttttgaaatggcccaggcatcactaactgatcgtggtatcagtgttggcggttttttaaatcgct

SEQ ID NO: 151141 - DNA, 75 bp, synthetic construct
  source 1..75: mol_type = other DNA
ttattcccgtcttgggtatgagcgtcctgagcggggaaatccttacgcgatgatgagcctttttgaaatggccca

SEQ ID NO: 151142 - DNA, 75 bp, synthetic construct
  source 1..75: mol_type = other DNA
cagcagcgatttttctcatattctggctggtggtgctgaaaaatcagtgctgaaaggctggcaggacagcggcga

SEQ ID NO: 151143 - DNA, 75 bp, synthetic construct
  source 1..75: mol_type = other DNA
cggcccgtcagatgatgcgcctgcagaaagaaggcgatcgtgccctgaatatccgtccggcctttatgctggtac

SEQ ID NO: 151144 - DNA, 75 bp, synthetic construct
  source 1..75: mol_type = other DNA
cgtagcggttcgctttcaaactttcatgaagcaaagcgcgttggtctgaatggattttcaaagctggataaagtg

SEQ ID NO: 151145 - DNA, 75 bp, synthetic construct
  source 1..75: mol_type = other DNA
ctatggcagatgttgtacatgtgcgcatttatgacgagatcggcgggtacggtgtaaaagcatcggcacttactg

SEQ ID NO: 151146 - DNA, 75 bp, synthetic construct
  source 1..75: mol_type = other DNA
cagcaaattcacagatggtaaagcgttgttccacgccgaccataaaaacctcatcgctaaagggatggatacaga

SEQ ID NO: 151147 - DNA, 75 bp, synthetic construct
  source 1..75: mol_type = other DNA
aacccaggcattatcaacgtcgtgaaggatatggcgcaggtagtggttgagccgcgactggacaaggccaacaac

SEQ ID NO: 151148 - DNA, 75 bp, synthetic construct
  source 1..75: mol_type = other DNA
agctggggcgcgagtccacgccatccaataaaaataccccgcctcatatctatgctggaaacggaaacataacag

SEQ ID NO: 151149 - DNA, 75 bp, synthetic construct
  source 1..75: mol_type = other DNA
aaacacagcaacctgattgacgcaggactgacaacaccgggacttagtgcagcacgtcacctgatgcgcacacag

SEQ ID NO: 151150 - DNA, 75 bp, synthetic construct
  source 1..75: mol_type = other DNA
tcaaacttccatgaagcgcgtcgtgttggtctgaatggcttctcgacattaaacaaagtgccggaaggtgcggaa

SEQ ID NO: 151151 - DNA, 75 bp, synthetic construct
  source 1..75: mol_type = other DNA
acctcacatggccaacccaacaaacaggtgcgtctcgtttggtatatctatgcccaacgttatcgcgatcatcac

SEQ ID NO: 151152 - DNA, 75 bp, synthetic construct
  source 1..75: mol_type = other DNA
accagttgcgcggggcattgccttaccacaaagccattcgcggtacgctcatcaccaccggaaaatttgcagcga

SEQ ID NO: 151153 - DNA, 75 bp, synthetic construct
  source 1..75: mol_type = other DNA
accagttgcgcggggcgttgccttaccacaaagccattcgcggtacactcatcaccaccgggaaatttgcggcga

SEQ ID NO: 151154 - DNA, 75 bp, synthetic construct
  source 1..75: mol_type = other DNA
gaagggcgctctgttgtcaaaaaaatgcagatcacccgccagcaatgtcagcagatagcgaacggctggcgcggt

SEQ ID NO: 151155 - DNA, 75 bp, synthetic construct
  source 1..75: mol_type = other DNA
gtaacgccttcctgaaactggtgcaggataatcccgataaggattactggcaggtattcactgatgacagaccgg

SEQ ID NO: 151156 - DNA, 75 bp, synthetic construct
  source 1..75: mol_type = other DNA
cgaaaacgggtatgtcagatgcgaaatgccgcaatctggtgaacgcatatcagatccctaccgacccccatgagt

SEQ ID NO: 151157 - DNA, 75 bp, synthetic construct
  source 1..75: mol_type = other DNA
aatacccgccaggtaatcggctattactgcctttctacaggcagtattcaacgtaatttggcccctggagccatg

SEQ ID NO: 151158 - DNA, 75 bp, synthetic construct
  source 1..75: mol_type = other DNA
ctgaaagacaaagccgtagtagtcacttccggcaccacttctgaagttctgctcaacaaactgaatgaagatcag

SEQ ID NO: 151159 - DNA, 75 bp, synthetic construct
  source 1..75: mol_type = other DNA
cggacttgcaggtgaaactgattccgatcacctcacaaaaccgtattccgctgctgcaaaacggcactttcgatt

SEQ ID NO: 151160 - DNA, 75 bp, synthetic construct
  source 1..75: mol_type = other DNA
agccgcattccttggatcaagaaacagcagagtgtttttgccaaacaacctcgccaatctgatcgagcaatggtt

SEQ ID NO: 151161 - DNA, 75 bp, synthetic construct
  source 1..75: mol_type = other DNA
tgtaacacatgtaggaaagcatgaagccaaattaggccgtgggcgattacatttgtatgtaagccatactgcaac

SEQ ID NO: 151162 - DNA, 75 bp, synthetic construct
  source 1..75: mol_type = other DNA
aatctcgaactggtaaaaaaaccacctgaatgccttgaattcattgtggttcacgagctagttcatctacacgaa

SEQ ID NO: 151163 - DNA, 75 bp, synthetic construct
  source 1..75: mol_type = other DNA
ttttgacgatccggagtcgctgggttttgccagtagtgggatccgtattgaaggaagcagcccgtcattatttgt

SEQ ID NO: 151164 - DNA, 75 bp, synthetic construct
  source 1..75: mol_type = other DNA
gatcttttttcagcaggaagggttaaatccgctaccagccccggcgaatcagttggccatcgactcgccgcttaa

SEQ ID NO: 151165 - DNA, 75 bp, synthetic construct
  source 1..75: mol_type = other DNA
ttcttattaagtttgcagcccatagccgactacctgctgtgccccatagaaagcacctatccgacatggaataat

SEQ ID NO: 151166 - DNA, 75 bp, synthetic construct
  source 1..75: mol_type = other DNA
tggcagcagataaaacagtgggctcagcaggcaaaaggggaagatccacagggttacagggcggaatttattcgc

SEQ ID NO: 151167 - DNA, 75 bp, synthetic construct
  source 1..75: mol_type = other DNA
aaatacccgcagggaaaagaaagtcagttagttgaattcccgttggcacccacaataaacgcaccttcagaagat

SEQ ID NO: 151168 - DNA, 75 bp, synthetic construct
  source 1..75: mol_type = other DNA
gcaaataaaacgttgtccacgcttaaaagggaatttcaaaaattttataaaaagaaaactggtgaggagatattt

SEQ ID NO: 151169 - DNA, 75 bp, synthetic construct
  source 1..75: mol_type = other DNA
cgaattgctgcccgcgagcaaggaggccatgcgctgagagatcccctcataatttccccaaagcgtaaccatgtg

SEQ ID NO: 151170 - DNA, 75 bp, synthetic construct
  source 1..75: mol_type = other DNA
gtaaaaatgtcgcctgggcacagtctgaggtcagcgcatggatggcggaccgcatcagcgcccgtgggcggggat

SEQ ID NO: 151171 - DNA, 75 bp, synthetic construct
  source 1..75: mol_type = other DNA
aaaaccgggaagatttttattagcattgggtggctggcgctcttgttattgagtttgcaaccggtagccgaccgc

SEQ ID NO: 151172 - DNA, 75 bp, synthetic construct
  source 1..75: mol_type = other DNA
gcttaatccgtgggaacgagctatcccttctccagtctggttaatgcatagcgatcgtgttggctatgaaacgct

SEQ ID NO: 151173 - DNA, 75 bp, synthetic construct
  source 1..75: mol_type = other DNA
gtattctgccggacagcctgcatcgctgcctgttgccattgattatccggctgcgctggcactccgccagatgtc

SEQ ID NO: 151174 - DNA, 75 bp, synthetic construct
  source 1..75: mol_type = other DNA
ccttaatggtgacggtccgttactggagcgccttcgctggaagaatctgaatgtacctcagaaaatcgcgcttgc

SEQ ID NO: 151175 - DNA, 75 bp, synthetic construct
  source 1..75: mol_type = other DNA
cgttttacggacactccggtccggcgctggcttgatcgccgggttttaagggaaatggtgagagaggcccgcgcc

SEQ ID NO: 151176 - DNA, 75 bp, synthetic construct
  source 1..75: mol_type = other DNA
ctgttattcggacgaccagaaaatattttccggtgaagtttatcttccctgaaaaaattcgttgtcaggataagg

SEQ ID NO: 151177 - DNA, 75 bp, synthetic construct
  source 1..75: mol_type = other DNA
tgattgcagcgacttcgccagttacccgcgtacgtatccgcaacgtcaatacgggtacgttcatcgaagctgatg

SEQ ID NO: 151178 - DNA, 75 bp, synthetic construct
  source 1..75: mol_type = other DNA
ttgacgatgtcccggtgacctgtatcgatatggcgatgaggtgtactggcaatagcggacactaccatttgttct

SEQ ID NO: 151179 - DNA, 75 bp, synthetic construct
  source 1..75: mol_type = other DNA
cagaaattaatgccgcaattgattcgctggatgccgaaggcagtaccaatggcggtgccgggctggaactggctt

SEQ ID NO: 151180 - DNA, 75 bp, synthetic construct
  source 1..75: mol_type = other DNA
ggcagcgccagcatatgaaagtgtggccaaagcaaaagctacgcgtatatcaaatccaggaaccgcccgctacca

SEQ ID NO: 151181 - DNA, 75 bp, synthetic construct
  source 1..75: mol_type = other DNA
ttagccactgacggtgactttaacgttggcattgacgatccaaaatcgattgaatcaatggtcaaaaaacagcgg

SEQ ID NO: 151182 - DNA, 75 bp, synthetic construct
  source 1..75: mol_type = other DNA
gcaaactgctctccacccagctggctactgtgatgaaggtgctttttaaaggcaatatttctataggtatttgcc

SEQ ID NO: 151183 - DNA, 75 bp, synthetic construct
  source 1..75: mol_type = other DNA
tttttaccgggaaggatttgaacataatgagaaccgagggggggtcaggctactggcatgccagaacagacaggc

SEQ ID NO: 151184 - DNA, 75 bp, synthetic construct
  source 1..75: mol_type = other DNA
tccccgcagggaaaagaaagtcagttagctgaattcccactggtccccacgattaatattgcttcagaagatatg

SEQ ID NO: 151185 - DNA, 75 bp, synthetic construct
  source 1..75: mol_type = other DNA
agttcatttgtgaaagctataatattaataatggatatttaacagtaagcttaaatcgagtaaataaaattcatc

SEQ ID NO: 151186 - DNA, 75 bp, synthetic construct
  source 1..75: mol_type = other DNA
aaaatgggacgatgacagataaaacagtaccattcgagaactatagtactaattatcctgctgacagaagtaaag

SEQ ID NO: 151187 - DNA, 75 bp, synthetic construct
  source 1..75: mol_type = other DNA
aaacaatactacgccagcgacctttttttatgattttggcacagttattatttcagatgttaacaacaattcagc

SEQ ID NO: 151188 - DNA, 75 bp, synthetic construct
  source 1..75: mol_type = other DNA
ctgcccgcggtgaactggaaattaccgatattaaccgtatttatatggaacaggggcatttatctgttgccatga

SEQ ID NO: 151189 - DNA, 75 bp, synthetic construct
  source 1..75: mol_type = other DNA
gaaggtgaaagtattagctgaaccgctgaaaaaaaatgcttatggtcagtatctgctgaaaatgattaaaggtta

SEQ ID NO: 151190 - DNA, 75 bp, synthetic construct
  source 1..75: mol_type = other DNA
tggcaggtggctcaggaactagattgtatcctgtaacaatggctgtaagtaaacagttgcttcctgtatttgata

SEQ ID NO: 151191 - DNA, 75 bp, synthetic construct
  source 1..75: mol_type = other DNA
atatctcaataaataatgtgttgctggtttctttgtatgccagccagttccccacagagcacggaccaattcctt

SEQ ID NO: 151192 - DNA, 75 bp, synthetic construct
  source 1..75: mol_type = other DNA
gcgacgttttcttataattttggcactgttactgtctctgatgttaataataattcacctggaacagtactacca

SEQ ID NO: 151193 - DNA, 75 bp, synthetic construct
  source 1..75: mol_type = other DNA
acaattaatgagggcaccagttttaccgttaatatgccggatgtctgggccagtgagctaagtcgggctggtgct

SEQ ID NO: 151194 - DNA, 75 bp, synthetic construct
  source 1..75: mol_type = other DNA
ttacctgttagtacaactggaaaagtgcctgcggcaggtcgttataatgcactggctatattgcgagtggaatat

SEQ ID NO: 151195 - DNA, 75 bp, synthetic construct
  source 1..75: mol_type = other DNA
tgggaaacaaagtattattcaggcacaagataatcctgatgttggtattatgattatggatagtcagcaaaactc

SEQ ID NO: 151196 - DNA, 75 bp, synthetic construct
  source 1..75: mol_type = other DNA
acgaagctggaaaagattcaaccgctatagataaaatcaatgcacactattttgacaaaaaagcagaagaggtaa

SEQ ID NO: 151197 - DNA, 75 bp, synthetic construct
  source 1..75: mol_type = other DNA
gcacattcggcggtaacgctgtacggcagcgccaattttctgggggcgcacaaagtcagactttatctatatttg

SEQ ID NO: 151198 - DNA, 75 bp, synthetic construct
  source 1..75: mol_type = other DNA
ttgaggcaagtaacttcattgcaacaatagaagaacgccaggggctgaaagtttcctgtccagaagagattgctt

SEQ ID NO: 151199 - DNA, 75 bp, synthetic construct
  source 1..75: mol_type = other DNA
ttggtgataatatcttctatggacacgacttgccgaaattaatggaagctgctgttaacaaagaaagcggtgcaa

SEQ ID NO: 151200 - DNA, 75 bp, synthetic construct
  source 1..75: mol_type = other DNA
tcaacagctacgattttgaattctccaacagcaccattccggtaacggaagcgctgagctgggcgcgtcctaagc

SEQ ID NO: 151201 - DNA, 75 bp, synthetic construct
  source 1..75: mol_type = other DNA
cggggcacggcgaagaccgttaaaagcggcattgtcagaaatgccacggaacaggggacgattaatgcggcgcag

SEQ ID NO: 151202 - DNA, 75 bp, synthetic construct
  source 1..75: mol_type = other DNA
atgagaaaaggatgctttgggctggtgtctctggcgctgttattgctggtggggtgtcgttcacatccggaaatt

SEQ ID NO: 151203 - DNA, 75 bp, synthetic construct
  source 1..75: mol_type = other DNA
cataccttaaacgcctgaatatcagcgtcacgtcgatgaaggatggcgtggattacatttcagtgataaagcaga

SEQ ID NO: 151204 - DNA, 75 bp, synthetic construct
  source 1..75: mol_type = other DNA
atgaaactgatcaccgtattcttttcatttgtgcttttatcatttttttctccggcttatgccgtttcagaaagt

SEQ ID NO: 151205 - DNA, 75 bp, synthetic construct
  source 1..75: mol_type = other DNA
gcaagtaaaagtgttagtacaacctctgaaaaaaaatgcttatggtcagtacctactaaaaatgattgaaggtta

SEQ ID NO: 151206 - DNA, 75 bp, synthetic construct
  source 1..75: mol_type = other DNA
tagcgggtggttctggtactcgtctttatcctgtgactatggcagtcagtaaacagctgttaccgatttatgata

SEQ ID NO: 151207 - DNA, 75 bp, synthetic construct
  source 1..75: mol_type = other DNA
caagtccagatggtcttgcgcaggcatttatcataggtgaagagtttattggtggtgatgattgtgctctggttc

SEQ ID NO: 151208 - DNA, 75 bp, synthetic construct
  source 1..75: mol_type = other DNA
aagcatcattttctgtgggatctgacgtgccggtactcggtcaggtcagctatgttgatggtcgtccggttcagt

SEQ ID NO: 151209 - DNA, 75 bp, synthetic construct
  source 1..75: mol_type = other DNA
ccagttttcttgataccaacggctatcttaatattgatgtcgccagtcctggaacgaaaattcatgagcctgaaa

SEQ ID NO: 151210 - DNA, 75 bp, synthetic construct
  source 1..75: mol_type = other DNA
aggtaacgctcagtcaaacgagaagtctttctgaataccaaaaaacaattgccggaaatattgaggaattagaaa

SEQ ID NO: 151211 - DNA, 75 bp, synthetic construct
  source 1..75: mol_type = other DNA
catgggggaagtgctacgtatcactatctcaataagcataatgtgttccggattacgttaccgcaaagaaattaa

SEQ ID NO: 151212 - DNA, 75 bp, synthetic construct
  source 1..75: mol_type = other DNA
tgactatcgatacgaacggtcagatggtcatgaagagcaaacaacagttgaaagaagattttggtatcacggcaa

SEQ ID NO: 151213 - DNA, 75 bp, synthetic construct
  source 1..75: mol_type = other DNA
ggcggagcacggaaggggatggttattttcacctgtgccgggctaaagataaatacccggtgcgtatcgatcacg

SEQ ID NO: 151214 - DNA, 75 bp, synthetic construct
  source 1..75: mol_type = other DNA
tctggctaaacaggatcagaaagaacacggtattattctgggccgtagcaggcttcccgaaaaaagtaaccgggg

SEQ ID NO: 151215 - DNA, 75 bp, synthetic construct
  source 1..75: mol_type = other DNA
gctgacatacgtcaacgactatggcgcacggatgccgctgttcttcaaatgcactggtaacagttgccaggttga

SEQ ID NO: 151216 - DNA, 75 bp, synthetic construct
  source 1..75: mol_type = other DNA
tgtctggacaacagaatttatgtttaacgcgcaacgcgtgcgatataccgagcaatcgttatataaatattattt

SEQ ID NO: 151217 - DNA, 75 bp, synthetic construct
  source 1..75: mol_type = other DNA
ctcgccgctggactcacgttgtctggatgggtatttatcgccgcgacgttattgtaaaaaataacattaaattta

SEQ ID NO: 151218 - DNA, 75 bp, synthetic construct
  source 1..75: mol_type = other DNA
tcatcgcacaggttgtcatcagcaaatataccgaccatctgcccctgtatcgccagcagcacattttctcccgaa

SEQ ID NO: 151219 - DNA, 75 bp, synthetic construct
  source 1..75: mol_type = other DNA
ggcagcgggattttcccccatggtgatatcaccaaaaacctccgtgccgttaaaagtcaaaatggatagcgtccc

SEQ ID NO: 151220 - DNA, 75 bp, synthetic construct
  source 1..75: mol_type = other DNA
cgtaataacgatccgaaactcccttatctggctcaaagctggattgaagatgaaaagggtaacaagatcacctcg

SEQ ID NO: 151221 - DNA, 75 bp, synthetic construct
  source 1..75: mol_type = other DNA
cagaccggataccatgcggacgattgcagagcgcaaggaccaggaaactggtgaaaccattcgcgaagttgtcga

SEQ ID NO: 151222 - DNA, 75 bp, synthetic construct
  source 1..75: mol_type = other DNA
aagagttgtcgtgcctgactgggaatcatcggcaacctgtatctcggcaggattatgcatagggatggtgccaac

SEQ ID NO: 151223 - DNA, 75 bp, synthetic construct
  source 1..75: mol_type = other DNA
cacccgctggcgttgatggatggcccattcagcgatgatacgttgcgcaactggccgtcgttggtgcgcgaagac

SEQ ID NO: 151224 - DNA, 75 bp, synthetic construct
  source 1..75: mol_type = other DNA
atatttcatcaacgagagatgttaatggtcggcaaagcattattcaggcggaggataaccccgacgttggtatta

SEQ ID NO: 151225 - DNA, 75 bp, synthetic construct
  source 1..75: mol_type = other DNA
agacttgataaaaaaataatatccgacatctcaataaataacgtgctgctggtttctttgtatgtcagccagttc

SEQ ID NO: 151226 - DNA, 75 bp, synthetic construct
  source 1..75: mol_type = other DNA
tctctatgcgtatgaaattcaggataaaaatgctatcggtttagttggaagcgaaagtgctttacaagaaaatga

SEQ ID NO: 151227 - DNA, 75 bp, synthetic construct
  source 1..75: mol_type = other DNA
ccaatcgatgttggcgggatattactgggtaatggaatatacacaaaacaaagggcttcatattcattttgtcgg

SEQ ID NO: 151228 - DNA, 75 bp, synthetic construct
  source 1..75: mol_type = other DNA
tgccgggctaaagacaaatatccagtgcgtattgatcacgtaattcactatagtgataaatctgcggtagacggt

SEQ ID NO: 151229 - DNA, 75 bp, synthetic construct
  source 1..75: mol_type = other DNA
aaatataccgtttacttagtgaaacccaaacgatgctggcgggatattactgggtaatggaatatacaccagaca

SEQ ID NO: 151230 - DNA, 75 bp, synthetic construct
  source 1..75: mol_type = other DNA
ctttactctatgaaatttggaccagtcatgtcgaatacgctgaacttgattcgtggtaaggctgaaggcattggt

SEQ ID NO: 151231 - DNA, 75 bp, synthetic construct
  source 1..75: mol_type = other DNA
tgcgtatcgatcatgtaattcactatagtgataaatctgcggtagacgacttacgttacgcccttagctatctgg

SEQ ID NO: 151232 - DNA, 75 bp, synthetic construct
  source 1..75: mol_type = other DNA
ctaaacaggatcagaaagaacacggtattattctggggcgtagcaggcttcccgaaaaaagtaaccggggccgac

SEQ ID NO: 151233 - DNA, 75 bp, synthetic construct
  source 1..75: mol_type = other DNA
gtccggaaaccaggctccggctctggttgccatctcctttgtggtggttttcctgtgtctggctgcactttatga

SEQ ID NO: 151234 - DNA, 75 bp, synthetic construct
  source 1..75: mol_type = other DNA
aaaatggaattgggtaagatccgcgacggttttgtcattccgtttaatatgcctgctattgttgaactgggcacg

SEQ ID NO: 151235 - DNA, 75 bp, synthetic construct
  source 1..75: mol_type = other DNA
gttgatattattaatcagttgaaggtacagaacgaccagatcgccgccggtcaattaggcgggacgcctgcatta

SEQ ID NO: 151236 - DNA, 75 bp, synthetic construct
  source 1..75: mol_type = other DNA
gttcagcgccctgcttggctttaccggctggcggatgagcaaacgcccgcaggcggcggaggcggaggagaaaag

SEQ ID NO: 151237 - DNA, 75 bp, synthetic construct
  source 1..75: mol_type = other DNA
atgctttcacgctcggatttactaacgctgttcacaatcaactttatcgtcgtcaccaaaggggccgagcgtatt

SEQ ID NO: 151238 - DNA, 75 bp, synthetic construct
  source 1..75: mol_type = other DNA
aagcccagggcaacccgctcacccagcgtattcgcggcgtgcgacaggtgatatccgacggcaacggcgtgctgc

SEQ ID NO: 151239 - DNA, 75 bp, synthetic construct
  source 1..75: mol_type = other DNA
taagccattcatccttattctggatgaatttcagacgtggtttgaaggcttaacaaactccaaccagtataagcg

SEQ ID NO: 151240 - DNA, 75 bp, synthetic construct
  source 1..75: mol_type = other DNA
aactgtctgttggccatgtggtgggtgccaacacaaccactcgaagcactaaaagttgttgaagcctggggattc

SEQ ID NO: 151241 - DNA, 75 bp, synthetic construct
  source 1..75: mol_type = other DNA
tgagtgtgctggatatctgccgccttcctgtgtgggatttggccgatgaaaactgtctgttggccatgtggtggg

SEQ ID NO: 151242 - DNA, 75 bp, synthetic construct
  source 1..75: mol_type = other DNA
atgtatatgtcttctaccagcgattcggcgggaagtgtgacaatcacactcaccttccagtccgggaccgatcca

SEQ ID NO: 151243 - DNA, 75 bp, synthetic construct
  source 1..75: mol_type = other DNA
gcacaaaacgccggtatggccttcgtcagtctgaaaccgtgggaagagcgtaatggtgacgaaaacagtgcggaa

SEQ ID NO: 151244 - DNA, 75 bp, synthetic construct
  source 1..75: mol_type = other DNA
cgctataagcatgtatgggatgttttgttcgaccagcatccgcatggcaatatcattaaagccaagtgggaggtg

SEQ ID NO: 151245 - DNA, 75 bp, synthetic construct
  source 1..75: mol_type = other DNA
cggttcaacgctggtgggcgatatcgtccaaaactggctggagaacggccgggacctgccgacaatcgcgttctg

SEQ ID NO: 151246 - DNA, 75 bp, synthetic construct
  source 1..75: mol_type = other DNA
cagcgccagccgacgaaggcagagaaacaagcctggtggagtcagatcaaattctatcagcgccagcgcgtatcg

SEQ ID NO: 151247 - DNA, 75 bp, synthetic construct
  source 1..75: mol_type = other DNA
ttgcacaggaacgagcacttaaccagctgcgccgtaactggaaggatacagaaaccttcatggtgtactcgccga

SEQ ID NO: 151248 - DNA, 75 bp, synthetic construct
  source 1..75: mol_type = other DNA
aaagacccggtgctgctggtgccgccgcagttgcgccctttgctggcgcgctacgcaaggttgtttgcgccgggg

SEQ ID NO: 151249 - DNA, 75 bp, synthetic construct
  source 1..75: mol_type = other DNA
cggcgtgccgctggtcatactgtgtattctggcgatggttattctgccgctgccgcctgcgctgctggatattct

SEQ ID NO: 151250 - DNA, 75 bp, synthetic construct
  source 1..75: mol_type = other DNA
atggcgaaaacaactaaatcgttcctcgcgctactgcgcggcggcaatctcggcgtgccgttggtgatcctgtgt

SEQ ID NO: 151251 - DNA, 75 bp, synthetic construct
  source 1..75: mol_type = other DNA
accgaaggcgtttccctgcgcgatatcgtcaccatcgccaccgtgctggtcgccagtagcgcggtgaccaaagat

SEQ ID NO: 151252 - DNA, 75 bp, synthetic construct
  source 1..75: mol_type = other DNA
ccatccgttcgttcgcaagcaggagctgacggtgtataccctgaataatgagctggaaaatctgctgactaacct

SEQ ID NO: 151253 - DNA, 75 bp, synthetic construct
  source 1..75: mol_type = other DNA
ccggtcgacccgaatatgctcaaccagttccagagtacgatgccgcaggtaaaagagcagatgaaagcggcgggg

SEQ ID NO: 151254 - DNA, 75 bp, synthetic construct
  source 1..75: mol_type = other DNA
gcggaagttaaatacaccccagagcagaaacaatcctggtggtctcagattcttttctatcagcgcacccgcgca

SEQ ID NO: 151255 - DNA, 75 bp, synthetic construct
  source 1..75: mol_type = other DNA
gaccaccatcggcgagttaatccagcgtggcgatctgagtaaatacgaattttacgcgccaactaagccggatct

SEQ ID NO: 151256 - DNA, 75 bp, synthetic construct
  source 1..75: mol_type = other DNA
cgtgaacggacacggaggatgacgaaaaactcatccgaagtgctttctctgccactggttgttggtggccggtat

SEQ ID NO: 151257 - DNA, 75 bp, synthetic construct
  source 1..75: mol_type = other DNA
tgcgtttacagcaggtcatctccaatctgttgagtaacgccattaaatttaccgataccggctgcattgttctgc

SEQ ID NO: 151258 - DNA, 75 bp, synthetic construct
  source 1..75: mol_type = other DNA
ccggggcgcggtgaagatcaagtgccgtcctcgcattacccagcatggtggcagtaccaaaacggccgtgggtcg

SEQ ID NO: 151259 - DNA, 75 bp, synthetic construct
  source 1..75: mol_type = other DNA
tgaaagatatcttgacttggtcaggaatctcatccgccaggccgagatgacttctggtggcgagcgccagcaaca

SEQ ID NO: 151260 - DNA, 75 bp, synthetic construct
  source 1..75: mol_type = other DNA
gaccatattcagacgttagagcgtcgagtccttcaactggaagaccagaagaagcgagcagccattcagtccgct

SEQ ID NO: 151261 - DNA, 75 bp, synthetic construct
  source 1..75: mol_type = other DNA
ttgcagcgcagtggtgtaatcgttacaacatacgaaggtcaggaaccctcaccagaagatgtgttgattacggat

SEQ ID NO: 151262 - DNA, 75 bp, synthetic construct
  source 1..75: mol_type = other DNA
ttccagggaaccggtctgggactggcgatttgtgaaaaactgatcagcatgatggacggtgatatctcagtagag

SEQ ID NO: 151263 - DNA, 75 bp, synthetic construct
  source 1..75: mol_type = other DNA
tccttattgcattcactggcaccgaccagcagaagcaggaatacctcctgaagcaagccaaatccggcaagcaga

SEQ ID NO: 151264 - DNA, 75 bp, synthetic construct
  source 1..75: mol_type = other DNA
tccttattgccttcactggcaccgaccagcagaagcaagagcacctcctgaagcaggcccaatccggcaagctgg

SEQ ID NO: 151265 - DNA, 75 bp, synthetic construct
  source 1..75: mol_type = other DNA
gagaaggacaagcagttactggaagaccagaagaagcgagcagcaattcagtccgctaaccgtcgaggcgtgact

SEQ ID NO: 151266 - DNA, 75 bp, synthetic construct
  source 1..75: mol_type = other DNA
cctttctacgtcctgcccggtggcaacattgaagaagatcccccccaacgtgccatgcctattgagcagagcctg

SEQ ID NO: 151267 - DNA, 75 bp, synthetic construct
  source 1..75: mol_type = other DNA
agtctggaacagaatctccggacaacgagattggcatcgagttccatcgtatcggcaaggatctcattcatgcct

SEQ ID NO: 151268 - DNA, 75 bp, synthetic construct
  source 1..75: mol_type = other DNA
aagaacataaacacgttttacgagatattcgtaatatggtcgaagagcttaacgggtccaaaactgagcactgct

SEQ ID NO: 151269 - DNA, 75 bp, synthetic construct
  source 1..75: mol_type = other DNA
aacctggttatgcactagatatctcaggaatggcgaaggcattcaaaaacgccccgctatcaccatcagacagcc

SEQ ID NO: 151270 - DNA, 75 bp, synthetic construct
  source 1..75: mol_type = other DNA
atgaacggtaaatacactctgatttatgctgatcctccttggtcataccgcgacaaagcagccgacggcgagcgc

SEQ ID NO: 151271 - DNA, 75 bp, synthetic construct
  source 1..75: mol_type = other DNA
gaactggacgagatcgaacaggcgaaagatgaagcgcggctggaaagctttatcaaacgtgtgaaaaagatgttt

SEQ ID NO: 151272 - DNA, 75 bp, synthetic construct
  source 1..75: mol_type = other DNA
tcatggcttcgatgtttggggtaatcagtgcgaagacccggcagtgcaactacacccaggatacgcgttggatat

SEQ ID NO: 151273 - DNA, 75 bp, synthetic construct
  source 1..75: mol_type = other DNA
ggcggattaacaaatgcattcagcaatgctcaggtgtcaccaatagacaaccaggggcgggagcgtgcagcatga

SEQ ID NO: 151274 - DNA, 75 bp, synthetic construct
  source 1..75: mol_type = other DNA
tacaaccatactttaatcatcaaattgatatttccggtaatgagtattttgtttcatttgattatcgtgatggtg

SEQ ID NO: 151275 - DNA, 75 bp, synthetic construct
  source 1..75: mol_type = other DNA
gatcagccgctttgtggcgaaagcacgcaccgtggttccgaaaggtgaagtgatcctcaacgaatccaatattga

SEQ ID NO: 151276 - DNA, 75 bp, synthetic construct
  source 1..75: mol_type = other DNA
tttcgcagttcgccgatggtgacaccatcatcgtcgggccacgtcagcatactttcagcgttcagggcgatgtct

SEQ ID NO: 151277 - DNA, 75 bp, synthetic construct
  source 1..75: mol_type = other DNA
agaacccaatcagtaacgagtggtctgtaaatccaaagtattccgactgcttccgtatcattaagccgtcagacc

SEQ ID NO: 151278 - DNA, 75 bp, synthetic construct
  source 1..75: mol_type = other DNA
cagcaaccagggacttgtcgtttccgttctctcaacgctgattgccattgccatcactgtggcaggaacggaagc

SEQ ID NO: 151279 - DNA, 75 bp, synthetic construct
  source 1..75: mol_type = other DNA
aacacgcagcaaaaaactgtcgcgaggaatacgtgcaaaaggccgaacgccgtcgccgactgattaaagcaggac

SEQ ID NO: 151280 - DNA, 75 bp, synthetic construct
  source 1..75: mol_type = other DNA
actcaaaccgggcgatgagattatggttctgccgaaatatgaatcgaaaaacattgaagttacccgtggtatttc

SEQ ID NO: 151281 - DNA, 75 bp, synthetic construct
  source 1..75: mol_type = other DNA
atgcagatcacccgccagcaatgtcagcagatagcgaacggctggcgcggtcagttagctatcgcagtggataat

SEQ ID NO: 151282 - DNA, 75 bp, synthetic construct
  source 1..75: mol_type = other DNA
cggcggtaaaaccctcgataccgccaaagcactggcacatttcatgggtgttccggtagcaatcgctccgactat

SEQ ID NO: 151283 - DNA, 75 bp, synthetic construct
  source 1..75: mol_type = other DNA
atggaccgcattattcaatcaccaggtaaatacatccagggcgcagatgtaattaatcgtctgggcgagtacctg

SEQ ID NO: 151284 - DNA, 75 bp, synthetic construct
  source 1..75: mol_type = other DNA
tcgctacttcccgtgacgttaactccggagccggataataaaatcccggcaccagtgcagatacctgaacagaca

SEQ ID NO: 151285 - DNA, 75 bp, synthetic construct
  source 1..75: mol_type = other DNA
cccagtgtaacaacgcctttattttcccgggcatcgggctgggtgttattgcttccggcgcgtcacgtatcaccg

SEQ ID NO: 151286 - DNA, 75 bp, synthetic construct
  source 1..75: mol_type = other DNA
gtaaatatatccagggcgctgatgtgattaatcgtctgggcgaatacctgaagccgctggcagaacgctggttag

SEQ ID NO: 151287 - DNA, 75 bp, synthetic construct
  source 1..75: mol_type = other DNA
aaactatccacaacatgcctggcggcgcaacgccagatgaagtgtatgcagcattgctggtggctgaccagtacg

SEQ ID NO: 151288 - DNA, 75 bp, synthetic construct
  source 1..75: mol_type = other DNA
cagtacgacctggaagagatgttctggcgctggagcgagcgtttcccgtcactggagccaatggagcgctggacg

SEQ ID NO: 151289 - DNA, 75 bp, synthetic construct
  source 1..75: mol_type = other DNA
aagaacggtgccagcgtgagcaggcgtaccaggcgctggcggggcaggcggagattgagctggcattccatacgc

SEQ ID NO: 151290 - DNA, 75 bp, synthetic construct
  source 1..75: mol_type = other DNA
gggaggcagagcagaaaacccgtgcgtaccaggcgctggttgctcaggcagaaatcgaactggcgttccattcgc

SEQ ID NO: 151291 - DNA, 75 bp, synthetic construct
  source 1..75: mol_type = other DNA
gtgcaactggcccgggctttgttcccggggcgatacccttcagccccgacagtaactcagactgtgaaaacagag

SEQ ID NO: 151292 - DNA, 75 bp, synthetic construct
  source 1..75: mol_type = other DNA
cacaggacatcattgccgctgccgtcagagctctggacaggatctgggtggatggtcaccgttacgcaaaggcag

SEQ ID NO: 151293 - DNA, 75 bp, synthetic construct
  source 1..75: mol_type = other DNA
cgcaatgtcggttttgacgatcaactctatttctcgcgagtatttaaaaaatgcaccggggccagcccgagcgag

SEQ ID NO: 151294 - DNA, 75 bp, synthetic construct
  source 1..75: mol_type = other DNA
gttcggcctgagacgttactccgacaggttaacaccgtctcgtttccagacagtgctatcccgccaggcttcagg

SEQ ID NO: 151295 - DNA, 75 bp, synthetic construct
  source 1..75: mol_type = other DNA
gtggtgtttgaacatgatgtcaacacaaaggcaactaataaagatacagataaagatctaaaaacagatctaacc

SEQ ID NO: 151296 - DNA, 75 bp, synthetic construct
  source 1..75: mol_type = other DNA
ttcgaacggagcagggcgctaacggggcgatacgggaactggaaaaattccgtcagcaggggtttacacctgagc

SEQ ID NO: 151297 - DNA, 75 bp, synthetic construct
  source 1..75: mol_type = other DNA
cgatgaatttaagcctgatgaataactcctgtctggcaaaaatacttctccttgcagacgcttcaaagcgtggac

SEQ ID NO: 151298 - DNA, 75 bp, synthetic construct
  source 1..75: mol_type = other DNA
aggtgctaacgtagggtttatcagttacagcgacctaacacaaaaagcgacgcaaaaattagatagtttgtctaa

SEQ ID NO: 151299 - DNA, 75 bp, synthetic construct
  source 1..75: mol_type = other DNA
ccggtgccagagcgtggtgacggttgcggagggcggattgatatcgtcgtgactgacaggaacggtgtccggtgt

SEQ ID NO: 151300 - DNA, 75 bp, synthetic construct
  source 1..75: mol_type = other DNA
aagatatccagttagccagcggcgatctggaaccatggttcaccaccgttgaaaacgaagtgaatttcccacatg

SEQ ID NO: 151301 - DNA, 75 bp, synthetic construct
  source 1..75: mol_type = other DNA
agtctgtgctgtgagctggttctgccggccggaactctcaggatgaaaggtgaactgacaccggcgttattacag

SEQ ID NO: 151302 - DNA, 75 bp, synthetic construct
  source 1..75: mol_type = other DNA
cgtctacctgatgggtgagttcaacgcaaaccgggtcatttttgatgaaagctgggacattgacgatctgtgcgt

SEQ ID NO: 151303 - DNA, 75 bp, synthetic construct
  source 1..75: mol_type = other DNA
gcagccgcccggcgaacatgaaacattgctacttcccgtgacgttaacgccggagccggataataaaatcccggc

SEQ ID NO: 151304 - DNA, 75 bp, synthetic construct
  source 1..75: mol_type = other DNA
tttccggtgaatattcctgcatgcaactggcccgggctcttttccctgggcgatacccttcagccccgacagtga

SEQ ID NO: 151305 - DNA, 75 bp, synthetic construct
  source 1..75: mol_type = other DNA
atctctggcgtaacggcggcctgcagccgcccggcgaacatgaaacatcgctacttcccgtgacgttaactccgg

SEQ ID NO: 151306 - DNA, 75 bp, synthetic construct
  source 1..75: mol_type = other DNA
tcgcgccccgcgtcagcgatccttctcgcctgatttctgcacttcgtgtactggcgttgttgacactgctgttcg

SEQ ID NO: 151307 - DNA, 75 bp, synthetic construct
  source 1..75: mol_type = other DNA
gtcaggaggaggtctacaccaccgattacctcacctttcgaatgaaatacatttacggtgttaccctgttcgaac

SEQ ID NO: 151308 - DNA, 75 bp, synthetic construct
  source 1..75: mol_type = other DNA
cgtatgttgatgaaaacgacgagttcactgacggtgaaccggcaacgggagggaagcccacaccgttgctggcgg

SEQ ID NO: 151309 - DNA, 75 bp, synthetic construct
  source 1..75: mol_type = other DNA
cagtaaaaaagatttattttgatcagattaagtctggaaagaaattagatgagtatcgcctcgttaccgagtatt

SEQ ID NO: 151310 - DNA, 75 bp, synthetic construct
  source 1..75: mol_type = other DNA
ggcatccatgctgcttggttttctgcttcgcccaaccattcaaccgcagggggttagccgccaacaggagagcac

SEQ ID NO: 151311 - DNA, 75 bp, synthetic construct
  source 1..75: mol_type = other DNA
tgcggcaccttcacggtctgccacctggcggccatgcgttatattgccgcccgccagggtagcgaagtcatccgt

SEQ ID NO: 151312 - DNA, 75 bp, synthetic construct
  source 1..75: mol_type = other DNA
caactgcgtattccgctctattcgatcgaggattggcagcagttatcaaggattgtcaacgcctggcagcaggcg

SEQ ID NO: 151313 - DNA, 75 bp, synthetic construct
  source 1..75: mol_type = other DNA
ggagtcgcattatcattaggattagatgattatttcgtaaagtgtgctgctgaaagccataaagtgccaataaaa

SEQ ID NO: 151314 - DNA, 75 bp, synthetic construct
  source 1..75: mol_type = other DNA
atgccgcaacatcgatagcaaataatgctcagatgtggctgaccgattatcgattcctgaatgataaggaagaat

SEQ ID NO: 151315 - DNA, 75 bp, synthetic construct
  source 1..75: mol_type = other DNA
cacaaaactgaaaacgggccggacaatccagataaatcttggcagtacgggtgcagttacttttgatggcagtgc

SEQ ID NO: 151316 - DNA, 75 bp, synthetic construct
  source 1..75: mol_type = other DNA
attgctcagcgatgactatttagaatcacctctcactaaaatactctatgactcattagctaaagatgaactaaa

SEQ ID NO: 151317 - DNA, 75 bp, synthetic construct
  source 1..75: mol_type = other DNA
tgtataagaacaaaacaaacctcatggtttttgagcaaagccgaaaattgtttaacttgataccagacgcagacg

SEQ ID NO: 151318 - DNA, 75 bp, synthetic construct
  source 1..75: mol_type = other DNA
gaaagattcaagctgaagaacttcgtggacagctaggtgacagaatggcaggtgctttccagttatttgccagaa

SEQ ID NO: 151319 - DNA, 75 bp, synthetic construct
  source 1..75: mol_type = other DNA
gtgttgaaggtggtaaaggaaaattatctgtagctgatgcaattaccaaagtaatgattgtcggtatggcaactg

SEQ ID NO: 151320 - DNA, 75 bp, synthetic construct
  source 1..75: mol_type = other DNA
aactagggaacctgaaaaactcttggaataccacgcttgatagtatcttcagaggttctgaagatggtcttcaag

SEQ ID NO: 151321 - DNA, 75 bp, synthetic construct
  source 1..75: mol_type = other DNA
gggaggtagagcagaaagcccgtgcgtaccaggcgctggtcgctcaggcggaaatcgaactggcgttccattcac

SEQ ID NO: 151322 - DNA, 75 bp, synthetic construct
  source 1..75: mol_type = other DNA
ttattgttgagctaggcttcaatgagaacgttattaaaggtctgcaaagagttgaaaaggcagctttgcagtccg

SEQ ID NO: 151323 - DNA, 75 bp, synthetic construct
  source 1..75: mol_type = other DNA
cagagagcaagaaatactaaagctttccagtttaccaccagatttaatgacgctattaatcctccaaaacaatca

SEQ ID NO: 151324 - DNA, 75 bp, synthetic construct
  source 1..75: mol_type = other DNA
gcattaaccgcagtgtcacagatggcttctaagggtcaggtgatggctgaggagttgaaggggcaattatctgaa

SEQ ID NO: 151325 - DNA, 75 bp, synthetic construct
  source 1..75: mol_type = other DNA
agagccaatattacaatttgagtagtaaatccaagacacttggaaacgaagcttttaatcgtgagttagcaaagt

SEQ ID NO: 151326 - DNA, 75 bp, synthetic construct
  source 1..75: mol_type = other DNA
ttatcgttgagctaggcttcagcgagaacgttgttaagggcttgcaaagagttgaaaaggaagctttgcagtcag

SEQ ID NO: 151327 - DNA, 75 bp, synthetic construct
  source 1..75: mol_type = other DNA
agaggattatggaaattggtttacagcgtgcaagtgctgaacgttcaattgatttcgtatttgataaagatgcag

SEQ ID NO: 151328 - DNA, 75 bp, synthetic construct
  source 1..75: mol_type = other DNA
ctggcttatgcgtattcaggttttaaagaaagcatttatctattcatggcatataaatatgactcaagcaaaagc

SEQ ID NO: 151329 - DNA, 75 bp, synthetic construct
  source 1..75: mol_type = other DNA
aaaacagcttttcgataagatgaaaaatggtgatgttaaagcctctgatgcacttcctaagtttgctaaagaact

SEQ ID NO: 151330 - DNA, 75 bp, synthetic construct
  source 1..75: mol_type = other DNA
agtaaaatccgccattggtttaggtctgctgctgtctgaaggcatcggcgacacgctgcgcgtatcactggcggc

SEQ ID NO: 151331 - DNA, 75 bp, synthetic construct
  source 1..75: mol_type = other DNA
gtattcgcatgaatgcaccggatattaaagctttattctccagcgtgcggacgggaacgccggtgaaagtgatca

SEQ ID NO: 151332 - DNA, 75 bp, synthetic construct
  source 1..75: mol_type = other DNA
gacgctggatcagtttgacgggtatcacgaccggattgtggcggagcccgtcgagtcgggcgggcagaacgcggg

SEQ ID NO: 151333 - DNA, 75 bp, synthetic construct
  source 1..75: mol_type = other DNA
cgcgctgaacttgaagcatacaaagaaaacacgccagcggcactaaatgaggcgtttaaacactgggatttagct

SEQ ID NO: 151334 - DNA, 75 bp, synthetic construct
  source 1..75: mol_type = other DNA
tcttgatcgtctgaacttcgatcagttcaaagtcagcgtcaaagcgtctgatgtcttcctcgctgttgagtctta

SEQ ID NO: 151335 - DNA, 75 bp, synthetic construct
  source 1..75: mol_type = other DNA
gcccaggtgaggcgctggtttctacactcggcgtcaccggcggcaacaagaaaagcggcctctatgaagatggcg

SEQ ID NO: 151336 - DNA, 75 bp, synthetic construct
  source 1..75: mol_type = other DNA
agtggtcggtgatgtagtgaaaaatggccgtcgcggatcgttgacctgtaaccttactattcatggcgtgcaggg

SEQ ID NO: 151337 - DNA, 75 bp, synthetic construct
  source 1..75: mol_type = other DNA
gacgggcgctttattgctcgcatgggggcgcaggtggtggaactcgggccggtcaatgccactattcataaaatt

SEQ ID NO: 151338 - DNA, 75 bp, synthetic construct
  source 1..75: mol_type = other DNA
aatgaatgtgtgaacgctgccgacctgcagctacttgcccgtatgtatcaacgtatcatggaacagctcgtcgcc

SEQ ID NO: 151339 - DNA, 75 bp, synthetic construct
  source 1..75: mol_type = other DNA
attacgctttcctctttcagagtcaaccctgaatttcaggatttttctcttcaaccgaaccggctgtttgtgtga

SEQ ID NO: 151340 - DNA, 75 bp, synthetic construct
  source 1..75: mol_type = other DNA
ataaaacaactcatggcggaacagtcatttccgcatcatcaacgatgactgtcaatggcaaaccggttgcgctca

SEQ ID NO: 151341 - DNA, 75 bp, synthetic construct
  source 1..75: mol_type = other DNA
tggtcggcgaaccgtcgagtatcgaagtggtaggtgatgtggtgaaaaatggtcgtcgcggatcgttaacctgca

SEQ ID NO: 151342 - DNA, 75 bp, synthetic construct
  source 1..75: mol_type = other DNA
gctatggcattccggttgtgagaggcccggtatttggtttgcctctggtcgaggaaaaatgtctggcgtggatgg

SEQ ID NO: 151343 - DNA, 75 bp, synthetic construct
  source 1..75: mol_type = other DNA
ttgacgatttaacctatgaagggtggttgatcgcaatcgacaagacaatcacagaaatatccgaaccggataaaa

SEQ ID NO: 151344 - DNA, 75 bp, synthetic construct
  source 1..75: mol_type = other DNA
accgatgataagttggtagaacttgttgatgatttaacctatgaaggttggttgatcgcaatcgacaagacaatc

SEQ ID NO: 151345 - DNA, 75 bp, synthetic construct
  source 1..75: mol_type = other DNA
gcgtggcgattgtggtagataaatcgacatggaccagggagttgattgaacgtaacggtaaatttggcatcgtta

SEQ ID NO: 151346 - DNA, 75 bp, synthetic construct
  source 1..75: mol_type = other DNA
tgggcgtgatgaagataagtttaactgttatggcattccggttgtgaaaggtccggtgcttggcttgccggtggt

SEQ ID NO: 151347 - DNA, 75 bp, synthetic construct
  source 1..75: mol_type = other DNA
tgcatcatgccagccgtctgttaaaccacggccctaccgtcctgatcaccagtttcgatgagcaatcccagcgac

SEQ ID NO: 151348 - DNA, 75 bp, synthetic construct
  source 1..75: mol_type = other DNA
acactgggatttagctgtgaatgcctttgagcacctctctaagcgtgtagagatgctctgtaagcgtgaaaacgc

SEQ ID NO: 151349 - DNA, 75 bp, synthetic construct
  source 1..75: mol_type = other DNA
ggcgtttaaacactgggatttagctgtgaatgcctttgagcacctctgtaagcgtgtagagatgctctgtaagcg

SEQ ID NO: 151350 - DNA, 75 bp, synthetic construct
  source 1..75: mol_type = other DNA
tgagaacgcatatctgacagcggatcagatatgggagctatcaaactggatagaaggtatttactcggacgttcg

SEQ ID NO: 151351 - DNA, 75 bp, synthetic construct
  source 1..75: mol_type = other DNA
cagatatgggagctatcaaactggatagaagatattgaatctgatgttcgctatgtgggagatggacttgttgaa

SEQ ID NO: 151352 - DNA, 75 bp, synthetic construct
  source 1..75: mol_type = other DNA
tagaagatattgaatctgatgttcgctatgtgggagacggacttgttgaactagctcaacgcttaggcgctacta

SEQ ID NO: 151353 - DNA, 75 bp, synthetic construct
  source 1..75: mol_type = other DNA
tagaaggtcttgaatcggacgttcgctatgtaggagacggacttgttgaactagctcaacgcttaggcgctacta

SEQ ID NO: 151354 - DNA, 75 bp, synthetic construct
  source 1..75: mol_type = other DNA
gaaagccctcgccgcgctgcaaaaaggcaagaaatttaccccggaaagcgtatctcgtctgctggagaaaatcag

SEQ ID NO: 151355 - DNA, 75 bp, synthetic construct
  source 1..75: mol_type = other DNA
cggtattcgcaaatcacttgaacaaattgagtgggtaaatgtcgtcggcgaatttgaagactctacagcgctaat

SEQ ID NO: 151356 - DNA, 75 bp, synthetic construct
  source 1..75: mol_type = other DNA
atcaccgccagtggcaaatatacagccagtgtgaaaaccgcaacggatggtagcgagacgccagcggccattctg

SEQ ID NO: 151357 - DNA, 75 bp, synthetic construct
  source 1..75: mol_type = other DNA
aatatattgcattatatgcttgacaatagctcaagattgattatttctgaaaccctttcagggatggtgatcagg

SEQ ID NO: 151358 - DNA, 75 bp, synthetic construct
  source 1..75: mol_type = other DNA
gtcattatttgtcccgcggtcgtttgttgtggctgacgccgttgatttctgccatcggcgtggtggcgctggtgg

SEQ ID NO: 151359 - DNA, 75 bp, synthetic construct
  source 1..75: mol_type = other DNA
gaaccgtaaatgtatcattgacgatggtgaatttgctgttgcagttgttttgatattatctggtgtagcagggta

SEQ ID NO: 151360 - DNA, 75 bp, synthetic construct
  source 1..75: mol_type = other DNA
gctgattaaaaccgtcaacggcctcgaaccggtgcagcaaggtgaaatcaccgtcgatggcatcgtggttaacga

SEQ ID NO: 151361 - DNA, 75 bp, synthetic construct
  source 1..75: mol_type = other DNA
agcattttgagctgttccctcatctgtcgattatcgaaaacctgaccctggcgcaggtgaaagtgcttaaacgcg

SEQ ID NO: 151362 - DNA, 75 bp, synthetic construct
  source 1..75: mol_type = other DNA
cggcgcagctttccggcggtcagcagcagcgtgtggcaatcgctcgcgcattgtgtatggatcctattgcgatgc

SEQ ID NO: 151363 - DNA, 75 bp, synthetic construct
  source 1..75: mol_type = other DNA
cgttccgaaagcagccagcaactggctggcaccatgaacacgctgatcgtagtgctatgtaccggagccatgacg

SEQ ID NO: 151364 - DNA, 75 bp, synthetic construct
  source 1..75: mol_type = other DNA
cgcatcacggaaagtggggcgtacaccctctgcaagcagggggcaggcgtgacggacggcagcgaaacgccggtg

SEQ ID NO: 151365 - DNA, 75 bp, synthetic construct
  source 1..75: mol_type = other DNA
cgttcccgcgtcggcatggtgttccagcattttgaactgttcccccatctgtcgattatcgaaaacctgaccctg

SEQ ID NO: 151366 - DNA, 75 bp, synthetic construct
  source 1..75: mol_type = other DNA
cgcaatgttggttttgacgatcaactctatttctcgcgagtatttaaaaaatgcaccggggccagtccgagcgag

SEQ ID NO: 151367 - DNA, 75 bp, synthetic construct
  source 1..75: mol_type = other DNA
cgacatggaccagggagttgattgagcgtaacggtaaatttggcatcgttatcccaggcgttgcagcgactaact

SEQ ID NO: 151368 - DNA, 75 bp, synthetic construct
  source 1..75: mol_type = other DNA
gccgctggcagtttgatgatgataagctcaatacgttgcatcatttaggtgctggcacgtttgttaccagtggta

SEQ ID NO: 151369 - DNA, 75 bp, synthetic construct
  source 1..75: mol_type = other DNA
acatcccaaccataaaggtcgactggcgtttctgatcacctcagacgaagaagccagcgcccacaacggcacggc

SEQ ID NO: 151370 - DNA, 75 bp, synthetic construct
  source 1..75: mol_type = other DNA
tctatttctcgcgagtatttaaaaaatgcaccggggccagcccgagtgaattccgtgccggttgtgaagaaaaag

SEQ ID NO: 151371 - DNA, 75 bp, synthetic construct
  source 1..75: mol_type = other DNA
gaaaggctatattctcaacctcaccattcgtggacagggtgtggtgaaaaatcagggacgagaatttgtctgccg

SEQ ID NO: 151372 - DNA, 75 bp, synthetic construct
  source 1..75: mol_type = other DNA
gggaagaaatttaccccggaaagcgtttctcgcctgttggaaaaaatcagtgctggtggttacggtgacaaacgt

SEQ ID NO: 151373 - DNA, 75 bp, synthetic construct
  source 1..75: mol_type = other DNA
acagttatgtcaagagcttgctgtagcaaggcagcctattacatgaacaatatgaacgtaattattgccgatgac

SEQ ID NO: 151374 - DNA, 75 bp, synthetic construct
  source 1..75: mol_type = other DNA
ttgttctgactatgaacaacaacccggcgattcttagtgcggtattggatctggatatcgaagggatcgtgctga

SEQ ID NO: 151375 - DNA, 75 bp, synthetic construct
  source 1..75: mol_type = other DNA
cgaggaaaaatgtctggcgtggatggagtgtcgcctgctacctgcaacttccgcgcaagaaaaatacgacacact

SEQ ID NO: 151376 - DNA, 75 bp, synthetic construct
  source 1..75: mol_type = other DNA
tgtttgtcattgagggattgccggcattagtgcttggtatctttacctggttctaccttgatgataatccgacga

SEQ ID NO: 151377 - DNA, 75 bp, synthetic construct
  source 1..75: mol_type = other DNA
aacaaggtgcaccgaccgatctgccgaaagccctcgcagcgctgcaaaaaggaaagaaatttaccccggaaagcg

SEQ ID NO: 151378 - DNA, 75 bp, synthetic construct
  source 1..75: mol_type = other DNA
tgaagtggtcggtgttggtcgctactggacaggctggaacactgaagtttatatcttcccgacctttaagcagat

SEQ ID NO: 151379 - DNA, 75 bp, synthetic construct
  source 1..75: mol_type = other DNA
gatgaaaatgcctttccagcgtgcgattactaaaaaagagcaagcggacatgggcaaactgaagaagagtgttcg

SEQ ID NO: 151380 - DNA, 75 bp, synthetic construct
  source 1..75: mol_type = other DNA
aactgagtaaagaagcacaaaaactgatgaagatgccgtttcagcgcgcaattaccaaaaaagagcaggctgata

SEQ ID NO: 151381 - DNA, 75 bp, synthetic construct
  source 1..75: mol_type = other DNA
gaaccctggcgtcatggagctggaagccatcaacaagtggaacggtactctgccgcaatacatgaccagcggtgc

SEQ ID NO: 151382 - DNA, 75 bp, synthetic construct
  source 1..75: mol_type = other DNA
cgcccatcggtattcaggtaataagcctctcatatgtgggtaagccggagtacccgcctactgttatcgacagca

SEQ ID NO: 151383 - DNA, 75 bp, synthetic construct
  source 1..75: mol_type = other DNA
tgtcggttgcgatcgcgttgaaccaggtaatgttggcatcaaggtaaataaactgggcgacgacaaaggcgtcgg

SEQ ID NO: 151384 - DNA, 75 bp, synthetic construct
  source 1..75: mol_type = other DNA
gtgtagatgatattactgataccgatctacgccagaaggttgcagatgctctgaaccggttagccagcaaaatga

SEQ ID NO: 151385 - DNA, 75 bp, synthetic construct
  source 1..75: mol_type = other DNA
tcaggcacaaaacaattacaaggttgccgatgacaaagccagtggcggtgcggcagttagaacgacggatggctc

SEQ ID NO: 151386 - DNA, 75 bp, synthetic construct
  source 1..75: mol_type = other DNA
ttttgtattaaggctgttaaaacggaagtaaatctctcagcatgtctggtttctgggtattcaatatggtctccg

SEQ ID NO: 151387 - DNA, 75 bp, synthetic construct
  source 1..75: mol_type = other DNA
acggtgtttcagacctaccgcaaaggcgtggatgacattaccgccactgacctgcgccagaagatcgccgacgca

SEQ ID NO: 151388 - DNA, 75 bp, synthetic construct
  source 1..75: mol_type = other DNA
caagtctgagctgctggatgaagctcttaaagacattcaggcagagatgacacctatcggtattcaggtaatgag

SEQ ID NO: 151389 - DNA, 75 bp, synthetic construct
  source 1..75: mol_type = other DNA
acatgctgcgcgcagaagctgctggacaggccgatgccattcgcacaaaagcccaggctgaagctgatgccattc

SEQ ID NO: 151390 - DNA, 75 bp, synthetic construct
  source 1..75: mol_type = other DNA
gctttaattattactgcgagaaagtggtgaaagggttctataaaaatcactttctgcgttttgatcgccagattg

SEQ ID NO: 151391 - DNA, 75 bp, synthetic construct
  source 1..75: mol_type = other DNA
catcactgcaaacagcaggggctgcactttattcagccaggacgctttgttttgcctggcgatatggcaggagcg

SEQ ID NO: 151392 - DNA, 75 bp, synthetic construct
  source 1..75: mol_type = other DNA
tgaccgtttttcttataacgggtgagccgcagaatgtaattaccggaatttatgacagtaagtcatcctgcattc

SEQ ID NO: 151393 - DNA, 75 bp, synthetic construct
  source 1..75: mol_type = other DNA
tcactgtttatcctggcgaagttcccgcacgtttgccaggtcaggcgttctgggataagcaaggcttccagtttg

SEQ ID NO: 151394 - DNA, 75 bp, synthetic construct
  source 1..75: mol_type = other DNA
ccagcggcattatcgacgtcaacggcgagaaaatcccggctctgcgcggcaatcgactgagcgatggcgcaccgc

SEQ ID NO: 151395 - DNA, 75 bp, synthetic construct
  source 1..75: mol_type = other DNA
tgaagggatcagcatggattgtctggggctggcctcagttcaggcgaccaccagcggcattatcgacgttaacgg

SEQ ID NO: 151396 - DNA, 75 bp, synthetic construct
  source 1..75: mol_type = other DNA
gagaatcagcgtttacgtctctcgcctgccgggcataactttttacgctatagccaacaaattctcacgttagtg

SEQ ID NO: 151397 - DNA, 75 bp, synthetic construct
  source 1..75: mol_type = other DNA
cctgcgccagaagatcgccgacgcactcaatcgactggccagcaaaatgaccaccgacaaatttatcgacggcgg

SEQ ID NO: 151398 - DNA, 75 bp, synthetic construct
  source 1..75: mol_type = other DNA
tggactggatggaacactgaggtttacatcttcccgacctttaagcagatgaagacctacgatgatccattcagt

SEQ ID NO: 151399 - DNA, 75 bp, synthetic construct
  source 1..75: mol_type = other DNA
gaaaggcgagaatcagtatgccgttgaaatggataatcctgcgttctctgaagatgtggcaacggagaccattaa

SEQ ID NO: 151400 - DNA, 75 bp, synthetic construct
  source 1..75: mol_type = other DNA
tggtgaatgcctcccgctaaaaaaagtatcgctgtacctgaataacgaaaccccggctggatacccctccagcca

SEQ ID NO: 151401 - DNA, 75 bp, synthetic construct
  source 1..75: mol_type = other DNA
aaacccaattactgggtacctaaccttaatctgaaaccagaaaataacattacccgtgagattggcgcaggtatt

SEQ ID NO: 151402 - DNA, 75 bp, synthetic construct
  source 1..75: mol_type = other DNA
tgctcagaggtatcgcgatcatcacgatgatgagtttattcgtcgctgcgagcgtgtgcgtcggcagtttattct

SEQ ID NO: 151403 - DNA, 75 bp, synthetic construct
  source 1..75: mol_type = other DNA
acgttactgaaaccgtcgagaaaatcaaaagaggcaccatacgcgatggttatgcaggctaccgtcagctggtgg

SEQ ID NO: 151404 - DNA, 75 bp, synthetic construct
  source 1..75: mol_type = other DNA
aatcaaaagaggcaccatacgcgatggttatgcaggataccgtcagctggtggcgaaaacaggtatgtcagatgc

SEQ ID NO: 151405 - DNA, 75 bp, synthetic construct
  source 1..75: mol_type = other DNA
tgccaaagataagttagaatcggctcttgggctgggaatcatcgttatagctgtttgggcaataatacacttctt

SEQ ID NO: 151406 - DNA, 75 bp, synthetic construct
  source 1..75: mol_type = other DNA
tgaagcaaactaataggggcgatgtttcttctcgtaaacaactaacagaaaatccacagcagcaagacttacctg

SEQ ID NO: 151407 - DNA, 75 bp, synthetic construct
  source 1..75: mol_type = other DNA
gcgtgaaaattgtcgtgacggtgtccgatggacagtcgcttcatttatcacaacaatggccaccctcttcaggat

SEQ ID NO: 151408 - DNA, 75 bp, synthetic construct
  source 1..75: mol_type = other DNA
tggaaaatccattccctgattcggcatgttgtctgacctggcagcagaatgatatgtcaccagcattgacctggc

SEQ ID NO: 151409 - DNA, 75 bp, synthetic construct
  source 1..75: mol_type = other DNA
ccttccgtgatatggggatgctgagctggagctgtgttgttgcccgccatcatccgcttgtgtcaatgaatggac

SEQ ID NO: 151410 - DNA, 75 bp, synthetic construct
  source 1..75: mol_type = other DNA
gtggctgggggggggggggggggggggggggggcggggggatgtggagctgaccgctgctggagcgtggtttctc

SEQ ID NO: 151411 - DNA, 75 bp, synthetic construct
  source 1..75: mol_type = other DNA
atgaacaccgcaatttttaacggcaaagcatccatgaccagcgttgagatcgcagagctggtgggtaaacgtcat

SEQ ID NO: 151412 - DNA, 75 bp, synthetic construct
  source 1..75: mol_type = other DNA
catgagtttatgactccggatggtctgttatcacgcagaaccatagtcgcactggaaccgttcatggctgcattt

SEQ ID NO: 151413 - DNA, 75 bp, synthetic construct
  source 1..75: mol_type = other DNA
gtggctgggggggggggggggggggggggggggccggatgtggagctgaccgctgctggagcgtggtttctcaaa

SEQ ID NO: 151414 - DNA, 75 bp, synthetic construct
  source 1..75: mol_type = other DNA
cagcagctaacgccaccgggcgtatcggcgacggcgcgcccgcgctgtggtttgacaatattcgcggctttaccg

SEQ ID NO: 151415 - DNA, 75 bp, synthetic construct
  source 1..75: mol_type = other DNA
ggggcctgccacctgcgtgccgctttaccagcagttaaaagccgagttcccggaagtgcaggcggtgaacgctat

SEQ ID NO: 151416 - DNA, 75 bp, synthetic construct
  source 1..75: mol_type = other DNA
tatccgccgctgggataacttcccgattgccccggagcgccgcgccaatcctgcctgggcgcagaacaccgtcga

SEQ ID NO: 151417 - DNA, 75 bp, synthetic construct
  source 1..75: mol_type = other DNA
aaatatatgaaaaaaaacacacgttttctaatgttaacatttccgacaacagatacaaagaatataaacaaaata

SEQ ID NO: 151418 - DNA, 75 bp, synthetic construct
  source 1..75: mol_type = other DNA
tcatatcatcttcacctatagatgcggacagaatggactacctacttagagatagctacttctccggcgttaaat

SEQ ID NO: 151419 - DNA, 75 bp, synthetic construct
  source 1..75: mol_type = other DNA
gccgttgactggctttgatgtgccgtggggctcggaagtgatccttgaaggggttatcgaaagccgtaaacgcga

SEQ ID NO: 151420 - DNA, 75 bp, synthetic construct
  source 1..75: mol_type = other DNA
gatggcaagattgccgaacagtatctggaagagttacgcggaaatcagacgctttcttctctgaatctcctgttt

SEQ ID NO: 151421 - DNA, 75 bp, synthetic construct
  source 1..75: mol_type = other DNA
aggtccatgttgaaaatttggatgcttcagctgaaaatccatcgactaaagagccagattccccttctgttgctg

SEQ ID NO: 151422 - DNA, 75 bp, synthetic construct
  source 1..75: mol_type = other DNA
gaaattttcccaagggatgggcaagttttggctttggcactattgtcttcggtaaaaaacctaaacaaggcttcc

SEQ ID NO: 151423 - DNA, 75 bp, synthetic construct
  source 1..75: mol_type = other DNA
aaagcccgtacccgatcgccaccgccccgctgaccggttttgatgtgccgtggggttcagaagtgatcacaggag

SEQ ID NO: 151424 - DNA, 75 bp, synthetic construct
  source 1..75: mol_type = other DNA
ggtgcgtatcgataaagtctcttaccgcaccaggccgattttcgaatcgctgtacctcggcatgccgtggaccga

SEQ ID NO: 151425 - DNA, 75 bp, synthetic construct
  source 1..75: mol_type = other DNA
atggcatttgatgatttacgcagctttttacaggcgctcgacgaccaggggcaattgctgaaaatcagcgaagag

SEQ ID NO: 151426 - DNA, 75 bp, synthetic construct
  source 1..75: mol_type = other DNA
tgttcgactccggtgaagtctgcgcgtttcgtatcaaatatcccaacggcactgttgatgttttccgtggctggc

SEQ ID NO: 151427 - DNA, 75 bp, synthetic construct
  source 1..75: mol_type = other DNA
acagcaggacctggtgaactggttcgatgagggcaccgtgaggggatataaaatcaaatacccaaatggtgttgt

SEQ ID NO: 151428 - DNA, 75 bp, synthetic construct
  source 1..75: mol_type = other DNA
gcagaaaaaactggttcagttgttcgactctggtgaagtctgtgcgtttcgtatcaaatatcccaacggcactgt

SEQ ID NO: 151429 - DNA, 75 bp, synthetic construct
  source 1..75: mol_type = other DNA
tttatggtgaagtcgacagcaacggtattccgaaaaaaggtctgctgctggctgcagtgaaaatgactgccctga

SEQ ID NO: 151430 - DNA, 75 bp, synthetic construct
  source 1..75: mol_type = other DNA
attgctatcgtctgggtatttacctttgtaaatatgctcggcggtacctgggtaagccgtttaaccacgattggt

SEQ ID NO: 151431 - DNA, 75 bp, synthetic construct
  source 1..75: mol_type = other DNA
tcctgttccggcgggtatcgcctgtattgctatcgtctgggtatttacctttgtaaatatgctcggcggtacttg

SEQ ID NO: 151432 - DNA, 75 bp, synthetic construct
  source 1..75: mol_type = other DNA
tactggcagcgtggttccgttcgtggcctggtaaaaaacgagcctcagtataatcgcctcgcgttctatgagtcc

SEQ ID NO: 151433 - DNA, 75 bp, synthetic construct
  source 1..75: mol_type = other DNA
taagcgatgagacgcgtcgcgcgctggacaatgaatatcaaaaactggagcgtgagcttgagcttcacaccctgc

SEQ ID NO: 151434 - DNA, 75 bp, synthetic construct
  source 1..75: mol_type = other DNA
cgttataatcgcactgctggttctgttgtgtcacaacgaaatcaacagtctcagatagctttcaatctcgctatc

SEQ ID NO: 151435 - DNA, 75 bp, synthetic construct
  source 1..75: mol_type = other DNA
cttcttaacaccagatgagcaggccgcagctgtggagatcattcgtgtagcagggattaaaggacttatgcctac

SEQ ID NO: 151436 - DNA, 75 bp, synthetic construct
  source 1..75: mol_type = other DNA
tatgctaacaacgttggagcggaaattattaccgcctatgaacattttacgccgctggataccttaaaggctcag

SEQ ID NO: 151437 - DNA, 75 bp, synthetic construct
  source 1..75: mol_type = other DNA
cgttcgtgctggggctgctggataaaatgttaggctggcaacgcgccggtggcgaaggcatcctgacgacaatct

SEQ ID NO: 151438 - DNA, 75 bp, synthetic construct
  source 1..75: mol_type = other DNA
caaaaatgtgcctggttcacatcggaaagaatctgcccgcagaaaaaaaagccggatttctggcaactctgattg

SEQ ID NO: 151439 - DNA, 75 bp, synthetic construct
  source 1..75: mol_type = other DNA
tgatatcgacggtccatcaggcaacgttaaaacacttcacgaaggcgtcaaaaaaaatgtgcctggtgcacattg

SEQ ID NO: 151440 - DNA, 75 bp, synthetic construct
  source 1..75: mol_type = other DNA
aaaaaatgtgcctggtgcatatcggaaagaatctgcccgcagaaaaaaaagccgaatttctggcaactctgattg

SEQ ID NO: 151441 - DNA, 75 bp, synthetic construct
  source 1..75: mol_type = other DNA
gagcgacatgattgccagcgcgcggcgttttgaaatgcagatgaaggtgatcagcagcgtcgatgataacgcagg

SEQ ID NO: 151442 - DNA, 75 bp, synthetic construct
  source 1..75: mol_type = other DNA
ataaagaaaccccattcactgtgattgatatcgatggtccatcaggcaacgtaaaaacacttgatgaaggtgtca

SEQ ID NO: 151443 - DNA, 75 bp, synthetic construct
  source 1..75: mol_type = other DNA
aaagaatctgcccgcagaaaaaaaagccggatttctggcaactctgattgcaatgaaattaaacggtgaaatctg

SEQ ID NO: 151444 - DNA, 75 bp, synthetic construct
  source 1..75: mol_type = other DNA
ggatgtaaacgatgatatgtccctgccctttgctaccattgagcgaaccatccttacatacctgggcttagacga

SEQ ID NO: 151445 - DNA, 75 bp, synthetic construct
  source 1..75: mol_type = other DNA
atcgcctgcgtaatggcctgctggtggatgtaaacgatgatatgtccctgccctttgctaccattgagcgaacca

SEQ ID NO: 151446 - DNA, 75 bp, synthetic construct
  source 1..75: mol_type = other DNA
gaaaatgtaaacctggttgtcgctgttttggcaaccgcatgtcgtgttatcggtttggctaaacaggcatttatt

SEQ ID NO: 151447 - DNA, 75 bp, synthetic construct
  source 1..75: mol_type = other DNA
ttttccatttctcctgagcaaggagagctaatctacttgctctgtcgagcaatgaaagccactcgtgttgtcgat

SEQ ID NO: 151448 - DNA, 75 bp, synthetic construct
  source 1..75: mol_type = other DNA
ggcattaaatgaaagggttcctgagctcattactgacagtaaggcgctgagggaagagctggagacaatgctgtg

SEQ ID NO: 151449 - DNA, 75 bp, synthetic construct
  source 1..75: mol_type = other DNA
tggtgtggatcaaccagtagcaggtgaaaacaaagacctggaacttgcagtaatgatggctgcttgtcgcgtgct

SEQ ID NO: 151450 - DNA, 75 bp, synthetic construct
  source 1..75: mol_type = other DNA
cagcgaaataacggtcagcaacaaagacagcaatctcagcagcatggaaatcacagcgaaccacctatgaacttc

SEQ ID NO: 151451 - DNA, 75 bp, synthetic construct
  source 1..75: mol_type = other DNA
aggcaagagacgagcaaaaaatttctggtgaatgcctaccggtaaaaaaagtatcgctgtacctgaataacgaaa

SEQ ID NO: 151452 - DNA, 75 bp, synthetic construct
  source 1..75: mol_type = other DNA
gtgagttcagcgtttgcactgatgatgacggtttttcttataacaggtgagccacagaatgtgattaccggaatt

SEQ ID NO: 151453 - DNA, 75 bp, synthetic construct
  source 1..75: mol_type = other DNA
ccagcctggcgattagcctgctgctgtgctgcacggcgcaggcaaacaaccataaaatcctcggcgtcattgcga

SEQ ID NO: 151454 - DNA, 75 bp, synthetic construct
  source 1..75: mol_type = other DNA
atcaaatctgccagcgtgaccgcagcgaagttgatcttaagcgtaagatcctcgatgacttacgtcacctggagt

SEQ ID NO: 151455 - DNA, 75 bp, synthetic construct
  source 1..75: mol_type = other DNA
tccagaaagacaaaggcgagtttttcgccaagagcgtgaagtttaaatatccgcgtcagcgtaaaacggtcgtcg

SEQ ID NO: 151456 - DNA, 75 bp, synthetic construct
  source 1..75: mol_type = other DNA
gggagttaattaacgctgccgaatttaaatatgcggatggcatcagcgttgtacgttcagtacgtaaaaagtacc

SEQ ID NO: 151457 - DNA, 75 bp, synthetic construct
  source 1..75: mol_type = other DNA
gtggcgcgcaaatcgtcactgtcgcaatgggatcgccaaaacaggaaatcttcatgcgcgactgccgtcaggtgc

SEQ ID NO: 151458 - DNA, 75 bp, synthetic construct
  source 1..75: mol_type = other DNA
gcgtctcaaaaatcaccttttccggtcatacagtgaactcatcggatatggccacgctgaaaattatcggcgacg

SEQ ID NO: 151459 - DNA, 75 bp, synthetic construct
  source 1..75: mol_type = other DNA
atgaaacagcccaaaataccggtgaaaatgctgacaatactcacgattttgatggtatttctctgtattggcggt

SEQ ID NO: 151460 - DNA, 75 bp, synthetic construct
  source 1..75: mol_type = other DNA
tgtggcaaaacgattacagcaattcgctgctggcgtaccgtcaggcgttgcaactacgtggtgagaacgctgaac

SEQ ID NO: 151461 - DNA, 75 bp, synthetic construct
  source 1..75: mol_type = other DNA
atgaataacaacaccacggcaccgacctatacgctgcgtggcttacagttgatcggttggcgtgatatgcagcac

SEQ ID NO: 151462 - DNA, 75 bp, synthetic construct
  source 1..75: mol_type = other DNA
catcccgacctgataagcgcattcatgaccacggcggcggcaaactttgccacgctgacagaacgggagattgcc

SEQ ID NO: 151463 - DNA, 75 bp, synthetic construct
  source 1..75: mol_type = other DNA
gcggcggcaaactttgccacgctgacagaacgggagattgccgaagcggaacaggtaacaaccatcaacgttaaa

SEQ ID NO: 151464 - DNA, 75 bp, synthetic construct
  source 1..75: mol_type = other DNA
ttcatgaccacagcggcggcaaactttgccacgctgacagaacgggagattgccgaagcggaacaggtaacaacc

SEQ ID NO: 151465 - DNA, 75 bp, synthetic construct
  source 1..75: mol_type = other DNA
atgggcggtctgaatactccacatttgcacggcgctgatatagtgagccgactcaggggattaatgtcccggaat

SEQ ID NO: 151466 - DNA, 75 bp, synthetic construct
  source 1..75: mol_type = other DNA
gcggcaaactttgccacgctgacagaacgggagattgccgaagcggaacaggtaacaaccatcaacattaaaacc

SEQ ID NO: 151467 - DNA, 75 bp, synthetic construct
  source 1..75: mol_type = other DNA
acggcggcaaactttgccacgctgacagaacgggagattgccgaagcggaacaggtgacaaccatcaacgttaaa

SEQ ID NO: 151468 - DNA, 75 bp, synthetic construct
  source 1..75: mol_type = other DNA
taccctctccttcagccctgaaaccctcgcgctgtgggtgccggatattagcgcggtcattaagaataagatcga

SEQ ID NO: 151469 - DNA, 75 bp, synthetic construct
  source 1..75: mol_type = other DNA
catgacagagcacgctttaaaggtggcaatcagaacgatagaccgccacgcgggggaaggatacgcgaaagaaca

SEQ ID NO: 151470 - DNA, 75 bp, synthetic construct
  source 1..75: mol_type = other DNA
agcttgcgccggtgttcgactcgctcgataacaaaattattattaccgggcatactgatgcgatggcctataaaa

SEQ ID NO: 151471 - DNA, 75 bp, synthetic construct
  source 1..75: mol_type = other DNA
cgttgacagaacgggagattgccgaagcggaacaggtaacaaccatcaacgttaaaaccggagagttgaaatcat

SEQ ID NO: 151472 - DNA, 75 bp, synthetic construct
  source 1..75: mol_type = other DNA
tgcgctgaatacgccgatgaccgaaggctatgatgattctgcggtctgggtggcgaagggcgtaaacctgattgg

SEQ ID NO: 151473 - DNA, 75 bp, synthetic construct
  source 1..75: mol_type = other DNA
aatgcggattactctgagctggcgcagtcaccgaaatttcagcagacgtttttgtccattgacgccgatccgcag

SEQ ID NO: 151474 - DNA, 75 bp, synthetic construct
  source 1..75: mol_type = other DNA
tctctcggttccattcctgactttagtgtgaggataaaaacgaatcagactgcattttctgactggtataagttg

SEQ ID NO: 151475 - DNA, 75 bp, synthetic construct
  source 1..75: mol_type = other DNA
aacgagtcagactgcattttctgactggtataagttgtaccacacaggatttaaacccactcccgctgatataaa

SEQ ID NO: 151476 - DNA, 75 bp, synthetic construct
  source 1..75: mol_type = other DNA
atcgactgatttagcagacaactgggggagcgtagtctcatttgatgccagtcgcgtagttccaactgcaccaga

SEQ ID NO: 151477 - DNA, 75 bp, synthetic construct
  source 1..75: mol_type = other DNA
gcttatgacgcagctctctcacgtcgtggttaatgccaatcgccatcaggaaatctatcaggcaagcggtctgaa

SEQ ID NO: 151478 - DNA, 75 bp, synthetic construct
  source 1..75: mol_type = other DNA
ggatttgcctggttcagccgcatgactaacatcgatccagtgtggaaagtgttaattaccacgggtttttgcgga

SEQ ID NO: 151479 - DNA, 75 bp, synthetic construct
  source 1..75: mol_type = other DNA
caccctgacgccacgctagatgaaaagggatttgtgcggcttagtaatagtgtttcaagcgaaagtgaactgata

SEQ ID NO: 151480 - DNA, 75 bp, synthetic construct
  source 1..75: mol_type = other DNA
ggaaggcgtttctaaagccccttaatccacaatatcccatcatagaaatggacaatgattgcgaaatagtaggtg

SEQ ID NO: 151481 - DNA, 75 bp, synthetic construct
  source 1..75: mol_type = other DNA
tatcatgttcatgtctgatgcgtcaaaaccctttcttccgtggccggattatcacggcgggcggagtcagcatct

SEQ ID NO: 151482 - DNA, 75 bp, synthetic construct
  source 1..75: mol_type = other DNA
gatacgcctgttccgccagacgacggcggtgatacgccagttccgcctgatgacggcggtgatacgccggttccg

SEQ ID NO: 151483 - DNA, 75 bp, synthetic construct
  source 1..75: mol_type = other DNA
gctggcaggaagctacaaacttttctcagtttgccgggaatataggcggaggtgcgggacacgcaattaactttc

SEQ ID NO: 151484 - DNA, 75 bp, synthetic construct
  source 1..75: mol_type = other DNA
ttctgcctctgattaccctgtgctggcgaaagtgtttccttcgctggtattacctgaagcccgcggtgatttcat

SEQ ID NO: 151485 - DNA, 75 bp, synthetic construct
  source 1..75: mol_type = other DNA
tgaaatttttggacatttagtctggttctggtctattgaaattatgaggtgtactggcaatagcggacactacca

SEQ ID NO: 151486 - DNA, 75 bp, synthetic construct
  source 1..75: mol_type = other DNA
tttgaagtgggggattacatttacatccttggcattaaagcggcgctggataatccgggtacgacgtttaaaggt

SEQ ID NO: 151487 - DNA, 75 bp, synthetic construct
  source 1..75: mol_type = other DNA
tggtcgtgatgaggttgagcgggcgacgcggcggaaggtcaagattgccaaaggatggggctgggttgcatgtgt

SEQ ID NO: 151488 - DNA, 75 bp, synthetic construct
  source 1..75: mol_type = other DNA
gatgaggttgaacgtgcgacgcggcggaaagtcaagattgccaaaggatggggctggcttgcatgtgtggacgtt

SEQ ID NO: 151489 - DNA, 75 bp, synthetic construct
  source 1..75: mol_type = other DNA
ggaaaactatcgagatattccgggcgggaacgcatatcacgatggctgggcaggaaattgccttttctgacgagg

SEQ ID NO: 151490 - DNA, 75 bp, synthetic construct
  source 1..75: mol_type = other DNA
gttaagccgtccgacatcccgaccatgaaagactacaccgcccgcctggtggatcagaaatggctgcgcctcgcg

SEQ ID NO: 151491 - DNA, 75 bp, synthetic construct
  source 1..75: mol_type = other DNA
gactaaacgctatcgttctaacgtcatcaactgggggatgttaccgctgcaaatggcggaagtaccaacctttga

SEQ ID NO: 151492 - DNA, 75 bp, synthetic construct
  source 1..75: mol_type = other DNA
ttgatttcagcgatcataaagatgcatttgttaacgtgaatacgccagaggagcttgcccgatggcaggaaaaac

SEQ ID NO: 151493 - DNA, 75 bp, synthetic construct
  source 1..75: mol_type = other DNA
gaagattcactggcggattacccaggccctctggcaggaatgctttcagtaatgcagcaggaagcaggcgagtgg

SEQ ID NO: 151494 - DNA, 75 bp, synthetic construct
  source 1..75: mol_type = other DNA
catttatgcgtctggctggcggtcatgcggttgatttcagcgatcataaagatgcatttgttaacgtgaatacgc

SEQ ID NO: 151495 - DNA, 75 bp, synthetic construct
  source 1..75: mol_type = other DNA
ataaccatagctattgatggcgatggcttggggaaatcgacggctgatctgatgtacgaacgctatggtattacc

SEQ ID NO: 151496 - DNA, 75 bp, synthetic construct
  source 1..75: mol_type = other DNA
ttatcaaaatgaagctggcggagtacggcgggcgtgataaccctatgtacatgattaaggtacgcggcctattcc

SEQ ID NO: 151497 - DNA, 75 bp, synthetic construct
  source 1..75: mol_type = other DNA
tagcgccgaaatcgctaacccgctgtggttcttcctgattgttattaccctttttccgctcagtatcggtccgga

SEQ ID NO: 151498 - DNA, 75 bp, synthetic construct
  source 1..75: mol_type = other DNA
ttaacgcagcggcccatactgcagtcgacaaagtggagagtgagcgggaatttgccgagttactcaatgcaacca

SEQ ID NO: 151499 - DNA, 75 bp, synthetic construct
  source 1..75: mol_type = other DNA
ccaacttcgccaaaaccatgctgcgttttggtaaagagcgcagcgagatgtcggtcatcaacgatcagtttggtg

SEQ ID NO: 151500 - DNA, 75 bp, synthetic construct
  source 1..75: mol_type = other DNA
atggccaggtgggctgggagctgcagcgcgcgctgttgccgctgggtcgcatcaccgcggtggattttgactcca

SEQ ID NO: 151501 - DNA, 75 bp, synthetic construct
  source 1..75: mol_type = other DNA
cgaaccgcagacgttatggtcttgctgcattcattgggctgattgctggcgttgtttccgcatttgttaagtggg

SEQ ID NO: 151502 - DNA, 75 bp, synthetic construct
  source 1..75: mol_type = other DNA
cgcgatgaatttaacccgccgtatatctttctacgagattatttaggtatcgacccaacccaaactgtgtatacc

SEQ ID NO: 151503 - DNA, 75 bp, synthetic construct
  source 1..75: mol_type = other DNA
gaacggatccgcagcgtcgccgctatggcgttgcgttacttgtgggtgtgctttcaggaattatttcagcatttg

SEQ ID NO: 151504 - DNA, 75 bp, synthetic construct
  source 1..75: mol_type = other DNA
cgccgaccaatggggcgtgcggcattattccggctgtgctggcttattatgataagttccgtcgcccagtaaatg

SEQ ID NO: 151505 - DNA, 75 bp, synthetic construct
  source 1..75: mol_type = other DNA
gccatgccacggatgtcgccatcatcatgggactggcaggaaacagtccgcaggatgttgtcattgatgagatcc

SEQ ID NO: 151506 - DNA, 75 bp, synthetic construct
  source 1..75: mol_type = other DNA
ctcggcaccgcgtgtttcactcgataaagtgatcgagacgatgtatgaaaccggcaaagatatgaacgataaata

SEQ ID NO: 151507 - DNA, 75 bp, synthetic construct
  source 1..75: mol_type = other DNA
gaatgccgactatattgattacctaccaatcaatatgttggctacacctaaagaagtcctcaactcatcgggtta

SEQ ID NO: 151508 - DNA, 75 bp, synthetic construct
  source 1..75: mol_type = other DNA
gtctggaggcgggggtgccgcgcattatgccacatgtttacagctcgattatagaccctgatacgggatataccc

SEQ ID NO: 151509 - DNA, 75 bp, synthetic construct
  source 1..75: mol_type = other DNA
tggataagcgacagcgactcccgtaccggcccagtgctggaactggtcactggtggcatgtatatctggctgccg

SEQ ID NO: 151510 - DNA, 75 bp, synthetic construct
  source 1..75: mol_type = other DNA
cctctgcctgatgtggctcagcgtctggtgcagcatcttgcagagcatggcattaatacatctaagcgctcgtga

SEQ ID NO: 151511 - DNA, 75 bp, synthetic construct
  source 1..75: mol_type = other DNA
ttatgggggctgacaaggtacgcaacaaagtgaccggctttattgaaacccgtatcgggggagcgaaaggaaatg

SEQ ID NO: 151512 - DNA, 75 bp, synthetic construct
  source 1..75: mol_type = other DNA
tcgctggtatgtgggattgtcacgcttgctgtggccggttcgctggaatatctggggcttccgtccaacgcagta

SEQ ID NO: 151513 - DNA, 75 bp, synthetic construct
  source 1..75: mol_type = other DNA
gcatgaacagcggcagcgaaacggcggtggacagcatcgttgggctgaaactggactatgcagggaaagaaggct

SEQ ID NO: 151514 - DNA, 75 bp, synthetic construct
  source 1..75: mol_type = other DNA
gtgaaccaggacggcgagctggatgtgagcggcggcggtcacggcattgatatcactggtgatagcgccactgta

SEQ ID NO: 151515 - DNA, 75 bp, synthetic construct
  source 1..75: mol_type = other DNA
aaataatcgcgccaaagtttatcgacagcagagaagcattagccaaagggtttactgttgattattccaatggct

SEQ ID NO: 151516 - DNA, 75 bp, synthetic construct
  source 1..75: mol_type = other DNA
gccacatcaccggaaacattgtcatcagagctgcgtcagttcgcgaatgcgagagataaagctctacaggaaatc

SEQ ID NO: 151517 - DNA, 75 bp, synthetic construct
  source 1..75: mol_type = other DNA
gtatccccgaaacgccgctgaccgaagatcagatagttatcttccaggtgccgatcccggaaccgctgcgcttta

SEQ ID NO: 151518 - DNA, 75 bp, synthetic construct
  source 1..75: mol_type = other DNA
ccggaaaccgcatgtttgtctgctccgataccgattattgccgccaacagagcgaggcaaaaaccaatgaatcaa

SEQ ID NO: 151519 - DNA, 75 bp, synthetic construct
  source 1..75: mol_type = other DNA
caatgctactgggaatggatgtttatggctggcaagtgatggcgctgacgctgctgctgggaacgcctacgcttg

SEQ ID NO: 151520 - DNA, 75 bp, synthetic construct
  source 1..75: mol_type = other DNA
ttgaactgcgtgtggcgtttcgccatagcgccgaaatcgccaatccactatggttctttcttattgttattactc

SEQ ID NO: 151521 - DNA, 75 bp, synthetic construct
  source 1..75: mol_type = other DNA
ttgtagtcggtctaataacttcatttattttcctttgtcctcttttttttatttctgtgaaaaactcttctctta

SEQ ID NO: 151522 - DNA, 75 bp, synthetic construct
  source 1..75: mol_type = other DNA
ccggggcaggccagacagctggcatggaaaaccaccatgctggcccggagcgggactgttcgcatgccgactatc

SEQ ID NO: 151523 - DNA, 75 bp, synthetic construct
  source 1..75: mol_type = other DNA
cattatttgaaggatttaacgacaattgtgtgctgattcacggcaatttctgtttgcgtagcatgttgaaagatt

SEQ ID NO: 151524 - DNA, 75 bp, synthetic construct
  source 1..75: mol_type = other DNA
gttcggtagataatactcaggaaaatttctggccttcctggtatcagcaacatgttgaagtgcaatgggcgacac

SEQ ID NO: 151525 - DNA, 75 bp, synthetic construct
  source 1..75: mol_type = other DNA
ctgtatcccggatgaccacgaactgatggccgggatggtgggtctgcaaaccgcgcatcgttacggtaacgcaac

SEQ ID NO: 151526 - DNA, 75 bp, synthetic construct
  source 1..75: mol_type = other DNA
cgttctggtcgtccgggtccggtactggtggatttaccgttcgacgttcaggttgcggaaatcgagtttgatcct

SEQ ID NO: 151527 - DNA, 75 bp, synthetic construct
  source 1..75: mol_type = other DNA
gtgcggttgacaatacccaggaaaatttctggccttcctggtatcgacagcacgttgaaatgctatgggcgacgc

SEQ ID NO: 151528 - DNA, 75 bp, synthetic construct
  source 1..75: mol_type = other DNA
gtaccggaagatcgtccgattgtagttactggtgccgtgtataatctcactaaaaccaacaacctgatggcggac

SEQ ID NO: 151529 - DNA, 75 bp, synthetic construct
  source 1..75: mol_type = other DNA
cccggaggcagcctgcaggctcacagcgggcgggtttcctttgactgggaaggcgatgctctggagctcctgagc

SEQ ID NO: 151530 - DNA, 75 bp, synthetic construct
  source 1..75: mol_type = other DNA
ttatggattgtgtaactcaagtatctcctaatgatcttgatagccttgttggggtcttccgtgaactaggagaag

SEQ ID NO: 151531 - DNA, 75 bp, synthetic construct
  source 1..75: mol_type = other DNA
gatccgtctcagagatcatctgaaacggtttcctgatttctataatgaagaaatattcagggaggtgaccgaaga

SEQ ID NO: 151532 - DNA, 75 bp, synthetic construct
  source 1..75: mol_type = other DNA
ttgcagagcaagtttgccactggcgatatcgaccacaccctgctgaccggtgtcgactttatgcgtatgcgtaat

SEQ ID NO: 151533 - DNA, 75 bp, synthetic construct
  source 1..75: mol_type = other DNA
aaggtaagcagtatgaagtcggcgtgaaatatgtaccggaagatcgtccgattgtagttactggtgccgtgtata

SEQ ID NO: 151534 - DNA, 75 bp, synthetic construct
  source 1..75: mol_type = other DNA
tgttgcgtaaaacacacttcgacaacgttccggttaaaccgcagcgcgtgtatgaagagatgaacaaagcttttg

SEQ ID NO: 151535 - DNA, 75 bp, synthetic construct
  source 1..75: mol_type = other DNA
ttgccgggggcggggtaatcaacgccgatgccgcggcgctgttacaacagtttgctgaactgaccagtgttccgg

SEQ ID NO: 151536 - DNA, 75 bp, synthetic construct
  source 1..75: mol_type = other DNA
ctttctgttatcaacgatcaggttggtgcacctacaggtgcagaattactggcagactgtaccgcgcatgctatt

SEQ ID NO: 151537 - DNA, 75 bp, synthetic construct
  source 1..75: mol_type = other DNA
tgcaaaaattggggcctgggttgttcattattcaacagattacgtttttccgggcgatggcgataaaccatggcg

SEQ ID NO: 151538 - DNA, 75 bp, synthetic construct
  source 1..75: mol_type = other DNA
gcctggtgcgctatgcggctgaacatgccaccgatgagcaaatcgatttgctggcaaaagcactggaaatcaaca

SEQ ID NO: 151539 - DNA, 75 bp, synthetic construct
  source 1..75: mol_type = other DNA
accgccactggatcaactgtggtcaggctggtccgttaggctggtccgttaggctggacgattccggctgcgcta

SEQ ID NO: 151540 - DNA, 75 bp, synthetic construct
  source 1..75: mol_type = other DNA
tttaccgttcgacgttcaggttgcggaaatcgagtttgatcctgacatgtacgaaccgctgccggtctacaaacc

SEQ ID NO: 151541 - DNA, 75 bp, synthetic construct
  source 1..75: mol_type = other DNA
gaaaagttcatttttaccactgcgaccaccggggcctgccgctggcgctcatcagcgaagacggcaattgatatc

SEQ ID NO: 151542 - DNA, 75 bp, synthetic construct
  source 1..75: mol_type = other DNA
gtagaaggtgcgtcgcacatggctgaaggctatacccgcgcaacggcagggaatatcggcgtttgtttggggact

SEQ ID NO: 151543 - DNA, 75 bp, synthetic construct
  source 1..75: mol_type = other DNA
aacggcagggaatatcggcgtatgtctggggacttccggtcctgcgggcacggacatgatcaccgcgctctattc

SEQ ID NO: 151544 - DNA, 75 bp, synthetic construct
  source 1..75: mol_type = other DNA
atggccgggatggtgggtctgcaaactgcgcatcgttacggtaacgcaacgctactggcgtccgacatggtgttt

SEQ ID NO: 151545 - DNA, 75 bp, synthetic construct
  source 1..75: mol_type = other DNA
ttagaaggggagatttactggtttgcgaaggtggagaaataggtaggtgtgcgatttggaataaccaaattaaag

SEQ ID NO: 151546 - DNA, 75 bp, synthetic construct
  source 1..75: mol_type = other DNA
gactaaaggtacaggcgcagtactctgatgatgaaattgaaaatgtacataaaccgttgctgcgtatgctggcgg

SEQ ID NO: 151547 - DNA, 75 bp, synthetic construct
  source 1..75: mol_type = other DNA
ggccgtgcaaggcgactgtacgtggccgcagtatgatcgacaaaaacatgatccggtagaagatgcgttgcacgt

SEQ ID NO: 151548 - DNA, 75 bp, synthetic construct
  source 1..75: mol_type = other DNA
gatacggcgccgtccgaatttcgcggggaaaggtgcggtgtaccatcgactcgctcaacgcgggcaggcctattc

SEQ ID NO: 151549 - DNA, 75 bp, synthetic construct
  source 1..75: mol_type = other DNA
aaaagaggatgacccacgtaatcaggttaatttctttatgagccatcggaaagaccatactgccatcacgcctct

SEQ ID NO: 151550 - DNA, 75 bp, synthetic construct
  source 1..75: mol_type = other DNA
gctatcgccttgtataccaggttatagacgagaaagttgtcgttttcgtgatttctgttggaaaagagaacgctc

SEQ ID NO: 151551 - DNA, 75 bp, synthetic construct
  source 1..75: mol_type = other DNA
gtctgaaggtacaagcacagtaccatgttgatgagatagaaaatgtacataaaccgttgctgcgcatgttggcgg

SEQ ID NO: 151552 - DNA, 75 bp, synthetic construct
  source 1..75: mol_type = other DNA
gactaaaggtacaggcgcagtactctgatgatgaaattgagaatgttcataaaccgctactgcgtatgctggcgg

SEQ ID NO: 151553 - DNA, 75 bp, synthetic construct
  source 1..75: mol_type = other DNA
atgacagatatcaatattggtaactggagaacagttgagatattccgggcgggaacacatatcgcgatggaggga

SEQ ID NO: 151554 - DNA, 75 bp, synthetic construct
  source 1..75: mol_type = other DNA
ccgcagtacgatcgacaaaagcatgatcccatagaagatgcattacacgttactgcaccgatcattatcgtagaa

SEQ ID NO: 151555 - DNA, 75 bp, synthetic construct
  source 1..75: mol_type = other DNA
caaatgttcgccgggtgctggaacagagtctgccggcaaatttgaccttaatgatgacggctagcggtgaatatc

SEQ ID NO: 151556 - DNA, 75 bp, synthetic construct
  source 1..75: mol_type = other DNA
gtgaaaatcgaactgacggtgaatggattgaaggtacaggcgcagtacccgaacgaagagattgaaaatgtgcat

SEQ ID NO: 151557 - DNA, 75 bp, synthetic construct
  source 1..75: mol_type = other DNA
tggatctgggcacctgcgatgtggtgtcgatggttgtcgaccgcgacggtcagccggtggcggtatgcctcgact

SEQ ID NO: 151558 - DNA, 75 bp, synthetic construct
  source 1..75: mol_type = other DNA
aatgtggttctggagagaaaggtccgggaactcaatggagaaagctgtatttcactggaggaagaaccgccccca

SEQ ID NO: 151559 - DNA, 75 bp, synthetic construct
  source 1..75: mol_type = other DNA
attgacagctgcatcgatttcgaggatttcgaccagcagctgcgtgaacacgtcaggaacgggactggcctgact

SEQ ID NO: 151560 - DNA, 75 bp, synthetic construct
  source 1..75: mol_type = other DNA
cgtctgggatttcttcggtgctgtcaccattgttcgtcgccatctcgatacccttgagcagcaatttggtcgccg

SEQ ID NO: 151561 - DNA, 75 bp, synthetic construct
  source 1..75: mol_type = other DNA
cggcggacatcacatctctctgactctcgccggaaatcgtcgtattccgctggaagaggcagagcagtacaagcg

SEQ ID NO: 151562 - DNA, 75 bp, synthetic construct
  source 1..75: mol_type = other DNA
catttaccgcagcacagtttgtttatgaccccgctggcgatcgccagtagcgggcgagagaaagcggaggggatc

SEQ ID NO: 151563 - DNA, 75 bp, synthetic construct
  source 1..75: mol_type = other DNA
atgaaagcagcggcgaaaacgcagaaaccaaaacgtcaggaagaacatgccaactttattagttggcgttttgcg

SEQ ID NO: 151564 - DNA, 75 bp, synthetic construct
  source 1..75: mol_type = other DNA
tgcatgcgttcgcgtctcaacccgacactggcgcaccactgttatgaaagcgacaacgctggtggccgtgccgcg

SEQ ID NO: 151565 - DNA, 75 bp, synthetic construct
  source 1..75: mol_type = other DNA
cccacgcgaacctcagcttgtggggctagatatgggtgctcgctttgcacagccgtaggggttgaccattcaatg

SEQ ID NO: 151566 - DNA, 75 bp, synthetic construct
  source 1..75: mol_type = other DNA
ccacgaaatcaaagacgtggcacgctacagcgaattaaccctgaccggggtattacagaagtcgagtaacgtcgg

SEQ ID NO: 151567 - DNA, 75 bp, synthetic construct
  source 1..75: mol_type = other DNA
caacaccggtgaagtgctggcgatggctaacagcccgtcatacaacccaaataatctgagcggcacgccgaaaga

SEQ ID NO: 151568 - DNA, 75 bp, synthetic construct
  source 1..75: mol_type = other DNA
ttacagttagcgcgagtctacgcaaccatcggcagctacggcatttatcgcccactgtcgattaccaaagttgac

SEQ ID NO: 151569 - DNA, 75 bp, synthetic construct
  source 1..75: mol_type = other DNA
atgaataacatgctgatgcaacgtattgttgacgaggtggtttttcgccttaaacaacgtgcgggaaaaacactc

SEQ ID NO: 151570 - DNA, 75 bp, synthetic construct
  source 1..75: mol_type = other DNA
gaacgccattgaattgaagactctcgcccgtctaccgctaagctggtgcgacgaacaagggcaaccgatctacct

SEQ ID NO: 151571 - DNA, 75 bp, synthetic construct
  source 1..75: mol_type = other DNA
tggcgtactacgaatcaatacctgctctttccatcgctatgtcgcagggcggggattttcttggtgacaatggcg

SEQ ID NO: 151572 - DNA, 75 bp, synthetic construct
  source 1..75: mol_type = other DNA
caactggcaggggatcgttgagtccctgaccctgccgaaattcacccgcaagtttgagaagtatcgcggcggcgg

SEQ ID NO: 151573 - DNA, 75 bp, synthetic construct
  source 1..75: mol_type = other DNA
ctaccgtaccggtggatacattaaacgactgccaaaggatccgtggggcaatgattatcagtatctcagcccggg

SEQ ID NO: 151574 - DNA, 75 bp, synthetic construct
  source 1..75: mol_type = other DNA
cgcggggcgtcgagtacaacatggcgcagagtgctgtttatcgcgtgtgtggtgggaagctctacaaaggcgaaa

SEQ ID NO: 151575 - DNA, 75 bp, synthetic construct
  source 1..75: mol_type = other DNA
gtctccgccgatgaaggcgatctcgatgccagcgtcgctactcgctggcaagagctctgccgtctggcagcgcca

SEQ ID NO: 151576 - DNA, 75 bp, synthetic construct
  source 1..75: mol_type = other DNA
accgattcatgcgcggatgcagcaactggtcagcgaattccagaccacccttgacgcgctggatagcgtgatagc

SEQ ID NO: 151577 - DNA, 75 bp, synthetic construct
  source 1..75: mol_type = other DNA
atgtctgataatttgccgtggaaaacctggacgccagacgatctcgcgccaccacaggcagagtttgtgccaatg

SEQ ID NO: 151578 - DNA, 75 bp, synthetic construct
  source 1..75: mol_type = other DNA
ggatgatctgcaacgtgtggatgatatgctcggcgctaccttaagtttgcatggctggcgcttgcggggcgatcc

SEQ ID NO: 151579 - DNA, 75 bp, synthetic construct
  source 1..75: mol_type = other DNA
gtctctgccgatgaaggcgatctcgatgccagtgtcgccacccgttggcaagaactctgccgtctggcagcacct

SEQ ID NO: 151580 - DNA, 75 bp, synthetic construct
  source 1..75: mol_type = other DNA
ctggcccaggggctggagcaaggtctggcagaggcgaagtctcaacaagcgccaattcatgcccggatgcagcaa

SEQ ID NO: 151581 - DNA, 75 bp, synthetic construct
  source 1..75: mol_type = other DNA
agcaatccggcaacaggtgcgccgtctgtgtacatcatcggctccggtcaggtatcaccaatcgccagcgcgagc

SEQ ID NO: 151582 - DNA, 75 bp, synthetic construct
  source 1..75: mol_type = other DNA
ctcggccttgatgatgatgctctgtcaatggagtggtcgctcggtggattcccggattcggttatctgggagctt

SEQ ID NO: 151583 - DNA, 75 bp, synthetic construct
  source 1..75: mol_type = other DNA
tcagaactgattcgtcagtggtctgaaacaggtgaaggcgtggtgatccacacacccgcctatgacgcattttac

SEQ ID NO: 151584 - DNA, 75 bp, synthetic construct
  source 1..75: mol_type = other DNA
tgccccggtgatgacagcgccgactgcccgattatcgaaaatctctccggctgctgtcatcatcgggcggggtga

SEQ ID NO: 151585 - DNA, 75 bp, synthetic construct
  source 1..75: mol_type = other DNA
atggttatcgaacctacacgcagcagcatctcaacgaattgaccttactgcgccaggcgcgccaggtgggcttta

SEQ ID NO: 151586 - DNA, 75 bp, synthetic construct
  source 1..75: mol_type = other DNA
gaaattcagtgttttttcgaggagtcggcgctggtgatcattgattatcagcaggctattgaaaatggatttgtc

SEQ ID NO: 151587 - DNA, 75 bp, synthetic construct
  source 1..75: mol_type = other DNA
cttcatttacgaaggcaatcagataacgtgcggcgataagctggagtccgtgaccgggaaattgcaattcgacat

SEQ ID NO: 151588 - DNA, 75 bp, synthetic construct
  source 1..75: mol_type = other DNA
ggcaaagccacggtggatggcgtccagttgcgctttaccggctctatccagcgtgacgataccggagaagtgcag

SEQ ID NO: 151589 - DNA, 75 bp, synthetic construct
  source 1..75: mol_type = other DNA
ggtaaagccacggtggatggcatccagttgcgctttaccggctctattcagcgtgacgataccggggaagtgcag

SEQ ID NO: 151590 - DNA, 75 bp, synthetic construct
  source 1..75: mol_type = other DNA
cgtctatctgaaagacaatctgacgtatattgcagatacgatgaataccgcgttcccggagctaaactggcaaat

SEQ ID NO: 151591 - DNA, 75 bp, synthetic construct
  source 1..75: mol_type = other DNA
tcggcactgaaaggacgtgatgggctttcttccccttcggtactggcgttaactgcccatatcgccgcctatcag

SEQ ID NO: 151592 - DNA, 75 bp, synthetic construct
  source 1..75: mol_type = other DNA
atcgtcatggcacatggtgtacacagtgggattatgtcgctgaccgtttcggcactgctgacctgttaccgttca

SEQ ID NO: 151593 - DNA, 75 bp, synthetic construct
  source 1..75: mol_type = other DNA
aaaaagcgcagttactgccagtttgattcgaagctggcgcagatagtccagcagcaggggcgtaacgggcagttg

SEQ ID NO: 151594 - DNA, 75 bp, synthetic construct
  source 1..75: mol_type = other DNA
tggtttgtggtggtgatgtcttctgtctcgatggtgaatgtgataaggcgcagagcggaaaaagcagtgattttg

SEQ ID NO: 151595 - DNA, 75 bp, synthetic construct
  source 1..75: mol_type = other DNA
ctggcctcacgtcagtgcgcgttttattccgatgagggaacctgtctgcatgagtatgccacgtactcctgcgag

SEQ ID NO: 151596 - DNA, 75 bp, synthetic construct
  source 1..75: mol_type = other DNA
aggatgttctggatatcgaaaaagagatcctgcgtatcgaaaaagcctgtggtcgtgaacccggcagcaccggcc

SEQ ID NO: 151597 - DNA, 75 bp, synthetic construct
  source 1..75: mol_type = other DNA
aaaaatgacggcaccacggaatgggcgaccggtgaaaccggaaaaaccatcacagagtcattcatgaacaagccg

SEQ ID NO: 151598 - DNA, 75 bp, synthetic construct
  source 1..75: mol_type = other DNA
atgaaacgtcttataccattgattctgtgcctggtagtcagtggggcacaggcggacagcaaccgtgattaccgg

SEQ ID NO: 151599 - DNA, 75 bp, synthetic construct
  source 1..75: mol_type = other DNA
cgttccgatttgaatcggtccagttaaacttcaacaatcaaaatacaatgcgtttttataagcacatctttgaaa

SEQ ID NO: 151600 - DNA, 75 bp, synthetic construct
  source 1..75: mol_type = other DNA
caatggttccgccattatatcaggtataccgatgattacgggggctgacctgctggcacagtatcgatatatgga

SEQ ID NO: 151601 - DNA, 75 bp, synthetic construct
  source 1..75: mol_type = other DNA
atgacgatcagcgaaatccctctttccccggaaaaccagcgattctccatatccgtggcaggtcaaagtctgcaa

SEQ ID NO: 151602 - DNA, 75 bp, synthetic construct
  source 1..75: mol_type = other DNA
cacaaactatacctgtgagcgggacacgatggtggaggagtactgcacacggactgccagtatcaccggggactg

SEQ ID NO: 151603 - DNA, 75 bp, synthetic construct
  source 1..75: mol_type = other DNA
aaggtgcttacagtcccgatgagtttatcgaaaaggtaaaacagtacaaaagcgtgcaggcttatattgctgcgg

SEQ ID NO: 151604 - DNA, 75 bp, synthetic construct
  source 1..75: mol_type = other DNA
cgcacaatattattcgaagtctcaacatgtatatcgaacgggttaagaaaacacttaacgtatcccgtctgacct

SEQ ID NO: 151605 - DNA, 75 bp, synthetic construct
  source 1..75: mol_type = other DNA
cgaggaaaagtgatcgctgccagcgcggtttactcctggaataagaggctggccttcagcaatcctagctggttt

SEQ ID NO: 151606 - DNA, 75 bp, synthetic construct
  source 1..75: mol_type = other DNA
atgctgactaaagaaccatcttttgcatcactgcttgttaagcaaagccctgcaatgcactgcggtcatggctgg

SEQ ID NO: 151607 - DNA, 75 bp, synthetic construct
  source 1..75: mol_type = other DNA
cgactgccaaaagatccgtggggcaatgattatcagtatctcagtccgggtgaaaaagggctgtttgatgtttac

SEQ ID NO: 151608 - DNA, 75 bp, synthetic construct
  source 1..75: mol_type = other DNA
ccggtcgatctgcagtttctgcagcaaataatagagaacggatcggcggcggaaagtattcacacggcactggcc

SEQ ID NO: 151609 - DNA, 75 bp, synthetic construct
  source 1..75: mol_type = other DNA
tcctgtgaaacaactcgctcgtctgccactggaactcagcgatgaacatggacagcgcatctttttgcattcatc

SEQ ID NO: 151610 - DNA, 75 bp, synthetic construct
  source 1..75: mol_type = other DNA
tgaatggtcagtatgttgtctccattacctctcccgttaccggtgaaattgtcgatgcgcattacagctggagtc

SEQ ID NO: 151611 - DNA, 75 bp, synthetic construct
  source 1..75: mol_type = other DNA
ggggcgttaacgacctggaagccgtcgttcgcggcggcgcggacattgtgcgtctgccgaaaaccgacaccgctc

SEQ ID NO: 151612 - DNA, 75 bp, synthetic construct
  source 1..75: mol_type = other DNA
gaaaaagacaccgctcgccgcatggtctaccacgcgctgcaacacccactgtatcgcgatatcgaaaccatcgtg

SEQ ID NO: 151613 - DNA, 75 bp, synthetic construct
  source 1..75: mol_type = other DNA
ggcaagatggtggacggtccggttatcgatcgcgcccgtctggtgctctcccgcgcagaactttccggcatccgc

SEQ ID NO: 151614 - DNA, 75 bp, synthetic construct
  source 1..75: mol_type = other DNA
ggtatctattgtgacgctgagtgtgcgcaatggcacagggaagagcaggcagcaaaacagcgtaaatatggcata

SEQ ID NO: 151615 - DNA, 75 bp, synthetic construct
  source 1..75: mol_type = other DNA
gggggaatatggggaattagtctatattacatctatttatcaaatagtggctttgtttattgattttggctttac

SEQ ID NO: 151616 - DNA, 75 bp, synthetic construct
  source 1..75: mol_type = other DNA
atgaatatccgtccccaatcctgcccaaagaacgctggcgttatcagatggtgaatatgtatccggacagcggac

SEQ ID NO: 151617 - DNA, 75 bp, synthetic construct
  source 1..75: mol_type = other DNA
gtaggtattaccgataccgatctcagcgcgtccgagcccaaactgcaagcatggctggacaaacaataccacggc

SEQ ID NO: 151618 - DNA, 75 bp, synthetic construct
  source 1..75: mol_type = other DNA
attcatggtttatcactgaccttgaagacgaatcgcatcctgaccgatacagcgcacaatatcgcgcagaatcgc

SEQ ID NO: 151619 - DNA, 75 bp, synthetic construct
  source 1..75: mol_type = other DNA
aaaagaaatgcgcgatccgtggcacaaagagcaggctggcaaggcggcgggtcgccagttggcggcgtgggttga

SEQ ID NO: 151620 - DNA, 75 bp, synthetic construct
  source 1..75: mol_type = other DNA
tgaccaactccgaaaccaacagcattaagaaagagtacatcgataaattaatggttgagcgtgaggctgaagcaa

SEQ ID NO: 151621 - DNA, 75 bp, synthetic construct
  source 1..75: mol_type = other DNA
aagagatgactgaacgcgagcagcgtgaacttaaaacactgctggatcgggcgcggattgcgcatggtcgcgtat

SEQ ID NO: 151622 - DNA, 75 bp, synthetic construct
  source 1..75: mol_type = other DNA
cacggaaggatcggcgattcgccgtataggtcacctgcgctggctgcgtaatatcgccgtggcattaggcaatgc

SEQ ID NO: 151623 - DNA, 75 bp, synthetic construct
  source 1..75: mol_type = other DNA
caggtaataaagtattaatggaaaaaataaattcttgtgtatttggaacggattctaatcacttttcttgcccgg

SEQ ID NO: 151624 - DNA, 75 bp, synthetic construct
  source 1..75: mol_type = other DNA
aaaggcaattaaatggaggtgtcgattttttaagtagtgttaataactattttcagagtgtcatggcagaacaca

SEQ ID NO: 151625 - DNA, 75 bp, synthetic construct
  source 1..75: mol_type = other DNA
ggattttcggttgagcctgtgagaggtggattgttggataggttattgaggcgtgagtatcgaatggaaggaagg

SEQ ID NO: 151626 - DNA, 75 bp, synthetic construct
  source 1..75: mol_type = other DNA
gtcgattttttaaggagtgttaataactattttcagagtgtcatggcagaacacagagaaaataaaacaagtaat

SEQ ID NO: 151627 - DNA, 75 bp, synthetic construct
  source 1..75: mol_type = other DNA
atcgaatggatagaagggctgtggctctggaaaggcaattaaatggaggtgtcgattttttaaggagtgttaata

SEQ ID NO: 151628 - DNA, 75 bp, synthetic construct
  source 1..75: mol_type = other DNA
ttcatgagaaactcacgaggtgctgagatatgctctctatatgataaggacgcgttagtgcaacttgttgaaact

SEQ ID NO: 151629 - DNA, 75 bp, synthetic construct
  source 1..75: mol_type = other DNA
caaattgaaaaggatggttttgttattgaagagttaattaatattaatattaatacgcttactaactccgatata

SEQ ID NO: 151630 - DNA, 75 bp, synthetic construct
  source 1..75: mol_type = other DNA
atttaccatcgcaggggtgaattccgtacaccagatcaccaaagataccaccgggcagccgcaggtattccgcgt

SEQ ID NO: 151631 - DNA, 75 bp, synthetic construct
  source 1..75: mol_type = other DNA
ccacaggtaatgacagcaaccaccgagcagggcgctacgctgatcatgtcttacgccttcgaccacatcaaaggc

SEQ ID NO: 151632 - DNA, 75 bp, synthetic construct
  source 1..75: mol_type = other DNA
atagttataatttcatatttattggctctaattctgatactggttctgatgaaataatgaaggagattatgggat

SEQ ID NO: 151633 - DNA, 75 bp, synthetic construct
  source 1..75: mol_type = other DNA
cacaacagtaattgattgtgcatgttctgcagaaactattaaaagtgctattcttttaagtcaaggagctgattt

SEQ ID NO: 151634 - DNA, 75 bp, synthetic construct
  source 1..75: mol_type = other DNA
ctcaactgtaattgattgtgaatgttctgctgaggctatcaaaagtgccatttttttaagtcaagaggctgattt

SEQ ID NO: 151635 - DNA, 75 bp, synthetic construct
  source 1..75: mol_type = other DNA
tggacaggtaagcactcacttatcctcaatcgcgaggccggttcgttcttctttttaggcgaattgctggtcgat

SEQ ID NO: 151636 - DNA, 75 bp, synthetic construct
  source 1..75: mol_type = other DNA
gaaatggactggatggcacgtcacggtatgctgcgcgctcgcccccatgaattattgcccggtacgctgcgcgtg

SEQ ID NO: 151637 - DNA, 75 bp, synthetic construct
  source 1..75: mol_type = other DNA
aaaaagcccgccagttaaagaaaaagcaggcttataaaccggatcctgaagcgtcattcagttggtcggcaaata

SEQ ID NO: 151638 - DNA, 75 bp, synthetic construct
  source 1..75: mol_type = other DNA
atcaatgcataatattccattaattcatattcatggtggtgaaaagacattagctaattatgatgagtttattag

SEQ ID NO: 151639 - DNA, 75 bp, synthetic construct
  source 1..75: mol_type = other DNA
acaggccagcggcctgattacttcaccgcaaaccataaaagcagccctttcgcatcagagcggcacatggataac

SEQ ID NO: 151640 - DNA, 75 bp, synthetic construct
  source 1..75: mol_type = other DNA
ccggtgtagaaaaagtggcgattaactttggtacaccacaacaacagtggctcgatgctatcagcgttgccgaag

SEQ ID NO: 151641 - DNA, 75 bp, synthetic construct
  source 1..75: mol_type = other DNA
catgaccgcttcagcgacagcatgtgcattctgccgaccatagaagaccgcatcggcagatatatcccacccact

SEQ ID NO: 151642 - DNA, 75 bp, synthetic construct
  source 1..75: mol_type = other DNA
gccagggaacggataccacagctgaacgataaacagagccctgctctgctgaaaaaacaccgtggcggcatatga

SEQ ID NO: 151643 - DNA, 75 bp, synthetic construct
  source 1..75: mol_type = other DNA
ctgctgatgaactggctgatggtgtgatggaatcgctgcgatttgatgctcatgagttgctgattatccaccttc

SEQ ID NO: 151644 - DNA, 75 bp, synthetic construct
  source 1..75: mol_type = other DNA
caatacgcacgaagctcccgggtgtcggggcggtctccggtgccattccttcaccttccggggtggcgcagttca

SEQ ID NO: 151645 - DNA, 75 bp, synthetic construct
  source 1..75: mol_type = other DNA
tgaagggattggggaaaagtgcggttaatgctgattatatagaccaacttccagtcaatcttttagctacgccca

SEQ ID NO: 151646 - DNA, 75 bp, synthetic construct
  source 1..75: mol_type = other DNA
aatttgaactgatcacgtactgggacggcttcgaaatgacgtccggtgtcgattatgccgaacatgcccgtattg

SEQ ID NO: 151647 - DNA, 75 bp, synthetic construct
  source 1..75: mol_type = other DNA
agtagggcgcatcaggaaaaatgtcggcttcaaattacgtgttatcactaagtcacctgtcactctgtctggctg

SEQ ID NO: 151648 - DNA, 75 bp, synthetic construct
  source 1..75: mol_type = other DNA
cctatttccggctgacgatggacggtaaggagctggtcgaaattgacaccatcaacatgattgagaaggtgaacg

SEQ ID NO: 151649 - DNA, 75 bp, synthetic construct
  source 1..75: mol_type = other DNA
acggcatattgaggaattgcaagccatgcgcgaccagttgctggcgctggcaaacgcctgccccggcgatgacag

SEQ ID NO: 151650 - DNA, 75 bp, synthetic construct
  source 1..75: mol_type = other DNA
atctgaacatgttcaatgatggccttagctacatgggcgttgtggaatccgtgacgctgccgaagctgacccgca

SEQ ID NO: 151651 - DNA, 75 bp, synthetic construct
  source 1..75: mol_type = other DNA
atggcactaccccgcaaactcaaatatctgaacatgttcaacgatggcctcagctacatgggcgttgttgaatcc

SEQ ID NO: 151652 - DNA, 75 bp, synthetic construct
  source 1..75: mol_type = other DNA
gacgtcagaaagaaatcgacaccggcgagggcaaacagggagaagacaccgagtcgaaaatctccgtggtctgca

SEQ ID NO: 151653 - DNA, 75 bp, synthetic construct
  source 1..75: mol_type = other DNA
gtgtgtgctggcagcgatcgtgctggcgctggtgatcgctgtgggcgtcagcgttggcgagctggccatcccgct

SEQ ID NO: 151654 - DNA, 75 bp, synthetic construct
  source 1..75: mol_type = other DNA
aggcgaatgaaccacgtccggctgaagacccggttactgtacagggtgacgcccctgtccggctgaacgtccggg

SEQ ID NO: 151655 - DNA, 75 bp, synthetic construct
  source 1..75: mol_type = other DNA
cctgatgccatcagtctggccagagccaccagtgatgcggccacgtatgtacaacaggcacagtcttcactgagc

SEQ ID NO: 151656 - DNA, 75 bp, synthetic construct
  source 1..75: mol_type = other DNA
ttgccgggacttactgcaaaacgccattctctgattcatatgcgttcatcagcaatccggcaacaggtgcgccgt

SEQ ID NO: 151657 - DNA, 75 bp, synthetic construct
  source 1..75: mol_type = other DNA
agcgcacaatatcgcgcagaatcgcagccggacggcatcatcggtatcggaacatggcgagacttcatcgtctgc

SEQ ID NO: 151658 - DNA, 75 bp, synthetic construct
  source 1..75: mol_type = other DNA
atttccatcagaaaaacatgcagaaaaaaatcaatgcaccgaataagacccaggttgcctgttacgcggccgcta

SEQ ID NO: 151659 - DNA, 75 bp, synthetic construct
  source 1..75: mol_type = other DNA
cgatacgcacgcaggttcccggcgtcggggcggtctccggtgccgtaccttctccctccggggtggcgcagtacg

SEQ ID NO: 151660 - DNA, 75 bp, synthetic construct
  source 1..75: mol_type = other DNA
actatcagcgccgttcgggtgacacagaaaatgaaggataaccccgttgtcgcactgacccgtgtgccggggctg

SEQ ID NO: 151661 - DNA, 75 bp, synthetic construct
  source 1..75: mol_type = other DNA
cgcaaccacgaacaaaagagcaagtattaaaagaagcccgcgatcaaatcgatcgcgggctttttttatgcggca

SEQ ID NO: 151662 - DNA, 75 bp, synthetic construct
  source 1..75: mol_type = other DNA
gcgtcgatcataatgcgcacacggaagccaatggctcacgtattgagaatgacgcaaataacaacatccagaccc

SEQ ID NO: 151663 - DNA, 75 bp, synthetic construct
  source 1..75: mol_type = other DNA
acgtgctggctgtcagtgccactgtgtctctccgggaatacaccggtgatccgaaaaatcctctgcaaccaccgg

SEQ ID NO: 151664 - DNA, 75 bp, synthetic construct
  source 1..75: mol_type = other DNA
cagcgctggatgccgtttccgggcagcttaactccgccagcaccaccttcactcgtatgtcgccggggttaagca

SEQ ID NO: 151665 - DNA, 75 bp, synthetic construct
  source 1..75: mol_type = other DNA
atggtcaggtgggctgggagctccagcgttcactatccacgctcggtgatgtggtcgcggtggactactttgata

SEQ ID NO: 151666 - DNA, 75 bp, synthetic construct
  source 1..75: mol_type = other DNA
tgatgaaccgtccctgcgggatgatgccagaatggtggtgctggagctgggtgggctggaagaccgtccgtccct

SEQ ID NO: 151667 - DNA, 75 bp, synthetic construct
  source 1..75: mol_type = other DNA
gcaggaacagtacggcccgcatcctgaatttccatctggcccgtaacccggaaatcgcttttttgtggaacatgg

SEQ ID NO: 151668 - DNA, 75 bp, synthetic construct
  source 1..75: mol_type = other DNA
caccgacccgcaggtcgccaccgtgggctacagcgaggcggaagcacatcacgacgggatcgagaccgacagtcg

SEQ ID NO: 151669 - DNA, 75 bp, synthetic construct
  source 1..75: mol_type = other DNA
caaaaatgtagatctttatagattgtacaacccacattttacaagcttctgcaaaagctacacttatgaccatga

SEQ ID NO: 151670 - DNA, 75 bp, synthetic construct
  source 1..75: mol_type = other DNA
atctgctgggcagaaacgacaagacgggtagcagcggcgcattgcatatcgccgtcatcggcagcggcggggccg

SEQ ID NO: 151671 - DNA, 75 bp, synthetic construct
  source 1..75: mol_type = other DNA
taacctggatgaagtgcatgaaggtctgctgctgcaggcggtcaaagcctcctggctggccaaaaagaatcaggc

SEQ ID NO: 151672 - DNA, 75 bp, synthetic construct
  source 1..75: mol_type = other DNA
aaaaccggcgagatacgtgacggtaagacggtgttattgcttaactatttgcaaacgtcacatttaatggactga

SEQ ID NO: 151673 - DNA, 75 bp, synthetic construct
  source 1..75: mol_type = other DNA
gctggcagagatggcgatttccagtgcccagcgtcgtatgcgtgcggctaaaaaagtggtgcgtaaaaagctaac

SEQ ID NO: 151674 - DNA, 75 bp, synthetic construct
  source 1..75: mol_type = other DNA
ggacgggatgggcaacaccaactacaacatggcggtcaccggtacctcgggggcaggcaagaccggcctggtgca

SEQ ID NO: 151675 - DNA, 75 bp, synthetic construct
  source 1..75: mol_type = other DNA
tgagccgtccctgcgggatgatgccagaatggtggtgctggagctgggtggactggaagaccgtccgtcactgct

SEQ ID NO: 151676 - DNA, 75 bp, synthetic construct
  source 1..75: mol_type = other DNA
tacctgacgctgggcctgcgtgagaacggcaggaacagcacggcccgtatcctgaatttccatctggcccgtaac

SEQ ID NO: 151677 - DNA, 75 bp, synthetic construct
  source 1..75: mol_type = other DNA
accgggtatttatctcgtactgttctccctcgaagaaaaaaagccgggctgacattctggaaatggaaaacctgg

SEQ ID NO: 151678 - DNA, 75 bp, synthetic construct
  source 1..75: mol_type = other DNA
gttcgaagtccgggatatgctccacaatgccgggtatatcatggcggctcagcgggcacattatcaggcaatgcc

SEQ ID NO: 151679 - DNA, 75 bp, synthetic construct
  source 1..75: mol_type = other DNA
tcctgctggctggcgacagggcgaggatacctctgtattccacgcaccgtcgctgaatctgcagttattcaccac

SEQ ID NO: 151680 - DNA, 75 bp, synthetic construct
  source 1..75: mol_type = other DNA
gacataccggaggtgccgcaccggacggcagcggaacatcgttcctcggcgtgttcagaacccgcctgggaacaa

SEQ ID NO: 151681 - DNA, 75 bp, synthetic construct
  source 1..75: mol_type = other DNA
cacactgaccgcactggcaggccttgccactgcggcagacaaacttccgtattttacggggaatgatacagccag

SEQ ID NO: 151682 - DNA, 75 bp, synthetic construct
  source 1..75: mol_type = other DNA
cagcgggcgtacccagaccgtacggatggtgctgattaccagcagtaccgataatatcacactgaaaattgaccc

SEQ ID NO: 151683 - DNA, 75 bp, synthetic construct
  source 1..75: mol_type = other DNA
tggaattaaggctgtatgtggatgaccagatgagaaaccacattgccgcacaggatcctcatacccagtatgcgc

SEQ ID NO: 151684 - DNA, 75 bp, synthetic construct
  source 1..75: mol_type = other DNA
agcttgtcagactgatggaaacggcagaagtctgcagggaactgcgcagccagatactgcgcggacaggttcccc

SEQ ID NO: 151685 - DNA, 75 bp, synthetic construct
  source 1..75: mol_type = other DNA
acatgtcgacactggaaatcgccggcgcactgaaagagatgagggaggatgttccaccggatcagattccaccag

SEQ ID NO: 151686 - DNA, 75 bp, synthetic construct
  source 1..75: mol_type = other DNA
cgcaactgcgggagcagtatcagataaaacagcaggttcagtcgctggaagaggtctacgatcggtaccgcacca

SEQ ID NO: 151687 - DNA, 75 bp, synthetic construct
  source 1..75: mol_type = other DNA
gctggctggccggacacgtttcgccctgaacccggacacgcgcctgattgccgttgacctgaacctggtggccgg

SEQ ID NO: 151688 - DNA, 75 bp, synthetic construct
  source 1..75: mol_type = other DNA
cacctcccggcagacgaagttcacggagattgtctgtggtgagccgggtaccgggaaatcggtgctggtcaacgc

SEQ ID NO: 151689 - DNA, 75 bp, synthetic construct
  source 1..75: mol_type = other DNA
tccggaccaccttcggcaccgtgcagcgtgacggctcacaggagctgctgctgagttatatccagcgttcgctga

SEQ ID NO: 151690 - DNA, 75 bp, synthetic construct
  source 1..75: mol_type = other DNA
gcttgcgaagaaaaattcagcagtcagaatgtaggcctcaccattacggtaacgccttgctggtgctatggcagt

SEQ ID NO: 151691 - DNA, 75 bp, synthetic construct
  source 1..75: mol_type = other DNA
aacacggcatcatccatttgatcaactccggttctgctgcgctggacggttcctgtaaacaacgcgacagcgaag

SEQ ID NO: 151692 - DNA, 75 bp, synthetic construct
  source 1..75: mol_type = other DNA
ccggcaccgctcaggtatttgccgatgtgcgtacctactggtcaccagaagcaattgagcgtgtaacggggcata

SEQ ID NO: 151693 - DNA, 75 bp, synthetic construct
  source 1..75: mol_type = other DNA
ttgccgggacttactgcaaaacgccattcgctgattcttatgcgttcatcagcaatccggcaacgggtgcgccgt

SEQ ID NO: 151694 - DNA, 75 bp, synthetic construct
  source 1..75: mol_type = other DNA
aaacccacagcgaagccaacctgaagtacatggacctggagaaaaagtcgaagacctcctatgccaaatggtttc

SEQ ID NO: 151695 - DNA, 75 bp, synthetic construct
  source 1..75: mol_type = other DNA
gcttgcctcgccgctaccgaatggtgcccggcgctccacgaatacttccgtggcggcggttactcttcccgcttc

SEQ ID NO: 151696 - DNA, 75 bp, synthetic construct
  source 1..75: mol_type = other DNA
tgtccgttcatcctgacgctgactctggtggtggaagaccaggtgaaaacccacagcgaagccaacctgaagtac

SEQ ID NO: 151697 - DNA, 75 bp, synthetic construct
  source 1..75: mol_type = other DNA
ctgcgttttaacccgtttgcgaacatcaccgatattgaccagtcagcggagcgtgtccgtgaccagttgtcagtg

SEQ ID NO: 151698 - DNA, 75 bp, synthetic construct
  source 1..75: mol_type = other DNA
ggctgatacagccacttatccgcagcgtgctggactccgggggctttgccgtggtgttcgacatgggggatggct

SEQ ID NO: 151699 - DNA, 75 bp, synthetic construct
  source 1..75: mol_type = other DNA
ggccaaccacctggtttgcaccgcgcctcaccggtaaagggccgtttacggatgtgtactcggtaatggcgaact

SEQ ID NO: 151700 - DNA, 75 bp, synthetic construct
  source 1..75: mol_type = other DNA
agcaatccggcaacgggtgcgccgtctgtatacatcatcggctccggtcaggtatcaccaatcgccagcgcgagc

SEQ ID NO: 151701 - DNA, 75 bp, synthetic construct
  source 1..75: mol_type = other DNA
cgcgccatgttctggtgtacgacgcatcttcaagcgccaatggtccgcaatggtgtgtgctgaaaaacaggcctg

SEQ ID NO: 151702 - DNA, 75 bp, synthetic construct
  source 1..75: mol_type = other DNA
aacgctatctacgctatctgagcgtggagcgtcaacttagcccgataactctgcttaactaccgacgccagcttg

SEQ ID NO: 151703 - DNA, 75 bp, synthetic construct
  source 1..75: mol_type = other DNA
aaaatctgcagaacgccttccggatgccggatggcgcgtcggagatgatgcgcaatctggccagcctggacttcc

SEQ ID NO: 151704 - DNA, 75 bp, synthetic construct
  source 1..75: mol_type = other DNA
ccagaagctgacggccatccgtgaggatgataaataccagaactcgccgggtatcaccaaccgactggatgaaat

SEQ ID NO: 151705 - DNA, 75 bp, synthetic construct
  source 1..75: mol_type = other DNA
ctgctggacttcaaaaatcacaaggtcggtgaatttattgagaaaggttaccgtaccgcccgccgtcataccggt

SEQ ID NO: 151706 - DNA, 75 bp, synthetic construct
  source 1..75: mol_type = other DNA
gaacgtcattgatgaaggctggcgtctgctggacttcaaaaatcgtaaagttggtgagtttattcaaaaaggtta

SEQ ID NO: 151707 - DNA, 75 bp, synthetic construct
  source 1..75: mol_type = other DNA
tgtcggtgatggccagccccaacggtaacctggatgaagtgcatgaaggtctgttgctgcaggcggtcagggcct

SEQ ID NO: 151708 - DNA, 75 bp, synthetic construct
  source 1..75: mol_type = other DNA
gcacgtgcagcgtgggggaactcatcgtacaaggccattctgaagcagtcagcgaaggaatttgccaagtataac

SEQ ID NO: 151709 - DNA, 75 bp, synthetic construct
  source 1..75: mol_type = other DNA
aacctgccggaattggcattcgcgaagaccgcgcgttgatcacccaggatatgtcacgtttttatccgcatatct

SEQ ID NO: 151710 - DNA, 75 bp, synthetic construct
  source 1..75: mol_type = other DNA
gctggcgtacgctggctggaaccggcatggaagagcattatctccaacaaggcgcttctgccgctattgtgggag

SEQ ID NO: 151711 - DNA, 75 bp, synthetic construct
  source 1..75: mol_type = other DNA
tatcgagaagggctaccgtaccgcacgccgtcacctgggttcgtatatcactattacacagaacattgtcgattt

SEQ ID NO: 151712 - DNA, 75 bp, synthetic construct
  source 1..75: mol_type = other DNA
tagccaaagcagttaatacattactcacagcgctgaagctacctgatgaatctgcaaaagcaaatgatgttctgg

SEQ ID NO: 151713 - DNA, 75 bp, synthetic construct
  source 1..75: mol_type = other DNA
cgtgataaaggaaatgcaggagtggggcgatatccgccagcgactggcgaccaaccagacctccctggtgtccta

SEQ ID NO: 151714 - DNA, 75 bp, synthetic construct
  source 1..75: mol_type = other DNA
atgagcaaaaagcagagttccaccccacacgatgcgctgttcaaactctttttacgccaaccggacatgcctgat

SEQ ID NO: 151715 - DNA, 75 bp, synthetic construct
  source 1..75: mol_type = other DNA
agggcggcaagattgctgccgatttcacggggtttcagggtaagacctgtgaagcgctggaacagcgtattcgcc

SEQ ID NO: 151716 - DNA, 75 bp, synthetic construct
  source 1..75: mol_type = other DNA
agccgtgtcgggtgtgcggtacgccgattgtggcgactaaacatgcgcagcgggcaacgttttattgtcggcagt

SEQ ID NO: 151717 - DNA, 75 bp, synthetic construct
  source 1..75: mol_type = other DNA
tgttcgacatgggggatggatataagtccctgtgtgagaacatgggcggggtgtatctggacggtgaaaccctgc

SEQ ID NO: 151718 - DNA, 75 bp, synthetic construct
  source 1..75: mol_type = other DNA
gtgatggccagccccaacggtaacctggatgaagtgcatgaaggtctgctgctgcaggcggtcagggcctcctgg

SEQ ID NO: 151719 - DNA, 75 bp, synthetic construct
  source 1..75: mol_type = other DNA
tgagctgatttcaccgcgctttaaccacatgcgcaatttcctgacctgcctgccctttatggccgggaaagggct

SEQ ID NO: 151720 - DNA, 75 bp, synthetic construct
  source 1..75: mol_type = other DNA
aaagcacatcgttgatggtgtgcgcatgggggcgttgcctgaccgcattatcgaagcagcgaatactgcaaatgc

SEQ ID NO: 151721 - DNA, 75 bp, synthetic construct
  source 1..75: mol_type = other DNA
tgaccgacaagcaaaaggccatcgctgatgcgcggatattgctggctaccgaagtgcataaactgcgtgaatacg

SEQ ID NO: 151722 - DNA, 75 bp, synthetic construct
  source 1..75: mol_type = other DNA
gtgtgcgcatgggggcgttacctgaccgcattatcgaagcagctaatactgcaaatgcacgtcagggaaagcgaa

SEQ ID NO: 151723 - DNA, 75 bp, synthetic construct
  source 1..75: mol_type = other DNA
atgattactgttattatttctgagatgaatagctggcgtgaatggacacaccgcgcccgaacaaaggatgcacag

SEQ ID NO: 151724 - DNA, 75 bp, synthetic construct
  source 1..75: mol_type = other DNA
ctggcattacgcgaagtccaggcactgaccgacaagcaaaaggccatcgctgatgcgcggatattgctggctact

SEQ ID NO: 151725 - DNA, 75 bp, synthetic construct
  source 1..75: mol_type = other DNA
gccattaaggccacccacaaagggaaagaactgacaaaacggcaggttaaggcgagggatgaaatccccaccttt

SEQ ID NO: 151726 - DNA, 75 bp, synthetic construct
  source 1..75: mol_type = other DNA
atgacgacgaagacaccagcccgatcgcaagcaaaaactcgcaaaaaagccaaaaacaaaaattctccccgcacc

SEQ ID NO: 151727 - DNA, 75 bp, synthetic construct
  source 1..75: mol_type = other DNA
tggtgcatagcatggatcgcctggcgcgcaatctcgatgatttgcgccggaggcactgttgcaaagttagcgatg

SEQ ID NO: 151728 - DNA, 75 bp, synthetic construct
  source 1..75: mol_type = other DNA
ggcgtggaagaagtcagggccggagatggcttcgctggaagcctggctggaagaacatgagaaatacaggagtgt

SEQ ID NO: 151729 - DNA, 75 bp, synthetic construct
  source 1..75: mol_type = other DNA
cccgctgccgcacaagccgcagaaaacttgaaaaatgacaaagtagcgattgtcggattcagtacgccaaacgtg

SEQ ID NO: 151730 - DNA, 75 bp, synthetic construct
  source 1..75: mol_type = other DNA
cgcagagtgtttcagtattcataatgataatttcagtgacccggaatgggagtgtaaccggccatcctttgttgt

SEQ ID NO: 151731 - DNA, 75 bp, synthetic construct
  source 1..75: mol_type = other DNA
aatccctcatcaccgtatctcagggctggtttttacgccggacgcaggcgctgtcactgtgccggtatatcgccg

SEQ ID NO: 151732 - DNA, 75 bp, synthetic construct
  source 1..75: mol_type = other DNA
atcgctgaagctgttaaagctgctggttatgaactgggtaaagacatcactctggcgatggactgcgcagcttct

SEQ ID NO: 151733 - DNA, 75 bp, synthetic construct
  source 1..75: mol_type = other DNA
atgaagttaaaacaacaaactgtgcgactttcacgtcgcaccctgacctgcctgccctttatggccgggaaaggg

SEQ ID NO: 151734 - DNA, 75 bp, synthetic construct
  source 1..75: mol_type = other DNA
accgcacgccgcgtaacctcaaaaaactgaacgtcattgatgaggggtggcgtctgctggacttcaaaaatcaca

SEQ ID NO: 151735 - DNA, 75 bp, synthetic construct
  source 1..75: mol_type = other DNA
ctgcaaaacctcagactaaaccttacaaacttactgatagcatgggcctgtatctgctggtgtctccttctggct

SEQ ID NO: 151736 - DNA, 75 bp, synthetic construct
  source 1..75: mol_type = other DNA
atgagttccaccgcctgcaactggatatcagcaacctgcggggagaaatcaaagagctggggccatccatccgcc

SEQ ID NO: 151737 - DNA, 75 bp, synthetic construct
  source 1..75: mol_type = other DNA
aaacgaaatttacgcgagacaagaaatatccttcaggatgaaacctttcaaggattcgaatcattacgtactgcc

SEQ ID NO: 151738 - DNA, 75 bp, synthetic construct
  source 1..75: mol_type = other DNA
aaatggcgaaaaggtgcaggatttacaggttgtcggcacttgcggtaaacgcaatactggtaccagcgtgcactt

SEQ ID NO: 151739 - DNA, 75 bp, synthetic construct
  source 1..75: mol_type = other DNA
ctggcacaaaaagcgccgctgtcgagtcctgcactcaccggaacgccaacagcacctactgcggcacagtcggtc

SEQ ID NO: 151740 - DNA, 75 bp, synthetic construct
  source 1..75: mol_type = other DNA
ggcccaacgaggggctatttctgcgcaacagctggatgacgaccgcgccgccgctgagagcgcccgagctgcgct

SEQ ID NO: 151741 - DNA, 75 bp, synthetic construct
  source 1..75: mol_type = other DNA
gaacaggtgatccctgaaaacgagggtggttggtggatacgtgaagtaggcctgtttgatgaatccggggcattg

SEQ ID NO: 151742 - DNA, 75 bp, synthetic construct
  source 1..75: mol_type = other DNA
cgcttaccaatttgagtggaaaggatgtagctggtcttctcacatatcttggtttgggagaaggttcggcattac

SEQ ID NO: 151743 - DNA, 75 bp, synthetic construct
  source 1..75: mol_type = other DNA
gagaaaccacattgccgcacaagatcctcatacccagtatgcgcagaaacataatccgacatttaccggagaacc

SEQ ID NO: 151744 - DNA, 75 bp, synthetic construct
  source 1..75: mol_type = other DNA
ctgttgcgcccggcaggtgtgccggaaggctttgctgtcagcaatgggcgcattgaagcgacggaagtggatatc

SEQ ID NO: 151745 - DNA, 75 bp, synthetic construct
  source 1..75: mol_type = other DNA
tcaataatattcgcgagcatctgatgctttatctttttctgtggggattattggccattatggatctgatctacg

SEQ ID NO: 151746 - DNA, 75 bp, synthetic construct
  source 1..75: mol_type = other DNA
gtcagggcctgttggacgcgatgcgtgagttctgtgaataccgcaacattctgccgcgcggtgtaaagttgtcgg

SEQ ID NO: 151747 - DNA, 75 bp, synthetic construct
  source 1..75: mol_type = other DNA
caggcagaactggactccgttgccaaacgtcatacgcgttcccgttcactggcccaacgaggggctatttctgcg

SEQ ID NO: 151748 - DNA, 75 bp, synthetic construct
  source 1..75: mol_type = other DNA
gcgaagatggatactcgcgtgttgcaggagcagcgactggaagccatcgcgcaaatcaaagaagcacaaagtgcc

SEQ ID NO: 151749 - DNA, 75 bp, synthetic construct
  source 1..75: mol_type = other DNA
atggataatattaagcgccatctggcgtggtgggttgtcggggttctggtggtggctgccgtcgtggcgtggtgg

SEQ ID NO: 151750 - DNA, 75 bp, synthetic construct
  source 1..75: mol_type = other DNA
ctcccctggcttgttcaggcgtgggttgaggatatcgacgaaaatcgcactgatgcatttacgtccgtaccgctg

SEQ ID NO: 151751 - DNA, 75 bp, synthetic construct
  source 1..75: mol_type = other DNA
cgtttaccgtccgcatcgtaaaaaaaggtgcagttcccgaagaccgggaaacgctgtactgggctgtatccaact

SEQ ID NO: 151752 - DNA, 75 bp, synthetic construct
  source 1..75: mol_type = other DNA
atagttttatatcaaaggtaaaaaaattaagatcgagatattctcaacttcctcaatgtaaagaaaaaccttttg

SEQ ID NO: 151753 - DNA, 75 bp, synthetic construct
  source 1..75: mol_type = other DNA
gttcaggggaaaatatatgagtaccatatatccagtttacctaaagatgttcagaaggttttacgtcaacgcctg

SEQ ID NO: 151754 - DNA, 75 bp, synthetic construct
  source 1..75: mol_type = other DNA
gccgatggtacaaaacgccgacgaagcccgtgaagcggtacgcgccacccgttatccccccgccggtattcgcgg

SEQ ID NO: 151755 - DNA, 75 bp, synthetic construct
  source 1..75: mol_type = other DNA
cgtttactgtccgtattgtaaaaaaaggcgaagttcaggaagaccgggagaccctgtactgggcagtctctaact

SEQ ID NO: 151756 - DNA, 75 bp, synthetic construct
  source 1..75: mol_type = other DNA
gcagaacagcagtcagattattgctgaacaggtgatccccgaaaacgagggcggttggtggatccgtgaagtggg

SEQ ID NO: 151757 - DNA, 75 bp, synthetic construct
  source 1..75: mol_type = other DNA
ggttgatactccagtggctgacgattccatcaagtgcagcagtcaaagctgtaacactggataatggtaattatc

SEQ ID NO: 151758 - DNA, 75 bp, synthetic construct
  source 1..75: mol_type = other DNA
taccggcggttgaactgattctttgccgtctgcatgcaggcggtaaattctctaacaaaaattaccagttctctg

SEQ ID NO: 151759 - DNA, 75 bp, synthetic construct
  source 1..75: mol_type = other DNA
cttacccgaaactggcgcttgttttccctggcctggttcttactgaatcacggggtgaatttattcgtatctggg

SEQ ID NO: 151760 - DNA, 75 bp, synthetic construct
  source 1..75: mol_type = other DNA
atcgcttaaatgcggaacccactgtctttcgcggatttaccacccatgaaatgtttgccgccgccggtgtcggtt

SEQ ID NO: 151761 - DNA, 75 bp, synthetic construct
  source 1..75: mol_type = other DNA
cagccagtttggtttgggtacaaagggactggtgcaaagcagtcgggtgctggcgctacgtcgtcaccggctggt

SEQ ID NO: 151762 - DNA, 75 bp, synthetic construct
  source 1..75: mol_type = other DNA
cggtaaaagagtttggcctctgggacgtggtccagcagggtaagatctccgtgtacgtggctgaagcgctgttga

SEQ ID NO: 151763 - DNA, 75 bp, synthetic construct
  source 1..75: mol_type = other DNA
atgccaatccttcccgccgtgcagaaaaaaaatctggcggtggtcggtgcgggacctgctgggctggcgtttgcc

SEQ ID NO: 151764 - DNA, 75 bp, synthetic construct
  source 1..75: mol_type = other DNA
tcgtgcctggtgaatcctcgcgcctgccacgaaaccaaaatgccaatccttcccgccgtgcagaaaaaaaatctg

SEQ ID NO: 151765 - DNA, 75 bp, synthetic construct
  source 1..75: mol_type = other DNA
gggattgcgctgctgggtggtttattgacgatggcgagcgcggtgcgggtactgtatccggcgctggctgacaac

SEQ ID NO: 151766 - DNA, 75 bp, synthetic construct
  source 1..75: mol_type = other DNA
tccgcgtcaaagcgcgtatcccaccggaattactccagcagcatctggaatatgtcaaaaccggattgccgggcg

SEQ ID NO: 151767 - DNA, 75 bp, synthetic construct
  source 1..75: mol_type = other DNA
tcgctgtaatcggtacccttagtctgtcgtcgttcattctcaacgcttatgcagcagaaagaatcgcatttatcc

SEQ ID NO: 151768 - DNA, 75 bp, synthetic construct
  source 1..75: mol_type = other DNA
tgtacactgttccgttcctgctgtggacctcggaaaagtggcatgctgcacatccgcgagatttttcgcagtatg

SEQ ID NO: 151769 - DNA, 75 bp, synthetic construct
  source 1..75: mol_type = other DNA
tgtgccgccagcgcggcgattcaggttatcaccgtcgcacgctgggactgaccacgttaggtcgtgcaagagcca

SEQ ID NO: 151770 - DNA, 75 bp, synthetic construct
  source 1..75: mol_type = other DNA
tggcgatgagtccgttccatctgcatcggttgtttaaagcgactaccggaatgacgccgaaagcctggcaacagg

SEQ ID NO: 151771 - DNA, 75 bp, synthetic construct
  source 1..75: mol_type = other DNA
tggtcatgaattctcccaaagtgttcttttcgtcatgtttgaaacgaatgctaaggaggctggtgaatatttcag

SEQ ID NO: 151772 - DNA, 75 bp, synthetic construct
  source 1..75: mol_type = other DNA
ttattcagttccctgtggctgatatcggtgtttctctttcctgaacggataaaaattattgcagcggttgttggt

SEQ ID NO: 151773 - DNA, 75 bp, synthetic construct
  source 1..75: mol_type = other DNA
tgaaaataacgcaatgcctccgctatctgattttaaagatatctcaggtaataaagagagaaccttagttatggt

SEQ ID NO: 151774 - DNA, 75 bp, synthetic construct
  source 1..75: mol_type = other DNA
tggcgattaaccagcaaatcatcccgcgagagcagtgggcgcaacatatcgtgcaggatggcgaccagatcctgc

SEQ ID NO: 151775 - DNA, 75 bp, synthetic construct
  source 1..75: mol_type = other DNA
tggcgattaatcagcaaatcgtcccgcgtgagcaatgggcacaacatatcgtgcaggatggcgaccagatcctgc

SEQ ID NO: 151776 - DNA, 75 bp, synthetic construct
  source 1..75: mol_type = other DNA
tggcgattaatcagcaaatcgtcccgcgtgagcagtgggcgcaacatatcgtgcaggatggcgaccagatcctgc

SEQ ID NO: 151777 - DNA, 75 bp, synthetic construct
  source 1..75: mol_type = other DNA
aaaacacggcattgcgtgagaccgccggaatggatgtatcgccatgggagggcgtggctgacgcaacgatcgaag

SEQ ID NO: 151778 - DNA, 75 bp, synthetic construct
  source 1..75: mol_type = other DNA
tcgctgatggccaagcggctgattgaaatgaagcgctaccggggtgcgtttgtcaccctgcgtaatcgctggaat

SEQ ID NO: 151779 - DNA, 75 bp, synthetic construct
  source 1..75: mol_type = other DNA
gcgataaggcatcaggacggcgatgcggcagagcaggcggcgcttaccatgatcgccagctcgacacgaaggtta

SEQ ID NO: 151780 - DNA, 75 bp, synthetic construct
  source 1..75: mol_type = other DNA
gcgtttggcgataaagaagaatacacattcagtgaatcgaagtttgggcatacctgggcggcggattctgtcgaa

SEQ ID NO: 151781 - DNA, 75 bp, synthetic construct
  source 1..75: mol_type = other DNA
agcggttcagctatatcaaccgtacagaactggaggcaaaaggtcgggcatttatggcgctggcccaattcgctg

SEQ ID NO: 151782 - DNA, 75 bp, synthetic construct
  source 1..75: mol_type = other DNA
ctgacgaaaaacagaagcccaccagcgcgtttttttccggagccatagctgtattcgataagtcatggcgtggtg

SEQ ID NO: 151783 - DNA, 75 bp, synthetic construct
  source 1..75: mol_type = other DNA
tgttttatacatccttcggtaatgtttactaaaaggattattgatcaaggaatgcgatattcgacaaaatttcct

SEQ ID NO: 151784 - DNA, 75 bp, synthetic construct
  source 1..75: mol_type = other DNA
gccgtcgaaaaggtggagtcggtgaattacccgaccgagaatctgcgcagcaagagctgggacgagtacgccacg

SEQ ID NO: 151785 - DNA, 75 bp, synthetic construct
  source 1..75: mol_type = other DNA
aagtctgcgacgagtgaaacgtggtggccggaagaggcagatcacgtcacattcatccgtggccgaattggtttc

SEQ ID NO: 151786 - DNA, 75 bp, synthetic construct
  source 1..75: mol_type = other DNA
ggaaatgaaatgtagcaaatgcaccatacaaaaaatactccgcgatcgtggttacagcgcaatgaagtgtggagg

SEQ ID NO: 151787 - DNA, 75 bp, synthetic construct
  source 1..75: mol_type = other DNA
tttttccgctcagtatcggcccggagccgcaactgctggcgcgaatcgcccctggcattatctgggtggcggcgc

SEQ ID NO: 151788 - DNA, 75 bp, synthetic construct
  source 1..75: mol_type = other DNA
gggggacgcaccggaagcctggcagtcagtggtgcactgctgtcctcaccctgcacgctggtaagtaatgaggtg

SEQ ID NO: 151789 - DNA, 75 bp, synthetic construct
  source 1..75: mol_type = other DNA
cagggcaggtaggttgggaactacagcgtgctctggcaccgctgggtaatctgattgctcttgatgttcactcca

SEQ ID NO: 151790 - DNA, 75 bp, synthetic construct
  source 1..75: mol_type = other DNA
ctgattattgtggcgatttcagcaaccccgaaggtgtggctgaaaccgtcaaaaaaattcgcccagatgttattg

SEQ ID NO: 151791 - DNA, 75 bp, synthetic construct
  source 1..75: mol_type = other DNA
cagggcaggtaggttgggaactacagcgttctcttgctcctctgggtaacttgattgctcttgatgttcactcca

SEQ ID NO: 151792 - DNA, 75 bp, synthetic construct
  source 1..75: mol_type = other DNA
aagcggaacaacgacctggcatgattatgcggcgttggtgtttgacgaagcgcgtaaatctggcatcgaactggc

SEQ ID NO: 151793 - DNA, 75 bp, synthetic construct
  source 1..75: mol_type = other DNA
atgaagatcaagcctgacgttattgtcaatgcggccgcacatactgccgttgataaagccgaaaccgagcgcgag

SEQ ID NO: 151794 - DNA, 75 bp, synthetic construct
  source 1..75: mol_type = other DNA
gggtggcggtgctggcggcagagtcggcaaagctgggtgccctgatggtgcattattccacggactatgtgttcg

SEQ ID NO: 151795 - DNA, 75 bp, synthetic construct
  source 1..75: mol_type = other DNA
tacagaaaaatttcagcagaactttgcgcttgtcttgcctgactggcaggttggtgtgaaacgcatgctcaacga

SEQ ID NO: 151796 - DNA, 75 bp, synthetic construct
  source 1..75: mol_type = other DNA
ggtggcatccggttataagataaaaccagcaggccggatgaattgccggttcaatatttcgcataagcaacttaa

SEQ ID NO: 151797 - DNA, 75 bp, synthetic construct
  source 1..75: mol_type = other DNA
cgaacgggaagaatgaactgcctgtttaatatctcacacaagcagcttaagcgcgcactgatgacagggccagta

SEQ ID NO: 151798 - DNA, 75 bp, synthetic construct
  source 1..75: mol_type = other DNA
tggcgaaaggggagagcgtgactacatctattcttaacgccggattccccgacagcagcagttactaccgcaaag

SEQ ID NO: 151799 - DNA, 75 bp, synthetic construct
  source 1..75: mol_type = other DNA
acggctaaacaattccgtcacggtggcgaaaatctggcggtgcgttacgcgctggctgattgtgagctgggtcgt

SEQ ID NO: 151800 - DNA, 75 bp, synthetic construct
  source 1..75: mol_type = other DNA
gggctggcgggcagtacgctgtctgtcgatgcggcagtgcgcaacatggttgagttggcgggtgtaacgcctgcg

SEQ ID NO: 151801 - DNA, 75 bp, synthetic construct
  source 1..75: mol_type = other DNA
cgggcatcttttgccgtccgtcttgtcgggctaaacacgccctgcgggaaaacgtttctttttatgccgatgcca

SEQ ID NO: 151802 - DNA, 75 bp, synthetic construct
  source 1..75: mol_type = other DNA
tggataaaatcacccacgcctgccgacttctggaacaggaaacgcctgtaacgctggaagccttagccgaccagg

SEQ ID NO: 151803 - DNA, 75 bp, synthetic construct
  source 1..75: mol_type = other DNA
tgatgacgcgacactaatcagcgagttacagcagatgtttcccgctgccgacagccgcttgctgatcttacgttt

SEQ ID NO: 151804 - DNA, 75 bp, synthetic construct
  source 1..75: mol_type = other DNA
gcctggtgcattgctataacgggatgacaggtttacatcaccgcgaaccgggaatggttggcgcgggattaacgg

SEQ ID NO: 151805 - DNA, 75 bp, synthetic construct
  source 1..75: mol_type = other DNA
tcaaaaccggtttaccgggcgtagcgtgggtgcgggtgaatgaagaacttccgtggcctgacgacctcgtggtga

SEQ ID NO: 151806 - DNA, 75 bp, synthetic construct
  source 1..75: mol_type = other DNA
gtcgtccacataactctcgccttaatacagaaaaatttcagcagaattttgcgcttgtattgcctgactggcagg

SEQ ID NO: 151807 - DNA, 75 bp, synthetic construct
  source 1..75: mol_type = other DNA
ggctgctgactgaggagggctggcttgatgatcatcagttgcatattgctgacggtgtaattgcagcaatcgaac

SEQ ID NO: 151808 - DNA, 75 bp, synthetic construct
  source 1..75: mol_type = other DNA
taaccgcgccgcttaataccattcatgcggcgctgaaacgtattgctcaacgttgccaacgcggcggacctggtg

SEQ ID NO: 151809 - DNA, 75 bp, synthetic construct
  source 1..75: mol_type = other DNA
gccattcgtcatcttaaacagcagaacgtacgggtgatgctggggcatagcgcggcgacctggcaacaaacccgc

SEQ ID NO: 151810 - DNA, 75 bp, synthetic construct
  source 1..75: mol_type = other DNA
gtacttcaccaccaaaaagaacggcaaaacttactacatcaaactccatgacccgcgcctgatgcgtgcgatgaa

SEQ ID NO: 151811 - DNA, 75 bp, synthetic construct
  source 1..75: mol_type = other DNA
aacagtgacatgccgcgtcgttcagcgcttctcgatgaggtgcgctcaaaaccgtactggtcaacggatgttgaa

SEQ ID NO: 151812 - DNA, 75 bp, synthetic construct
  source 1..75: mol_type = other DNA
aacctgcgcaaggtgccggccgatgcacccacggccttcatcaagccgcgctggaagccgctggtgatcaccccg

SEQ ID NO: 151813 - DNA, 75 bp, synthetic construct
  source 1..75: mol_type = other DNA
ctccgaccagtacgcgccgttccacaccaaggtcgtgaacgtcggcgtgcgcgactcgacctacgtgctcgacgg

SEQ ID NO: 151814 - DNA, 75 bp, synthetic construct
  source 1..75: mol_type = other DNA
catcgaggtgctgcgcggcatgaacagcgacaacgcccgcaaggtgcccgccgacgcgccgaccgagttcatcaa

SEQ ID NO: 151815 - DNA, 75 bp, synthetic construct
  source 1..75: mol_type = other DNA
ttcaacggctggggctcgtgttcccgacatatgccgatgaaattgagaaatggttaagtaacggacatctccccc

SEQ ID NO: 151816 - DNA, 75 bp, synthetic construct
  source 1..75: mol_type = other DNA
gtaagcctgatccgttcaaagtgccggagggtgagggtgaacgttatcgcgatgaccttgccagaatgatgaaat

SEQ ID NO: 151817 - DNA, 75 bp, synthetic construct
  source 1..75: mol_type = other DNA
atttatccgacggtgcggttccgcgatccggatgaagttcgtattgaaattaacgggagtggtgcgtccagacca

SEQ ID NO: 151818 - DNA, 75 bp, synthetic construct
  source 1..75: mol_type = other DNA
caggtattcaccaatgagcgaccggacaccatgcgtgcgattgcagagcgtgttgatccggaaaccggtgaaacc

SEQ ID NO: 151819 - DNA, 75 bp, synthetic construct
  source 1..75: mol_type = other DNA
atcctggtcaagctgttcagcggcgcgaagcacaagcatcagcagcagttccagaagcagggcaaggcgatcaac

SEQ ID NO: 151820 - DNA, 75 bp, synthetic construct
  source 1..75: mol_type = other DNA
gaaacccaactctcggcacatgctggaacacatcgagcggctgaagacatttcagttggtggacttgcccgaagg

SEQ ID NO: 151821 - DNA, 75 bp, synthetic construct
  source 1..75: mol_type = other DNA
agcctgctcatatcagagggtgaacaaccttcccgtctggcatggctgctacagcctccgggtaaaataaacggt

SEQ ID NO: 151822 - DNA, 75 bp, synthetic construct
  source 1..75: mol_type = other DNA
ccagtgagttcgtcaaatttgccgaacctaataaaacactgacggagcagatcgcctcgcgcagccgctccatcg

SEQ ID NO: 151823 - DNA, 75 bp, synthetic construct
  source 1..75: mol_type = other DNA
ctgcaggagcggctggcccgtattctctttgtggcaaatatctgggggcatctgcatgagcgtgacaacggctga

SEQ ID NO: 151824 - DNA, 75 bp, synthetic construct
  source 1..75: mol_type = other DNA
gcagtgagatctccattgcattactcggtcagaatcagaccactgaagcgaacagtaacaaggcctctgcacagg

SEQ ID NO: 151825 - DNA, 75 bp, synthetic construct
  source 1..75: mol_type = other DNA
tcgcgactatgaccgtgactccgggctgtttgtgaaccgcagtacggttggttttctgctgcgggcggaacccct

SEQ ID NO: 151826 - DNA, 75 bp, synthetic construct
  source 1..75: mol_type = other DNA
gcagcatcgaactcaaagcagcggatggcaaggcggacagcagcgaggtattccgcgagctgatcacactgtcac

SEQ ID NO: 151827 - DNA, 75 bp, synthetic construct
  source 1..75: mol_type = other DNA
tgccgtgctctacgggtatcagccctgtgaaatcatgtggggccgttcggtcagggcgtgggcagtgacggatat

SEQ ID NO: 151828 - DNA, 75 bp, synthetic construct
  source 1..75: mol_type = other DNA
cgcgcccttcagtgccaaggtggtcaacgtgggcattcgtgattcaacttacgtgcttgatggcctgctgtacca

SEQ ID NO: 151829 - DNA, 75 bp, synthetic construct
  source 1..75: mol_type = other DNA
gccatcgtgctatggaacacggtctatctggagcgggccgcgaacgccttgcgtggccacggtcaagccgtcgat

SEQ ID NO: 151830 - DNA, 75 bp, synthetic construct
  source 1..75: mol_type = other DNA
gtacggccagcgcgaacagacacggcgggagcacttggtcgagctgcaaacggtttttgggttcaagcccttcac

SEQ ID NO: 151831 - DNA, 75 bp, synthetic construct
  source 1..75: mol_type = other DNA
actcagccgcgccggtgtggtcttcaccccgcaatacttcaagcgtgagtaccagctgcaggacggtgatattga

SEQ ID NO: 151832 - DNA, 75 bp, synthetic construct
  source 1..75: mol_type = other DNA
aaagaaatccttaacagcagcggatatcttcgctcattcccgggcattgccaaacgttctgatgtgaacggtgta

SEQ ID NO: 151833 - DNA, 75 bp, synthetic construct
  source 1..75: mol_type = other DNA
tcaacgccgtcgagcgggcgagtgccgaggcgatcacccgtgctagccggcgcatctacgacgccttggccgaac

SEQ ID NO: 151834 - DNA, 75 bp, synthetic construct
  source 1..75: mol_type = other DNA
gtgtgtatcaggcggcaggagggaaacgttacgatccgccacggaaactttattcactgcgcaataaggacaata

SEQ ID NO: 151835 - DNA, 75 bp, synthetic construct
  source 1..75: mol_type = other DNA
tgcgatttttcatgccgtccctgaccgcagaagaactacacggcaaccgtcttcagtggctgtatgccattgatg

SEQ ID NO: 151836 - DNA, 75 bp, synthetic construct
  source 1..75: mol_type = other DNA
tggcgaagggaggatggaaaggccagagtatcggtgcatggaattcgttccttaacctggtcgaggatgccaacg

SEQ ID NO: 151837 - DNA, 75 bp, synthetic construct
  source 1..75: mol_type = other DNA
tattggtttatgggctggcggacgttttccggcaaaagaagtcgttggcggtgatgctgccaacttactgattta

SEQ ID NO: 151838 - DNA, 75 bp, synthetic construct
  source 1..75: mol_type = other DNA
tcgccagaaagccacgctgacagagcagaaatacagccgccagcgggagcgtgaggcagaacaacgggaacggga

SEQ ID NO: 151839 - DNA, 75 bp, synthetic construct
  source 1..75: mol_type = other DNA
acacagataacacctacgcttatccgacgaatgcggaactggatggcggtattcgtgaggcattcgatcacctgt

SEQ ID NO: 151840 - DNA, 75 bp, synthetic construct
  source 1..75: mol_type = other DNA
cgcgtaagccgctacacgcaccggaactcattgagttattcgcctggagcgaagagaagtttttaaaagtcacgg

SEQ ID NO: 151841 - DNA, 75 bp, synthetic construct
  source 1..75: mol_type = other DNA
cccggaagagttgcgaccgttaatgggaaaccgtatttacggttgcgatgactgccagcttatctgcccgtggaa

SEQ ID NO: 151842 - DNA, 75 bp, synthetic construct
  source 1..75: mol_type = other DNA
gcatttggtgcccgtggtaagggtaaggcggcggcacactatgagccgggtgaggtggcaatcaacctgacaaaa

SEQ ID NO: 151843 - DNA, 75 bp, synthetic construct
  source 1..75: mol_type = other DNA
ggagggacagggcgcttcatttccaaaaccacggatgcggcggtgaaatcgctgaatggtattgatataccggag

SEQ ID NO: 151844 - DNA, 75 bp, synthetic construct
  source 1..75: mol_type = other DNA
ggtggtgcgggcgttttccatcactgtcatcatttgaccggtttttctggcagggaggaaccactctggcggctg

SEQ ID NO: 151845 - DNA, 75 bp, synthetic construct
  source 1..75: mol_type = other DNA
cggctgatttttgaagccggtgaggccggtcgtggtgcaccgatacaggtacgtgcacttgagcagtggatgatc

SEQ ID NO: 151846 - DNA, 75 bp, synthetic construct
  source 1..75: mol_type = other DNA
gcattcaacgacgcagcacgtcgtattgaagaaacgcagaaagaaaaaatggcttctgtatcctccggaatgcag

SEQ ID NO: 151847 - DNA, 75 bp, synthetic construct
  source 1..75: mol_type = other DNA
aattaatgcacgtcgcgtaccgcacattggcgacgtagtactggcgatcggtaacccgtacaacctcgggcagac

SEQ ID NO: 151848 - DNA, 75 bp, synthetic construct
  source 1..75: mol_type = other DNA
acaaacccgccatctcggctctggagacaatggatcaggttgcagaaattcgccctggctcagtgattccagtcg

SEQ ID NO: 151849 - DNA, 75 bp, synthetic construct
  source 1..75: mol_type = other DNA
cgaagcgacaggctgtgatgaatgagctgaaggcgaagccgcgttctgaactgcttgaggaataccgcagactca

SEQ ID NO: 151850 - DNA, 75 bp, synthetic construct
  source 1..75: mol_type = other DNA
gagtgcagcgtgactcaggtagctatgttgaataatatccttaattcccgcgccccagacgtgccccaaagtgat

SEQ ID NO: 151851 - DNA, 75 bp, synthetic construct
  source 1..75: mol_type = other DNA
aactgccgtcgtgttgagatcgatccaagcttgctggaagatgacaaagagatgttggaagatctggtagctgcg

SEQ ID NO: 151852 - DNA, 75 bp, synthetic construct
  source 1..75: mol_type = other DNA
aaaaaggctattaaataatgatggtattttcatatttacagaaaaacatagttcagaacatgatgaatatcaaaa

SEQ ID NO: 151853 - DNA, 75 bp, synthetic construct
  source 1..75: mol_type = other DNA
aatgatgccgccccagggttaaaaaagagtctgggggatgtcactaaggctgcatttgatttatgtgataagtaa

SEQ ID NO: 151854 - DNA, 75 bp, synthetic construct
  source 1..75: mol_type = other DNA
tggaaaggggatttggcgcttaatgggcaatatgtgattgagcttttctcatttccgttcccgccggagcgcccc

SEQ ID NO: 151855 - DNA, 75 bp, synthetic construct
  source 1..75: mol_type = other DNA
gacgcctgccagttataatctggcggttcgccgcgccgcgccagcggtggttaacgtttacaaccgtggtttgaa

SEQ ID NO: 151856 - DNA, 75 bp, synthetic construct
  source 1..75: mol_type = other DNA
aaaggtgatgaaaaaacagcaccgtcaccggatgacaaaatccgctttgacgtttaccggaatacccgcagtggc

SEQ ID NO: 151857 - DNA, 75 bp, synthetic construct
  source 1..75: mol_type = other DNA
atgaaaaaagtattaggtctggttgttaccgctgctatgggtctgtcttctgccgcctttgctgcagagactgcg

SEQ ID NO: 151858 - DNA, 75 bp, synthetic construct
  source 1..75: mol_type = other DNA
tggcgctgactggcctttagaagaaaaagtaaaggtacaattacaaacgccgcaagctgcggatcagggaggctg

SEQ ID NO: 151859 - DNA, 75 bp, synthetic construct
  source 1..75: mol_type = other DNA
tccgttgcccgaacacttttccagtcagctgacatcgctcaagcccacagcggagataagacgtctcaggaacag

SEQ ID NO: 151860 - DNA, 75 bp, synthetic construct
  source 1..75: mol_type = other DNA
aataaaggcgcagtatcggtacaggcgcagcacgatctgatggagttactggcgaagaagtcgatagagatcgtc

SEQ ID NO: 151861 - DNA, 75 bp, synthetic construct
  source 1..75: mol_type = other DNA
tcgaggccctatgccggggatacctacggcctgcacctgccgctgctggcaggaacggaagtcagcatcgccttt

SEQ ID NO: 151862 - DNA, 75 bp, synthetic construct
  source 1..75: mol_type = other DNA
cagaacgatctgatggaactgttggcgcagaaatcgatagagatcaccagtacggaagatgagattaaaatcacc

SEQ ID NO: 151863 - DNA, 75 bp, synthetic construct
  source 1..75: mol_type = other DNA
ggctcagaaatcgatagagatcaccagtacggaagatgagatcaggatcaccgctaagaagaaaatcaccattaa

SEQ ID NO: 151864 - DNA, 75 bp, synthetic construct
  source 1..75: mol_type = other DNA
gctaagcgcacccaagggcgtggcgatcgccagcggcgagcacctgcaactggcggcggcaaagaatgtgatagc

SEQ ID NO: 151865 - DNA, 75 bp, synthetic construct
  source 1..75: mol_type = other DNA
actggcaaacctgcaaaaaatcaaaaggtacaggtcacacggggtgatggctcagtggtggaaatgaccaccgat

SEQ ID NO: 151866 - DNA, 75 bp, synthetic construct
  source 1..75: mol_type = other DNA
ttatgaaagcctgtgggtacgccagtcgcgcccgtatgccggggatacctacggtctgcacctgccgctgctggc

SEQ ID NO: 151867 - DNA, 75 bp, synthetic construct
  source 1..75: mol_type = other DNA
atggccgacattatcagcgaactgaacagcctgagcgataaaatccagaaactgtctgacgatgcggccacggcg

SEQ ID NO: 151868 - DNA, 75 bp, synthetic construct
  source 1..75: mol_type = other DNA
gatggcgtttccgatgattgaatctggagaatttaatacccgtttcttttttacagatgataatgatattcctta

SEQ ID NO: 151869 - DNA, 75 bp, synthetic construct
  source 1..75: mol_type = other DNA
ccattcagaactacaagcgcaacgtgctgcgcaccccggcgaacaacaaaatccggctggatgacgagcgcggca

SEQ ID NO: 151870 - DNA, 75 bp, synthetic construct
  source 1..75: mol_type = other DNA
gatgcacgcgccgaaaggagtggcggtcgccagcggcgagcacctgcaactggccgcggtgaaaaacctccagat

SEQ ID NO: 151871 - DNA, 75 bp, synthetic construct
  source 1..75: mol_type = other DNA
gatgcacgctccgaaaggggtggcggtcgccagcggcgagcacctgcaactggccgctgtgaaaaacctccagat

SEQ ID NO: 151872 - DNA, 75 bp, synthetic construct
  source 1..75: mol_type = other DNA
gatgcacgcaccgaaaggggtggcggtcgccagcggcgagcacctgcaactggccgcggtgaaaaacctccagat

SEQ ID NO: 151873 - DNA, 75 bp, synthetic construct
  source 1..75: mol_type = other DNA
cgccatctaccagaatcagacggtgccgcaaatcgtcgaaaaaatcctgcgcgagcgtcatcacatgcgcggtca

SEQ ID NO: 151874 - DNA, 75 bp, synthetic construct
  source 1..75: mol_type = other DNA
cgccatctaccagaaacagacggtgccgcaaatcgtcgaaaaaatcctgcgcgagcggcatcaaatgcgcggtca

SEQ ID NO: 151875 - DNA, 75 bp, synthetic construct
  source 1..75: mol_type = other DNA
gatgcacgcgccgaaaggggtggcggtcgccagcggcgagcacctgcaactggccgcagtgaaaaacctccagat

SEQ ID NO: 151876 - DNA, 75 bp, synthetic construct
  source 1..75: mol_type = other DNA
gggtcaccagcacggtgaagaacgatatttatgcccatatcgacaaggacgggcgctaccgggtcaatctcgact

SEQ ID NO: 151877 - DNA, 75 bp, synthetic construct
  source 1..75: mol_type = other DNA
acagaactaatatcctctgataaggaggaggtcgttaatattagtgtgtttgaacccgatgagtttttagacgat

SEQ ID NO: 151878 - DNA, 75 bp, synthetic construct
  source 1..75: mol_type = other DNA
ctgcgcaccccggcgaacaacaaaatccgcctcgatgacgagcgcggcaaagagcatatcaaggtcagtaccgag

SEQ ID NO: 151879 - DNA, 75 bp, synthetic construct
  source 1..75: mol_type = other DNA
ggcgacgacgcgcctgcggtgttccgcaagggcgtgctgattaccggcgtgacgaccagcgcggcgcgtgaccgc

SEQ ID NO: 151880 - DNA, 75 bp, synthetic construct
  source 1..75: mol_type = other DNA
cgcagggagatgaaatgttgctagatgcgctgaaagatatccgcatcagcagcagtgaggggcgaatccttatta

SEQ ID NO: 151881 - DNA, 75 bp, synthetic construct
  source 1..75: mol_type = other DNA
gataaaatccagaaactgtccgatgacgcgacgacggcgaacgccgacccggcggatatggccgcgcagatagca

SEQ ID NO: 151882 - DNA, 75 bp, synthetic construct
  source 1..75: mol_type = other DNA
attttggtgaacgcagtcgcacctggggcgatcgccacgccaatgaacggcatggatggcggcgacgtgaagccc

SEQ ID NO: 151883 - DNA, 75 bp, synthetic construct
  source 1..75: mol_type = other DNA
gcgaccctttgtgcgggtactgtctgaaaaagtacgggcccgacgcgggccccaccgaaagatgaggtccgcctg

SEQ ID NO: 151884 - DNA, 75 bp, synthetic construct
  source 1..75: mol_type = other DNA
ctccgctatttcatcgtcagagtgtttatcgtgttcagattgtttggtcgtgaatggtcatttgacctcaaggac

SEQ ID NO: 151885 - DNA, 75 bp, synthetic construct
  source 1..75: mol_type = other DNA
gtcacgcgcactttaagcacgaaatagaaaatcaccctgaatattttatcaaagttgacaatgtaactgtggcgt

SEQ ID NO: 151886 - DNA, 75 bp, synthetic construct
  source 1..75: mol_type = other DNA
gagccggagtcggtactgatgcaggacggcgcattcagcctgacggcaccaccggtacagggaatgccggtgcag

SEQ ID NO: 151887 - DNA, 75 bp, synthetic construct
  source 1..75: mol_type = other DNA
cctccgattcggggatcggcaaagagtgcgcgttattactggcgcagcaggggtttgatattggtattacctggc

SEQ ID NO: 151888 - DNA, 75 bp, synthetic construct
  source 1..75: mol_type = other DNA
gtgtagttaaattcgaacagagtaatgagaaatcgtcagttcgtgctgatagctctggtagtcgtggcaaggcga

SEQ ID NO: 151889 - DNA, 75 bp, synthetic construct
  source 1..75: mol_type = other DNA
gtttatgacatggatgaaactgatgtacttgttgcgttgtttgtatgccaaacaaagagatgttgatccggatgt

SEQ ID NO: 151890 - DNA, 75 bp, synthetic construct
  source 1..75: mol_type = other DNA
attttgccttctgcgctgcgtattgcgttaccggcctacagcaacgaagtgatcctgatgctgcactctactgcg

SEQ ID NO: 151891 - DNA, 75 bp, synthetic construct
  source 1..75: mol_type = other DNA
atgttgataatacgcttgggaaaaactgggcgaatgaggatgttaaaaataaagcggttttaatggccaatgcct

SEQ ID NO: 151892 - DNA, 75 bp, synthetic construct
  source 1..75: mol_type = other DNA
aaggtcaaaaattaaaggtgtccagtgttcatcgccgctgggggctacgaggaagacctgggcatcttgaagtgg

SEQ ID NO: 151893 - DNA, 75 bp, synthetic construct
  source 1..75: mol_type = other DNA
caacttgatgatgtgctgatccttgaaggtcaaaaattaaaggtgtccagtgttcatcgccgctgggggctacga

SEQ ID NO: 151894 - DNA, 75 bp, synthetic construct
  source 1..75: mol_type = other DNA
cacaccacaagctcaaaattcgcggcctgcaaagcccggtggacgtgctgacttttacgggccgggaacaactca

SEQ ID NO: 151895 - DNA, 75 bp, synthetic construct
  source 1..75: mol_type = other DNA
cacccctgcggcctgatccgggcgcaaattgccattacggcctccttacgaccgcatggccccatacatcagcta

SEQ ID NO: 151896 - DNA, 75 bp, synthetic construct
  source 1..75: mol_type = other DNA
atgccagaaggccatgcccagctctgcgagcgtcatatagccgcctgtgttgtaatgacaacgtttcgcggctat

SEQ ID NO: 151897 - DNA, 75 bp, synthetic construct
  source 1..75: mol_type = other DNA
gacgaccagcgcggcgcgtgaccgcagctatgaactgacgtttactgccatcccgtactcagaacgctatagcta

SEQ ID NO: 151898 - DNA, 75 bp, synthetic construct
  source 1..75: mol_type = other DNA
gaggaaggcaacccggacaggccgtatatcgccggggtaaagcacgactcggcgcacaccgaccatgtgaccatc

SEQ ID NO: 151899 - DNA, 75 bp, synthetic construct
  source 1..75: mol_type = other DNA
tcatctggtggatgccggaaaacagcagcgcggggaagggtttgaactgcgtaccgatctgtggggcgcggtgcg

SEQ ID NO: 151900 - DNA, 75 bp, synthetic construct
  source 1..75: mol_type = other DNA
cctttggagagcttgatttatggttaaaggattccgaagagaaaatatatattgtcatggtgttgcagatggagg

SEQ ID NO: 151901 - DNA, 75 bp, synthetic construct
  source 1..75: mol_type = other DNA
aatgagaatgttctcaataaggtaaagataaatatacctacgtttaataatgttcctgcatataattatatggta

SEQ ID NO: 151902 - DNA, 75 bp, synthetic construct
  source 1..75: mol_type = other DNA
gctggagaaagtctgctgcttggcggatttatccaggataaagagagttcaagtaaagatggtataccgttgtta

SEQ ID NO: 151903 - DNA, 75 bp, synthetic construct
  source 1..75: mol_type = other DNA
ttaggtgccgttttattgtgggttgctaatcgtctcgatttgccgctattgccggtgatattcccgacgcagctt

SEQ ID NO: 151904 - DNA, 75 bp, synthetic construct
  source 1..75: mol_type = other DNA
ttacgtaccagcgaagctttattacaattcaacccggaagatccctatgaaattcgcgatcgcgggttgatttat

SEQ ID NO: 151905 - DNA, 75 bp, synthetic construct
  source 1..75: mol_type = other DNA
atggcccccgtggtgttgtcaggtgcatacctgcaacgtgcgggggttttctctctccagcaaccaatgccacca

SEQ ID NO: 151906 - DNA, 75 bp, synthetic construct
  source 1..75: mol_type = other DNA
tccagtaaccatgtcgctactgatttatagcggcatgttagcttcgctgctggcgcttggaacggtgtcgtcatt

SEQ ID NO: 151907 - DNA, 75 bp, synthetic construct
  source 1..75: mol_type = other DNA
atggaagggctggatcttcaggcggctggcattgcggcgggtggcatcgcccaggctttcgcactcgataaaatg

SEQ ID NO: 151908 - DNA, 75 bp, synthetic construct
  source 1..75: mol_type = other DNA
atgtttacgcgccaggcctgggaagagcaggtacaggatgcgattaacgaagtcgtcagaacacgccgcgatgaa

SEQ ID NO: 151909 - DNA, 75 bp, synthetic construct
  source 1..75: mol_type = other DNA
ccgggcattcttgttgctgggttagcggtgtttattttgatgagccggaaaacacgaatgcaggcgtgcactgat

SEQ ID NO: 151910 - DNA, 75 bp, synthetic construct
  source 1..75: mol_type = other DNA
ttcgcaggacggcggtgagcctgatgtattgcggtgtccccattggcgcggcgctggcggctacgctgggtttcg

SEQ ID NO: 151911 - DNA, 75 bp, synthetic construct
  source 1..75: mol_type = other DNA
tgatcaactggctaccgctgcttttggtggagcaaggattccagccatcgcaggcggcaggggtgatgtttgcac

SEQ ID NO: 151912 - DNA, 75 bp, synthetic construct
  source 1..75: mol_type = other DNA
gatttcgaatccgttgccaccaccacgcttgcggcgttaggcctggagaaagcaccagagccaaaatccagccgg

SEQ ID NO: 151913 - DNA, 75 bp, synthetic construct
  source 1..75: mol_type = other DNA
ctttgctttccagtggcaggacggtaattacggcgacttaacagcggtagaaagtgaagcccgcgccattcttaa

SEQ ID NO: 151914 - DNA, 75 bp, synthetic construct
  source 1..75: mol_type = other DNA
ccgaggcggcaaaaacctttgccagcaaagtctttcacagcaccgagtttggctatcgtcgcatcaccgttgagc

SEQ ID NO: 151915 - DNA, 75 bp, synthetic construct
  source 1..75: mol_type = other DNA
tttacgcggtgtcatgttcagtcctgaactgatcgttgccggagcggtaccaaacacatgccccgacacaccggc

SEQ ID NO: 151916 - DNA, 75 bp, synthetic construct
  source 1..75: mol_type = other DNA
gatggcttgcagaagattgtgggcgatctgcgtaaggaccctcatgctctggagactgtctgggtgtcagttatt

SEQ ID NO: 151917 - DNA, 75 bp, synthetic construct
  source 1..75: mol_type = other DNA
attcgctggaagcagcgcaatctagcggtgctgaaaaataaaaatccggcgaagtatgtggcggcggtgaataag

SEQ ID NO: 151918 - DNA, 75 bp, synthetic construct
  source 1..75: mol_type = other DNA
ttcggtgattgatatcgggttaaccaccgtcaaagtgcgcaactgggacaataccatcaccaccattcctacctg

SEQ ID NO: 151919 - DNA, 75 bp, synthetic construct
  source 1..75: mol_type = other DNA
agtatcagtattgatgtcaccagtattcgttttcttgatgaagacgaaatgcaacgtctgaataaagcgcatttg

SEQ ID NO: 151920 - DNA, 75 bp, synthetic construct
  source 1..75: mol_type = other DNA
cattacccagaataaactcttccaccgtttagcttttaccctgcaggggattatcgtcaatattcaggcggtatt

SEQ ID NO: 151921 - DNA, 75 bp, synthetic construct
  source 1..75: mol_type = other DNA
atggatcagttcgaatgtattaacgttgccgacgcgcaccagaagttgcaggaaaaagaggcggtgctggtcgat

SEQ ID NO: 151922 - DNA, 75 bp, synthetic construct
  source 1..75: mol_type = other DNA
gaccgcagacgctgtagctgttccgaagtttgctaaaggctctaatgtatatcagaacatctacggggctgcttc

SEQ ID NO: 151923 - DNA, 75 bp, synthetic construct
  source 1..75: mol_type = other DNA
gggaaggcctgattgtcccggcagacgtgcaaggcaaacgtaagcctggcactgattttcaggaaacactcactg

SEQ ID NO: 151924 - DNA, 75 bp, synthetic construct
  source 1..75: mol_type = other DNA
ggctgcaaatcattacccagaataaactatttcaccgtttagcttttaccctgcaggggattatcgtcaatattc

SEQ ID NO: 151925 - DNA, 75 bp, synthetic construct
  source 1..75: mol_type = other DNA
tcacaccacctcaatggtgatgattttcggtattatttttctgaccgccgttgtagtgcatattattttgcactg

SEQ ID NO: 151926 - DNA, 75 bp, synthetic construct
  source 1..75: mol_type = other DNA
aagttcgctaaaggctctaacgtctatcagaacattttcggcgctccttcttcaacgttcgacctgctgaattct

SEQ ID NO: 151927 - DNA, 75 bp, synthetic construct
  source 1..75: mol_type = other DNA
ggctgaataaagcgcatctgttaaagccttatttaaccagccgccatcaggaaattaatgagtggaaccgccagc

SEQ ID NO: 151928 - DNA, 75 bp, synthetic construct
  source 1..75: mol_type = other DNA
accgtcaaagtgcgtaactgggacaataccattaccactattcccacctggtctctggtttctgactcctttaaa

SEQ ID NO: 151929 - DNA, 75 bp, synthetic construct
  source 1..75: mol_type = other DNA
ctggtcggcattttgatgatctcgctgctgattggtcagtcaccgaccattctgatcagtggtcttggcgcaatg

SEQ ID NO: 151930 - DNA, 75 bp, synthetic construct
  source 1..75: mol_type = other DNA
gaaattgtcggtttgggggtggttgaaccgcgtgagatccaggaaacaacctgggtatttgacgaccatgccgcc

SEQ ID NO: 151931 - DNA, 75 bp, synthetic construct
  source 1..75: mol_type = other DNA
agcgcggcaaagagcatatcaaggtcagcaccgaatacggcggcaagagccagctaaacctcggtcatctggtgg

SEQ ID NO: 151932 - DNA, 75 bp, synthetic construct
  source 1..75: mol_type = other DNA
aatagcgctgttgcagcagagtgtaaaagatctgacgcaggcggcgatcctgctaagcgcacccaaaggcgtggc

SEQ ID NO: 151933 - DNA, 75 bp, synthetic construct
  source 1..75: mol_type = other DNA
ccactgatgcgcagacggcgaatgccgatccggcagatctgtcatcacagatagcgctgttgcagcaaagtgtaa

SEQ ID NO: 151934 - DNA, 75 bp, synthetic construct
  source 1..75: mol_type = other DNA
ccctatgaactagaactggaaagtgggctaaaaatgagtgggattactgatgaaaatggaaatacagaactaata

SEQ ID NO: 151935 - DNA, 75 bp, synthetic construct
  source 1..75: mol_type = other DNA
agaagaaaatcacccttaacggcggtggcagctacatccggctggatgcctgtgggatagaggccggtacgccgg

SEQ ID NO: 151936 - DNA, 75 bp, synthetic construct
  source 1..75: mol_type = other DNA
gcatgacgccaccgggggcgataaaaccacctatggcgaagcctaccactatgccgacaacttcctgcaaaaagg

SEQ ID NO: 151937 - DNA, 75 bp, synthetic construct
  source 1..75: mol_type = other DNA
cgccatctaccagaagcagacggtgccgcaaatcgtcgaaaaaatcctgcgcgagcgccatcagatgcgcggtca

SEQ ID NO: 151938 - DNA, 75 bp, synthetic construct
  source 1..75: mol_type = other DNA
cgccatctaccagaaccagacggtgccgcaaatcgtcgaaaaaatcctgcgcgagcgtcatcatatgcgcggtca

SEQ ID NO: 151939 - DNA, 75 bp, synthetic construct
  source 1..75: mol_type = other DNA
gcgcagggtcaggtgcgcgaaatggctccggcgatggcaatactggatggcgcacagtcacagatgaagtcgctg

SEQ ID NO: 151940 - DNA, 75 bp, synthetic construct
  source 1..75: mol_type = other DNA
attgagagcggggaatataatattcagttcaatttcaaggatgatgatgggataccttatgcaaatacgagatat

SEQ ID NO: 151941 - DNA, 75 bp, synthetic construct
  source 1..75: mol_type = other DNA
ctacaactaccgtgaagccacggcggaaatgaccacaggtcagcatgacgccaccgggggcgataaaaccaccta

SEQ ID NO: 151942 - DNA, 75 bp, synthetic construct
  source 1..75: mol_type = other DNA
gtttatcagccgccaaggccgctggaagaaattgatgcggacctggatgcggtaagcgctgagattatgaaactg

SEQ ID NO: 151943 - DNA, 75 bp, synthetic construct
  source 1..75: mol_type = other DNA
attttatcgaataaaaaagcgcgagaacgcaaaggcaaagtccagcttatcgacggcagccacctgtgcggcaag

SEQ ID NO: 151944 - DNA, 75 bp, synthetic construct
  source 1..75: mol_type = other DNA
agcagaagtgctgccgcatgtaaatgatgcgtggatcaacgccgataagcgtgatgcgaaagatggtgaggtggg

SEQ ID NO: 151945 - DNA, 75 bp, synthetic construct
  source 1..75: mol_type = other DNA
agcacccgaacaaaaatccagccggggacgccagcccgcaacaaccaaaaccgaggcggcaaaaacctttgccag

SEQ ID NO: 151946 - DNA, 75 bp, synthetic construct
  source 1..75: mol_type = other DNA
ggctatcgtcgcatcaccgttgagcgcccgttgcgcctgtcggctcagataagtgatgacgccattgccacattg

SEQ ID NO: 151947 - DNA, 75 bp, synthetic construct
  source 1..75: mol_type = other DNA
tgatcagcaaaatgcgcgatgccaaaagcggtggcggacggatcggcatcattcttaatggttcgccgttattca

SEQ ID NO: 151948 - DNA, 75 bp, synthetic construct
  source 1..75: mol_type = other DNA
gggcgctaccgggtcaacctcgactttgaccgcgatacgtggaaaccgggttatgaaagcctgtgggtacgccag

SEQ ID NO: 151949 - DNA, 75 bp, synthetic construct
  source 1..75: mol_type = other DNA
cggagaaggttcctatgccagaatttcccatcctttcagccgtggactcatccgatttttgtcttgaatgcctgc

SEQ ID NO: 151950 - DNA, 75 bp, synthetic construct
  source 1..75: mol_type = other DNA
gcctcggagaaggttcctatgccagaatttcccatcctttcagccgtggactcatccgatttttgtcttgaatgc

SEQ ID NO: 151951 - DNA, 75 bp, synthetic construct
  source 1..75: mol_type = other DNA
cggctgcgtttatatggtcggtggccgatctactgcgcggtgatttcaaacagtctcagtacgggcgcgtgatcc

SEQ ID NO: 151952 - DNA, 75 bp, synthetic construct
  source 1..75: mol_type = other DNA
agaacccgcttagatgtggaagcacagcacatgtggtttattctggagagtctgccgcaaatgccactggaaaaa

SEQ ID NO: 151953 - DNA, 75 bp, synthetic construct
  source 1..75: mol_type = other DNA
actgccattgaagccggtgatgaatgtcgcgcccgcgcaaaatttcactggcaattcctggaacattatccggct

SEQ ID NO: 151954 - DNA, 75 bp, synthetic construct
  source 1..75: mol_type = other DNA
aaaagcactgactaaaaacagaatattaaacgtacctgtgaacagtattgttttcgcaccaaactgtataaatat

SEQ ID NO: 151955 - DNA, 75 bp, synthetic construct
  source 1..75: mol_type = other DNA
gaccggagattcttgaccagtatatagccggtcaaaatgactggatggagattgatcagtctgcggtatggccga

SEQ ID NO: 151956 - DNA, 75 bp, synthetic construct
  source 1..75: mol_type = other DNA
aattaactgaaatgcagggtgagttttgtgcttattgtgagtgccggttgaatagacgtcatattgagcatttca

SEQ ID NO: 151957 - DNA, 75 bp, synthetic construct
  source 1..75: mol_type = other DNA
gtggctttcctgcgttcggtaaaatcacgttgcggcatttttgccggggggattacttataaagggggcatggac

SEQ ID NO: 151958 - DNA, 75 bp, synthetic construct
  source 1..75: mol_type = other DNA
taagactattgttctcgctcgaaaaattgcacatatacactcacaaaatcctcactggaaaatagcagttacttt

SEQ ID NO: 151959 - DNA, 75 bp, synthetic construct
  source 1..75: mol_type = other DNA
cctattgagtgcacataactcaattgatgagatgatccagtttgttaaatttgaagacaagcattctcaatctaa

SEQ ID NO: 151960 - DNA, 75 bp, synthetic construct
  source 1..75: mol_type = other DNA
gccgtccgatgcgctttgctgcgccgccgagcaaaaacgtcagcaaagatgtcttccatccggtgttcgacgtcg

SEQ ID NO: 151961 - DNA, 75 bp, synthetic construct
  source 1..75: mol_type = other DNA
atgagatggtgaagctggcaacggcggtggcgcatctgattggccgttccaatttcgatgcgatgagcggtcagt

SEQ ID NO: 151962 - DNA, 75 bp, synthetic construct
  source 1..75: mol_type = other DNA
aatttcgatgcgatgagcggtcagtattacgcgcgttttgtagtgaaaaatgtcgataactcagacagctatctg

SEQ ID NO: 151963 - DNA, 75 bp, synthetic construct
  source 1..75: mol_type = other DNA
gccactcttcagaaataaagagtcacccttcatatttccttctcatgacgtcaaaaggcaaaaataaattttatg

SEQ ID NO: 151964 - DNA, 75 bp, synthetic construct
  source 1..75: mol_type = other DNA
atcttatccgtggagagtttatcgtttttgtacgaagagaatcctctattaaagattcggagagagctaatggaa

SEQ ID NO: 151965 - DNA, 75 bp, synthetic construct
  source 1..75: mol_type = other DNA
acgatacagggtaaatctatcagaaaacgtagttgaaaaatttattgaaagcgatagcaaagagaaggttgaaca

SEQ ID NO: 151966 - DNA, 75 bp, synthetic construct
  source 1..75: mol_type = other DNA
ccgtctggccgcatctaaaatcaggtggaacgctagtttatgccacctgttcggtgttaccggaagagaatagcc

SEQ ID NO: 151967 - DNA, 75 bp, synthetic construct
  source 1..75: mol_type = other DNA
gattaacggcgtattacgccagttccaacgtcagcaagaagagttattagccgagtttaatgccagtgatgcacg

SEQ ID NO: 151968 - DNA, 75 bp, synthetic construct
  source 1..75: mol_type = other DNA
gttgactatacggaattgccgttggtctctgtagattttaaccacgatccgcacagtgccattgtcgatggcacc

SEQ ID NO: 151969 - DNA, 75 bp, synthetic construct
  source 1..75: mol_type = other DNA
tcgcattttattagatgcaccttgttccgctaccggtgtgattcgtcgccatccggatataaaatggctgcgtcg

SEQ ID NO: 151970 - DNA, 75 bp, synthetic construct
  source 1..75: mol_type = other DNA
gtttgtatcaactgctttatacccgcattccacctcatgccgcgctggctgaaacggttgaaggcgcagttgcaa

SEQ ID NO: 151971 - DNA, 75 bp, synthetic construct
  source 1..75: mol_type = other DNA
atccggatattaaatggttacgtcgtgatcgcgatatcccggaactcgcgcaattgcagtctgaaattctcgacg

SEQ ID NO: 151972 - DNA, 75 bp, synthetic construct
  source 1..75: mol_type = other DNA
atttgcttaaaccagaatgtctttactcaatgctacgggcctacatcattgagcgcgccccgtttgcgttaacaa

SEQ ID NO: 151973 - DNA, 75 bp, synthetic construct
  source 1..75: mol_type = other DNA
ttaacgttcctgatgtctgatgatgtaccaccacaattcagcggaaaaggctatgaagcgttcggcccatacaaa

SEQ ID NO: 151974 - DNA, 75 bp, synthetic construct
  source 1..75: mol_type = other DNA
atttgcttaaaccagaacatctttactcgatgttacgggcctatattatcgaacgcgccccgtttgcagtgacaa

SEQ ID NO: 151975 - DNA, 75 bp, synthetic construct
  source 1..75: mol_type = other DNA
attgccggatggcatttgaatggcgatatcgctacatgggaagagattcttcctgaaattaacgatatcgaaacc

SEQ ID NO: 151976 - DNA, 75 bp, synthetic construct
  source 1..75: mol_type = other DNA
ggagataccaaagccgaccagcctgtttgatgatgagtcgcatttgtttggggtgataacgtacatcatcaatga

SEQ ID NO: 151977 - DNA, 75 bp, synthetic construct
  source 1..75: mol_type = other DNA
aaggacgaatgcggctaccttcctactcagaaattatttagcgaattaacattaaaaatcaaacgtgagtacggc

SEQ ID NO: 151978 - DNA, 75 bp, synthetic construct
  source 1..75: mol_type = other DNA
aagcgggtatcccccacgaagacataatcttatttaccagcctgacgatggaggagcttaaagaaattatccatt

SEQ ID NO: 151979 - DNA, 75 bp, synthetic construct
  source 1..75: mol_type = other DNA
ctgctgatgaactggctgatggtgtgatggaatcgctgcgatttgatgcgcatgagttgctgattatccaccttc

SEQ ID NO: 151980 - DNA, 75 bp, synthetic construct
  source 1..75: mol_type = other DNA
attgagaaaatcctccgctcctacactgctgatgaactggctgatggcgtgatggaatcgttgcggtttgatgct

SEQ ID NO: 151981 - DNA, 75 bp, synthetic construct
  source 1..75: mol_type = other DNA
atgcttgaatccggagtccctcttacagacatcatgcgctttaccggggtgtcagaagaagagttggctgcggcg

SEQ ID NO: 151982 - DNA, 75 bp, synthetic construct
  source 1..75: mol_type = other DNA
aatggcctgcttattaagtagtggatacgctaatgacagacaaatcaaagggctgtttaattacatactgcaaac

SEQ ID NO: 151983 - DNA, 75 bp, synthetic construct
  source 1..75: mol_type = other DNA
acaaatcaaagggctgtttaattacatactgcaaaccggcgacgcggtacgttttaacgattttatcgacggcgt

SEQ ID NO: 151984 - DNA, 75 bp, synthetic construct
  source 1..75: mol_type = other DNA
attgagcagaatgaaccgttcgtttacgacaaacgcgttttgtggaagcgtgtcgggcgcatcaggaaaaatgtc

SEQ ID NO: 151985 - DNA, 75 bp, synthetic construct
  source 1..75: mol_type = other DNA
tgttcctctctgcaaccactgacggcataaattacgggcgtgagcagatgattgagcagaatgaaccgttcgttt

SEQ ID NO: 151986 - DNA, 75 bp, synthetic construct
  source 1..75: mol_type = other DNA
gaacacctgctgtttactccactgttcaaagcggataacgccagagtgttcgaccttgaggttgaatcgtcaact

SEQ ID NO: 151987 - DNA, 75 bp, synthetic construct
  source 1..75: mol_type = other DNA
agcgcacaatatcgcgcagagtctcagcctgacggcatcatcggcatcggaacatggcgagacttcatcgtctgc

SEQ ID NO: 151988 - DNA, 75 bp, synthetic construct
  source 1..75: mol_type = other DNA
tttggttcatcgacgattgaatatttttccctgacaggtgcaaccactgttggtgccgctttgtatgtcgcacag

SEQ ID NO: 151989 - DNA, 75 bp, synthetic construct
  source 1..75: mol_type = other DNA
ggttggtcgagttagacgcctcattggatttaaattcagggttattgcaaaaggtcctgtcacattatcaggcct

SEQ ID NO: 151990 - DNA, 75 bp, synthetic construct
  source 1..75: mol_type = other DNA
gagtggcccgtgcaggcgctggagtacaaatcgtttctgcgttttcgggtaggcaaaattcttgacgatctgtgt

SEQ ID NO: 151991 - DNA, 75 bp, synthetic construct
  source 1..75: mol_type = other DNA
tctggctgcacggtcgcgaccgctttactccgcacccggatctgcgccgtgaactgatgcgtcagcgtggctatt

SEQ ID NO: 151992 - DNA, 75 bp, synthetic construct
  source 1..75: mol_type = other DNA
ctgatgagcaaggaatcatagaagctggtaaagctgctgaactatttttcagcttacagttagatgctcaggaga

SEQ ID NO: 151993 - DNA, 75 bp, synthetic construct
  source 1..75: mol_type = other DNA
ccggatctgcgccgtgaactgatgcgtcagcgcggctacttcgcttacgccactcaccactaccagacgcatcag

SEQ ID NO: 151994 - DNA, 75 bp, synthetic construct
  source 1..75: mol_type = other DNA
gttttccatccagtgttcgacgttgatcaacagggtcgcccggtgatgcgctatatcgaccagttcgtccagccg

SEQ ID NO: 151995 - DNA, 75 bp, synthetic construct
  source 1..75: mol_type = other DNA
gtcgcccgatgcgcttttgccgcgccgccgagcaaaaacgtcagcaaagatgttttccatccagtgttcgacgtt

SEQ ID NO: 151996 - DNA, 75 bp, synthetic construct
  source 1..75: mol_type = other DNA
atgagcaaaaagcagagttccaccccacatgatgcactgttcaaactctttttacgccaaccggacacggcacgc

SEQ ID NO: 151997 - DNA, 75 bp, synthetic construct
  source 1..75: mol_type = other DNA
agactatcacttatttaagtgatactggttgtctggagattcagggggccagtctactgatcgcatttcgcatga

SEQ ID NO: 151998 - DNA, 75 bp, synthetic construct
  source 1..75: mol_type = other DNA
ccggatacaaaacgttgccgatggtggtgccattgttgttttaccacggtattgaaagcccctatccctattcgc

SEQ ID NO: 151999 - DNA, 75 bp, synthetic construct
  source 1..75: mol_type = other DNA
aaagcagtgcaggggcgggtatcatgatcgggtttggggcaagaagatggaagaagtaggtttgatgccgtctaa

SEQ ID NO: 152000 - DNA, 75 bp, synthetic construct
  source 1..75: mol_type = other DNA
tcctggatgtggtttaaatgcatgggcgaaaccttcggctgtccttgtgtgtggtgaatgcagggttgaacttga

SEQ ID NO: 152001 - DNA, 75 bp, synthetic construct
  source 1..75: mol_type = other DNA
agcaaatgacgcactatattattcgtggtggtcgttttcagacagccgtttatgatctcctgaaaagtggtttct

SEQ ID NO: 152002 - DNA, 75 bp, synthetic construct
  source 1..75: mol_type = other DNA
ccacgggtatccgtagctggattttgcgcaacttgccgcacggtgtggcgcacggcacggggatcggtatcggtc

SEQ ID NO: 152003 - DNA, 75 bp, synthetic construct
  source 1..75: mol_type = other DNA
ctgaagttaaagattttttttcaaaagataaattcccactcaatttagttgatgggtcttatccaatatttattt

SEQ ID NO: 152004 - DNA, 75 bp, synthetic construct
  source 1..75: mol_type = other DNA
gttaaatcgcgtgagttcggtttatccgaaactagcgctggatgtccgcgttaaacgtaatgcctacatggcaga

SEQ ID NO: 152005 - DNA, 75 bp, synthetic construct
  source 1..75: mol_type = other DNA
aacaatcaaactgatgtacaccgccagtagtgctctgccaaaagacagagaaagtgtgttctggtttaacgtact

SEQ ID NO: 152006 - DNA, 75 bp, synthetic construct
  source 1..75: mol_type = other DNA
gaaggcttgccagtggcgctcggtgcctttacctccttcccggtgatgatgagcttactggggctggcggtcatc

SEQ ID NO: 152007 - DNA, 75 bp, synthetic construct
  source 1..75: mol_type = other DNA
cagttttcgttgcaacctgtctggttgccggactcggttctatcgtgatgggtctgtgggctaatctgccgttgg

SEQ ID NO: 152008 - DNA, 75 bp, synthetic construct
  source 1..75: mol_type = other DNA
gttcggtgattggattcctgccggatgtcttcgtttacccgattatcggctactggcaagacaccctgcccgctg

SEQ ID NO: 152009 - DNA, 75 bp, synthetic construct
  source 1..75: mol_type = other DNA
gctaatcgattatcgaaaagcgaaaaagctggcgcggctggcagaatggttgggagtagtaaatgatgatgtttg

SEQ ID NO: 152010 - DNA, 75 bp, synthetic construct
  source 1..75: mol_type = other DNA
cgcgtgattgtagaacgtaatttacctaccggaacttattcactccgacaagaacttatccgtacaggagattaa

SEQ ID NO: 152011 - DNA, 75 bp, synthetic construct
  source 1..75: mol_type = other DNA
ctttgcaggacgcaattaaaaacgctgcgggcatcatcaaagaaatcgaagagatgattgccgctgaacaaccgt

SEQ ID NO: 152012 - DNA, 75 bp, synthetic construct
  source 1..75: mol_type = other DNA
acggcgcaggatatcgccgaagcaaccatcatcatccactccgtagctgttaccccggaagataacgaacgtttc

SEQ ID NO: 152013 - DNA, 75 bp, synthetic construct
  source 1..75: mol_type = other DNA
tgagttactccaccaactatctgaccgaaatgtacggcatgtcgctggtggcggcgagctacatggggattgtga

SEQ ID NO: 152014 - DNA, 75 bp, synthetic construct
  source 1..75: mol_type = other DNA
atgatggatggtaacgttggtcagcagtactctaccggctggtttggcgataacgccggtggcgagaactttatg

SEQ ID NO: 152015 - DNA, 75 bp, synthetic construct
  source 1..75: mol_type = other DNA
gcgatcattttattgtggctaacgcgattgtttactccttcggtaacgatatttatagctacgaaacaggcgcac

SEQ ID NO: 152016 - DNA, 75 bp, synthetic construct
  source 1..75: mol_type = other DNA
acctaaatcatgggcgattggttctctgggccgctttggtaacgaatactccggctggtttgatttgcagttaaa

SEQ ID NO: 152017 - DNA, 75 bp, synthetic construct
  source 1..75: mol_type = other DNA
ctggcgtttacggccacggtgccggatctgctgaaaatagcccgcgatattaacgccgccacgtatcaacctttt

SEQ ID NO: 152018 - DNA, 75 bp, synthetic construct
  source 1..75: mol_type = other DNA
gttccttaacgcctttttccgcagtggcctgaattgtactgtgctggcgctgacgcttaacacctgtgcttacac

SEQ ID NO: 152019 - DNA, 75 bp, synthetic construct
  source 1..75: mol_type = other DNA
ctctaaaaaaattgatttgaattgtttgtcagaacatgctctaaacagaacagtaagtcatgataatatattttc

SEQ ID NO: 152020 - DNA, 75 bp, synthetic construct
  source 1..75: mol_type = other DNA
cggtacgcaacttgccgaaaagttaagaagcctggtgctggatatcaaatcggtaggcgatgaagtcattaccga

SEQ ID NO: 152021 - DNA, 75 bp, synthetic construct
  source 1..75: mol_type = other DNA
aactggctttccgtacccgaatcaaacttttttatcgcccaagtggattacaaggtgaacccgctgaagcaccag

SEQ ID NO: 152022 - DNA, 75 bp, synthetic construct
  source 1..75: mol_type = other DNA
tgggatgagtggcagaacaagctctgcaaaagtgcattttttcgccattaatgattttggtggatctattgaagg

SEQ ID NO: 152023 - DNA, 75 bp, synthetic construct
  source 1..75: mol_type = other DNA
gcaaaagcagcaaatcaaagcctgctacaactggcatttcgcacacgtataaaactgttctatcgcccggaagga

SEQ ID NO: 152024 - DNA, 75 bp, synthetic construct
  source 1..75: mol_type = other DNA
gggttaaaaactggctgcgtttttctggccgtctgaccagtcgttctctggcagaaaaaatgaatatgccgctat

SEQ ID NO: 152025 - DNA, 75 bp, synthetic construct
  source 1..75: mol_type = other DNA
acttaacgctctatctcgatgttaccccggaagttggcttaaaacgcgctctcgcacgtggcgagttggatcgta

SEQ ID NO: 152026 - DNA, 75 bp, synthetic construct
  source 1..75: mol_type = other DNA
ttatttttacagcactattttgctgcagtgcacaagctgccccgtcctctctggaaaaaagattaggcaagaacg

SEQ ID NO: 152027 - DNA, 75 bp, synthetic construct
  source 1..75: mol_type = other DNA
tctggatattgactcactgctaaaatatctgagtgatacaatctcagtaaacaaaaactcttgcaatgtgagaaa

SEQ ID NO: 152028 - DNA, 75 bp, synthetic construct
  source 1..75: mol_type = other DNA
tacctgcgtaacatccaggacaccaacgaaaccctcttctaccgtctggtaaacaatcatcttgatgagatgatg

SEQ ID NO: 152029 - DNA, 75 bp, synthetic construct
  source 1..75: mol_type = other DNA
aagccagctcatgttacgcctggcgacagaagaacaatgggacgaactcatcgccagcgaaatggcgtatgtgaa

SEQ ID NO: 152030 - DNA, 75 bp, synthetic construct
  source 1..75: mol_type = other DNA
atgaacaatgcaccgcatttgtatttcgcctggcaacaactcgccgaaaaaagccagctcatgttacgcctggcg

SEQ ID NO: 152031 - DNA, 75 bp, synthetic construct
  source 1..75: mol_type = other DNA
aagccagctcatgttacgcctggcaacggaagaacaatgggacgaactcatcgccagcgaaatggcgtatgtgaa

SEQ ID NO: 152032 - DNA, 75 bp, synthetic construct
  source 1..75: mol_type = other DNA
gtgcttaatacctggctttctgattcaacaatcgcattacgaaagaatgtcacaacctggcagcaagcattagat

SEQ ID NO: 152033 - DNA, 75 bp, synthetic construct
  source 1..75: mol_type = other DNA
tgctaagtgaatacaaggctacgacaggtttcgttcagcttagtggaagcggttgctatgttgttgatattaaaa

SEQ ID NO: 152034 - DNA, 75 bp, synthetic construct
  source 1..75: mol_type = other DNA
tcggcaactggtgtaattcgtcgccatccggatattaaatggttacgccgcgatcgcgatatcccagaactcgcg

SEQ ID NO: 152035 - DNA, 75 bp, synthetic construct
  source 1..75: mol_type = other DNA
tgggatgggcattccaatcggtaaactgtcgctctataccgcctgtggcggcatcagcccggcgtatacccttcc

SEQ ID NO: 152036 - DNA, 75 bp, synthetic construct
  source 1..75: mol_type = other DNA
gctatcgcaatgaaatttgttcttttaacgatgacattcagggcactgcggcggtaacagtcggcacactgatcg

SEQ ID NO: 152037 - DNA, 75 bp, synthetic construct
  source 1..75: mol_type = other DNA
cagagataattacgacggattatctcagtgcgataaagacacaacatgaaaaactggggccttattatgtcctgg

SEQ ID NO: 152038 - DNA, 75 bp, synthetic construct
  source 1..75: mol_type = other DNA
atgaaaggacgttgggtaaagtaccttcttatgggcgcagtcgtaacgatacttgccgcctgctcctccaaacca

SEQ ID NO: 152039 - DNA, 75 bp, synthetic construct
  source 1..75: mol_type = other DNA
atcctttgtttcttgttttcaggtatgagttttataatattaagacaaaaacaggagcgtcgatttttcttatca

SEQ ID NO: 152040 - DNA, 75 bp, synthetic construct
  source 1..75: mol_type = other DNA
ccgtcctttcctcagcacttgcagccgtgttactcagcgccccgctgtcgttctcgttctggcaaggcgcgctaa

SEQ ID NO: 152041 - DNA, 75 bp, synthetic construct
  source 1..75: mol_type = other DNA
gaattggttttgccaccgaaattaaaatgcggttattgaagcggaagccacgattggtccgcaatgctttattgc

SEQ ID NO: 152042 - DNA, 75 bp, synthetic construct
  source 1..75: mol_type = other DNA
gttgatctggcaggcgaactggctgacgttgaaatcataattgaacagttccgcctaaacgggatgggcctgatg

SEQ ID NO: 152043 - DNA, 75 bp, synthetic construct
  source 1..75: mol_type = other DNA
gcttctgttgcctctgatcgttccattatcccaccaggtacaaccttgctggcagaagtgccgctgctggataat

SEQ ID NO: 152044 - DNA, 75 bp, synthetic construct
  source 1..75: mol_type = other DNA
atgccagttagccgtaatctctgcattttcttaaacgttggtttgggagaaggttcggcattacccgttggtgtg

SEQ ID NO: 152045 - DNA, 75 bp, synthetic construct
  source 1..75: mol_type = other DNA
ttgatgcaatcagaggggctttttacgatgcaggaacacgatcagcgacaatggcgaataacacaactgctatag

SEQ ID NO: 152046 - DNA, 75 bp, synthetic construct
  source 1..75: mol_type = other DNA
accgaaaagacgttcagcaaatcatccgccaactcaagttagacattttcaccaaatcacgactccgcatcaaag

SEQ ID NO: 152047 - DNA, 75 bp, synthetic construct
  source 1..75: mol_type = other DNA
atctctgcggcatttaccttaggatttgcttatgctgcatggaatgtcggtatattgcatggcaatgtcaccata

SEQ ID NO: 152048 - DNA, 75 bp, synthetic construct
  source 1..75: mol_type = other DNA
tgatgaccggcgtcgggctgggcgcggcgttgccgaatctgatcgcgctgacttccgaggcggcgggcccgcgtt

SEQ ID NO: 152049 - DNA, 75 bp, synthetic construct
  source 1..75: mol_type = other DNA
cctgatgtattgcggtgttcccattggcgcggcgctggcggcgacgctgggtttcgcgggggcaaacttagcatg

SEQ ID NO: 152050 - DNA, 75 bp, synthetic construct
  source 1..75: mol_type = other DNA
gcttactataaatggaactcttcggatcaagttgaaaactggggggcggttggagctgattggccattagaagaa

SEQ ID NO: 152051 - DNA, 75 bp, synthetic construct
  source 1..75: mol_type = other DNA
taagttaaaacaacgatttgccaaaggcgttacggaaatcataataccttctgctggtggtgagcaaacaatgac

SEQ ID NO: 152052 - DNA, 75 bp, synthetic construct
  source 1..75: mol_type = other DNA
tataagacccttaaggaattgtgtgaacaatatagcgcaccttccaatgaagcccttaagactttgtacatcaca

SEQ ID NO: 152053 - DNA, 75 bp, synthetic construct
  source 1..75: mol_type = other DNA
ggcacttaaaactttgtacattacaaggctagccttacattcctttcttgaactaagaattgaactcactcctga

SEQ ID NO: 152054 - DNA, 75 bp, synthetic construct
  source 1..75: mol_type = other DNA
gttaattactaatcatggattttccagtgatccttctggtgatttgtccacgatgacagggctttcatgtctttc

SEQ ID NO: 152055 - DNA, 75 bp, synthetic construct
  source 1..75: mol_type = other DNA
gaaaactaattagttgcttaggtgaatttctgtggtatctctcagctcagaacgatcttgagtttataaaacact

SEQ ID NO: 152056 - DNA, 75 bp, synthetic construct
  source 1..75: mol_type = other DNA
aagtacgatcctttcgcaatagcaaaaagaacatcgtataagcaaaaagttgattttgatattctgcttgagata

SEQ ID NO: 152057 - DNA, 75 bp, synthetic construct
  source 1..75: mol_type = other DNA
acagccgcatctaaggatggttggataagctgtagtgagcgaatgcctgtaattggcgagctaaattggagaact

SEQ ID NO: 152058 - DNA, 75 bp, synthetic construct
  source 1..75: mol_type = other DNA
tgcgcaatctctgtcggcgtggctacgccactcaagtagggcgaatgactaacccactactctcatcctgtgatg

SEQ ID NO: 152059 - DNA, 75 bp, synthetic construct
  source 1..75: mol_type = other DNA
ccatctacgtcgccaactggcctgccccacgctctctgcactggcaggcattgctgacagcccgcgcgattgaga

SEQ ID NO: 152060 - DNA, 75 bp, synthetic construct
  source 1..75: mol_type = other DNA
tataaaacgctaaaagagttatgtgaacaatacaattccccctcaaatgaggcacttaaaactttgtacattaca

SEQ ID NO: 152061 - DNA, 75 bp, synthetic construct
  source 1..75: mol_type = other DNA
tgcatcatcgaaatgatgatgcagctccccggtgatactcagcgtcgtctggttatctgtcttgctttacgtaaa

SEQ ID NO: 152062 - DNA, 75 bp, synthetic construct
  source 1..75: mol_type = other DNA
acggcgcagagctttatgttgtcaaccacaacggcgagccgtacaccccaatgaaacctatcgttgagggaatgg

SEQ ID NO: 152063 - DNA, 75 bp, synthetic construct
  source 1..75: mol_type = other DNA
tagctaaaacagttgaagaagggctaaatcgtgccgctgaagcggcaagacagcttgagcaactcaagcaacaat

SEQ ID NO: 152064 - DNA, 75 bp, synthetic construct
  source 1..75: mol_type = other DNA
ggaaaacagacattgaaagatatggtcccaatcgactgagaagagcagaaaaacttacacctgtactcaatcagt

SEQ ID NO: 152065 - DNA, 75 bp, synthetic construct
  source 1..75: mol_type = other DNA
ggtcacttttttcagaagctatctgaaaaattatccgggcctgttgaataaagcatggagtggacaaccgtttga

SEQ ID NO: 152066 - DNA, 75 bp, synthetic construct
  source 1..75: mol_type = other DNA
gtggcaacggacaaggcagttccatgatcatgaaaatgaaagtggaccagtttttaacccaatcaaacattgacc

SEQ ID NO: 152067 - DNA, 75 bp, synthetic construct
  source 1..75: mol_type = other DNA
catcttaatagctcatggcaatatgaaatgttattttcaaacagtcatgaataaaaaacctaatcggttgtctgg

SEQ ID NO: 152068 - DNA, 75 bp, synthetic construct
  source 1..75: mol_type = other DNA
gataaccagcttcagtcacaagattcattcgacgaggaaaacacgtccagttctggcaaagagttaataaatggc

SEQ ID NO: 152069 - DNA, 75 bp, synthetic construct
  source 1..75: mol_type = other DNA
atgtagttaaccataatggcgaaccatacgttcccatgaaacctgtcgttgcggggatggggctggcctggcaat

SEQ ID NO: 152070 - DNA, 75 bp, synthetic construct
  source 1..75: mol_type = other DNA
tgaaacgggataaaaacattgccagtgtgtttgctaccgggctgaatgagtggaaacaggttaaagccgcgcatg

SEQ ID NO: 152071 - DNA, 75 bp, synthetic construct
  source 1..75: mol_type = other DNA
tccccgtaaaatgagcgtgatggaagaactcaaccaggcttgtgctgacatgaaacgggataaaaaacattgcca

SEQ ID NO: 152072 - DNA, 75 bp, synthetic construct
  source 1..75: mol_type = other DNA
gttggagctcatttttaatactgtactggcaacgctctcactctcctgtcagtcattggttgacgttgttcatcc

SEQ ID NO: 152073 - DNA, 75 bp, synthetic construct
  source 1..75: mol_type = other DNA
ccatataatgttcattacacggtgattcagtcccaggagaatacgtggggaagaccttatgatgttactatttta

SEQ ID NO: 152074 - DNA, 75 bp, synthetic construct
  source 1..75: mol_type = other DNA
cagcgcaaatatattgaggctatctgctctttttaattacgttcatgatgatcgtgaagatgccattcattcaca

SEQ ID NO: 152075 - DNA, 75 bp, synthetic construct
  source 1..75: mol_type = other DNA
aacgatggatagcaataacaacagccattcaacaaatgtgtctacggattatcgttatagcgaacaggatggcga

SEQ ID NO: 152076 - DNA, 75 bp, synthetic construct
  source 1..75: mol_type = other DNA
gataacgacgacaacggcttgtacttatcgttttcgttatctgacacgccaacgatggatagcaataacaacagc

SEQ ID NO: 152077 - DNA, 75 bp, synthetic construct
  source 1..75: mol_type = other DNA
gtacagaagatttgctgggggcggtgttggtagatgtgaaaggattctctgaacaggatgaggagagtcaggatc

SEQ ID NO: 152078 - DNA, 75 bp, synthetic construct
  source 1..75: mol_type = other DNA
atggataaaaaactactggctcttttgatcctggcgagtatcagcccggcaaaggcaacattaacaaaaatcccc

SEQ ID NO: 152079 - DNA, 75 bp, synthetic construct
  source 1..75: mol_type = other DNA
atgctgacgtcagcgatctctattatcgttatgattttttacgtcgttattatgtgcaggcggggcgcatggaca

SEQ ID NO: 152080 - DNA, 75 bp, synthetic construct
  source 1..75: mol_type = other DNA
gaataacagaaaatagctatattggtgcgcactggaatttcgacggttatgatgcagatgatgtcagcgacaaca

SEQ ID NO: 152081 - DNA, 75 bp, synthetic construct
  source 1..75: mol_type = other DNA
cacgcaaaataacactgatgatagtttgcgctgggacaaacagcagagctttgaaaataactatcttcgccagac

SEQ ID NO: 152082 - DNA, 75 bp, synthetic construct
  source 1..75: mol_type = other DNA
tttttcagggggagtggtatccggatgcagaaaattccgctactcgactggttttatgcaataaatcagtatgat

SEQ ID NO: 152083 - DNA, 75 bp, synthetic construct
  source 1..75: mol_type = other DNA
cgcctcactgatggagagccgttacctggcgctttcatttgagattgcagagctgcacccgacgctgaattttaa

SEQ ID NO: 152084 - DNA, 75 bp, synthetic construct
  source 1..75: mol_type = other DNA
aaatgtctacgctaccgtgtctgacagttatgatcgtaagaatcatgatcatctctcggcctttacaggtactta

SEQ ID NO: 152085 - DNA, 75 bp, synthetic construct
  source 1..75: mol_type = other DNA
cgggaattttacttttaactttctgccactcggtgcaatcgatggaatgcgtatcgggtcaacactcagttattt

SEQ ID NO: 152086 - DNA, 75 bp, synthetic construct
  source 1..75: mol_type = other DNA
ttgggatcgttttatctcaatagtggttcgcaatttattgataccagttcctttccgccaggcagctacagcgtg

SEQ ID NO: 152087 - DNA, 75 bp, synthetic construct
  source 1..75: mol_type = other DNA
caggttttcctcccgcagctgtgtttgttgccacctgtctggtcgcgggcttcggctcgttgctgatggggttat

SEQ ID NO: 152088 - DNA, 75 bp, synthetic construct
  source 1..75: mol_type = other DNA
tgatgtacgtgggtttgctgatgttaagtaacgtctcgaagctggatttcaacgattttattgacgcaatggctg

SEQ ID NO: 152089 - DNA, 75 bp, synthetic construct
  source 1..75: mol_type = other DNA
cagcagtcagtatggtcttcaacaggaacacctgctgtttactccgttgttcaaagcggataatgccagagtgtt

SEQ ID NO: 152090 - DNA, 75 bp, synthetic construct
  source 1..75: mol_type = other DNA
acgcgcattgatgcggagctgtcgatgatggcattgcgggaatatagagaaaagtttccggcatggcgggatgcg

SEQ ID NO: 152091 - DNA, 75 bp, synthetic construct
  source 1..75: mol_type = other DNA
cgagtgattgtggaatggcgcggctggcgtattttaccgctggtgtgctacgacttacgttttccggtgtggtcg

SEQ ID NO: 152092 - DNA, 75 bp, synthetic construct
  source 1..75: mol_type = other DNA
gggcgcggtctttctgatgggcgtcatcttcaccgccatttccgtaaccggtgtgcgtacctggatcttacgtaa

SEQ ID NO: 152093 - DNA, 75 bp, synthetic construct
  source 1..75: mol_type = other DNA
tcatcctgtcgaactattgccggttatcggtacgattgtcagtacctgggcgctgttccgctgtaaagggctcac

SEQ ID NO: 152094 - DNA, 75 bp, synthetic construct
  source 1..75: mol_type = other DNA
atcgtagacagcaaggcggataaaacaatgctctgctgggccaaggctctaccggctgcaaaaaagatggagtga

SEQ ID NO: 152095 - DNA, 75 bp, synthetic construct
  source 1..75: mol_type = other DNA
atgggcgttgggatggtcaatatggaaatgtctacgctactgtttcggacagttatgatcgccagaatcatgatc

SEQ ID NO: 152096 - DNA, 75 bp, synthetic construct
  source 1..75: mol_type = other DNA
atcaggcgtatgtggctggatgtaatcgcgtgggtagcgatggcaatggctgccactatcgcggcgacagtcggg

SEQ ID NO: 152097 - DNA, 75 bp, synthetic construct
  source 1..75: mol_type = other DNA
acacgcattgatgcggagctgtcgatgatggcattgcgggaatatagagaaaagtttccggcatggcaggatgcg

SEQ ID NO: 152098 - DNA, 75 bp, synthetic construct
  source 1..75: mol_type = other DNA
aaacattaattacgcagggcgctatttgccagacgatcgtcttctgcctggcaagctgccgcagtgaacagcacg

SEQ ID NO: 152099 - DNA, 75 bp, synthetic construct
  source 1..75: mol_type = other DNA
aatcacggagtccattctcaatacgccgccggataacaagccgtcgctggatgcaccatttatttctgaagggct

SEQ ID NO: 152100 - DNA, 75 bp, synthetic construct
  source 1..75: mol_type = other DNA
gcgatatcccggaagaccaggccttgctgaagaaagcacaggacattatcgctgaaaagatgaaggagaacgcgc

SEQ ID NO: 152101 - DNA, 75 bp, synthetic construct
  source 1..75: mol_type = other DNA
tggtcgcgtatcaatggcgcacggtagaacatctcaggcggtaggagttaacggtcatcttgtcgaataccgtta

SEQ ID NO: 152102 - DNA, 75 bp, synthetic construct
  source 1..75: mol_type = other DNA
cagatccaggggcagggtattggcagtattcagagttttaatccgcaggagagtatccccgggtataacgcgaac

SEQ ID NO: 152103 - DNA, 75 bp, synthetic construct
  source 1..75: mol_type = other DNA
gactgccggggaattaccgtggacgaactgcagcgcattaagttcgaccagctggatttcacaaacttctacgaa

SEQ ID NO: 152104 - DNA, 75 bp, synthetic construct
  source 1..75: mol_type = other DNA
gagcactgtgaaaacgtttgttatctcccatgaacagttccgtttctggcgggaaggaaagcgtattgcggtgag

SEQ ID NO: 152105 - DNA, 75 bp, synthetic construct
  source 1..75: mol_type = other DNA
gtataaaaataacaccatcagcaattttgcaaaaaaatgtcattcaacgaattaaagatgataaacttagggctt

SEQ ID NO: 152106 - DNA, 75 bp, synthetic construct
  source 1..75: mol_type = other DNA
aatatatcacgattgagaaatttatagacattctgaatgaagagaatttaccccaggagcatcatgttatggtgc

SEQ ID NO: 152107 - DNA, 75 bp, synthetic construct
  source 1..75: mol_type = other DNA
gaagcgcagactcaccagttactggcacaactggacagtggcaaactcgattgcgtgatccttgcgttggtgaaa

SEQ ID NO: 152108 - DNA, 75 bp, synthetic construct
  source 1..75: mol_type = other DNA
tttttaacccagtcgaacatcgaccacacggtaaatagctgcgcggttggcgaatacaaaagcgagttgagcggt

SEQ ID NO: 152109 - DNA, 75 bp, synthetic construct
  source 1..75: mol_type = other DNA
tcttcgctcattcccgggcattgccaaacgttctgatgtgaacggcgtatcgcgcggagttgagtacaacatggc

SEQ ID NO: 152110 - DNA, 75 bp, synthetic construct
  source 1..75: mol_type = other DNA
tacaaaaacttactacacattaccatatggatcacaaacaatttccagtaaatatgcttatgaaattttagagca

SEQ ID NO: 152111 - DNA, 75 bp, synthetic construct
  source 1..75: mol_type = other DNA
actggtgtatgcaaaccagatgtacatcgacaccggcgcagtgttctgcggaaatctgacgcttaccaaagtcca

SEQ ID NO: 152112 - DNA, 75 bp, synthetic construct
  source 1..75: mol_type = other DNA
caacagtgaagaaaaggcgctgggaaaggcaaaggacaacaaactgacggtgagtgtgggcgagttctgctcccg

SEQ ID NO: 152113 - DNA, 75 bp, synthetic construct
  source 1..75: mol_type = other DNA
accggtacagtggaaagtgcatcattgtctgtatacgccgcttttttcttcctgaactcccgttataccttcatg

SEQ ID NO: 152114 - DNA, 75 bp, synthetic construct
  source 1..75: mol_type = other DNA
ttgccgctgctatgggtctgtcttctgccgcctttgctgcagaaactgtgaccacacctgctccgactgcgacga

SEQ ID NO: 152115 - DNA, 75 bp, synthetic construct
  source 1..75: mol_type = other DNA
atggcaattcaggaaatcccactgacagcggataaccagcaattcagcatcatcctggcggggaccacctggcgg

SEQ ID NO: 152116 - DNA, 75 bp, synthetic construct
  source 1..75: mol_type = other DNA
tgcgatgacaacacacaggattatcccacgaaaactgatctgggcggtcgcagtcatttactggtatcaacggag

SEQ ID NO: 152117 - DNA, 75 bp, synthetic construct
  source 1..75: mol_type = other DNA
actgccggtgtggcttttacgtcatctcaccccgtccgggtcgggaatacaaaattcaaacgtcatacggcaatg

SEQ ID NO: 152118 - DNA, 75 bp, synthetic construct
  source 1..75: mol_type = other DNA
gccggttggctggcctctgtaagtggactgtccgcgttctgggcgagcgtaattactaccgtacccttctcggcg

SEQ ID NO: 152119 - DNA, 75 bp, synthetic construct
  source 1..75: mol_type = other DNA
tggagagttgtccgtttaataaaggggatggcgtgctgaaaggtactgagtgttcagagccgggggggacgaaaa

SEQ ID NO: 152120 - DNA, 75 bp, synthetic construct
  source 1..75: mol_type = other DNA
actcaggatgaaggtccgtgataaagaatgggttccacgggtggagtgggtggagagttgtccgtttaataaagc

SEQ ID NO: 152121 - DNA, 75 bp, synthetic construct
  source 1..75: mol_type = other DNA
gtgacacaggggcaggtactgaccggcagtggctgtactgctaacggtaactgtctttctggcgggaacggtgac

SEQ ID NO: 152122 - DNA, 75 bp, synthetic construct
  source 1..75: mol_type = other DNA
acgtgcggcgataagctggaatcggttaccggcaaattgcagttcgatatcagcagccagtacgacaagcaacag

SEQ ID NO: 152123 - DNA, 75 bp, synthetic construct
  source 1..75: mol_type = other DNA
aaatcaaaaggcacgccgtcccaggccggattgctggacgatacgcaaagtgccatcaatgtggtgcgccatcgc

SEQ ID NO: 152124 - DNA, 75 bp, synthetic construct
  source 1..75: mol_type = other DNA
ttctcaaaattctgtttattctctttgttgttgccttctgcgtttatttagtgccgcgcgtcgccatcaacttct

SEQ ID NO: 152125 - DNA, 75 bp, synthetic construct
  source 1..75: mol_type = other DNA
gttgatttgcggcatttccacgctgattccgcaatattttgtcgccatccatcttggcgcggaattacccgcttt

SEQ ID NO: 152126 - DNA, 75 bp, synthetic construct
  source 1..75: mol_type = other DNA
aattatcccgtcggatccagttttaacaccatcaccaaagatttaatcggtaacacctggaacattatcagcggt

SEQ ID NO: 152127 - DNA, 75 bp, synthetic construct
  source 1..75: mol_type = other DNA
ggcaccaaacagcacggcattatcgagttttgcctgctggtgttctctaacttagctgttgccagttcgttcttt

SEQ ID NO: 152128 - DNA, 75 bp, synthetic construct
  source 1..75: mol_type = other DNA
cccgtatatctttatggctttgccggtgtgtctggcgtcatttggtttccacggcaatattcccagcctgattat

SEQ ID NO: 152129 - DNA, 75 bp, synthetic construct
  source 1..75: mol_type = other DNA
aattcatagcatggaaagacctttgaatgatctgtcgcttcagaatactgacaatctactcaatagtattttcgg

SEQ ID NO: 152130 - DNA, 75 bp, synthetic construct
  source 1..75: mol_type = other DNA
aatggttcgtaaaagaatgccaggggaatgctcttggtgaaggtagaatcgtagttcaaacaacaacaaaaaagt

SEQ ID NO: 152131 - DNA, 75 bp, synthetic construct
  source 1..75: mol_type = other DNA
tttttaacccaatcaaacattgaccacacggtaaacagctgtgcggttggcgaatacaaaagcgagttgagcggc

SEQ ID NO: 152132 - DNA, 75 bp, synthetic construct
  source 1..75: mol_type = other DNA
tctctttggtattcaccgctgcactatcggcaatattctgggaaatgcccatacaaaatctgaaagccgcgatag

SEQ ID NO: 152133 - DNA, 75 bp, synthetic construct
  source 1..75: mol_type = other DNA
cctgatgtgcggtattagcacattgatacctcagtatctggtggctgttaatcttggcgcagagctcccggcttt

SEQ ID NO: 152134 - DNA, 75 bp, synthetic construct
  source 1..75: mol_type = other DNA
tatacggcgcaatcaaaggtttgtggccgattgtgattgtcatccttgctgccatttacagctataacctgatga

SEQ ID NO: 152135 - DNA, 75 bp, synthetic construct
  source 1..75: mol_type = other DNA
tcgccgctgcgcagtcgctatgagcaactggcagaggccatccgtgcaagaatggatggccatttcggtaaaacg

SEQ ID NO: 152136 - DNA, 75 bp, synthetic construct
  source 1..75: mol_type = other DNA
atggctgaactgaaaaaacgccatgaattctggctggcattactgattgtggtgctgtttgttggccttgcctgg

SEQ ID NO: 152137 - DNA, 75 bp, synthetic construct
  source 1..75: mol_type = other DNA
acgcgcattgatgcggagctgtcgatggtggcattgcgggaatatagagaaaagtttccggcatggcaggatgcg

SEQ ID NO: 152138 - DNA, 75 bp, synthetic construct
  source 1..75: mol_type = other DNA
gtcgggccttacctgctaccgcatattatcccgatgctgcaccagactttcccgaagctggaaatgtatctgcat

SEQ ID NO: 152139 - DNA, 75 bp, synthetic construct
  source 1..75: mol_type = other DNA
agcagggcgagaccatgtccggcccgttgcatattggtttgatccccacagttggaccttacttgttgccgcata

SEQ ID NO: 152140 - DNA, 75 bp, synthetic construct
  source 1..75: mol_type = other DNA
tcaccgctgcgtagccgttatgaacagctggcagaggccatccgcgcaaaaatggatggccatttcgataaagcg

SEQ ID NO: 152141 - DNA, 75 bp, synthetic construct
  source 1..75: mol_type = other DNA
gaagcggcagcttcgtcgctagcacaagatgacgtagtgaactggatgacagctaaggcgcagcagtgcaatgcg

SEQ ID NO: 152142 - DNA, 75 bp, synthetic construct
  source 1..75: mol_type = other DNA
tgatcttgccggtgcctggtttttctggggtgcctttatccttatcattgcctggttttcaatgcttcattccgg

SEQ ID NO: 152143 - DNA, 75 bp, synthetic construct
  source 1..75: mol_type = other DNA
cgattatctcctccggcggcaacgtcgattcactggtgaaatcgttcctcggcaccaaacaacatggcattatcg

SEQ ID NO: 152144 - DNA, 75 bp, synthetic construct
  source 1..75: mol_type = other DNA
ttactggcggcacgcgctattgagaatcaggcatatgtcgcgggatgtaaccgagtgggcagcgacggtaacggc

SEQ ID NO: 152145 - DNA, 75 bp, synthetic construct
  source 1..75: mol_type = other DNA
ctttttgctggttgagccggacggcacggtacatttctatgataagcgccatctgtttcgaatggcggatgagca

SEQ ID NO: 152146 - DNA, 75 bp, synthetic construct
  source 1..75: mol_type = other DNA
acgcgtatagacgctgaactttcgatggtggcgttacgggagtatcgcgaaaaattcccggcatggcaggatgcg

SEQ ID NO: 152147 - DNA, 75 bp, synthetic construct
  source 1..75: mol_type = other DNA
agcatgagcggtcccgcaatcatcctgacgccacgctgaaagaaaaaggctttgtgcaactcagtagcgcaaccg

SEQ ID NO: 152148 - DNA, 75 bp, synthetic construct
  source 1..75: mol_type = other DNA
cctgatatgcggggctggacaatcaaaggtaaacccgcaagtgggcgcgctattttgtctcaggagcaggacggc

SEQ ID NO: 152149 - DNA, 75 bp, synthetic construct
  source 1..75: mol_type = other DNA
caactctgcacacagcaatactcagggatacaatactgttattggcattgattttaatggagatgtaatcggttt

SEQ ID NO: 152150 - DNA, 75 bp, synthetic construct
  source 1..75: mol_type = other DNA
gttcagcaattgccacaggtgaaaaagaacagtggaatggaccttgcggctgcaaatgacgctgttgcttcctta

SEQ ID NO: 152151 - DNA, 75 bp, synthetic construct
  source 1..75: mol_type = other DNA
aatggtgttgcgacattatccagtgcttcatcatcgacacgcgggagtgccgcagtacaatttctactgtgttaa

SEQ ID NO: 152152 - DNA, 75 bp, synthetic construct
  source 1..75: mol_type = other DNA
ttccgtggccatccgataccgttccacccgctcacgccttaatgcaggggcagtcatttgataaatctgcatatc

SEQ ID NO: 152153 - DNA, 75 bp, synthetic construct
  source 1..75: mol_type = other DNA
cgccgggagaatataacgttaaggcgggatattatgggcgtaagccgaaggcgaagctgacgccggagctgatgg

SEQ ID NO: 152154 - DNA, 75 bp, synthetic construct
  source 1..75: mol_type = other DNA
acgcccctgcgcaccctgtacggcgtcattaccggctttaagcatctctcctcgtcacaggacgaagcccgctat

SEQ ID NO: 152155 - DNA, 75 bp, synthetic construct
  source 1..75: mol_type = other DNA
ccatttaccagaatctgacggtgccgcaaatcgtcgaaaaaatcctgcgcgagcggcaccagatgcgcggtcagg

SEQ ID NO: 152156 - DNA, 75 bp, synthetic construct
  source 1..75: mol_type = other DNA
aaggcagcctatgaccttgctatcgggaaatataccgcacaggacgccactacagcgcggaaaggacttgtccag

SEQ ID NO: 152157 - DNA, 75 bp, synthetic construct
  source 1..75: mol_type = other DNA
tatccagcactgccaccgtggcgcttaccgtggataacaccatggtgatggccacagtggattacgtgaatgaca

SEQ ID NO: 152158 - DNA, 75 bp, synthetic construct
  source 1..75: mol_type = other DNA
cgctgctgacccgcagccgccagaacgccatttaccagaaccagacggtgccgcaaatcgtcgaaaaaatcctgc

SEQ ID NO: 152159 - DNA, 75 bp, synthetic construct
  source 1..75: mol_type = other DNA
caatctgacagtacatgtcaggtaactgccaaagaataccgcgattcattctaccagtacgacaatgccacatac

SEQ ID NO: 152160 - DNA, 75 bp, synthetic construct
  source 1..75: mol_type = other DNA
agcatcgtatactggcgtccccacaattgcggttactgtggaaactggcggtaaactggcagcgcagtcagatcg

SEQ ID NO: 152161 - DNA, 75 bp, synthetic construct
  source 1..75: mol_type = other DNA
ttatgagtgggtcggcccgttcctggcctgcccggacggggaaacgctggacgcattcgaggtgaacatcaactt

SEQ ID NO: 152162 - DNA, 75 bp, synthetic construct
  source 1..75: mol_type = other DNA
atcctacgaaaatgcgcgtccagatgctgctgtgtctcggtgtcggtgatctgatttataccaatggcgatatca

SEQ ID NO: 152163 - DNA, 75 bp, synthetic construct
  source 1..75: mol_type = other DNA
attccagattaatgaagatttgctcaatttatgtaatgacttgcatatttacaaaaaagtgatatgtgagaatgc

SEQ ID NO: 152164 - DNA, 75 bp, synthetic construct
  source 1..75: mol_type = other DNA
gtaacaagattctcagttgatgatccaaccgtaatgacagttgaaatgttcgttgttatggggagagggcgtttt

SEQ ID NO: 152165 - DNA, 75 bp, synthetic construct
  source 1..75: mol_type = other DNA
cctccggtacctgctggactgtaaggccgaatggaatcaaattctggacagcttctgacagccagaaacggcgcg

SEQ ID NO: 152166 - DNA, 75 bp, synthetic construct
  source 1..75: mol_type = other DNA
taaagaaacagtgttcatcaaccagaaatacagggcagattttgcagtgcgccaacaacattctgggcgagcatt

SEQ ID NO: 152167 - DNA, 75 bp, synthetic construct
  source 1..75: mol_type = other DNA
gccagttaagcctgacaactcactgctgacacaccggataatcatgacagaccagcattatggtctgacttccga

SEQ ID NO: 152168 - DNA, 75 bp, synthetic construct
  source 1..75: mol_type = other DNA
ttaccctggcttacaacagcgccaccggcacgccgtttaccgggttaccggaaggcattcagcggttctcgctgg

SEQ ID NO: 152169 - DNA, 75 bp, synthetic construct
  source 1..75: mol_type = other DNA
catgttcctgtgcgtgggcgtcggtgacatggtgattaaccagtccgatatccggattggcaatacgccgatctc

SEQ ID NO: 152170 - DNA, 75 bp, synthetic construct
  source 1..75: mol_type = other DNA
gccaaagcgaacgctgcgaaacttggtgatcccatccgggaaatcttcggcaaatatcgggtctggcctgattac

SEQ ID NO: 152171 - DNA, 75 bp, synthetic construct
  source 1..75: mol_type = other DNA
cgctgactgcaaccatcgacgcatcaagcaccacgccttctatggtgttccagcaattcgatcagatgcatacag

SEQ ID NO: 152172 - DNA, 75 bp, synthetic construct
  source 1..75: mol_type = other DNA
cgttcaaggcaaacgtaaaccaggcgctaccgttgaagagactctgacagatatctacgcggaatatgttgctaa

SEQ ID NO: 152173 - DNA, 75 bp, synthetic construct
  source 1..75: mol_type = other DNA
gtaccaaccgccttatgcgtctgcgcagccgcgtcaaccggtccagcagccgcctgaagcgcaggtaccgccgca

SEQ ID NO: 152174 - DNA, 75 bp, synthetic construct
  source 1..75: mol_type = other DNA
aatgacaatgcgaatggtcgggtaccttctgcccgtaaggtgaatggtaaggcgctttcagcggatataacactg

SEQ ID NO: 152175 - DNA, 75 bp, synthetic construct
  source 1..75: mol_type = other DNA
atgccgggataacacagatttactatgtgtataacacatccagaagctatacccgcagccagtactcaacgggtg

SEQ ID NO: 152176 - DNA, 75 bp, synthetic construct
  source 1..75: mol_type = other DNA
atgaccgtcgataaacgcaccaatcgccttttgctacgagataacaaaacggcgttaagcgcgcttgaacagtgg

SEQ ID NO: 152177 - DNA, 75 bp, synthetic construct
  source 1..75: mol_type = other DNA
ttgaatccctgccggatggcacgtttacccgcgagcaggctcagattgtcgcagcgcagtatcagaatgtggcga

SEQ ID NO: 152178 - DNA, 75 bp, synthetic construct
  source 1..75: mol_type = other DNA
aaaaagtttgcgggaattgggggtgaaatggacgctggccgatgcgcaacaaactggcggcgttgggcaagtgac

SEQ ID NO: 152179 - DNA, 75 bp, synthetic construct
  source 1..75: mol_type = other DNA
gttcttcggctaagagcgaaacaggtgagcaatggatgggggctgctggcactaaactaggattggataaacctt

SEQ ID NO: 152180 - DNA, 75 bp, synthetic construct
  source 1..75: mol_type = other DNA
tggaccagccgtaaagaacgatcttttatgttccgcgatcggccattaaaacgaatgaagtcaaaacgtgacgac

SEQ ID NO: 152181 - DNA, 75 bp, synthetic construct
  source 1..75: mol_type = other DNA
cgctggcgctgctggaattttgaacctgatgccggaaaacagctaaatccgtatctcgccagtgaagggctccac

SEQ ID NO: 152182 - DNA, 75 bp, synthetic construct
  source 1..75: mol_type = other DNA
ttcagtcactgcctgacggcacattcacccgcgaacaggctgaagtggtcgcagcgcagtatcagaatgtcgcca

SEQ ID NO: 152183 - DNA, 75 bp, synthetic construct
  source 1..75: mol_type = other DNA
gaagtgcgtcttgaaccccgtatggcgctgctggcccgcagccgccagaacgccatttaccagaaccagacggtg

SEQ ID NO: 152184 - DNA, 75 bp, synthetic construct
  source 1..75: mol_type = other DNA
actaacattgatgttgttaaactggtagatccgctacaccttgcacatatgacttctgatgcggttgcgattccg

SEQ ID NO: 152185 - DNA, 75 bp, synthetic construct
  source 1..75: mol_type = other DNA
atgattctaggtaatgattacgttgatttagctccgcttttccagacacacagcacgcgtaactttctgctctct

SEQ ID NO: 152186 - DNA, 75 bp, synthetic construct
  source 1..75: mol_type = other DNA
acttttacaggccacgaacagctcagctcacccttccgctacgacattgagtttaccagtatcgataaagccatc

SEQ ID NO: 152187 - DNA, 75 bp, synthetic construct
  source 1..75: mol_type = other DNA
aactaatatcctctgataaggaggaggtcgttaatattagtgtgtttgaacccgatgagtttttagacgatgaca

SEQ ID NO: 152188 - DNA, 75 bp, synthetic construct
  source 1..75: mol_type = other DNA
atgggtattcagaatttcgatcattcacaccacaagctcaaaatccgtggcctgcaaagttcggtggatgtgctg

SEQ ID NO: 152189 - DNA, 75 bp, synthetic construct
  source 1..75: mol_type = other DNA
cctgtagacgatgccaacgtggtgtttaatgtgcgttccctgctaccaggtgtaactactttcaccattccagga

SEQ ID NO: 152190 - DNA, 75 bp, synthetic construct
  source 1..75: mol_type = other DNA
cgtcgatttaaccccagtgtttttaaagatacttatcaatatggttatacaagctcaggtcaaaatacctggggt

SEQ ID NO: 152191 - DNA, 75 bp, synthetic construct
  source 1..75: mol_type = other DNA
catggacacaccatcaccgttaacgctgctggtaacgcggaaaacactgtcaaaaacatcgcatttaactacatt

SEQ ID NO: 152192 - DNA, 75 bp, synthetic construct
  source 1..75: mol_type = other DNA
ggcaagacctgatcaaaccgcaggacgtgcaaggcaaacgtaaaccaggtactgattttcaggaaacactcactg

SEQ ID NO: 152193 - DNA, 75 bp, synthetic construct
  source 1..75: mol_type = other DNA
atgattctaggtaatgattacgttgatttagctccgcttttccaggcacatagcactagaaactatctactgtct

SEQ ID NO: 152194 - DNA, 75 bp, synthetic construct
  source 1..75: mol_type = other DNA
atgattctaggtaatgattacgttgatttagctccgcttttccaggctcataacactagaaactatctgctttct

SEQ ID NO: 152195 - DNA, 75 bp, synthetic construct
  source 1..75: mol_type = other DNA
gcaggctgtctggaaggcggagacatggatatagcctatctgtccgagattgacccgacctgggtggacagcagc

SEQ ID NO: 152196 - DNA, 75 bp, synthetic construct
  source 1..75: mol_type = other DNA
ctacaaaaaggccgaatccgactgaaattacacatcagccagaacgtgcctgggcaggtgctacagcaggccgat

SEQ ID NO: 152197 - DNA, 75 bp, synthetic construct
  source 1..75: mol_type = other DNA
aagcaggctgatttcgacacgataaagcagccactccaccttacctccgacatgctggcctcagtgattgctgag

SEQ ID NO: 152198 - DNA, 75 bp, synthetic construct
  source 1..75: mol_type = other DNA
tacatggcgagacttcatagtctgctttggttcgtcgacgattgaatatttctccctgactggtgcaaccactgt

SEQ ID NO: 152199 - DNA, 75 bp, synthetic construct
  source 1..75: mol_type = other DNA
gacggacgtcacacgctcaccgggatgcatggtgaacctgggcttcagtctgccggagttcgggaaaacggcaca

SEQ ID NO: 152200 - DNA, 75 bp, synthetic construct
  source 1..75: mol_type = other DNA
atgacgatgtgtaccgcgctatcgacttcatttacgaaggcaatcagataacgtgcggcgataagctggaatcgg

SEQ ID NO: 152201 - DNA, 75 bp, synthetic construct
  source 1..75: mol_type = other DNA
atcagacttgtgctaaagatccgcagatgctgttaatcactgcaattgatgacactatgcgtgccattggcaaaa

SEQ ID NO: 152202 - DNA, 75 bp, synthetic construct
  source 1..75: mol_type = other DNA
gcacggtacagggattggtatcggcctgttcctgctgctgattgccgccaatggcgttggcctggtgattaaaaa

SEQ ID NO: 152203 - DNA, 75 bp, synthetic construct
  source 1..75: mol_type = other DNA
acacggcacggggattggtatcggcctgttcttgctgctgattgccgctaatggtgtcggtctggtgattaaaaa

SEQ ID NO: 152204 - DNA, 75 bp, synthetic construct
  source 1..75: mol_type = other DNA
gagatcaactgtcaccacaactatgtgcaaaaagaacagcactttggtgaagagatctacgtgacgcgtaaaggc

SEQ ID NO: 152205 - DNA, 75 bp, synthetic construct
  source 1..75: mol_type = other DNA
tcacgaacggtgcaatagtggatcacttttcatccgtcgttgacactgtcagaaatggagcttgccgattattgc

SEQ ID NO: 152206 - DNA, 75 bp, synthetic construct
  source 1..75: mol_type = other DNA
gcgaactacccggtcctggccccgagactgaactcattaaaagagattaaagggcgttctctcatgcttcatgct

SEQ ID NO: 152207 - DNA, 75 bp, synthetic construct
  source 1..75: mol_type = other DNA
tggatattctgttctggtgtgccggttcgcagggcagcatgtacccgttcaacggctgggtgagcaatgagtcca

SEQ ID NO: 152208 - DNA, 75 bp, synthetic construct
  source 1..75: mol_type = other DNA
gtctggttttatgggtaaaaataagctggcagacgtttgtgaatggctgcatttactggtggtgtaccacgctgg

SEQ ID NO: 152209 - DNA, 75 bp, synthetic construct
  source 1..75: mol_type = other DNA
gtgatgcgctgggaagccgggaaaaatccccctaacacaaagaaaaacttcggttacctgatgtggcgtaaacgt

SEQ ID NO: 152210 - DNA, 75 bp, synthetic construct
  source 1..75: mol_type = other DNA
atgctggtggcatttgtgactaatccgggcgaaattctcagccgtgaacgtctgctgcgtatgctctctgcgcgt

SEQ ID NO: 152211 - DNA, 75 bp, synthetic construct
  source 1..75: mol_type = other DNA
cgcagtgtgatgcgctgggagacgggaaaaaatccgcccaacactaagaaaaacttcggttacctgatgtggcgt

SEQ ID NO: 152212 - DNA, 75 bp, synthetic construct
  source 1..75: mol_type = other DNA
aatacaccagaaggatgtgttattaaagaatatcccgatggccgtaaggagctggtcagttttatgacaggtact

SEQ ID NO: 152213 - DNA, 75 bp, synthetic construct
  source 1..75: mol_type = other DNA
cagcagccagtatgacaagcagcaggaacacctgctgtttactccactcttcaaagcagataacgccagatgctt

SEQ ID NO: 152214 - DNA, 75 bp, synthetic construct
  source 1..75: mol_type = other DNA
ctgaccactattctcaacccggaggcggtcatttttgccaacccgatagcacagggcgcctgtgcggcggacgcg

SEQ ID NO: 152215 - DNA, 75 bp, synthetic construct
  source 1..75: mol_type = other DNA
tgtgaggggcgtttcgtcaacccgatcaccgatatctgctggagctgtattttcccgctgtcgctgggcagcaca

SEQ ID NO: 152216 - DNA, 75 bp, synthetic construct
  source 1..75: mol_type = other DNA
gtccgttgcagtcctccctgctggtcagtgaacgcatggcgttcaaactacaccgtcagggcatgattatggaaa

SEQ ID NO: 152217 - DNA, 75 bp, synthetic construct
  source 1..75: mol_type = other DNA
gcatcggcgtggatgtggctgtctgttatgaatatccgtcgcccatacttcccaaagagcgctggcgttatcaga

SEQ ID NO: 152218 - DNA, 75 bp, synthetic construct
  source 1..75: mol_type = other DNA
caggtggggaaaggagatcagccggacacgcctaatcccggcagcccgatacagtattgcccggccccaccccca

SEQ ID NO: 152219 - DNA, 75 bp, synthetic construct
  source 1..75: mol_type = other DNA
gacgacgatcgccgttctcaggacgatgtacagaaactgactgatgctgcaatcaagaaaattgaagcggcgctg

SEQ ID NO: 152220 - DNA, 75 bp, synthetic construct
  source 1..75: mol_type = other DNA
ccggccgttgaaaaagcgattatggcgtccgatctcggcctgaacccgaactctgcgggtagcgacatccgtgtt

SEQ ID NO: 152221 - DNA, 75 bp, synthetic construct
  source 1..75: mol_type = other DNA
tctcaggacgatgtacagaaactgactgatgctgcaatcaagaaaattgaagcggcgctggcagacaaagaagca

SEQ ID NO: 152222 - DNA, 75 bp, synthetic construct
  source 1..75: mol_type = other DNA
cgccaaacgtatgggtgcgaaaaaggtgatggtattgatccagcgtcgcgcttatgtggatctggttcaggggag

SEQ ID NO: 152223 - DNA, 75 bp, synthetic construct
  source 1..75: mol_type = other DNA
aaattcagttcttttttaattgcctttaaagatggtgtcatcggagggatactgtcaggtattaccacaacgctg

SEQ ID NO: 152224 - DNA, 75 bp, synthetic construct
  source 1..75: mol_type = other DNA
gccacggaggctgagcgacagcggtatgaaggtcgtggcgactatgattctcatcattaccacagccatgagaac

SEQ ID NO: 152225 - DNA, 75 bp, synthetic construct
  source 1..75: mol_type = other DNA
gttcaactcaacggaagttgggggaacgtcgagcggcagcggcctcgatatggctcagactgcccctgaagccag

SEQ ID NO: 152226 - DNA, 75 bp, synthetic construct
  source 1..75: mol_type = other DNA
ctgtccattccgccaggcgagtgggctacttgcgtgatccaccctgaaagtgatgtccggctttatcctgtgccc

SEQ ID NO: 152227 - DNA, 75 bp, synthetic construct
  source 1..75: mol_type = other DNA
ggctggatacggatgatgatgacgataatgacgagaacgataacgcactgccgcccagctgggtcgctggcgccg

SEQ ID NO: 152228 - DNA, 75 bp, synthetic construct
  source 1..75: mol_type = other DNA
tctgaagtggtggacgctttcgaggtgaatttctcctttccgtctggcatttgcggattcgacagcaaaggcaaa

SEQ ID NO: 152229 - DNA, 75 bp, synthetic construct
  source 1..75: mol_type = other DNA
gtcgacgccggaatgaacaggggagcgataatgcgcgtgacagcatgtactggcaggcgctgcggggcaggctgc

SEQ ID NO: 152230 - DNA, 75 bp, synthetic construct
  source 1..75: mol_type = other DNA
cattgcggcgctcagtacgctggaggctacctactggacgccaaggggagaatattttgatcaccaggcaagcag

SEQ ID NO: 152231 - DNA, 75 bp, synthetic construct
  source 1..75: mol_type = other DNA
gctgggtggacaattaaccatcattggtattgtatttccattagttgtcggtctgatcagcgtcctttttcagaa

SEQ ID NO: 152232 - DNA, 75 bp, synthetic construct
  source 1..75: mol_type = other DNA
tgaacagtctggttgatcgtgagctcagacataatttacgtatgaattctgaatatcgaaaataccgctggaatg

SEQ ID NO: 152233 - DNA, 75 bp, synthetic construct
  source 1..75: mol_type = other DNA
gcgtggttaacgcattcagccgccccctctcttgattctatccgcgaaaatccaaacaacggacgctccatttca

SEQ ID NO: 152234 - DNA, 75 bp, synthetic construct
  source 1..75: mol_type = other DNA
tgcgcaacttaccgcacggcgtggcacacggcacggggattggtatcggcctgttcttgctgctgattgccgcta

SEQ ID NO: 152235 - DNA, 75 bp, synthetic construct
  source 1..75: mol_type = other DNA
aacgtggcgaaaatcgactttgctgattttgttgatgcgatggcgggtctggttacggcggtattcatcgtgctg

SEQ ID NO: 152236 - DNA, 75 bp, synthetic construct
  source 1..75: mol_type = other DNA
taaaagcggagaaacgctggcgttgggcggcatctttacccgtaaaaataaatcgggtcaggatagcgtaccgct

SEQ ID NO: 152237 - DNA, 75 bp, synthetic construct
  source 1..75: mol_type = other DNA
atgcgtacaacccaacaattcagcattacattaaccaacgaaatggctgacatggtgcgcgcccgtgtggcttcc

SEQ ID NO: 152238 - DNA, 75 bp, synthetic construct
  source 1..75: mol_type = other DNA
tgactatcgaccttgttgctaaggttggtggttttgtctctggcctaagccagtctgagcgagcatctcaaaaat

SEQ ID NO: 152239 - DNA, 75 bp, synthetic construct
  source 1..75: mol_type = other DNA
gccaggttggtggcacgctggcggaaaacctggtaggcgaaaataacgatattaccgttgtcgataccaatggtg

SEQ ID NO: 152240 - DNA, 75 bp, synthetic construct
  source 1..75: mol_type = other DNA
atgcggttgtggtgcggcctgcaggctgcaccatcacttattcaggtcagagatgatgaaacgcgccttatcgtt

SEQ ID NO: 152241 - DNA, 75 bp, synthetic construct
  source 1..75: mol_type = other DNA
gttgtgctggcactgcgacaacccaacaattcagtattacattaactaacgagatggctgacatggtgcgctccc

SEQ ID NO: 152242 - DNA, 75 bp, synthetic construct
  source 1..75: mol_type = other DNA
gaatgaacgcgacaaagcaatggaagcgtggttaatacactcagccgcgccgccactcgacgctattcgtgagaa

SEQ ID NO: 152243 - DNA, 75 bp, synthetic construct
  source 1..75: mol_type = other DNA
aatccctgatcactgtgtctcagggctggtttttacgccggacgcaggtggtgtcgctgtgccggtattttaccg

SEQ ID NO: 152244 - DNA, 75 bp, synthetic construct
  source 1..75: mol_type = other DNA
catgtcaaaaatacagggtttatctcttttgacggtaaaactttcgtctattacctctatccggtaactcacaat

SEQ ID NO: 152245 - DNA, 75 bp, synthetic construct
  source 1..75: mol_type = other DNA
ctatagcggattcactctcatcccgtcggcgcaatccccgcgtctgctggaactcaccttcaccgaacagacgac

SEQ ID NO: 152246 - DNA, 75 bp, synthetic construct
  source 1..75: mol_type = other DNA
aaagcaaaaactcctttaatatcaggacacaaaatgtcttggcaaaggtcgaagaggagagaattagtgcaaaag

SEQ ID NO: 152247 - DNA, 75 bp, synthetic construct
  source 1..75: mol_type = other DNA
tttgacgtcgataaattcaaaaacattaacgataccttcgggcatttgctgggcgatgaagtgttgatgaaggta

SEQ ID NO: 152248 - DNA, 75 bp, synthetic construct
  source 1..75: mol_type = other DNA
cgcagtttgatatttttgcttgggctggagcgattttcgttactgtcaaagtcactggcaatggatagcgagaac

SEQ ID NO: 152249 - DNA, 75 bp, synthetic construct
  source 1..75: mol_type = other DNA
ttagaacagcgccgtttgttaatccgcgttcgaaatatcgacgatctggaaaagatttataaacttctcgtgtct

SEQ ID NO: 152250 - DNA, 75 bp, synthetic construct
  source 1..75: mol_type = other DNA
gccgaattaaagcgatgaacttatcggaagatggcgtactggttatgcaattagaacagcgccgtttgttaatcc

SEQ ID NO: 152251 - DNA, 75 bp, synthetic construct
  source 1..75: mol_type = other DNA
ctgcggccctgacaggtctgttccagccgtacagcgtgggtaaattcaacgcgtcagcagcggtgggtggttaca

SEQ ID NO: 152252 - DNA, 75 bp, synthetic construct
  source 1..75: mol_type = other DNA
ttaaaaacacttgaagaaaaaaacaatttatacagaagccaatataattcacagaaagcaaactatgttgaaaga

SEQ ID NO: 152253 - DNA, 75 bp, synthetic construct
  source 1..75: mol_type = other DNA
agaaaaaatagaaataaagctatcagggatattccagaacaaaatagagttaaaaataaattaccagaagataaa

SEQ ID NO: 152254 - DNA, 75 bp, synthetic construct
  source 1..75: mol_type = other DNA
gcaagggagcgctcagttctgcacacccgttgaatgtcggcgggattggcgaaaccggttcactggcggcgaatc

SEQ ID NO: 152255 - DNA, 75 bp, synthetic construct
  source 1..75: mol_type = other DNA
aggcaaaattctcgacgatctgtgtgcgaatcagctgcaaccgctgctgttgaagaccctgttaaaccgcgctga

SEQ ID NO: 152256 - DNA, 75 bp, synthetic construct
  source 1..75: mol_type = other DNA
gttggttaccgtttcaacgagcagaccgcagcgaaagcgggtattgcagcgagtgatggcgatgtgtcctacaac

SEQ ID NO: 152257 - DNA, 75 bp, synthetic construct
  source 1..75: mol_type = other DNA
gaaaaagtctcgtgaatatacagactccagaacgacagttggtgtgaaccctgacggaaaacttacccgtgcaga

SEQ ID NO: 152258 - DNA, 75 bp, synthetic construct
  source 1..75: mol_type = other DNA
accacaaaccgttctactttactggctttggtcgtcatgaagatgcggacttgcgtggcaaaggattcgataacg

SEQ ID NO: 152259 - DNA, 75 bp, synthetic construct
  source 1..75: mol_type = other DNA
tgatgcggatcagcaggtggttgcaactggacaaggtaccagcgggactttgcaagtggtgaatccacacctctg

SEQ ID NO: 152260 - DNA, 75 bp, synthetic construct
  source 1..75: mol_type = other DNA
atggtgattaccgacgaaaacggcaagaaaaagcagtcttacttccatgatttctttaactatgccgggatccat

SEQ ID NO: 152261 - DNA, 75 bp, synthetic construct
  source 1..75: mol_type = other DNA
cgtatgccataggtgaaggtaaatgggggaatacctatgaagttgtaaagacaggcggtaatggtaacttcagat

SEQ ID NO: 152262 - DNA, 75 bp, synthetic construct
  source 1..75: mol_type = other DNA
agcgttgaccgccgggttactaaaaatacacaggctattcagtccaatactcgccagttgcaggagcataatgca

SEQ ID NO: 152263 - DNA, 75 bp, synthetic construct
  source 1..75: mol_type = other DNA
tctcgtgaatatacagactccagaacgacagttggtgttaactccgacggaaccctgaccagcgctgatggcgct

SEQ ID NO: 152264 - DNA, 75 bp, synthetic construct
  source 1..75: mol_type = other DNA
ctggctcaggatacgaatacccgccttgtagtcgaagcgaaaaagtctcgtgaatatacagactccagaacgaca

SEQ ID NO: 152265 - DNA, 75 bp, synthetic construct
  source 1..75: mol_type = other DNA
cagaatgctgctctggctggtctttttcagccgtatagtgtgggtaaattgaatgccacagcggcgatggggggg

SEQ ID NO: 152266 - DNA, 75 bp, synthetic construct
  source 1..75: mol_type = other DNA
tgttgtgaataaagaacactcaataagatataaggtgcatgagcctgtgttgaaggattttgcccgaatggcaga

SEQ ID NO: 152267 - DNA, 75 bp, synthetic construct
  source 1..75: mol_type = other DNA
tatctgtattcccggggaatgctcctgaaatggagtgggctgagtgtggcagatgaagacaataaaagagcggaa

SEQ ID NO: 152268 - DNA, 75 bp, synthetic construct
  source 1..75: mol_type = other DNA
gacagaggccagattgttaactgactttacacaggcacctcagaaaggtaacccgtcgtggcttgccagccgggc

SEQ ID NO: 152269 - DNA, 75 bp, synthetic construct
  source 1..75: mol_type = other DNA
aaaaacaatccattgaagtacttaaacagagtctctcccggcataacgcaattcttaatgatctgaatactatca

SEQ ID NO: 152270 - DNA, 75 bp, synthetic construct
  source 1..75: mol_type = other DNA
atgttgaaatcccccctgttctggaaaatgaccaccctgtttggtgcagtattgctgttgttgattccgataatg

SEQ ID NO: 152271 - DNA, 75 bp, synthetic construct
  source 1..75: mol_type = other DNA
aaatgaccactttgtttggcacggtgttgctgttgttaattccattaatgttgattcggcaggtgattgtcgaac

SEQ ID NO: 152272 - DNA, 75 bp, synthetic construct
  source 1..75: mol_type = other DNA
caatgataccggctgggaaaacttcccggcgtttagcgtcgcagtgacgacgccagccgatcaataccaattaac

SEQ ID NO: 152273 - DNA, 75 bp, synthetic construct
  source 1..75: mol_type = other DNA
gcggttatctcattactactcctgttttcctcatcgtcattatgacgttgatgggctacaggcgatgggtactca

SEQ ID NO: 152274 - DNA, 75 bp, synthetic construct
  source 1..75: mol_type = other DNA
gggagattctccgccgtgaaaaaacctgtgatctgcctgttcctgctgacattgctggtgggctgctcgaatacg

SEQ ID NO: 152275 - DNA, 75 bp, synthetic construct
  source 1..75: mol_type = other DNA
tgtgctctggattaagccgctgctggccgtgattgaaaagggcaataacaatttcgctggaattcgtcaaataga

SEQ ID NO: 152276 - DNA, 75 bp, synthetic construct
  source 1..75: mol_type = other DNA
aaacgctgagacgtcaggagcaggcctctgccagagttgtggacttttatcgtcttcagttcagggtggcaagaa

SEQ ID NO: 152277 - DNA, 75 bp, synthetic construct
  source 1..75: mol_type = other DNA
tggtgtcagtgaaaaggccgcgcagatagctgcagctaccggacgactggactctgttgcccgaatgattgatga

SEQ ID NO: 152278 - DNA, 75 bp, synthetic construct
  source 1..75: mol_type = other DNA
tcgtcacagcaacaggcagtaaactcctttcccagagtcaccgctatgactacgactctgaagatattttgcccg

SEQ ID NO: 152279 - DNA, 75 bp, synthetic construct
  source 1..75: mol_type = other DNA
ttcagcacgtctggacagccagcagcgccagattaatgaaaaccacaaggaaatgaagcgtgcagcagcacagtc

SEQ ID NO: 152280 - DNA, 75 bp, synthetic construct
  source 1..75: mol_type = other DNA
cgtcatcatcgtcgcgtaataccaccggcactgggaatgacattcagaaagctgctgatacctacaataatggca

SEQ ID NO: 152281 - DNA, 75 bp, synthetic construct
  source 1..75: mol_type = other DNA
ggaatactcctaagtctgaagatatccctaaaaaggctaatattgtcactcgtgttgtaaatgcatccctggata

SEQ ID NO: 152282 - DNA, 75 bp, synthetic construct
  source 1..75: mol_type = other DNA
tcagcgtcgaagatggggagaatgggaaggtttctctgggtagcgatgcgaaagcctctggtgagttctcagtag

SEQ ID NO: 152283 - DNA, 75 bp, synthetic construct
  source 1..75: mol_type = other DNA
cggtgaaaggatatattgacgcagcatctgaagcagcccgtacagttgcgcttaaacctgcgctgggtaaaggtg

SEQ ID NO: 152284 - DNA, 75 bp, synthetic construct
  source 1..75: mol_type = other DNA
cgccagattaatgaaaaccacaaggaaatgaagcgtgcagcagcacagtctgcggccctgacaggtctgttccag

SEQ ID NO: 152285 - DNA, 75 bp, synthetic construct
  source 1..75: mol_type = other DNA
taaactcctttcccagagtcaccgctacgactatgactacgactctgaagatattttgcccggtattcgtggtga

SEQ ID NO: 152286 - DNA, 75 bp, synthetic construct
  source 1..75: mol_type = other DNA
ggccggtcgtcacagcgacaggcagtaaactcctttcccagagtcaccgctacgactatgactacgactctgaag

SEQ ID NO: 152287 - DNA, 75 bp, synthetic construct
  source 1..75: mol_type = other DNA
tggcaaagtagctggtttgctaataatctcggtgagcgttttgcttcaggcaatgataccggctgggaaaacttc

SEQ ID NO: 152288 - DNA, 75 bp, synthetic construct
  source 1..75: mol_type = other DNA
cagaagaatattatacatttggtaaacagtcggatggcacacaatatcgcttgtccagaaatgacggtggacata

SEQ ID NO: 152289 - DNA, 75 bp, synthetic construct
  source 1..75: mol_type = other DNA
tgaggtacttgaacagagtctctcccggcataacgcaattcttaatgatcttaacaccatcagtattcacgaaac

SEQ ID NO: 152290 - DNA, 75 bp, synthetic construct
  source 1..75: mol_type = other DNA
aaggccgcgcagatagctgcagctaccggacgactggactctgttgcccgaatgattgatgaaaccggacgatta

SEQ ID NO: 152291 - DNA, 75 bp, synthetic construct
  source 1..75: mol_type = other DNA
gctagatgcagcgttatgtcatggtgatgtgttgctacaaatttgcgccaacacccaggatacggtgatccatgc

SEQ ID NO: 152292 - DNA, 75 bp, synthetic construct
  source 1..75: mol_type = other DNA
gctttcaccggatgcacgcaatgagaaacagccgttttatggtgagcatcaggcagggatcctgacgccacaaca

SEQ ID NO: 152293 - DNA, 75 bp, synthetic construct
  source 1..75: mol_type = other DNA
aggagccagcgtggacaatcggtggcagctatcaggcagtacgcttgattcagtttcgagtggaattttgggaca

SEQ ID NO: 152294 - DNA, 75 bp, synthetic construct
  source 1..75: mol_type = other DNA
aaatccgcgcctgccaccactcgattccggcattcttggcggctacattgcgcccgataatctcaccatcacgtt

SEQ ID NO: 152295 - DNA, 75 bp, synthetic construct
  source 1..75: mol_type = other DNA
aggagcctgcgtggacaatcggtggcagctatcaggcagtacgcttgattcagtttcgcgttgagttttgggacc

SEQ ID NO: 152296 - DNA, 75 bp, synthetic construct
  source 1..75: mol_type = other DNA
gctggatgccacgctgtgtcatggcgatgtgttgctacagatttgcgccaatactcaggacacggttatccatgc

SEQ ID NO: 152297 - DNA, 75 bp, synthetic construct
  source 1..75: mol_type = other DNA
gagatgaaaatcagcgtccgctcgcttagccgtgaaacccggcaacttcttctgacccgtattcctgctctggca

SEQ ID NO: 152298 - DNA, 75 bp, synthetic construct
  source 1..75: mol_type = other DNA
cgctaacgtgatccctgatagcgctgaaatgaaaatcagcgtccgctccctgagtcgtgaaacccgacaacttct

SEQ ID NO: 152299 - DNA, 75 bp, synthetic construct
  source 1..75: mol_type = other DNA
aggtggcgtgtaaaacgtttggtgaagatcgggccgagtttggcatcaagcctctgatggcagtgaagatttctc

SEQ ID NO: 152300 - DNA, 75 bp, synthetic construct
  source 1..75: mol_type = other DNA
ttagtattttctttaccattgcgacccgtttggtttatcctcttttccacaaaacaccgtataaagtatacaagg

SEQ ID NO: 152301 - DNA, 75 bp, synthetic construct
  source 1..75: mol_type = other DNA
cctctgatgggcagtgaagacttctctttcatgctggaggcccagccaaaaggcgctttcctgttgttcggtaat

SEQ ID NO: 152302 - DNA, 75 bp, synthetic construct
  source 1..75: mol_type = other DNA
ctacggctgatgtgatgcatgttaacggcactccggtgttagtgaatgatgaggcgatggcgagatttgcctgcc

SEQ ID NO: 152303 - DNA, 75 bp, synthetic construct
  source 1..75: mol_type = other DNA
gaagtcgttccggaggttgaagcatggctgagtgttaaggcgtcgccatggggaatatatctgacttctgagtca

SEQ ID NO: 152304 - DNA, 75 bp, synthetic construct
  source 1..75: mol_type = other DNA
tggtgcataaccccggttacgactttaacgatgcaagcctggtcccggcaagcagctactggggcgcactggttg

SEQ ID NO: 152305 - DNA, 75 bp, synthetic construct
  source 1..75: mol_type = other DNA
ccgcagatgccgaaaaagttgcagaagatgacgcgtttccctaacgactcgcttgatgcagcgttatgtcatggt

SEQ ID NO: 152306 - DNA, 75 bp, synthetic construct
  source 1..75: mol_type = other DNA
tttagcgagtggctggcgctgtttaaacatcggacaacctgggggatgattttaggtttcgctggtgtcaactat

SEQ ID NO: 152307 - DNA, 75 bp, synthetic construct
  source 1..75: mol_type = other DNA
atgcttaactatcatgacaatacgcgttctatgcaggcaatccgcaccaatacagcagtggtcgatagctttcct

SEQ ID NO: 152308 - DNA, 75 bp, synthetic construct
  source 1..75: mol_type = other DNA
tggtatgaacaactcagtaatcaggcatatccgggacatattcgggtacatgaacttgcacaacaggaactggga

SEQ ID NO: 152309 - DNA, 75 bp, synthetic construct
  source 1..75: mol_type = other DNA
gatatttggtcgtgataagcaaaccggtgcgccgctgggcatgcagcatgagcatgatgttcccgattacgctag

SEQ ID NO: 152310 - DNA, 75 bp, synthetic construct
  source 1..75: mol_type = other DNA
cagctaccaggccgtgcgtttaattcagtttcgggtggagttttgggacagaacaccactgaaagagcagcagac

SEQ ID NO: 152311 - DNA, 75 bp, synthetic construct
  source 1..75: mol_type = other DNA
ccagaatgataagttgatgcaaaaagtggtgtgggtgacggcagatcagcaggagcctgcgtggacaatcggtgg

SEQ ID NO: 152312 - DNA, 75 bp, synthetic construct
  source 1..75: mol_type = other DNA
gtttgatgagcggtttggccttgcaccgcagatgccgaaaaagttgcagaagatgacgcgtttccctaacgactc

SEQ ID NO: 152313 - DNA, 75 bp, synthetic construct
  source 1..75: mol_type = other DNA
aacgaagcgcagcctttttatggcgagcatcaggcgggtattctgacaccgcagcaggctgcaatgatgctggta

SEQ ID NO: 152314 - DNA, 75 bp, synthetic construct
  source 1..75: mol_type = other DNA
tgaatgaaccgtcacgccgacgtttactgaaagggattggcgcgctggcgctggcgggaagttgtccggtcgctc

SEQ ID NO: 152315 - DNA, 75 bp, synthetic construct
  source 1..75: mol_type = other DNA
ctaaccttggtgatactatatccacgacatttagtgattatactgcaaagattggtgatgctatttcagcatggt

SEQ ID NO: 152316 - DNA, 75 bp, synthetic construct
  source 1..75: mol_type = other DNA
ggggcgtggcatgctgaaaaaagctggagcactcgcttttggcgctctgggggcaaagaaacttgtaggaatgct

SEQ ID NO: 152317 - DNA, 75 bp, synthetic construct
  source 1..75: mol_type = other DNA
tgaaccagcctccacgtcccaggtgacgactgccgccaacgatttgcagcaaccaaccggtcgtatgcagataga

SEQ ID NO: 152318 - DNA, 75 bp, synthetic construct
  source 1..75: mol_type = other DNA
ttaaaagctccggttaatagccaccaggagacatctgattctaaaactgaatccgatgccaaacagactaatatt

SEQ ID NO: 152319 - DNA, 75 bp, synthetic construct
  source 1..75: mol_type = other DNA
gcactcggcgctttaggtattaagggggtagggaaactagggattaaggcggtcgcaaaaggcgctttacgtgca

SEQ ID NO: 152320 - DNA, 75 bp, synthetic construct
  source 1..75: mol_type = other DNA
ggcataggtaacccttcagagactcgtgccgtcgatgcgttaggttatgccgttgctggtccattgtgggcagca

SEQ ID NO: 152321 - DNA, 75 bp, synthetic construct
  source 1..75: mol_type = other DNA
aaggcaccggtgaattatcgaaggaaaaccgcgagtatgcgattaaggtcaatactcatcgtgctcgctatttag

SEQ ID NO: 152322 - DNA, 75 bp, synthetic construct
  source 1..75: mol_type = other DNA
aatgatacagaagcgcaacgtcgagcgtttgggcttaaatcaggacaagatccatcattccagcaaaaagccgct

SEQ ID NO: 152323 - DNA, 75 bp, synthetic construct
  source 1..75: mol_type = other DNA
aagaagttggcggatcgcttaatggtgccagaaagtctattgccgatgtgattcgtggcaatgacgataacagcc

SEQ ID NO: 152324 - DNA, 75 bp, synthetic construct
  source 1..75: mol_type = other DNA
gttacaatcattttcgacggaaagtattgcacaggccattgatagtgggattaccagtttagaaacgtatatttc

SEQ ID NO: 152325 - DNA, 75 bp, synthetic construct
  source 1..75: mol_type = other DNA
taggggacgtttctcgtatacgggaggacaaagtcactaaccgtgaacagcaggctgcaccaacagcgcacaatc

SEQ ID NO: 152326 - DNA, 75 bp, synthetic construct
  source 1..75: mol_type = other DNA
tgatagcccgtttgagaaaggcggtctggtagacaaaatcggcaatgctgttggcgttaacgatctggtcaacaa

SEQ ID NO: 152327 - DNA, 75 bp, synthetic construct
  source 1..75: mol_type = other DNA
accatagacatcatgaatataatattgaaacttcattagattttagttctcctttgccagagccggagcgagagc

SEQ ID NO: 152328 - DNA, 75 bp, synthetic construct
  source 1..75: mol_type = other DNA
accatatacagcatgaatataatattgaaacttcattagattttagttctcctttgccagagccggagcgagagc

SEQ ID NO: 152329 - DNA, 75 bp, synthetic construct
  source 1..75: mol_type = other DNA
actatagacaccatgaatataatattgaaacttcattagattttagttctcctttgccagagccggagcgagagc

SEQ ID NO: 152330 - DNA, 75 bp, synthetic construct
  source 1..75: mol_type = other DNA
atagtggcaagccctgggccagtaaacatcctggtttaatgcacgcctgcgggcatgacgggcataccaccatac

SEQ ID NO: 152331 - DNA, 75 bp, synthetic construct
  source 1..75: mol_type = other DNA
acgatacacatcatgaatataatattgaaacttcattagattttagttctcctttgccagagccggagcgagagc

SEQ ID NO: 152332 - DNA, 75 bp, synthetic construct
  source 1..75: mol_type = other DNA
acgatatacaccatgaatataatattgaaacttcattagattttagttctcctttgccagagccggagcgagagc

SEQ ID NO: 152333 - DNA, 75 bp, synthetic construct
  source 1..75: mol_type = other DNA
aaggctatcctgcccctacccgtagttttcgctggtgtaccgagcgtatgaaaatcaacccggttagcgacttta

SEQ ID NO: 152334 - DNA, 75 bp, synthetic construct
  source 1..75: mol_type = other DNA
tgaacttcaggttctacagcgcagaattgtagacgccagtgaatcctctgttttggtcgaggaggaaaacgaacg

SEQ ID NO: 152335 - DNA, 75 bp, synthetic construct
  source 1..75: mol_type = other DNA
cgcaacagcagctggcaatgtgtatgttgataccccgatgccagttgaagaggcgcgtccggtggccaacaactc

SEQ ID NO: 152336 - DNA, 75 bp, synthetic construct
  source 1..75: mol_type = other DNA
actatacacagcatgaatataatattgaaacttcattagattttagttctcctttgccagagccggagcgagagc

SEQ ID NO: 152337 - DNA, 75 bp, synthetic construct
  source 1..75: mol_type = other DNA
aagctcatataatgatagtaattattacattgaaaatgatctgtctgtatcatcattgaatgaacaacccatttc

SEQ ID NO: 152338 - DNA, 75 bp, synthetic construct
  source 1..75: mol_type = other DNA
ttgcagattgaggcgggagcgaagcgtaacggcttgccgatcactcaacacgcggtaacgcctaaaacgaatgaa

SEQ ID NO: 152339 - DNA, 75 bp, synthetic construct
  source 1..75: mol_type = other DNA
acatctattccctggtttgcatttctgggagaaggtcaggaagtttctaacggtatatatcccgttattctctat

SEQ ID NO: 152340 - DNA, 75 bp, synthetic construct
  source 1..75: mol_type = other DNA
cgtgatgaaaacgatctgctgggaatgcttattgataacggcaagaatctgctgggggccatccagattttacct

SEQ ID NO: 152341 - DNA, 75 bp, synthetic construct
  source 1..75: mol_type = other DNA
agacggtaaagtgatgatgccatcgggtgattttccgtcatggggatatggctttgcggggatgtatgacagcgg

SEQ ID NO: 152342 - DNA, 75 bp, synthetic construct
  source 1..75: mol_type = other DNA
acgccgtctggcttacctgctgacaggagaaaaggctccgcaacgcgtcaatatggttcagttccatcaatctta

SEQ ID NO: 152343 - DNA, 75 bp, synthetic construct
  source 1..75: mol_type = other DNA
gtgtttatcctaaaaaatacggacagtcctattacgcctgttcccaaaaagtctcacagggtcttgattataccc

SEQ ID NO: 152344 - DNA, 75 bp, synthetic construct
  source 1..75: mol_type = other DNA
tatgtcaaaaactgaatcatactgtctggaagatgcgttaaatgatttgtttatccctgaaaccacgatagagac

SEQ ID NO: 152345 - DNA, 75 bp, synthetic construct
  source 1..75: mol_type = other DNA
gtggttactgcactggcgggcgtggcgctggttgtctggaaatactggcaacccatcaccgcatttctcgctggt

SEQ ID NO: 152346 - DNA, 75 bp, synthetic construct
  source 1..75: mol_type = other DNA
tggcatcgtcggtgaaaacgggccggaaattgttaacggcccggcaaatgtgaccagccggagaaataccgctgc

SEQ ID NO: 152347 - DNA, 75 bp, synthetic construct
  source 1..75: mol_type = other DNA
gtgaacgtcctggcgaatatgatgtttggttccatttctggttcagccgttgcggcagctgctgccgttggtggc

SEQ ID NO: 152348 - DNA, 75 bp, synthetic construct
  source 1..75: mol_type = other DNA
ctggctgccgttgtcgccggaatgatgggtgttgctgccgtgccagcagagcttccaccgttgcatcctttggcg

SEQ ID NO: 152349 - DNA, 75 bp, synthetic construct
  source 1..75: mol_type = other DNA
aaagcggcggcaggtcccatcagtgcagcgttcgaaccgcttaagcccgtgttccagtggattggcgacaaagtg

SEQ ID NO: 152350 - DNA, 75 bp, synthetic construct
  source 1..75: mol_type = other DNA
gcttccaccgttgcaccctttggcacttcccgcgaaaggtggagaagcaattgtgagtcgcgcagccactgtgcc

SEQ ID NO: 152351 - DNA, 75 bp, synthetic construct
  source 1..75: mol_type = other DNA
agcgcggtaatcgtatcggtatctgcacgctggatgaccgttccgggcgcctcgaagtgatgttgtttactgacg

SEQ ID NO: 152352 - DNA, 75 bp, synthetic construct
  source 1..75: mol_type = other DNA
ccgttggtaaaaaaggcggcggcgttgggtatgccagcactggcgatcaccgatttcaccaacctttgtggtctg

SEQ ID NO: 152353 - DNA, 75 bp, synthetic construct
  source 1..75: mol_type = other DNA
ttatagcaaatgcaaataatttcgaaataactaatctaggtattgactgtaattattttacaagtgcatggaatg

SEQ ID NO: 152354 - DNA, 75 bp, synthetic construct
  source 1..75: mol_type = other DNA
atggcggcgaaagcggtgatccgcgacgtaggccgcgtgctggggcatccgtacggctttgtcgatcgtatctcg

SEQ ID NO: 152355 - DNA, 75 bp, synthetic construct
  source 1..75: mol_type = other DNA
tcttttgcgtggtaacagcgcgctggtagatgagtgcgtcgcgttttatgaagaacacttcccggatcgctattt

SEQ ID NO: 152356 - DNA, 75 bp, synthetic construct
  source 1..75: mol_type = other DNA
cggtttgcccgtcgtggcgaccaatgacgtgcgctttatcgacagcagcgactttgacgcgcacgaaatccgcgt

SEQ ID NO: 152357 - DNA, 75 bp, synthetic construct
  source 1..75: mol_type = other DNA
caaaaagtctcacagggtattgattactctcagtttgcctctatgctggacaacataatcagcgactataaatta

SEQ ID NO: 152358 - DNA, 75 bp, synthetic construct
  source 1..75: mol_type = other DNA
tagatattgagccaggttttgatacaccacagttccggaattttttactgaataaaaaagcagaaccttcatttg

SEQ ID NO: 152359 - DNA, 75 bp, synthetic construct
  source 1..75: mol_type = other DNA
gtgaaaactggtctgttcccctaacctactccgaaaacgatgaagaacgattctatgtcccggagaatgtttata

SEQ ID NO: 152360 - DNA, 75 bp, synthetic construct
  source 1..75: mol_type = other DNA
ctgtagtggttacaaatgatgctcaggttgaaatgaatttctcaaactcaactgcaccggcaggagatgcagaag

SEQ ID NO: 152361 - DNA, 75 bp, synthetic construct
  source 1..75: mol_type = other DNA
taaaaatgccattttgaaagcaggtgcgcagcgcaagtggattatgacgcaagtgtcccctggagttattaaagc

SEQ ID NO: 152362 - DNA, 75 bp, synthetic construct
  source 1..75: mol_type = other DNA
atgaaacgttatataaaatggtttgccatcacaatttttatcagtatgttgagtgcctgtgcccgtacggcccca

SEQ ID NO: 152363 - DNA, 75 bp, synthetic construct
  source 1..75: mol_type = other DNA
ggcggcatgaccagctgcttaccgcgcttcgtgcgctgctgttaagccgcaagaatccgtttggcgatatcaaat

SEQ ID NO: 152364 - DNA, 75 bp, synthetic construct
  source 1..75: mol_type = other DNA
atgcaaaattcgccatcttcaactaaggtgaacaagtttcactcgaaaaaagaggcgagtatgagctttatggtt

SEQ ID NO: 152365 - DNA, 75 bp, synthetic construct
  source 1..75: mol_type = other DNA
tggcgaaagaggccgaccgtttaaaccgcgtggtaagcgagttgctggaactggttaagccaacgcatctggctt

SEQ ID NO: 152366 - DNA, 75 bp, synthetic construct
  source 1..75: mol_type = other DNA
taacagggttttattctgcctttagaacaacctcgacaagtccaactgttaccatgaattactgttggtgggctg

SEQ ID NO: 152367 - DNA, 75 bp, synthetic construct
  source 1..75: mol_type = other DNA
atgacttatacagtaaaattccgggatgatgcgctgaaagaatggctcagactgaataagtccattcagcagcag

SEQ ID NO: 152368 - DNA, 75 bp, synthetic construct
  source 1..75: mol_type = other DNA
cggcaggaggcggactacttgcattttatttaatgagttctcgtactggcggaacgggtgctggcgctaactgga

SEQ ID NO: 152369 - DNA, 75 bp, synthetic construct
  source 1..75: mol_type = other DNA
cctggagatgaagaagcgtggcggcggatcgatagcgcagacggcgagcctgttctggaaatttatcgccagttt

SEQ ID NO: 152370 - DNA, 75 bp, synthetic construct
  source 1..75: mol_type = other DNA
ccgtttgctgaatattcttcacttgatgaattattccaggaaacctataagcatgaacaattaatcacgcagaaa

SEQ ID NO: 152371 - DNA, 75 bp, synthetic construct
  source 1..75: mol_type = other DNA
aactcaatgagcagatgaacctggaactgtactcttcgctgctttatcaacaaatgagcgcctggtgcagctacc

SEQ ID NO: 152372 - DNA, 75 bp, synthetic construct
  source 1..75: mol_type = other DNA
acgacacattaccggaaattcaggccgatccggacaggctgactcaggtcctgttgaatctctatctcaatgcta

SEQ ID NO: 152373 - DNA, 75 bp, synthetic construct
  source 1..75: mol_type = other DNA
gggagaagcgcatcaactggcgcaggtgatggcgaaagaagccgaccgtttaaaccgcgtggtaagcgagttgct

SEQ ID NO: 152374 - DNA, 75 bp, synthetic construct
  source 1..75: mol_type = other DNA
gtaaaaatgactcgccagtcgtggagagtgagtcgtttttactcattgaaacacaagcgtttgtgtttcagcgca

SEQ ID NO: 152375 - DNA, 75 bp, synthetic construct
  source 1..75: mol_type = other DNA
ttggattcatcaatggtcagaagtttaccacccgcaatgccatgccatgccatgccagacggttttactccagta

SEQ ID NO: 152376 - DNA, 75 bp, synthetic construct
  source 1..75: mol_type = other DNA
atgacggtgctggactggctgaccaatccgtgggaaccgtacaaacgcgggattatgattggctttgattccagc

SEQ ID NO: 152377 - DNA, 75 bp, synthetic construct
  source 1..75: mol_type = other DNA
agagatcactgattacgtgctgatgatgaaaatcgacgagcagaacatgcagggcggtaactcgctgctgctgca

SEQ ID NO: 152378 - DNA, 75 bp, synthetic construct
  source 1..75: mol_type = other DNA
gacggtgattggtattggcggcagtgaaaaacaggccagagaaggtgaatttgatgctgtgatgctggcaccaaa

SEQ ID NO: 152379 - DNA, 75 bp, synthetic construct
  source 1..75: mol_type = other DNA
aataagaccggtggagggtatcagattgataatccgacaccgtatttcgtgacggtgattggtattggcggcagt

SEQ ID NO: 152380 - DNA, 75 bp, synthetic construct
  source 1..75: mol_type = other DNA
caactggacatcaagcaggatattacaaactcaatgatagtctggatattaaaaccacattacaggcgaatgaca

SEQ ID NO: 152381 - DNA, 75 bp, synthetic construct
  source 1..75: mol_type = other DNA
ctctatatcggagaaccgaacgccgaagcggtagccgcacaaatgccggatctgattttgattagcgcaaccggc

SEQ ID NO: 152382 - DNA, 75 bp, synthetic construct
  source 1..75: mol_type = other DNA
tgcgaaggaacgcaaactgcagcgcctctatatcggagaaccgaacgccgaagcggtagccgcacaaatgccgga

SEQ ID NO: 152383 - DNA, 75 bp, synthetic construct
  source 1..75: mol_type = other DNA
tcaaccagcgtcacgctgacggggtcgctgctggcgatagacgctccggtgattgccagtggtgcaactacaccg

SEQ ID NO: 152384 - DNA, 75 bp, synthetic construct
  source 1..75: mol_type = other DNA
ttatgcgctgggaaccgagacgttccgtctggattactacagcgccatgcaagtgctggatgggcttaattcact

SEQ ID NO: 152385 - DNA, 75 bp, synthetic construct
  source 1..75: mol_type = other DNA
gttaatcatcaattacgacgacaaaagctggcagtcgctgttaacgcaacttggcgaaattaccgggcatgagaa

SEQ ID NO: 152386 - DNA, 75 bp, synthetic construct
  source 1..75: mol_type = other DNA
ccatgacatcattcagcttggtggagaaaatctggctgcagggttaaatggcgagtcactattcctgttcgccgg

SEQ ID NO: 152387 - DNA, 75 bp, synthetic construct
  source 1..75: mol_type = other DNA
ccatcatcctgacgctgaaaacgccggtgctggtgtggctggtgcggggctatatcacgctgtttaccggtacgc

SEQ ID NO: 152388 - DNA, 75 bp, synthetic construct
  source 1..75: mol_type = other DNA
gctacacggtgaggcaaaccacaatgccgaagaaggtacggcagatcttgaattccacggtgaagaaggggatta

SEQ ID NO: 152389 - DNA, 75 bp, synthetic construct
  source 1..75: mol_type = other DNA
gctgcatggcgaagcaaaccataatgccgaagaaggtacggcagatcttgaatttcacggcgaagagggaggata

SEQ ID NO: 152390 - DNA, 75 bp, synthetic construct
  source 1..75: mol_type = other DNA
cgctgctggtgcagatcttcctgatttattacgggccgggccagttcccgacgttgcaggagtatccggcactgt

SEQ ID NO: 152391 - DNA, 75 bp, synthetic construct
  source 1..75: mol_type = other DNA
gctaaccgttgcctcgctgattgtggcactgattctggcattgatttttaccattatcctgacgctgaaaacgcc

SEQ ID NO: 152392 - DNA, 75 bp, synthetic construct
  source 1..75: mol_type = other DNA
atgtttgagtatttacccgaactgatgaaagggctgcacaccagcctgacgctaaccgttgcctcgctgattgtg

SEQ ID NO: 152393 - DNA, 75 bp, synthetic construct
  source 1..75: mol_type = other DNA
aatcacctcgtctgatgagatgaccatcactgccgagctggcgaacggtcaggtctatgtattgtcgtctgcctg

SEQ ID NO: 152394 - DNA, 75 bp, synthetic construct
  source 1..75: mol_type = other DNA
ggaccgcaaggaaactcaccgtgcaccttatgtcaaagggaccttcaaggtgccgaagaattttccggtgagcaa

SEQ ID NO: 152395 - DNA, 75 bp, synthetic construct
  source 1..75: mol_type = other DNA
atttcaaaattgacggtcagcagctatcgctgaccggcggcattgaggtgcccatgaacaaaacggttaacgatg

SEQ ID NO: 152396 - DNA, 75 bp, synthetic construct
  source 1..75: mol_type = other DNA
cagaaagttgataaaagtgattgtgttgagatagaaggcaggcgcgtttataagcctcgtttgtcgagaatggaa

SEQ ID NO: 152397 - DNA, 75 bp, synthetic construct
  source 1..75: mol_type = other DNA
tttccggtgagcaaaatcacctcgtctgatgagatgaccatcactgccgagctggcgaacggtcaggtctatgta

SEQ ID NO: 152398 - DNA, 75 bp, synthetic construct
  source 1..75: mol_type = other DNA
agttatctgacctcccgccacttcaagaaagtgacgcaccaagcgactccattaacgccgccaacgatggcgaac

SEQ ID NO: 152399 - DNA, 75 bp, synthetic construct
  source 1..75: mol_type = other DNA
agcaggcgatcgcagaagagctggaagttcaggattactacactgagaaaaacatcttctgggtacccaaactgg

SEQ ID NO: 152400 - DNA, 75 bp, synthetic construct
  source 1..75: mol_type = other DNA
gtacgaagacgaagccggattctgcttctctgcaacgctggaagatattcagaaaaacgactttgtgttgacccc

SEQ ID NO: 152401 - DNA, 75 bp, synthetic construct
  source 1..75: mol_type = other DNA
tcgtcaccctgattgttgaaatgctgcaaccgtataacgggcgcgtgtatgacccggcgatgggttccggcgggt

SEQ ID NO: 152402 - DNA, 75 bp, synthetic construct
  source 1..75: mol_type = other DNA
gcagccgatgatagtaccgctgccgccggctcaataacgtactgccaggctgtgctctggattaagccgctgctg

SEQ ID NO: 152403 - DNA, 75 bp, synthetic construct
  source 1..75: mol_type = other DNA
gcacgccgataccgacggacctgacgcagccgatgatagtaccgctgccgccggctcaataacgtactgccaggc

SEQ ID NO: 152404 - DNA, 75 bp, synthetic construct
  source 1..75: mol_type = other DNA
gcgccgtcactttgcagaaaatacgcgccgccgactgctgctcgacaccatcaagcctatcgaggtgaagcatgt

SEQ ID NO: 152405 - DNA, 75 bp, synthetic construct
  source 1..75: mol_type = other DNA
agttgaagattactacaccgaaaagaacatcttctgggtgccgaaagccgcgcgctgggacacgctgaaaaacaa

SEQ ID NO: 152406 - DNA, 75 bp, synthetic construct
  source 1..75: mol_type = other DNA
tgaacgagctggataacaaattctggaaagccgccgacaagctacgcgccaacatggatgccgccaactacaagc

SEQ ID NO: 152407 - DNA, 75 bp, synthetic construct
  source 1..75: mol_type = other DNA
atcactgccgagctggcgaacggtcaggtctatgtactgtcgtctgcctggctgcacggcgaagcgaaccataat

SEQ ID NO: 152408 - DNA, 75 bp, synthetic construct
  source 1..75: mol_type = other DNA
ggcgaagtgctgtttatcgacgcccgcaagattggctttatgaaagaccgcgtgctgcgtgactttactcgtgaa

SEQ ID NO: 152409 - DNA, 75 bp, synthetic construct
  source 1..75: mol_type = other DNA
atataacggcgagaagctcaacttaaagagcaaagatattctcggtcacgtgtacgaatatttcctcggtcagtt

SEQ ID NO: 152410 - DNA, 75 bp, synthetic construct
  source 1..75: mol_type = other DNA
gctcgccagcaagaactgataaccctgttccgcgacgtcggcaacccggacaacatctacgccatgtcgcgcgat

SEQ ID NO: 152411 - DNA, 75 bp, synthetic construct
  source 1..75: mol_type = other DNA
aaggtactgccgcgcatgacggcaccgatgctgaccgagcaggaggtcgccgcgctggaactgctgcgtattacc

SEQ ID NO: 152412 - DNA, 75 bp, synthetic construct
  source 1..75: mol_type = other DNA
tggacaatccggtcaagcgtggtgagcaggtcatcgcacaggtcacgctgatgaaacccagtgccgggacgctgc

SEQ ID NO: 152413 - DNA, 75 bp, synthetic construct
  source 1..75: mol_type = other DNA
gtgctggaaaaactgatcatgtccggggcgtttgaccgtcttgggccacaccgcgcggcgctgatgaactcgctg

SEQ ID NO: 152414 - DNA, 75 bp, synthetic construct
  source 1..75: mol_type = other DNA
tataacgccatgccgctggaaggcgttaaagcgctgacagacttcatggttgagttcgaacgccgtcacggctaa

SEQ ID NO: 152415 - DNA, 75 bp, synthetic construct
  source 1..75: mol_type = other DNA
atttctatcgtaatgatgtcgcaaaagataaccgttcgcggatgaatgtgccgttccagttggcggacagtgcgc

SEQ ID NO: 152416 - DNA, 75 bp, synthetic construct
  source 1..75: mol_type = other DNA
tgcgtgaatggcaactctctgataatgctgcttatatgcattactgcccgaatgaaaccatcgacggtatcgcca

SEQ ID NO: 152417 - DNA, 75 bp, synthetic construct
  source 1..75: mol_type = other DNA
tctcgaaactgatcccgcccgatccggggatgacgctggcgaaagcgtttgaagccgagccgcagttgccggaaa

SEQ ID NO: 152418 - DNA, 75 bp, synthetic construct
  source 1..75: mol_type = other DNA
gtatcaggaacaggtcatgcagattgcgcaggtgctttctggttataccctcggtggcgcggatatgctgcgtcg

SEQ ID NO: 152419 - DNA, 75 bp, synthetic construct
  source 1..75: mol_type = other DNA
ccggatgaagaaagctatttgcacgcggcggtggaactggcggaaaggcgcggtttgcctgttgtggcaaccaac

SEQ ID NO: 152420 - DNA, 75 bp, synthetic construct
  source 1..75: mol_type = other DNA
gtggcagcatgaaagtctgaaaccagtactggaaccgacttacggcattatcctgtatcaggaacaggtaatgca

SEQ ID NO: 152421 - DNA, 75 bp, synthetic construct
  source 1..75: mol_type = other DNA
ctactatcagagggcggatgcacgtgcgcggttgcgttttggcgcgacgtggcgtgtctctccgagcgatcgttt

SEQ ID NO: 152422 - DNA, 75 bp, synthetic construct
  source 1..75: mol_type = other DNA
tctcgaaactgatcccgcccgatccggggatgacgctggcgaaagcgtttgaagctgaaccgcaactgccagaaa

SEQ ID NO: 152423 - DNA, 75 bp, synthetic construct
  source 1..75: mol_type = other DNA
tatgtatttcattggaaactgttttcaagatgactcaggcatcgcagaaataaatagtatattagatatgttaag

SEQ ID NO: 152424 - DNA, 75 bp, synthetic construct
  source 1..75: mol_type = other DNA
ttgaaagctcatctttatatgaccaactcatcgaagatgatattaaaattagatatgaaaacaaaaaaggaatag

SEQ ID NO: 152425 - DNA, 75 bp, synthetic construct
  source 1..75: mol_type = other DNA
agaccagtttacttcattgggaaagatgaaggtgagcttggcctatatgacagaattcatgcgtttattattatt

SEQ ID NO: 152426 - DNA, 75 bp, synthetic construct
  source 1..75: mol_type = other DNA
ttatatcgttttgtaccgagtagcaacttcaagcattgaaattgcaaatattgtgcatgcccgccgacaatttcc

SEQ ID NO: 152427 - DNA, 75 bp, synthetic construct
  source 1..75: mol_type = other DNA
aggagtttgttatatgcaagggtattatttttcccctgctttaaaggggaaagacttcataaaaaaatggttaat

SEQ ID NO: 152428 - DNA, 75 bp, synthetic construct
  source 1..75: mol_type = other DNA
aactgtaagaactatttcaggaaccgggcgtttagtcgagtcatctaatagaattaactttgataacttagctct

SEQ ID NO: 152429 - DNA, 75 bp, synthetic construct
  source 1..75: mol_type = other DNA
gtaatacgttaatcgtctattcactggtcagtggtggtacttctattgccgcactgttcctggcaggatatgtcc

SEQ ID NO: 152430 - DNA, 75 bp, synthetic construct
  source 1..75: mol_type = other DNA
gtaatacgttaatcgtctattcactggtcagtggtggtacttctattgccgcactgttcctggcgggttatgttc

SEQ ID NO: 152431 - DNA, 75 bp, synthetic construct
  source 1..75: mol_type = other DNA
acggcggtgtggcagcgatggataaaatcaatcagcaaaaagccgaactgctgtacggtgtgattgataacagcg

SEQ ID NO: 152432 - DNA, 75 bp, synthetic construct
  source 1..75: mol_type = other DNA
catcccaccatctgggctacgataaaaaccagcctaaaccgggtgccaactcccgcaatggctattccacaaagg

SEQ ID NO: 152433 - DNA, 75 bp, synthetic construct
  source 1..75: mol_type = other DNA
aaggtgctgccgcgcatgacggcaccgatgctgaccgagcaggaggtcgccgcgctggaactgcctgaccttgtg

SEQ ID NO: 152434 - DNA, 75 bp, synthetic construct
  source 1..75: mol_type = other DNA
gcgatgggcggcgtcatgcatccgcaacaggttaaagagggttacgacccggcattcagtactgcggttaacgtt

SEQ ID NO: 152435 - DNA, 75 bp, synthetic construct
  source 1..75: mol_type = other DNA
tttgatgatgtcggcattaggaacgttgctggtcgtgcaatcttcctcgcctgcgcaagcggtggcgtttatctc

SEQ ID NO: 152436 - DNA, 75 bp, synthetic construct
  source 1..75: mol_type = other DNA
ttggtgtccctgttccgtggccttcagccaccccgccgacaggctggctgaaatgcaacggtgcggctttttctg

SEQ ID NO: 152437 - DNA, 75 bp, synthetic construct
  source 1..75: mol_type = other DNA
cagtggtctgtatggttgaagttcaacggcgaaattcctgcatattatcgtgctggcggtttcccgcttataccg

SEQ ID NO: 152438 - DNA, 75 bp, synthetic construct
  source 1..75: mol_type = other DNA
cggggtttgctgctgaatacctgagtcgccaaaatccgtttggcgatatcaaatcggatggtacggtgaaaacgg

SEQ ID NO: 152439 - DNA, 75 bp, synthetic construct
  source 1..75: mol_type = other DNA
ccgccgaggcggtggcgcgcatctcgccacgtaccgcaacgttccataaagggcaactggtatgggggcgtgtgg

SEQ ID NO: 152440 - DNA, 75 bp, synthetic construct
  source 1..75: mol_type = other DNA
agcgaacaacaccatgaaaatcactgacccgcattactatctcgacaacgtgctgctggaaaccggttttgacta

SEQ ID NO: 152441 - DNA, 75 bp, synthetic construct
  source 1..75: mol_type = other DNA
aagcaccattaaacagcccggcactgaccggaacgccaacaacaccaacagcgccacaggggactaatagtaccc

SEQ ID NO: 152442 - DNA, 75 bp, synthetic construct
  source 1..75: mol_type = other DNA
ttaagttctacaactaatgccttgtccccggacggtattgatgccactaattcgttaattggtaatgatgattac

SEQ ID NO: 152443 - DNA, 75 bp, synthetic construct
  source 1..75: mol_type = other DNA
tggtgagtttattcgtggctgggatgacgggcgtggtgtggatgcgggacgtgccttgctaagtcttcaggatga

SEQ ID NO: 152444 - DNA, 75 bp, synthetic construct
  source 1..75: mol_type = other DNA
acacatctcatgcgtgcgtcgtgggagtggattttcagaccttaaagatggcgcgtttagatacgatagcaactg

SEQ ID NO: 152445 - DNA, 75 bp, synthetic construct
  source 1..75: mol_type = other DNA
ccgcaagaatccgtttggcgatatcaaatcggatggcaccgtgaaaacggctctcgaaaaccttggtttgggaga

SEQ ID NO: 152446 - DNA, 75 bp, synthetic construct
  source 1..75: mol_type = other DNA
acctgatgaaaaaacatgttgaggccgccaatccacacaagcagtacccgttaatcgctaatgctctgaaagaaa

SEQ ID NO: 152447 - DNA, 75 bp, synthetic construct
  source 1..75: mol_type = other DNA
atttgattcttcaacacaggttccaacggccttggagaatcgaccgagaaacattgcttttaactttcttgtaag

SEQ ID NO: 152448 - DNA, 75 bp, synthetic construct
  source 1..75: mol_type = other DNA
gtaacattcgatgcttccagagttgttccaactgcaaacgaaaaccgacctcgtaacattgcctttaattatatc

SEQ ID NO: 152449 - DNA, 75 bp, synthetic construct
  source 1..75: mol_type = other DNA
ttggtgtccctgttccgtggccttcagccactccgccaacaggctggctgaaatgcaatggtgcagctttttctg

SEQ ID NO: 152450 - DNA, 75 bp, synthetic construct
  source 1..75: mol_type = other DNA
cttctgaaatgtatcccaaactggcaaaggcttatcccatcaataaattaccggatttacgcggtgagtttatcc

SEQ ID NO: 152451 - DNA, 75 bp, synthetic construct
  source 1..75: mol_type = other DNA
aatccgtttggcgatatcaaatcggatggcacggtgaaaacggctctcgaaaaccttggtttgggagaaggctct

SEQ ID NO: 152452 - DNA, 75 bp, synthetic construct
  source 1..75: mol_type = other DNA
cctgttccgtggccttcagccactccgccaacaggctggttgaaatgcaatggtgcggctttttctgctgaagaa

SEQ ID NO: 152453 - DNA, 75 bp, synthetic construct
  source 1..75: mol_type = other DNA
gttgcaggaagaactttgtagcgtggtggaggcctccggtgccagcctggagaaagggcggcatgaccagctact

SEQ ID NO: 152454 - DNA, 75 bp, synthetic construct
  source 1..75: mol_type = other DNA
accattacaccagtaattcagtgggtgatggtgtgaattttatagccgtcagaccacgtaacatcgcatttaact

SEQ ID NO: 152455 - DNA, 75 bp, synthetic construct
  source 1..75: mol_type = other DNA
acatctttatcgcaatttggaggtaattatccagagggatccggccattcgattgctaatcacgatggaatatca

SEQ ID NO: 152456 - DNA, 75 bp, synthetic construct
  source 1..75: mol_type = other DNA
gatattcacctgcacgaaaccactccggcgggcgtggcggccatcaattatatggttgaaacggtagagaaaacg

SEQ ID NO: 152457 - DNA, 75 bp, synthetic construct
  source 1..75: mol_type = other DNA
gtacctgttccatggcccttagaaacaccgccaacggggtggctaaaatgtaacggagcagcattttcttctgaa

SEQ ID NO: 152458 - DNA, 75 bp, synthetic construct
  source 1..75: mol_type = other DNA
ttttcataaacgttggtttgggagaaggttcagcattacctgttggtgcacctgttccgtggccttcagagacac

SEQ ID NO: 152459 - DNA, 75 bp, synthetic construct
  source 1..75: mol_type = other DNA
accctgtgctggcaaaagtgtttccttcgctggtattacctgaagcccgcggtgatttcattcgtatctgggatg

SEQ ID NO: 152460 - DNA, 75 bp, synthetic construct
  source 1..75: mol_type = other DNA
ggcattcttacaggccgaagcgcgtgaacgttctgccgaagcggaagcccgcgccaccaaaatggtgtctgaagc

SEQ ID NO: 152461 - DNA, 75 bp, synthetic construct
  source 1..75: mol_type = other DNA
tatcccttcccaggaagttatctcgaaagataacgccaacgttaccatcgacgccgtgtgttttattcaggtgat

SEQ ID NO: 152462 - DNA, 75 bp, synthetic construct
  source 1..75: mol_type = other DNA
acttgatgccacgctgacggcattggcagggctcgcaacaggtgaaaataaactcccgtatttcactggaaatga

SEQ ID NO: 152463 - DNA, 75 bp, synthetic construct
  source 1..75: mol_type = other DNA
gtgatttctttcttactgacgtatatgaacacattctcgtataagattatggggattatcggcggggatttagaa

SEQ ID NO: 152464 - DNA, 75 bp, synthetic construct
  source 1..75: mol_type = other DNA
acaccgaagcgttacagcagatcgggtcgtccagtaacagcaaagtggtaatgatgccattagacgccagtagtc

SEQ ID NO: 152465 - DNA, 75 bp, synthetic construct
  source 1..75: mol_type = other DNA
gcttatctcttcaatgaacgcgcagatgaaagcggaacgtaccaaacgtgcttacatccttgaagcggaagggat

SEQ ID NO: 152466 - DNA, 75 bp, synthetic construct
  source 1..75: mol_type = other DNA
ggtttgggagaaggctctgcattaccggttggggtgcctgttccgtggccttcagccactccgccgacaggctgg

SEQ ID NO: 152467 - DNA, 75 bp, synthetic construct
  source 1..75: mol_type = other DNA
aaattagatcgactgatttagcagacgactgggggagcgtagtctcatttgatgccagtcgcgtagttccaactg

SEQ ID NO: 152468 - DNA, 75 bp, synthetic construct
  source 1..75: mol_type = other DNA
aggggaagtctcggtgcgtattcagcatgctgacggtagcgaaagtgaaattcaggaagcgatcttctgcgggtt

SEQ ID NO: 152469 - DNA, 75 bp, synthetic construct
  source 1..75: mol_type = other DNA
tgattggccttgatgcttcaagaattgttccaactgcaaacgaaaaccgtcctcgtaacattgcctttaattata

SEQ ID NO: 152470 - DNA, 75 bp, synthetic construct
  source 1..75: mol_type = other DNA
atgccagttagccgtaatctctgcattttcttaaacgttggtttaggggaaggctcggcgctgcccgttggtgtg

SEQ ID NO: 152471 - DNA, 75 bp, synthetic construct
  source 1..75: mol_type = other DNA
gttgcaggaggagctttgcagcgttgtagaggcatccggtgccagtctcgagaaggcgcggcacgaccagctgct

SEQ ID NO: 152472 - DNA, 75 bp, synthetic construct
  source 1..75: mol_type = other DNA
ttgctgtattaattgttcccacaaccaaagacgagacaattgaaaaatatgctacacgggtttttgacaattggc

SEQ ID NO: 152473 - DNA, 75 bp, synthetic construct
  source 1..75: mol_type = other DNA
gttttttcatcaaggcagtaatttttgtcgcgcatgtaaaagtggagtctgtatttcagcaatctatcttttaga

SEQ ID NO: 152474 - DNA, 75 bp, synthetic construct
  source 1..75: mol_type = other DNA
ggcggggggggggcttctggcgggggggggggggccgggcgcggggaactcaaccataaaaaatgccagcccgaa

SEQ ID NO: 152475 - DNA, 75 bp, synthetic construct
  source 1..75: mol_type = other DNA
tggtttgccagtctttcgatttaattatctgtaaaaagcctgtatcattaaagaaaaatacagttttacttctgg

SEQ ID NO: 152476 - DNA, 75 bp, synthetic construct
  source 1..75: mol_type = other DNA
ggctctcgaaaaccttggtttgggagaaggttctgcgttgcctgttggcgcaccagttccttggccttcagctac

SEQ ID NO: 152477 - DNA, 75 bp, synthetic construct
  source 1..75: mol_type = other DNA
gtaactcaaccataaaaaatgccagcccggaggctggcatttttaaatcagataaagtcagtcttatgcctggcc

SEQ ID NO: 152478 - DNA, 75 bp, synthetic construct
  source 1..75: mol_type = other DNA
tatgcatttgccaccctggtgcgttgtagcccggtaaccggacgtactcatcagatccgtgtgcatacacagtat

SEQ ID NO: 152479 - DNA, 75 bp, synthetic construct
  source 1..75: mol_type = other DNA
tggtttaagcttcggcgttatcgaaggtttgcgggcgttgcgcccggaagcgcggttccttgaactggttcatcg

SEQ ID NO: 152480 - DNA, 75 bp, synthetic construct
  source 1..75: mol_type = other DNA
cgacaaataaattgcctgatttacgtggtgagtttattcgtggctgggatgacggccgtggagtggataacggaa

SEQ ID NO: 152481 - DNA, 75 bp, synthetic construct
  source 1..75: mol_type = other DNA
gtgatcattatgcgcttaatcttttttctacttactttatggtgccttcctgggcttacccagcaaattgcagtg

SEQ ID NO: 152482 - DNA, 75 bp, synthetic construct
  source 1..75: mol_type = other DNA
gcgagcgctgctgtccgcacaaggtgatgctataagggacatatcagggaagctcttgggacttatgaccactgc

SEQ ID NO: 152483 - DNA, 75 bp, synthetic construct
  source 1..75: mol_type = other DNA
atcgctacggcgaccgtgaatttgacaaacagctcactgaagcgggaacgggattaaatcgcttattcctgcacg

SEQ ID NO: 152484 - DNA, 75 bp, synthetic construct
  source 1..75: mol_type = other DNA
gattcaattaaaggtggttatgcaaagcgagtaacatttgatgcttccagagttgttccaactgcaaacgaaaac

SEQ ID NO: 152485 - DNA, 75 bp, synthetic construct
  source 1..75: mol_type = other DNA
gtatctattgtgatggtgcatttggcgtcactgttgagaatgtgtcacaaactttaggattaactcttgcgcctt

SEQ ID NO: 152486 - DNA, 75 bp, synthetic construct
  source 1..75: mol_type = other DNA
ctggcaaaggcttatcccaccaataaattaccggatttacgcggtgaatttatccgtggttgggatgacggacgt

SEQ ID NO: 152487 - DNA, 75 bp, synthetic construct
  source 1..75: mol_type = other DNA
atgccagttagtcgtaatagctgcattttcttaaacgttggtttgggagaaggttcagcattacctgttggtgcg

SEQ ID NO: 152488 - DNA, 75 bp, synthetic construct
  source 1..75: mol_type = other DNA
cctgttccgtggccttctgagacacctccaacaggctggctgaaatgcaacggtgctcctttttctgctgaagaa

SEQ ID NO: 152489 - DNA, 75 bp, synthetic construct
  source 1..75: mol_type = other DNA
gaactctgctttcagcgcaaggagatgctattcgaaacattactggcggttttggtcagttgcgcgtaaacagcg

SEQ ID NO: 152490 - DNA, 75 bp, synthetic construct
  source 1..75: mol_type = other DNA
atgccagttagccgttatctctgcattttcataaacgttggtttgggagaaggttcagcattacccgttggtgtg

SEQ ID NO: 152491 - DNA, 75 bp, synthetic construct
  source 1..75: mol_type = other DNA
cgggtgtcattggtctgaatgggtatgtaacgattccgttaattatttcaggttcccggagaacactgattattc

SEQ ID NO: 152492 - DNA, 75 bp, synthetic construct
  source 1..75: mol_type = other DNA
cctgatgaaacaatttactttgcaatactacggtccttctgctggtactggaacaagaacggttttcgccctcca

SEQ ID NO: 152493 - DNA, 75 bp, synthetic construct
  source 1..75: mol_type = other DNA
gacagaaagaacagatggcgctgtttacccaaaagtgattggccttgatgcttcaagaattgttccaactgcaaa

SEQ ID NO: 152494 - DNA, 75 bp, synthetic construct
  source 1..75: mol_type = other DNA
cttctgaaaagtatccaaaactggcaaaggcttacccaacgttaaaattacctgatttacggggtgaatttattc

SEQ ID NO: 152495 - DNA, 75 bp, synthetic construct
  source 1..75: mol_type = other DNA
ctgttggcgtaccagttccttggccttcacctacgccgccgacaggctggctgaaatgcaacggggctgcttttt

SEQ ID NO: 152496 - DNA, 75 bp, synthetic construct
  source 1..75: mol_type = other DNA
tgaaaaagccaccggtgccgatgagtcgtctggagcattatgccggtcaggatgaaatcggtctgcgttacaaca

SEQ ID NO: 152497 - DNA, 75 bp, synthetic construct
  source 1..75: mol_type = other DNA
ctggcgaagaaacgctcggaagatcgccgtaactggttgcaagagaaaggcgacatggcggagattgaggtttaa

SEQ ID NO: 152498 - DNA, 75 bp, synthetic construct
  source 1..75: mol_type = other DNA
gccgccaggcgggtgtggatccggggggattaacggtcatccacacatggggtcgtgaccagcagtggcatccgc

SEQ ID NO: 152499 - DNA, 75 bp, synthetic construct
  source 1..75: mol_type = other DNA
agcccgcgcttttctgtttcccggcttacacatgtactgaaagccaaagcagtactgtgccccggcgttgagatc

SEQ ID NO: 152500 - DNA, 75 bp, synthetic construct
  source 1..75: mol_type = other DNA
ggttgacccgctgaagtgcattctgtgcggaagtcagatgcgttttacggggctgaagcggggttaccgactggc

SEQ ID NO: 152501 - DNA, 75 bp, synthetic construct
  source 1..75: mol_type = other DNA
tgccggtcaggatgaaattggtctgcgttacaacagccaccgcacaaaacgggaagaatacctggtgatgagtgg

SEQ ID NO: 152502 - DNA, 75 bp, synthetic construct
  source 1..75: mol_type = other DNA
gttcatggaaaggttctcctggcatgtagcagataaggggttccgtatggtgaggtactacggtttcctgagtcc

SEQ ID NO: 152503 - DNA, 75 bp, synthetic construct
  source 1..75: mol_type = other DNA
gatgtgatactggaaatctgccatcaggcagatgtggagccggggatattcacggtgatccacacatgggggagt

SEQ ID NO: 152504 - DNA, 75 bp, synthetic construct
  source 1..75: mol_type = other DNA
gggcatattcgggatttacatcatcatatggcgggagcgaaacccgtccacgaaatattgcatttaactatatcg

SEQ ID NO: 152505 - DNA, 75 bp, synthetic construct
  source 1..75: mol_type = other DNA
gcagcgaatgtgatactggaaatctgccgccaggcgggtgtggatccggggggattaacggtcatccacacatgg

SEQ ID NO: 152506 - DNA, 75 bp, synthetic construct
  source 1..75: mol_type = other DNA
cagtgacaaaaatcatggcctgcgggaccacactgacgggctacacgcagtggtgttgttcatcaccggactgtt

SEQ ID NO: 152507 - DNA, 75 bp, synthetic construct
  source 1..75: mol_type = other DNA
gcgtggctggaatgtcaacgtatccagggtgatggataacgccacacacgtggcggtgtacttcggctcttacct

SEQ ID NO: 152508 - DNA, 75 bp, synthetic construct
  source 1..75: mol_type = other DNA
tggtggcgctggcgaatctggcggcggtcagactgtatggtgaaatcgagttttggttcgcgatgatcaaagtca

SEQ ID NO: 152509 - DNA, 75 bp, synthetic construct
  source 1..75: mol_type = other DNA
cggtagcccgttcgtactgactttcgccaaaatcggcattaccgcagcggcgggcattatcaactttgtggtgct

SEQ ID NO: 152510 - DNA, 75 bp, synthetic construct
  source 1..75: mol_type = other DNA
cacacctgccaccgatctggatgatgactactttgacatgttgcaggaggaactttgcagtgttgtggaggcatc

SEQ ID NO: 152511 - DNA, 75 bp, synthetic construct
  source 1..75: mol_type = other DNA
gccggaaccggaaaaaattgaggcgggtgtgaagattctggcggaagagattgaacgcgcctgggttgaaagcca

SEQ ID NO: 152512 - DNA, 75 bp, synthetic construct
  source 1..75: mol_type = other DNA
gccggagccggataaaattgaagcgggggtgaagattctggcggaagagattgaacgcgcctgggctgaaagtca

SEQ ID NO: 152513 - DNA, 75 bp, synthetic construct
  source 1..75: mol_type = other DNA
cagacgctactgaccgacatgctggaaagtggcaaagcgactgatgcactgtgcaattacgacggtccacagggg

SEQ ID NO: 152514 - DNA, 75 bp, synthetic construct
  source 1..75: mol_type = other DNA
ggctctgcattacctgttggtgtccctgttccgtggccttcagccactccgccaacaggctggctgaaatgcaat

SEQ ID NO: 152515 - DNA, 75 bp, synthetic construct
  source 1..75: mol_type = other DNA
atgccatttgctcgttatttctgcattttcataaacgttggtttgggagaaggctcagcgttacccgttggtgtg

SEQ ID NO: 152516 - DNA, 75 bp, synthetic construct
  source 1..75: mol_type = other DNA
gagcaccagtattgtcggtgcagcagagacacgcccacgtaatatttcatttaattacattgtgagggctgcatg

SEQ ID NO: 152517 - DNA, 75 bp, synthetic construct
  source 1..75: mol_type = other DNA
gaggtacctcagtccggaataacatcaacgtatctatgacatacgctaatgaccgaaaaatccgacaagatgttc

SEQ ID NO: 152518 - DNA, 75 bp, synthetic construct
  source 1..75: mol_type = other DNA
gcgaactctgctttcagcgcaaggagatgctattcgaaacattactggcggttttggtcagttgcgcgtaaacag

SEQ ID NO: 152519 - DNA, 75 bp, synthetic construct
  source 1..75: mol_type = other DNA
atgccagttagccgttatctctgcatttttataaacgttggtttgggagaagcggcaaaacccgttggtgtgcct

SEQ ID NO: 152520 - DNA, 75 bp, synthetic construct
  source 1..75: mol_type = other DNA
agatactagccgtagcttgctttcatcacagggcgatgccattcgaaatataattggtgcattagtggatgtcag

SEQ ID NO: 152521 - DNA, 75 bp, synthetic construct
  source 1..75: mol_type = other DNA
gaaataccagcatcagaagttatgggaagaagctatcttgcaaacctgacgccgggtgctaatagcccacttgat

SEQ ID NO: 152522 - DNA, 75 bp, synthetic construct
  source 1..75: mol_type = other DNA
tcggaaatggatcgcgtcactcaacagaatgcctcgttggtgcaggagtcagccgccgctgctgccgcactggaa

SEQ ID NO: 152523 - DNA, 75 bp, synthetic construct
  source 1..75: mol_type = other DNA
gatcggtattgatcctgacagcgccgaccttagccagttgcgttatggcaagatctgtatcctggcggatgcgga

SEQ ID NO: 152524 - DNA, 75 bp, synthetic construct
  source 1..75: mol_type = other DNA
ctttttacggaggtacctcagtccggaataacatcaacgtatctatgacatacgctaatgaccgaaaaatccgac

SEQ ID NO: 152525 - DNA, 75 bp, synthetic construct
  source 1..75: mol_type = other DNA
gctgggatgatggacgcggcttggatgctgggcgtgccttgctaagtcttcaggatgactcttttgaagcgcaca

SEQ ID NO: 152526 - DNA, 75 bp, synthetic construct
  source 1..75: mol_type = other DNA
cagcggtccggcactgcccggaaaactggctgactgtaccgcgcaggatcttaaccgcaccgaactgtttctcgt

SEQ ID NO: 152527 - DNA, 75 bp, synthetic construct
  source 1..75: mol_type = other DNA
atgtaccccaaactggcaaaagcctaccccaccaataaattaccagacttacgcggtgaatttatccgtggctgg

SEQ ID NO: 152528 - DNA, 75 bp, synthetic construct
  source 1..75: mol_type = other DNA
cagacgctactgactgacatgctggaaagcggcaaagcaacggatgcgctgtgtaattatgacggcccgcagggg

SEQ ID NO: 152529 - DNA, 75 bp, synthetic construct
  source 1..75: mol_type = other DNA
gaaatcgccgacagttcgaagaaaatcgccgacattattagcgtaatcgacggcattgccttccagaccaatatc

SEQ ID NO: 152530 - DNA, 75 bp, synthetic construct
  source 1..75: mol_type = other DNA
gatagcgccaggaaaacattggcccaggccgcgacgcattataaaaaattcaaaagcatggcaccgttacctgaa

SEQ ID NO: 152531 - DNA, 75 bp, synthetic construct
  source 1..75: mol_type = other DNA
ggcagtttgtttttttcttcgcttcaccatagccagaaaagctttgtcgtttccaatgaactacgggaacaacag

SEQ ID NO: 152532 - DNA, 75 bp, synthetic construct
  source 1..75: mol_type = other DNA
gcgaatacctgctcgaacaggggcatctgaattacgcaaccgtcgcagccgaagcacgcaaggaggcacacagaa

SEQ ID NO: 152533 - DNA, 75 bp, synthetic construct
  source 1..75: mol_type = other DNA
ctgacgccccaattaacggggaaaggccagcagtggttgacgcgtaaactgctcgatgctggcttgttaaaacct

SEQ ID NO: 152534 - DNA, 75 bp, synthetic construct
  source 1..75: mol_type = other DNA
acgccagcaccagccgtgaatattatccccaacaccggagacacaatcgacagcctgacactgttaaagatggtc

SEQ ID NO: 152535 - DNA, 75 bp, synthetic construct
  source 1..75: mol_type = other DNA
ttgctaaggggtacggaaccgatgaaggcaatattcgtaaaaatttgtcttgcaactccgatcgctttgaagaag

SEQ ID NO: 152536 - DNA, 75 bp, synthetic construct
  source 1..75: mol_type = other DNA
atgagaacatcgttagttacccgtgaagagatgatcgaggcaattgaacagcacactgcctgtatcagtaccagg

SEQ ID NO: 152537 - DNA, 75 bp, synthetic construct
  source 1..75: mol_type = other DNA
gaatcagagctggtggttgttcaaaatcagtcggatgaaattcccgttctggagtggcagggagtgcgtgtcgta

SEQ ID NO: 152538 - DNA, 75 bp, synthetic construct
  source 1..75: mol_type = other DNA
gtgataaaagtggctgcatttacggatggtattcagcggctggcgttaaatatgatggaaaattctccccatgta

SEQ ID NO: 152539 - DNA, 75 bp, synthetic construct
  source 1..75: mol_type = other DNA
cagggtggcgaaggcgcgatgctcgccgtcaatgaagcgatggcttatatgtcgcaaaaagtgcagggcggggaa

SEQ ID NO: 152540 - DNA, 75 bp, synthetic construct
  source 1..75: mol_type = other DNA
ttggggcttaatgatgtcctcgccacaaatatggtactgaccattcgtcaacgactttttgccgaggcggaagcc

SEQ ID NO: 152541 - DNA, 75 bp, synthetic construct
  source 1..75: mol_type = other DNA
aaaatactcgatgaacttgaaggtgaattttacacaaaaagtgcaaaatcccatggcacaagggctgggcgctct

SEQ ID NO: 152542 - DNA, 75 bp, synthetic construct
  source 1..75: mol_type = other DNA
tccgccataagcgacagcttgtggcaggtctgaagaatacatcatataacgccgtacactggagtcagctgtccc

SEQ ID NO: 152543 - DNA, 75 bp, synthetic construct
  source 1..75: mol_type = other DNA
agcagccattattgtcggtatttgtcgctgatggcgcaggcagcgtctcgcagggtggcgaaggtgcgatgctcg

SEQ ID NO: 152544 - DNA, 75 bp, synthetic construct
  source 1..75: mol_type = other DNA
taatcgaagaagctaaatttaaaatagcgattgcgaaatgccaccctaattcagagatggcacgggtagagggtg

SEQ ID NO: 152545 - DNA, 75 bp, synthetic construct
  source 1..75: mol_type = other DNA
gtggctgaaagatacacaccgcaaaaacactggagtcagctgtcccccgaagaccagatccgtttctgggaagac

SEQ ID NO: 152546 - DNA, 75 bp, synthetic construct
  source 1..75: mol_type = other DNA
gaaatatgtcccgacaaaagaggattgcaacgacagaccgaactatgaaattcaggcgttattcactgccccgcc

SEQ ID NO: 152547 - DNA, 75 bp, synthetic construct
  source 1..75: mol_type = other DNA
gaattactggtaattcttgaggatgtacgcgaacacttcgggaaaccagtaattattaacagtgggaaccgttgc

SEQ ID NO: 152548 - DNA, 75 bp, synthetic construct
  source 1..75: mol_type = other DNA
ccgaaaaaaaatcactggagttgacgaagatcagcgcacacaaaatggctctaccggtcagaattctgacgcttc

SEQ ID NO: 152549 - DNA, 75 bp, synthetic construct
  source 1..75: mol_type = other DNA
ggagttgacgaagagcagcgcacacaaaatggctctaccgatcagaatcctgacgcttcaggtccgcagtattaa

SEQ ID NO: 152550 - DNA, 75 bp, synthetic construct
  source 1..75: mol_type = other DNA
tatcagcgaaagaactcgcagcaattcttgaaaaggaatacccgcatctggatgtcgataagcgcgatgtttatc

SEQ ID NO: 152551 - DNA, 75 bp, synthetic construct
  source 1..75: mol_type = other DNA
gaatcggagctggtggttgttcagaatcagtctgatgaaattcccgttctggaatggctgggagtgcgtgtagtg

SEQ ID NO: 152552 - DNA, 75 bp, synthetic construct
  source 1..75: mol_type = other DNA
acaaccgaaactcttgctagagggtatggggtcgatgaagccaatattcgcaacaatttgtctcgcaaccttgac

SEQ ID NO: 152553 - DNA, 75 bp, synthetic construct
  source 1..75: mol_type = other DNA
gtgaaaaaagacgttacagactttcaggggaagccgtgggctggtgactggaaatatgtaccgacaaaagaggat

SEQ ID NO: 152554 - DNA, 75 bp, synthetic construct
  source 1..75: mol_type = other DNA
ccacttaccctgtgcggttgagaaaatcgccttcgaccgcttccatgtagcaaagcaacttggcgaagtggttga

SEQ ID NO: 152555 - DNA, 75 bp, synthetic construct
  source 1..75: mol_type = other DNA
acagaaagcccaccagctaaatcagcagctggtggccgccgctcctaaagtcgattttgccgaccgggtatcagt

SEQ ID NO: 152556 - DNA, 75 bp, synthetic construct
  source 1..75: mol_type = other DNA
aaaaggtaaactttgagccagacagcgccttccgcggcgagaaaaaaccgaagccgaaagcggcgaagaaagacg

SEQ ID NO: 152557 - DNA, 75 bp, synthetic construct
  source 1..75: mol_type = other DNA
gggggaatccagcggccagacttatcgcctgggcgatcgcgtggaagttcgcgtcgaagcggttaatatggacga

SEQ ID NO: 152558 - DNA, 75 bp, synthetic construct
  source 1..75: mol_type = other DNA
ggtaggtaacgtctttaaaggcgtaatttccagcgtcaccggcttcggtttctttgttcgcctggatgatttgtt

SEQ ID NO: 152559 - DNA, 75 bp, synthetic construct
  source 1..75: mol_type = other DNA
gtattgaagttcgtcgtgatgcttatgggcgttacagcctgaacgatctgcagatggtattgaagttcgtcgtga

SEQ ID NO: 152560 - DNA, 75 bp, synthetic construct
  source 1..75: mol_type = other DNA
aaatcgtcgaagtacttggcgacaatatgggcaccggcatggcggttgatatcgctctgcgtacccatgaaattc

SEQ ID NO: 152561 - DNA, 75 bp, synthetic construct
  source 1..75: mol_type = other DNA
cgagaaaagcgaaaaagccatcggcgaaaacgcagaaaatagccgcagctaccaaagcgaagcgtgcggcgaaga

SEQ ID NO: 152562 - DNA, 75 bp, synthetic construct
  source 1..75: mol_type = other DNA
ttgaaaccaccgatggcgtggtccagctctccggtaccgtagattctcaggcacaaagtgaccgtgctgaaagta

SEQ ID NO: 152563 - DNA, 75 bp, synthetic construct
  source 1..75: mol_type = other DNA
atagcgaagaagaactgaaccttgtcgatccacgtcctaaagctggcgtcataagcataaatgcagcgcgtaaaa

SEQ ID NO: 152564 - DNA, 75 bp, synthetic construct
  source 1..75: mol_type = other DNA
ttcaggtgatggtgtcagaaacaaaagtggcttccatcgccgggattcaaaactttggtagttttgtctttgctt

SEQ ID NO: 152565 - DNA, 75 bp, synthetic construct
  source 1..75: mol_type = other DNA
ctggcgtttatgggtcgcaattgccgacgtcagttactatgtgcgtccgccaacaccgctggacagagaagcgcg

SEQ ID NO: 152566 - DNA, 75 bp, synthetic construct
  source 1..75: mol_type = other DNA
ggttaaaccgcgtccacagttgcaatttagcgagtggctggcgctgtttaagcatcggacaacctgggggatgat

SEQ ID NO: 152567 - DNA, 75 bp, synthetic construct
  source 1..75: mol_type = other DNA
aatttctgagccagagcggtaagatggtcaccgccgccgcgctgtttggtccctcagtgccgctcgcccatgcgg

SEQ ID NO: 152568 - DNA, 75 bp, synthetic construct
  source 1..75: mol_type = other DNA
cgctgatggcgcaggcagtgtctcgcagggtggcgaaggcgcgatgcttgccatcaatgaagcgatggcttatgt

SEQ ID NO: 152569 - DNA, 75 bp, synthetic construct
  source 1..75: mol_type = other DNA
gcgactttttgccgaggctgaagccaaagaattagcggttcgcgattttgcctgcacgtttctgggattgatttc

SEQ ID NO: 152570 - DNA, 75 bp, synthetic construct
  source 1..75: mol_type = other DNA
tccaccagacccaaatgcgaaaatccgacctggtatcgtcctgcgcgctataaggcgctgagcgggcagctcggg

SEQ ID NO: 152571 - DNA, 75 bp, synthetic construct
  source 1..75: mol_type = other DNA
aagcagtttttgtccagcccagcggtaaacgagcgtaccgatgatgataaaacgttagcactggcgctgtgggca

SEQ ID NO: 152572 - DNA, 75 bp, synthetic construct
  source 1..75: mol_type = other DNA
aaagcattagcagttcgcgattttgcctgcacgtttctgggattgatttcatcggctaatggcaccttgattatg

SEQ ID NO: 152573 - DNA, 75 bp, synthetic construct
  source 1..75: mol_type = other DNA
acgcgatatattgccagatttgctaaagcaatttttgtcctgccccgcagtgaatgaacgcaccgatgatgataa

SEQ ID NO: 152574 - DNA, 75 bp, synthetic construct
  source 1..75: mol_type = other DNA
acctacgcttcctcgaacggtcgcctggatatctggtgggataaccgttctgacttcaacgccaacggcgaaaaa

SEQ ID NO: 152575 - DNA, 75 bp, synthetic construct
  source 1..75: mol_type = other DNA
atgcttaagccagacaacctgcccgttacacttggcaaaaacgatgtagaaattattgcacgagaaacactttat

SEQ ID NO: 152576 - DNA, 75 bp, synthetic construct
  source 1..75: mol_type = other DNA
attcacccccgtattgctggaaaaaggatgccaccgtttataccagttttacatgaacggtgaactccctatgaa

SEQ ID NO: 152577 - DNA, 75 bp, synthetic construct
  source 1..75: mol_type = other DNA
accaaacctaaatgcgaaaatccgtcctggtttcgtcctgcacgctataaggctctgggcggtcaactgggatat

SEQ ID NO: 152578 - DNA, 75 bp, synthetic construct
  source 1..75: mol_type = other DNA
aggtctgaagaatactccatataacgcagtacactggagtcagttagcacccgaagagcagatccgtttctggga

SEQ ID NO: 152579 - DNA, 75 bp, synthetic construct
  source 1..75: mol_type = other DNA
acatcccaagctggggcggtggttacggcaacattttccaggatgagcgtgacgtgaaatttatggtaatcgcac

SEQ ID NO: 152580 - DNA, 75 bp, synthetic construct
  source 1..75: mol_type = other DNA
gatggaagagggattgatactaaccgtagcttgctttcgtcacagggagataccattcggaatataacaggattt

SEQ ID NO: 152581 - DNA, 75 bp, synthetic construct
  source 1..75: mol_type = other DNA
cccggttttgttgaattgctggaatcggggtttgctgttgaatacctgagccgcaagaatccgtttggcgatatc

SEQ ID NO: 152582 - DNA, 75 bp, synthetic construct
  source 1..75: mol_type = other DNA
gtcaccatcgggccgctgatcgatgaaaaagcggtagcaaaagtggaagagcatattgccgatgcgctggagaaa

SEQ ID NO: 152583 - DNA, 75 bp, synthetic construct
  source 1..75: mol_type = other DNA
cgtgcctggcatcttaaagatattgccggacgtctctatgccagtgaaagtctgatcaagaaaagactgaaggag

SEQ ID NO: 152584 - DNA, 75 bp, synthetic construct
  source 1..75: mol_type = other DNA
atgccagttagccgtaatctctgcattttcttaaacgttggtttgggagaaggttcagcattacctgttggtgca

SEQ ID NO: 152585 - DNA, 75 bp, synthetic construct
  source 1..75: mol_type = other DNA
attcaacaatgaagattccattacagaccttcgtgagggcagctttaaaatgccggacgggacaacattcagcga

SEQ ID NO: 152586 - DNA, 75 bp, synthetic construct
  source 1..75: mol_type = other DNA
gatctggaatacatggaatcagacggggcttgaattaggctggtttaagcaacagaacaaaactcagcagggggt

SEQ ID NO: 152587 - DNA, 75 bp, synthetic construct
  source 1..75: mol_type = other DNA
tttttgtcgcgctggtcattgtcggcgcgggcgtcaaaatcgtgccgcagggctatcagtggacagtagaacgtt

SEQ ID NO: 152588 - DNA, 75 bp, synthetic construct
  source 1..75: mol_type = other DNA
ctctgccggatacagccccttcagcattcccatgaacaacatattgaagaactccgcgcgtccctggtccggatg

SEQ ID NO: 152589 - DNA, 75 bp, synthetic construct
  source 1..75: mol_type = other DNA
aggcgtcaccatcgggccgctgatcgatgaaaaagcggtagcaaaagtggaagagcatattgccgatgcgctgga

SEQ ID NO: 152590 - DNA, 75 bp, synthetic construct
  source 1..75: mol_type = other DNA
acgccgggcaaacctgcgtctgcgccaaccgcctgtatgttcaggacggcgtatatgaccgctttgctgaaaaat

SEQ ID NO: 152591 - DNA, 75 bp, synthetic construct
  source 1..75: mol_type = other DNA
gcgctgctgttaagccgcaagaatccgtttggtgatatcaaatcggatggcacggtggaaacggctctcgaaaac

SEQ ID NO: 152592 - DNA, 75 bp, synthetic construct
  source 1..75: mol_type = other DNA
cgggaaatattcagattcgtaccattggctatggcgagagctatatcaacgccacggggttacgccatgtctggc

SEQ ID NO: 152593 - DNA, 75 bp, synthetic construct
  source 1..75: mol_type = other DNA
tctgatcaagaaaagactgaaggaggagggaaactcattttctgaaatattaagggatatgtgtatggagtcagc

SEQ ID NO: 152594 - DNA, 75 bp, synthetic construct
  source 1..75: mol_type = other DNA
tggctgttccgtggccttcagccacaccgcctactggctggctgaaatgcaacggtgcggctttttctgctgaag

SEQ ID NO: 152595 - DNA, 75 bp, synthetic construct
  source 1..75: mol_type = other DNA
tgggacctggaacgcaaccgaacgatgacagtttcagcatgaacccgctgccaattacctgccaggtgaatgatg

SEQ ID NO: 152596 - DNA, 75 bp, synthetic construct
  source 1..75: mol_type = other DNA
cgcatgagttactggcacatgtacgtaaccccgacgcgcagccgcacagcattaatctgacgcaattacccatca

SEQ ID NO: 152597 - DNA, 75 bp, synthetic construct
  source 1..75: mol_type = other DNA
atgagtgacacttttttccatttactggggccaggaacgcaacctgatgacgacagcttcagtatgaatccgctg

SEQ ID NO: 152598 - DNA, 75 bp, synthetic construct
  source 1..75: mol_type = other DNA
cacaaaagatgaatgggaactggctacgatttcaaaaagacatacacacaaggacggggacttgatgccacaaat

SEQ ID NO: 152599 - DNA, 75 bp, synthetic construct
  source 1..75: mol_type = other DNA
aaagtacccaaaactggcaaaggcttaccccaccaataaattaccagacttacgcggtgaatttatccgtggctg

SEQ ID NO: 152600 - DNA, 75 bp, synthetic construct
  source 1..75: mol_type = other DNA
ggatgtgcttgataatggtgatcttcccggttttgttgaattgctgggatcggggtttgctgttgaatacctgag

SEQ ID NO: 152601 - DNA, 75 bp, synthetic construct
  source 1..75: mol_type = other DNA
cctgttccgtggccttccgctactccgccgacaggctggctgaaatgcaatggtgcggctttttctgctgaagaa

SEQ ID NO: 152602 - DNA, 75 bp, synthetic construct
  source 1..75: mol_type = other DNA
gcaacggagcagctttttctgctgaagaatacccggtactggcaaaggcttacccgacaaataaattgcctgatt

SEQ ID NO: 152603 - DNA, 75 bp, synthetic construct
  source 1..75: mol_type = other DNA
cctgttccgtggccttcagccactccgccaacaggctggctgaaatgcaacggtgcggctttttctgctgaagaa

SEQ ID NO: 152604 - DNA, 75 bp, synthetic construct
  source 1..75: mol_type = other DNA
gcacatactcacgatgcagcgcgttttttaagaatggcaagatctacgaggttggcgcggcattggttgacgcaa

SEQ ID NO: 152605 - DNA, 75 bp, synthetic construct
  source 1..75: mol_type = other DNA
atgacaccaaccgaattattagaaagcgttaaagtacgatttaatccactgcttgtgcgtgaagaagaaacgctg

SEQ ID NO: 152606 - DNA, 75 bp, synthetic construct
  source 1..75: mol_type = other DNA
cctgtcatctcttggctgggcggaagatgaagacctccagaataaactgttagttgatgaaattggtttcaccta

SEQ ID NO: 152607 - DNA, 75 bp, synthetic construct
  source 1..75: mol_type = other DNA
ggaacatatcgccgatgcgctggagaaaggggcaacgctgcttacgggcggaaaacgccacgcgctgggcggaac

SEQ ID NO: 152608 - DNA, 75 bp, synthetic construct
  source 1..75: mol_type = other DNA
atttgctaacggtgcggtaagatcggctttgtggttgagtggtaaggaaagtggtctttttgatatgcgagatgt

SEQ ID NO: 152609 - DNA, 75 bp, synthetic construct
  source 1..75: mol_type = other DNA
aagatctgaaagattgcgcagtttacagccgtgaaggtcataccggtgaacgagtgccaggcaccattggttttg

SEQ ID NO: 152610 - DNA, 75 bp, synthetic construct
  source 1..75: mol_type = other DNA
atgaaagatttaactttgaagtttcatgacaaactgcagtttaaggccttcctgtcatctcttgactgggcggaa

SEQ ID NO: 152611 - DNA, 75 bp, synthetic construct
  source 1..75: mol_type = other DNA
atgaaagatttaactttgaagtttcatgacaaactgcagtttaaggccttcctgtcatctcttgactgggaggac

SEQ ID NO: 152612 - DNA, 75 bp, synthetic construct
  source 1..75: mol_type = other DNA
gccacagcacaacgcctttgcgtggttctatcttggcgcatttctggtggcggtgattgcatggttcttgctggg

SEQ ID NO: 152613 - DNA, 75 bp, synthetic construct
  source 1..75: mol_type = other DNA
atgaaagatttaactttgaagtttcatgacaaactgcagtttaaggccttcctgtcatctcttggctggggggac

SEQ ID NO: 152614 - DNA, 75 bp, synthetic construct
  source 1..75: mol_type = other DNA
atgaaagatttaactttgaagtttcatgacaaactgcagtttaaggccttcctgtcatctcttggctgggcggag

SEQ ID NO: 152615 - DNA, 75 bp, synthetic construct
  source 1..75: mol_type = other DNA
atgaaagatttaactttgaagtttcatgacaaactgcagtttaaggccttcctgtcatctcttgcctgggcggac

SEQ ID NO: 152616 - DNA, 75 bp, synthetic construct
  source 1..75: mol_type = other DNA
tatccatgatgcagaatgtattcgtgaaatccacgaagcacccctgcaggctatcggcatcctggaaaaatacaa

SEQ ID NO: 152617 - DNA, 75 bp, synthetic construct
  source 1..75: mol_type = other DNA
tctggccaacgggacatccggcacatggttttacactgaagacattgcagtcactgacgcgtggcttcgcgcgca

SEQ ID NO: 152618 - DNA, 75 bp, synthetic construct
  source 1..75: mol_type = other DNA
ttggaagccttcttaacattgagtaaaacaattccaaatgatttttatttgaactttaataatgtaaatgaaatg

SEQ ID NO: 152619 - DNA, 75 bp, synthetic construct
  source 1..75: mol_type = other DNA
cccctgaaacgtggaaaatacgttttctggccaacgggtcatccggcacatggttttacactgacgacattgcgg

SEQ ID NO: 152620 - DNA, 75 bp, synthetic construct
  source 1..75: mol_type = other DNA
atctgcccaataccggaagtggtgctggcagcgccagaagatttggtcgactctgcgcagcggcttagtgaggta

SEQ ID NO: 152621 - DNA, 75 bp, synthetic construct
  source 1..75: mol_type = other DNA
tgacagtttcagcatgaatccactgccgatcacctgtcaggtgaatggtgaaccgagtatggcggccctggagca

SEQ ID NO: 152622 - DNA, 75 bp, synthetic construct
  source 1..75: mol_type = other DNA
gcggccaatgtgtcactgtgggttagtagctttgtgatgcaggcggccatgttacttgtttatttttcaaataat

SEQ ID NO: 152623 - DNA, 75 bp, synthetic construct
  source 1..75: mol_type = other DNA
tatgttaatgtccattctgccgttcggtgtaatgcctcaggcagaactagcgcaggtcagtaacccctctaccgc

SEQ ID NO: 152624 - DNA, 75 bp, synthetic construct
  source 1..75: mol_type = other DNA
ctccagcaaccaacaaacgcattgtagtgatcaagcagcctgtcggcgtgtgtgcggcgattacaccctggaatt

SEQ ID NO: 152625 - DNA, 75 bp, synthetic construct
  source 1..75: mol_type = other DNA
ttaaattaattaagttcggaggtttctttcatagagttttattaataaactctcaatatcttctttcatctcatg

SEQ ID NO: 152626 - DNA, 75 bp, synthetic construct
  source 1..75: mol_type = other DNA
agttttgaacgaaaaaataaaataacaaacatgctaccgatcaaaacaaagctgttaagatatgtgtccacattg

SEQ ID NO: 152627 - DNA, 75 bp, synthetic construct
  source 1..75: mol_type = other DNA
tgtaaaattattggtagatggcgatgaaataaaaaaagactttatttttaattttattaattacgatgctggatt

SEQ ID NO: 152628 - DNA, 75 bp, synthetic construct
  source 1..75: mol_type = other DNA
aagggctggtggtttactttctctatttcgaatttattgccctgattgtgaagtattttcaatccggctttcact

SEQ ID NO: 152629 - DNA, 75 bp, synthetic construct
  source 1..75: mol_type = other DNA
acgtggttttacatttcttacgaacccttcagccgaccaatttctaacacaagatgcccttccagcttttagtga

SEQ ID NO: 152630 - DNA, 75 bp, synthetic construct
  source 1..75: mol_type = other DNA
catcagcgatctcaaactggcaatggggcttaacgcatccaaaggcaaaaaaacggcaatcgataaaatttatcc

SEQ ID NO: 152631 - DNA, 75 bp, synthetic construct
  source 1..75: mol_type = other DNA
atggggtccagcgaggcgctgaaagatcgctatgattttatgaagtttcaggtcttccagtggttgattggcgca

SEQ ID NO: 152632 - DNA, 75 bp, synthetic construct
  source 1..75: mol_type = other DNA
aaaaattgacggattaactcatcaagaaatagctgatgtttttagacgctcacagaaatttatttcatatgatga

SEQ ID NO: 152633 - DNA, 75 bp, synthetic construct
  source 1..75: mol_type = other DNA
tactaatgtcattgattatgggaaaaacgaactgtattttaaatttaactcggcgattcatgactttgaaaatga

SEQ ID NO: 152634 - DNA, 75 bp, synthetic construct
  source 1..75: mol_type = other DNA
cctgtttggcacaaattaaacaatatcccttcagattccgtggtaatttatccggaaataatcaatggtaatcct

SEQ ID NO: 152635 - DNA, 75 bp, synthetic construct
  source 1..75: mol_type = other DNA
agcggagccgaaggggtagaaacgttgctcgaacgtggggctaaatttagcgcgttagtcgccagtaatgatgat

SEQ ID NO: 152636 - DNA, 75 bp, synthetic construct
  source 1..75: mol_type = other DNA
tgtatgcgttatttagtcttttcgtaattccggcaaatgttttcctagcaaaacaatatttaggtcaagggacat

SEQ ID NO: 152637 - DNA, 75 bp, synthetic construct
  source 1..75: mol_type = other DNA
tgtatcattgttattagttacttgtggttggtgggtaagtgaacaatatagtacttcatggctaaatacaaagct

SEQ ID NO: 152638 - DNA, 75 bp, synthetic construct
  source 1..75: mol_type = other DNA
atctcttattctatatcgaggcagcatggcagcgcagagaaatagaaagaataaaagctaggttagacttaatag

SEQ ID NO: 152639 - DNA, 75 bp, synthetic construct
  source 1..75: mol_type = other DNA
ctatcactgcatgagtatgggggttgtcagaaatcgcctttttgctgtaattgagacgcggaccgtgagcggaaa

SEQ ID NO: 152640 - DNA, 75 bp, synthetic construct
  source 1..75: mol_type = other DNA
gggtataaagacgcgctggcgcagcatggtattgcgctcaatgaaaaacttatcgctaacggtaaatggacgcct

SEQ ID NO: 152641 - DNA, 75 bp, synthetic construct
  source 1..75: mol_type = other DNA
tcgtagcagtacgtattggcatctggctctatcaccgttccgacaatccacgcgatttaatcccggggagaaaag

SEQ ID NO: 152642 - DNA, 75 bp, synthetic construct
  source 1..75: mol_type = other DNA
cacttaatcaggggcttagccttggcgcgctggcttcagttgttgtcggtgtccctcccgaggtggcgttaggtg

SEQ ID NO: 152643 - DNA, 75 bp, synthetic construct
  source 1..75: mol_type = other DNA
cactcaatcaggggcttagtctgggtgcgatggcttcagttgtcgtcggtgtccctcccgaggtggcgttaggtt

SEQ ID NO: 152644 - DNA, 75 bp, synthetic construct
  source 1..75: mol_type = other DNA
acagcggagccagcatcgtgcgggcgctggcttcgggcgacgtgcaaatcggcaacctcggttccagcccgttag

SEQ ID NO: 152645 - DNA, 75 bp, synthetic construct
  source 1..75: mol_type = other DNA
gtattggtatatggctctatcaccgttctgataatccacgcgagttaattccggggagaaaagacgatggtaacg

SEQ ID NO: 152646 - DNA, 75 bp, synthetic construct
  source 1..75: mol_type = other DNA
gtattggtatctggctctatcatcgttcagacaatccacgcgattttataccggggagaaaagacgatgacaact

SEQ ID NO: 152647 - DNA, 75 bp, synthetic construct
  source 1..75: mol_type = other DNA
atcggcatagccagcctgatccctaccatcacgcaggactctttcgagaaagggattgttttctctgctggtgca

SEQ ID NO: 152648 - DNA, 75 bp, synthetic construct
  source 1..75: mol_type = other DNA
ggaccgcaagcttatcgcagagaacgtgaagcgcgcctaaaggcggctgcgaaagcgttggaccccctgatttcg

SEQ ID NO: 152649 - DNA, 75 bp, synthetic construct
  source 1..75: mol_type = other DNA
aaacaggaattcgatgcatttgatgcttccatactcttggatctctttgaaaaccagtattatgcaaataaaaat

SEQ ID NO: 152650 - DNA, 75 bp, synthetic construct
  source 1..75: mol_type = other DNA
cgataaatcaggggcttagctacggtgcgctggcggcagtcatcgccggcgtacctcctgaagtggcgcttggat

SEQ ID NO: 152651 - DNA, 75 bp, synthetic construct
  source 1..75: mol_type = other DNA
cgcgcattaatcttgactggaccacggtaaccgcaccgatttcagggcgtattggcatttcgtcggtaacccctg

SEQ ID NO: 152652 - DNA, 75 bp, synthetic construct
  source 1..75: mol_type = other DNA
gaattggtatctggctctatcaccgttccgataatccacgcgagttaattccggggagaaaagacgatggtaacg

SEQ ID NO: 152653 - DNA, 75 bp, synthetic construct
  source 1..75: mol_type = other DNA
caattaattgctgaagggaaaatatccggtaatgggggtatggccattaaaggcggcaaaggaaaatatactgcc

SEQ ID NO: 152654 - DNA, 75 bp, synthetic construct
  source 1..75: mol_type = other DNA
catatccctgctccgcgtgacggtcgtgattatgatccggaagtactgaagcaggcggtgaatgatgcggttgcg

SEQ ID NO: 152655 - DNA, 75 bp, synthetic construct
  source 1..75: mol_type = other DNA
tgggtatcaggcccatttatataagcagcaaaaccctggtgttggtgtacgtgaaaatattgatatctgggcctg

SEQ ID NO: 152656 - DNA, 75 bp, synthetic construct
  source 1..75: mol_type = other DNA
ttgtttttccgtaatcgcaaaaatattgccatgaccataaaagaaaaattctcacaaaaatatccccatgcttcc

SEQ ID NO: 152657 - DNA, 75 bp, synthetic construct
  source 1..75: mol_type = other DNA
caggtggccaaatttagtgtgccactacacttttgtacttttggcgattcagcagcgttggccgatcacctcgca

SEQ ID NO: 152658 - DNA, 75 bp, synthetic construct
  source 1..75: mol_type = other DNA
aaaaatatccccatgcttccttttgtacttttggcgattcagcagcgttggccgatcacctcgcaacgttgattg

SEQ ID NO: 152659 - DNA, 75 bp, synthetic construct
  source 1..75: mol_type = other DNA
aaagagattttaagctctgaacctattgttaaaagaaaaatgcctgaaataaatcaaaaaacatatatgcagctt

SEQ ID NO: 152660 - DNA, 75 bp, synthetic construct
  source 1..75: mol_type = other DNA
attgataaacttatgtttaatataaagcaagttagcagaaggatattagaaataaacaaggatctaaattatgaa

SEQ ID NO: 152661 - DNA, 75 bp, synthetic construct
  source 1..75: mol_type = other DNA
ataacggtgagcccttcaccatccgtgactggatgcggggtgtccgggaagatcagaaaaacggctggctgttta

SEQ ID NO: 152662 - DNA, 75 bp, synthetic construct
  source 1..75: mol_type = other DNA
ggtgggcagaaaaaacgtgcaaaggaatctggtgtcactttgctgtacaccccctttgcccgtgaagcatttgtt

SEQ ID NO: 152663 - DNA, 75 bp, synthetic construct
  source 1..75: mol_type = other DNA
aagggttgttagatgcggtaataggtctaccagataggttgcttcctggaacagcgataccaaccgccattttga

SEQ ID NO: 152664 - DNA, 75 bp, synthetic construct
  source 1..75: mol_type = other DNA
gtatagaattaaatcacgaagaacgcagagatatatctatacagtttagagtaaacaaagcagagtttgaatatt

SEQ ID NO: 152665 - DNA, 75 bp, synthetic construct
  source 1..75: mol_type = other DNA
gggaaatgccgctgactgataatgacgggagcatcattgttgatgaggatgataatccagtgatggtaatagaag

SEQ ID NO: 152666 - DNA, 75 bp, synthetic construct
  source 1..75: mol_type = other DNA
gccagcaggatctagatggggggtcagacctgatctcttattctatatcgaggcggcatggcagcgcagagaaat

SEQ ID NO: 152667 - DNA, 75 bp, synthetic construct
  source 1..75: mol_type = other DNA
agacctgatctcttattctatatcgaggcagcatggcagcgcagagaaatggataagataaaagagcggattcag

SEQ ID NO: 152668 - DNA, 75 bp, synthetic construct
  source 1..75: mol_type = other DNA
taacttcctggtggcttcatgctcagggttaatcttcttctgcctcctggcccgattaaaggtggccgcgccggc

SEQ ID NO: 152669 - DNA, 75 bp, synthetic construct
  source 1..75: mol_type = other DNA
ggtgatggcgctgcgcatgattgcttcagggctggtggaaggccccctgcttatctccattaccaaactgcttca

SEQ ID NO: 152670 - DNA, 75 bp, synthetic construct
  source 1..75: mol_type = other DNA
taacgctgctggatatcctgtatataacggacagattgccaaattcgttaccgtgcaaggccattctatggctgt

SEQ ID NO: 152671 - DNA, 75 bp, synthetic construct
  source 1..75: mol_type = other DNA
ccagccaggtgctggcggcgcgccaacaactgcagcgcgcacagggagcaaccaaagcaaaaaagagtgaaccgg

SEQ ID NO: 152672 - DNA, 75 bp, synthetic construct
  source 1..75: mol_type = other DNA
tggtcgtttcaaagtttatctgatcgacgaagtgcatatgctgtcgcgccacagctttaacgcactgttaaaaac

SEQ ID NO: 152673 - DNA, 75 bp, synthetic construct
  source 1..75: mol_type = other DNA
acgaagcaaaagaaattttctttaactactgcaattactcataccacgaaataaaagacgaagaggaaggacaaa

SEQ ID NO: 152674 - DNA, 75 bp, synthetic construct
  source 1..75: mol_type = other DNA
aaagttcctggggaaaggctcacaggtctttgtagaaggttctatgcgtaacactcagtatgaatcgaacggcca

SEQ ID NO: 152675 - DNA, 75 bp, synthetic construct
  source 1..75: mol_type = other DNA
accggaaacgccgcgtcagtccgtcgcgccaacggcggtaatgacacctacgcaaatgccgccgcaaccgcaatc

SEQ ID NO: 152676 - DNA, 75 bp, synthetic construct
  source 1..75: mol_type = other DNA
tgcgataactgccgcgaaatcgaacaggggcgctttgttgatctgattgagatcgatgccgcctcgcgcaccaaa

SEQ ID NO: 152677 - DNA, 75 bp, synthetic construct
  source 1..75: mol_type = other DNA
ggcggagccggatgcggtgaaagggattgccggtattaaggtgaataaaggtgctgaaagttttgaagtcgagcc

SEQ ID NO: 152678 - DNA, 75 bp, synthetic construct
  source 1..75: mol_type = other DNA
gcgacaatccgcatattccttccgcaaaactgcgcgggataaaggactgctacaaaataaaattacgtgcgtcag

SEQ ID NO: 152679 - DNA, 75 bp, synthetic construct
  source 1..75: mol_type = other DNA
tgacgctgaattaattatcgctgttgtagctgtaggtaaacgtgaacgtagtgacgtgtataatcttgccagcaa

SEQ ID NO: 152680 - DNA, 75 bp, synthetic construct
  source 1..75: mol_type = other DNA
gccgatgaaaggcgcagcagtgggtcacgctcagcagcgttacaaagacagccgttttattggtatgacagagcc

SEQ ID NO: 152681 - DNA, 75 bp, synthetic construct
  source 1..75: mol_type = other DNA
tcatgccagatatcgaaaaacgtctggaagcgtttgtccgtatcgctcacggtatcattatcttccctggcggtg

SEQ ID NO: 152682 - DNA, 75 bp, synthetic construct
  source 1..75: mol_type = other DNA
cgagaacatggctaatctgaaactgtacccggatcagcctgtagaagttttggccgctgacctgcgtcgcgcgtt

SEQ ID NO: 152683 - DNA, 75 bp, synthetic construct
  source 1..75: mol_type = other DNA
gaataaaaaacagcagcagtcacaggtccagaccgaagagaagaaactcgttcaggaaaaagagaaaaaacggac

SEQ ID NO: 152684 - DNA, 75 bp, synthetic construct
  source 1..75: mol_type = other DNA
catcctcgatgccgatactgaccggggccagaaacatccaattatggatggtgagaagcatcggatcacggtaga

SEQ ID NO: 152685 - DNA, 75 bp, synthetic construct
  source 1..75: mol_type = other DNA
ccagacaaaagagccgggggatatcaccaaaatcaccagtgcggtgatgcagctcagtacggggatggatattcc

SEQ ID NO: 152686 - DNA, 75 bp, synthetic construct
  source 1..75: mol_type = other DNA
attgccggtattaaggtgaataaaggtgctgaaggttttgaagtcgagccttttgaacaggacgccggactgaat

SEQ ID NO: 152687 - DNA, 75 bp, synthetic construct
  source 1..75: mol_type = other DNA
atggttaaacgtgttacaaaattaaaggccgcagccgaggccgcaccacagacccgcgaagaagtcagccgcgat

SEQ ID NO: 152688 - DNA, 75 bp, synthetic construct
  source 1..75: mol_type = other DNA
cgtatcaaacgcaacgatgatggcagcgttgtgctcgataaagatgataacccggtaaaagaaaccgtccagctg

SEQ ID NO: 152689 - DNA, 75 bp, synthetic construct
  source 1..75: mol_type = other DNA
cgttgccgtaattcacttctgtttatccttctcctgctgggttttgtcgctggttatcaggctcatttatataaa

SEQ ID NO: 152690 - DNA, 75 bp, synthetic construct
  source 1..75: mol_type = other DNA
ttgcaatctacttctcacaccaacaatttaccttttactcaacgtttttatgctggcgctgggcgcgatagtgat

SEQ ID NO: 152691 - DNA, 75 bp, synthetic construct
  source 1..75: mol_type = other DNA
ctacgttgccgtaacttactcctgtttctacttctcttacttggtattgtcgccgggtatcaggcccatttatat

SEQ ID NO: 152692 - DNA, 75 bp, synthetic construct
  source 1..75: mol_type = other DNA
atgcagggaacaggtgtgatattccgtgacactgtcaccgtttctggctgtcttttattgcgcccacttcggctc

SEQ ID NO: 152693 - DNA, 75 bp, synthetic construct
  source 1..75: mol_type = other DNA
atcctggttggctggataatcgcgctgcatctggcagattatcaatttcgccagatgggatcgggttggttggca

SEQ ID NO: 152694 - DNA, 75 bp, synthetic construct
  source 1..75: mol_type = other DNA
gtggaatggtttttaacgccacaaggacagagtctggtggaagatgtgggttatgtaccgatgtatccaacaatg

SEQ ID NO: 152695 - DNA, 75 bp, synthetic construct
  source 1..75: mol_type = other DNA
ggcaaacctggtaaccggcgatgtgtcatggcgtcagcgcccaccatcggtaagtattcgcggtgtggatgcggt

SEQ ID NO: 152696 - DNA, 75 bp, synthetic construct
  source 1..75: mol_type = other DNA
aaaggtcagtccatcaggaattcctcactgccagttcgtacttgagcatcgttctgtgcaggaggaagccggttt

SEQ ID NO: 152697 - DNA, 75 bp, synthetic construct
  source 1..75: mol_type = other DNA
atggacgacctgcttcagggttttgtcgcccagcaccgtatgaagttgcctggctcagcctacatcccttgctac

SEQ ID NO: 152698 - DNA, 75 bp, synthetic construct
  source 1..75: mol_type = other DNA
tttgagcgcgcccgcgacgctgtcagtaaagcggatgcgggtatcgtgaaagcacgacgccagcttaacgccctt

SEQ ID NO: 152699 - DNA, 75 bp, synthetic construct
  source 1..75: mol_type = other DNA
aaaatcttaaaaagcaaatcaaagtgctttttaaagggattcaggactggtgtaaaaccaaccgtgatgagctga

SEQ ID NO: 152700 - DNA, 75 bp, synthetic construct
  source 1..75: mol_type = other DNA
aggccgcagcagaggcggcaccgcagacccgtgaagaggtcagccgcgatatccgcaccctgggcgatattcagc

SEQ ID NO: 152701 - DNA, 75 bp, synthetic construct
  source 1..75: mol_type = other DNA
cgcgcgcccaccagccccggcgcgcgggtggcgtttatgtcgcaactggacgatgtgcaggtgcaggcggagaaa

SEQ ID NO: 152702 - DNA, 75 bp, synthetic construct
  source 1..75: mol_type = other DNA
ggagaaaatccgcgctcgcgtggtgtttaactcgcgtaccggcacggtggtgatgggcgatggcgttgcgctgca

SEQ ID NO: 152703 - DNA, 75 bp, synthetic construct
  source 1..75: mol_type = other DNA
gaaacgcccgtcgtttaaagatgccaataatattgcggcggcgatcaacgcctcgtttggcggcattgccaccgc

SEQ ID NO: 152704 - DNA, 75 bp, synthetic construct
  source 1..75: mol_type = other DNA
gccggacgacattatgtcgattttgcaggcgctgcatgaagcgggcgcgctggatgccgacctggaggtgatctg

SEQ ID NO: 152705 - DNA, 75 bp, synthetic construct
  source 1..75: mol_type = other DNA
accggggccagcggttccagcgtgacggttaacacgccgaccgccgggttaattcccaacggcgcaacggtggag

SEQ ID NO: 152706 - DNA, 75 bp, synthetic construct
  source 1..75: mol_type = other DNA
gggtggcgtttatgtcgcaactggatgatgtacaggtgcaggcggagaaaatccgcgcccgcgtggtgtttaact

SEQ ID NO: 152707 - DNA, 75 bp, synthetic construct
  source 1..75: mol_type = other DNA
cgtcgtcgtgtactcttgtcgatactcagctttctttgtggtcttctcttttacaaaccaacaacatcaattctt

SEQ ID NO: 152708 - DNA, 75 bp, synthetic construct
  source 1..75: mol_type = other DNA
aattaaatcaatcaattggcgttggtggcctgattgcttttattgcaggtgtgccaccagaggttgcattaggtt

SEQ ID NO: 152709 - DNA, 75 bp, synthetic construct
  source 1..75: mol_type = other DNA
cagcaacaaacggcagaactgaccggaccggtgaataaagcgatcatcgacaccgcgcagtttttgaaagagcag

SEQ ID NO: 152710 - DNA, 75 bp, synthetic construct
  source 1..75: mol_type = other DNA
tctcgattaacgaaaccagcaacgtcagccagccgaatgcctttgcgggcgggcgcacggcggtaacgccgcaga

SEQ ID NO: 152711 - DNA, 75 bp, synthetic construct
  source 1..75: mol_type = other DNA
ttatcgaattaacaatgctggttaaacaattggtcagccaactgaaaaaagcaaaacctgattgcaaattaccgg

SEQ ID NO: 152712 - DNA, 75 bp, synthetic construct
  source 1..75: mol_type = other DNA
gacacttctcgacacaataatgtgtaatcatcagtaccgctcaatgtggcaactggtgaaaaaagttcgccattt

SEQ ID NO: 152713 - DNA, 75 bp, synthetic construct
  source 1..75: mol_type = other DNA
atgtcagctatcgactgtataattactgctgccggattatcatctcgaatggggcaatggaaaatgatgttaccc

SEQ ID NO: 152714 - DNA, 75 bp, synthetic construct
  source 1..75: mol_type = other DNA
cttttatggcgatgattggctgggcagaaaaagcgatttcaaaagccattctgggcggcaccctgaccacagagg

SEQ ID NO: 152715 - DNA, 75 bp, synthetic construct
  source 1..75: mol_type = other DNA
agcccccgtgatgaactggacgatatgggggatgcggtgcctgcccgccggttacaggacgctatcgacctgctg

SEQ ID NO: 152716 - DNA, 75 bp, synthetic construct
  source 1..75: mol_type = other DNA
ttttcctaaaaatctggcagttacgtaacagcggcgcaatactcccgctacacaatggtatccctggccatccca

SEQ ID NO: 152717 - DNA, 75 bp, synthetic construct
  source 1..75: mol_type = other DNA
cgtcccaacgtgaccaatatgcgtcaggcattgcaaatgggtgaacattattccgtcgaaatagaagatgaagaa

SEQ ID NO: 152718 - DNA, 75 bp, synthetic construct
  source 1..75: mol_type = other DNA
agaatattgttttctcacccacggtgacatgcctaccctcaccatcgatatttttagaaaaatctggtcgttacg

SEQ ID NO: 152719 - DNA, 75 bp, synthetic construct
  source 1..75: mol_type = other DNA
tgaagaaaaggatacccacctttttgcagagctgggcaagcgacgccttgccattcagggggtgccctggagtat

SEQ ID NO: 152720 - DNA, 75 bp, synthetic construct
  source 1..75: mol_type = other DNA
ctgaacaccacgcacactattgatatccgccgtctgccacgtatctgcttccagacaaaagaaccaggtgatatc

SEQ ID NO: 152721 - DNA, 75 bp, synthetic construct
  source 1..75: mol_type = other DNA
cagcctggtggtcggcctcgacggtaccggcgataaaaaccaggtcaaattcaccaaccagaccatcaccaatat

SEQ ID NO: 152722 - DNA, 75 bp, synthetic construct
  source 1..75: mol_type = other DNA
ggtattccacagcccacgcccggtgaagccatattccgtgtccgtcagagcagtaatgaaccggccatgcctgac

SEQ ID NO: 152723 - DNA, 75 bp, synthetic construct
  source 1..75: mol_type = other DNA
aaaagacagaacagacggcgctgtcagcccgactgccggaagcgaaaagcagcccccgtgatgagctggacgaca

SEQ ID NO: 152724 - DNA, 75 bp, synthetic construct
  source 1..75: mol_type = other DNA
acgccgcgtgatgaactggatgatatgggggacgcggtgcctgcccgccgcttacaggaggccatcgacccggta

SEQ ID NO: 152725 - DNA, 75 bp, synthetic construct
  source 1..75: mol_type = other DNA
atgatttatggcatattattttcatgaagattctacttattgaagataatcaaagaacccaggaatgggtaacgc

SEQ ID NO: 152726 - DNA, 75 bp, synthetic construct
  source 1..75: mol_type = other DNA
caaaaaacagctaattgctgcggcactggcacagtttggtgagtatggaatgaacgccaccacccgcgatatcgc

SEQ ID NO: 152727 - DNA, 75 bp, synthetic construct
  source 1..75: mol_type = other DNA
gaagaaaagaccgaactgatcaaccagacgataacctgtcatatcgatctgattttgcaaggattatcgcaaagg

SEQ ID NO: 152728 - DNA, 75 bp, synthetic construct
  source 1..75: mol_type = other DNA
ctttcgatgctgtatctgccgtggccttttactttcattattgtgctgttgatgtggagcgccgtgcgcctgcca

SEQ ID NO: 152729 - DNA, 75 bp, synthetic construct
  source 1..75: mol_type = other DNA
tcggcgcactggcactggtgccactgggattgttatttaaaccacactatctgctgcgccatcgcaacccacggt

SEQ ID NO: 152730 - DNA, 75 bp, synthetic construct
  source 1..75: mol_type = other DNA
aagcctttttgatcttccttaccacggtgatgatggtgtcactgatgatggccgcggatccctccctgcttgcta

SEQ ID NO: 152731 - DNA, 75 bp, synthetic construct
  source 1..75: mol_type = other DNA
agtacagctcgctggaatccattcatactgagattggcaccaacgaacgtggcgagctggaagagcaaaaaatct

SEQ ID NO: 152732 - DNA, 75 bp, synthetic construct
  source 1..75: mol_type = other DNA
aatcgtctggccgcagtttctgacgctgatggcaattggcggcgcatttttcaccattgcgctgctgcgattcag

SEQ ID NO: 152733 - DNA, 75 bp, synthetic construct
  source 1..75: mol_type = other DNA
gtcaatcggcatttttatggggacgatagcgcgttcaatgccgcaactggggctgctggtgattctggtgctgct

SEQ ID NO: 152734 - DNA, 75 bp, synthetic construct
  source 1..75: mol_type = other DNA
ctgattggcgagattctggcctttcgtcttggcaaagaaactattctgttacgcaccggctgggccgcgttcgat

SEQ ID NO: 152735 - DNA, 75 bp, synthetic construct
  source 1..75: mol_type = other DNA
cgcgcctgcaggaacatgattaagctgctcacccaggatgacactgtcaacctcagcaagtttatctcccgtgag

SEQ ID NO: 152736 - DNA, 75 bp, synthetic construct
  source 1..75: mol_type = other DNA
gatgatttaattcagactatttatcagatgaccgatgatggtcatgccaatgatttagctggcttatatctgaca

SEQ ID NO: 152737 - DNA, 75 bp, synthetic construct
  source 1..75: mol_type = other DNA
cggtcaggagttctcgcagagcgttctgtttgtgatgttcgaaaccaacaccaacgaagccagcgagtatttaag

SEQ ID NO: 152738 - DNA, 75 bp, synthetic construct
  source 1..75: mol_type = other DNA
gcagcaatggttgttccaatggttattggctcattaccgaacgttacgagctcgacgggttcagaagaatattta

SEQ ID NO: 152739 - DNA, 75 bp, synthetic construct
  source 1..75: mol_type = other DNA
ttgagattgaatttgttcatctgggagagaaaacgcgtcgccgttttggcgcgttaatattgctgtttgatgagg

SEQ ID NO: 152740 - DNA, 75 bp, synthetic construct
  source 1..75: mol_type = other DNA
gaaacaggcaggttataaaaccttctggatcaccaaccagcagacgatgaccgcccgcaataccatgctgacggt

SEQ ID NO: 152741 - DNA, 75 bp, synthetic construct
  source 1..75: mol_type = other DNA
cggtattcctctttccgaagcggattaaaattattgccgcagtaatcggcgtggtgctatgggcagcctctctgg

SEQ ID NO: 152742 - DNA, 75 bp, synthetic construct
  source 1..75: mol_type = other DNA
cggcgctgtgctactacgtcatctacggtcaggagttctcgcagagcgttctgtttgtgatgtttgaaaccaaca

SEQ ID NO: 152743 - DNA, 75 bp, synthetic construct
  source 1..75: mol_type = other DNA
gaatgcgtgctgtgcggcggacggatggtataccgccgggccattgcggggctgaatgtatcaaggctgaagaaa

SEQ ID NO: 152744 - DNA, 75 bp, synthetic construct
  source 1..75: mol_type = other DNA
caacgatttgttactcctttatgcaggcatgtgggctggtgaatgaccatgtggttggctgctgttgccatccgg

SEQ ID NO: 152745 - DNA, 75 bp, synthetic construct
  source 1..75: mol_type = other DNA
tgatctgccttgaaggacaacaggctgggttatcctggattaccgtcctcaaaaaacgtgaaaattatcgcgctt

SEQ ID NO: 152746 - DNA, 75 bp, synthetic construct
  source 1..75: mol_type = other DNA
ttatcgcgactttagccaaacctttggcctggcgaaagataaggtacgcgatctcgactctctatgggatgtgtt

SEQ ID NO: 152747 - DNA, 75 bp, synthetic construct
  source 1..75: mol_type = other DNA
tggtgtaccgtcgtgcagtcgcgggactgaatgtggcagggctgaagaaaaacgcgcgggatatcagcctgctga

SEQ ID NO: 152748 - DNA, 75 bp, synthetic construct
  source 1..75: mol_type = other DNA
ccaaccgggtgtgtggagagaagctgccgcaggtgtaccgtgctctggggatggataaaccggaaccagtggcga

SEQ ID NO: 152749 - DNA, 75 bp, synthetic construct
  source 1..75: mol_type = other DNA
gccagttgccgctatatccacaatggatatgcattctaatatgtggcttgaaaaggacaccgtgcataaagcgcg

SEQ ID NO: 152750 - DNA, 75 bp, synthetic construct
  source 1..75: mol_type = other DNA
accagttggtaatatggggattatgaactaccacgcctgcctatgtttaaagcacgatgcggtaaataaagcgcg

SEQ ID NO: 152751 - DNA, 75 bp, synthetic construct
  source 1..75: mol_type = other DNA
acaggatcttcactaaaaaccagttgttcagaataaaggcagaaaataatgaaatacctgttggcaatatgggta

SEQ ID NO: 152752 - DNA, 75 bp, synthetic construct
  source 1..75: mol_type = other DNA
agccgatgaactgatgcgtctgatggaaggccagcatgcggtgaaactgaccgcagagcaggcgcagcaactgca

SEQ ID NO: 152753 - DNA, 75 bp, synthetic construct
  source 1..75: mol_type = other DNA
atcgcggcggcaatcggcctgaacgtgccgcaagaaacgcgtttgctgtttgtggaaaccactgcagaacatccg

SEQ ID NO: 152754 - DNA, 75 bp, synthetic construct
  source 1..75: mol_type = other DNA
ctttctgctctgctggagagacagcgccttgcgattggcgggtaagcaaaaggaacggcttacagcggccagcga

SEQ ID NO: 152755 - DNA, 75 bp, synthetic construct
  source 1..75: mol_type = other DNA
cggcgaatctaagctgcgcttcatggttgaaagagcatcttcagcagcctgaaaaaaaacgccgcgatgagcagt

SEQ ID NO: 152756 - DNA, 75 bp, synthetic construct
  source 1..75: mol_type = other DNA
gttctctgaagatgccgccgtcaacactgcggtcagaaaaagatgatgttgaatcgcgtattgaaaaactggagt

SEQ ID NO: 152757 - DNA, 75 bp, synthetic construct
  source 1..75: mol_type = other DNA
gtgtaaccggccatcctttgttgtatccggtgatgctgggaaaataaccatctcagaaaatggaaaagtaacacc

SEQ ID NO: 152758 - DNA, 75 bp, synthetic construct
  source 1..75: mol_type = other DNA
ccttctttgataccgaccacctttccggtggcaagtcggtctctaacaaaggcacgaaaaagcttgccgtcacct

SEQ ID NO: 152759 - DNA, 75 bp, synthetic construct
  source 1..75: mol_type = other DNA
tgaataacgttgaccctcaggccatgatgatgatggtcaccctgttatccctggatgcttcagcgcagaaagttg

SEQ ID NO: 152760 - DNA, 75 bp, synthetic construct
  source 1..75: mol_type = other DNA
atgcttaatgtaaatagcgatatccagtctatgaggtctggggccagcgctgctacggctacttcaggtattaat

SEQ ID NO: 152761 - DNA, 75 bp, synthetic construct
  source 1..75: mol_type = other DNA
ttggtttgggacaactactacgccaatcaccaggacaaccaagcattcagaaaattgaaagtggctgacattttc

SEQ ID NO: 152762 - DNA, 75 bp, synthetic construct
  source 1..75: mol_type = other DNA
attattcgcctgaatgcggcgaatgctcgttttgtctatcaaccctttacacgcgatcagcgggcgagggggtaa

SEQ ID NO: 152763 - DNA, 75 bp, synthetic construct
  source 1..75: mol_type = other DNA
ccggtcttgagggattgcttcgatataatgtcacattaaatattggtttaacgtccagaaatgtctggccgggat

SEQ ID NO: 152764 - DNA, 75 bp, synthetic construct
  source 1..75: mol_type = other DNA
ctgatggcaattggcggcgcgtttttcaccatcgcgctgctgcgattcaggaagacgattgggacaatggcgtaa

SEQ ID NO: 152765 - DNA, 75 bp, synthetic construct
  source 1..75: mol_type = other DNA
tggtatcgggattatcgctggtgctgatggtgaaaggcgtgctgggcgtaccgattgaaggctcgatcccgctgt

SEQ ID NO: 152766 - DNA, 75 bp, synthetic construct
  source 1..75: mol_type = other DNA
accccggtggtgtgtgagccaaacacacgccaatttctgcgtattttttcacgcaaaccttctgtcgagcgcgat

SEQ ID NO: 152767 - DNA, 75 bp, synthetic construct
  source 1..75: mol_type = other DNA
aacagtacccgatcgtttctatcgaagacggtctggacgaatctgactgggacggtttcgcataccagaccaaag

SEQ ID NO: 152768 - DNA, 75 bp, synthetic construct
  source 1..75: mol_type = other DNA
taacgccaaagctgctgcagctgctaaagggatgccgctgtacgagcacatcgctgaactgaacggcactccggg

SEQ ID NO: 152769 - DNA, 75 bp, synthetic construct
  source 1..75: mol_type = other DNA
cagcagccagatttattacggaatatgagggaagcaatacggcctccggtttaggtatagaaatactggacggaa

SEQ ID NO: 152770 - DNA, 75 bp, synthetic construct
  source 1..75: mol_type = other DNA
tttacgcggatttcgtgataagcaagcggaactgaaactctacgctcgttattacacagtggaaaattgcgctga

SEQ ID NO: 152771 - DNA, 75 bp, synthetic construct
  source 1..75: mol_type = other DNA
aaatattggcttaacgtccagcaatgtatggccgggattttccctcgataccgccaccattagccgtctttgtgc

SEQ ID NO: 152772 - DNA, 75 bp, synthetic construct
  source 1..75: mol_type = other DNA
tcatagcaaagcgcccgcttaaaaaatgtgacgcctggattgaggatgtttatatctttcaggtgtttaaagaag

SEQ ID NO: 152773 - DNA, 75 bp, synthetic construct
  source 1..75: mol_type = other DNA
tcagaccacgcacctttgcaacagccttccactttgcaagcgccgccacaaaatacccagccaacagacaacaaa

SEQ ID NO: 152774 - DNA, 75 bp, synthetic construct
  source 1..75: mol_type = other DNA
aactggagaatgccagtgcgaccctgatcccggccagcagtggcgaagatccgttctggcagggcagtgcacgta

SEQ ID NO: 152775 - DNA, 75 bp, synthetic construct
  source 1..75: mol_type = other DNA
acccgtgcctttttccgttcccccagccataagattgcagagttcgctgccggtgaaattggtgagaaagagcac

SEQ ID NO: 152776 - DNA, 75 bp, synthetic construct
  source 1..75: mol_type = other DNA
cacatttggttttcatccgcacgaaggttttgaggatgaattaattttatatattcagaaaacaaacgagagggt

SEQ ID NO: 152777 - DNA, 75 bp, synthetic construct
  source 1..75: mol_type = other DNA
gtgtttggtatccagtcctatgcccaactggaagatatctacggtgagaaagcggcagccacgctgtttgatgtg

SEQ ID NO: 152778 - DNA, 75 bp, synthetic construct
  source 1..75: mol_type = other DNA
tggctccgacaggtgctttggggatgaaggcgagaagacttgcatccctggaaaaagcacgagcgaggaatgccg

SEQ ID NO: 152779 - DNA, 75 bp, synthetic construct
  source 1..75: mol_type = other DNA
gccaatatcatgctttactgcctgtttatttttttctggatactcgttggtctgattttatgggtaaaaataagc

SEQ ID NO: 152780 - DNA, 75 bp, synthetic construct
  source 1..75: mol_type = other DNA
aagttgtttccggagaagacgtgactcaggctgaacagccgcaacagccgcaacagccgcaacagccgcaacagc

SEQ ID NO: 152781 - DNA, 75 bp, synthetic construct
  source 1..75: mol_type = other DNA
ttttccggtaaccattggcaatgttccggtcgccaaaggacgtcagccggatacgccgaatccttccatgccgat

SEQ ID NO: 152782 - DNA, 75 bp, synthetic construct
  source 1..75: mol_type = other DNA
cctttgtgctggccgccgttgtggcgctggttatctgtctggtcaccttttttgtgactacctggattctgggac

SEQ ID NO: 152783 - DNA, 75 bp, synthetic construct
  source 1..75: mol_type = other DNA
attattttctactgcctgtttatcctgttctggattctggtcgcactcggtctctggataaagataacctggcag

SEQ ID NO: 152784 - DNA, 75 bp, synthetic construct
  source 1..75: mol_type = other DNA
atgaaaggcactatcttcgccgtagcgttgaaccatcgcagccaacttgatgcatggcaggaagcgttccagcaa

SEQ ID NO: 152785 - DNA, 75 bp, synthetic construct
  source 1..75: mol_type = other DNA
cgctgtgccgcctgggatttgtggaaggagtgcctgacacagccggattttgataatgtcgcgaacacgctgatc

SEQ ID NO: 152786 - DNA, 75 bp, synthetic construct
  source 1..75: mol_type = other DNA
ctctgaaatatcagacacgaccgaaggtcgctccggagtttattccgcgtgacatcaacccggaaatggagaacc

SEQ ID NO: 152787 - DNA, 75 bp, synthetic construct
  source 1..75: mol_type = other DNA
tctggttttatgggtaaaaataagctggcagacgtttgtgaatggctgcatttactggtggtgtaccacgctgga

SEQ ID NO: 152788 - DNA, 75 bp, synthetic construct
  source 1..75: mol_type = other DNA
atgatccggctgaaccgagcgatggctatcgcgtactggtcgatcgtctctggccacgcggtattaagaaaacag

SEQ ID NO: 152789 - DNA, 75 bp, synthetic construct
  source 1..75: mol_type = other DNA
cggacctggtggagatcctgccggaagcccgtaagttcggaggctgttatgtgtttggtatccagtcctatgccc

SEQ ID NO: 152790 - DNA, 75 bp, synthetic construct
  source 1..75: mol_type = other DNA
gatgcagcgtcgtgaagaggtgaacatcaatgtgcaccgggagcgcggggaggatgttgagccgggagatgattt

SEQ ID NO: 152791 - DNA, 75 bp, synthetic construct
  source 1..75: mol_type = other DNA
tctccttggtctgatattatgggtaaaaataagctggcagacgtttataaacggctgtatttactggtggtgtac

SEQ ID NO: 152792 - DNA, 75 bp, synthetic construct
  source 1..75: mol_type = other DNA
cccgggatcagtgaatccggtgaagtggtggatatggccgcttatgaggcatggcaacaggaaaatcatccggac

SEQ ID NO: 152793 - DNA, 75 bp, synthetic construct
  source 1..75: mol_type = other DNA
ataacggtgagtccttcaccattcgtgactggatgcgtggtgtccgtgaagataagaaaaacggctggctgttta

SEQ ID NO: 152794 - DNA, 75 bp, synthetic construct
  source 1..75: mol_type = other DNA
gctccttggtctgttattatgggtaaaaataagctggcagacgtttataaacggctgtatttactggtggtgtac

SEQ ID NO: 152795 - DNA, 75 bp, synthetic construct
  source 1..75: mol_type = other DNA
cctcgttggtctgttattatgggtaaaaataagctggcagacgtttataaacggctgtatttactggtggtgtac

SEQ ID NO: 152796 - DNA, 75 bp, synthetic construct
  source 1..75: mol_type = other DNA
cctctttggtctgatattatgggtaaaaataagctggcagacgtttataaacggctgtatttactggtggtgtac

SEQ ID NO: 152797 - DNA, 75 bp, synthetic construct
  source 1..75: mol_type = other DNA
aatactgcaggtacagaattaaaacttatttattcatggaatggagttgggcaaccctttagctttatttgtgag

SEQ ID NO: 152798 - DNA, 75 bp, synthetic construct
  source 1..75: mol_type = other DNA
taacttatctacggcaacgcgaaaaataaacagtgagcaatactaccggttaaccgaagaactggaagtgatgac

SEQ ID NO: 152799 - DNA, 75 bp, synthetic construct
  source 1..75: mol_type = other DNA
tttcagcaattataatgttttcagctaataatgcgatagctgctgattggggaccatgtacatcgacttcagggg

SEQ ID NO: 152800 - DNA, 75 bp, synthetic construct
  source 1..75: mol_type = other DNA
ctgaatataatctgtcgcgagtgccggaagagcgaagctatgcagcgtgtactgacattttatcaaggaaatgtt

SEQ ID NO: 152801 - DNA, 75 bp, synthetic construct
  source 1..75: mol_type = other DNA
ggcatggcattactacggtgatgcgctggcttatgaacgcataatcgccgccaatccacatgtagccatttaccc

SEQ ID NO: 152802 - DNA, 75 bp, synthetic construct
  source 1..75: mol_type = other DNA
tcatcccagagaatcgaaatcatttcaggtgatcgactactcgccctctttaactcaaatcagaaactcattttc

SEQ ID NO: 152803 - DNA, 75 bp, synthetic construct
  source 1..75: mol_type = other DNA
agtaactgccttgttattaagctcaataaaggcggcattaacacggtcgagttaacagagattcttcttgatgga

SEQ ID NO: 152804 - DNA, 75 bp, synthetic construct
  source 1..75: mol_type = other DNA
tgttattaatatcgcgtgtttatatgtgctgactgccagtctctggtttctgtgtggtgcaattatgaatcaggg

SEQ ID NO: 152805 - DNA, 75 bp, synthetic construct
  source 1..75: mol_type = other DNA
gtgattatcccgacagggatgttgctgactcccctgctgctggtctggttcggtggcgtctggatcagccggctg

SEQ ID NO: 152806 - DNA, 75 bp, synthetic construct
  source 1..75: mol_type = other DNA
aaaaatgtcgcaaataccattctttccgatgtgatgaactgggcaaatggtcaaaacgtgtcgttaatatgcgaa

SEQ ID NO: 152807 - DNA, 75 bp, synthetic construct
  source 1..75: mol_type = other DNA
aaaaacaaaaagtggaggctccgaaaacggagggtcatgaaatggaggaatctgatggctcttacagcgatacga

SEQ ID NO: 152808 - DNA, 75 bp, synthetic construct
  source 1..75: mol_type = other DNA
cggaaaggaattaatcgacgaactcatttcagagctggtggagttcgtaaaaaagcagaaaccagttaattcgga

SEQ ID NO: 152809 - DNA, 75 bp, synthetic construct
  source 1..75: mol_type = other DNA
aagacgagagtttatggctgcaatcgcgcgtctatgtacgagctcaccattactatcacagctggatgcactatt

SEQ ID NO: 152810 - DNA, 75 bp, synthetic construct
  source 1..75: mol_type = other DNA
gtgacggcggcacagatgcagaagcagtatgaggaaatccgtcgtgagatggatgttctgaacaaacagcgctgg

SEQ ID NO: 152811 - DNA, 75 bp, synthetic construct
  source 1..75: mol_type = other DNA
gtgacggcagcgcagatgcagaagcagtatgaggaaatccgtcgtgagctggatgttctgaacaaacagcgcggt

SEQ ID NO: 152812 - DNA, 75 bp, synthetic construct
  source 1..75: mol_type = other DNA
tatctacagtgaacatgataaagtacttaacacgatataccctctcgtagagtcagtaacgccaattggggttcg

SEQ ID NO: 152813 - DNA, 75 bp, synthetic construct
  source 1..75: mol_type = other DNA
acattaccctacattaagaatgacaatacccttttaacaatatctatggctggagccaccccaataacaagttat

SEQ ID NO: 152814 - DNA, 75 bp, synthetic construct
  source 1..75: mol_type = other DNA
gatgatttaattcaaactatttatcagatgaccgatgaagggcacgcaaatgatttagctggattatacctggcc

SEQ ID NO: 152815 - DNA, 75 bp, synthetic construct
  source 1..75: mol_type = other DNA
aggtgattggcagcaagagctatattcgtgtgtatgagcgcgtcggcgattctgacgaatatcgcgcaatcccgc

SEQ ID NO: 152816 - DNA, 75 bp, synthetic construct
  source 1..75: mol_type = other DNA
tacgtaatcaactgaacgccgggtgttttgtcgcgaaggtgccgctggtttccggcgcggcaattcgcatggaag

SEQ ID NO: 152817 - DNA, 75 bp, synthetic construct
  source 1..75: mol_type = other DNA
gttttgccgcgaaggtgccgctggtttccggcgcggcaattcgtatggaagggcaaatcacggtcttcacttatc

SEQ ID NO: 152818 - DNA, 75 bp, synthetic construct
  source 1..75: mol_type = other DNA
ggtactgcttagtgctccgctatcgttctcattctggcaaggcgcactgatggtctgcggcggttccctgctctg

SEQ ID NO: 152819 - DNA, 75 bp, synthetic construct
  source 1..75: mol_type = other DNA
atgaaatcttgagtgactttgccagaatgattccggcagcactggataacgtgaagacttcattaccgacagatt

SEQ ID NO: 152820 - DNA, 75 bp, synthetic construct
  source 1..75: mol_type = other DNA
agattttacagtcgcttgaactctcaatgacgctatgcgacgcgaaaaatgcctcgccagaagcaacagaacagc

SEQ ID NO: 152821 - DNA, 75 bp, synthetic construct
  source 1..75: mol_type = other DNA
agcaattaacagtgagctttatacaaaaatgatatacctgaccaggaactggtcactgtatccgaacggtgatgg

SEQ ID NO: 152822 - DNA, 75 bp, synthetic construct
  source 1..75: mol_type = other DNA
atgagaaaagacagagaggaaaacttagattatctcgatgaagaagataccggcatcgaggatgagcgtcagggc

SEQ ID NO: 152823 - DNA, 75 bp, synthetic construct
  source 1..75: mol_type = other DNA
gccttgtcagataagattggtcgccgaacttcgatgctttgcttcggttctctggctgctgtttttaccgttccg

SEQ ID NO: 152824 - DNA, 75 bp, synthetic construct
  source 1..75: mol_type = other DNA
caggtaatctggtcgagtggttcgatttctatgtctactcgttctgttcactctactttgcccacatcttcttcc

SEQ ID NO: 152825 - DNA, 75 bp, synthetic construct
  source 1..75: mol_type = other DNA
ggtgccagctatgccggggcaattctgaaagatgagttaaaacaggcgggtatcacctggagcggaacactgctg

SEQ ID NO: 152826 - DNA, 75 bp, synthetic construct
  source 1..75: mol_type = other DNA
tatctggttttttgatgagagttgtccggggggagctgtttgggtgcttgaagatggctctctcgaatggacctg

SEQ ID NO: 152827 - DNA, 75 bp, synthetic construct
  source 1..75: mol_type = other DNA
gcgagccgaatgaaaccggcgcgtatggctgtcgcccaggcatctgtaatgccgcatccaaatctgaccattgcg

SEQ ID NO: 152828 - DNA, 75 bp, synthetic construct
  source 1..75: mol_type = other DNA
agtggttcgatttctatgtctactcgttctgttccctctactttgcccacatcttcttcccttctggtaacacga

SEQ ID NO: 152829 - DNA, 75 bp, synthetic construct
  source 1..75: mol_type = other DNA
gcgccctacagcgaagtgctggaacaggcacagaaggcggtttctctggttgccatcgtttctgaccgccgaagt

SEQ ID NO: 152830 - DNA, 75 bp, synthetic construct
  source 1..75: mol_type = other DNA
gcgttagttaacgtcatacttaaagaaaaaatcatcctacatcaagaggaaaaatatgataaagacgatcaaacg

SEQ ID NO: 152831 - DNA, 75 bp, synthetic construct
  source 1..75: mol_type = other DNA
gcgatgaactgacgtccaaagagacccgccgtcgcatatgggcaattgtaggggcatcatccggcaatctggtag

SEQ ID NO: 152832 - DNA, 75 bp, synthetic construct
  source 1..75: mol_type = other DNA
cagccatttttaccgttcctattctctcagcattgcaaaacgtttcctcgccttatgccgcttttggtctggtga

SEQ ID NO: 152833 - DNA, 75 bp, synthetic construct
  source 1..75: mol_type = other DNA
caagaaacacgcgctttaaaagaagctggatctctgaaaggattatggcgcaatcgccgtgcattcatcatggtt

SEQ ID NO: 152834 - DNA, 75 bp, synthetic construct
  source 1..75: mol_type = other DNA
ctgccgctgccggaagaagtcaaagcccaggaagtttcgccagaagaatggcaggcagaagcggaaaccgtggag

SEQ ID NO: 152835 - DNA, 75 bp, synthetic construct
  source 1..75: mol_type = other DNA
gttccgcggtaaaaaaatcgacgatgatctgtttgaggagctggaagaacagctgttgatcgccgatgtgggcgt

SEQ ID NO: 152836 - DNA, 75 bp, synthetic construct
  source 1..75: mol_type = other DNA
ctacaaattctacgaagcggtgatgagctctcacgcgcgtctgacctacaccaaagtctggcatatactgcaagg

SEQ ID NO: 152837 - DNA, 75 bp, synthetic construct
  source 1..75: mol_type = other DNA
caaagaaggtttcttcgcgcgcctgaaacgcagcctgttaaaaaccaaagaaaacctcggttccggatttatcag

SEQ ID NO: 152838 - DNA, 75 bp, synthetic construct
  source 1..75: mol_type = other DNA
ggaagttattgcagaaccggagccgatagttgaagaaacgccagcgtcggtagttgaacctgaagttacgccaga

SEQ ID NO: 152839 - DNA, 75 bp, synthetic construct
  source 1..75: mol_type = other DNA
agctgttgatcgccgatgtgggcgtggaaaccacacgtaaaattatcaccaatctgacggaaggcgcatcccgca

SEQ ID NO: 152840 - DNA, 75 bp, synthetic construct
  source 1..75: mol_type = other DNA
tgatcggccatgcgcgcttcaatgtgcctggaacatggcgggccggatcggacgccgtgcgtcagatcctgcgcc

SEQ ID NO: 152841 - DNA, 75 bp, synthetic construct
  source 1..75: mol_type = other DNA
ttaactttatctctatgctgccgctggcgggctatgacggctctttgcagtaccgtgcaggtctgcatcaggcag

SEQ ID NO: 152842 - DNA, 75 bp, synthetic construct
  source 1..75: mol_type = other DNA
ctcggccccgattttcgtttcaccacgacgcttgaaaccaaaggcaatgtggaaaacggcgtacttaagggtgac

SEQ ID NO: 152843 - DNA, 75 bp, synthetic construct
  source 1..75: mol_type = other DNA
tatctcggcggcgcgtttcgttgagaaagccaaagaaccggcactgttccgtattcacgacaagccgagcaccga

SEQ ID NO: 152844 - DNA, 75 bp, synthetic construct
  source 1..75: mol_type = other DNA
gacttttgttgatatccacatcctgcgcttatgcctcctcaggagggtgtggagctgacagcactagcggtgcga

SEQ ID NO: 152845 - DNA, 75 bp, synthetic construct
  source 1..75: mol_type = other DNA
ggcatcttattaccccgttacgatgttcagccaggtacgcaccctcccccgtggttctgccgaagcgcaatactg

SEQ ID NO: 152846 - DNA, 75 bp, synthetic construct
  source 1..75: mol_type = other DNA
ctgccatcttattaatggcaccgttagccttttccgcacaatcattggctgaatcattaacggtggaacaacgcc

SEQ ID NO: 152847 - DNA, 75 bp, synthetic construct
  source 1..75: mol_type = other DNA
atgaaaaagtggctagtgacgattgcggcactgtggctggccggatgcagctccggcgaaattaataaaaactat

SEQ ID NO: 152848 - DNA, 75 bp, synthetic construct
  source 1..75: mol_type = other DNA
cggcactgtggctggccggatgcagctccggcgagatcaataaaaactattaccagctacctgtggtgcagagcg

SEQ ID NO: 152849 - DNA, 75 bp, synthetic construct
  source 1..75: mol_type = other DNA
atctcaatggctaatgacagtgattacggcctgacctcatccaatctatacccaaaatctgaacgtcgcgatgaa

SEQ ID NO: 152850 - DNA, 75 bp, synthetic construct
  source 1..75: mol_type = other DNA
acgcgccagttggttgcgcaaaatctccgccgggatccgggaacgtgccagtgaaatcagtgcgctgattgttga

SEQ ID NO: 152851 - DNA, 75 bp, synthetic construct
  source 1..75: mol_type = other DNA
tatatcgattacatggcggagtgggcacggcgttacgagggcgagattattcaaagcgatcgtccaggagaaaat

SEQ ID NO: 152852 - DNA, 75 bp, synthetic construct
  source 1..75: mol_type = other DNA
cagccagtatatgagatccagtattacggcaaaaccttccggatgaacgctgctcaggtactgcatgataaatat

SEQ ID NO: 152853 - DNA, 75 bp, synthetic construct
  source 1..75: mol_type = other DNA
ataagaagtcagattcaggtgtgaatgttccggccggggggatcgagcaggagctgaaaatgaaaccggaagaag

SEQ ID NO: 152854 - DNA, 75 bp, synthetic construct
  source 1..75: mol_type = other DNA
gaacgccgacacccatgcctccctgaagccggtgatctccatgtggctgtccattgccattcgtggtctgctggc

SEQ ID NO: 152855 - DNA, 75 bp, synthetic construct
  source 1..75: mol_type = other DNA
aatatcagcagccgcaacaaccggttgcgccgcagcagcagtatcagcagccacaacagccagttgcgccacaac

SEQ ID NO: 152856 - DNA, 75 bp, synthetic construct
  source 1..75: mol_type = other DNA
taaaatcctgaatccgctggatgcccgctgtgccgcatgggatttgtggaaggagtgcctgacacagccggattt

SEQ ID NO: 152857 - DNA, 75 bp, synthetic construct
  source 1..75: mol_type = other DNA
gatcccgatgggtacaaaagaggacccgttctggcagggttcaggacgtaccatttttgcggaagcggcgtacct

SEQ ID NO: 152858 - DNA, 75 bp, synthetic construct
  source 1..75: mol_type = other DNA
aaccagacgcgctttaacaactgggatgaggtgcgccagacgctggaacgtgatttaagcgcctgtgcccagggt

SEQ ID NO: 152859 - DNA, 75 bp, synthetic construct
  source 1..75: mol_type = other DNA
tatatgaactttcctggctgaatgcgaaaggtttgccgcaggtcgccgtcggtcatgttgaacttgattacacca

SEQ ID NO: 152860 - DNA, 75 bp, synthetic construct
  source 1..75: mol_type = other DNA
cgatttaagtacctgcgcccagggtaaggtcagcgtggcgttatatcgactcgatgaactggaaggccagccaat

SEQ ID NO: 152861 - DNA, 75 bp, synthetic construct
  source 1..75: mol_type = other DNA
aaaaataacggcctgctgccggataaaccagtatttgagatcgaaaaacttaacggtgaaacggggttggaatta

SEQ ID NO: 152862 - DNA, 75 bp, synthetic construct
  source 1..75: mol_type = other DNA
taattgattttttaaatgacgctgttatttcaggtgagggaacgatagttaaatctattcctgggccggaaggtg

SEQ ID NO: 152863 - DNA, 75 bp, synthetic construct
  source 1..75: mol_type = other DNA
aaaaataacgggttgcttcctgataaaccagtgtttgaggttgaaaaacttaacggtgaaacggggttggaatta

SEQ ID NO: 152864 - DNA, 75 bp, synthetic construct
  source 1..75: mol_type = other DNA
atcgggctaaaagatgatactaatgcccgtcacttcgccggccttaactttaccgagaaaaaattgcaggaagcg

SEQ ID NO: 152865 - DNA, 75 bp, synthetic construct
  source 1..75: mol_type = other DNA
gagagccgcctgaagactgggatacacttctcgctcaggctatgaaagccacttccacaacctctgttcctggtt

SEQ ID NO: 152866 - DNA, 75 bp, synthetic construct
  source 1..75: mol_type = other DNA
gaaatccaccggatgactgggatacccttctcaaggaggccagtaaagctacagcgaccaccaatatggatgatt

SEQ ID NO: 152867 - DNA, 75 bp, synthetic construct
  source 1..75: mol_type = other DNA
cactggaagtctttgctttcggcagcctgtgcattatgtcggaaggccgttgctatctgtcgtcgtatctgacgg

SEQ ID NO: 152868 - DNA, 75 bp, synthetic construct
  source 1..75: mol_type = other DNA
gcaggttatccgacgctatgtaaagggcgttatctggtggacggcgagcgctatcacgcgctggaagaaccaacc

SEQ ID NO: 152869 - DNA, 75 bp, synthetic construct
  source 1..75: mol_type = other DNA
ggcgttatctgtggacggcgagcgctatcacgcgctggaagaaccaaccagtctcaataccctggaactgctgcc

SEQ ID NO: 152870 - DNA, 75 bp, synthetic construct
  source 1..75: mol_type = other DNA
gattgagctgtgcgactgggtgccagctctgctttccggtaccacccgcccgcaggatattcgtcgcggacgttg

SEQ ID NO: 152871 - DNA, 75 bp, synthetic construct
  source 1..75: mol_type = other DNA
gcaaaagtgcacgcagacattccatcagcacagcaaaaaatggccagtgcggtagagaaaactttgcaaccgagc

SEQ ID NO: 152872 - DNA, 75 bp, synthetic construct
  source 1..75: mol_type = other DNA
gaatctcgctaccgacgccccactgctgttcggcggtttgattgccgccaccgcttttggcgcacgcgcaattca

SEQ ID NO: 152873 - DNA, 75 bp, synthetic construct
  source 1..75: mol_type = other DNA
tagggcatgtcggtaatgaaaccgtttatgaagaagcgctggcgggctatcactataccgatcctgaccaggcgg

SEQ ID NO: 152874 - DNA, 75 bp, synthetic construct
  source 1..75: mol_type = other DNA
aaagcgctaacagaaatttttacgcaagctaaagcccggcagatgattatctgtgccgatatgatcaaaccgcgg

SEQ ID NO: 152875 - DNA, 75 bp, synthetic construct
  source 1..75: mol_type = other DNA
gcgataactttgcttctggctttatagcggctctgttagaaggcaaaaatctgcgtgaatgcgcacgctttgcca

SEQ ID NO: 152876 - DNA, 75 bp, synthetic construct
  source 1..75: mol_type = other DNA
cgtgcttgcagagcttagcgtcgaacagcgcgcagctgtggtcgggattggcgttgacacaaccggctcgacgcc

SEQ ID NO: 152877 - DNA, 75 bp, synthetic construct
  source 1..75: mol_type = other DNA
cagcgcgcagctgtggtcgggattggcgttgacacaaccggctcgacgcccgcaccgattgatgccgacggtaac

SEQ ID NO: 152878 - DNA, 75 bp, synthetic construct
  source 1..75: mol_type = other DNA
cctgcactcaccgaagcatgggccaaaaatccgtctctggatcacctgccagtggtgcttgactggtttaatggc

SEQ ID NO: 152879 - DNA, 75 bp, synthetic construct
  source 1..75: mol_type = other DNA
cgttgcagcgccgggcataagtcgctatggcatgaaagctggggcggcctgccgccagccagtttctttgatgag

SEQ ID NO: 152880 - DNA, 75 bp, synthetic construct
  source 1..75: mol_type = other DNA
cctggatttatcggtctggaagcaggccaatcggcgtttggtgatatctacgcctggtttggtcgcgtactcggc

SEQ ID NO: 152881 - DNA, 75 bp, synthetic construct
  source 1..75: mol_type = other DNA
ggtgaaaatccggttccggcaagccaggcaatccaggtaatggagttgattgagctgggcatcgaatccgccaaa

SEQ ID NO: 152882 - DNA, 75 bp, synthetic construct
  source 1..75: mol_type = other DNA
agaacccaaggcccgatacggcatgcggactgcaggcagagaaaactggccgattttctctgcactggagggata

SEQ ID NO: 152883 - DNA, 75 bp, synthetic construct
  source 1..75: mol_type = other DNA
attacgttcccatttcgagacactttcttttgacattcccattgtatgtgccagcacggattgtgacatgccgta

SEQ ID NO: 152884 - DNA, 75 bp, synthetic construct
  source 1..75: mol_type = other DNA
tggctgtgtaattcgaaacggctgaagcgggaggaaaaagacagcacgccgaactggcgcggcgtgctggacagg

SEQ ID NO: 152885 - DNA, 75 bp, synthetic construct
  source 1..75: mol_type = other DNA
tgacactgtcacaagcgcgagagctggatgcgctggcaaaaagcctggggcgtgtgctgtctgtattccataacc

SEQ ID NO: 152886 - DNA, 75 bp, synthetic construct
  source 1..75: mol_type = other DNA
tgattgggtacggctatgcgagtaaaaccttccatgcgcccttaattgcgggtacgcccggactggagctggctg

SEQ ID NO: 152887 - DNA, 75 bp, synthetic construct
  source 1..75: mol_type = other DNA
tctgcgccacggttctgtaatttcactggtcggcgtaatgctgattgtgttgagttcattatttataaattctaa

SEQ ID NO: 152888 - DNA, 75 bp, synthetic construct
  source 1..75: mol_type = other DNA
cctgctgcgataaacaaactgcgccaaattaagctacggcatggggatgtaacaactgaaaaatatgaatacggc

SEQ ID NO: 152889 - DNA, 75 bp, synthetic construct
  source 1..75: mol_type = other DNA
catgacgatgaaggtgccggcggtcgcaggaataaccgccatcgacaccattggcgcgggcgataactttgcttc

SEQ ID NO: 152890 - DNA, 75 bp, synthetic construct
  source 1..75: mol_type = other DNA
tctttgccgcattggtggcagtgatatcgggtgccagttgcctctatctggtacgcagagtgattaatcgtggta

SEQ ID NO: 152891 - DNA, 75 bp, synthetic construct
  source 1..75: mol_type = other DNA
catctggaatcactgtatcgccgtctggaagtcaaaaatcgcacccaggcggcaatgatgttaaatatctcctcc

SEQ ID NO: 152892 - DNA, 75 bp, synthetic construct
  source 1..75: mol_type = other DNA
aggcagacgagttatggcaaaagctggaaagttatcccgaagccttagttatgctcgatggcgatcaggatggcg

SEQ ID NO: 152893 - DNA, 75 bp, synthetic construct
  source 1..75: mol_type = other DNA
atgacttatacagtaaaattccgggatgatgcactgaaagaatggctcagactggacaagaccattcagcagcag

SEQ ID NO: 152894 - DNA, 75 bp, synthetic construct
  source 1..75: mol_type = other DNA
gcgaaacgagctcagctacaccctgttcacgctgccggtcatcgggcaggttagcgcactggcggccctcgacgg

SEQ ID NO: 152895 - DNA, 75 bp, synthetic construct
  source 1..75: mol_type = other DNA
tcacatgatgcgaggaattttgccgccggtgtcagtctgccgtatggctataccctggtggattacacgtattca

SEQ ID NO: 152896 - DNA, 75 bp, synthetic construct
  source 1..75: mol_type = other DNA
gaatcgaattatgctcaggggattctgtgagaatagaaataacattaaaaagcagtgcagaaaagtatgagccag

SEQ ID NO: 152897 - DNA, 75 bp, synthetic construct
  source 1..75: mol_type = other DNA
gattatccctgtttcttctcgtttaccaggtatatatcctcctgttaccgctcgtggtattgaaattacggttac

SEQ ID NO: 152898 - DNA, 75 bp, synthetic construct
  source 1..75: mol_type = other DNA
aacattacacaggtatgaaaaagatttggtcaaggaaatcccattaaaaaacttatttggacttgaacattcagc

SEQ ID NO: 152899 - DNA, 75 bp, synthetic construct
  source 1..75: mol_type = other DNA
taatcgtctgcgtacggagtcggtacagattgaaatatcgcccggtgaccgtgagggatggtcggtggtgacact

SEQ ID NO: 152900 - DNA, 75 bp, synthetic construct
  source 1..75: mol_type = other DNA
ccggtgattgcccagcataccggtgcggattccgcctctgttatcttcgacgccattcaggccgctaaagcgcgt

SEQ ID NO: 152901 - DNA, 75 bp, synthetic construct
  source 1..75: mol_type = other DNA
atggcgaaagaaaaaaaacgtggctttttttcttggctgggctttggtcaaaaagagcagaccccggaaaaagag

SEQ ID NO: 152902 - DNA, 75 bp, synthetic construct
  source 1..75: mol_type = other DNA
gcggacagaagaataccggtacggggcagttaaatggtgtcctttcctttaataatccgctggggctggctgaca

SEQ ID NO: 152903 - DNA, 75 bp, synthetic construct
  source 1..75: mol_type = other DNA
cgtactcgtccggcacgctgtggggtgctgctgccgggctcagcaccaccagtggccatgtttccggttcgttca

SEQ ID NO: 152904 - DNA, 75 bp, synthetic construct
  source 1..75: mol_type = other DNA
tgtttccggttcgttcactgccggactgcctctggtttacccggactggcttgcccctgaccatctcacggttta

SEQ ID NO: 152905 - DNA, 75 bp, synthetic construct
  source 1..75: mol_type = other DNA
tggctgcactctgacagagatgacccgtactcgtccggcacgctgtggggtgctgctgccgggctcagcaccacc

SEQ ID NO: 152906 - DNA, 75 bp, synthetic construct
  source 1..75: mol_type = other DNA
atttagacatttttgacggggctaaattttctcttgattttgtgaggttttatcttaacggcccggcaacggtta

SEQ ID NO: 152907 - DNA, 75 bp, synthetic construct
  source 1..75: mol_type = other DNA
ccatcatcaattaataatggtgcccctgatggtgactttgattgtgatatagatattgctcacctgcgagtaaca

SEQ ID NO: 152908 - DNA, 75 bp, synthetic construct
  source 1..75: mol_type = other DNA
ccgactgacgtctgcagaaaccgacagactggtggcaccgtgggtgaatcagtgtctgaatatcaccggcctgac

SEQ ID NO: 152909 - DNA, 75 bp, synthetic construct
  source 1..75: mol_type = other DNA
tggcgaacagaacgttgttgcctggtatggtttccggccagtgcgcatttaagctccgcactttctctccggtgg

SEQ ID NO: 152910 - DNA, 75 bp, synthetic construct
  source 1..75: mol_type = other DNA
caattcagcagcaacagcagcagttgctggatgaaaatcagcgtcagcgtgatgcgctggagcgcagtgcgccgc

SEQ ID NO: 152911 - DNA, 75 bp, synthetic construct
  source 1..75: mol_type = other DNA
ataaaatagagaaaaatgtttccgaagaactatttagagtaaactgttcccccgttgttaatctcttcgaaaaaa

SEQ ID NO: 152912 - DNA, 75 bp, synthetic construct
  source 1..75: mol_type = other DNA
atgaataaactattatcttactatcagaaagaactttttttcttaaaaaagcatgggaatgagtttgcaaaaaaa

SEQ ID NO: 152913 - DNA, 75 bp, synthetic construct
  source 1..75: mol_type = other DNA
ctgatggggattttgattgtgatatagatattgctaacctgcgaataacagcactaaaccgcccatcaagaatgc

SEQ ID NO: 152914 - DNA, 75 bp, synthetic construct
  source 1..75: mol_type = other DNA
agaaagaacttttttttcttaaaaaacatggggatgagtttgcaaaaaaatacccaaaaatagccaggcgtcttg

SEQ ID NO: 152915 - DNA, 75 bp, synthetic construct
  source 1..75: mol_type = other DNA
agaaatgctgtcaatatataattataataacaatcgctcaatatcaatttatattgaatggattaaagaactaca

SEQ ID NO: 152916 - DNA, 75 bp, synthetic construct
  source 1..75: mol_type = other DNA
gcggatttatattcccgcggtgaagtcttaatctgggatataaataaagtaacgttgcacagatatgaaaataat

SEQ ID NO: 152917 - DNA, 75 bp, synthetic construct
  source 1..75: mol_type = other DNA
atggctactccggtagataataaatttatttcgccgccagaatatattcatgaagcaccaatgccaaccacgcac

SEQ ID NO: 152918 - DNA, 75 bp, synthetic construct
  source 1..75: mol_type = other DNA
aagcgaaacgccatgccttatgctggtgggcagattacgttatgcaggcagaagcgaaggttatcccgttacacg

SEQ ID NO: 152919 - DNA, 75 bp, synthetic construct
  source 1..75: mol_type = other DNA
gtgaactcctgaaacacaaagaagtaagctttaaccacttccaagaccagagcgaaattaagcgtttctggtgcg

SEQ ID NO: 152920 - DNA, 75 bp, synthetic construct
  source 1..75: mol_type = other DNA
gtctcgaagaagccctgcggcttagggcggggggcatcacgcaacctattttgttactggaaggcttttttgaag

SEQ ID NO: 152921 - DNA, 75 bp, synthetic construct
  source 1..75: mol_type = other DNA
ggtgaaggtctgccggttgagcgaatcgctgcaatgacaaaagtaagtgcttacgaacttatcacgcgcctgacg

SEQ ID NO: 152922 - DNA, 75 bp, synthetic construct
  source 1..75: mol_type = other DNA
catgtttccagggttaaataagtactcagatgatttccattcggtttcaagctacaagcaaaaaacgggctggca

SEQ ID NO: 152923 - DNA, 75 bp, synthetic construct
  source 1..75: mol_type = other DNA
atgggactggtaatcaaagccgcgcttggtgcgctggtggtggtgttgattggtgtattagcaaaaacgaaaaat

SEQ ID NO: 152924 - DNA, 75 bp, synthetic construct
  source 1..75: mol_type = other DNA
atggggctggtaatcaaagccgcgctcggtgcgctggtagtgctgttgattggtgttttagcaaaaacgaaaaat

SEQ ID NO: 152925 - DNA, 75 bp, synthetic construct
  source 1..75: mol_type = other DNA
tgtagagttcaaaagaacaatatgttccagcttcgactatataaaaagcggcgctgtaatagcaaaatacctagc

SEQ ID NO: 152926 - DNA, 75 bp, synthetic construct
  source 1..75: mol_type = other DNA
ccctttctccgctacatcataaccaacttcccgtcatcactactgaattgcttgccagtttgtatggcacggaag

SEQ ID NO: 152927 - DNA, 75 bp, synthetic construct
  source 1..75: mol_type = other DNA
ccactgcagccaatgcggtcgtttattatccgatgagtgcacgcctggtcgtggaagatgagtgcacgcctggtc

SEQ ID NO: 152928 - DNA, 75 bp, synthetic construct
  source 1..75: mol_type = other DNA
caatgcggtcgtttattatccgatgagtgcacgcctggtcgtggaaaaaaataaaaccgtaaacaatgtcactgc

SEQ ID NO: 152929 - DNA, 75 bp, synthetic construct
  source 1..75: mol_type = other DNA
atgagccgaccacttctgcaactggcactcgaccactcatcacttgaagccgcgcagcgcgacgtgacgctgtta

SEQ ID NO: 152930 - DNA, 75 bp, synthetic construct
  source 1..75: mol_type = other DNA
atggcgcaacgctgcggtggtgaaattcagatagagctgttcggtaactggacgctggacgacgcccgcgactgg

SEQ ID NO: 152931 - DNA, 75 bp, synthetic construct
  source 1..75: mol_type = other DNA
gaaagatgaggcgaccgacggtgaaatccgtgaaatgcacggcgtaccagtcatctatctcagccagctcaacga

SEQ ID NO: 152932 - DNA, 75 bp, synthetic construct
  source 1..75: mol_type = other DNA
tgaccatcatctgcgccgcgccgctcgcgacggtagaaaaaggccacgcaatggcgcaacgctgcggtggtgaaa

SEQ ID NO: 152933 - DNA, 75 bp, synthetic construct
  source 1..75: mol_type = other DNA
aaagacagcgtcgatatcgtcgaagcgggcaccattctctgtttaaacgaagggcttggcgcggtgaaagccttg

SEQ ID NO: 152934 - DNA, 75 bp, synthetic construct
  source 1..75: mol_type = other DNA
gttcggtaactggacgctggacgacgcccgcgactggcatcgtattggcgtgcggcaggccatttatcatcgcgg

SEQ ID NO: 152935 - DNA, 75 bp, synthetic construct
  source 1..75: mol_type = other DNA
atggtgctgttgtttctgtatatcaataaagataatataaaagtgagttacagtctaaaaataaaccagacaaca

SEQ ID NO: 152936 - DNA, 75 bp, synthetic construct
  source 1..75: mol_type = other DNA
tcgatctgattgagattttattttatctgaagaaaaagattcgtgttatcctttttattatggctatctgtatgg

SEQ ID NO: 152937 - DNA, 75 bp, synthetic construct
  source 1..75: mol_type = other DNA
gagcctgtcggttatggcggcacctgggtcagcgagcgcgatacccgtcttggcgtggtggcgatgggctatggc

SEQ ID NO: 152938 - DNA, 75 bp, synthetic construct
  source 1..75: mol_type = other DNA
ttttaccatgaaccctcagataatttacgtctcgtgggcgtaacgggcactaacggtaaaaccacgacgacccag

SEQ ID NO: 152939 - DNA, 75 bp, synthetic construct
  source 1..75: mol_type = other DNA
ccgtgtggcggcattgaaatttgcggcgtcggtctttaccaacttaagccgcgatcaccttgattatcatggtga

SEQ ID NO: 152940 - DNA, 75 bp, synthetic construct
  source 1..75: mol_type = other DNA
atccgtgaaatgcacggcgtaccggtcatctatctcagccagctcaacgagcgtttatctgcactggcgggccgc

SEQ ID NO: 152941 - DNA, 75 bp, synthetic construct
  source 1..75: mol_type = other DNA
atcgtcaaagttgatcgtgttggtgatgccgcgaaaatcggcgctggcgcgacccgtatgaccacgaacccgcgc

SEQ ID NO: 152942 - DNA, 75 bp, synthetic construct
  source 1..75: mol_type = other DNA
gacccgtatgaccactaacccgcgcgaactgcttattgcccgtagcgctgcggatgtgattgtcaactctggcta

SEQ ID NO: 152943 - DNA, 75 bp, synthetic construct
  source 1..75: mol_type = other DNA
catctggtacagagcggtgaactgaatatcgacgtggctttcctcggcgtcccctcctgcgacgaatttggtaat

SEQ ID NO: 152944 - DNA, 75 bp, synthetic construct
  source 1..75: mol_type = other DNA
aaaagcgccatcgatgctcagcaaccgtacattgctaacccagacgcgtggctgaaacagccggaaaacatcagc

SEQ ID NO: 152945 - DNA, 75 bp, synthetic construct
  source 1..75: mol_type = other DNA
ccgcgattatcgccgcatggcagcggggtgatattgatggtgcttatgtctgggcaccggcggttaacgccctgg

SEQ ID NO: 152946 - DNA, 75 bp, synthetic construct
  source 1..75: mol_type = other DNA
agtgattgccatgcgccgctggtagaacacattcgccagggcgtggttacccgcatttatacctccggcctgcgt

SEQ ID NO: 152947 - DNA, 75 bp, synthetic construct
  source 1..75: mol_type = other DNA
agatgattatgtttcctcccgcgtacagaaacctacccccacacggctttttaccgatattgaatcaatcgcccg

SEQ ID NO: 152948 - DNA, 75 bp, synthetic construct
  source 1..75: mol_type = other DNA
ggatatgaaccatttcgtcgttctccataaagttcggggaaaccggttatacatccatgatccggacagaggaaa

SEQ ID NO: 152949 - DNA, 75 bp, synthetic construct
  source 1..75: mol_type = other DNA
tatttgtcctaccagatgcgtttttcatccagtatcagcagcctgaccgataagtatttttcctggcgtatgctt

SEQ ID NO: 152950 - DNA, 75 bp, synthetic construct
  source 1..75: mol_type = other DNA
gccgctttccagaactcgccaaagcaaacctaccaggctgaaaaagcgcgcgatcgcaaactgtgcgccaacctg

SEQ ID NO: 152951 - DNA, 75 bp, synthetic construct
  source 1..75: mol_type = other DNA
acggacatctgagccaacgcgtgccgtatggtggctactggcaggaaaggacgatgaagattcttagacatcaga

SEQ ID NO: 152952 - DNA, 75 bp, synthetic construct
  source 1..75: mol_type = other DNA
ttttacgccgagtttccaaaaaagatgggcctcaaaggtaaaaagcttggcgagtggccggagctcgctatccag

SEQ ID NO: 152953 - DNA, 75 bp, synthetic construct
  source 1..75: mol_type = other DNA
tttgccctcaccacgaaaggtacgcctgctcacagcgccgtaagctatcaggatggcgattatctgatgttcggc

SEQ ID NO: 152954 - DNA, 75 bp, synthetic construct
  source 1..75: mol_type = other DNA
tcgttgccgactggaaggtcgccgacgcgggtgaaacgctcgcgcaacaggcatttggcgcaggcgctaactgga

SEQ ID NO: 152955 - DNA, 75 bp, synthetic construct
  source 1..75: mol_type = other DNA
aaaattaaaaccttcaaattacagttcaaagactgtgcggggattcccgggaaaaaggccaaaataaaattgact

SEQ ID NO: 152956 - DNA, 75 bp, synthetic construct
  source 1..75: mol_type = other DNA
ccgttaaaatcactcattgcaagaaagatcatggaaagcggtctaactgatgtagagttcaaaagaacaatatgt

SEQ ID NO: 152957 - DNA, 75 bp, synthetic construct
  source 1..75: mol_type = other DNA
attgatagtaaaaaacagtccttttatcatgaagaacataatactgttgtaaattcatttgacttacaaggtaat

SEQ ID NO: 152958 - DNA, 75 bp, synthetic construct
  source 1..75: mol_type = other DNA
cctttaaaggcttttatttcttcaaaaataaaagaaagtggtttatctgagaaggatttcaaaaagcaggtttgt

SEQ ID NO: 152959 - DNA, 75 bp, synthetic construct
  source 1..75: mol_type = other DNA
aaccggcgaaagtggctcaggctgataacacctttgctaaagagagcggggcgaccgtggactggcgtaagtttg

SEQ ID NO: 152960 - DNA, 75 bp, synthetic construct
  source 1..75: mol_type = other DNA
cggaaggtgacgttccggggctggtgaaggggaatacctatctgacaccgcagcaacaaacggcagaactgaccg

SEQ ID NO: 152961 - DNA, 75 bp, synthetic construct
  source 1..75: mol_type = other DNA
cagctcggtaactcagaagcgctggtagtgaagaaaaacatcactaaaccggaagatctgatcggcaaacgcatc

SEQ ID NO: 152962 - DNA, 75 bp, synthetic construct
  source 1..75: mol_type = other DNA
aaggccaaaataaagttgaccccacgagccttatgcgaaggtaattctaataacggccctggatttgctaacgca

SEQ ID NO: 152963 - DNA, 75 bp, synthetic construct
  source 1..75: mol_type = other DNA
atgaaatctaaaacattacgttatggactgcctgctggtattattttgacggcatccctattcaccagccaattg

SEQ ID NO: 152964 - DNA, 75 bp, synthetic construct
  source 1..75: mol_type = other DNA
agattatccgatgagtgcgcgcctggtcgtagataagagtaaaaccgtaagcgatgttacagcgggcacattttc

SEQ ID NO: 152965 - DNA, 75 bp, synthetic construct
  source 1..75: mol_type = other DNA
cagcaataatctttcagtttctcactgtcagtatgcggctgaatgggttgctggcagtgaacgcctggatcattg

SEQ ID NO: 152966 - DNA, 75 bp, synthetic construct
  source 1..75: mol_type = other DNA
tttgaaatcactgtccggcgcgttgacccccgcatcaaacccggcggcatggaaatcagccagatggtttcccgt

SEQ ID NO: 152967 - DNA, 75 bp, synthetic construct
  source 1..75: mol_type = other DNA
tcaaattaacctattactggtttgtaacagacaccgggggagttgattatttagatggggtgttgacatataatt

SEQ ID NO: 152968 - DNA, 75 bp, synthetic construct
  source 1..75: mol_type = other DNA
tatgtatcttgctgcatttgattcaggagcaccacttgctgtttattctaaatttgttactccattaataaaagg

SEQ ID NO: 152969 - DNA, 75 bp, synthetic construct
  source 1..75: mol_type = other DNA
cagaaaggcagccggacggacgcagggagcagcgacttaccctgccggaaggtgatttgggtgaatggttaaggt

SEQ ID NO: 152970 - DNA, 75 bp, synthetic construct
  source 1..75: mol_type = other DNA
gcatacgaaactgccgaagaggccaacgactacggcgaattcccgcaacgcatttacggcgtccgcgccccgtca

SEQ ID NO: 152971 - DNA, 75 bp, synthetic construct
  source 1..75: mol_type = other DNA
cttccggctaaattacgtcgcgagcaaattatattccactgccaggcaggtaaacgcaccagtaataacgccgat

SEQ ID NO: 152972 - DNA, 75 bp, synthetic construct
  source 1..75: mol_type = other DNA
cggggtttccgtatctcgggaatttgccggaacaactgcataccccgcggcgcgctgagccgcgcctgatcgttc

SEQ ID NO: 152973 - DNA, 75 bp, synthetic construct
  source 1..75: mol_type = other DNA
atcctgagtcgctggcgctggatgccatagagcgtttgcaacgctggtgggaggagagtgaggcgctggagccgg

SEQ ID NO: 152974 - DNA, 75 bp, synthetic construct
  source 1..75: mol_type = other DNA
tgcctttaatgaagatccaatcatatatagcaaactcacaattagaccttatctagacagcatgctatatctaag

SEQ ID NO: 152975 - DNA, 75 bp, synthetic construct
  source 1..75: mol_type = other DNA
tgggtacgaatacattcaatctgccgatagttacagttggcatgatgtaagtgaagagtatgcaaaagaatcatg

SEQ ID NO: 152976 - DNA, 75 bp, synthetic construct
  source 1..75: mol_type = other DNA
aagtggatttgtcggtgttggattaatgtttgcaggaatcagcggtttttgtgggatggcaaggctgttagataa

SEQ ID NO: 152977 - DNA, 75 bp, synthetic construct
  source 1..75: mol_type = other DNA
gcagagtatgcaataagtcgtgatgcattaacaatcattaatgagcaatttagcgttcaactaccggatgatgag

SEQ ID NO: 152978 - DNA, 75 bp, synthetic construct
  source 1..75: mol_type = other DNA
gcgatcgcttcccgcaggctgaaatttcgggcttttattatgacggaccggggattggcgtcgaacgtgcgaccg

SEQ ID NO: 152979 - DNA, 75 bp, synthetic construct
  source 1..75: mol_type = other DNA
cgcgccgcagcccaactacattccggggctgattgcggtggtcgggtgtgatggaaccggtaaatccacactgac

SEQ ID NO: 152980 - DNA, 75 bp, synthetic construct
  source 1..75: mol_type = other DNA
tgggtaaaaataagctggcagacgtttgtgaatggctgtatttactggtggtgtaccacgctggaaggcatgcgg

SEQ ID NO: 152981 - DNA, 75 bp, synthetic construct
  source 1..75: mol_type = other DNA
tgctttactgcctgtttatttttttctggatactcgttggtctggttttatgggtaaaaataagctggcagacgt

SEQ ID NO: 152982 - DNA, 75 bp, synthetic construct
  source 1..75: mol_type = other DNA
agatttatgatgcaccttaaatatttttctagtcgtgtgttatgtaatgaaaaaaataaaacagaaaaatattgg

SEQ ID NO: 152983 - DNA, 75 bp, synthetic construct
  source 1..75: mol_type = other DNA
tgatttcccgcattcccgatggtcaggctgaagatgctcgcaaagcaatcgacgccgcagagcgcgcgcagccag

SEQ ID NO: 152984 - DNA, 75 bp, synthetic construct
  source 1..75: mol_type = other DNA
atcagttgcgagaggcagcccgagaatttcagagcgattataaaggatggacgcgcgatattaacggcagcgtca

SEQ ID NO: 152985 - DNA, 75 bp, synthetic construct
  source 1..75: mol_type = other DNA
tgctgcatttgattcaggagcaccacttgctgtttattctaaatttgttactccattaataaaaggtgtgtcgcc

SEQ ID NO: 152986 - DNA, 75 bp, synthetic construct
  source 1..75: mol_type = other DNA
aaacacaaactgttaagagtacaaccgcgccgcagcccaactacattccggggctgattgcggtggtcgggtgtg

SEQ ID NO: 152987 - DNA, 75 bp, synthetic construct
  source 1..75: mol_type = other DNA
aatcctccaaaacccaaagtatgaaaacccaatctccggcgctttgggcggcggcgattatgtatggcttttcgc

SEQ ID NO: 152988 - DNA, 75 bp, synthetic construct
  source 1..75: mol_type = other DNA
gcgctatgggcggcgttgattatgtattgcttctcgctgcgaagaatgacgaatctgcgcaaggttcagcggctg

SEQ ID NO: 152989 - DNA, 75 bp, synthetic construct
  source 1..75: mol_type = other DNA
tcaggaacgtttagccgttaacccgtatgcagactttgaagaaacagactggatcgaactggcattaaagaaaac

SEQ ID NO: 152990 - DNA, 75 bp, synthetic construct
  source 1..75: mol_type = other DNA
aagaacaaaaagcagctttgacactgcctaaaccgaataacacgatcatgattcagaataaagcgactatcatga

SEQ ID NO: 152991 - DNA, 75 bp, synthetic construct
  source 1..75: mol_type = other DNA
atatcaataatgtggtatgtgcgatgcccttgccctatacccgcttgtatgaaggtttagcgagcgggttaaaag

SEQ ID NO: 152992 - DNA, 75 bp, synthetic construct
  source 1..75: mol_type = other DNA
cttttccgcaacagacggaaaaaaaacgcgcactgaatgacagcgggcggatcccctacgactctgccggtttct

SEQ ID NO: 152993 - DNA, 75 bp, synthetic construct
  source 1..75: mol_type = other DNA
catggaaaacactcacccgccggcgcgatgatttttccatgggtaccgcgcagcctgtgctgacagcctttgttg

SEQ ID NO: 152994 - DNA, 75 bp, synthetic construct
  source 1..75: mol_type = other DNA
gcattattgcttctcgcgcgtttattccagggattatccgttggcggagaatatggcaccagcgccacctatatg

SEQ ID NO: 152995 - DNA, 75 bp, synthetic construct
  source 1..75: mol_type = other DNA
cgcactggcgggcgctaccaatccagcgcaggtggccactgattttcatgcacaaattgacgcaatctggggagg

SEQ ID NO: 152996 - DNA, 75 bp, synthetic construct
  source 1..75: mol_type = other DNA
agcgctgacgggcgcagcaaatccgacacaggttgctgccgatttccatgcgcaaatcgatactatctggggagg

SEQ ID NO: 152997 - DNA, 75 bp, synthetic construct
  source 1..75: mol_type = other DNA
agcactggcaggcgcagcaaatccggtgcaggtggctggcgatttccatgcacaaattgatgccatctggggagg

SEQ ID NO: 152998 - DNA, 75 bp, synthetic construct
  source 1..75: mol_type = other DNA
ctacgtacggttgtagataaacacgtcctgcttgctcatcaacagcgagtagtcagtggggaacaggaacccagt

SEQ ID NO: 152999 - DNA, 75 bp, synthetic construct
  source 1..75: mol_type = other DNA
aactgaatgccgttcatcggttggcctgacgcaggccgcgttgaaaacgctggaatcaagcggagcgatacggat

SEQ ID NO: 153000 - DNA, 75 bp, synthetic construct
  source 1..75: mol_type = other DNA
tggcagaaagcgaactggccatgcttggattagaagcgacgccgctcacagacgatccgcgatttttgcaggcca

SEQ ID NO: 153001 - DNA, 75 bp, synthetic construct
  source 1..75: mol_type = other DNA
cacatttactgctatctgatcgtcgtctgcgcgatctcgcaaaacttccgggagctccagtcccccaaggacgtg

SEQ ID NO: 153002 - DNA, 75 bp, synthetic construct
  source 1..75: mol_type = other DNA
cagaccaacggcgtactgattaacgacgaatgggcgacgtttctggctcagtatcgatttcttgtggggatatcg

SEQ ID NO: 153003 - DNA, 75 bp, synthetic construct
  source 1..75: mol_type = other DNA
cagaccaacggcgtactgattaacgacgaatgggcggcatttctggctcagcatcggtttctggtaggcatatcg

SEQ ID NO: 153004 - DNA, 75 bp, synthetic construct
  source 1..75: mol_type = other DNA
aacaatatcacggtgattttgcgtaatcctgagtcgctggcgctggatgccatagagcgtttgcaacgctggtgg

SEQ ID NO: 153005 - DNA, 75 bp, synthetic construct
  source 1..75: mol_type = other DNA
gtgcaacgagcgcgttgttatctgataggtgaaacggtggtagtactggaaccgccggtgacgctggctagccag

SEQ ID NO: 153006 - DNA, 75 bp, synthetic construct
  source 1..75: mol_type = other DNA
gccggaacaactacacacgccgcgacgcgctgaaccgcgtttgctcgttccggcaggttctgtcgggatcggtgg

SEQ ID NO: 153007 - DNA, 75 bp, synthetic construct
  source 1..75: mol_type = other DNA
gatgtcgagcgagctgcataaattgtaccgttcgctggaagcgtcagtagaagaaaagacccgcgatctccacga

SEQ ID NO: 153008 - DNA, 75 bp, synthetic construct
  source 1..75: mol_type = other DNA
gctgagttgggctttgcaacgtgtaataatgacattatgcttcggagtattgatgatcattttcatggaataaaa

SEQ ID NO: 153009 - DNA, 75 bp, synthetic construct
  source 1..75: mol_type = other DNA
atcacatgattcttatgcccttaatactttaaataacaatgagcacaaaaattctaatgtaattatgaaagggat

SEQ ID NO: 153010 - DNA, 75 bp, synthetic construct
  source 1..75: mol_type = other DNA
cctatatggcgcagcagattcgtatgcagcagtctccggctggagtgatggtggtggcggacgatttgtgtcgta

SEQ ID NO: 153011 - DNA, 75 bp, synthetic construct
  source 1..75: mol_type = other DNA
ccgccatattttgcagattgttcgcgacaatgaggctgctgaatatctggagctgaacgttggggataactggcg

SEQ ID NO: 153012 - DNA, 75 bp, synthetic construct
  source 1..75: mol_type = other DNA
acgggattggcatcggtgaaccgaaagaacctgaaggccattatggcttgaatattatgcgcgagcgcgcggaac

SEQ ID NO: 153013 - DNA, 75 bp, synthetic construct
  source 1..75: mol_type = other DNA
gccgacggcaatattgtactgagttatcaggaacatcagccgcaagcgttgccgttgccggacgtcgccaaagcg

SEQ ID NO: 153014 - DNA, 75 bp, synthetic construct
  source 1..75: mol_type = other DNA
atcgtggcgaactggtgacaaaagccattgatgtctttccgcagtttgtccgtttcccgaatacgctggaggaag

SEQ ID NO: 153015 - DNA, 75 bp, synthetic construct
  source 1..75: mol_type = other DNA
gatcagccggttgattatctcttctggcaaggaatggcgctgcgactgctgggcgaacaacaaaccgcacagcaa

SEQ ID NO: 153016 - DNA, 75 bp, synthetic construct
  source 1..75: mol_type = other DNA
cgaccggcgatcgcaccattaacatccacagttattacaacgatcagccggttgattatctcttctggcaaggaa

SEQ ID NO: 153017 - DNA, 75 bp, synthetic construct
  source 1..75: mol_type = other DNA
cgcgtctataacggtaacgctacgccacgccattttttgtggtgggctaatccggcagtgaaaggcggggaaggg

SEQ ID NO: 153018 - DNA, 75 bp, synthetic construct
  source 1..75: mol_type = other DNA
gctacaacaaagccattgccttatggcaacgttgcgtagagatgtcgccggagtttgccgacggctggcgcgggt

SEQ ID NO: 153019 - DNA, 75 bp, synthetic construct
  source 1..75: mol_type = other DNA
gcctcccgcgatgcggtgataaaactccagcgtagtgagcgggggattgagtgggggctgtatgccatctctccg

SEQ ID NO: 153020 - DNA, 75 bp, synthetic construct
  source 1..75: mol_type = other DNA
tgaacgagatttgctggataaaatagccggcgtatcaccagaaaagcgacttacacgtctggaagcgcatcttga

SEQ ID NO: 153021 - DNA, 75 bp, synthetic construct
  source 1..75: mol_type = other DNA
gcccgtatatcgaactgatgaccggtatttttgccgataaccagcccgattttacctggcttgatgcttacgaag

SEQ ID NO: 153022 - DNA, 75 bp, synthetic construct
  source 1..75: mol_type = other DNA
accagcgaccgccatccagggcgtgttgcacggtatcaatcctgacagactgaccattgaactctccgatgccga

SEQ ID NO: 153023 - DNA, 75 bp, synthetic construct
  source 1..75: mol_type = other DNA
ggaaggtcaccagtcagtttatcctcaaccagttattacgcgcctggcagcatcttgatgccagagagccgcagc

SEQ ID NO: 153024 - DNA, 75 bp, synthetic construct
  source 1..75: mol_type = other DNA
ctgtttagtgaaatgaaacagtgggcgcaagagatggcgaaaaccagtatcgaggcggatttctttgctgtttca

SEQ ID NO: 153025 - DNA, 75 bp, synthetic construct
  source 1..75: mol_type = other DNA
tcaatctgatggccaacgacagtacgctgaccggtaaaggcagcgtggtgctgggcgataagccggtgtggtcgc

SEQ ID NO: 153026 - DNA, 75 bp, synthetic construct
  source 1..75: mol_type = other DNA
tgcctcaggagtctggcgatcgcggctggtcattcgatattgccgggctgcaggtcattgacagcgtgctggtat

SEQ ID NO: 153027 - DNA, 75 bp, synthetic construct
  source 1..75: mol_type = other DNA
cagaacaggccagagcaaaactaccgttctaaaggcagcactggcgatgtacaacagccaggaggctttgttgaa

SEQ ID NO: 153028 - DNA, 75 bp, synthetic construct
  source 1..75: mol_type = other DNA
atgcgtcccgcgactatcgccccgttaacgccatacgataaatgggatggtgagaaatgggtgactgatactgaa

SEQ ID NO: 153029 - DNA, 75 bp, synthetic construct
  source 1..75: mol_type = other DNA
atgcgtcccgcgactatcgcccctttatcgccatacgataaatgggatggtgagaaatgggtgactgatactgaa

SEQ ID NO: 153030 - DNA, 75 bp, synthetic construct
  source 1..75: mol_type = other DNA
atgcgtcccgcgactatcgccccattagcgccatacgataaatgggatggtgagaaatgggtgactgatactgaa

SEQ ID NO: 153031 - DNA, 75 bp, synthetic construct
  source 1..75: mol_type = other DNA
aagccaaatggttatcggacggcaggaacatttcgtacatcctttacgtttagtgagttagctggcctggatgta

SEQ ID NO: 153032 - DNA, 75 bp, synthetic construct
  source 1..75: mol_type = other DNA
taatgcgtcaactgactcattagcgggagttacgcttggtcagctattgtataacgattccaataaagtggatgg

SEQ ID NO: 153033 - DNA, 75 bp, synthetic construct
  source 1..75: mol_type = other DNA
tgacggaagaagtcattttaaatatgaattaccctgattttgttgctctgatgcaacaggataacactcctcctg

SEQ ID NO: 153034 - DNA, 75 bp, synthetic construct
  source 1..75: mol_type = other DNA
gccaggtaaagccagccagaccactgaccccgcagaacttcgcaattacatcgtaacgggtgacgttcgctcatt

SEQ ID NO: 153035 - DNA, 75 bp, synthetic construct
  source 1..75: mol_type = other DNA
aaaccaacgaataccagaagctggtatctgtgggcggcactaccgttaatcgtggtaccgaaggtgaggcacgta

SEQ ID NO: 153036 - DNA, 75 bp, synthetic construct
  source 1..75: mol_type = other DNA
gaatatttcgtacagcctttacgttcagtgagttagctggcctggatgtaaccatccgttcaactcaattctctt

SEQ ID NO: 153037 - DNA, 75 bp, synthetic construct
  source 1..75: mol_type = other DNA
tggctgttggtttgcgtggcgtcatcaggccagcgacgaatacattgattattttgccgtttcgttacgtattat

SEQ ID NO: 153038 - DNA, 75 bp, synthetic construct
  source 1..75: mol_type = other DNA
ggcggtgctgccggtgtggttgctgctggccccgcgtgactatctctcgaccttcctgaaaatcgggactatcgt

SEQ ID NO: 153039 - DNA, 75 bp, synthetic construct
  source 1..75: mol_type = other DNA
tctggcgttcttcatatgtcagcgacagatattggaatcatatcatgtgctggattcttatcttatggtatatca

SEQ ID NO: 153040 - DNA, 75 bp, synthetic construct
  source 1..75: mol_type = other DNA
gtactggcaactcagcgtccatcggttgatgttattactggtctgattaaagcgaatattccgacccgtatcgcc

SEQ ID NO: 153041 - DNA, 75 bp, synthetic construct
  source 1..75: mol_type = other DNA
gccgccgccgagcgaagtggaacccgtagatacctttgcacttgagcaaatggcgcgtctggtagaggcgcgtct

SEQ ID NO: 153042 - DNA, 75 bp, synthetic construct
  source 1..75: mol_type = other DNA
gatgcgatgcagcaggatgaactggctcgtcagttcgcccagacgcagcagcaacgctatggcgagcaatatcaa

SEQ ID NO: 153043 - DNA, 75 bp, synthetic construct
  source 1..75: mol_type = other DNA
tccattgctctgcgcgcctggtaagcctatgctgctgggtttcagtgattccagttatcagcaatttttccatga

SEQ ID NO: 153044 - DNA, 75 bp, synthetic construct
  source 1..75: mol_type = other DNA
gtaatgatgacaccggctttcagcaagtgctggaacgtgctgactatctggcgaaggagcataccaaagctcact

SEQ ID NO: 153045 - DNA, 75 bp, synthetic construct
  source 1..75: mol_type = other DNA
actggccgggatgattaaacaggcgtggtgcagtgccctgggggtggatgccggatgctatgccacactggcgaa

SEQ ID NO: 153046 - DNA, 75 bp, synthetic construct
  source 1..75: mol_type = other DNA
acttcctccaattgaaaaatggaaaggtgaagagtacgcagagacacctgaaataaaaatgtctatgtctacaat

SEQ ID NO: 153047 - DNA, 75 bp, synthetic construct
  source 1..75: mol_type = other DNA
ccggagatcataccacgctggcgcattttccggtcaggccggcggtgtggctggaacgcgatgatgacaccggct

SEQ ID NO: 153048 - DNA, 75 bp, synthetic construct
  source 1..75: mol_type = other DNA
ctctgcgcgcccggtaagcctatgctgctgggtttcagtgattccagttatcagcaatttttccatgaggtgtag

SEQ ID NO: 153049 - DNA, 75 bp, synthetic construct
  source 1..75: mol_type = other DNA
ttaccgaataaaaaacgacaaaccgtttatctgcgcgaggttttggataacgccaaattccgcgataatccgtcg

SEQ ID NO: 153050 - DNA, 75 bp, synthetic construct
  source 1..75: mol_type = other DNA
ttcaggaaaatccgctacagaaaacaataatccgcaacaaaatccgaccgaaagaacagaattaaatctcctatt

SEQ ID NO: 153051 - DNA, 75 bp, synthetic construct
  source 1..75: mol_type = other DNA
ccgggtgctgaggacgtactgccagcgccgctgccgccgtaccgggtgcttaccgggctggcagaccgtttcggg

SEQ ID NO: 153052 - DNA, 75 bp, synthetic construct
  source 1..75: mol_type = other DNA
ccagcgcacgctgccgctttacctgcaagccagcttgctgccgaaagccgaacgcggcgaactggtcgcaaaagc

SEQ ID NO: 153053 - DNA, 75 bp, synthetic construct
  source 1..75: mol_type = other DNA
aaccgggccgcaggatatacatcccatgttcctggaaaatcgcgtttatcagggatcgtccggcgcggtttatcc

SEQ ID NO: 153054 - DNA, 75 bp, synthetic construct
  source 1..75: mol_type = other DNA
gatcctgagcatgctttataaagcacagccagaagatgtacgtttcatcatgatcgacccgaaaatgctggagct

SEQ ID NO: 153055 - DNA, 75 bp, synthetic construct
  source 1..75: mol_type = other DNA
gacactgatagacgctgcaaaactactcgaccttaaatcatcaccatttggaggaaaagaccatgttcaaacaga

SEQ ID NO: 153056 - DNA, 75 bp, synthetic construct
  source 1..75: mol_type = other DNA
cctgtacagcagccgcaacaaccggttgcaccgcagcagcaatatcagcagccgcaacaaccagttccgccgcag

SEQ ID NO: 153057 - DNA, 75 bp, synthetic construct
  source 1..75: mol_type = other DNA
ttgatgttattactggtctgattaaagcgaatattccgacccgtatcgcctttaccgtatccagtaagattgact

SEQ ID NO: 153058 - DNA, 75 bp, synthetic construct
  source 1..75: mol_type = other DNA
ggtccacacgaaccgttgtttacgccaattgttgaacctgtacagcagccgcaacaaccggttgcaccgcagcag

SEQ ID NO: 153059 - DNA, 75 bp, synthetic construct
  source 1..75: mol_type = other DNA
catcggttgatgttattactggtctgattaaagcgaatattccgacccgtatcgcctttaccgtatccagtaaga

SEQ ID NO: 153060 - DNA, 75 bp, synthetic construct
  source 1..75: mol_type = other DNA
cgcatctgttaacggaagtcgttactgatatgaaagatgccgccaacgcgctgcgctggtgtgttaacgagatgg

SEQ ID NO: 153061 - DNA, 75 bp, synthetic construct
  source 1..75: mol_type = other DNA
cgggtaaattgccgcaggcaagtcatttcaatttcggcgccgtctatcgtgccgctaactgggcagatctcaacc

SEQ ID NO: 153062 - DNA, 75 bp, synthetic construct
  source 1..75: mol_type = other DNA
actggaacccgccgacgctgaatggtgtactgatgaaactcagcgtggggcaatatctggcaaaagataaaggtg

SEQ ID NO: 153063 - DNA, 75 bp, synthetic construct
  source 1..75: mol_type = other DNA
gcaagattaaaaaccacattctgaaaatgccgttgccaggaagcgtcgtcgcatccatcagcccggatgagctgc

SEQ ID NO: 153064 - DNA, 75 bp, synthetic construct
  source 1..75: mol_type = other DNA
atgaattacaacggttttctgaagactatgatttatggctaaggttagctaaagataaatgtataatgggttatg

SEQ ID NO: 153065 - DNA, 75 bp, synthetic construct
  source 1..75: mol_type = other DNA
gctaaatcttgaactggtcagtgcaccgaaaggaactgctgccgatgtctttaattctctaacacaaaatgtggg

SEQ ID NO: 153066 - DNA, 75 bp, synthetic construct
  source 1..75: mol_type = other DNA
cgggtgagcgataaatattgtcatcgtgcagagtctcacgatgcgggcgatatcagctttagcgatatctttcgt

SEQ ID NO: 153067 - DNA, 75 bp, synthetic construct
  source 1..75: mol_type = other DNA
tatggctggcaactggcggggatgatgttaattggcgcggcattgatgcgtagcggttggctgaaagggcagtac

SEQ ID NO: 153068 - DNA, 75 bp, synthetic construct
  source 1..75: mol_type = other DNA
ttgctgccccgtggcagacgctggatccagtcgcggttaacgctgttagtcttgctgggctttattcacggttta

SEQ ID NO: 153069 - DNA, 75 bp, synthetic construct
  source 1..75: mol_type = other DNA
atggagcgcaacgtcacgctcgattttgttcgcggcgtcgccattctggggatcctgcttcttaacatcagcgcc

SEQ ID NO: 153070 - DNA, 75 bp, synthetic construct
  source 1..75: mol_type = other DNA
cgttaatcgtgcaggatatggggatccttgagctcgatattccccccattgaactgcatgccagtacgcagtgtg

SEQ ID NO: 153071 - DNA, 75 bp, synthetic construct
  source 1..75: mol_type = other DNA
tatacaaccagaaagcgcgtgaattttatcatcgctatggtgtgcaactgattgatgcggcgtatgaagcgcatg

SEQ ID NO: 153072 - DNA, 75 bp, synthetic construct
  source 1..75: mol_type = other DNA
gttttgtgctggtggcgattggggtgatcattaaccttcctgccatcgccctgcaatggcggctggactgggcat

SEQ ID NO: 153073 - DNA, 75 bp, synthetic construct
  source 1..75: mol_type = other DNA
cgttgaaacgtgcgctacacccgttcggtggcattaatatgattaaaagttcattccacgcctatggccgtgaaa

SEQ ID NO: 153074 - DNA, 75 bp, synthetic construct
  source 1..75: mol_type = other DNA
ggacatacctctcccaataccagaaagaactacggctaccttatctggcgcaagcgcaattgtgtgttcctgtga

SEQ ID NO: 153075 - DNA, 75 bp, synthetic construct
  source 1..75: mol_type = other DNA
gtgaatctggggggctttaatatcaatattggtaatgtgggtagcggcagtggtggtcaggaaagccgcgccaaa

SEQ ID NO: 153076 - DNA, 75 bp, synthetic construct
  source 1..75: mol_type = other DNA
cctgtttggctcctacgatgcgcagactggtgtacgccatatcaaggaagtttttatccttatccccaagaataa

SEQ ID NO: 153077 - DNA, 75 bp, synthetic construct
  source 1..75: mol_type = other DNA
ccgacgttcggggagtcctgcgcacagtgggtgtttgacctggtggcggccctgtttggctcctacgatgcgcag

SEQ ID NO: 153078 - DNA, 75 bp, synthetic construct
  source 1..75: mol_type = other DNA
taccgatctgcgtaaaacccataaccagggcgtatttgatgtttactcaccggatatgctgcgctctgagagatc

SEQ ID NO: 153079 - DNA, 75 bp, synthetic construct
  source 1..75: mol_type = other DNA
gcagccgcagtatcagcagccacaacagcaggttgcgccgcagccacaatatcagcagccgcaacaaccggttgc

SEQ ID NO: 153080 - DNA, 75 bp, synthetic construct
  source 1..75: mol_type = other DNA
tgattgtcagtgcagtgaaaacactgggggccgcggaaattgtctgtgccgatgtgagtccccgttccctttcgc

SEQ ID NO: 153081 - DNA, 75 bp, synthetic construct
  source 1..75: mol_type = other DNA
gcggcgtaatggtgcaggtaggtatgggaggcgcgatggcagaattcccaatgatgacattgattggtaaggaga

SEQ ID NO: 153082 - DNA, 75 bp, synthetic construct
  source 1..75: mol_type = other DNA
aaaagaagcagcaataagtaaagcctgttcgattgccagagaaaaaatgaattctgtgatggggaatatatcgga

SEQ ID NO: 153083 - DNA, 75 bp, synthetic construct
  source 1..75: mol_type = other DNA
ccgcagccgcagtatcaacagccgcaacaaccggttgcaccgcagcagcaggataccctgcttcatccgctgttg

SEQ ID NO: 153084 - DNA, 75 bp, synthetic construct
  source 1..75: mol_type = other DNA
gtatcagcagccacaacagccagttgcgccacagccgcaggatactctgcttcatccgctgttgatgcgtaatgg

SEQ ID NO: 153085 - DNA, 75 bp, synthetic construct
  source 1..75: mol_type = other DNA
cggcagaagcacagcgccagtcgctgattgatgctgcaatggcttccattagtctgattcaactgaaattccagg

SEQ ID NO: 153086 - DNA, 75 bp, synthetic construct
  source 1..75: mol_type = other DNA
ccgcagaagcacagcgccagtcgctgattgatgctgcaatggcttccattagtctgattcaactgaaattgcagg

SEQ ID NO: 153087 - DNA, 75 bp, synthetic construct
  source 1..75: mol_type = other DNA
ccgcagaagcacagcgccagtcgctgattgatcctgcaatggcttccattagtctgattcaactgaaattccagg

SEQ ID NO: 153088 - DNA, 75 bp, synthetic construct
  source 1..75: mol_type = other DNA
ctgccgctctatctcaatgccgacagcccggtggcctgtgcgctgcaccgggctttaacgcttggcatccagcag

SEQ ID NO: 153089 - DNA, 75 bp, synthetic construct
  source 1..75: mol_type = other DNA
ttctggctgcgtctgccggggcaggatcgccggatgcttggcgcacacttttccccgatgggctttgaggatgat

SEQ ID NO: 153090 - DNA, 75 bp, synthetic construct
  source 1..75: mol_type = other DNA
cgctgcatccgctggcgttgccggacgtgtcattgcaatatgaaccggacggacgctcggttatccgtctgcgct

SEQ ID NO: 153091 - DNA, 75 bp, synthetic construct
  source 1..75: mol_type = other DNA
tgagaaatgggtgacggatacggatgcacagcatagcggcgcagtagaagctgcagaagcacagcgccagtcact

SEQ ID NO: 153092 - DNA, 75 bp, synthetic construct
  source 1..75: mol_type = other DNA
tgagaaatgggtgacggatacggatgcacagcatagcgtcgcagtagaagcagcagaagcacagcgccagtcact

SEQ ID NO: 153093 - DNA, 75 bp, synthetic construct
  source 1..75: mol_type = other DNA
tgagaaatgggtgacggatactgatgcacagcatagcgacgcagtagaagccgcagaagcacagcgccagtcact

SEQ ID NO: 153094 - DNA, 75 bp, synthetic construct
  source 1..75: mol_type = other DNA
ccgcagaagcacagcgccagtcgctgattgatactgcaatggcttccattagtctgattcaactgaaattacagg

SEQ ID NO: 153095 - DNA, 75 bp, synthetic construct
  source 1..75: mol_type = other DNA
ctgcagaagcacagcgccagtcgctgattgattctgcaatggcttccattagtctgattcaactgaaattccagg

SEQ ID NO: 153096 - DNA, 75 bp, synthetic construct
  source 1..75: mol_type = other DNA
cagcagaagcacagcgccagtcgctgattgatactgcaatggcttccattagtctgattcaactgaaattccagg

SEQ ID NO: 153097 - DNA, 75 bp, synthetic construct
  source 1..75: mol_type = other DNA
gcaatgatatcggctgcggtatggcgctatggcaaacagatattctcgctcgcaaatacaacgccgataagtttg

SEQ ID NO: 153098 - DNA, 75 bp, synthetic construct
  source 1..75: mol_type = other DNA
gtcacttaaaaaactcaggccggagtcggtaacctcgcgcatacacccgggcagtgatgtgattgtctgcgctga

SEQ ID NO: 153099 - DNA, 75 bp, synthetic construct
  source 1..75: mol_type = other DNA
atcgctggtgcgccttcttacttcagatgccgcgggaactgagtgcgccgtttcaggcgattggctatgcgtcgc

SEQ ID NO: 153100 - DNA, 75 bp, synthetic construct
  source 1..75: mol_type = other DNA
ccggcgtcatgctttatctggtggggcttggcgttttgctgttattggggttgatttccgacagccagaccagcc

SEQ ID NO: 153101 - DNA, 75 bp, synthetic construct
  source 1..75: mol_type = other DNA
gaagctggagcagcagcaacaggaaaatagcgcggcgctgaaatcgcagcggcgaatgttccatcaccagattga

SEQ ID NO: 153102 - DNA, 75 bp, synthetic construct
  source 1..75: mol_type = other DNA
ggcgctgtcaggcccgtctgcaactgacgctgcccgtcagcctgttgcctgctgcccggctgggaaaacagcgtg

SEQ ID NO: 153103 - DNA, 75 bp, synthetic construct
  source 1..75: mol_type = other DNA
cattcgcctgcgctttgaatgcggcccgctggtcggcgactggtcgcagattgatttatcccgcctgccgctgta

SEQ ID NO: 153104 - DNA, 75 bp, synthetic construct
  source 1..75: mol_type = other DNA
gccagacatagcgaaacaattaagactgccatatcctattgaccaggccagtagtgcgcctaatgttttcaaaac

SEQ ID NO: 153105 - DNA, 75 bp, synthetic construct
  source 1..75: mol_type = other DNA
cttccatttccatcagatgtccttcctgctccgctactgaaggcgtggtgcgtaacggcaaaagcactgccggac

SEQ ID NO: 153106 - DNA, 75 bp, synthetic construct
  source 1..75: mol_type = other DNA
gcccgcgcgtgattgtagaacgtaatttacctagtggaacttactcactccgacaagaacttatccgtacaggag

SEQ ID NO: 153107 - DNA, 75 bp, synthetic construct
  source 1..75: mol_type = other DNA
ctctcaggccgcagtcggtaaactcacgcatacaaccgggcagtgacgtcattgtttgcgcggaaatggacgaac

SEQ ID NO: 153108 - DNA, 75 bp, synthetic construct
  source 1..75: mol_type = other DNA
ttgtggttttctttgttgccggattgcttttatggcacggtatgcatgcttttttcagcgccggtattgattcgt

SEQ ID NO: 153109 - DNA, 75 bp, synthetic construct
  source 1..75: mol_type = other DNA
atgatgacagaaaacaaaaagaatcaggaattcaaaatcagaaaaattaaacgggatatcgagcgcagttgtgat

SEQ ID NO: 153110 - DNA, 75 bp, synthetic construct
  source 1..75: mol_type = other DNA
gacttatatgtggaacatcctgatgtatgccatcccgtatacgttatatgcgcttgcagacgggtttcttgttac

SEQ ID NO: 153111 - DNA, 75 bp, synthetic construct
  source 1..75: mol_type = other DNA
tttcaaagtgctttggcagcttatcagcgagtaatggaagttggtttacagcgtgcaagtgctgaacgttcaatt

SEQ ID NO: 153112 - DNA, 75 bp, synthetic construct
  source 1..75: mol_type = other DNA
tttctgcgctgaatattaaactggatcagtcagttgtcatggtcacaaaagccgctctggatcaggccatcaaag

SEQ ID NO: 153113 - DNA, 75 bp, synthetic construct
  source 1..75: mol_type = other DNA
tgggttattcgatgatgaaggtgccctgattgctgttggcaacgtagcagaaggttacaaaccgaagctggagga

SEQ ID NO: 153114 - DNA, 75 bp, synthetic construct
  source 1..75: mol_type = other DNA
gttgaagtggttatgaacgttgaccaggctccggttaaagctgaagagggtggtaaaaaagataagctcaacaag

SEQ ID NO: 153115 - DNA, 75 bp, synthetic construct
  source 1..75: mol_type = other DNA
accaccatctttaaatttaaagatatcgaaattgatgatagcaatcccaatggcctgaacaaccgtgacaacatc

SEQ ID NO: 153116 - DNA, 75 bp, synthetic construct
  source 1..75: mol_type = other DNA
gagttaaagactggggaccatggcataatactgagcttcgtgatgagattctgccgggcctagcgtcggtactca

SEQ ID NO: 153117 - DNA, 75 bp, synthetic construct
  source 1..75: mol_type = other DNA
tgtacgcaaggacatgggattaattatcgactacctcggcgttttcgaaaatctgcgtacggctctggcctacaa

SEQ ID NO: 153118 - DNA, 75 bp, synthetic construct
  source 1..75: mol_type = other DNA
ggatgcagcgaaagataccgtacaagccgagcgcgaaacaggcgagcgcccagtaactgaagctgataataaaca

SEQ ID NO: 153119 - DNA, 75 bp, synthetic construct
  source 1..75: mol_type = other DNA
accgccaagctgcttacgggctttgatgccccgatttgctactgcatgtacctcgataagcctctacgcgatcat

SEQ ID NO: 153120 - DNA, 75 bp, synthetic construct
  source 1..75: mol_type = other DNA
agcaatgctcaacttgcaatgactattagtgaactatcacgcaaggtagacgctttaacagcagaaactaggaag

SEQ ID NO: 153121 - DNA, 75 bp, synthetic construct
  source 1..75: mol_type = other DNA
aacaacgcttttaaacgctcttggtggaagtggtaaaagtcttggtgaatctcttggtagtctcatgacttctat

SEQ ID NO: 153122 - DNA, 75 bp, synthetic construct
  source 1..75: mol_type = other DNA
aagcaactggaaagagtgaacaagagctatttgacaccatgaaaaagggagctttaaaatctgccgatactcttc

SEQ ID NO: 153123 - DNA, 75 bp, synthetic construct
  source 1..75: mol_type = other DNA
tgggtcaatggataattcaaaattcaatgagaagttagctcaattaaatgcttcagtcagagaagcaatcactaa

SEQ ID NO: 153124 - DNA, 75 bp, synthetic construct
  source 1..75: mol_type = other DNA
gtcgagaaatacattaagagccagttttacgcattaagtagtaaagctggtcagatggataacaccaagtttaat

SEQ ID NO: 153125 - DNA, 75 bp, synthetic construct
  source 1..75: mol_type = other DNA
aaaccagatgaaaccagctttatgacctttagcagtaatatctacgaccaatacgcagaagctacgctattaagt

SEQ ID NO: 153126 - DNA, 75 bp, synthetic construct
  source 1..75: mol_type = other DNA
aacccaattgtcgagaaatacattaagagccagttttacgcattaagtagtaaagctggtcagatggataacacc

SEQ ID NO: 153127 - DNA, 75 bp, synthetic construct
  source 1..75: mol_type = other DNA
gctgcaaatgtagctggaggcttgttaaaccttgcaaatgctgttacttcattcggtgacgctgttaataaagct

SEQ ID NO: 153128 - DNA, 75 bp, synthetic construct
  source 1..75: mol_type = other DNA
cgctattaatcctccaaaacaaccgagacagccacgaattagcggcaacagagcaatcacagcagcttattcagc

SEQ ID NO: 153129 - DNA, 75 bp, synthetic construct
  source 1..75: mol_type = other DNA
gcattatcacagatggctggtaagggtcagattatggctgaagagcttaaggggcaattagctgaagctgttcct

SEQ ID NO: 153130 - DNA, 75 bp, synthetic construct
  source 1..75: mol_type = other DNA
ggaagtggtaaaagtcttggtgaatctcttggtagcttgatgactgatatgtcacatggtgtcgattcattgact

SEQ ID NO: 153131 - DNA, 75 bp, synthetic construct
  source 1..75: mol_type = other DNA
accaaagtacacaggtcaaaaagttcattcaagatttaactcagattactgggatggacacaaccgaaacacaag

SEQ ID NO: 153132 - DNA, 75 bp, synthetic construct
  source 1..75: mol_type = other DNA
gatatcgaactggcggcaggcgatctggcgaagatcctcgatgccaaatttgctgatatcgcccgccgcgattaa

SEQ ID NO: 153133 - DNA, 75 bp, synthetic construct
  source 1..75: mol_type = other DNA
tcaggtctacaaaacgctgctggtcgcagtgaacggtgatatgaaacaccttgccgtggccgttacgccggtcgc

SEQ ID NO: 153134 - DNA, 75 bp, synthetic construct
  source 1..75: mol_type = other DNA
gcacaggcaagactcacctggccacagccattggtacacaagcagtgatgcacttgaaccgacgggtgcgtttct

SEQ ID NO: 153135 - DNA, 75 bp, synthetic construct
  source 1..75: mol_type = other DNA
aatttgctgatatcgcccgtcgcgattaagcattgtgccggatgcgaacatccggcactttcagattactgccag

SEQ ID NO: 153136 - DNA, 75 bp, synthetic construct
  source 1..75: mol_type = other DNA
ggctggacatcgaactggcggcaagcgacctggcgaagatccttgatgccacatttgctgatatcgctcgtcgcg

SEQ ID NO: 153137 - DNA, 75 bp, synthetic construct
  source 1..75: mol_type = other DNA
gggggaattagcccactaggacagaaaaaacgtctgccgacgattattgatgcccccgcgcaagaatttgccact

SEQ ID NO: 153138 - DNA, 75 bp, synthetic construct
  source 1..75: mol_type = other DNA
atacatctgaaggttgttttgaaattggtgttcaaatcagtaaccgtgagtttactgaagatgccattaatatga

SEQ ID NO: 153139 - DNA, 75 bp, synthetic construct
  source 1..75: mol_type = other DNA
tataaagatccgagctatgacgatgactttggtattgaaacgccatcagcgttagataactttactcaggccatt

SEQ ID NO: 153140 - DNA, 75 bp, synthetic construct
  source 1..75: mol_type = other DNA
atattatgcctgggttcaaaaccatctgaaggcacatcccgctgatcgcgttgttggctttaataagatgcctgg

SEQ ID NO: 153141 - DNA, 75 bp, synthetic construct
  source 1..75: mol_type = other DNA
ctcagtaaccgggagtttactgaagatgccattaatatgaggaaatatgagccttatctgctcaatgataattcc

SEQ ID NO: 153142 - DNA, 75 bp, synthetic construct
  source 1..75: mol_type = other DNA
ggaaatatgaaccttatcttctgaatgataattccatactttccagaattgcccttattgaacttggcattttcg

SEQ ID NO: 153143 - DNA, 75 bp, synthetic construct
  source 1..75: mol_type = other DNA
ggaaatatgaaccttatcttctcaatgataattccatgctttcccgactcgccctccttaaacttgacattttcc

SEQ ID NO: 153144 - DNA, 75 bp, synthetic construct
  source 1..75: mol_type = other DNA
gagccagggttcgcaggtggcggggttcagtaccgattatttaatcgatcttgtcacacgctttattaactggca

SEQ ID NO: 153145 - DNA, 75 bp, synthetic construct
  source 1..75: mol_type = other DNA
agctttcgtcgggtattggttacggcctcagcagtgcattgattgttgctgggggaattggtgctggtgtaacga

SEQ ID NO: 153146 - DNA, 75 bp, synthetic construct
  source 1..75: mol_type = other DNA
atgcctattggtaaccttggtaataatgtaaatagcaataatttaattccgcctgcgccgccactaccttcacaa

SEQ ID NO: 153147 - DNA, 75 bp, synthetic construct
  source 1..75: mol_type = other DNA
gcgcagcaggttcactatatcgcggccactgaagtctattttgatattgttctttatgtgaacggcataccactg

SEQ ID NO: 153148 - DNA, 75 bp, synthetic construct
  source 1..75: mol_type = other DNA
aacatgtctggattttggtttataagtcttaaaataactaatttattccgtattcaagctcttggtaatggtggg

SEQ ID NO: 153149 - DNA, 75 bp, synthetic construct
  source 1..75: mol_type = other DNA
attttttttcttagtcttagctggaggttctgtttttttattaaatgaatatttgaatataaatgttccattaga

SEQ ID NO: 153150 - DNA, 75 bp, synthetic construct
  source 1..75: mol_type = other DNA
gggaattcagtaccgtcaggggagttaagagatgatgttgttgcgcaaatagcagaacaggctaaagcggcagga

SEQ ID NO: 153151 - DNA, 75 bp, synthetic construct
  source 1..75: mol_type = other DNA
ttatgctgctgctccggcttctgattgtctggccgtcaatgctggcaggatgtctggtaatgctgtatgtctgga

SEQ ID NO: 153152 - DNA, 75 bp, synthetic construct
  source 1..75: mol_type = other DNA
gatgtcgattttggtcagaatttaattgcccgtaatagcggcgtgattcgcgttggcgatgaggtggaaattctg

SEQ ID NO: 153153 - DNA, 75 bp, synthetic construct
  source 1..75: mol_type = other DNA
cgctggattgcgtttaggtatgggaggattaacggggagtggcgagagcgcagtaaatactgcaaatgcaaatgc

SEQ ID NO: 153154 - DNA, 75 bp, synthetic construct
  source 1..75: mol_type = other DNA
gccgcgtttctgctgatgccccttccgcgctacagcctgcatcgcttgcgccactggattgccctgccgatcggc

SEQ ID NO: 153155 - DNA, 75 bp, synthetic construct
  source 1..75: mol_type = other DNA
gggctggctacggtcttagtggtgcattgattcttggtgggggaattggtgctgttgttaccgctgcgcttcata

SEQ ID NO: 153156 - DNA, 75 bp, synthetic construct
  source 1..75: mol_type = other DNA
tgcgcgctaatgatcatgaaggtctgaaagcgctggaaaaacagtgtctggcacagaacgcgcaacacaaagact

SEQ ID NO: 153157 - DNA, 75 bp, synthetic construct
  source 1..75: mol_type = other DNA
gacctgggcttattccccaagctacggcaaaccactctctgttcctcagggcatcatcggcctgatgacccgctt

SEQ ID NO: 153158 - DNA, 75 bp, synthetic construct
  source 1..75: mol_type = other DNA
tttattaatcgcgtactggtacgtgccatcaggcaatgaatatctctggctaaactatacaatccttattctgtt

SEQ ID NO: 153159 - DNA, 75 bp, synthetic construct
  source 1..75: mol_type = other DNA
gattaccgcgctccggggtcactggccgggatgattaaacaggcctggtgcagtgccctgggggtggatgccgga

SEQ ID NO: 153160 - DNA, 75 bp, synthetic construct
  source 1..75: mol_type = other DNA
ggaacgcgatgatgacactggctttcagcaggtgctggaacgtgctgactatctggcgaaggaacataccaaagc

SEQ ID NO: 153161 - DNA, 75 bp, synthetic construct
  source 1..75: mol_type = other DNA
gctttcagcaagtgctggaacgtgctgactatctggcgaaggagcataccaaagctcactgcaccggtgagcgca

SEQ ID NO: 153162 - DNA, 75 bp, synthetic construct
  source 1..75: mol_type = other DNA
catcctgcctaccaggaagcggcgggaattgtgctgctggaagcgataactgcaggattaccggtactaacaaca

SEQ ID NO: 153163 - DNA, 75 bp, synthetic construct
  source 1..75: mol_type = other DNA
cttcttctcggggcgcaacgatgtctcggaattaatggcggcggcggatttattactgcatcctgcctaccagga

SEQ ID NO: 153164 - DNA, 75 bp, synthetic construct
  source 1..75: mol_type = other DNA
tttggttttttcggcgacagtgctctggatcatgcccgggccgcatttatcttcccaggagtactgtgtatggca

SEQ ID NO: 153165 - DNA, 75 bp, synthetic construct
  source 1..75: mol_type = other DNA
aaccgccatttgaaacctggttcagagacgtggttgaactggttaaaaatggcggacattcaatggatattgttg

SEQ ID NO: 153166 - DNA, 75 bp, synthetic construct
  source 1..75: mol_type = other DNA
atgattaaacaggcctggtgcagtgctctgggggtggatgccggatgctatgccacgctggcgcattttccagac

SEQ ID NO: 153167 - DNA, 75 bp, synthetic construct
  source 1..75: mol_type = other DNA
gtgctgactatctggcgaaggagagtaccaaagcttacggcaccggtgagcgcaactttggctgcagtcgtggct

SEQ ID NO: 153168 - DNA, 75 bp, synthetic construct
  source 1..75: mol_type = other DNA
aacggacgcagctgtgatatcccgcttcatcaatgccctgaaagcccgaatcgacgcttaccagaaccgtaagct

SEQ ID NO: 153169 - DNA, 75 bp, synthetic construct
  source 1..75: mol_type = other DNA
gctgactatctcgcgaaagagtacaccaaagtcaacggtaccggtgagcgcaattttggctgtagccggagttga

SEQ ID NO: 153170 - DNA, 75 bp, synthetic construct
  source 1..75: mol_type = other DNA
ccggcgattaccgcgatccggggtcactggccggaatgattgaacaggcctggtgcagtgccctgggggtggatg

SEQ ID NO: 153171 - DNA, 75 bp, synthetic construct
  source 1..75: mol_type = other DNA
ccctgggagtggataccggagatcataccacgctggcgcattttccggtcaggccggcggtgtggctggaacgcg

SEQ ID NO: 153172 - DNA, 75 bp, synthetic construct
  source 1..75: mol_type = other DNA
tccgggttcactggccggaatgattaaacaggcctggtgcagtgccctgggggtggatgccgggccttatgccac

SEQ ID NO: 153173 - DNA, 75 bp, synthetic construct
  source 1..75: mol_type = other DNA
tccgggatcactggccggtatgattaaacaggcctggtgcagtgccctgggggtggatgccgggccttatgccac

SEQ ID NO: 153174 - DNA, 75 bp, synthetic construct
  source 1..75: mol_type = other DNA
ctggaacgtgctgactatctggcgaaggagcataccaaagctcactgcaccggtgagcgcaattttggctgtagc

SEQ ID NO: 153175 - DNA, 75 bp, synthetic construct
  source 1..75: mol_type = other DNA
aacggacgcagctgtgatatcccgcttcatcaatgccctgaaagcccgaatcgacgcttaccagaatcgtaagcc

SEQ ID NO: 153176 - DNA, 75 bp, synthetic construct
  source 1..75: mol_type = other DNA
tccggggtcactggccggcatgatttaacaggcctggtgcagtgccctgggggtggatgccgggccttatgccac

SEQ ID NO: 153177 - DNA, 75 bp, synthetic construct
  source 1..75: mol_type = other DNA
tccgggctcactggccgggatgatttaacaggcctggtgcagtgccctgggggtggatgccgggccttatgccac

SEQ ID NO: 153178 - DNA, 75 bp, synthetic construct
  source 1..75: mol_type = other DNA
tcactcaggaactgaataaacaaatcaccgctaaaggtggctggaaagccatttcagaaagtacacaggcacaac

SEQ ID NO: 153179 - DNA, 75 bp, synthetic construct
  source 1..75: mol_type = other DNA
tgtttccaagattgagcagcgtcttaaaaacactaaagtgtttaagattaaaacggaaattgaggatactttaaa

SEQ ID NO: 153180 - DNA, 75 bp, synthetic construct
  source 1..75: mol_type = other DNA
ttcagaggttctgaaaatggtctgcaagattttacacgaagcctaacaacgcttttaaacgctcttggtggaagt

SEQ ID NO: 153181 - DNA, 75 bp, synthetic construct
  source 1..75: mol_type = other DNA
gagtggaaacattcacacaagatttaaaggttatcaagccgtcagtaaatattcagcctcagacaatcaatatca

SEQ ID NO: 153182 - DNA, 75 bp, synthetic construct
  source 1..75: mol_type = other DNA
tgactgctatcacaagattaggtcaggttgccaatacaacagcagacaacgtgaataaaaagaatgggaaaccat

SEQ ID NO: 153183 - DNA, 75 bp, synthetic construct
  source 1..75: mol_type = other DNA
aaagccgagaaacaaacgatgcaggtagcatcacgaattgagaagcggctaaataaggcattcagagttaaccct

SEQ ID NO: 153184 - DNA, 75 bp, synthetic construct
  source 1..75: mol_type = other DNA
tgctgttaataaagctaaagctggcaaggctggttcttcaggtggtgcattaagcaaagtcggtagagttgtcct

SEQ ID NO: 153185 - DNA, 75 bp, synthetic construct
  source 1..75: mol_type = other DNA
ttgataatttaagttcagcggcagttaaaacagcaggtgcatttatctcaatgcaagctgtattagccagttatc

SEQ ID NO: 153186 - DNA, 75 bp, synthetic construct
  source 1..75: mol_type = other DNA
atcatcggaaagaagtattgatttcgtattcggtgaccaaagtacacaggttaaaaagttcattcaggatttaac

SEQ ID NO: 153187 - DNA, 75 bp, synthetic construct
  source 1..75: mol_type = other DNA
tttaaacgctcttggtggaagtggtaagagtcttggtgaatctcttggtagcttgatgactgatatgtcaagtgg

SEQ ID NO: 153188 - DNA, 75 bp, synthetic construct
  source 1..75: mol_type = other DNA
caatcaactccaccagctatcacaggtgacatggttaatagcaatgctcaattagctatggctgtatcagagtta

SEQ ID NO: 153189 - DNA, 75 bp, synthetic construct
  source 1..75: mol_type = other DNA
ctaagaatccgaacttacatcaatcaggtattggcacagagacaaacttcaaccctgaatacaaaggcgattcat

SEQ ID NO: 153190 - DNA, 75 bp, synthetic construct
  source 1..75: mol_type = other DNA
tggtgcagtgccctgggggtggatgccggatgctatgccacgctggtgcattttccggtcaggccggcggtgtgg

SEQ ID NO: 153191 - DNA, 75 bp, synthetic construct
  source 1..75: mol_type = other DNA
gcggcacgcactgaatgttcatccccgcctgacggcacttcggattgacctgcgtcttccggatgtaccggcagc

SEQ ID NO: 153192 - DNA, 75 bp, synthetic construct
  source 1..75: mol_type = other DNA
ggcgctggacccggatgcactctccatcagtggtttgcacaactacgtgaagtatctgaagtcgagcggtcagga

SEQ ID NO: 153193 - DNA, 75 bp, synthetic construct
  source 1..75: mol_type = other DNA
atgacctacaaatacaaccccttttggcagcaacgtattcgtgagacggtgctgcacgcactgaatgttcatcca

SEQ ID NO: 153194 - DNA, 75 bp, synthetic construct
  source 1..75: mol_type = other DNA
ttgatgaatctgacctgaccaatcccaaacagataaccggttcgcagaccgtgagcggcacctggaaaaccaacc

SEQ ID NO: 153195 - DNA, 75 bp, synthetic construct
  source 1..75: mol_type = other DNA
cgggcaggggagttacgacgcgttaggcgcaggaatgtataccttgctgagcgtgccgaaagatgtgcaaatatt

SEQ ID NO: 153196 - DNA, 75 bp, synthetic construct
  source 1..75: mol_type = other DNA
tgagcgatcgggtagcggtgatgtatctcgggcagattgtagaactgggcggcgcgcaacaggtactgacggctc

SEQ ID NO: 153197 - DNA, 75 bp, synthetic construct
  source 1..75: mol_type = other DNA
cgaaagagcaaccgtgtgacaatgttccggcgacgcgtccactcagtgaatcaacaacacagccgctaaaacaaa

SEQ ID NO: 153198 - DNA, 75 bp, synthetic construct
  source 1..75: mol_type = other DNA
ggttattgatgaaagaaccacatcgcatattaatcgtatgcaggaagataccttgattagctcagcttacccaga

SEQ ID NO: 153199 - DNA, 75 bp, synthetic construct
  source 1..75: mol_type = other DNA
agctccggtgctggcgggcgctgtagagatgctaacaacgcatcaggcattcacgcgcctgacgcgtcatccggc

SEQ ID NO: 153200 - DNA, 75 bp, synthetic construct
  source 1..75: mol_type = other DNA
attacgcggggatcaacggccgttgcactggtgaaacagaactccttctatgtgttggcctatatggaagaaacc

SEQ ID NO: 153201 - DNA, 75 bp, synthetic construct
  source 1..75: mol_type = other DNA
gttgatagcgtcgctgccggggtcaccaacgccagcagtacgcgcgatgataaaggaatggcgactatcgactct

SEQ ID NO: 153202 - DNA, 75 bp, synthetic construct
  source 1..75: mol_type = other DNA
ggtaagcacaactgcatttcttattacgttcacatcatgcctaacttttaaattaatagagacgccattcatcaa

SEQ ID NO: 153203 - DNA, 75 bp, synthetic construct
  source 1..75: mol_type = other DNA
caggctaaagtgggtgtcgtgtatgctgaatatggtttaaccgaatcgggaggcgtggttctttttccgccgccg

SEQ ID NO: 153204 - DNA, 75 bp, synthetic construct
  source 1..75: mol_type = other DNA
gatcagtcggtcgtgattagcggtgacacgaggctggaggaattggggattagcgaacgtttgcagcaggaatgc

SEQ ID NO: 153205 - DNA, 75 bp, synthetic construct
  source 1..75: mol_type = other DNA
tgacgcgctgtgagctgaccagcgaggcgaaggcggcagaagctgcaatacgtctgtgtaaagagctgggagatc

SEQ ID NO: 153206 - DNA, 75 bp, synthetic construct
  source 1..75: mol_type = other DNA
gcgcagtatccggcgtttacctttagcgcctccgtcgccaccattactggcctgctgttttatgtgacctcggcg

SEQ ID NO: 153207 - DNA, 75 bp, synthetic construct
  source 1..75: mol_type = other DNA
ggcgcaggcggcagaagcggcattacgtttgtgtaaagagctgggagatcagtcggtcgtggtgagtggcgacaa

SEQ ID NO: 153208 - DNA, 75 bp, synthetic construct
  source 1..75: mol_type = other DNA
tcccggaatcatctctttttatcctgcgtaaaagcactatcctgccgcgtgtagcgcaactcgcagaaaaattgc

SEQ ID NO: 153209 - DNA, 75 bp, synthetic construct
  source 1..75: mol_type = other DNA
ctgccgccggagctgtgggcgtatctgaaagaacaccgtttcttcgcgatgatcatcaagaaagagtacggtggg

SEQ ID NO: 153210 - DNA, 75 bp, synthetic construct
  source 1..75: mol_type = other DNA
aacgggcgcgtatgctcacattcgtcgtcagttcaaaatctctatcggtaagatggaagggattgaagaggcgct

SEQ ID NO: 153211 - DNA, 75 bp, synthetic construct
  source 1..75: mol_type = other DNA
ctgaaacgtcgtgaacgtatctcggcacgtctgggggatattttaagtcagctttacctcgcctccgccgttctg

SEQ ID NO: 153212 - DNA, 75 bp, synthetic construct
  source 1..75: mol_type = other DNA
aggcgtggtacttttttccgctgccgagcgcgggcgttcgttgagcctgctaccggagtcctctatttttattct

SEQ ID NO: 153213 - DNA, 75 bp, synthetic construct
  source 1..75: mol_type = other DNA
agatcccttgctttgcactgaccagcccggaagcgggttccgatgcgggtgcgattccagataccgggattgtct

SEQ ID NO: 153214 - DNA, 75 bp, synthetic construct
  source 1..75: mol_type = other DNA
taaggtggcgaagattttacaagtgccaaacgccacccgttctcgcattggtcgcggtcagtacctgacgccgag

SEQ ID NO: 153215 - DNA, 75 bp, synthetic construct
  source 1..75: mol_type = other DNA
tgttgataacgatattcgctacaaagccgacagtttcatctttaacgtcgccggtgcgccagaagaggtgaaaca

SEQ ID NO: 153216 - DNA, 75 bp, synthetic construct
  source 1..75: mol_type = other DNA
gctggacaattccccaaaaaatcttagggaggcaagccggatagcaaacagccgaaatcagaaaactaagtgcaa

SEQ ID NO: 153217 - DNA, 75 bp, synthetic construct
  source 1..75: mol_type = other DNA
agaagcaattcgccgtcgcggtttggatggaagttacgatcatgacgtcctgcaagttctcaggacaatggtgac

SEQ ID NO: 153218 - DNA, 75 bp, synthetic construct
  source 1..75: mol_type = other DNA
gctcagaagagctgaaaagcgtggtggcagacccacactatcgcaacgactggggattctacgacgataccgtgc

SEQ ID NO: 153219 - DNA, 75 bp, synthetic construct
  source 1..75: mol_type = other DNA
ccactgccagaaagtgaatactccgcgccactgcgtttccaactggccgatttcgccccacgtgataatttcatc

SEQ ID NO: 153220 - DNA, 75 bp, synthetic construct
  source 1..75: mol_type = other DNA
gtccgggcagtcgatgtcagaagtgttcctcaacattaaagagaaagtactggcatggaagccggatatcatccg

SEQ ID NO: 153221 - DNA, 75 bp, synthetic construct
  source 1..75: mol_type = other DNA
cgacttcaccgtcacttcacatagcttcaaattcttcccacatagccttcgtaacctgctgccattgcaaaggag

SEQ ID NO: 153222 - DNA, 75 bp, synthetic construct
  source 1..75: mol_type = other DNA
aaagcccactggcggcgattcgtggcgcggcggaaattttacgcgaaggtccgccgccggaagtggtggctcgtt

SEQ ID NO: 153223 - DNA, 75 bp, synthetic construct
  source 1..75: mol_type = other DNA
atgcgtatcggcatgcggttgctgctgggctattttttactggtggcggtggcggtggcggcctggttcgtactg

SEQ ID NO: 153224 - DNA, 75 bp, synthetic construct
  source 1..75: mol_type = other DNA
ctggggcgtacaggatgcgctgtatcaggcagagcaggcgatggacgatttactgcaaaacttcccgaaccgcgt

SEQ ID NO: 153225 - DNA, 75 bp, synthetic construct
  source 1..75: mol_type = other DNA
gcgattcgttgccatccgtacgtgctggaagagatggaagcggcgaagaacaatgacgtaaacgcgttcgataaa

SEQ ID NO: 153226 - DNA, 75 bp, synthetic construct
  source 1..75: mol_type = other DNA
tgctggcggagctggcgcgtcccgatttgctctctggggacccaacgcatgggcaactggcgcaggcgtttaatc

SEQ ID NO: 153227 - DNA, 75 bp, synthetic construct
  source 1..75: mol_type = other DNA
caattaggatataaaaaagcggctaaactcctgaaagaaacactggaagaggaaaaagctactgatgtcaaatta

SEQ ID NO: 153228 - DNA, 75 bp, synthetic construct
  source 1..75: mol_type = other DNA
aaagatctgagtggctactcactcggtcagggcggttactacagtccgcaggaatacctgtcgtttgccataccg

SEQ ID NO: 153229 - DNA, 75 bp, synthetic construct
  source 1..75: mol_type = other DNA
ggaacgacgcatgtgggaggagatgctggacattcgttctgcggatcgcgcctacggtatggcacaccgcccgtc

SEQ ID NO: 153230 - DNA, 75 bp, synthetic construct
  source 1..75: mol_type = other DNA
ctgcctttgatgatgttctgcttcagtttcaaaatgctatgaaagaaaaaacattagattcagtgagtttgctaa

SEQ ID NO: 153231 - DNA, 75 bp, synthetic construct
  source 1..75: mol_type = other DNA
ccggtaaaaggtgccggtaccacactgtgggtttacaccggcaagggtgatgcttatgcaaacccgttgtcagac

SEQ ID NO: 153232 - DNA, 75 bp, synthetic construct
  source 1..75: mol_type = other DNA
gtttacaacggcaagggtgatgcttatgcaaacccgttgtcagacgatgactggcagcgactggctaaggtgaag

SEQ ID NO: 153233 - DNA, 75 bp, synthetic construct
  source 1..75: mol_type = other DNA
attttgccttgcagaatgatggctctttcaccagtggtatcatcatggtagatgcacatatgcacataaagcggc

SEQ ID NO: 153234 - DNA, 75 bp, synthetic construct
  source 1..75: mol_type = other DNA
ttttaattataaaaaaaacataaatctatacttagagttgttttcgaaaaaattcaaaaaagaagataaatcttt

SEQ ID NO: 153235 - DNA, 75 bp, synthetic construct
  source 1..75: mol_type = other DNA
ttgatgccctggagaataatcaggggcgaagaaaattatgcatcccgatttattagtctgatgtgtgaaaaagaa

SEQ ID NO: 153236 - DNA, 75 bp, synthetic construct
  source 1..75: mol_type = other DNA
ccaccggttactactgccgcaagacttccttcagtgtcccgggtaagccgctggttgatgccctggagaataatc

SEQ ID NO: 153237 - DNA, 75 bp, synthetic construct
  source 1..75: mol_type = other DNA
atactgaacgttatgaaaaactcgcacaatcagcggcaatatcgcaacaaattattgataacgccaggtttgact

SEQ ID NO: 153238 - DNA, 75 bp, synthetic construct
  source 1..75: mol_type = other DNA
gaaagcattcaagccactattgcgatgcagcagtcgataattcaaagtgccagtgaaacatggcaggcagtaaaa

SEQ ID NO: 153239 - DNA, 75 bp, synthetic construct
  source 1..75: mol_type = other DNA
gattatgtcactggaggtagggcggataaaacaattcgagtttatggtgttgagaaaaaaattgttgatttagat

SEQ ID NO: 153240 - DNA, 75 bp, synthetic construct
  source 1..75: mol_type = other DNA
cgactctctggttgccggtatcatcggtactgcgggctgtgtgggtctgtggggctacctgctgtatcagggcgt

SEQ ID NO: 153241 - DNA, 75 bp, synthetic construct
  source 1..75: mol_type = other DNA
ctatctacttcggtggcgtgattgctcacgatccgtactggggtccggcactgacctttaaagacaccaccatta

SEQ ID NO: 153242 - DNA, 75 bp, synthetic construct
  source 1..75: mol_type = other DNA
ctgacagcctcagctcccggggcactttgtgtactgatcgccccgaccacggcgctggtgttggagctggctagc

SEQ ID NO: 153243 - DNA, 75 bp, synthetic construct
  source 1..75: mol_type = other DNA
ctggcagatacattatcttccgggtacttgctgacaaaacgcttaaagaatattaatgcacctgtaacttctgcc

SEQ ID NO: 153244 - DNA, 75 bp, synthetic construct
  source 1..75: mol_type = other DNA
gaaactttacctgctgctgcccggactcaactggagatgcatctgaaacaattgacagctcgctatgctgaaata

SEQ ID NO: 153245 - DNA, 75 bp, synthetic construct
  source 1..75: mol_type = other DNA
gctcaggtaaaacaggatgagcgggaaagcgaaggcaaacgggaacgaagcaaaaaatcgcccagccgtaaggct

SEQ ID NO: 153246 - DNA, 75 bp, synthetic construct
  source 1..75: mol_type = other DNA
ttgcatcgtccggtgcaggaaagccccggtgagttaagagacatctttgcctggcatgatgttcgtaccgtgtcg

SEQ ID NO: 153247 - DNA, 75 bp, synthetic construct
  source 1..75: mol_type = other DNA
ggctgtttgtgaaaagcgcctacgccgtcgcgatgcagcgtcacagcttggcatctcagaacgtcaggcgcaacg

SEQ ID NO: 153248 - DNA, 75 bp, synthetic construct
  source 1..75: mol_type = other DNA
gccctgtggcagaaacgattgtggatctggatgatattttctcatggcaggaaacccgtaaactctcgaaatcat

SEQ ID NO: 153249 - DNA, 75 bp, synthetic construct
  source 1..75: mol_type = other DNA
ttttgcctggcaggaacagcgtaagctgcctaaaacgctgacgttccgctatgacaaaatgatatatctggttga

SEQ ID NO: 153250 - DNA, 75 bp, synthetic construct
  source 1..75: mol_type = other DNA
cactcgtgagtatcttgagcaacacggcaaacccctggcgttttacagtgataagcacggcattttcagggtcaa

SEQ ID NO: 153251 - DNA, 75 bp, synthetic construct
  source 1..75: mol_type = other DNA
ggccgtgttattgaccgccgttgaggggagaaccgccgccgaattacaggcacagtcaccgctggcattgtttga

SEQ ID NO: 153252 - DNA, 75 bp, synthetic construct
  source 1..75: mol_type = other DNA
aggagtgtttacctgcttcgcaggaataagacttggtttagggcttgcggggaaatggagaaagggtatggatct

SEQ ID NO: 153253 - DNA, 75 bp, synthetic construct
  source 1..75: mol_type = other DNA
tggtgtttacggcattaaagctgatgcacgacttgatgacaacactttatatgatgctaataatgcagcagatgg

SEQ ID NO: 153254 - DNA, 75 bp, synthetic construct
  source 1..75: mol_type = other DNA
cgcagtttggatgatgcggctaagccaaggggggagagtgtattcaatttaactttacacccagcgtttttgggt

SEQ ID NO: 153255 - DNA, 75 bp, synthetic construct
  source 1..75: mol_type = other DNA
acggtcatgttctgacaaaaaaggaacctttgcctaaaggaagggatggtaagcgctatccctatactcttgaag

SEQ ID NO: 153256 - DNA, 75 bp, synthetic construct
  source 1..75: mol_type = other DNA
tgagctgggattgcgtgggcaacttagcgcctctcgcagtcaggggttgaatgcgttaagcgaggcgattatcgc

SEQ ID NO: 153257 - DNA, 75 bp, synthetic construct
  source 1..75: mol_type = other DNA
caaccaatatcaaaatgctgtgggagcacgacggggaaactcgcactcacatcagccctaacagctttaagcgcg

SEQ ID NO: 153258 - DNA, 75 bp, synthetic construct
  source 1..75: mol_type = other DNA
aagaggaattttatctcggtctgcaacgcggcagaaataataccacattattaagtgctataacgctggaagccg

SEQ ID NO: 153259 - DNA, 75 bp, synthetic construct
  source 1..75: mol_type = other DNA
atgtcagagagtaacatgtatttttatgctacgcttgaagaagccattgacgctgcacgcgaagaatttcttgca

SEQ ID NO: 153260 - DNA, 75 bp, synthetic construct
  source 1..75: mol_type = other DNA
ctcgccagcaggcattaatgctgcgtcatcaggcggcgaattcgtcgcgcgatgtgcgccgtcagttggatagcg

SEQ ID NO: 153261 - DNA, 75 bp, synthetic construct
  source 1..75: mol_type = other DNA
ctcgtcaacaggcattaatgttgcgtcaccaggcggcgaactcttcgcgtgatgtgcgtcgtcaactggatagcg

SEQ ID NO: 153262 - DNA, 75 bp, synthetic construct
  source 1..75: mol_type = other DNA
atgctggctggacaaggtattttagaggtcttccattcatttctagcgaggtaacaagagatactagaaagattg

SEQ ID NO: 153263 - DNA, 75 bp, synthetic construct
  source 1..75: mol_type = other DNA
tgcgcagtattaacgttgatgactttgatccggaagagctggcgacgaagccggtaaagttgccggagaaagtgc

SEQ ID NO: 153264 - DNA, 75 bp, synthetic construct
  source 1..75: mol_type = other DNA
gcgatgccactaaacgctactatcagcacctgaaccgcctgagcgccaacctcgccctgctttctgatgtctcga

SEQ ID NO: 153265 - DNA, 75 bp, synthetic construct
  source 1..75: mol_type = other DNA
tttatttggctgatggcttgatatttttctgttggtcgttaaattatggcgctgtttttataggaatgggcgctg

SEQ ID NO: 153266 - DNA, 75 bp, synthetic construct
  source 1..75: mol_type = other DNA
gctaggcaaagttacttcagatttccaatatcatcctgaatgggtggaagaggggatgggaatcgctcgacaggt

SEQ ID NO: 153267 - DNA, 75 bp, synthetic construct
  source 1..75: mol_type = other DNA
ggtctggcgttttgtgaatgagatccaaaagggtgattgggttattacctattcgccagccaaccgtacttatct

SEQ ID NO: 153268 - DNA, 75 bp, synthetic construct
  source 1..75: mol_type = other DNA
ttggaggcaagaaagaattcaccttgctgaacaagtcagagatggagttactggctgacgcctatgagatggcaa

SEQ ID NO: 153269 - DNA, 75 bp, synthetic construct
  source 1..75: mol_type = other DNA
cgattgataagttacatacattacaaaacaggagctcccgctgagcttattttaatagtattacttggggtaatg

SEQ ID NO: 153270 - DNA, 75 bp, synthetic construct
  source 1..75: mol_type = other DNA
atgcacttgacacatggctgaagactcagaatgccatagggcgtgatgtggcccgctctgccattatggcaacgc

SEQ ID NO: 153271 - DNA, 75 bp, synthetic construct
  source 1..75: mol_type = other DNA
taagaaaactcccggcagaaataaaaccggtagtgatgcgcattatggcttcgtacgcttttgaggattatgccc

SEQ ID NO: 153272 - DNA, 75 bp, synthetic construct
  source 1..75: mol_type = other DNA
gctctattctggcagtgtgcgccatgacagcggcgtacgtgatcaaaggcgacaatttcaccacagtcgatccga

SEQ ID NO: 153273 - DNA, 75 bp, synthetic construct
  source 1..75: mol_type = other DNA
agaacgcctgatacccgttttaaaggaacttgaaaaagatggaaaggtacagttatttaaagaggatggcgttga

SEQ ID NO: 153274 - DNA, 75 bp, synthetic construct
  source 1..75: mol_type = other DNA
ttagaaagtatcttactaaaaatgattcaacaagcgagggacttaaaaagacattagctctgggatctccgtcat

SEQ ID NO: 153275 - DNA, 75 bp, synthetic construct
  source 1..75: mol_type = other DNA
agtccaaaagagctgattcagattgcggagtacttccggactccactggcgacagcggttacgggcggcgatcgc

SEQ ID NO: 153276 - DNA, 75 bp, synthetic construct
  source 1..75: mol_type = other DNA
aagccagggagaagtgaataagcaaccggacattgaagaactgaaaaaacgcatggagcaaagtcggctgcggaa

SEQ ID NO: 153277 - DNA, 75 bp, synthetic construct
  source 1..75: mol_type = other DNA
atcatccgcagctacaacaatgaggcctaccctgatgaagaagctgacattgatgatgttgagataatcggccgc

SEQ ID NO: 153278 - DNA, 75 bp, synthetic construct
  source 1..75: mol_type = other DNA
attactcgctctcttgccacaactgcccggatgtggtgcaggcgctgaacctgatgagcgtactgaacccgcgca

SEQ ID NO: 153279 - DNA, 75 bp, synthetic construct
  source 1..75: mol_type = other DNA
cgtcgaaccctatatgcgcgacattctgcgcgccatcgcgcccgtactgaacggtattcccaaccgaattagcct

SEQ ID NO: 153280 - DNA, 75 bp, synthetic construct
  source 1..75: mol_type = other DNA
gcaactgggagctttctgccgaacgcgctaatgcgtcgcgccgtgagctaatggtgggcggtctggctgatggca

SEQ ID NO: 153281 - DNA, 75 bp, synthetic construct
  source 1..75: mol_type = other DNA
aacacagaaatagataacattgttacactgccggaattgaacaacctgtccattatatatcaaataaaagcggtc

SEQ ID NO: 153282 - DNA, 75 bp, synthetic construct
  source 1..75: mol_type = other DNA
acagctggagttccccgtatcagctctcttacgcgataggcgtgggtgatttggtggcgacatcacttaacacct

SEQ ID NO: 153283 - DNA, 75 bp, synthetic construct
  source 1..75: mol_type = other DNA
gtcagacatttatgcgccagtaagcggtgaaatcgtggcggtaaacgatgcactgagcgattccccggaactggt

SEQ ID NO: 153284 - DNA, 75 bp, synthetic construct
  source 1..75: mol_type = other DNA
acgccccggtggaaaactaatcatacgcagttataacagtgaagagtaccctgacgaagaagcagatactcaaag

SEQ ID NO: 153285 - DNA, 75 bp, synthetic construct
  source 1..75: mol_type = other DNA
gccgcgcctgaccgcagaagagcaagcgtttctcgacggcccagtagaagaagcctgccggatggcgaatgattt

SEQ ID NO: 153286 - DNA, 75 bp, synthetic construct
  source 1..75: mol_type = other DNA
tcggacaaggagcgattcgttgccatccgtacgtgctggaagagatggaagcggcgaagaacaatgacgtaaacg

SEQ ID NO: 153287 - DNA, 75 bp, synthetic construct
  source 1..75: mol_type = other DNA
atgaaagcactcacctctctcattttgccagtaatactgcttactggttgttcttcttcccctaccatctcgcca

SEQ ID NO: 153288 - DNA, 75 bp, synthetic construct
  source 1..75: mol_type = other DNA
gggctggcgtgactggcttctccgggggctttcaacaacagccactccgggtacagaaggcagcgtcgttccaga

SEQ ID NO: 153289 - DNA, 75 bp, synthetic construct
  source 1..75: mol_type = other DNA
tcgattactttacctccgcaaaatctgcagacgtttaacgaactggtccgtgccgtcccccgcgcagtcccctgg

SEQ ID NO: 153290 - DNA, 75 bp, synthetic construct
  source 1..75: mol_type = other DNA
tttgacggcgactatgatgagatagagatccgccaggagtggcaggaagagaatacattacatgaatgggacgag

SEQ ID NO: 153291 - DNA, 75 bp, synthetic construct
  source 1..75: mol_type = other DNA
tatgagattgccagttacgggacattagcgacgctggctgaacaattaggttaccgtaaagcagcgaagcttctg

SEQ ID NO: 153292 - DNA, 75 bp, synthetic construct
  source 1..75: mol_type = other DNA
gtgcttaagaaactggcgatagaagtcaccttgaagttgaggcaatccactaccgttgactggcaggtgcgcgag

SEQ ID NO: 153293 - DNA, 75 bp, synthetic construct
  source 1..75: mol_type = other DNA
tgattaagaagattgccgcctaccaccagttccatgcagtgcgtgaagcggtgacggcgacgattgtggcctcga

SEQ ID NO: 153294 - DNA, 75 bp, synthetic construct
  source 1..75: mol_type = other DNA
ttattgatgaagcgcaggatgttgctcacattcagcctgaccagataagaaccgcgtcccgtgtctggaccatcc

SEQ ID NO: 153295 - DNA, 75 bp, synthetic construct
  source 1..75: mol_type = other DNA
tggcgggtatcgttgagcacgtaactctgctggaatttgcgccagaaatgaaagccgaccaggttctgcaggaca

SEQ ID NO: 153296 - DNA, 75 bp, synthetic construct
  source 1..75: mol_type = other DNA
gcccgggaaagcacacttaatgccttatacgatttccggccactgattagcccggaaggctggctaccaccggtt

SEQ ID NO: 153297 - DNA, 75 bp, synthetic construct
  source 1..75: mol_type = other DNA
ggcaggaaaacccggcttcagttacgcaggtttttctcgcgacccgttagcgttcttacgcgaagcggtgaacta

SEQ ID NO: 153298 - DNA, 75 bp, synthetic construct
  source 1..75: mol_type = other DNA
tggaaaaactgctcaatgacggcattcatgcccgttcgggcaataacgtggtgcagcagaagaaatactccgacc

SEQ ID NO: 153299 - DNA, 75 bp, synthetic construct
  source 1..75: mol_type = other DNA
cttcacttcatgcacgggactttatctatagacgaaccgagaaaatattgcagtgaagcttgtgccgaaaaagac

SEQ ID NO: 153300 - DNA, 75 bp, synthetic construct
  source 1..75: mol_type = other DNA
tcatttatttctagtatattattcttttatctatcctcttggacgccatccttacattttaaatttgagggggtt

SEQ ID NO: 153301 - DNA, 75 bp, synthetic construct
  source 1..75: mol_type = other DNA
tggctctcggcctttcactgcccgcgatggcgagtgaaaaagtgattgatatgtacaaatctgaaaactgtggct

SEQ ID NO: 153302 - DNA, 75 bp, synthetic construct
  source 1..75: mol_type = other DNA
gcgaagcgcgtcatcgaaggcgacaaaaacgtcaacatgatggaagtggcgatcgatgaagcctgcgtgcgcatt

SEQ ID NO: 153303 - DNA, 75 bp, synthetic construct
  source 1..75: mol_type = other DNA
atcgccaaacgtcagccgacggcgagcgacctgcgtctggttatggtgatcagtaaaaccattgccgagctggag

SEQ ID NO: 153304 - DNA, 75 bp, synthetic construct
  source 1..75: mol_type = other DNA
cttcacttcatgcacgggattttaaaaaaagacgaaccgagaaaatattgcagtgaagcttgtgccgaaaaagac

SEQ ID NO: 153305 - DNA, 75 bp, synthetic construct
  source 1..75: mol_type = other DNA
aagaagtggtgcctatttagaagctcgaggaatctttaaagaatcagggtatgggttaacagaaattgttttgga

SEQ ID NO: 153306 - DNA, 72 bp, synthetic construct
  source 1..72: mol_type = other DNA
atgactgaaaccacagcctctgattcttccggtcaagggaaaataagcgtaatgttcatcaccagattatgt

SEQ ID NO: 153307 - DNA, 75 bp, synthetic construct
  source 1..75: mol_type = other DNA
gtaagccatgagtttgttcttgtttttcttggagaaaagtggtttttagtttctacattattaatgtggctcgct

SEQ ID NO: 153308 - DNA, 75 bp, synthetic construct
  source 1..75: mol_type = other DNA
tgctggatcacctgtcactgcagcggcagcagaagatatacgcccgtgaaggggtacagttgccggaaagcacgc

SEQ ID NO: 153309 - DNA, 75 bp, synthetic construct
  source 1..75: mol_type = other DNA
gaccgtgagaccgcagtacagttgcccgtgctgcgacacggtgcacagtgccgtgctgccgccggcagtcatcga

SEQ ID NO: 153310 - DNA, 75 bp, synthetic construct
  source 1..75: mol_type = other DNA
cacgctggaacagcgccttcataacctgaataccgtcaccaccacgctggaacagcgtatccatgaccttaatgc

SEQ ID NO: 153311 - DNA, 75 bp, synthetic construct
  source 1..75: mol_type = other DNA
gaggtcaatggcgtgattgccagcgcccgcgagcgtattgcggctttctcccctgaactggtggtgctgtttgcg

SEQ ID NO: 153312 - DNA, 75 bp, synthetic construct
  source 1..75: mol_type = other DNA
attgacgaagcggtacgtatttatcgtgaagataaaaaagtcgatcaggagtacgaaggtattgttcgtcagctg

SEQ ID NO: 153313 - DNA, 75 bp, synthetic construct
  source 1..75: mol_type = other DNA
gctggacgcgttcgcgcggatggacattgacgaagcggtacgtatttatcgtgaagataaaaaagtcgatcagga

SEQ ID NO: 153314 - DNA, 75 bp, synthetic construct
  source 1..75: mol_type = other DNA
aggcgttggggcgacggcaattggcgatttcggcagtgcggcaggagagcttcctgtgcctgtggagttggcgga

SEQ ID NO: 153315 - DNA, 75 bp, synthetic construct
  source 1..75: mol_type = other DNA
atgacgtgatgccaccgttctgtttaggcgttggagcgacggcaattggtgatttcggcagtgcggcaggagagc

SEQ ID NO: 153316 - DNA, 75 bp, synthetic construct
  source 1..75: mol_type = other DNA
ccagatcactacaacggctttttctatgacgtgatgccaccgttctgtttaggcgttggagcgacggcaattggt

SEQ ID NO: 153317 - DNA, 75 bp, synthetic construct
  source 1..75: mol_type = other DNA
aacaactggcgctgttttccgctgccgccattgtgccgctctatgtcggtatggcgaaccatgaacaggccgatc

SEQ ID NO: 153318 - DNA, 75 bp, synthetic construct
  source 1..75: mol_type = other DNA
ctggctgaagacggtgaatcagttctaccaggaacaccacaaactgatcgagaaataccatattgccgatggtat

SEQ ID NO: 153319 - DNA, 75 bp, synthetic construct
  source 1..75: mol_type = other DNA
ccgtatgaattaaaactggatgagatgatcgaggcagaaccggaacccgagatgattgaagggctgcccgcctct

SEQ ID NO: 153320 - DNA, 75 bp, synthetic construct
  source 1..75: mol_type = other DNA
tctgcgaatacatcttctactacgtgaaggggcaagatttccgccacgtaggcggtgatgagctggataaactgc

SEQ ID NO: 153321 - DNA, 75 bp, synthetic construct
  source 1..75: mol_type = other DNA
gctgttctgtgcacgttctatcgaacgtatcggcgaccgctgccagaatatttgtgaatacatcttctactacgt

SEQ ID NO: 153322 - DNA, 75 bp, synthetic construct
  source 1..75: mol_type = other DNA
atgctcaatcagaaaattcaaaaccctaatccagacgaactgatgatcgaggtcgatctctgctatgaactggat

SEQ ID NO: 153323 - DNA, 75 bp, synthetic construct
  source 1..75: mol_type = other DNA
ggcgtaaaagcggcgcgcatttctaacttgtcacgtgaccttgcccgttcactttcgacggtggcggtgcgtgtc

SEQ ID NO: 153324 - DNA, 75 bp, synthetic construct
  source 1..75: mol_type = other DNA
cttctgttgaagcagtatctccagtggaagccgctgccgctgtttcccctttggcatctggcgtgaaaaaagcga

SEQ ID NO: 153325 - DNA, 75 bp, synthetic construct
  source 1..75: mol_type = other DNA
agatggagcgtcggtataaactgatgtctgcgctgggtgtgcgtaatctggcgggttatacgaaaaaattgctga

SEQ ID NO: 153326 - DNA, 75 bp, synthetic construct
  source 1..75: mol_type = other DNA
aataactgttcctccactccccgaacaacacgaaatcgttcgccgcgtcgagcagctcttcgcctacgcagacac

SEQ ID NO: 153327 - DNA, 75 bp, synthetic construct
  source 1..75: mol_type = other DNA
gcaccggaaggttacccacagcagtcacaatatgcgcagcctgcagtgcaatataatgagccgctgcaacaacct

SEQ ID NO: 153328 - DNA, 75 bp, synthetic construct
  source 1..75: mol_type = other DNA
cagtatcagcagccacaacagccggttgcgccgcagccacaatatcagcagccgcaacaaccggttgcgccacag

SEQ ID NO: 153329 - DNA, 75 bp, synthetic construct
  source 1..75: mol_type = other DNA
tgccgatgaattccgcctcctcctccctctactcagaggaactgcagatattcggcgtgatgatcgcattcatac

SEQ ID NO: 153330 - DNA, 75 bp, synthetic construct
  source 1..75: mol_type = other DNA
tacgccttgccggatgacacctgcgcggtggttcaggcgcagaccgtcacgctgtgcgccacggtcatcatgcgc

SEQ ID NO: 153331 - DNA, 75 bp, synthetic construct
  source 1..75: mol_type = other DNA
tcagaggttgttcgtatggtcgttaccttctgctattcagggtactggatactgaagttcgtatcgaacgtatcg

SEQ ID NO: 153332 - DNA, 75 bp, synthetic construct
  source 1..75: mol_type = other DNA
ccgcagtatcagcagccgcaacaaccgatagcgccgcagcagcaataccagcagccgcaacaaccggttgcacag

SEQ ID NO: 153333 - DNA, 75 bp, synthetic construct
  source 1..75: mol_type = other DNA
aaccggttgcacagcagccgcagtatcagcagccacaacagccggttacacagcagccgcagtatcagcagccgc

SEQ ID NO: 153334 - DNA, 75 bp, synthetic construct
  source 1..75: mol_type = other DNA
gcggctgaagaaatactgacgctggctaactggtgcctgttaaactattccgggctgaaaacgccagtcgggagt

SEQ ID NO: 153335 - DNA, 75 bp, synthetic construct
  source 1..75: mol_type = other DNA
acatgcctctgccgtacgcttcagctcggttttaccggtcagtaccggtcgcaggatgatgagcgtcgcgaagat

SEQ ID NO: 153336 - DNA, 75 bp, synthetic construct
  source 1..75: mol_type = other DNA
cattgcagcaggtatctggcttctcagatttctggatgattttttaatgacgccagcatttcatgttgctctgtt

SEQ ID NO: 153337 - DNA, 75 bp, synthetic construct
  source 1..75: mol_type = other DNA
tgacggaaaagtatctgatatccgcagccaggagacactaccaaaagaagaaaatcggcaggagcagaagtggtg

SEQ ID NO: 153338 - DNA, 75 bp, synthetic construct
  source 1..75: mol_type = other DNA
ctgcgctactcgatttttctgaagcaaatgattgtatgcctagttccatccggaatattgttttttatactttct

SEQ ID NO: 153339 - DNA, 75 bp, synthetic construct
  source 1..75: mol_type = other DNA
cattacgctggcgtatgtattgattaacgcttttatcatgctggtgatgacgctggttgaacgtaaagttcgcct

SEQ ID NO: 153340 - DNA, 75 bp, synthetic construct
  source 1..75: mol_type = other DNA
gtaatacgcgcactgacagcgcgtgttcctgcatttactttcgcacaggatgcgccggtggtggtgcgtgcaccg

SEQ ID NO: 153341 - DNA, 75 bp, synthetic construct
  source 1..75: mol_type = other DNA
gctgacctcatgggcttttatgtgttttcctgatccagatatcagtatgaacaggtattattcatggttgatgaa

SEQ ID NO: 153342 - DNA, 75 bp, synthetic construct
  source 1..75: mol_type = other DNA
tgaaatccctatacctaaacccccaattgaagaacaagctgaaatcgttcgccgcgtcgagcaactcttcgccta

SEQ ID NO: 153343 - DNA, 75 bp, synthetic construct
  source 1..75: mol_type = other DNA
tatagttaatataccttcggaaaaagaacaacgcgaaatcgttcgccgcgtcgagcagctcttcgcctacgccga

SEQ ID NO: 153344 - DNA, 75 bp, synthetic construct
  source 1..75: mol_type = other DNA
ctgaaagcgtcccccggggaagaaaaggtgaaagcacaccagaagctgattaactacattgaagagttctgcaac

SEQ ID NO: 153345 - DNA, 75 bp, synthetic construct
  source 1..75: mol_type = other DNA
atgaccgtgcaaaaagagctggttgctatttacgattatgagatccctgtacctgaagatccgttttccttcaga

SEQ ID NO: 153346 - DNA, 75 bp, synthetic construct
  source 1..75: mol_type = other DNA
aattgttaaatagcaatccgaatgcaaaactcactttctggaaattctggttcttaggttctattccgtgggagc

SEQ ID NO: 153347 - DNA, 75 bp, synthetic construct
  source 1..75: mol_type = other DNA
gctgctgtggggggcagatcgtaacggcgctaacccgatgacgccggaagaggtgcatcgtgttgctaatgaacg

SEQ ID NO: 153348 - DNA, 75 bp, synthetic construct
  source 1..75: mol_type = other DNA
tgaaacctattcccgttcctgatgagatttacactcagtgcattacggatgccgcccgctacttcggaattgatg

SEQ ID NO: 153349 - DNA, 75 bp, synthetic construct
  source 1..75: mol_type = other DNA
tctggatgaatttatccgcaaatggcaggatgctgagcgcaaaaaagtcattattcacgaactggagcaacaggg

SEQ ID NO: 153350 - DNA, 75 bp, synthetic construct
  source 1..75: mol_type = other DNA
gctgctaacttcctgcgttccttaccgccgcagcacttccagttggcaccgggctatgtacagtcgccgtacatt

SEQ ID NO: 153351 - DNA, 75 bp, synthetic construct
  source 1..75: mol_type = other DNA
ggcggtgctggtggcgctcggcgttattattgccgacagtcgcctggggatgtttagtcaaatccgtacctatat

SEQ ID NO: 153352 - DNA, 75 bp, synthetic construct
  source 1..75: mol_type = other DNA
tctgatgcagatgatgccgcaggtattgccttcgccagacgcgatggggccaaagttacctgaaccggcaacggg

SEQ ID NO: 153353 - DNA, 75 bp, synthetic construct
  source 1..75: mol_type = other DNA
aaagtacctctgggtttaagcgcaacctatggacaaacaggaaacaaggtttcagccggaaccgtccagtcagtc

SEQ ID NO: 153354 - DNA, 75 bp, synthetic construct
  source 1..75: mol_type = other DNA
cggaatgcaaattgcagaagattatcaggccttcaaccttggtattgggaaagaattcgggttattacaaaaatg

SEQ ID NO: 153355 - DNA, 75 bp, synthetic construct
  source 1..75: mol_type = other DNA
ataatgttgatactgctggctatactgagccccttgtatcacatttgtttcgctctatggaaatgcttattacag

SEQ ID NO: 153356 - DNA, 75 bp, synthetic construct
  source 1..75: mol_type = other DNA
ccggagaactatgttttttctgaaccaggtgcaaagatcacatttgcaacagttggtcgcttgattggtaatgcc

SEQ ID NO: 153357 - DNA, 75 bp, synthetic construct
  source 1..75: mol_type = other DNA
ttgtcacatcaacggggcggcaagtccttactgacaacggacaacaaggtatgggcggcgtggcggaagcgattt

SEQ ID NO: 153358 - DNA, 75 bp, synthetic construct
  source 1..75: mol_type = other DNA
gatcagccgggcgttcaaccatgccattaacgttcatgcaaataaaaaacgtccggttggggccggacgttctga

SEQ ID NO: 153359 - DNA, 75 bp, synthetic construct
  source 1..75: mol_type = other DNA
gaagaactggatccgttgttcgatcaggcggtgcagtttgtcactgaaaaacgcaaagcgtcaatttcaggcgta

SEQ ID NO: 153360 - DNA, 75 bp, synthetic construct
  source 1..75: mol_type = other DNA
ttgcaccgcagcaacaatatcagcagccgcagcaaccagttgcgccgcagccgcagtatcagcagccgcaacagc

SEQ ID NO: 153361 - DNA, 75 bp, synthetic construct
  source 1..75: mol_type = other DNA
cggttgcgccacagcagcaatatcagcagccgcaacagccggttgcgccgcagccgcagtatcagcagccacaac

SEQ ID NO: 153362 - DNA, 75 bp, synthetic construct
  source 1..75: mol_type = other DNA
ttgccaccgccgacttggtgacagagatagccaaagtccaacgtgacctcgtggtccagctccaggagcttcaaa

SEQ ID NO: 153363 - DNA, 75 bp, synthetic construct
  source 1..75: mol_type = other DNA
caaaacttgatcccgccaactatatggtgcatagggccagaagcatgctggcgcaactacgggcaagacaatttg

SEQ ID NO: 153364 - DNA, 75 bp, synthetic construct
  source 1..75: mol_type = other DNA
tttactccttgtatgtcaatcaacctcaaaatgaggttcaacgggatcaacaatagcttacgagagaaagatgtg

SEQ ID NO: 153365 - DNA, 75 bp, synthetic construct
  source 1..75: mol_type = other DNA
tgctgggtaaagatatcgccggtgagccggtggttgccgatctggcgaaaatgccgcacttgttggttgcgggga

SEQ ID NO: 153366 - DNA, 75 bp, synthetic construct
  source 1..75: mol_type = other DNA
tatggattggggcgcaatgttaatttattcgaagatctaagagtaattgcatataaaaatatactaaaatatcaa

SEQ ID NO: 153367 - DNA, 75 bp, synthetic construct
  source 1..75: mol_type = other DNA
ttacgatgccgacggtaaactggttaccgaatcttttaaagattacacccgcaaaacactgctcaaagaatatgc

SEQ ID NO: 153368 - DNA, 75 bp, synthetic construct
  source 1..75: mol_type = other DNA
cgttactgatatgaaagatgccgccaacgcgctgcgctggtgtgttaacgagatggagcgtcggtataaactgat

SEQ ID NO: 153369 - DNA, 75 bp, synthetic construct
  source 1..75: mol_type = other DNA
gcagtacctccagtggaagccgctgccgctgtttctccgctggcatctggcgtgaaaaaagcgacactggcgacg

SEQ ID NO: 153370 - DNA, 75 bp, synthetic construct
  source 1..75: mol_type = other DNA
cagccgcaatatcaacagccgcaacaaccggttgcaccgcagcagcaatatcagcagccacaacaaccggttgca

SEQ ID NO: 153371 - DNA, 75 bp, synthetic construct
  source 1..75: mol_type = other DNA
atggcgggcattaatcttaataaaaaattatggcgtattccgcagcagggtatggtacgcggcgtctgcgccggg

SEQ ID NO: 153372 - DNA, 75 bp, synthetic construct
  source 1..75: mol_type = other DNA
atcgttccagggatgatgtcaatttatctaatacgaaaaaaccacattgttgcttataaagggttttctttttca

SEQ ID NO: 153373 - DNA, 75 bp, synthetic construct
  source 1..75: mol_type = other DNA
atgactgattacggttttaatttcagtgcaacaaaaaaaatagctacatcaacaagtattgatgaaagaaatgaa

SEQ ID NO: 153374 - DNA, 75 bp, synthetic construct
  source 1..75: mol_type = other DNA
ccttcttaacagattatctaatacacatggaattgatgtaagcaactataccgttaagcaggctaaggatggttc

SEQ ID NO: 153375 - DNA, 75 bp, synthetic construct
  source 1..75: mol_type = other DNA
agctaccttccagcagcgaattgctggatgaagtcgaccgtgaactggcggcaagtgaaacgcgtttacgcgaga

SEQ ID NO: 153376 - DNA, 75 bp, synthetic construct
  source 1..75: mol_type = other DNA
tcgctggcaacaggccgggcaaaaggtaaagcctggtttcaaattagcaggcaagctggtacttcttaccgcact

SEQ ID NO: 153377 - DNA, 75 bp, synthetic construct
  source 1..75: mol_type = other DNA
attgctaattattttgatgtaccggtaaaactggtgcgtatcctcgtggtgctgtcgattttcttcggcctggcg

SEQ ID NO: 153378 - DNA, 75 bp, synthetic construct
  source 1..75: mol_type = other DNA
cccactcgccgctggtggggtatgtcgacccggcgcaagaggtactcgatgaggtcaatggcgtgattgccagcg

SEQ ID NO: 153379 - DNA, 75 bp, synthetic construct
  source 1..75: mol_type = other DNA
acccgcatgttgggtgaagccattggacgtttcaccagtacgctgaataagcgcgtgctgttcctgggttccggt

SEQ ID NO: 153380 - DNA, 75 bp, synthetic construct
  source 1..75: mol_type = other DNA
ttgtttttgggcaaaaacttgcaacaatgtatttaggagaagatttttcttcatctgctatattgttcaaatgga

SEQ ID NO: 153381 - DNA, 75 bp, synthetic construct
  source 1..75: mol_type = other DNA
ccccgccgcacgtcttgttgctgtgccggatgccatccgttgtgtgaactgccagaacatcatggaggcccgtta

SEQ ID NO: 153382 - DNA, 75 bp, synthetic construct
  source 1..75: mol_type = other DNA
tcagatcgtgctcaggctgtgatggagcggggatcagaacgcgccctttgtaaccggctgacacgtaagcgccgg

SEQ ID NO: 153383 - DNA, 75 bp, synthetic construct
  source 1..75: mol_type = other DNA
tatagttggtatttgtcgctattttttctgcaggcgacgattcctgattgtccggcagaagacatatatcacaaa

SEQ ID NO: 153384 - DNA, 75 bp, synthetic construct
  source 1..75: mol_type = other DNA
gatatcttggtatggtcaaacctgcaccaagttcgtgtatccgaagaccgcctttcccggctcctgtacacggat

SEQ ID NO: 153385 - DNA, 75 bp, synthetic construct
  source 1..75: mol_type = other DNA
ccacagcagcaatatcagcagccgcaacaaccggttgcgccgcagcagcagtatcagcagccacaacagccagtt

SEQ ID NO: 153386 - DNA, 75 bp, synthetic construct
  source 1..75: mol_type = other DNA
atttaacgtcctggctgatttgaaggcagttggtgcgtcatatgcacggcggaacattatcgcagatatgttcca

SEQ ID NO: 153387 - DNA, 75 bp, synthetic construct
  source 1..75: mol_type = other DNA
tgaataccggtttgatatcaacaaaacggtacagaccattgtgtcgcaggttcatcaggataagaaaaaacgcaa

SEQ ID NO: 153388 - DNA, 75 bp, synthetic construct
  source 1..75: mol_type = other DNA
ctgaagaaaatggggcattcagttctgcttgtctgcagggaaaacagcaaaattgcttttgaagccagtaaattg

SEQ ID NO: 153389 - DNA, 75 bp, synthetic construct
  source 1..75: mol_type = other DNA
ctactgccaggtagttgagagcccagcaggttcacgcaaatggtacaaatacgagcataagacaggttgtattgc

SEQ ID NO: 153390 - DNA, 75 bp, synthetic construct
  source 1..75: mol_type = other DNA
tttagtgatgcacataattcaccaaccgcacagattgacagggatatcaaaaaggcagaaaccgagcttgccaaa

SEQ ID NO: 153391 - DNA, 75 bp, synthetic construct
  source 1..75: mol_type = other DNA
agccgatgaaagaagtacacaagccggagcagggcggtaacatggaacactacgaaaaggaaatggcgattatat

SEQ ID NO: 153392 - DNA, 75 bp, synthetic construct
  source 1..75: mol_type = other DNA
atgaaagccttcaccatgcgcctgatgcatatgggaaaagaggtttacttcctgacggaaaccattacgccgaac

SEQ ID NO: 153393 - DNA, 75 bp, synthetic construct
  source 1..75: mol_type = other DNA
tgaaagcccaaaagattttgtgcgtgtaactgatgataatgaggcgcagattctatcacgggtaaaagccgatac

SEQ ID NO: 153394 - DNA, 75 bp, synthetic construct
  source 1..75: mol_type = other DNA
attttagcgatgctcacaattcgccaaccgctcaggttgaccgcgacattcggaaagctgaaatggaacttgcta

SEQ ID NO: 153395 - DNA, 75 bp, synthetic construct
  source 1..75: mol_type = other DNA
agccagcagccagccaatagccgtgaaatcttccgtaagaagaatggaataaccgaacaacaatatttattgttg

SEQ ID NO: 153396 - DNA, 75 bp, synthetic construct
  source 1..75: mol_type = other DNA
gtaacccaaatctgctggattacaaaatgccgaccatgccagatctgccacaactggaaagcgcgttcgtcgaaa

SEQ ID NO: 153397 - DNA, 75 bp, synthetic construct
  source 1..75: mol_type = other DNA
atgttgccgcgccagcgttgcgcagtgcggcgttgctgttgaaagagaaaatcatcgctcacgccgcagtcatgc

SEQ ID NO: 153398 - DNA, 75 bp, synthetic construct
  source 1..75: mol_type = other DNA
atctttgaatgggaaaaacgccgtgcagagtgccagaaccagcaaggcaatttacggcgaggcgttggcgttgcc

SEQ ID NO: 153399 - DNA, 75 bp, synthetic construct
  source 1..75: mol_type = other DNA
atacggtagctggaccaaccgtaaagtggttgatttctttgtccgtttcgcggaagtggtgtttgaacgctataa

SEQ ID NO: 153400 - DNA, 75 bp, synthetic construct
  source 1..75: mol_type = other DNA
atggtgacgccgttgccatcgtcgtggcccgcgatgaactcacggcagaaaaagcggcgcaattggtcagcattg

SEQ ID NO: 153401 - DNA, 75 bp, synthetic construct
  source 1..75: mol_type = other DNA
tcaaaaccaccactaacccaccggcgtttggctgtacctttgttgatctgacgatcgatattgctctgtgtaaag

SEQ ID NO: 153402 - DNA, 75 bp, synthetic construct
  source 1..75: mol_type = other DNA
aagtttcggcaacgccagaggcagtaccagagactgatgagagttgggctgagattattgagtttggcttattaa

SEQ ID NO: 153403 - DNA, 75 bp, synthetic construct
  source 1..75: mol_type = other DNA
tcgaacagcatcatgcggagattgcttcacaatttacggcgatcttccccgatcttgccgcagaaactcgtcaac

SEQ ID NO: 153404 - DNA, 75 bp, synthetic construct
  source 1..75: mol_type = other DNA
tcccgcgatcaggcgcgtctcttgctggcgaaaattttgcaggcaagagattcgatacgggtaattgattccatc

SEQ ID NO: 153405 - DNA, 75 bp, synthetic construct
  source 1..75: mol_type = other DNA
atgttgccgcgcctgcgttacgcagtgctgcattgctattgaaagagaaaatcatcgctcatgccgctgtaatgc

SEQ ID NO: 153406 - DNA, 75 bp, synthetic construct
  source 1..75: mol_type = other DNA
cactgtgttctcgcaaatggtggctgaaaccgtgggggttccggtcagcgatgtccgcgtgatttcgacacaaga

SEQ ID NO: 153407 - DNA, 75 bp, synthetic construct
  source 1..75: mol_type = other DNA
cgttagatcttgacccggtagaaattcgtttacgtaatgccgcccgtgaaggcgatgcaaatccactcactggaa

SEQ ID NO: 153408 - DNA, 75 bp, synthetic construct
  source 1..75: mol_type = other DNA
tccacctcccaaaatcaccgcgtttgtcagatgaaagccggggcacgtccccagactcgcttaatactactgatg

SEQ ID NO: 153409 - DNA, 75 bp, synthetic construct
  source 1..75: mol_type = other DNA
tactcaccaatatgaaccgccccgggtttcctggagagtgttttatctgtgaactcaggctgccagatcatcgtt

SEQ ID NO: 153410 - DNA, 75 bp, synthetic construct
  source 1..75: mol_type = other DNA
cgttaggtattgatcctgttgaaattcgtttacgcaacgccgcccgcgaaggagatgctaatccgctcacgggaa

SEQ ID NO: 153411 - DNA, 75 bp, synthetic construct
  source 1..75: mol_type = other DNA
tatggagtgcggcggatataaatttacgtttgacgaatacggagaaaaacacctttgcaaaaaatgcaaggggca

SEQ ID NO: 153412 - DNA, 75 bp, synthetic construct
  source 1..75: mol_type = other DNA
gcttttttgggaaagatggagctatcgcaagctgaaaaaaataaagccgtgtcgttgcttatagaccgcttaaaa

SEQ ID NO: 153413 - DNA, 75 bp, synthetic construct
  source 1..75: mol_type = other DNA
cgctaactgccgctggtatggcgcaatcgcgcgtagagcttggttatagcgcttttctgggaaagatggaactat

SEQ ID NO: 153414 - DNA, 75 bp, synthetic construct
  source 1..75: mol_type = other DNA
ctgtcggcgtagaaatagcaggcgcgcgccttctgatgaatcaggatggaaccatcaacgtgcaaagcggcgcga

SEQ ID NO: 153415 - DNA, 75 bp, synthetic construct
  source 1..75: mol_type = other DNA
gtcgacgggcaatgtccaacaaacaattgatgccgccgatcaccaggtccaggggcactatcagacgccggtcat

SEQ ID NO: 153416 - DNA, 75 bp, synthetic construct
  source 1..75: mol_type = other DNA
aatggaaaagtaacaccgccatcgcaccagcactgtgagatgctcattgaatttgccattgattacctgaagaac

SEQ ID NO: 153417 - DNA, 75 bp, synthetic construct
  source 1..75: mol_type = other DNA
gaaatcactgccgcgtgcaattaactctattccgatccgtatcattatgttctacgtcttcgcgctgattgtaat

SEQ ID NO: 153418 - DNA, 75 bp, synthetic construct
  source 1..75: mol_type = other DNA
acgacggtttccgcgattctgtttatgttcgtctggacgattatcctttgctcgtacctggtgtatcgcaaacag

SEQ ID NO: 153419 - DNA, 75 bp, synthetic construct
  source 1..75: mol_type = other DNA
gtgtttttcactgatattcagggaacgcttatgtgaactgaatattcacaggggaaatacagtggtgcaggtaac

SEQ ID NO: 153420 - DNA, 75 bp, synthetic construct
  source 1..75: mol_type = other DNA
ggcaagatgattaattcatcggctgatgataaacgcggcattgtgaagctcggttttacaccacgcgaaaacgat

SEQ ID NO: 153421 - DNA, 75 bp, synthetic construct
  source 1..75: mol_type = other DNA
atatcgatgccgataccattcaaaatcagaacagcggcacggtggattacagcggtctggatgccggtattaagg

SEQ ID NO: 153422 - DNA, 75 bp, synthetic construct
  source 1..75: mol_type = other DNA
acgccgcttacgatcgctatgaagatcgtacctggtcgctcgccagtgaatatcaatgggctgctgccgataatg

SEQ ID NO: 153423 - DNA, 75 bp, synthetic construct
  source 1..75: mol_type = other DNA
cagttttttgaaatcagcgacctgaacattgtgacgatgatcggtgttggcgcacaaatcatgtctgattacgac

SEQ ID NO: 153424 - DNA, 75 bp, synthetic construct
  source 1..75: mol_type = other DNA
catcgcggaatttgccgctttgcaggctacccgcgaagatatcgtcaaaatgcgtcaggcattgcaactggaaga

SEQ ID NO: 153425 - DNA, 75 bp, synthetic construct
  source 1..75: mol_type = other DNA
gtacagcattatcactcgccctcactcagcaagcagttgcggctcaagaaaacgagacgatgaccatatggtcca

SEQ ID NO: 153426 - DNA, 75 bp, synthetic construct
  source 1..75: mol_type = other DNA
ggacgtggttgccatcacggcttatgcgcagttctggtttccggggctatctgactgggtcgcctcgttggcggt

SEQ ID NO: 153427 - DNA, 75 bp, synthetic construct
  source 1..75: mol_type = other DNA
cagctgcggaaaccaaagatccggagaaatcactgccacgcgcgattaactccattccgatccgtatcattatgt

SEQ ID NO: 153428 - DNA, 75 bp, synthetic construct
  source 1..75: mol_type = other DNA
cgggtgacgaagtgcaggtcgttagcgaggcggcagggttctttgtgctggatgaagtgccggattgcgaaacac

SEQ ID NO: 153429 - DNA, 75 bp, synthetic construct
  source 1..75: mol_type = other DNA
tgcaagtcagcggtagccagctaaagcaggattttctcggcctgccgcatggtgtaaataatgatattgcaggca

SEQ ID NO: 153430 - DNA, 75 bp, synthetic construct
  source 1..75: mol_type = other DNA
agaaatcacgctactggcagtggccggagtacgataaagaaagtttttactatcagggaaccacacagctcagcg

SEQ ID NO: 153431 - DNA, 75 bp, synthetic construct
  source 1..75: mol_type = other DNA
ttgaactgtttgtgttggtaggtttgcctgcggctgccagcgtgatcaactttgtggtgctgacctctgcggcgt

SEQ ID NO: 153432 - DNA, 75 bp, synthetic construct
  source 1..75: mol_type = other DNA
tgcatggcaaggtgaccgtcggcctgtttgtcggcgacagcgaaatcgaacccagcaaaaaaatgtcggcagaaa

SEQ ID NO: 153433 - DNA, 75 bp, synthetic construct
  source 1..75: mol_type = other DNA
agagagatgcagcaaggactaggtggggtgcataacaaatggttatgcactacaaaaaattatgaaatgggaaga

SEQ ID NO: 153434 - DNA, 75 bp, synthetic construct
  source 1..75: mol_type = other DNA
tataattggcgcatcaatgtttttctctagagaatgtttggaaacagttggattgatgaatgaagaatatttttt

SEQ ID NO: 153435 - DNA, 75 bp, synthetic construct
  source 1..75: mol_type = other DNA
tgctgaaattacttgaactggcctatcaggcaatagtggaatgcagttgcaacaatgatacgcataaagatggtt

SEQ ID NO: 153436 - DNA, 75 bp, synthetic construct
  source 1..75: mol_type = other DNA
gaaaggcgttgtgtaccgcgagccggaaaatgaaggcgaatcctggcggcagtatctggtgatttacgataccgt

SEQ ID NO: 153437 - DNA, 75 bp, synthetic construct
  source 1..75: mol_type = other DNA
cccagcaaaaagatgtctgcagataaagtcatcacctgcaaacataccctgcgcgagaacccaccggatatcctg

SEQ ID NO: 153438 - DNA, 75 bp, synthetic construct
  source 1..75: mol_type = other DNA
cattggcggatggtttacgtaacgtgctgattattcatggcaaagggcgggacgataaatcgcacgccaacattg

SEQ ID NO: 153439 - DNA, 75 bp, synthetic construct
  source 1..75: mol_type = other DNA
attattaaagagtatatatcaaaaaatgattctatatttttatatgaaggtgataacgttggcgtcatagctagt

SEQ ID NO: 153440 - DNA, 75 bp, synthetic construct
  source 1..75: mol_type = other DNA
gtccggatgccaacgtctgtaatgatgccggtccttttgagctgttacaggcgcgtcagttactggaaagtaaca

SEQ ID NO: 153441 - DNA, 75 bp, synthetic construct
  source 1..75: mol_type = other DNA
agagagatgcagcaaggactgggtggggtacataacagatggttatgcactacaaaaaattatgagatgggaaga

SEQ ID NO: 153442 - DNA, 75 bp, synthetic construct
  source 1..75: mol_type = other DNA
cgggtgtgcgtgcgcccacagaaccttctgccggtggtgaagtgaaaacgccggagcaactgacaccagaacaac

SEQ ID NO: 153443 - DNA, 75 bp, synthetic construct
  source 1..75: mol_type = other DNA
ccaaaaccgacggcggagaaaaaagacgaacgccgctggatggtgcagtgcggttcgttcagaggcgcggaacag

SEQ ID NO: 153444 - DNA, 75 bp, synthetic construct
  source 1..75: mol_type = other DNA
tctacctactcgcgagcgcgccagtttaatcctgacgaaaagtgctaatcatgcggtagaagaggtcagactacg

SEQ ID NO: 153445 - DNA, 75 bp, synthetic construct
  source 1..75: mol_type = other DNA
ttcgcggctcattcaacgctaaccagacatacacggtaagtgccacatacacacggtctgaggtgtcggctatgg

SEQ ID NO: 153446 - DNA, 75 bp, synthetic construct
  source 1..75: mol_type = other DNA
atcttctcgcagtcatatctgctgtacgttatcgcacagggtactgatgttggtaacgtggcgaacaaggccaac

SEQ ID NO: 153447 - DNA, 75 bp, synthetic construct
  source 1..75: mol_type = other DNA
actgatgtgaaaaacgtgctgacaatcccactgtcggcgttaggtgatccggttggcgataaccgctataagatc

SEQ ID NO: 153448 - DNA, 75 bp, synthetic construct
  source 1..75: mol_type = other DNA
tcgttcacaccgtagcttctggttatgtgactggcgcaatgttcatcctcggtatcagcgcatggtatatgctga

SEQ ID NO: 153449 - DNA, 75 bp, synthetic construct
  source 1..75: mol_type = other DNA
tgcctttactctgttcggcattcctgatcaggaagaggaaacgaacaaatttgcgatccagatcccttacgcgct

SEQ ID NO: 153450 - DNA, 75 bp, synthetic construct
  source 1..75: mol_type = other DNA
ggtgaatttcaactaaatgccgacaaagatggaaaagcgatctctctgtctggagaagcgcaaagcggcattata

SEQ ID NO: 153451 - DNA, 75 bp, synthetic construct
  source 1..75: mol_type = other DNA
gttgccggaaaagaaaatccgtggattaaaagtggtcagagcgtcatcttcaacgaatcagttgatcatggtccc

SEQ ID NO: 153452 - DNA, 75 bp, synthetic construct
  source 1..75: mol_type = other DNA
accaaaaactgtcgctggaaaaaatgaccatttcagtggaaggcaaagaactggcactgctggaaggcatggaga

SEQ ID NO: 153453 - DNA, 75 bp, synthetic construct
  source 1..75: mol_type = other DNA
gagattgccaacaatcccgaactttatcaggagaaagtgacggaagccttctttagcgccctgccgctgatgttg

SEQ ID NO: 153454 - DNA, 75 bp, synthetic construct
  source 1..75: mol_type = other DNA
ggatgaaaaagtcgcctttagcggcggcgagttccagttaaatgcagacagagacggcaaagctatctccctttc

SEQ ID NO: 153455 - DNA, 75 bp, synthetic construct
  source 1..75: mol_type = other DNA
agtttagccagcaatataacgcgcaaactcaggcgctgctggcacagccagaaattgccaacaatcccgaacttt

SEQ ID NO: 153456 - DNA, 75 bp, synthetic construct
  source 1..75: mol_type = other DNA
aggcgcgtcagttactggaaagtaacatcgcggaatttgccgctttgcaggctacccgcgaagatatcgtcaaaa

SEQ ID NO: 153457 - DNA, 75 bp, synthetic construct
  source 1..75: mol_type = other DNA
aacgcataacagcatgctggtggagttattccgtcagtcctggcagtggcgggaaaacaatccgatgtggatcca

SEQ ID NO: 153458 - DNA, 75 bp, synthetic construct
  source 1..75: mol_type = other DNA
gatcaaagggctggtggaagtgcgtcggggtgccggtatctatgttcttgatagctcaggcagccacaacacaga

SEQ ID NO: 153459 - DNA, 75 bp, synthetic construct
  source 1..75: mol_type = other DNA
tgctgctagatggtgaaagtctgcataacatcgcacgtcacctacaggctaataacattagttcattctcacggc

SEQ ID NO: 153460 - DNA, 75 bp, synthetic construct
  source 1..75: mol_type = other DNA
agtcgaagctatcgaccgcataggccgccttgaacatcttgaaacagaagccttgatgaatcgcattattgctca

SEQ ID NO: 153461 - DNA, 75 bp, synthetic construct
  source 1..75: mol_type = other DNA
agtgataagggattaccccaacttaaagatattgaccttgaagtggctgaagtggtcaacaaaaactggccaccg

SEQ ID NO: 153462 - DNA, 75 bp, synthetic construct
  source 1..75: mol_type = other DNA
ttactggtcagtttggtgacatgttagcccgtattgagtctggggagtttccagaaggtacgattttgcttgttg

SEQ ID NO: 153463 - DNA, 75 bp, synthetic construct
  source 1..75: mol_type = other DNA
gtgatgttccaccgttgaagcgtaaaccgtttgaccgatggatgattgataattttctggggatgattgacgtgg

SEQ ID NO: 153464 - DNA, 75 bp, synthetic construct
  source 1..75: mol_type = other DNA
cggtaatcattcagactacacgactcgacacatcagtccttccacgcaatatcttctcgcagtcgtatctgcttt

SEQ ID NO: 153465 - DNA, 75 bp, synthetic construct
  source 1..75: mol_type = other DNA
aggcggatataaacgtctgtaacgacgccggcccctttgaattgttgcaggcgcgacagcttcttgagagcaaca

SEQ ID NO: 153466 - DNA, 75 bp, synthetic construct
  source 1..75: mol_type = other DNA
atcacaaacagatcctcgccgcgttaatcaaaaaagatgcccgagcggcgaagctggcaatgtggcagcatctgg

SEQ ID NO: 153467 - DNA, 75 bp, synthetic construct
  source 1..75: mol_type = other DNA
atggctacagtcatttcccctcatcctaaccctctccccaaaggggcgaggggactgaacgtgccctttacagga

SEQ ID NO: 153468 - DNA, 75 bp, synthetic construct
  source 1..75: mol_type = other DNA
tctctgctcgaacaactgcgttctggttccaccgatcaggctgtacgtgaccagttcaatagcatgaagaaagac

SEQ ID NO: 153469 - DNA, 75 bp, synthetic construct
  source 1..75: mol_type = other DNA
tggccggggaagtcacgcaaatcaccactctgcaaggccagacggtgattgccgcacaacaagcaccgaacattc

SEQ ID NO: 153470 - DNA, 75 bp, synthetic construct
  source 1..75: mol_type = other DNA
acgctgatggagctacgcgcgcagcggcagcaggcggaagcggagctgaaactggcgcgggtgacgtattcccgt

SEQ ID NO: 153471 - DNA, 75 bp, synthetic construct
  source 1..75: mol_type = other DNA
tgaacgcccgacggtagtgataaccaccccggctatcggccatgttccgccgcgcccggtgctgatgttcagttg

SEQ ID NO: 153472 - DNA, 75 bp, synthetic construct
  source 1..75: mol_type = other DNA
acaccgcactggtcaaagccagctttgtgggcgaagcctggactcgcgccacagaacaggaaaaacgccgccagg

SEQ ID NO: 153473 - DNA, 75 bp, synthetic construct
  source 1..75: mol_type = other DNA
acggggcgctggtcaaagccggttttgtgggcgaggcctggacccgcgccacagagcaggaaaaacgccgcgagg

SEQ ID NO: 153474 - DNA, 75 bp, synthetic construct
  source 1..75: mol_type = other DNA
ccgaaaaacatggggtcgcgcaccgcaggctgaagtattaacaccaggctataagtacaatctgaccgatattaa

SEQ ID NO: 153475 - DNA, 75 bp, synthetic construct
  source 1..75: mol_type = other DNA
ttcttaatccactgctggcagaaggtcaggtacacggcggaatgggaatgggcattggctgggcgctatttgaag

SEQ ID NO: 153476 - DNA, 75 bp, synthetic construct
  source 1..75: mol_type = other DNA
cgcaaactgaaaaacacagggccgtagttttgcttacagagcgtttaagagctatggcaaaagattacgaatacg

SEQ ID NO: 153477 - DNA, 75 bp, synthetic construct
  source 1..75: mol_type = other DNA
gcgagcgttttcccacgctgtcgttaccgaataccgaatggaatagcgaacgcatctgttcgttgccgctgttcc

SEQ ID NO: 153478 - DNA, 75 bp, synthetic construct
  source 1..75: mol_type = other DNA
gtgattacgccttccctgacctgggtttcaaccctcaatatgatttccttgttgggtgcaacgccggtaatggtg

SEQ ID NO: 153479 - DNA, 75 bp, synthetic construct
  source 1..75: mol_type = other DNA
agaatcaggcactggaagcggccttttgccagttgacaggaaatcaacatgccatcgcagtcagctcggccactg

SEQ ID NO: 153480 - DNA, 75 bp, synthetic construct
  source 1..75: mol_type = other DNA
taaacaacttagagagcgttttgatgcctcattgacgcgtattgcccgtaccagtatctcgttcgttaagaaaaa

SEQ ID NO: 153481 - DNA, 75 bp, synthetic construct
  source 1..75: mol_type = other DNA
gatcggttttctggaatactccatagacaaagaaaacggcgattacgtactgaatattctaaagagaaacatgaa

SEQ ID NO: 153482 - DNA, 75 bp, synthetic construct
  source 1..75: mol_type = other DNA
cccaggtaaaaaacgatgaacaggacgtcgaactggctgaccacgatgcaagaatcaccgcaaacacaaaagcga

SEQ ID NO: 153483 - DNA, 75 bp, synthetic construct
  source 1..75: mol_type = other DNA
gcaactcaaactgacagctcctgaatccaacctggaagtgagttatcaaaactatcatcgcggcgtattcagcag

SEQ ID NO: 153484 - DNA, 75 bp, synthetic construct
  source 1..75: mol_type = other DNA
atgatttattgtccattcctttcagttctgccacggaattcaccgaattggccgatcactgtgaccgtttcgctg

SEQ ID NO: 153485 - DNA, 75 bp, synthetic construct
  source 1..75: mol_type = other DNA
gaacgcctgcaactgtcatcacacctcggcaaccagaatgccacggtgaaaaaggcgctgggccagcttaaagag

SEQ ID NO: 153486 - DNA, 75 bp, synthetic construct
  source 1..75: mol_type = other DNA
aagctgacctttaacattgacgggctggcaagggcgattgctcccctgcgcgatgcctgccactgggcgggagaa

SEQ ID NO: 153487 - DNA, 75 bp, synthetic construct
  source 1..75: mol_type = other DNA
cgccggatgcgacagccacgttacaggccatgcagtcctgtcggcgggagtccgcggcgctggagcggcttgact

SEQ ID NO: 153488 - DNA, 75 bp, synthetic construct
  source 1..75: mol_type = other DNA
agggcaacaccacagagctgctggtgacgcaggtgccgggggagcgcccgacggtggtgataaccaccccggcta

SEQ ID NO: 153489 - DNA, 75 bp, synthetic construct
  source 1..75: mol_type = other DNA
agcgatacttacacgcaatctgaaatccagactatagccaatgctctaattgctgagcgtcggcgcactaaggct

SEQ ID NO: 153490 - DNA, 75 bp, synthetic construct
  source 1..75: mol_type = other DNA
tgttcttaatcgccgaagtctacctgatgcagaaatatgcccgtctggggccgagcgcgatgcagagtgaacaac

SEQ ID NO: 153491 - DNA, 75 bp, synthetic construct
  source 1..75: mol_type = other DNA
ccggtgtggcggtagctgtcgccacagcgacaccgccggatgcgacagccacgttacaggccatgcagtcctgtc

SEQ ID NO: 153492 - DNA, 75 bp, synthetic construct
  source 1..75: mol_type = other DNA
gtggtgtgacccgttatcgccctttgttgattcagcagtcaggcacagcaacgacagcaacctgtaaggcccgtt

SEQ ID NO: 153493 - DNA, 75 bp, synthetic construct
  source 1..75: mol_type = other DNA
aaaacctgctcagaatagtcagtgaactggctgcgccatttggcatcaccgttgttgatgctggcgtgccgcaga

SEQ ID NO: 153494 - DNA, 75 bp, synthetic construct
  source 1..75: mol_type = other DNA
attaaccgtattgcccgggattttaatgttgccattaccacccgctggcccggcagccgggattatcagccccgg

SEQ ID NO: 153495 - DNA, 75 bp, synthetic construct
  source 1..75: mol_type = other DNA
gctttctgctgctggagtgtacggagctgggcgaatttaggcagagtcacggaggcagcaatggcgactcccttt

SEQ ID NO: 153496 - DNA, 75 bp, synthetic construct
  source 1..75: mol_type = other DNA
gttcggtcagcaccggtattgccggacgtagtctgaccgctgacctgattgactgtgcagccgaaccgacacagt

SEQ ID NO: 153497 - DNA, 75 bp, synthetic construct
  source 1..75: mol_type = other DNA
gggagatgagggtatcaccacgcttcagccgcgcattaaaaacggttcaaaagtggaggtgctgattggtgatga

SEQ ID NO: 153498 - DNA, 75 bp, synthetic construct
  source 1..75: mol_type = other DNA
accgacgccgatgatgcgttacgccagggaatgccagtgacggtacaattcggtgacgaggcaggacatgaatga

SEQ ID NO: 153499 - DNA, 75 bp, synthetic construct
  source 1..75: mol_type = other DNA
cttgaccaggcccagccggggcgcaaagtgctgctttataccgatggtcgcccggacaagccgtatcacgggcag

SEQ ID NO: 153500 - DNA, 75 bp, synthetic construct
  source 1..75: mol_type = other DNA
ccgtctgatggcacgctgttaacgcgcgcggtggagccaggcacggttctcaatgaaggtggcacggtgtttacc

SEQ ID NO: 153501 - DNA, 75 bp, synthetic construct
  source 1..75: mol_type = other DNA
tatcgcctgcgtattgtggtgaccgacgccgatgatgcgttacgccagggaatgccggtaacggtgcaattcggt

SEQ ID NO: 153502 - DNA, 75 bp, synthetic construct
  source 1..75: mol_type = other DNA
ttcggcaaatgacctggaaaatgcccgctcctcgcgcgaccaggcgcaggcaacgctgaaatcagcacaggataa

SEQ ID NO: 153503 - DNA, 75 bp, synthetic construct
  source 1..75: mol_type = other DNA
aatgaaggtggcacggtgtttaccgtttcactaacgcgtccggtgtgggtgcgtgcctatgtcgatgagcgcaat

SEQ ID NO: 153504 - DNA, 75 bp, synthetic construct
  source 1..75: mol_type = other DNA
atgttgaccactgacgaatggggtagttacgctagagagttaccaaaggagaagcatctgactggtaagattttt

SEQ ID NO: 153505 - DNA, 75 bp, synthetic construct
  source 1..75: mol_type = other DNA
agcttcgtggtggtgtatacatagtgtttgcgcgtaaaaatgatcagctaacaacctatgacaacagtaaagttt

SEQ ID NO: 153506 - DNA, 75 bp, synthetic construct
  source 1..75: mol_type = other DNA
gtgattactggttgtgagggcattaatgcgggaacgcggcccatcgctcgcgaaaacgatgaagaacgtaagccc

SEQ ID NO: 153507 - DNA, 75 bp, synthetic construct
  source 1..75: mol_type = other DNA
aatatgctgggcgcggcgcgcacgctcgcccgctacgatattaaagttattggaatcaaccgtggcaacctgggt

SEQ ID NO: 153508 - DNA, 75 bp, synthetic construct
  source 1..75: mol_type = other DNA
atgaaacatttatattttgagctaatacagacgcgcgaccgcaatatatttgaagaagggaagatctattgcggc

SEQ ID NO: 153509 - DNA, 75 bp, synthetic construct
  source 1..75: mol_type = other DNA
tcattttctttgttctgaatgacaaagaagaggcaccgtccgtcgaggtgaaaaagaagacggagcatcgaaaaa

SEQ ID NO: 153510 - DNA, 75 bp, synthetic construct
  source 1..75: mol_type = other DNA
tgtgtaccgggtgaaacgtcagcgcgatctgaacggggcgcggcgctttctgctgctggagtgtacggagctggg

SEQ ID NO: 153511 - DNA, 75 bp, synthetic construct
  source 1..75: mol_type = other DNA
atgaaaattcgccaggcgcagaccagcgcaacctacattctgccggaccccggtgaactgaataaacgcgtcctg

SEQ ID NO: 153512 - DNA, 75 bp, synthetic construct
  source 1..75: mol_type = other DNA
gcgaaggttatccagaccagtgccaccacctggcaggaaaccgcgcagatcggagacgccatcacccattacatc

SEQ ID NO: 153513 - DNA, 75 bp, synthetic construct
  source 1..75: mol_type = other DNA
cctgaggaacctcaccaggcgctgtgcgcgattggcgcggctacgtcagtacgcaaagcggtctttaaggtaccg

SEQ ID NO: 153514 - DNA, 75 bp, synthetic construct
  source 1..75: mol_type = other DNA
gtcaccgttatctgattcaacaggctgcggcacagtgcgactggctgcatctgtttttagttaaagaagattctt

SEQ ID NO: 153515 - DNA, 75 bp, synthetic construct
  source 1..75: mol_type = other DNA
gggcgcggcgctttctgctgctggagtgtacggaactgggcgaatttacgcagagtcacggaggcagcaatggcg

SEQ ID NO: 153516 - DNA, 75 bp, synthetic construct
  source 1..75: mol_type = other DNA
tgcgattccgctggtggtaggtaaaacgctgggtgaatacaaaaacgttctgacgctggtgcgtaatacatttgc

SEQ ID NO: 153517 - DNA, 75 bp, synthetic construct
  source 1..75: mol_type = other DNA
cgggtaaaatcaccgcgattgatacgcactggatctggcaggaaggtaatcagcgcctgaccaaagaaccgtttg

SEQ ID NO: 153518 - DNA, 75 bp, synthetic construct
  source 1..75: mol_type = other DNA
ctgttctttgtcggcaatcgcaacgctacaccgctgccgtatcaaagccagccggatgactcatgcgactggtat

SEQ ID NO: 153519 - DNA, 75 bp, synthetic construct
  source 1..75: mol_type = other DNA
atctgcacgttgccgctgtcgtagatcagaacaataaagttctggggcccccgtttttctccacaacacggcaag

SEQ ID NO: 153520 - DNA, 75 bp, synthetic construct
  source 1..75: mol_type = other DNA
atgagttctcaatttacgacgcctgttgttactgaaatgcaggtcatcccggtggcgggtcatgacagtatgctg

SEQ ID NO: 153521 - DNA, 75 bp, synthetic construct
  source 1..75: mol_type = other DNA
acatcaggggatatctttaaggcgggcacccgggtgacaggcttcagtcgtgtgacgccgacgctgcgtgttgac

SEQ ID NO: 153522 - DNA, 75 bp, synthetic construct
  source 1..75: mol_type = other DNA
acaaccgcttcaccggcgggattgaggctcatgacagtcaggtaaacgtcacttcaccggatgccctgctgcaga

SEQ ID NO: 153523 - DNA, 75 bp, synthetic construct
  source 1..75: mol_type = other DNA
taccgactgcaaccaatatgatcgccaccgactggcggcaaatggatgatcgccaccgactggcggcaaatggat

SEQ ID NO: 153524 - DNA, 75 bp, synthetic construct
  source 1..75: mol_type = other DNA
aggtttctccgggcgtgaagtaatggcggagttccgtcgcgcaactggcctgccaaccgcaaccaacatgatcgc

SEQ ID NO: 153525 - DNA, 75 bp, synthetic construct
  source 1..75: mol_type = other DNA
gccagaaaaaccggggctgggtgtagaaatcgatatggatcaggtgatgaaagcgcacgagctgtatcagaaaca

SEQ ID NO: 153526 - DNA, 75 bp, synthetic construct
  source 1..75: mol_type = other DNA
aagatgcggcctttgcggtcagtatgaatggggtggccgtcgtacccggggattcgaaagacatcacgatagatt

SEQ ID NO: 153527 - DNA, 75 bp, synthetic construct
  source 1..75: mol_type = other DNA
ctgcggtgattgatgcacagccggaacacggcgaaactgttgccgattgtcttaaccggttgctggggcaggttc

SEQ ID NO: 153528 - DNA, 75 bp, synthetic construct
  source 1..75: mol_type = other DNA
gacaaagtttttatcccccgtctggcacatatgatgcaccactatggcagcattctgttaccgcacggcggcagc

SEQ ID NO: 153529 - DNA, 75 bp, synthetic construct
  source 1..75: mol_type = other DNA
gcgcagaacttctataaccgccagcaagggttgtggaaaagccgcaccatttcggcaaacgacctggaaaatgcc

SEQ ID NO: 153530 - DNA, 75 bp, synthetic construct
  source 1..75: mol_type = other DNA
ggtggtcgcgttgagtcgctggccgtagacgaaggcgatgcgatcaaagtaggccaggtgctgggcgaactggat

SEQ ID NO: 153531 - DNA, 75 bp, synthetic construct
  source 1..75: mol_type = other DNA
catcctttcctgcgatacggagaagagtatccgggagcgattttctgtttaccaggtggcggggcagcgtgccgg

SEQ ID NO: 153532 - DNA, 75 bp, synthetic construct
  source 1..75: mol_type = other DNA
aagccctgctgcgcggggaagtaccaccggggtatgtggcttcgcccgttgtcggtgaaccggtgttttcgcttc

SEQ ID NO: 153533 - DNA, 75 bp, synthetic construct
  source 1..75: mol_type = other DNA
atgttcttgcgataaaaatgagaaagattgtttatcgacgccagataataaatttgatgaacataaatacgataa

SEQ ID NO: 153534 - DNA, 75 bp, synthetic construct
  source 1..75: mol_type = other DNA
tgttaccaacgtttatcgtatttcattaaagtcccttgcccgacgctatctcgagttacatgacgaaatcgctga

SEQ ID NO: 153535 - DNA, 75 bp, synthetic construct
  source 1..75: mol_type = other DNA
agttaggttatcagccgatcatcaccctggatgaaggtatcgagaaaactgccgcctggctacgcgaccacggaa

SEQ ID NO: 153536 - DNA, 75 bp, synthetic construct
  source 1..75: mol_type = other DNA
cgcatatgatgcaccactacggcagcatcctgttaccccacggcggcagcgcactggtcgatatgacttactatg

SEQ ID NO: 153537 - DNA, 75 bp, synthetic construct
  source 1..75: mol_type = other DNA
aatgattcaggcgacagcctgaacgtagcagggatccacgtccttcagggcgtggaggatgtcaatttgcgctat

SEQ ID NO: 153538 - DNA, 75 bp, synthetic construct
  source 1..75: mol_type = other DNA
taacagtttgtctcaaattgctcatgaaggtggacgggctcatggcttgctaaatgtaaaaccttcggacttctt

SEQ ID NO: 153539 - DNA, 75 bp, synthetic construct
  source 1..75: mol_type = other DNA
atctggtcggcgcgtaactcgtgcagcaccgtgctggtggggattgtgttggggccagccgccgctgggttattt

SEQ ID NO: 153540 - DNA, 75 bp, synthetic construct
  source 1..75: mol_type = other DNA
cggtcaatgtctggatgtggcgctctcattaattccgaccttaaaggcgttttttcagcgccattcattgcgtta

SEQ ID NO: 153541 - DNA, 75 bp, synthetic construct
  source 1..75: mol_type = other DNA
actcgcttgcctgaaagatgagaaaaaagccctgatgcagcagttactgaccgggaaacgccgtgtcaaaacaga

SEQ ID NO: 153542 - DNA, 75 bp, synthetic construct
  source 1..75: mol_type = other DNA
ccgaaatctccgtgctggagaaaaaactcgcttgcctgaaagatgagaaaaaagccctgatgcagcagttactga

SEQ ID NO: 153543 - DNA, 75 bp, synthetic construct
  source 1..75: mol_type = other DNA
tttttctatgcagaaaactcgctactacttcttcaccttagcaacgggcgcaacaagatttggcttatcagttgg

SEQ ID NO: 153544 - DNA, 75 bp, synthetic construct
  source 1..75: mol_type = other DNA
atgcgtttagatccgcgcaccaccagaccgtggttgttaggcgtgaagtccggtttactggcgggcggaatcggt

SEQ ID NO: 153545 - DNA, 75 bp, synthetic construct
  source 1..75: mol_type = other DNA
ggtttgcagatggagcctttcgcaccattattcgcaatagcgcctggttaggctccagcaatgtcgtgagcgcct

SEQ ID NO: 153546 - DNA, 75 bp, synthetic construct
  source 1..75: mol_type = other DNA
gggcttccctcaggagtcattgctattgatggcgggaaaacagcgcgcttttctcgtggcgcaaaccatcgcctc

SEQ ID NO: 153547 - DNA, 75 bp, synthetic construct
  source 1..75: mol_type = other DNA
ctttgaccaacaataatccgcagcaatttcgcaatgttgtctcattttccttctcgctggatatcgtcagcggcg

SEQ ID NO: 153548 - DNA, 75 bp, synthetic construct
  source 1..75: mol_type = other DNA
gggcaaaagtttttacccagaggtgatgcgtttagatccacgcaccaccagaccgtggttgttaggcgtgaagtc

SEQ ID NO: 153549 - DNA, 75 bp, synthetic construct
  source 1..75: mol_type = other DNA
aaaactctgcttaccaggcgcatttcgcccaggggatcaccataataaaatgctgaggcctggcctttgcgtagt

SEQ ID NO: 153550 - DNA, 75 bp, synthetic construct
  source 1..75: mol_type = other DNA
cagcccagaaccattgatatgggagctcggagcggtaagcggctggaacgtatacccgatgctgtcgtgaatgag

SEQ ID NO: 153551 - DNA, 75 bp, synthetic construct
  source 1..75: mol_type = other DNA
attacgcatcacaagaaagaagagtccgagacgctgcaaagccagaaagtgaccggaaacgggttaccgccgaag

SEQ ID NO: 153552 - DNA, 75 bp, synthetic construct
  source 1..75: mol_type = other DNA
cttcattacgcatcacaagaaagaagagtccgagacgctgcaaagccagaaagtgaccggaaacggactacctcc

SEQ ID NO: 153553 - DNA, 75 bp, synthetic construct
  source 1..75: mol_type = other DNA
ctgaaagagacccggcagatgacgaagcatttacgtcgccgaccgggtcacatgacagcggagcattactggtaa

SEQ ID NO: 153554 - DNA, 75 bp, synthetic construct
  source 1..75: mol_type = other DNA
ccgatgaataaagaaaccagccatgtgatgctgtgcggcaatccacagatggtgcgcgatacgcaacagttgctg

SEQ ID NO: 153555 - DNA, 75 bp, synthetic construct
  source 1..75: mol_type = other DNA
gatgaagtaccagattgcgaaacgctatggatgctggcaaccggtacagcgattggcccttatttatcgattctg

SEQ ID NO: 153556 - DNA, 75 bp, synthetic construct
  source 1..75: mol_type = other DNA
atgaaccttgacgacaaatcgctgtttcttgacgccatggaagatgtccagccgctgaaacgtgctacagatgtc

SEQ ID NO: 153557 - DNA, 75 bp, synthetic construct
  source 1..75: mol_type = other DNA
aaagcacattatgaaactgtagatgcaatgtatgcagccgttcgcccattaatgaaagagttaggttttcctgat

SEQ ID NO: 153558 - DNA, 75 bp, synthetic construct
  source 1..75: mol_type = other DNA
aactcgcctgcctgagagatgagaaaaaagccctgatgcaacagctactgactggcaaacgtcgtgttaaggtcg

SEQ ID NO: 153559 - DNA, 75 bp, synthetic construct
  source 1..75: mol_type = other DNA
tttgcccgcactgccggctttgcggtgtcgctggatggtgccggcattcgtaccaccggtgttgtgcgttgcgat

SEQ ID NO: 153560 - DNA, 75 bp, synthetic construct
  source 1..75: mol_type = other DNA
tcaacggcgggaatatcatcacgctacagcgtattttgggtcatacaacaatcgagcaaacaatgacatatgctc

SEQ ID NO: 153561 - DNA, 75 bp, synthetic construct
  source 1..75: mol_type = other DNA
gatgataaatcgcatgccaatattgtccgcagctatgtggcgcgctggctgaccgaatttgatgatgttcaggca

SEQ ID NO: 153562 - DNA, 75 bp, synthetic construct
  source 1..75: mol_type = other DNA
tgatagccagcgtggatataaaaacaggacagaaaagtgtatttcagtacctgattaaaccaatcaccagaatga

SEQ ID NO: 153563 - DNA, 75 bp, synthetic construct
  source 1..75: mol_type = other DNA
atcgagtactggttactaccagtaataattatctgacagacaggaacggaaaaatattgccagttattcctggca

SEQ ID NO: 153564 - DNA, 75 bp, synthetic construct
  source 1..75: mol_type = other DNA
atgaaaaaactcgcaattgcaggcgcgctcatgttgctggcgggctactggcagaccaaagggccgcaacgtgcg

SEQ ID NO: 153565 - DNA, 75 bp, synthetic construct
  source 1..75: mol_type = other DNA
ggccgtgggtatggggctgaagacatcagataaccagccgctggcgtatctgcgtaccaatagcatccggaaaaa

SEQ ID NO: 153566 - DNA, 75 bp, synthetic construct
  source 1..75: mol_type = other DNA
actgacatttccggatgacgtgcctgcagatttgagggagagggaaagtactgtttatcgactacgaaagactga

SEQ ID NO: 153567 - DNA, 75 bp, synthetic construct
  source 1..75: mol_type = other DNA
gatggccacgatatattcctggtgatcaggaaacggtcgatagtcatttagaacaattattacgcgacggctata

SEQ ID NO: 153568 - DNA, 75 bp, synthetic construct
  source 1..75: mol_type = other DNA
gaatctgattcatccaaaagattacagctatttcaatacattaagcactaagctcggctggtcaaaaaaattatt

SEQ ID NO: 153569 - DNA, 75 bp, synthetic construct
  source 1..75: mol_type = other DNA
tgattcgtcgttgtgattaccatctgaatctgattcatccaaaagattacagctatttcaatacattaagcacta

SEQ ID NO: 153570 - DNA, 75 bp, synthetic construct
  source 1..75: mol_type = other DNA
tgcccatgttcccgcatacgttgtcagcgcgaccactggtcataaacagcagcagcacgatccgcctgcgttttt

SEQ ID NO: 153571 - DNA, 75 bp, synthetic construct
  source 1..75: mol_type = other DNA
caaaaggggatgataagtttatcaccaccgactatttgcaacagtgccgtcgcgattatatatctaatgccgctg

SEQ ID NO: 153572 - DNA, 75 bp, synthetic construct
  source 1..75: mol_type = other DNA
caaggcttttagatgatattactatatcttctgataaggatctttcatcagaggaaaaaacaaaagtaataaaac

SEQ ID NO: 153573 - DNA, 75 bp, synthetic construct
  source 1..75: mol_type = other DNA
tgattcgtcgctgtgattaccatctgaatctaattcacccaaaagactatagctatttcaacacattaagcacaa

SEQ ID NO: 153574 - DNA, 75 bp, synthetic construct
  source 1..75: mol_type = other DNA
gttatttcttattaaaaaaagggcagtttgcttacaataaaagttactctaatggttatccgatgggtgcaataa

SEQ ID NO: 153575 - DNA, 75 bp, synthetic construct
  source 1..75: mol_type = other DNA
tgaatccgcagcagtttatgtccaaagacaagaacccgcagggcggggaggccggcaaggagggcggaaatggcg

SEQ ID NO: 153576 - DNA, 75 bp, synthetic construct
  source 1..75: mol_type = other DNA
gctgttccaccgccgacggcgttttatcccgggaatggtgtcacgccaccaccacaggtgacgtaccagtctgtg

SEQ ID NO: 153577 - DNA, 75 bp, synthetic construct
  source 1..75: mol_type = other DNA
tgcgccgaaagagacattacaggtagtggaatattatcgtgatgaaactgaccgtgaatatttaaaaggctgcgg

SEQ ID NO: 153578 - DNA, 75 bp, synthetic construct
  source 1..75: mol_type = other DNA
gcgattgaaaatatcgacaacattcagcccggcgtcgcccactccatcggtgactcattgacctaccgtgtggaa

SEQ ID NO: 153579 - DNA, 75 bp, synthetic construct
  source 1..75: mol_type = other DNA
gggcgacaagccccaggaagatattgctgatgaggccggaatgtctccggcaacactctcggctctgcgtaaagg

SEQ ID NO: 153580 - DNA, 75 bp, synthetic construct
  source 1..75: mol_type = other DNA
ggcagggagggcggaaatggcgggggatgcactgacattccgtgtggcgtttgtcgttcgctggctgctgtgggt

SEQ ID NO: 153581 - DNA, 75 bp, synthetic construct
  source 1..75: mol_type = other DNA
atgtcccgttttatcctgggtgactgcgtgcgtgttatggccacgtttccgggcaatgctgtcgatttcatgtcg

SEQ ID NO: 153582 - DNA, 75 bp, synthetic construct
  source 1..75: mol_type = other DNA
gcttattacaaagcggctgaagagagggcaagaatggaaaatatccctaaatgcggctcatttttcgacatgctg

SEQ ID NO: 153583 - DNA, 75 bp, synthetic construct
  source 1..75: mol_type = other DNA
gcgctgagcagtatcacccggtgatacccatcggggcgggtaatgaagtgaccgtggtgttccaggacggtttcc

SEQ ID NO: 153584 - DNA, 75 bp, synthetic construct
  source 1..75: mol_type = other DNA
cggcgcatcgaaagccgcacagacgctcagtgactactacatcaaacgtgctgaacagtatcacccggtgatacc

SEQ ID NO: 153585 - DNA, 75 bp, synthetic construct
  source 1..75: mol_type = other DNA
accagtccgtgcctgtaccgaaccgtattcagcgtaaaacattcagttacgacagtaccaccaggaaagcgccct

SEQ ID NO: 153586 - DNA, 75 bp, synthetic construct
  source 1..75: mol_type = other DNA
tgattttgtccaagcatctaaaagggcttacattgggtaaggattcggtaactgtaacgctacagaacgacactg

SEQ ID NO: 153587 - DNA, 75 bp, synthetic construct
  source 1..75: mol_type = other DNA
atccaaagctatcccttacactatccaactcaaagataagatatcaattatcagaattaggcattgcttttcaga

SEQ ID NO: 153588 - DNA, 75 bp, synthetic construct
  source 1..75: mol_type = other DNA
aaatgcgtgattgtttcctataacttcagtgaagctcttcaaaaggtaacatcctcttaccaacacaaatcccct

SEQ ID NO: 153589 - DNA, 75 bp, synthetic construct
  source 1..75: mol_type = other DNA
aacatttgttcttcctaatttgaatgcctatgtaagattttttacgctgttaacttttttttactaccccctaca

SEQ ID NO: 153590 - DNA, 75 bp, synthetic construct
  source 1..75: mol_type = other DNA
tatcatttcagaagcggattatgcaacgaatgtggtgttctttaatgatgttctggataaatacatagatgtatt

SEQ ID NO: 153591 - DNA, 75 bp, synthetic construct
  source 1..75: mol_type = other DNA
ctggctgtacagacgttgtattccgacgggcatacctcggcaaaagaaagattataatgacatcccctatgattt

SEQ ID NO: 153592 - DNA, 75 bp, synthetic construct
  source 1..75: mol_type = other DNA
ctgatactctggggagtggcagccggcgcggtggcgggggctcactatgcccgccctgtctttgatccgtttgcc

SEQ ID NO: 153593 - DNA, 75 bp, synthetic construct
  source 1..75: mol_type = other DNA
cctctggtgctaaacctactcataccgtggaggttttttcagacattttatctatttttgaattcgcagaattta

SEQ ID NO: 153594 - DNA, 75 bp, synthetic construct
  source 1..75: mol_type = other DNA
gcactggacagatgaggatgtagaaagagaaataaaaataaaagaaaatgcctctggtgctaaacctactcatac

SEQ ID NO: 153595 - DNA, 75 bp, synthetic construct
  source 1..75: mol_type = other DNA
tccattaattcggcaatggatgaggctattcacgcttttagaagcgcaagaaaaaaacatttaatgctgtaccca

SEQ ID NO: 153596 - DNA, 75 bp, synthetic construct
  source 1..75: mol_type = other DNA
tttcgacagccaactggagaaatttgaggaagcgattccttctgcggacgatttcgatctgtacggcgtttatcc

SEQ ID NO: 153597 - DNA, 75 bp, synthetic construct
  source 1..75: mol_type = other DNA
aaaaaacacaaaaacaaatcaatcttgtaattgaaaagaataaaactgattcttattactcacatctaaaaagtt

SEQ ID NO: 153598 - DNA, 75 bp, synthetic construct
  source 1..75: mol_type = other DNA
tgattataaataccaagaacatcttttctcaataattcttgaacatccaaaaccagatacggaagccataagcat

SEQ ID NO: 153599 - DNA, 75 bp, synthetic construct
  source 1..75: mol_type = other DNA
gatgtggatacagctgcgggaagactgaaacggtactataagttttattcaaatgaagaagtcgatgcgattcgt

SEQ ID NO: 153600 - DNA, 75 bp, synthetic construct
  source 1..75: mol_type = other DNA
aggacatctgaaagaatcaacgcttgcaccgttatttaaacgtgtgaaggatgtggcagaaggaagagtcagata

SEQ ID NO: 153601 - DNA, 75 bp, synthetic construct
  source 1..75: mol_type = other DNA
gttgatgttgatacggctgcaggaagattaaagcggtactataaattttattcgaatgaggaagttgacgctatt

SEQ ID NO: 153602 - DNA, 75 bp, synthetic construct
  source 1..75: mol_type = other DNA
cgccgtaatgatgttaacccagaaatcaccgaccgttttgaattcttcatcggtggtcgtgaaatcggtaatggt

SEQ ID NO: 153603 - DNA, 75 bp, synthetic construct
  source 1..75: mol_type = other DNA
cgttaccgagatcttcgaagaagtggcagaagcacatctgatccagccgaccttcattactgaatatccggcaga

SEQ ID NO: 153604 - DNA, 75 bp, synthetic construct
  source 1..75: mol_type = other DNA
ccgctttggtcatcgccaccagtgcaatggcgcaggatgatttaacaattagcagcctggcaaagggcgaagcca

SEQ ID NO: 153605 - DNA, 75 bp, synthetic construct
  source 1..75: mol_type = other DNA
attgctcttacccaacatcaactgacgccagcgcaactgaccgatgacgaacgccaacgttttgccgcccagtaa

SEQ ID NO: 153606 - DNA, 75 bp, synthetic construct
  source 1..75: mol_type = other DNA
ccgcagatgttccagtttaaccacctgctgcgcgcgctgttccaggccgatcgcaaagtgctggaacaaaacttc

SEQ ID NO: 153607 - DNA, 75 bp, synthetic construct
  source 1..75: mol_type = other DNA
cgatcgcaggggcagatgttgatcgcccgcgaccaggggctgttgtgggatcaaacctcaccgttccccatgcag

SEQ ID NO: 153608 - DNA, 75 bp, synthetic construct
  source 1..75: mol_type = other DNA
actgggatgattatgatcatctgactattgaagtggaaaagaatggtacaggaagtaaattatatattacgttta

SEQ ID NO: 153609 - DNA, 75 bp, synthetic construct
  source 1..75: mol_type = other DNA
acgcgaaaaacggtgcaggggatcatttctcaggcgctgcaggcattgattcatcattacgctcagtctggtgaa

SEQ ID NO: 153610 - DNA, 75 bp, synthetic construct
  source 1..75: mol_type = other DNA
agcgttacgttattgcgctggtgatagtcatcgccgggctgattacgttatggagaattcttaacgcacccgtgc

SEQ ID NO: 153611 - DNA, 75 bp, synthetic construct
  source 1..75: mol_type = other DNA
tagaagaggacggcagcatcaacgatgactaccgcattgattacctgcgcgcccacattgaagagatgaaaaaag

SEQ ID NO: 153612 - DNA, 75 bp, synthetic construct
  source 1..75: mol_type = other DNA
ttacgctgttagtcgccaatgcccttgagcggctgacgctgaccgccagcgaagaacaggcgcggatggcaagcg

SEQ ID NO: 153613 - DNA, 75 bp, synthetic construct
  source 1..75: mol_type = other DNA
atctacaactggatgtctgggataacggccccggtcttccgccaggccaggagcagacgatatttgataagtttg

SEQ ID NO: 153614 - DNA, 75 bp, synthetic construct
  source 1..75: mol_type = other DNA
gtttgatctcgatgccgccctcgcccgccgtccggcgctgatcttaatggacgaactggcgcacagtaatgcgcc

SEQ ID NO: 153615 - DNA, 75 bp, synthetic construct
  source 1..75: mol_type = other DNA
ctctatccttactcctgtaacccggacgatgtgatgtttgcccaggagtcgatgcgcgaacgttacgtctttacc

SEQ ID NO: 153616 - DNA, 75 bp, synthetic construct
  source 1..75: mol_type = other DNA
tcctcaggcgggaaggaccacagtggccggtgagtgttgggtaaacggtgtgcggataacggaaaccgagtttgc

SEQ ID NO: 153617 - DNA, 75 bp, synthetic construct
  source 1..75: mol_type = other DNA
ccgtaaaggcgatattggcgcgttcgattcgccgaaatttatcggcctgccggtgggcgaagtattgaaagtagc

SEQ ID NO: 153618 - DNA, 75 bp, synthetic construct
  source 1..75: mol_type = other DNA
cggtgacttacgatggcgtggacctgatgggccacacgccgtggggctgcatcgactgtgtgtcgttcaccaccg

SEQ ID NO: 153619 - DNA, 75 bp, synthetic construct
  source 1..75: mol_type = other DNA
ctttaccgatgtgcaactgcgtggctattacccgtcctatgtattgaacgagtgggagcgtcgcggatttaacat

SEQ ID NO: 153620 - DNA, 75 bp, synthetic construct
  source 1..75: mol_type = other DNA
tatctatgtgaataaacatgacgacggtactggcgatatgtcgcgttcacgtaagaagagctttaactggtacaa

SEQ ID NO: 153621 - DNA, 75 bp, synthetic construct
  source 1..75: mol_type = other DNA
aatagcatcaatgataaaattaaaagccatcctgatgttgggccacaatcaattcatatgattgtagcaatgatt

SEQ ID NO: 153622 - DNA, 75 bp, synthetic construct
  source 1..75: mol_type = other DNA
ttgctgctggtttgctctatgattggctgggtggcagcgtggcttgccacggtacaacatttacgccactttacg

SEQ ID NO: 153623 - DNA, 75 bp, synthetic construct
  source 1..75: mol_type = other DNA
gactgggctggttgggcgtgtttcggcaatgatcggcgtgctgatggtggcggcagtgttccttgttatcggcaa

SEQ ID NO: 153624 - DNA, 75 bp, synthetic construct
  source 1..75: mol_type = other DNA
tgctggaacgcctgccgctcaacttcgcccgccgctttgttgccggggaaccgagccgcagcatcaagtccgatc

SEQ ID NO: 153625 - DNA, 75 bp, synthetic construct
  source 1..75: mol_type = other DNA
tgcccgtcgctttgttgcaggcgaatcgagccgcagtattaagtccgatcccgcgtttattgccatgcgcgaata

SEQ ID NO: 153626 - DNA, 75 bp, synthetic construct
  source 1..75: mol_type = other DNA
cgcccgccgcttcatcgcgggagaacccgtgcgcagcatcaaatccgatccgctgtttatcgaacagcgtgaata

SEQ ID NO: 153627 - DNA, 75 bp, synthetic construct
  source 1..75: mol_type = other DNA
atattcggcagtttggcgggcgtctggatcgcttccgtaaatcggtcggcggctctggcgacggcggtcgtaacg

SEQ ID NO: 153628 - DNA, 75 bp, synthetic construct
  source 1..75: mol_type = other DNA
atgttgcatcaacgcggctatgccaaaatgttcatgattttcaaagaagatgaacttatcggcgttatctctttt

SEQ ID NO: 153629 - DNA, 75 bp, synthetic construct
  source 1..75: mol_type = other DNA
cgcaagagaaactcacctggttgaatgtgaacgatgcgctttcgattgatggcaaaacggtgctgttcgcggcgt

SEQ ID NO: 153630 - DNA, 75 bp, synthetic construct
  source 1..75: mol_type = other DNA
agcagggcgtggagaaagtgaactatctttctcgtgaagacgcgctgggcgagttccgtaactggtctggttttg

SEQ ID NO: 153631 - DNA, 75 bp, synthetic construct
  source 1..75: mol_type = other DNA
atgaataagcgcgatgcaatcaatcatattcggcagtttggcgggcgtctggatcgcttccgtaaatcggtcggt

SEQ ID NO: 153632 - DNA, 75 bp, synthetic construct
  source 1..75: mol_type = other DNA
aacagggcgtggagaaagtgaactatctttctcgcgaagacgcgttgggcgagttccgtaactggtctggttttg

SEQ ID NO: 153633 - DNA, 75 bp, synthetic construct
  source 1..75: mol_type = other DNA
tcatcctgttgttgattagcagtgatttcatcgcttctgactattgctatcaggtagaaatgaccaacgctctgg

SEQ ID NO: 153634 - DNA, 75 bp, synthetic construct
  source 1..75: mol_type = other DNA
cttcagccatggctactcaagggataccttactcactaacgaaggtatggctgatcatctatgggatatgttttt

SEQ ID NO: 153635 - DNA, 75 bp, synthetic construct
  source 1..75: mol_type = other DNA
gaacctattgtattgcaactaagatacaaaactcttagtcaatttgacattccagatgtgtttatttcctcaccc

SEQ ID NO: 153636 - DNA, 75 bp, synthetic construct
  source 1..75: mol_type = other DNA
aaagaccgcgatgcctgggcgaaagatctcgccaccacctttgaaagtcaggggctggcaccgacgctggaaaac

SEQ ID NO: 153637 - DNA, 75 bp, synthetic construct
  source 1..75: mol_type = other DNA
taatcggcttgatacagattcattcacctgtgccgtgtatatcaatggcagtaaggtcggccaatgtggcatctg

SEQ ID NO: 153638 - DNA, 75 bp, synthetic construct
  source 1..75: mol_type = other DNA
agtttcagaattactggatttatcattgcaataaaatagaacgtgttattagcctatgtgatttgaacataaaga

SEQ ID NO: 153639 - DNA, 75 bp, synthetic construct
  source 1..75: mol_type = other DNA
cttcacaggccggtgatatagccagagtacttggggctgccagacgtgttgatggtgcgattgaaggtaaggact

SEQ ID NO: 153640 - DNA, 75 bp, synthetic construct
  source 1..75: mol_type = other DNA
tggcagcatttgaactggtgccaatcacttcagccatgaccgctataaatgcaaaagttcaggcgtcaagcgggg

SEQ ID NO: 153641 - DNA, 75 bp, synthetic construct
  source 1..75: mol_type = other DNA
gcatacccggcgtcggtggtttcatgggtcaatcagctttctgtcttttcagaacaactgaaaactgtcagtgca

SEQ ID NO: 153642 - DNA, 75 bp, synthetic construct
  source 1..75: mol_type = other DNA
gtcagcctggacaatgcaactggtggcaaaggggcagcatcagacggttaagatcacgttaccaccttctccgcc

SEQ ID NO: 153643 - DNA, 75 bp, synthetic construct
  source 1..75: mol_type = other DNA
ggtacagacgccgacacttgccatggtggtcagacgggatcaggagattgccggttttgtgccacgcccctggtg

SEQ ID NO: 153644 - DNA, 75 bp, synthetic construct
  source 1..75: mol_type = other DNA
tctgctggagctggccgccccggaagcgtacggggagcagttcggggttccctggcgtatggagtcgcttcccgt

SEQ ID NO: 153645 - DNA, 75 bp, synthetic construct
  source 1..75: mol_type = other DNA
acagttgccgcacggggccaccatgttcgggtatatacacagtcgtgggaaggcgattgtccggaagcatttgag

SEQ ID NO: 153646 - DNA, 75 bp, synthetic construct
  source 1..75: mol_type = other DNA
gtgcggagcaatgtgcatttcttctccggtcgcaatgatgtgtcagaattaatggcagccgctgatttattactg

SEQ ID NO: 153647 - DNA, 75 bp, synthetic construct
  source 1..75: mol_type = other DNA
atggacgaaaaacagttacaggctctggctacgaactggccaaaaacctcaaaacccctgaagacctcagtcagt

SEQ ID NO: 153648 - DNA, 75 bp, synthetic construct
  source 1..75: mol_type = other DNA
atggaaacgttattaccaaacgttaatacgtctgaaggttgttttgatattggagttctgctcagtaaccgggag

SEQ ID NO: 153649 - DNA, 75 bp, synthetic construct
  source 1..75: mol_type = other DNA
aaggtgtggatcgctcaattaaggctttggcatcgttaccggaatcattacgccacaatacgcttttgtttgtcg

SEQ ID NO: 153650 - DNA, 75 bp, synthetic construct
  source 1..75: mol_type = other DNA
atggtaaaccgacgaaactcatgatgctgacggataagcaaatcgccgatttccagaagcattaccaaactgagc

SEQ ID NO: 153651 - DNA, 75 bp, synthetic construct
  source 1..75: mol_type = other DNA
atagcatggcaagagattgaccgtcgtgccgaacggatgcacatccctgcttttctggttcataccgcgctaaaa

SEQ ID NO: 153652 - DNA, 75 bp, synthetic construct
  source 1..75: mol_type = other DNA
agccgtaatgccgcgtttcagaacgcggtcagtaaggccagcggcgtgaagctggcactggacggtgatttaatt

SEQ ID NO: 153653 - DNA, 75 bp, synthetic construct
  source 1..75: mol_type = other DNA
gtcgtgctgaacggatgcacattcctgcttttctggttcataccgcgctaaaaatcaaatcgccaaacggcaaaa

SEQ ID NO: 153654 - DNA, 75 bp, synthetic construct
  source 1..75: mol_type = other DNA
gtcgtaaagcaatgctgcaggatatcgcaaccctgaccggcggtactgtaatctctgaagagatcggtatggagc

SEQ ID NO: 153655 - DNA, 75 bp, synthetic construct
  source 1..75: mol_type = other DNA
aacaaagacaccaccactatcatcgatggcatgggtgaagaagctgcaatccagggccgtgttgctcagatccgt

SEQ ID NO: 153656 - DNA, 75 bp, synthetic construct
  source 1..75: mol_type = other DNA
atcaaatcgccaaacggcaaaagctatagcgaacggttagattcggtgcgtacagaaaagcaattgagcgcgatt

SEQ ID NO: 153657 - DNA, 75 bp, synthetic construct
  source 1..75: mol_type = other DNA
aaataccgtatcgctacctacaaagaagccagctggaagccttatatcatcgccgcgatgatcctgtcccgtaaa

SEQ ID NO: 153658 - DNA, 75 bp, synthetic construct
  source 1..75: mol_type = other DNA
ccaggttgccttgcgcaatggttttagcctggaaggttgcctgaaacaggctgagttcctgaatgatgtctatga

SEQ ID NO: 153659 - DNA, 75 bp, synthetic construct
  source 1..75: mol_type = other DNA
cgtccccctggcgggcttccatccctgacgcgataccccgggcttgcagcgaccgttccggtcgcgccgcctctg

SEQ ID NO: 153660 - DNA, 75 bp, synthetic construct
  source 1..75: mol_type = other DNA
tgggggcagccagttatcttggtgaagaaatcacgatctttccgtatatcaacgaaacaattatttccggcggca

SEQ ID NO: 153661 - DNA, 75 bp, synthetic construct
  source 1..75: mol_type = other DNA
ggaaccgttcggattcctgatccgcattattgagtggtggcagaccggagaaacaccgggcacgtttcgcctgga

SEQ ID NO: 153662 - DNA, 75 bp, synthetic construct
  source 1..75: mol_type = other DNA
cggttacaagcagggtgtgctgccgcagcgtccggctttagtgaacctgcaatgcgatattgaccacccgactca

SEQ ID NO: 153663 - DNA, 75 bp, synthetic construct
  source 1..75: mol_type = other DNA
actgctccggcacatccatatacccgattattgctggattccctccccgccattgataaaccgctggaggaagaa

SEQ ID NO: 153664 - DNA, 75 bp, synthetic construct
  source 1..75: mol_type = other DNA
ggtggtcttgacggcggtaacatggccgggacagaagcgttcggctggattggcggcaacgagatcgagatggaa

SEQ ID NO: 153665 - DNA, 75 bp, synthetic construct
  source 1..75: mol_type = other DNA
tctgggtattaatgggatttatttttgtcctatttttacctcagcttccaaccataaatatgacaccatcgatca

SEQ ID NO: 153666 - DNA, 75 bp, synthetic construct
  source 1..75: mol_type = other DNA
tttcatgcctgtcatttgtctgttactgatgatgttgttgttgttgttcctgctactgttcttctttttcctgct

SEQ ID NO: 153667 - DNA, 75 bp, synthetic construct
  source 1..75: mol_type = other DNA
acaaatcacgccagcagaagacgttgctggcgtcttctgcattcccggggagctgtcgcgcggcatgtttgctta

SEQ ID NO: 153668 - DNA, 75 bp, synthetic construct
  source 1..75: mol_type = other DNA
ccgccacatgatcggcatgtccatcaatctgcagaccagcggcccgcattgggtgggagccgccagctatcttgg

SEQ ID NO: 153669 - DNA, 75 bp, synthetic construct
  source 1..75: mol_type = other DNA
gttaaatcagagcagtcaccgcgggtggtactctgggaaatcgacctgacggtacagggtggtgagcggtatttt

SEQ ID NO: 153670 - DNA, 75 bp, synthetic construct
  source 1..75: mol_type = other DNA
agcggtattttttctgtaatgagctgaatgaaaaaggggagccggtgacctggcaggggcggaagtaccaggcat

SEQ ID NO: 153671 - DNA, 75 bp, synthetic construct
  source 1..75: mol_type = other DNA
ccttatcgcctgtggcctgttgtgggaggaagaatccgccccgcccgtacaacaggaaacacacaacgccggctg

SEQ ID NO: 153672 - DNA, 75 bp, synthetic construct
  source 1..75: mol_type = other DNA
cacgttgccaaccaccacatcgcgccaggtaaaaacagtggagctggggacacagtgaattcggccaggcgtggg

SEQ ID NO: 153673 - DNA, 75 bp, synthetic construct
  source 1..75: mol_type = other DNA
taactggccgcaacatcatcgcccgaccacctttatgcccgttgatttcaccctcgaagcccatgaagacggtgc

SEQ ID NO: 153674 - DNA, 75 bp, synthetic construct
  source 1..75: mol_type = other DNA
tttaacggttttcaccggaagccctcgcgccagctttcacttttttcagaaacgcatttttttcccacgacacag

SEQ ID NO: 153675 - DNA, 75 bp, synthetic construct
  source 1..75: mol_type = other DNA
aacgaaacaattatttccggcggcaccgcgcatgaaggcggggcagtccacgttattgacacagtgagagtgaat

SEQ ID NO: 153676 - DNA, 75 bp, synthetic construct
  source 1..75: mol_type = other DNA
caacaccactggagcgccgactggcacaaacctgcagcgggatttctgatttgcaggtgccgctacgtgacttgt

SEQ ID NO: 153677 - DNA, 75 bp, synthetic construct
  source 1..75: mol_type = other DNA
caacaccactggagcgccgactggcgcaaacctgcagcgggatttctgatttgcaggtgccgctgcgtgacttgt

SEQ ID NO: 153678 - DNA, 75 bp, synthetic construct
  source 1..75: mol_type = other DNA
tggttggcgtgtggttcgagtcgctgcaaaaactggtgccgtactggcaggtcaccggtagctggattggcgtta

SEQ ID NO: 153679 - DNA, 75 bp, synthetic construct
  source 1..75: mol_type = other DNA
cgtctggttcgacattaacaccaaaatgagcgaagaactgcgcaccttcggcgcgaatttttacatcgggccggg

SEQ ID NO: 153680 - DNA, 75 bp, synthetic construct
  source 1..75: mol_type = other DNA
gcagcaggcccaggggccgaagtaaagacgcaaaataataggacctaccaggcagaaaacaagactgagctcgcg

SEQ ID NO: 153681 - DNA, 75 bp, synthetic construct
  source 1..75: mol_type = other DNA
cgaaaatcgtcatgaggttgcatcaaaaatacttaatgttataagtactaatggagagactttatcaatcagtga

SEQ ID NO: 153682 - DNA, 75 bp, synthetic construct
  source 1..75: mol_type = other DNA
atggtggaagcggaccatattctggctgctattgaagcgcgtttcctgcaaaccggacacccgcgcgatctgaca

SEQ ID NO: 153683 - DNA, 75 bp, synthetic construct
  source 1..75: mol_type = other DNA
actttacctggtcgcccaaaatgcaggcgctggtaaaaaataacacgattgaagcctactgctttcctggtggcg

SEQ ID NO: 153684 - DNA, 75 bp, synthetic construct
  source 1..75: mol_type = other DNA
atgctgtgtctgaaatatccggagccggaagaggttttacaggggcatcctgccggaagtgtgtttgtgctgccg

SEQ ID NO: 153685 - DNA, 75 bp, synthetic construct
  source 1..75: mol_type = other DNA
taaagaaacacctccagacctgaaagatgcacagttggtgggggctattatagttcccgggatggagcttagagg

SEQ ID NO: 153686 - DNA, 75 bp, synthetic construct
  source 1..75: mol_type = other DNA
ttttgcatcagtaaatttttctgattccagatttgatgatgctgatcttagtggctgtaacctgtcaggtgcatc

SEQ ID NO: 153687 - DNA, 75 bp, synthetic construct
  source 1..75: mol_type = other DNA
ctaatacatcaactaactggatgtcctttttttatataaggatggagaagttcaaaatacatttgggtattcatt

SEQ ID NO: 153688 - DNA, 75 bp, synthetic construct
  source 1..75: mol_type = other DNA
ttcaataatgatgtatatggagaatggtagtttattgcaggcagggatgtattttgagcgacatccaggtgcgat

SEQ ID NO: 153689 - DNA, 75 bp, synthetic construct
  source 1..75: mol_type = other DNA
ttgattgaagaaattaaaaagcgacatcttgcaacaatgaacaccgatctcagtttcgatgcactatctgcaggt

SEQ ID NO: 153690 - DNA, 75 bp, synthetic construct
  source 1..75: mol_type = other DNA
ttttgtaagtactcgtcatctgatatatttggaacggagcatgagtctcctgagatcctgcgtcgttatgcaaat

SEQ ID NO: 153691 - DNA, 75 bp, synthetic construct
  source 1..75: mol_type = other DNA
aacgggggaagagtctgctgaacaattaaattactctggatgtgacttgtcaggtctaagtcttgcagggctgaa

SEQ ID NO: 153692 - DNA, 75 bp, synthetic construct
  source 1..75: mol_type = other DNA
tgaaacatatagatggttcctttcctgagacgctcaggaattccgtatatttaaatggatgtaattcattaaatg

SEQ ID NO: 153693 - DNA, 75 bp, synthetic construct
  source 1..75: mol_type = other DNA
atgagagaaatatcagataacatgcttgattccgtgaaaggagggatgaatcttaatggattacctgcttctact

SEQ ID NO: 153694 - DNA, 75 bp, synthetic construct
  source 1..75: mol_type = other DNA
catctgtttttagtcaaagaagattcttcacgtttcccctatgaagatcggttgaatctggtagtaaaaggcacc

SEQ ID NO: 153695 - DNA, 75 bp, synthetic construct
  source 1..75: mol_type = other DNA
gctggatctggtgttaaaaggcaccgccgatattccacacctgactgtgcatcgcggctccgaatacatcatctc

SEQ ID NO: 153696 - DNA, 75 bp, synthetic construct
  source 1..75: mol_type = other DNA
gggcaaaatttcctctggtttactacctgttaataccgtgttgatgtcatcacgtgcacctgtgggatacctggc

SEQ ID NO: 153697 - DNA, 75 bp, synthetic construct
  source 1..75: mol_type = other DNA
atgagagaaatatcatatcacatgcttgatttcgtgaaaggagggatgaatcttaatggattacctggttctact

SEQ ID NO: 153698 - DNA, 75 bp, synthetic construct
  source 1..75: mol_type = other DNA
atatgggaacatatattgatgctaatggagcatgctgggctccggatactccatccatcatcatgtatccggggg

SEQ ID NO: 153699 - DNA, 75 bp, synthetic construct
  source 1..75: mol_type = other DNA
gccattacgtgcggctattgttaaagaaaactggctgcttgatgaccgtctggcagtcggcggcgcatcgatggg

SEQ ID NO: 153700 - DNA, 75 bp, synthetic construct
  source 1..75: mol_type = other DNA
gcgcagactggtttgcgggtgattatgccggatgcgcccgatcacggtagccgttttagtggcgacgcaccgcga

SEQ ID NO: 153701 - DNA, 75 bp, synthetic construct
  source 1..75: mol_type = other DNA
ttggagtgtatatggtggtggtattgagaaaaacagcacaatcaagattacccttgatcaggcagcttccggtga

SEQ ID NO: 153702 - DNA, 75 bp, synthetic construct
  source 1..75: mol_type = other DNA
gggctttgagcatatcgactatgcgcttggctgcacgggtcatgtcgattgtgaagtgcgaatgctacgcaaact

SEQ ID NO: 153703 - DNA, 75 bp, synthetic construct
  source 1..75: mol_type = other DNA
aggttttcaacatatcgactatgcacttggctgcacgggccatgttgattgtgaagtgcggatgttgcgcgaact

SEQ ID NO: 153704 - DNA, 75 bp, synthetic construct
  source 1..75: mol_type = other DNA
ggttattggtgctcgtcagacagggtggacagcggctacaggtacggatcttcgcggctcattcaacgctaacca

SEQ ID NO: 153705 - DNA, 75 bp, synthetic construct
  source 1..75: mol_type = other DNA
atgatattaacatatataccaatattatttttaaggaattaaatccactggcaatggcccatcctttaaagtcat

SEQ ID NO: 153706 - DNA, 75 bp, synthetic construct
  source 1..75: mol_type = other DNA
caaaactgcaaataaaaagtggtagaattgaaccagaatacacaacagatattagcgttgctgaccgatttagcc

SEQ ID NO: 153707 - DNA, 75 bp, synthetic construct
  source 1..75: mol_type = other DNA
aacaacactcatatcagccgttatccaatgagatgcccaacaaaataaaatacaataatagagagttagaattaa

SEQ ID NO: 153708 - DNA, 75 bp, synthetic construct
  source 1..75: mol_type = other DNA
caaaaacaatacacttttgataaagtagcaagaaatgaaaaaaaatacaacttaaatatttacgacattttcttt

SEQ ID NO: 153709 - DNA, 75 bp, synthetic construct
  source 1..75: mol_type = other DNA
cgaaagtggctggattatccccaaaaacgctcctgtcgagccagtaggattaattgaccggacatttggtcaatc

SEQ ID NO: 153710 - DNA, 75 bp, synthetic construct
  source 1..75: mol_type = other DNA
gttcggctgtacctttgttgatctgacggtcgatattgcgctgtgcaaagtcaccatcaaccgcatcctcaacgt

SEQ ID NO: 153711 - DNA, 75 bp, synthetic construct
  source 1..75: mol_type = other DNA
aacaggtaatatcaaagggaaaggctcttcagaaagagttttttaaaagttttataaataataaagaaacagaat

SEQ ID NO: 153712 - DNA, 75 bp, synthetic construct
  source 1..75: mol_type = other DNA
atgccaacaatatctaatatccattcatataatccaatatactcatcgaaaacgaaagctccgcaaacatgggat

SEQ ID NO: 153713 - DNA, 75 bp, synthetic construct
  source 1..75: mol_type = other DNA
tcaagaaagctaccgccctacttcttgagatggatgatattacagagttgaaaacacaggtgaaggaactgaacc

SEQ ID NO: 153714 - DNA, 75 bp, synthetic construct
  source 1..75: mol_type = other DNA
taatatcgaacaggtaatatcaaagggaaaagctcttcagaaagatttttttgatagttatatagaaaataaaga

SEQ ID NO: 153715 - DNA, 75 bp, synthetic construct
  source 1..75: mol_type = other DNA
tcatgcacgcagagaacatgaatatagaatatatgaagcgcttgcacgagatataattgtgcaccctcaacctta

SEQ ID NO: 153716 - DNA, 75 bp, synthetic construct
  source 1..75: mol_type = other DNA
gcgatagatcttttcttggcccaaaaaatagaggagcatttaataagaaaaatatttcctttttacccctcgata

SEQ ID NO: 153717 - DNA, 75 bp, synthetic construct
  source 1..75: mol_type = other DNA
gtatcctccgggcgatatgagagataaccctgcatttaaaaatatgaatgatggtgcatttttacaggctggaat

SEQ ID NO: 153718 - DNA, 75 bp, synthetic construct
  source 1..75: mol_type = other DNA
gatgtctcacttaagcaaatgtttatagatgctctggaatctgataaatcagaagtaaaaatggttgctgatact

SEQ ID NO: 153719 - DNA, 75 bp, synthetic construct
  source 1..75: mol_type = other DNA
tcagattagtgaaataacagaatctagctggatgtcatcggaagaacaacatacaaaacaaattcaggctctcga

SEQ ID NO: 153720 - DNA, 75 bp, synthetic construct
  source 1..75: mol_type = other DNA
tctgcggctggagcggctcagtttcttgatcaattacttcctaaaacagctggtgtatcttctccagagcaagtt

SEQ ID NO: 153721 - DNA, 75 bp, synthetic construct
  source 1..75: mol_type = other DNA
ctttcgctgatttggcaaacagcacaatcagcgcagcgtttgatagcgctaattttagtggtgccaatcttaaca

SEQ ID NO: 153722 - DNA, 75 bp, synthetic construct
  source 1..75: mol_type = other DNA
ggtatcttatagtagttcatttatacaaatcgtaatgaatggttcacagcgtgatggaatgcaggaacgatttag

SEQ ID NO: 153723 - DNA, 75 bp, synthetic construct
  source 1..75: mol_type = other DNA
tcaaacattaatgaaaaaataatagattctatatcaaaaaaaataattcacaacaacgatttttcaccaaattta

SEQ ID NO: 153724 - DNA, 75 bp, synthetic construct
  source 1..75: mol_type = other DNA
acacaaactattcgatagcgaaacatcagagatattaacagataatatcgaacaggtaatatcaaagggaaaggc

SEQ ID NO: 153725 - DNA, 75 bp, synthetic construct
  source 1..75: mol_type = other DNA
acaacataagcgaattgctcattgctgttgatgaaaaaggaaatctcatcgccccacaaaaagaaacatcagaga

SEQ ID NO: 153726 - DNA, 75 bp, synthetic construct
  source 1..75: mol_type = other DNA
ttaccagaaactgatataaataaatgtcaaatacatattgcaaatacttatgcatataataaaaaagaagataac

SEQ ID NO: 153727 - DNA, 75 bp, synthetic construct
  source 1..75: mol_type = other DNA
tatccccagaatgatatcatagaagacaatgtaagtagaatattacagcaccaatattcgcatagtccaacactc

SEQ ID NO: 153728 - DNA, 75 bp, synthetic construct
  source 1..75: mol_type = other DNA
aatgaaattagctgtagaaaaacaattatcatgggcggaaacacactataaagcacaaagtcatattgagaatca

SEQ ID NO: 153729 - DNA, 75 bp, synthetic construct
  source 1..75: mol_type = other DNA
atgcaggatgtcacccccgatgcatggccaacctggccagtaaaactgggctggctgacgccgcgcggcggcgag

SEQ ID NO: 153730 - DNA, 75 bp, synthetic construct
  source 1..75: mol_type = other DNA
taacagccagtggattcaggtttcgctggtcttccagactttacagcagatgcgtgataaaactccgctgtcatt

SEQ ID NO: 153731 - DNA, 75 bp, synthetic construct
  source 1..75: mol_type = other DNA
ccccgccgggtggtgaactggtatttgaacgctggcggcggctaagtgataacagtcaatggattcaggtttcgc

SEQ ID NO: 153732 - DNA, 75 bp, synthetic construct
  source 1..75: mol_type = other DNA
ggataaagtgaacgtgactgaggcgattctcagcagggcaggcggctctctcgttgattttaccgatcatcggca

SEQ ID NO: 153733 - DNA, 75 bp, synthetic construct
  source 1..75: mol_type = other DNA
actacctgcatacgctcagagtgagccggaactgaaattggagagagtggtgattgtcagccgtcatggcgtgcg

SEQ ID NO: 153734 - DNA, 75 bp, synthetic construct
  source 1..75: mol_type = other DNA
aaacggcgtttcgcgaactggaacgggtgcttaatttcccgcaatcaaacttgtgccttaatcgtgagaaacagg

SEQ ID NO: 153735 - DNA, 75 bp, synthetic construct
  source 1..75: mol_type = other DNA
aatccggcgaagatcgccagccgtaaagcgtctcagaatgctatcgaagcgttcggtccgctgttgccggaattc

SEQ ID NO: 153736 - DNA, 75 bp, synthetic construct
  source 1..75: mol_type = other DNA
tggaagaactgaaaaacttccgtcagctgcactctaaaactccgggccacccggaagtaggttacaccgctggtg

SEQ ID NO: 153737 - DNA, 75 bp, synthetic construct
  source 1..75: mol_type = other DNA
cgtctgacttcgacgctaaagcgaaagagttcatcgctaaactgcaggctaatccggcgaaaatcgccagccgta

SEQ ID NO: 153738 - DNA, 75 bp, synthetic construct
  source 1..75: mol_type = other DNA
ataaagcccgtctgtcgcttgatacgccgccaggggaagtgaagttgacgttggccgagtgtgaagaaagaaacg

SEQ ID NO: 153739 - DNA, 75 bp, synthetic construct
  source 1..75: mol_type = other DNA
cttgctgagtctgcataatgcgcagttttatctgctgcaacgtaccccagaagtggcccgtagccgtgccacgcc

SEQ ID NO: 153740 - DNA, 75 bp, synthetic construct
  source 1..75: mol_type = other DNA
gtgtggtgattgtcagtcgtcatggtgtgcgtgccccaaccaaggccacgcaactgatgcaggatgtcaccccag

SEQ ID NO: 153741 - DNA, 75 bp, synthetic construct
  source 1..75: mol_type = other DNA
caatactgaacaggcaagcagtgttattgagaaactgaagaagtggcagcacagagctgcgggagtaaaacatga

SEQ ID NO: 153742 - DNA, 75 bp, synthetic construct
  source 1..75: mol_type = other DNA
ctatgatttttgcttctggctcagtaatggcagctgatggtggccaaatcgactttaacggtcttgtacaatctg

SEQ ID NO: 153743 - DNA, 75 bp, synthetic construct
  source 1..75: mol_type = other DNA
cctgtttaacgcgtcttacgtaaaagcacctaacagctctgctgtaactgctggtcacgttacgactaacgcaat

SEQ ID NO: 153744 - DNA, 75 bp, synthetic construct
  source 1..75: mol_type = other DNA
tcgtactgaacatttctttgttccatcgacggaaaagactttccaccgtggtagcacagattattttgttaatgc

SEQ ID NO: 153745 - DNA, 75 bp, synthetic construct
  source 1..75: mol_type = other DNA
cgctgattgttcaggatatggggattctggaacttgatattccgccgattgaactgcacgccagtacgcagtgcg

SEQ ID NO: 153746 - DNA, 75 bp, synthetic construct
  source 1..75: mol_type = other DNA
ttaaacctgccagaaaagccagctccggtttaccgctggatgaccatccgcagtccaggaaaattcgtgcgctat

SEQ ID NO: 153747 - DNA, 75 bp, synthetic construct
  source 1..75: mol_type = other DNA
cccgtctgacctggctgaaaaatgcggctgagcaacaggctgaacgcgatctgcggatgctgaccagccgcctgg

SEQ ID NO: 153748 - DNA, 75 bp, synthetic construct
  source 1..75: mol_type = other DNA
tcaggatgcgaaatggcgtacatctcaggcgcgccgcccttttcttttggcaaatacacgtaatttagaccgtga

SEQ ID NO: 153749 - DNA, 75 bp, synthetic construct
  source 1..75: mol_type = other DNA
acggtagagaatgttaacactgccgttaaacaatatctttctcatccggtaaatacttataccggagtattattg

SEQ ID NO: 153750 - DNA, 75 bp, synthetic construct
  source 1..75: mol_type = other DNA
cgaagcttctttaaccatgagttccattagctttgcaaataccagcggtactctgaacaacaatatgaacgtcac

SEQ ID NO: 153751 - DNA, 75 bp, synthetic construct
  source 1..75: mol_type = other DNA
gcaagctacgcgaacaccagcggtaccctgaataacaatatgaacatcactgttaacggtattgcaccggctcag

SEQ ID NO: 153752 - DNA, 75 bp, synthetic construct
  source 1..75: mol_type = other DNA
taaacaggtacacatgaacaactctgcagaaaaacatctgctgactttggatgctaatggcgacggtcaatatgt

SEQ ID NO: 153753 - DNA, 75 bp, synthetic construct
  source 1..75: mol_type = other DNA
ggctaccggtctgaccatggagttccagttcgggactaactggtcttactattcccattatgtaggggatatctt

SEQ ID NO: 153754 - DNA, 75 bp, synthetic construct
  source 1..75: mol_type = other DNA
cagcatcagtttctgcatggcttattgccgcagcagatattccggcacaattaactgaactgctggcgccggtta

SEQ ID NO: 153755 - DNA, 75 bp, synthetic construct
  source 1..75: mol_type = other DNA
ggatgcggcgtatcgtgaagcggtgttgccgcaggcggtttctgcgcgtattgccgtggaagcggggatcgcgga

SEQ ID NO: 153756 - DNA, 75 bp, synthetic construct
  source 1..75: mol_type = other DNA
gctttccagccaattgacccgcattttacgcacccacgcagcaatgagcgtacttgggcatggtttgctgcgcgg

SEQ ID NO: 153757 - DNA, 75 bp, synthetic construct
  source 1..75: mol_type = other DNA
agcaggaatttctgcaagcggtcgatgcaagggttaatgagctggaagaactgctgccattactgatgaaagaca

SEQ ID NO: 153758 - DNA, 75 bp, synthetic construct
  source 1..75: mol_type = other DNA
tacatacccaggcagatacgtccagtcccgatccgttatttaatcctctaaaaactggcgtttgccaactggata

SEQ ID NO: 153759 - DNA, 75 bp, synthetic construct
  source 1..75: mol_type = other DNA
taaagtagataattcgccatttcgtgctacttaccatagttatttaaatactgccaaaatatttatatttggttc

SEQ ID NO: 153760 - DNA, 75 bp, synthetic construct
  source 1..75: mol_type = other DNA
ctgttgacgcagtaccaggatgcccgtgcgcagaagcagaatacagatgcgctggaaaaacaaattaatgagcga

SEQ ID NO: 153761 - DNA, 75 bp, synthetic construct
  source 1..75: mol_type = other DNA
actgcatatgcaaaaaaaatatcgctaccaggagatattttattttgtgttcgtggttcaacaaccggcaggatg

SEQ ID NO: 153762 - DNA, 75 bp, synthetic construct
  source 1..75: mol_type = other DNA
cagctgatccttatctcgaccggctcggaggtggagctggcggtagccgcatggcagcaactgacggctgaaggt

SEQ ID NO: 153763 - DNA, 75 bp, synthetic construct
  source 1..75: mol_type = other DNA
ccacaacggaccgacggcactgattctctccaggcagaatctggcccaggtggaacgtacgccggatcaggttaa

SEQ ID NO: 153764 - DNA, 75 bp, synthetic construct
  source 1..75: mol_type = other DNA
ttgatattaacgcttggcattgtggggattggactcagtgatgtgatcatatgggcacgcagcattccaattatc

SEQ ID NO: 153765 - DNA, 75 bp, synthetic construct
  source 1..75: mol_type = other DNA
aagcatcacgacgagctgcatgcggataatgtggcattcgaagagaagtatggctcccagctggagctgatattt

SEQ ID NO: 153766 - DNA, 75 bp, synthetic construct
  source 1..75: mol_type = other DNA
gtgctggcactgtgacaaccagctgcgcgaccagacatcagaatcactcgagcaacttgctcaacaaaacctgtc

SEQ ID NO: 153767 - DNA, 75 bp, synthetic construct
  source 1..75: mol_type = other DNA
atattgctatgaagtcaaaattattaaaaattctcaataaaaaacctgagggcgcagttgataatacgggagcgt

SEQ ID NO: 153768 - DNA, 75 bp, synthetic construct
  source 1..75: mol_type = other DNA
taaccccgaacatgtctacatggcgtccgtgtgaccaggttgaatccgcggtcgcgtggaaaaacggtgttgagc

SEQ ID NO: 153769 - DNA, 75 bp, synthetic construct
  source 1..75: mol_type = other DNA
tcgaaatcccgtctgaaatctatgcgcagtgggatgcgaaagaagcaggccaggcgaaagaagctgcctggaatg

SEQ ID NO: 153770 - DNA, 75 bp, synthetic construct
  source 1..75: mol_type = other DNA
ttggctgacaccgcgcggtggtgagctaatcgcttatctcggacattaccaacgccagcgtctggtggccgacgg

SEQ ID NO: 153771 - DNA, 75 bp, synthetic construct
  source 1..75: mol_type = other DNA
gttatcgagaaaaatcgccgcattttgccgatgggctactggaaaggttctggcatgtcgattgtgctggatatg

SEQ ID NO: 153772 - DNA, 75 bp, synthetic construct
  source 1..75: mol_type = other DNA
gcatcggttgctgaagtcacccaggacaacagcgacgagtacggcatttcacaaatctttattgccattgaagtg

SEQ ID NO: 153773 - DNA, 75 bp, synthetic construct
  source 1..75: mol_type = other DNA
aagcagcctttaatcgggtcttaatttcacgcggcgttgacagcgaaacggctgacgcctgtgcagagatgttcg

SEQ ID NO: 153774 - DNA, 75 bp, synthetic construct
  source 1..75: mol_type = other DNA
tgttggatctatttcctttaatgaaaatagattgtgttcttttgctattgatgaaatttattatatttcgttatc

SEQ ID NO: 153775 - DNA, 75 bp, synthetic construct
  source 1..75: mol_type = other DNA
gatgcgcggaggcagctacggctggcaggcagcggaaaaaggctatatcggcatctgctggaccaactctatcgc

SEQ ID NO: 153776 - DNA, 75 bp, synthetic construct
  source 1..75: mol_type = other DNA
tcatggattacatcaccaccgctgaacgcgccgatgaaaaccaggccatccgcttacccggccatgaatttacca

SEQ ID NO: 153777 - DNA, 75 bp, synthetic construct
  source 1..75: mol_type = other DNA
ttgattagccatcttatcggtgtttttccctggataagatggctgaatggaatgatcacgttccggtataacggt

SEQ ID NO: 153778 - DNA, 75 bp, synthetic construct
  source 1..75: mol_type = other DNA
ttgcaaataacaaaacatgtaccaaaattaacaacatataaattattcataacaaaacattatgcctatccactc

SEQ ID NO: 153779 - DNA, 75 bp, synthetic construct
  source 1..75: mol_type = other DNA
tcgaaaggcagagaactgggccgctacggcgaccaggacatgattgagtatatcgacgttggtgcgacgtatttc

SEQ ID NO: 153780 - DNA, 75 bp, synthetic construct
  source 1..75: mol_type = other DNA
atatgatccgcgatctcgatcaggagtgtggttcaacctgcgcggcggatttccgcgatcgcttaggcgtaggcc

SEQ ID NO: 153781 - DNA, 75 bp, synthetic construct
  source 1..75: mol_type = other DNA
atgactcattctgaagaattgtccgtaaccccattacataaaaaaatttaccggggggtgattgtgacgggcgtg

SEQ ID NO: 153782 - DNA, 75 bp, synthetic construct
  source 1..75: mol_type = other DNA
gtgctttagccgatataggcagcgctaagggcaatccgtgggtacaggatattaaccaccgcgttactttgtggt

SEQ ID NO: 153783 - DNA, 75 bp, synthetic construct
  source 1..75: mol_type = other DNA
atgagcgacaccgacttacgcgagctcaggctgacgctcaggaattaaaaaatgcaaaagagtccgctgaagtgg

SEQ ID NO: 153784 - DNA, 75 bp, synthetic construct
  source 1..75: mol_type = other DNA
tgttgccggtacgattacgctcggcctgatgacgcaaattaccaacgttttcggccaggtgcgcggtgctttcca

SEQ ID NO: 153785 - DNA, 75 bp, synthetic construct
  source 1..75: mol_type = other DNA
ggggattgcgctgatcgcggtggtgatcagtgtgctgaacaacttctttgtcagtcactacgtgttccgctggcg

SEQ ID NO: 153786 - DNA, 75 bp, synthetic construct
  source 1..75: mol_type = other DNA
ttattaacgctatcatgacgttaatcgctttcttaccggtactggtgacgctctccgcacatgtaccggaattgc

SEQ ID NO: 153787 - DNA, 75 bp, synthetic construct
  source 1..75: mol_type = other DNA
cacacgcgcccccgccagcgtgtggtgatgcttaccccgccgcgtcgcggtaaacgtaagccggaatatctgcaa

SEQ ID NO: 153788 - DNA, 75 bp, synthetic construct
  source 1..75: mol_type = other DNA
gtgctgcgcgatatctcggcccgcaacacgctggcgggggcgcgtgtggtgatgcttaacccgccgcgtcgcggt

SEQ ID NO: 153789 - DNA, 75 bp, synthetic construct
  source 1..75: mol_type = other DNA
tgcgacgacttgagtcagcaggtgcagagattagtcgagcaggtggaccacttgagtcggttatttatcacgaac

SEQ ID NO: 153790 - DNA, 75 bp, synthetic construct
  source 1..75: mol_type = other DNA
gcccgcctttcctgttacagcggtctggcctatgtgctgttgctctcctgcggccagattgccggagccgttgcc

SEQ ID NO: 153791 - DNA, 75 bp, synthetic construct
  source 1..75: mol_type = other DNA
tttctggaaaagcaggggatcgctgtgcgggcctatggcggcgcgttgatctgcgatagcacgacgccgtcagtc

SEQ ID NO: 153792 - DNA, 75 bp, synthetic construct
  source 1..75: mol_type = other DNA
cgttcttcttcccgacgctgcaatggctgacgcaaaccttcggtacgccgcagatgggacgcattttgcacccgt

SEQ ID NO: 153793 - DNA, 75 bp, synthetic construct
  source 1..75: mol_type = other DNA
cctgcgcgaactggcactgcgccgtactgccgatcgcgttgatgagcaaatgcgcgcctggcgggggcatcctgg

SEQ ID NO: 153794 - DNA, 75 bp, synthetic construct
  source 1..75: mol_type = other DNA
ttatattcataatgaggataaaccttccttaggttttggtccaatatccaataattggttaagccaatcctttac

SEQ ID NO: 153795 - DNA, 75 bp, synthetic construct
  source 1..75: mol_type = other DNA
cgttggtcagtcatattcagcacatcaataaactcaagaccacgttcgagcatatcgtcacggttgagtcagaac

SEQ ID NO: 153796 - DNA, 75 bp, synthetic construct
  source 1..75: mol_type = other DNA
cgctggtaagtcatatccagcgcatcaatcaacttaaaaccactttcgagcatatcgtcacggttgagtcagaac

SEQ ID NO: 153797 - DNA, 75 bp, synthetic construct
  source 1..75: mol_type = other DNA
gtacagcacgcctgcccgacaccgcttatcgcgttgattaatatcaataatggcgctggcataccggatattggc

SEQ ID NO: 153798 - DNA, 75 bp, synthetic construct
  source 1..75: mol_type = other DNA
tttcgctgatgaagtgtacgctttatgatgccggatttgcttacggcagattattactgtggcgtgcggatggtc

SEQ ID NO: 153799 - DNA, 75 bp, synthetic construct
  source 1..75: mol_type = other DNA
atgacgttatttaacctgatttatggcattgcccgtgggctgttctttgtggccgatcacgtctgtcgctattcc

SEQ ID NO: 153800 - DNA, 75 bp, synthetic construct
  source 1..75: mol_type = other DNA
atgcctgaaattcagtatttatctacctttcccgctatattaactctctcaaggtcaaccgatatcaacgtactt

SEQ ID NO: 153801 - DNA, 75 bp, synthetic construct
  source 1..75: mol_type = other DNA
tcaactttgttcgccgttttcttctgcggttagtcgttgtcctcgctgtgttctggagcgggggcattgtactgt

SEQ ID NO: 153802 - DNA, 75 bp, synthetic construct
  source 1..75: mol_type = other DNA
aagatcagaaatttcctgagcactggggctttgatgtcgcttccattgagaaagccctggcgcacaacgagcgca

SEQ ID NO: 153803 - DNA, 75 bp, synthetic construct
  source 1..75: mol_type = other DNA
gcacgtaaacttaatgccttaaccatgccgcacccggaccgacgcccggacaaaaaagagcgccgcgacctgtta

SEQ ID NO: 153804 - DNA, 75 bp, synthetic construct
  source 1..75: mol_type = other DNA
gcaaatactcgctcaccgatgcgcagatgcagcagtacgaagaagagcaactggcgctcgccgcacgctggtcgc

SEQ ID NO: 153805 - DNA, 75 bp, synthetic construct
  source 1..75: mol_type = other DNA
actaccccgccagcctgctggatgcggcgttccgcgtcgccgatgacgagagcaaccgctttacgctaccgcagg

SEQ ID NO: 153806 - DNA, 75 bp, synthetic construct
  source 1..75: mol_type = other DNA
acgcccacgttgctgaatctcaccagcttggcagcgtgatcgccgaatttcccaccacgttcgaagcggcggaag

SEQ ID NO: 153807 - DNA, 75 bp, synthetic construct
  source 1..75: mol_type = other DNA
cattacccgcaccatgttctggcgcggatgttcggagcgccacggtactgataaaaccgagtttttgtggcaaag

SEQ ID NO: 153808 - DNA, 75 bp, synthetic construct
  source 1..75: mol_type = other DNA
tggcaacactggcctggacgttgggttttgaataccaccacggcttgctggagaaaatgtggaaagagatcttaa

SEQ ID NO: 153809 - DNA, 75 bp, synthetic construct
  source 1..75: mol_type = other DNA
ccgctcttttcaccaccgctgatctatacggacctgacgctgacaacacatcaacaggagcagatccgcaaaatg

SEQ ID NO: 153810 - DNA, 75 bp, synthetic construct
  source 1..75: mol_type = other DNA
gtttcgctgatcattgccggtttgctgcttttattaccgggctttttcaccgatttcctcggtcttcttcttcta

SEQ ID NO: 153811 - DNA, 75 bp, synthetic construct
  source 1..75: mol_type = other DNA
gatcttgtgctttgcgatgtgcgaatggcagagatggatggtatcgccacgctaaaagagatcaaaacattaaac

SEQ ID NO: 153812 - DNA, 75 bp, synthetic construct
  source 1..75: mol_type = other DNA
aagacaagatcatcattgtgactggcggcctggggcaactgggcgctcagtacgtgaaaacgctgcacgagcgcg

SEQ ID NO: 153813 - DNA, 75 bp, synthetic construct
  source 1..75: mol_type = other DNA
tcaatgtcgcaaataaggacaccttcccggtaatgaccttctttagctctgcgctgatcaacttcgccgtacctt

SEQ ID NO: 153814 - DNA, 75 bp, synthetic construct
  source 1..75: mol_type = other DNA
cccggtaatgaccttttttagttctgcactgattaacttcgccgttccgtctggcggcggtcactgggttattca

SEQ ID NO: 153815 - DNA, 75 bp, synthetic construct
  source 1..75: mol_type = other DNA
aaccattttgtgctggcaaatcagtggctggaacaacgtggcgaaaaaccgattgactggatgccagtgttatcg

SEQ ID NO: 153816 - DNA, 75 bp, synthetic construct
  source 1..75: mol_type = other DNA
ttatcaacgccatcatgacgttgatcgcctttctgccggtgctggtaacgctctccgcgcatgtgccggagctgc

SEQ ID NO: 153817 - DNA, 75 bp, synthetic construct
  source 1..75: mol_type = other DNA
cgtaggactttttgcattgttctggtttatctacagcccgcatcgttggcaatactggtcaatactcggtactgc

SEQ ID NO: 153818 - DNA, 75 bp, synthetic construct
  source 1..75: mol_type = other DNA
tgaacgcattagagcaactgcaacaggactatatgcagcggctgagcgaatgggagagcgccttcgtggaattgc

SEQ ID NO: 153819 - DNA, 75 bp, synthetic construct
  source 1..75: mol_type = other DNA
atgattatcaataacgtcaaactggtgctggaaaacgaggtggtacacggttctctggagatgcaggacggcgaa

SEQ ID NO: 153820 - DNA, 75 bp, synthetic construct
  source 1..75: mol_type = other DNA
ctcgccagccacgatgacgccacgcacgcgcacgttgccgaatcccaccagcttggcagcgtaatcgccgaattt

SEQ ID NO: 153821 - DNA, 75 bp, synthetic construct
  source 1..75: mol_type = other DNA
gatgcagcagtacgaagaggaacagctggcgcttgccgcacgctggtcgcagccgaatcgcgaatccatcgccgc

SEQ ID NO: 153822 - DNA, 75 bp, synthetic construct
  source 1..75: mol_type = other DNA
tggtgtttttgttgtggggctcacatgcgcaaaagaaaggggcgattattgataaacaacgccatcacgtactga

SEQ ID NO: 153823 - DNA, 75 bp, synthetic construct
  source 1..75: mol_type = other DNA
tggtgtttttgttgtggggatcacatgcgcaaaagaaaggggcgattatagataagcaacgccatcatgtactga

SEQ ID NO: 153824 - DNA, 75 bp, synthetic construct
  source 1..75: mol_type = other DNA
gataagcagcgccatcacgtactgaaagcgccgcatccatcgccattatcagcacatcgtggattctttggctgt

SEQ ID NO: 153825 - DNA, 75 bp, synthetic construct
  source 1..75: mol_type = other DNA
agtgcgcgcgatgcagccatagaaaatgaaaagttgcggaaggaagttgaagatctccgcattgcttctgagtcc

SEQ ID NO: 153826 - DNA, 75 bp, synthetic construct
  source 1..75: mol_type = other DNA
aggcgtcagcagcgaagggcagcgccacgacggcatccacgaaggcgacagaggcagctggcagtgcgacggcgg

SEQ ID NO: 153827 - DNA, 75 bp, synthetic construct
  source 1..75: mol_type = other DNA
gacaatgatttgaggtgtgtcccagccgataacattgagcaggcttttacccaggggctgatgaatcatgtcagt

SEQ ID NO: 153828 - DNA, 75 bp, synthetic construct
  source 1..75: mol_type = other DNA
tgatgccgccgtaatgttttttattccactgctgattaataaatatattggtagcaagaatgcactattaattac

SEQ ID NO: 153829 - DNA, 75 bp, synthetic construct
  source 1..75: mol_type = other DNA
tgatcctgcttgttgcccgttctgagccactgccgggtattgaggcggagcaggtccgccagcaaaaggtgagcg

SEQ ID NO: 153830 - DNA, 75 bp, synthetic construct
  source 1..75: mol_type = other DNA
aattattccgccaggtggcaagcgctcggtgacgttgaacgttgatcaccctgccgctacttgctggttccatcc

SEQ ID NO: 153831 - DNA, 75 bp, synthetic construct
  source 1..75: mol_type = other DNA
cctgaaattaatgctgccgaaacagtggggtatcgatgatgtcccggtgattgttcaggataaaaaatttaacgc

SEQ ID NO: 153832 - DNA, 75 bp, synthetic construct
  source 1..75: mol_type = other DNA
tgtatggtatattgcatggcagacagaacgctctaaagaagaagagtttaaatcaagcattaagtcggaagattt

SEQ ID NO: 153833 - DNA, 75 bp, synthetic construct
  source 1..75: mol_type = other DNA
caaagttatagcctgtgatatatcaatatatctggaaccagcattttaccttctcattggcactgttgttttgtt

SEQ ID NO: 153834 - DNA, 75 bp, synthetic construct
  source 1..75: mol_type = other DNA
gcagccttttattgggctggctcttgtgggttatggcgcatgggaattttcaggtgacagtatctgtacagcaga

SEQ ID NO: 153835 - DNA, 75 bp, synthetic construct
  source 1..75: mol_type = other DNA
gggacgaccggagctgaaccagatgaacacggccatcaatatgggagggaacaacctgaacaatgcaggaaacgt

SEQ ID NO: 153836 - DNA, 75 bp, synthetic construct
  source 1..75: mol_type = other DNA
gatgccctgcgcagtatcgccagcctgctccccggtctgggcggatttataggaaaaaatggcacagcaaccggt

SEQ ID NO: 153837 - DNA, 75 bp, synthetic construct
  source 1..75: mol_type = other DNA
acttcgaataatggctggctggtcacaaaaaacagcaaaggctggatgaacagtacctatggtggcggctggtat

SEQ ID NO: 153838 - DNA, 75 bp, synthetic construct
  source 1..75: mol_type = other DNA
caggatgtctgacgctgcccagagaggtttttgagcgcgatggccggctgtgccagcgacctgtgcgtgaagtcg

SEQ ID NO: 153839 - DNA, 75 bp, synthetic construct
  source 1..75: mol_type = other DNA
tattaccctgaggaagggctggatggttaccgcagtgttgaacttcctgatacagaatatctgactcttcgtatt

SEQ ID NO: 153840 - DNA, 75 bp, synthetic construct
  source 1..75: mol_type = other DNA
gtgcccacccgcagtgaagcctgggcaggatgtctgacgctgcccagagaggtttttgagcgcgatggccggctg

SEQ ID NO: 153841 - DNA, 75 bp, synthetic construct
  source 1..75: mol_type = other DNA
atcttgcgcacgtttgttaaaaagacacccaggacgccaccggcagagatccaattagcattaaagagactggag

SEQ ID NO: 153842 - DNA, 75 bp, synthetic construct
  source 1..75: mol_type = other DNA
ttgtttgagttgcgcgtaggaagaaaagacatttcaagaacattttttgcttacgctaaaggtcgaaagatctat

SEQ ID NO: 153843 - DNA, 75 bp, synthetic construct
  source 1..75: mol_type = other DNA
cagagatgcgtgctcgagttgaaaatttcaacaaactttttgaagaactactcaaagctcgcaaaagaagcgcaa

SEQ ID NO: 153844 - DNA, 75 bp, synthetic construct
  source 1..75: mol_type = other DNA
gaaggagctggttagcgagcacctgccgggcgtaaaccagtacgaagtgcttcgcaaaataattatcgatcgtgt

SEQ ID NO: 153845 - DNA, 75 bp, synthetic construct
  source 1..75: mol_type = other DNA
tgttggtagtgctgatgcattgaagaacgcgcgaattgctgcggaagattttgctaaagcagtttttgaccgtat

SEQ ID NO: 153846 - DNA, 75 bp, synthetic construct
  source 1..75: mol_type = other DNA
gcgccagcattggttttatgtcgaagatgaccggcaagcgcgatcacgagacatcacacagccttgcgcgtgagg

SEQ ID NO: 153847 - DNA, 75 bp, synthetic construct
  source 1..75: mol_type = other DNA
tttttataagtataatgatttttgtggtttgcttatttgtagcttctttttatcctgaaatatatggttcagtat

SEQ ID NO: 153848 - DNA, 75 bp, synthetic construct
  source 1..75: mol_type = other DNA
gggcctggttgaaaatacggctgctcaggcgatgctccagaacgtgtctcgtgaagaattactgtccgatttcat

SEQ ID NO: 153849 - DNA, 75 bp, synthetic construct
  source 1..75: mol_type = other DNA
tacgagtacaccaagacttgcttcgtcatgatctccgtatattggttatcgaccttgaccctcaggcatccagta

SEQ ID NO: 153850 - DNA, 75 bp, synthetic construct
  source 1..75: mol_type = other DNA
ttgttctcgatccaggccacggcgggattgataccggagcgatcggacgcaacggttcgaaagaaaaacatgtgg

SEQ ID NO: 153851 - DNA, 75 bp, synthetic construct
  source 1..75: mol_type = other DNA
tattgcagcaagtgctgtttgatctggtgcaaaccgatactattaaaaacagcctgacgcttggctcgcatattc

SEQ ID NO: 153852 - DNA, 75 bp, synthetic construct
  source 1..75: mol_type = other DNA
cgtcggttccttcggtgctggtggaaacctcgtttatcaccaacccggaagaagagcgactgttaggcacggcgg

SEQ ID NO: 153853 - DNA, 75 bp, synthetic construct
  source 1..75: mol_type = other DNA
cagcgatttgctgcttacccctaccccaccagcccaggttgacttccactcaacactgaaatatctcacccgtct

SEQ ID NO: 153854 - DNA, 75 bp, synthetic construct
  source 1..75: mol_type = other DNA
agaggtgacacgacaggctgatgtgacgcgcatactgccgctgattaacgagctggaagcgctgccagaacagtg

SEQ ID NO: 153855 - DNA, 75 bp, synthetic construct
  source 1..75: mol_type = other DNA
ccatgaccctttactttattattttcggtaacctgattggttcgcgtattggcgatatgcatggcttcagctaca

SEQ ID NO: 153856 - DNA, 75 bp, synthetic construct
  source 1..75: mol_type = other DNA
gtgaagtcgacggcggcccgcagggaattattccgccaggtggcaagcgctcggtgacgttgaacgttgatcaac

SEQ ID NO: 153857 - DNA, 75 bp, synthetic construct
  source 1..75: mol_type = other DNA
atgaaaaactccgtaaagaggttgaggattacagggctgccagtgaggcagatctccagcctgggactattgagt

SEQ ID NO: 153858 - DNA, 75 bp, synthetic construct
  source 1..75: mol_type = other DNA
ggttatttactcccgctcgcggcgtcgggtacgcgtggtgcaggaagagtttcctgaacaaagcgtgccggaagg

SEQ ID NO: 153859 - DNA, 75 bp, synthetic construct
  source 1..75: mol_type = other DNA
tcgatatgatggggatgcagatgctgatggagaaatatggcgatcaggccatggccgggatggatcacagccaga

SEQ ID NO: 153860 - DNA, 75 bp, synthetic construct
  source 1..75: mol_type = other DNA
atgcaacgtcgtgatttcttaaaatattccgtcgcgctgggcgtggcttcagccttaccgctgtggagccgcgca

SEQ ID NO: 153861 - DNA, 75 bp, synthetic construct
  source 1..75: mol_type = other DNA
aaatcaacggtcaggcgtttgatatgaacaagccgatgtttgcggcggcgaaagggcaatacgaacgttgggtta

SEQ ID NO: 153862 - DNA, 75 bp, synthetic construct
  source 1..75: mol_type = other DNA
atgaggtttttattgggcgtgctgatgctgatgatctccggctcagcactggcgaccatcgacgtgttgcagttt

SEQ ID NO: 153863 - DNA, 75 bp, synthetic construct
  source 1..75: mol_type = other DNA
gacgagtttgtcgcattgcctcttcttaatgtttctctttccgccgggagtggtagctgtgagttagaggaatca

SEQ ID NO: 153864 - DNA, 75 bp, synthetic construct
  source 1..75: mol_type = other DNA
gatccgaaaaacagcgatgccgcactgggttatgctgaagcgttgacacgttcatctgatcccaacgacaaccgc

SEQ ID NO: 153865 - DNA, 75 bp, synthetic construct
  source 1..75: mol_type = other DNA
cgatgcgtatgctaacgcgtatcgcctcgacccgaaaaatagtgatgcggcgctgggttatgctgaagcactgac

SEQ ID NO: 153866 - DNA, 75 bp, synthetic construct
  source 1..75: mol_type = other DNA
acgttcatctgatcccaacgacaaccgcctcggcggtgaactgctacgtcagttggtgagaacggaccatagcaa

SEQ ID NO: 153867 - DNA, 75 bp, synthetic construct
  source 1..75: mol_type = other DNA
ccgtaataagtcccggtttacagaaggaaaacatttcataattgtaaaaggtacagatctccaaagtttgaaaat

SEQ ID NO: 153868 - DNA, 75 bp, synthetic construct
  source 1..75: mol_type = other DNA
aacgccagagcacttatcagttttgacgaaaacctgaatcctcagctcaagctactaccaccgacaggcaaagta

SEQ ID NO: 153869 - DNA, 75 bp, synthetic construct
  source 1..75: mol_type = other DNA
ttacgcaagcattattaccattatttgttgggggaaagaataataacaagttaataaaatacataatatctatca

SEQ ID NO: 153870 - DNA, 75 bp, synthetic construct
  source 1..75: mol_type = other DNA
ctggccgagaaataccacacgcagttgctggggcagatgccgttacacatctccttacgtgaagatctcgataaa

SEQ ID NO: 153871 - DNA, 75 bp, synthetic construct
  source 1..75: mol_type = other DNA
aaggcattgtaatgttcgagaaagtcgaagtgccggtactgggcattgtcgagaacatgagcgtgcatatctgca

SEQ ID NO: 153872 - DNA, 75 bp, synthetic construct
  source 1..75: mol_type = other DNA
gtggaactggttatgccattcgtctggcatagcgcgttcgaagagttaaaagagcaatgtagcgccgaactgctg

SEQ ID NO: 153873 - DNA, 75 bp, synthetic construct
  source 1..75: mol_type = other DNA
tcgaatatgatttgttatatatcagaggttggagcatttggttagatctaaaaataatattccttactgtcttta

SEQ ID NO: 153874 - DNA, 75 bp, synthetic construct
  source 1..75: mol_type = other DNA
tcacagcgagcctggctggattttagggacaaagaatgtgaattaatcctttcaaatgaggacgttcaggattaa

SEQ ID NO: 153875 - DNA, 75 bp, synthetic construct
  source 1..75: mol_type = other DNA
atcgtcggactgtttataggtacgagatatttaaatgatgatacatcagagttctttttttacatgacaattgtt

SEQ ID NO: 153876 - DNA, 75 bp, synthetic construct
  source 1..75: mol_type = other DNA
aagcgggccagagcacctgaaattattcctgtttctgtgtctggtgcccccggtatggatgatggcagaccattg

SEQ ID NO: 153877 - DNA, 75 bp, synthetic construct
  source 1..75: mol_type = other DNA
gtggcgcgctatcctgagcgtccattatctctctacgtacatatcccgttctgccataagctttgttacttctgc

SEQ ID NO: 153878 - DNA, 75 bp, synthetic construct
  source 1..75: mol_type = other DNA
acctgatttacggcctgccgaaacagacgccggagagtttcgcctttaccctgaaacgcgtggcggagctgaacc

SEQ ID NO: 153879 - DNA, 75 bp, synthetic construct
  source 1..75: mol_type = other DNA
gagcatgggtgtgcaggacttcaacaaagaagtgcaacgtctggttaaccgcgagcaggatgaagagttcatctt

SEQ ID NO: 153880 - DNA, 75 bp, synthetic construct
  source 1..75: mol_type = other DNA
acgtttgcctttaccagccgttccagtgctgcgtctatcccactgaatgtggaagcacaaacgcgtcgtctgggt

SEQ ID NO: 153881 - DNA, 75 bp, synthetic construct
  source 1..75: mol_type = other DNA
ttccgcaggcgttgccggtgtcggtggtggtgcaactttcgccgcactgattgtgctgcctgcgatgggcctgcc

SEQ ID NO: 153882 - DNA, 75 bp, synthetic construct
  source 1..75: mol_type = other DNA
cgatgaagtcagggccactttcagggtgattatgacgctgattggctccatgctttcattctttattgttcttcg

SEQ ID NO: 153883 - DNA, 75 bp, synthetic construct
  source 1..75: mol_type = other DNA
cacggtctggcaaccaattcaattggttatctggtgactgacgacaacgcgatggtgtggcgtggtccgatggcc

SEQ ID NO: 153884 - DNA, 75 bp, synthetic construct
  source 1..75: mol_type = other DNA
caccagaagccttgcgcgcaatggtcgccgggacactggccaattttcagcacccaaccctgcagcataacctca

SEQ ID NO: 153885 - DNA, 75 bp, synthetic construct
  source 1..75: mol_type = other DNA
ctggctgagaaatatcacacgcagttgctgggtcagatgccgttgcacattagcctgcgtgaagacctcgacaaa

SEQ ID NO: 153886 - DNA, 75 bp, synthetic construct
  source 1..75: mol_type = other DNA
tctccttcgtcgagaaacagtgcgctcctgcagagggctgaaaccgtggcaacctatcacctcagcgttaaattt

SEQ ID NO: 153887 - DNA, 75 bp, synthetic construct
  source 1..75: mol_type = other DNA
aaaccacgccgattacatcgagcgcaaaggggagtatgcgaaacggaaagatctggaatacacggagcacggaaa

SEQ ID NO: 153888 - DNA, 75 bp, synthetic construct
  source 1..75: mol_type = other DNA
ccgtcagttggctgaccgtgtggcagcacagctttactggcaaggggaagtcattcctggcgagatctccttccg

SEQ ID NO: 153889 - DNA, 75 bp, synthetic construct
  source 1..75: mol_type = other DNA
gggggccaccatcattggctacgcgcaaacgaaagtttactcctttggtttgccaagtattttcaccttcatgca

SEQ ID NO: 153890 - DNA, 75 bp, synthetic construct
  source 1..75: mol_type = other DNA
gctttgtttatgttatttcaggtatttttacgcctctgatcggtttgatggcggcaaccgggatcctgaaaggta

SEQ ID NO: 153891 - DNA, 75 bp, synthetic construct
  source 1..75: mol_type = other DNA
actgaaaaagacccccggtattattatggtggtggaaagcggtggtcagtttcaggtggtcataggtaaccatgt

SEQ ID NO: 153892 - DNA, 75 bp, synthetic construct
  source 1..75: mol_type = other DNA
tggcgcaggtcggggcggcgctcggcgtcttcctctgcgaacgcgatgcgcagaaaaagtggtggcgggatcagc

SEQ ID NO: 153893 - DNA, 75 bp, synthetic construct
  source 1..75: mol_type = other DNA
cggcggtaatccatttactgccatggtgattggcggagcgttagtgcatccattaattctgactgccttcgagaa

SEQ ID NO: 153894 - DNA, 75 bp, synthetic construct
  source 1..75: mol_type = other DNA
caccgtgctgggctacgacaccatgatcccgctgttaatgcccgccattatggcgcaggtcggggcggcgctcgg

SEQ ID NO: 153895 - DNA, 75 bp, synthetic construct
  source 1..75: mol_type = other DNA
tcttttacgctacacatcaacggcaaagatcatgatttgttagcggtagataaaattcatgtcgatttaaactgg

SEQ ID NO: 153896 - DNA, 75 bp, synthetic construct
  source 1..75: mol_type = other DNA
aggtaattataatattattgattctgtcgatacggagtatattgcaaagacatcagcaggtaatgctgccaactt

SEQ ID NO: 153897 - DNA, 75 bp, synthetic construct
  source 1..75: mol_type = other DNA
attgccaagaatcaactcgctcgtgaaaaactgattatttataatagcgaaggtaattataatattattgattct

SEQ ID NO: 153898 - DNA, 75 bp, synthetic construct
  source 1..75: mol_type = other DNA
aatgcttaatcttgacgtgtcagggatagtttccagttcgaatgctgaaaactctattgctattattgttaatga

SEQ ID NO: 153899 - DNA, 75 bp, synthetic construct
  source 1..75: mol_type = other DNA
tcagggcatttttttaatgcctcagataaactattttatttgccatttgttttcattattgcagtcttgttgata

SEQ ID NO: 153900 - DNA, 75 bp, synthetic construct
  source 1..75: mol_type = other DNA
gagcgccacggcacagtctgcagaattcgccagtgctgactgcgtgacgggcctgaatgaaataggtcagatctc

SEQ ID NO: 153901 - DNA, 75 bp, synthetic construct
  source 1..75: mol_type = other DNA
gcagggagaatgaaaaagctaaaagaactggggttcatatcctgtcgtgaaggcagcaccggtgaatttcattac

SEQ ID NO: 153902 - DNA, 75 bp, synthetic construct
  source 1..75: mol_type = other DNA
ctggaaaaatatccgcaacatcacggtaaaattcgttatacccagatcgcgccaacgtcgcgtggtgatgtgcaa

SEQ ID NO: 153903 - DNA, 75 bp, synthetic construct
  source 1..75: mol_type = other DNA
cgtggtgatgtgcaagcgtatcaggatattcgtcatcagttggaaaatgaagccgggagaattaacggcaaatat

SEQ ID NO: 153904 - DNA, 75 bp, synthetic construct
  source 1..75: mol_type = other DNA
tggctggattttagggacaaagaatgtgaattaatcctttcaaatgaggacgttcaggatttaagtgacccttat

SEQ ID NO: 153905 - DNA, 75 bp, synthetic construct
  source 1..75: mol_type = other DNA
gtcatcctgtttacctctttctcaggaagtttagtctccaggattcccggggcggttcagttttttaagatggtg

SEQ ID NO: 153906 - DNA, 75 bp, synthetic construct
  source 1..75: mol_type = other DNA
cgacggaatcacagtggagaagcctggtgctgaaaagcggcgggaaatactggcatgtgtacatgtcgaagaaaa

SEQ ID NO: 153907 - DNA, 75 bp, synthetic construct
  source 1..75: mol_type = other DNA
ttcaagcgcccggtcgtgcctggcgatcaaatgatcatggaagtcactttcgaaaaaaacgcgccgcggcctgac

SEQ ID NO: 153908 - DNA, 75 bp, synthetic construct
  source 1..75: mol_type = other DNA
ggaagcaatggcacaggcaacaggtattctggcgtttaaaagcgtaggaaaactggaaccgggtgaactgtacta

SEQ ID NO: 153909 - DNA, 75 bp, synthetic construct
  source 1..75: mol_type = other DNA
cgtcttcctctgcgaacgcgatgcgcagaaaaaagtggtagcgggatcggcggcgttgacgggtctgtttggtat

SEQ ID NO: 153910 - DNA, 75 bp, synthetic construct
  source 1..75: mol_type = other DNA
gtaacattacgtgggcctcttttaacctcagcgaacaggaccttgacgaatactacaaccaattctccaatgccg

SEQ ID NO: 153911 - DNA, 75 bp, synthetic construct
  source 1..75: mol_type = other DNA
atattcgccatcaactggaaaatgaagcaggaagaattaatggtaaatatggccaattaggctggacgccgcttt

SEQ ID NO: 153912 - DNA, 75 bp, synthetic construct
  source 1..75: mol_type = other DNA
gccgcaccgtttcccgttcttactggtggatcgcgtgctggattttgaagaaggtcgtcttctgcgcgcagtaaa

SEQ ID NO: 153913 - DNA, 75 bp, synthetic construct
  source 1..75: mol_type = other DNA
ccagctggctgaagatatcatcaaggctcaggagcaagaaattaaacagatgcagtcctggctggaaaagaaagc

SEQ ID NO: 153914 - DNA, 75 bp, synthetic construct
  source 1..75: mol_type = other DNA
cgagggtggataacgctcaggccattctggatgcgctcaggtcgctaaccaaaaaggatgtgctggttggcatcc

SEQ ID NO: 153915 - DNA, 75 bp, synthetic construct
  source 1..75: mol_type = other DNA
cttgctgacagtactgttgaagcccgggctcgtcgggggcgcaagggggcaacactggaacttgcccggcgtgct

SEQ ID NO: 153916 - DNA, 75 bp, synthetic construct
  source 1..75: mol_type = other DNA
cggagggccgcattcccggcgcaatacagacggcagtcagggattccgtcgatggctgggttgacgcgattaaat

SEQ ID NO: 153917 - DNA, 75 bp, synthetic construct
  source 1..75: mol_type = other DNA
agtcagaggttgctgctgcttttgatgaagagttagcggacgctgtgagtgatttttctggttcttattctatgt

SEQ ID NO: 153918 - DNA, 75 bp, synthetic construct
  source 1..75: mol_type = other DNA
atgatgaaagggatcatggcagctgatgcagacgaagccttcgtccggggcatgattgcccatcatcagggtgct

SEQ ID NO: 153919 - DNA, 75 bp, synthetic construct
  source 1..75: mol_type = other DNA
tgttcgtcaatggcgctctcctgtgaatacaccaataaccccgatttatcgattgccaacgttatatcgttagtg

SEQ ID NO: 153920 - DNA, 75 bp, synthetic construct
  source 1..75: mol_type = other DNA
tgaagccaaaccgccttgaagcggccttgttgatcaaatccaaagttggatggtcgctccccaacccgccgggcg

SEQ ID NO: 153921 - DNA, 75 bp, synthetic construct
  source 1..75: mol_type = other DNA
ttgctataaatgacatgaatattagcaacgctattacagctgaatatctcgcacagcaccgtgaatttattcaga

SEQ ID NO: 153922 - DNA, 75 bp, synthetic construct
  source 1..75: mol_type = other DNA
tggccgcgaatggcgtcaggcgttacatgactattaccggctttacaccgcttgctgatagcaccgttgaagccc

SEQ ID NO: 153923 - DNA, 75 bp, synthetic construct
  source 1..75: mol_type = other DNA
gcagaagagcagacggtgccgcagctcaaagccgcggcgcaggctgctcttgatggtaatgctgcgggagcagaa

SEQ ID NO: 153924 - DNA, 75 bp, synthetic construct
  source 1..75: mol_type = other DNA
tttatggactgacgataaagacaatttgtggaccaatatcgtcgaacgccagagacacgcgttacaggagatagg

SEQ ID NO: 153925 - DNA, 75 bp, synthetic construct
  source 1..75: mol_type = other DNA
gtaatgaccgccgatatggacaataccgagaaggtggtgggcctggtggatgagtgctggcggatggggctgaaa

SEQ ID NO: 153926 - DNA, 75 bp, synthetic construct
  source 1..75: mol_type = other DNA
acaccgagaaggtggtgggcctggtggatgagtgctggcggatggggctgaaaatcctgccaccagatataaact

SEQ ID NO: 153927 - DNA, 75 bp, synthetic construct
  source 1..75: mol_type = other DNA
attacagcgacattcctgcttctggtagcgaagcatggtctgacgccaaacgcggcaattttttgccagatccag

SEQ ID NO: 153928 - DNA, 75 bp, synthetic construct
  source 1..75: mol_type = other DNA
tgcgcgaacttacactattgccactcaatattaagcatatatcggtgaagacatttttacgaaatggcgccccga

SEQ ID NO: 153929 - DNA, 75 bp, synthetic construct
  source 1..75: mol_type = other DNA
ttacaccacgccgttaccgcttttttcaccaccactgatctacacagatctgacgctgacaacacaccaacagga

SEQ ID NO: 153930 - DNA, 75 bp, synthetic construct
  source 1..75: mol_type = other DNA
gtctctccgagcgatcgtttattaaacgatctccgtggcctcattggttcggagcaggtggaactggagtttgac

SEQ ID NO: 153931 - DNA, 75 bp, synthetic construct
  source 1..75: mol_type = other DNA
tgaacggtgaaatccgcgatcacgattccgccattacggcaataaaagccgccatgaccgggcatctgatgctga

SEQ ID NO: 153932 - DNA, 75 bp, synthetic construct
  source 1..75: mol_type = other DNA
ttggcagtaaaattaagctccaatggtccggttatatttaaacaaattagatatggtatggatggcaaacctatc

SEQ ID NO: 153933 - DNA, 75 bp, synthetic construct
  source 1..75: mol_type = other DNA
gttcgaacgctaacgcctccttgatttcaatggctcaaagattttctgatatattaataatcataatggggcttt

SEQ ID NO: 153934 - DNA, 75 bp, synthetic construct
  source 1..75: mol_type = other DNA
ggcgatatcccattgattggtaacctgtttaaatcgacggcggataaaaaagaaaaacgtaacctgatggtgttt

SEQ ID NO: 153935 - DNA, 75 bp, synthetic construct
  source 1..75: mol_type = other DNA
gaaggacagaccagtctcgacgtcgtgtttggcgagcgcaaactgaaaaccaccgtgctggcaaacgatggtgag

SEQ ID NO: 153936 - DNA, 75 bp, synthetic construct
  source 1..75: mol_type = other DNA
cgtctggttcagctgatatgtccgcactgccgtcgcccctggcatgaggtggctaccgagcgcacggatgatgaa

SEQ ID NO: 153937 - DNA, 75 bp, synthetic construct
  source 1..75: mol_type = other DNA
cacggtgatgcacgttccggcagatgcccagggaacgctgcccgatgcgctgaattttatgaaggtattcagcaa

SEQ ID NO: 153938 - DNA, 75 bp, synthetic construct
  source 1..75: mol_type = other DNA
aggtttgttcaccttcctggtgattctggtgggctataacgccgcccaggcatttggcggcacgggcgtcaatgg

SEQ ID NO: 153939 - DNA, 75 bp, synthetic construct
  source 1..75: mol_type = other DNA
aggcgcgggccaggtgggcgcggcgctggcactctactggcgggcgcaaccgcacagtgcattacgcagtcaggt

SEQ ID NO: 153940 - DNA, 75 bp, synthetic construct
  source 1..75: mol_type = other DNA
cgcggcaatattatcggcgtactgattgccgcctgggtctgcgctcgcattgaaagtatggtgcgtcaatttatg

SEQ ID NO: 153941 - DNA, 75 bp, synthetic construct
  source 1..75: mol_type = other DNA
cgcacagtgcattacgcagtcaggtccgcggggcaattattcccggcctgctgggcgttggcgaaccgttaattt

SEQ ID NO: 153942 - DNA, 75 bp, synthetic construct
  source 1..75: mol_type = other DNA
cgctacgcaggcatatctggtgattatgccgctgggaggctggttattcgaaggcatgtcctggctgtttatgca

SEQ ID NO: 153943 - DNA, 75 bp, synthetic construct
  source 1..75: mol_type = other DNA
cgccgaaaggtgaacgcgtcttagccgctatcgataccctgcaaagctgggtaatgaagctggttcgcctggtca

SEQ ID NO: 153944 - DNA, 75 bp, synthetic construct
  source 1..75: mol_type = other DNA
tgaccgctggcacgctgaccagccagtggctgaagcaaaccgataaagccattctggatagcgaagacgacgccg

SEQ ID NO: 153945 - DNA, 75 bp, synthetic construct
  source 1..75: mol_type = other DNA
tgcccgtctgcataacgcatcacagttaggcaaaatcagttttctgaccatcggaacgcttttgtttaccacgct

SEQ ID NO: 153946 - DNA, 75 bp, synthetic construct
  source 1..75: mol_type = other DNA
tatttaaaaactggacgcttagcttattaattgctttagggcttttatctttagactcaacgattgatactcgtt

SEQ ID NO: 153947 - DNA, 75 bp, synthetic construct
  source 1..75: mol_type = other DNA
ataaagaggcgcgctgggcgctggggctgacccttttgtatttggcggtatggttagtagccgcttacttacctg

SEQ ID NO: 153948 - DNA, 75 bp, synthetic construct
  source 1..75: mol_type = other DNA
gttgccggtgtcggtggtggtgcaactttcgccgcactgattgtgctgcctgcgatgggcctgccagtaaccctg

SEQ ID NO: 153949 - DNA, 75 bp, synthetic construct
  source 1..75: mol_type = other DNA
ttgaatgctggtgtgaaaaagcttaaaacacctgagcaacatgagaaagaaatcgatagggtttatcatgttatc

SEQ ID NO: 153950 - DNA, 75 bp, synthetic construct
  source 1..75: mol_type = other DNA
gcctgcgctgttattgtgcggcagccacgatcgcgaagcctcctggcagcaggtcgatgcctggcgtcagtggct

SEQ ID NO: 153951 - DNA, 75 bp, synthetic construct
  source 1..75: mol_type = other DNA
agttatccgtcagacgaatctctgctcagtaatgaagtggtttcggtatcgctgacctgtaccaaccgtgagctt

SEQ ID NO: 153952 - DNA, 75 bp, synthetic construct
  source 1..75: mol_type = other DNA
atgcgcgaaaaggattatgtcgtaattataggctcggcgagtattgatgtcgccggatattcacatgaatcatta

SEQ ID NO: 153953 - DNA, 75 bp, synthetic construct
  source 1..75: mol_type = other DNA
gtaaactcagaacggtggcatcagaaggcaatgttgcccgctttactcagcgttttggtcgtttcgttgggactc

SEQ ID NO: 153954 - DNA, 75 bp, synthetic construct
  source 1..75: mol_type = other DNA
atacaatgaagaaaaattttatgatggtatgaataaaaaaactcgtatttctgtttcaggttatgaactaaaaac

SEQ ID NO: 153955 - DNA, 75 bp, synthetic construct
  source 1..75: mol_type = other DNA
cgggcagactatccgctggttcccagccgccattacccacaacattacgatgtattttccgttaacagtgtggtg

SEQ ID NO: 153956 - DNA, 75 bp, synthetic construct
  source 1..75: mol_type = other DNA
gagcaaattgaaaatcgcagtacgccccgtaatagcgtcattaacattaccttttcggtcgcgccaggaacggac

SEQ ID NO: 153957 - DNA, 75 bp, synthetic construct
  source 1..75: mol_type = other DNA
ccgtctggtctggtggcgctgccgctgatgacttccgcgcaaggcatccttccggcaatggcggtttacgctggc

SEQ ID NO: 153958 - DNA, 75 bp, synthetic construct
  source 1..75: mol_type = other DNA
cgggggctggcctccacgctgtatctgcacccggagccgtttgtctgtaagcgactcgtcagaaccgtattgata

SEQ ID NO: 153959 - DNA, 75 bp, synthetic construct
  source 1..75: mol_type = other DNA
tggttgcccggcgttgcctgacggattgcagggtgaatcctttaccctgcaactgcgtttttcgcgcccattgcc

SEQ ID NO: 153960 - DNA, 75 bp, synthetic construct
  source 1..75: mol_type = other DNA
tcactgctcagtaatgaagtggtttcggtatcgctgacatgcaccaaccgggaacttccgtcacaacttcgctct

SEQ ID NO: 153961 - DNA, 75 bp, synthetic construct
  source 1..75: mol_type = other DNA
caccagatggacttgtaggccgtgacagcaaaggggcaatactttcgtgccaatccggtatctggacaacggcaa

SEQ ID NO: 153962 - DNA, 75 bp, synthetic construct
  source 1..75: mol_type = other DNA
cccattggcactgacgtaggcaaagagatcaaaacgctgaccggcaagcagggtgccgatgtgattatcgaaacc

SEQ ID NO: 153963 - DNA, 75 bp, synthetic construct
  source 1..75: mol_type = other DNA
ccatcgctgtgatattgcccgtcgccacggtgcggatttctgccttaaccccattggcactgacgtaggcaaaga

SEQ ID NO: 153964 - DNA, 75 bp, synthetic construct
  source 1..75: mol_type = other DNA
tcgtgattggcgtcgatcctatcgctcatcgctgtgatattgcccgtcgccacggcgcggatttctgccttaacc

SEQ ID NO: 153965 - DNA, 75 bp, synthetic construct
  source 1..75: mol_type = other DNA
ttcattattaccggaaatgaaagcacttaatcaggtggcaaaaaatccgtggctggaaatatttatcggacactg

SEQ ID NO: 153966 - DNA, 75 bp, synthetic construct
  source 1..75: mol_type = other DNA
tgacgcaggtctgtccgtttccactcatagaagcaaaagcagcactggcaggaatggccagcggcgatgagttgg

SEQ ID NO: 153967 - DNA, 75 bp, synthetic construct
  source 1..75: mol_type = other DNA
ccgttgtgccaggcctgagcgcggaacaggttctttaccgccattatgacaccgtgtggacccagcaaggcatag

SEQ ID NO: 153968 - DNA, 75 bp, synthetic construct
  source 1..75: mol_type = other DNA
ttttcagattttatcacagttaacagttatgctctatttagttatgtatatgctcatgttcgctagtgctatcta

SEQ ID NO: 153969 - DNA, 75 bp, synthetic construct
  source 1..75: mol_type = other DNA
cgtgggaccccaatttttaagtgcagggatttgattcagcaacaccggatcgaagtccggagctctaactttact

SEQ ID NO: 153970 - DNA, 75 bp, synthetic construct
  source 1..75: mol_type = other DNA
catggaccccaaacttgccaaatccccgctcatcatcgcgagcaacaacgatgccaccattatcgccatgaacag

SEQ ID NO: 153971 - DNA, 75 bp, synthetic construct
  source 1..75: mol_type = other DNA
cagaaccccatttcagccagcataccctgaacaagtatgcatcgctgatggcgcaggggaacggctatcttgggc

SEQ ID NO: 153972 - DNA, 75 bp, synthetic construct
  source 1..75: mol_type = other DNA
ggatggtgtggtgctgggtggtctgattatctccgccattgggtttattgtcgtggcgaattccgcaatttccac

SEQ ID NO: 153973 - DNA, 75 bp, synthetic construct
  source 1..75: mol_type = other DNA
ttgctgggtagtctgacaccggcactggccgatctgccgcagattgaaccgccgtcgtccggtggtggtggcgga

SEQ ID NO: 153974 - DNA, 75 bp, synthetic construct
  source 1..75: mol_type = other DNA
aagaatatcccggaacccacgccgccggagccggtcacccgcccggtggagctttatatcaatggcgaactggtg

SEQ ID NO: 153975 - DNA, 75 bp, synthetic construct
  source 1..75: mol_type = other DNA
atgaactggcaaaagagaacgattactggggccgtgaccgcatcaattatcatctcaaaaaactgtacatcatgg

SEQ ID NO: 153976 - DNA, 75 bp, synthetic construct
  source 1..75: mol_type = other DNA
ttcgctgttacctgaagtaaaagcacttacccaggtggcaaaaaatccgtggctggagatttttattggtcactg

SEQ ID NO: 153977 - DNA, 75 bp, synthetic construct
  source 1..75: mol_type = other DNA
tcatcaggtcgaagccttagtttctagttttaatgtgcgagtggaaagtgctccacctagacgtggcgatgctaa

SEQ ID NO: 153978 - DNA, 75 bp, synthetic construct
  source 1..75: mol_type = other DNA
gattaccgtcttgatgcggttttgcctatttctgcctttgccaaaatgatcataaagacaatactttatcgtaat

SEQ ID NO: 153979 - DNA, 75 bp, synthetic construct
  source 1..75: mol_type = other DNA
gtcccatgagaagaaatacacgctgaatgtgatcgtgtgtgactttgtcggtgaccccgacctgatttttgtgcc

SEQ ID NO: 153980 - DNA, 75 bp, synthetic construct
  source 1..75: mol_type = other DNA
gttgtgctggtggcgtcttgccaaagaagccggagcgaacgaagagaaacatgctgctatttctgaacgttatgg

SEQ ID NO: 153981 - DNA, 75 bp, synthetic construct
  source 1..75: mol_type = other DNA
ccgtggcgatcagcaagcgatcgaacacctgacgaagcagtatgaacaggcggagttactacatatggcgttgtg

SEQ ID NO: 153982 - DNA, 75 bp, synthetic construct
  source 1..75: mol_type = other DNA
ctggtcaatgcgttaaacgcctgcaatgcgattgatgaatcgattgaactcctgcaacgctacgttgaaagccac

SEQ ID NO: 153983 - DNA, 75 bp, synthetic construct
  source 1..75: mol_type = other DNA
atgaactggcagaagaaaatgattactgggggcgcgaccgtatcagttatcagttgaaaaaactgtatatcatgg

SEQ ID NO: 153984 - DNA, 75 bp, synthetic construct
  source 1..75: mol_type = other DNA
gatgcggaaatgttgaatacccgaccagaagacgaagaagagcagaagaatttcactccgctctatgggtgcctg

SEQ ID NO: 153985 - DNA, 75 bp, synthetic construct
  source 1..75: mol_type = other DNA
tacggaaggcgaaggttttatcgacgaaaaatgggggttattgaacatccgtttccgggaaaacttcgaataccg

SEQ ID NO: 153986 - DNA, 75 bp, synthetic construct
  source 1..75: mol_type = other DNA
ttttattgaacataaatcccgaaactgtctgctttttcagcccacggattctgccgctgaagattttatgaaatc

SEQ ID NO: 153987 - DNA, 75 bp, synthetic construct
  source 1..75: mol_type = other DNA
gactgcctggtgtatgcctacgcggcattacgtgtgtccgtgcaacgctggcagcttgatctggctgtactggca

SEQ ID NO: 153988 - DNA, 75 bp, synthetic construct
  source 1..75: mol_type = other DNA
tggaaaacgctgccgttccaggtcgccatcatgaactgtatgggtaacgaccaggttcgcacggttaatctgata

SEQ ID NO: 153989 - DNA, 75 bp, synthetic construct
  source 1..75: mol_type = other DNA
taatattcgtgatgcgtttataaaatacgatccggcaaatgcacaaacctaccaacgtaatgccgatacttataa

SEQ ID NO: 153990 - DNA, 75 bp, synthetic construct
  source 1..75: mol_type = other DNA
tttcccgtgtctgctgggacaccgggggatcgatggcgaaatcgtttatcagaggtcaaaaaaacacggtgtttt

SEQ ID NO: 153991 - DNA, 75 bp, synthetic construct
  source 1..75: mol_type = other DNA
ccctgtccgcactgtggggaggcgcagtatctgaaatttggcgatgatgcctcgcctttcggtcttaagtgggag

SEQ ID NO: 153992 - DNA, 75 bp, synthetic construct
  source 1..75: mol_type = other DNA
gtcaaaattcaagaaaaacatattgtgaaagattcaaagttgacaagatgatagatttatatgcatcaatattcg

SEQ ID NO: 153993 - DNA, 75 bp, synthetic construct
  source 1..75: mol_type = other DNA
gcttgtggagaagtgggaaaaaggaaagatgcgtctgctgtgggataacaaaaagcggcgtaacgaagcgctgga

SEQ ID NO: 153994 - DNA, 75 bp, synthetic construct
  source 1..75: mol_type = other DNA
atcccacgcctgtggatgaagccacgtcgtatgctatccgttttcctgatgatccggagattttttcgcagacag

SEQ ID NO: 153995 - DNA, 75 bp, synthetic construct
  source 1..75: mol_type = other DNA
ccattcgcggctcgacgcctaaaatcaaaggcacctgccagatcgaaaaagcggccaacgagtcggcgcatttta

SEQ ID NO: 153996 - DNA, 75 bp, synthetic construct
  source 1..75: mol_type = other DNA
agcacagaaaacggcccggtacctacgtatatcgaccttctgaaggttactaccagtacgctggtacagggaatt

SEQ ID NO: 153997 - DNA, 75 bp, synthetic construct
  source 1..75: mol_type = other DNA
gttccaacgcttttaccagcatctcaatggggttccagaagtaattgtctcttcgggtgtgacgccagtagggat

SEQ ID NO: 153998 - DNA, 75 bp, synthetic construct
  source 1..75: mol_type = other DNA
ggttgcgaacatcgaaagctccatttctgccctgtgtcttgcgtatgacgatctgctgcaggcgaaagtcactat

SEQ ID NO: 153999 - DNA, 75 bp, synthetic construct
  source 1..75: mol_type = other DNA
cagccagctgagcaacttggatccgaaagacggttccgtagttgttctgggttacaccgaccgcatcggttctga

SEQ ID NO: 154000 - DNA, 75 bp, synthetic construct
  source 1..75: mol_type = other DNA
caacttttaccatcatcgcagatatggccaaaaacgtggctggagatgctgcagaagtctcatccataaccaagc

SEQ ID NO: 154001 - DNA, 75 bp, synthetic construct
  source 1..75: mol_type = other DNA
gtcgatggtattgagctcgctgaactgattaacaaaatcgctgaaaacggttattcactccgcgtggtggatgaa

SEQ ID NO: 154002 - DNA, 75 bp, synthetic construct
  source 1..75: mol_type = other DNA
atgtctgccgggtttccccactttcgactggtaaccagaaacaacatgaaatcattaaccacggaaacagcgctg

SEQ ID NO: 154003 - DNA, 75 bp, synthetic construct
  source 1..75: mol_type = other DNA
gtttaaaaatattttctataatattcatatttgtttcattttttctcatgaaactacacgagaaaaattggctat

SEQ ID NO: 154004 - DNA, 75 bp, synthetic construct
  source 1..75: mol_type = other DNA
aacccgttgctggtagcaatggtggtgatcattccttttttaatgctgaccggcatctcttacgacagctacttt

SEQ ID NO: 154005 - DNA, 75 bp, synthetic construct
  source 1..75: mol_type = other DNA
cctcgcacgccctcggtacggcgcgctgcgccgagctggattatcaggaaggtgcgtttagttcgctggcactgg

SEQ ID NO: 154006 - DNA, 75 bp, synthetic construct
  source 1..75: mol_type = other DNA
taccgctgacattgattgtcttttttgccgcccgcaaactggcggcacggtataagtttcccttgcttaacccgt

SEQ ID NO: 154007 - DNA, 75 bp, synthetic construct
  source 1..75: mol_type = other DNA
agggggcgatatcacgctgggcgcggcgaccacaatggagccacagagtgatattcgcgacaggacggaaggcag

SEQ ID NO: 154008 - DNA, 75 bp, synthetic construct
  source 1..75: mol_type = other DNA
caccatttgttttatcggtagcgtggtcgcgatggtgacagggacttccgtggcattgttgatgggtgcttcacc

SEQ ID NO: 154009 - DNA, 75 bp, synthetic construct
  source 1..75: mol_type = other DNA
gacggccagtaacattactcttaccggggaaagtacgagtgggaatgccatcaaccttacagacactacaggcac

SEQ ID NO: 154010 - DNA, 75 bp, synthetic construct
  source 1..75: mol_type = other DNA
aatgggatatagtacagtctcttttgctgaagcaaacatccttatttatatcaaacaacacaatgcaaggaagta

SEQ ID NO: 154011 - DNA, 75 bp, synthetic construct
  source 1..75: mol_type = other DNA
gttaacccgtccagacaaaaccacactcacaatcgaaattacccgccgatgggaggccacctttaatgccgtatg

SEQ ID NO: 154012 - DNA, 75 bp, synthetic construct
  source 1..75: mol_type = other DNA
aaatgccatcgactggctttcccgcctgccggatcaaccgctggccggtaaaccggtgttgattcagaccagctc

SEQ ID NO: 154013 - DNA, 75 bp, synthetic construct
  source 1..75: mol_type = other DNA
atggttcatcaacattacggcacacagaccgtcaatcgcggtgccgtccggccaggaatgctggttaagcacaaa

SEQ ID NO: 154014 - DNA, 75 bp, synthetic construct
  source 1..75: mol_type = other DNA
gggtccggccctgctggatgcctgtttaaaagtcaggcaacagcagggcgattgccctacggggcatgccgttat

SEQ ID NO: 154015 - DNA, 75 bp, synthetic construct
  source 1..75: mol_type = other DNA
aggcagaaaatagtgtagtgcgtccagttcaacagataaaacggacacctatgcgtatactgatagggttattga

SEQ ID NO: 154016 - DNA, 75 bp, synthetic construct
  source 1..75: mol_type = other DNA
cactcaaccatatgtttgattcgctgcttgaactgcgccaggaagagttaatcgctcgtgagcgcacgcatggtt

SEQ ID NO: 154017 - DNA, 75 bp, synthetic construct
  source 1..75: mol_type = other DNA
gggatacggtgaaacaacttatctctccggtaaaacgggaaaaccgggtactccgctcaacttcctggcgaccga

SEQ ID NO: 154018 - DNA, 75 bp, synthetic construct
  source 1..75: mol_type = other DNA
ccgggcgacacatacagcgatttttcgtggggttcccgcctgtggctgcttgaacgcgaaaagctgacggaagat

SEQ ID NO: 154019 - DNA, 75 bp, synthetic construct
  source 1..75: mol_type = other DNA
aacaaaaccccgctgacggacacggacggtaatcccgtgatacacggtgtgaccgccgtctggcgtgccggggga

SEQ ID NO: 154020 - DNA, 75 bp, synthetic construct
  source 1..75: mol_type = other DNA
tttgcctttgcaaaaggggcgggactgatgggggaggccggtcctgaagccattatgcccctgacccgggcggcg

SEQ ID NO: 154021 - DNA, 75 bp, synthetic construct
  source 1..75: mol_type = other DNA
gcgccaagctaatggcgatgaaccctatatcgaaattatttgtatggattcagaagctgaaattaagaaagcaga

SEQ ID NO: 154022 - DNA, 75 bp, synthetic construct
  source 1..75: mol_type = other DNA
agctaaaaccaaaccgtggaacgggggattaaatcaaggtagtttagttggcaatggtaatacttccatcaacgg

SEQ ID NO: 154023 - DNA, 75 bp, synthetic construct
  source 1..75: mol_type = other DNA
taaaattaagcgcgacgggaacgatactgcgtaaatccggtacgctggtggtaactaaaattgccgtcgcgtggg

SEQ ID NO: 154024 - DNA, 75 bp, synthetic construct
  source 1..75: mol_type = other DNA
tatttatccgttttattgattttcgcggtgaactgttattacgtgcatccgctattgacggagtgactccggcgg

SEQ ID NO: 154025 - DNA, 75 bp, synthetic construct
  source 1..75: mol_type = other DNA
acgtcaggttaatggcaataaaccctatctcgaaattatctgcatggattcagaagctgaaattcagaaggcaga

SEQ ID NO: 154026 - DNA, 75 bp, synthetic construct
  source 1..75: mol_type = other DNA
acgtcaggttaatggcgatgaaccctatatcgaaattatttgtatggattcagaagctgaaattcagaaagcaga

SEQ ID NO: 154027 - DNA, 75 bp, synthetic construct
  source 1..75: mol_type = other DNA
gcccggaagaagctcggaagcgagcaaagcgttacctgacggcaatgcccgcctgggctcataaagcagatgaat

SEQ ID NO: 154028 - DNA, 75 bp, synthetic construct
  source 1..75: mol_type = other DNA
agcaacaaaaaaggcgtgatgaacgtgctgatggttccgtcccgctgaaactgtccggaaaaatccacaaacagc

SEQ ID NO: 154029 - DNA, 75 bp, synthetic construct
  source 1..75: mol_type = other DNA
gaacaaccggtgacttggtttagcccgttagatggcgataataccctttccgccgccctgctcgacttcttcaac

SEQ ID NO: 154030 - DNA, 75 bp, synthetic construct
  source 1..75: mol_type = other DNA
cttccagttctgccggtgctgcggtggctacgccggtactgattgcagaaatgatcccggcctttaaacctatgg

SEQ ID NO: 154031 - DNA, 75 bp, synthetic construct
  source 1..75: mol_type = other DNA
tggggaaccttgaccctgaattacgagaatttttcagcaaagcggtgcaaacgctgattccattctttgccttcg

SEQ ID NO: 154032 - DNA, 75 bp, synthetic construct
  source 1..75: mol_type = other DNA
tgaacattttaagaaaacaaaagttgttgaagagacactctacatttccccaattttggatcttataagatgtgc

SEQ ID NO: 154033 - DNA, 75 bp, synthetic construct
  source 1..75: mol_type = other DNA
tcaaagacctgatcgagaacgctgtggacagcaatgaaaaaattgctggcatggctgacgacatcaaacaggcca

SEQ ID NO: 154034 - DNA, 75 bp, synthetic construct
  source 1..75: mol_type = other DNA
cgcgcagctggttgaccgcagcggtaacgagtcaggttataccagctgggttcgtgggcaggccagtatcgatgt

SEQ ID NO: 154035 - DNA, 75 bp, synthetic construct
  source 1..75: mol_type = other DNA
aacaatgcgcgtgagctgggaccaggcgcagaacgctatcgcctatgaagcgcaatggcgccgcaacgacgggaa

SEQ ID NO: 154036 - DNA, 75 bp, synthetic construct
  source 1..75: mol_type = other DNA
ggcgcaaaggcggcaaatccagttcacgaactcctaccgaacagcctgatgatctgcaatctgtagcgaaggcaa

SEQ ID NO: 154037 - DNA, 75 bp, synthetic construct
  source 1..75: mol_type = other DNA
acctgatcgagaacgcggtagacagcaatgaaaaaattgctggtatggctgacgacattaaacaggccaacgacg

SEQ ID NO: 154038 - DNA, 75 bp, synthetic construct
  source 1..75: mol_type = other DNA
catcaacagcctgaatcagacgctctccgactatcagcaggccaccgccacgcagataaacgtcatcacggcgac

SEQ ID NO: 154039 - DNA, 75 bp, synthetic construct
  source 1..75: mol_type = other DNA
gtatgtgaacatctacatattcccgtaccggaaaaattatgcgtgattggcatcgataacgaagaactgacccgc

SEQ ID NO: 154040 - DNA, 75 bp, synthetic construct
  source 1..75: mol_type = other DNA
taaccgcctggacggaacgcgaagcgcgtaacctttgcccgtccgattgtgttgctgtatacgccgcccgtattc

SEQ ID NO: 154041 - DNA, 75 bp, synthetic construct
  source 1..75: mol_type = other DNA
aaccatctggtgatggataaatacgatcgagatgctgattttcctacagatttaccgtctattcctgtccagcta

SEQ ID NO: 154042 - DNA, 75 bp, synthetic construct
  source 1..75: mol_type = other DNA
caaaaatcgtatttaaggagggtgctactaatagatggttaagaagtccaacaatgattgtaacaagaggttctg

SEQ ID NO: 154043 - DNA, 75 bp, synthetic construct
  source 1..75: mol_type = other DNA
cgtatcgataccggtgccatcattgaccaacggccggtgagcgtgatcccgccgggcaaccagtcgccgcctgcg

SEQ ID NO: 154044 - DNA, 75 bp, synthetic construct
  source 1..75: mol_type = other DNA
gcgtcatagccgacttcgatgatacacaaatcgagcaggcgctggctgatgtcgacgtccctattgtcggagttg

SEQ ID NO: 154045 - DNA, 75 bp, synthetic construct
  source 1..75: mol_type = other DNA
caatgtgaccgtcagaggtgtagtatatgctagtggcggtagctttactggtgagatccaagcaacaagcggtaa

SEQ ID NO: 154046 - DNA, 75 bp, synthetic construct
  source 1..75: mol_type = other DNA
aagccagctcacaaaacactgctgatatcaccacgctgcggcaggttgtcacagacacgacttcgtcagtggcgt

SEQ ID NO: 154047 - DNA, 75 bp, synthetic construct
  source 1..75: mol_type = other DNA
ttctgatgtctccagtgtgatcctggaggagattaaagattctgaggtattcaaggatctgattgagagtgccgt

SEQ ID NO: 154048 - DNA, 75 bp, synthetic construct
  source 1..75: mol_type = other DNA
cacctgcaacgttttcattcagagccaggaggacgcctggcaggtacttaacgatctcgccgcggtatttcgtgg

SEQ ID NO: 154049 - DNA, 75 bp, synthetic construct
  source 1..75: mol_type = other DNA
gggaaacccaccgaagccggttggcttcatcgcttctgaaaacgtggtattcggtatcgagctgaactggggatt

SEQ ID NO: 154050 - DNA, 75 bp, synthetic construct
  source 1..75: mol_type = other DNA
aaattcttgttgcactgggagagggcgaatttgcagggcagttgacggcgaaggatatctatctcgatggcacgc

SEQ ID NO: 154051 - DNA, 75 bp, synthetic construct
  source 1..75: mol_type = other DNA
cacaatggcgccgcaacgacgggaactgggttaacgtgccgcgcagctccaccacatcgttcgatgttccgggca

SEQ ID NO: 154052 - DNA, 75 bp, synthetic construct
  source 1..75: mol_type = other DNA
tgaccggttcggcctcgggcaccgtttgaccgctgcgaatattgataaatggacgctttatcaggttgcccagta

SEQ ID NO: 154053 - DNA, 75 bp, synthetic construct
  source 1..75: mol_type = other DNA
cgtgttatccgcgttccagatacctacgaccctgaaacccgcacttatagcggtacatggaccggtgcgtttaag

SEQ ID NO: 154054 - DNA, 75 bp, synthetic construct
  source 1..75: mol_type = other DNA
cgtgcgcgcaatcaatgccgcagaaatttcatctggatggggctactcagaagagaaaacgctgacgggtaaagt

SEQ ID NO: 154055 - DNA, 75 bp, synthetic construct
  source 1..75: mol_type = other DNA
aaagatatctatttggacggaacagccctggagaatgctgacggctcccaaaacttcagcggcgtaacgtgggag

SEQ ID NO: 154056 - DNA, 75 bp, synthetic construct
  source 1..75: mol_type = other DNA
cgtgtctgtggacggtatgacgggaggagtgaagaactctgccatcgcgattattcagggcaacctggcgcaggt

SEQ ID NO: 154057 - DNA, 75 bp, synthetic construct
  source 1..75: mol_type = other DNA
gaagaacggatgcagaaagggcaaagccatctggcgaatctgaaagcgatgatggcggcaaaacgagggaaataa

SEQ ID NO: 154058 - DNA, 75 bp, synthetic construct
  source 1..75: mol_type = other DNA
cgcgaacgttggcagaataaaattcgttatctgttggtggatgagtatcaggacaccaacaccagtcagtatgag

SEQ ID NO: 154059 - DNA, 75 bp, synthetic construct
  source 1..75: mol_type = other DNA
aggcagcgaactggatgagccgatgacgctcacccaggtggtgacgcgctttactttgcgcgacatgatggagcg

SEQ ID NO: 154060 - DNA, 75 bp, synthetic construct
  source 1..75: mol_type = other DNA
gcgctcgctttaccgtggtgggcgatgatgaccagtcgatctactcctggcgtggcgcacgtccgcaaaacctgg

SEQ ID NO: 154061 - DNA, 75 bp, synthetic construct
  source 1..75: mol_type = other DNA
ttactctgcgcgacatgatggagcgcggcgagagcgaggaagagctggatcaggtgcaactgatgactttgcacg

SEQ ID NO: 154062 - DNA, 75 bp, synthetic construct
  source 1..75: mol_type = other DNA
cgcaggatgatctgatttgggaacaggagcgtaaagtgatcagcgccgaagaacggatgcagaaaggacaaagcc

SEQ ID NO: 154063 - DNA, 75 bp, synthetic construct
  source 1..75: mol_type = other DNA
gcgcaacgtcggccagctcgtcaacgagctgatgcaggtgcaggactgcgcgaccgttcgtcgtgaccctgcaca

SEQ ID NO: 154064 - DNA, 75 bp, synthetic construct
  source 1..75: mol_type = other DNA
gctatcagaatcaatgcaatgatacacaaaatatcgatattgagaaccatttattccatttcaagatcattaatt

SEQ ID NO: 154065 - DNA, 75 bp, synthetic construct
  source 1..75: mol_type = other DNA
tcaacgccacggcgaaaaaagtggcctgtggtgcggcagaaagcgttccgctgattcgggtaaccaacctggcgc

SEQ ID NO: 154066 - DNA, 75 bp, synthetic construct
  source 1..75: mol_type = other DNA
cgaagcgagagattggcccggcgacgctgaaaaagctgggtgagtgggcgatgacgcgcaataaaagcatgttta

SEQ ID NO: 154067 - DNA, 75 bp, synthetic construct
  source 1..75: mol_type = other DNA
cgcaggatgatttgatttgggaacaggagcgcaaagtggtcagcgccgaagaacggatgcagaaagggcaaagcc

SEQ ID NO: 154068 - DNA, 75 bp, synthetic construct
  source 1..75: mol_type = other DNA
ggatttttgccccaccagagcagtatcgatgaagataatatcgatgaggagcggcggctggcctatgtcggcatt

SEQ ID NO: 154069 - DNA, 75 bp, synthetic construct
  source 1..75: mol_type = other DNA
ctggatttgtgacaataccgggatgtggacgcgtgatggcctgacattttacagcgccggtgatgaggagatgcc

SEQ ID NO: 154070 - DNA, 75 bp, synthetic construct
  source 1..75: mol_type = other DNA
aaattattgcggtgaaaaccgatcttgccgatgagaaaagccgggagcatctctttgcggcctgcattgagcaga

SEQ ID NO: 154071 - DNA, 75 bp, synthetic construct
  source 1..75: mol_type = other DNA
ccactatcgcttaaaaaatataaatataaaaccagggcttgctgaatcacaagacaatattaaagaagcttggtt

SEQ ID NO: 154072 - DNA, 75 bp, synthetic construct
  source 1..75: mol_type = other DNA
ccgggtgctgccggtaaaaggcgcatctgtctatggcaagccggtgatcaccatgccaaaaacccgcaatcagcg

SEQ ID NO: 154073 - DNA, 75 bp, synthetic construct
  source 1..75: mol_type = other DNA
gaagtgggaacggacaccgcaaaagaaattctctatgcccgtatgaaagccgatccctcgcctgcggatgaagcc

SEQ ID NO: 154074 - DNA, 75 bp, synthetic construct
  source 1..75: mol_type = other DNA
agtctgctttttcagcccacggattctgccgctgaagattttatgaagtctcacgtggaggcgacgattcgggat

SEQ ID NO: 154075 - DNA, 75 bp, synthetic construct
  source 1..75: mol_type = other DNA
atggaaataaagctcatcgataatccggtgaagcttgcagaattcctcaacaacccggcaaacacggggaatatc

SEQ ID NO: 154076 - DNA, 75 bp, synthetic construct
  source 1..75: mol_type = other DNA
gcgttcctgcgtatcgttaacacgccgaagcgagagattggcccggcgacgctgaaaaagctgggcgagtgggcg

SEQ ID NO: 154077 - DNA, 75 bp, synthetic construct
  source 1..75: mol_type = other DNA
cgaagcgagagattggcccggcgacgctgaaaaagctgggtgagtgggcgatgacgcgtaataaaagtatgttta

SEQ ID NO: 154078 - DNA, 75 bp, synthetic construct
  source 1..75: mol_type = other DNA
aaataataaagcatatcctttaattattcaaagcaatatatgggatgaaaacaataataaaaatcatgactttat

SEQ ID NO: 154079 - DNA, 75 bp, synthetic construct
  source 1..75: mol_type = other DNA
tcaagcctgatgcggtatatctcggcatctacgaaggattagtgctggctggcgttcatgaagtgcgtaacttct

SEQ ID NO: 154080 - DNA, 75 bp, synthetic construct
  source 1..75: mol_type = other DNA
ctgaaatcaaacccgcaaggagcccttttaagaggccaacaaccacccctcctcaaagatacggggtccatgcat

SEQ ID NO: 154081 - DNA, 75 bp, synthetic construct
  source 1..75: mol_type = other DNA
taacaacaaagggatcacaaccgaaggagagctcaaaggaggaaaagtcagtggtggaactgtccggtctgacgg

SEQ ID NO: 154082 - DNA, 75 bp, synthetic construct
  source 1..75: mol_type = other DNA
gtaaacaacaagggcatctataccggcggtcaggtgaaaggcggtactgttcgggctgatggtcgcctttatact

SEQ ID NO: 154083 - DNA, 75 bp, synthetic construct
  source 1..75: mol_type = other DNA
tataccgtggccatcagccacccctccacaaggctacctggtgatgaacgggcagtcattttcatgttcccggta

SEQ ID NO: 154084 - DNA, 75 bp, synthetic construct
  source 1..75: mol_type = other DNA
gccactcctccacaaggctatctgttgatgaacggccagtcgttttcctgttcccggtatcctcagcttgcccgt

SEQ ID NO: 154085 - DNA, 75 bp, synthetic construct
  source 1..75: mol_type = other DNA
accgcagccagaaactatattgccgacaacaatgcccgtctgcatagcggcagccttccggcaaatttcacggct

SEQ ID NO: 154086 - DNA, 75 bp, synthetic construct
  source 1..75: mol_type = other DNA
ctacgcgacggaagcgtccaacatgaccaaacagcaggtgctgatgcagaccggcatcaccatgctgaaacagtc

SEQ ID NO: 154087 - DNA, 75 bp, synthetic construct
  source 1..75: mol_type = other DNA
agtatgcaggacaacaccgaagtcgctatcggtaacatcatggataccgattacgcgacggaagcgtccaatatg

SEQ ID NO: 154088 - DNA, 75 bp, synthetic construct
  source 1..75: mol_type = other DNA
aggcgatgcaggacgaatacgacgaactgggccagcagatgtctgacatgctgcaaaacaccacttacggcggca

SEQ ID NO: 154089 - DNA, 75 bp, synthetic construct
  source 1..75: mol_type = other DNA
accaaacagcaggtgctgatgcagactggcatcaccatgctgaaacagtccaacagcatgtccagcatggtttcc

SEQ ID NO: 154090 - DNA, 75 bp, synthetic construct
  source 1..75: mol_type = other DNA
caatgacgcaaccgcgatgctgcaaaccgccgatagtatgttcgatgaaatgtctgatgtgctgggtcgtatgaa

SEQ ID NO: 154091 - DNA, 75 bp, synthetic construct
  source 1..75: mol_type = other DNA
ctatcggcaacatcatggataccgattacgcgacggaagcgtccaacatgaccaaacagcaggtgctgatgcaga

SEQ ID NO: 154092 - DNA, 75 bp, synthetic construct
  source 1..75: mol_type = other DNA
agagagtggtgcaccagaagttattgtctggggaaccggaacaccgatgcgtgagtttttatatgttgatgatat

SEQ ID NO: 154093 - DNA, 75 bp, synthetic construct
  source 1..75: mol_type = other DNA
aaaacacactgcctatgttatcccatattaatgttggtacgggtgtggattgttcgattcgtgaaatggctgaaa

SEQ ID NO: 154094 - DNA, 75 bp, synthetic construct
  source 1..75: mol_type = other DNA
ctggccaccgaggtatggttggctctgctatttgccgtcaattatcactacgtgatgatatcgaattagtggtca

SEQ ID NO: 154095 - DNA, 75 bp, synthetic construct
  source 1..75: mol_type = other DNA
aaattcgatgaaacactgtttaatattcgcgatatgaatatttatcatcgtggtatggtgacattagcgtgtatt

SEQ ID NO: 154096 - DNA, 75 bp, synthetic construct
  source 1..75: mol_type = other DNA
agaaggcaaagtctatattgccgggcaggcggagcgcgccattgaacattttttccgcaaaggtaatctgatcgc

SEQ ID NO: 154097 - DNA, 75 bp, synthetic construct
  source 1..75: mol_type = other DNA
ggccgctgcatcagtatatgtgatggagcttgatgatgaaatttataaaaaaaatactcaaccaatgttatctca

SEQ ID NO: 154098 - DNA, 75 bp, synthetic construct
  source 1..75: mol_type = other DNA
ttattcctaccaagtacgacgatgcatatgccatttatcatatgtcagggatatatcccaaatttacccttaccc

SEQ ID NO: 154099 - DNA, 75 bp, synthetic construct
  source 1..75: mol_type = other DNA
aacgatggtaacagtatttatgactaacgggcagacgctggatattgaggctgttcgggtatctcagaaccagaa

SEQ ID NO: 154100 - DNA, 75 bp, synthetic construct
  source 1..75: mol_type = other DNA
tgtatttctgcacggtggtgtgtgcgttatatctggtgagtggcggatataaggtaatacgtaattatgtccgcc

SEQ ID NO: 154101 - DNA, 75 bp, synthetic construct
  source 1..75: mol_type = other DNA
caatggcctctgtggtgggttatcaaggtaaaattgtttttgatgttactaaacctgatggcactccgcgtaaac

SEQ ID NO: 154102 - DNA, 75 bp, synthetic construct
  source 1..75: mol_type = other DNA
ttcaggtgcattcgtgggtattcgttgccttaacgctggtgcttacggcggtgttgttctctttggctggactgc

SEQ ID NO: 154103 - DNA, 75 bp, synthetic construct
  source 1..75: mol_type = other DNA
tgaagagctgttggtggctccggtgccaacgcacgtaattattgccggatatgttggcggcggcgtggcgcgtgg

SEQ ID NO: 154104 - DNA, 75 bp, synthetic construct
  source 1..75: mol_type = other DNA
tcattctgttaactcatccacgtatgggagaacagttgtttcagtttgaacccagggaggtcagacggatttttg

SEQ ID NO: 154105 - DNA, 75 bp, synthetic construct
  source 1..75: mol_type = other DNA
aacgatttatctacaatctatcagaaatcaaatgatatcgcaatatattatctattccgtcagttcagctttata

SEQ ID NO: 154106 - DNA, 75 bp, synthetic construct
  source 1..75: mol_type = other DNA
aatggcaggaagtgtttcttcgctgaacgtttctgtggcgacagggatttgcttatttgaagcggtgcgacagcg

SEQ ID NO: 154107 - DNA, 75 bp, synthetic construct
  source 1..75: mol_type = other DNA
gaggcattggcagtggcaagagtaccgttgcaaatgcgtttgcagacctcggaattaacgtcattgatgccgata

SEQ ID NO: 154108 - DNA, 75 bp, synthetic construct
  source 1..75: mol_type = other DNA
gaaaggttagaaaagggtcaggacgatctagagttcgcacttaatgatttacgttctcagattcattcaatggat

SEQ ID NO: 154109 - DNA, 75 bp, synthetic construct
  source 1..75: mol_type = other DNA
gttgaactgcaacaggcggcagacaaagtcactgccactatcactgataaaaacggcgcggttgtgcgcaccatt

SEQ ID NO: 154110 - DNA, 75 bp, synthetic construct
  source 1..75: mol_type = other DNA
tgaagccttgcgcaatggcgtaaccttaaatgatggccctaccctgcccgcaggcgcggagctggttgacgaacc

SEQ ID NO: 154111 - DNA, 75 bp, synthetic construct
  source 1..75: mol_type = other DNA
ataatatggtggctgccgtttcagcagcactacagcctctggtaagggtagtgccgatgacggcagttgaatggg

SEQ ID NO: 154112 - DNA, 75 bp, synthetic construct
  source 1..75: mol_type = other DNA
ggacttgttcgtgcgctgaccgtgggcgtggcgtatcagacgacggtaggtggcattatgaacacctcggtggca

SEQ ID NO: 154113 - DNA, 75 bp, synthetic construct
  source 1..75: mol_type = other DNA
ttggtgcgtgcctgcgtagcgcggatgccgctggcgttcatgcagtgattgtgccgaaagatcgctccgctcaac

SEQ ID NO: 154114 - DNA, 75 bp, synthetic construct
  source 1..75: mol_type = other DNA
ccaggacgtcagtatcaggaaaacgatctgccggatctgatcgcttcgctcgatcaaccgttcctgctgatcctc

SEQ ID NO: 154115 - DNA, 75 bp, synthetic construct
  source 1..75: mol_type = other DNA
ctgattcgggtgactaacctggcgcgcaccatgcgtatgttgcaggaagagaatatttggatcgtcggtacggca

SEQ ID NO: 154116 - DNA, 75 bp, synthetic construct
  source 1..75: mol_type = other DNA
atgattttttattgtgcgctcagtataggaagggtgttttcggctacaatcaaaacatgcctgaatgtgcgccag

SEQ ID NO: 154117 - DNA, 75 bp, synthetic construct
  source 1..75: mol_type = other DNA
gcgtgtatctgtgtgaagtggggacagacaccgcaaaagaaattctctatgcccgtatgaaagccgagcccacgc

SEQ ID NO: 154118 - DNA, 75 bp, synthetic construct
  source 1..75: mol_type = other DNA
ctgagctttgagttgttgctggaaaaagtctgccactatgatgcgcaggttcccctgcgggtggtttacctgacc

SEQ ID NO: 154119 - DNA, 75 bp, synthetic construct
  source 1..75: mol_type = other DNA
tgatagttttcgtctgaccatcaaagtgcggcaattaagcgaaggatttcgtgacgaacagtggatttctgcact

SEQ ID NO: 154120 - DNA, 75 bp, synthetic construct
  source 1..75: mol_type = other DNA
atctggacggcgtacagcccgttcaccacctgggttcagattgtcaaagactggatgaagacgaaaggggatacg

SEQ ID NO: 154121 - DNA, 75 bp, synthetic construct
  source 1..75: mol_type = other DNA
tacgatgaccgtatgacagaaattctgcgaattgcgcaaacctacgaaccatggctggatttctgggaactggtt

SEQ ID NO: 154122 - DNA, 75 bp, synthetic construct
  source 1..75: mol_type = other DNA
aacggcctgaaaacctttgtgaacaccacgctgggcgagacctgggaagaagccgtgggcgaaaaactcgatcac

SEQ ID NO: 154123 - DNA, 75 bp, synthetic construct
  source 1..75: mol_type = other DNA
tgcggttttatgtgccatgccctcattgtggtgaggcccagtatctgaagtttggcgatgatgcgacaacctttg

SEQ ID NO: 154124 - DNA, 75 bp, synthetic construct
  source 1..75: mol_type = other DNA
tcctccggtgtgggattctggtgtctgggcggcgctgctgccaaaaactaccgtgaaaaatctgtggatgtggtc

SEQ ID NO: 154125 - DNA, 75 bp, synthetic construct
  source 1..75: mol_type = other DNA
tggaaaacgctgccgtttcagatcgccatcatgaatagcatgggaaacgatcatatccgcactgttaatctgatt

SEQ ID NO: 154126 - DNA, 75 bp, synthetic construct
  source 1..75: mol_type = other DNA
ctatttgctgcttaatgaactcaggcgtcagcgttttcttagccttgatcaccaggaaaatttttgtttgtggac

SEQ ID NO: 154127 - DNA, 75 bp, synthetic construct
  source 1..75: mol_type = other DNA
tgatgaataaagccatcgaaaaaggcgtggcggcggaaaacgtcatcttcttccccaactggtcggaaatcgccc

SEQ ID NO: 154128 - DNA, 75 bp, synthetic construct
  source 1..75: mol_type = other DNA
actactcgccggagttaaccggcatcggcaaatacaccggagagatggtggaatggctggcggcacaaggtcatg

SEQ ID NO: 154129 - DNA, 75 bp, synthetic construct
  source 1..75: mol_type = other DNA
gcgttaagcaagatggatctccgggaactggcacgcccacgcctgacgcaactgatggataccactggactgttg

SEQ ID NO: 154130 - DNA, 75 bp, synthetic construct
  source 1..75: mol_type = other DNA
cgtcagcgttttctgagtcttgatcaccaggaaaatttttgtctgtggaccaggctggtggagctttccggccat

SEQ ID NO: 154131 - DNA, 75 bp, synthetic construct
  source 1..75: mol_type = other DNA
gcgacacccacaacgattactcatccacagcaacttcacgaagaactggcgcgtattcgccgtcagggctggagc

SEQ ID NO: 154132 - DNA, 75 bp, synthetic construct
  source 1..75: mol_type = other DNA
aacggacaccgcaaaagaaattctctatgcccgtatgaaagccgatcccacgcctgcggatgaagccacgtcgta

SEQ ID NO: 154133 - DNA, 75 bp, synthetic construct
  source 1..75: mol_type = other DNA
ctcggcaatgtgcctgcacctatcctgactgaagagggccgcctggtcttccgactccatttcatgtgcgtttac

SEQ ID NO: 154134 - DNA, 75 bp, synthetic construct
  source 1..75: mol_type = other DNA
gcggtgcctgcccgggtggtttatctgacggcgggcattgactcgcagcgaaaccgttttgagatgtatgtctgg

SEQ ID NO: 154135 - DNA, 75 bp, synthetic construct
  source 1..75: mol_type = other DNA
ttttttcgcagacagaggcgcagcaactggtcgcggaagagcttgtggagaagtgggaaaaaggaaagatgcgtc

SEQ ID NO: 154136 - DNA, 75 bp, synthetic construct
  source 1..75: mol_type = other DNA
tgcggatttaatgacgcgtcgcgcagcaattattatgcgcggctatatttccggcctgatggaaaactggctctt

SEQ ID NO: 154137 - DNA, 75 bp, synthetic construct
  source 1..75: mol_type = other DNA
tttgatcttaaaaaagaagcccgcgattacgtcgccatcttactggagatgtatctcctgtgccccacgcttcgt

SEQ ID NO: 154138 - DNA, 75 bp, synthetic construct
  source 1..75: mol_type = other DNA
gggttatgacgtcaaagtcggaaataacgttaccttcaccgttggtaaaacgaaaaaggatgataccgggcagac

SEQ ID NO: 154139 - DNA, 75 bp, synthetic construct
  source 1..75: mol_type = other DNA
ggctggtgctgacgaaggacggacaaatttttctcaacggcacaaaaattcatttgcagggtaaggagcaggtta

SEQ ID NO: 154140 - DNA, 75 bp, synthetic construct
  source 1..75: mol_type = other DNA
cccgccacgttctgtcactttccacatctggacggcgtacagcccgttcactacctgggcgcagattgtttatga

SEQ ID NO: 154141 - DNA, 75 bp, synthetic construct
  source 1..75: mol_type = other DNA
ccatacgcggttcaacgccaaaaatcaaaggctcctgccagattgaaaaagccgcgaatgaatctgcacatttca

SEQ ID NO: 154142 - DNA, 75 bp, synthetic construct
  source 1..75: mol_type = other DNA
ctggatttgtgacaataccgggatgtggacgcgtgacggtctggcatttttcagtgccagtgatgaggagatgcc

SEQ ID NO: 154143 - DNA, 75 bp, synthetic construct
  source 1..75: mol_type = other DNA
ctggatttgtgacaataccgggatgtggacgcacgacggcctggcattttacagcgccggtgatgaggagatgcc

SEQ ID NO: 154144 - DNA, 75 bp, synthetic construct
  source 1..75: mol_type = other DNA
acagcgccggtgatgaggaaatcccgccaccgcgctcaatctcgtaccacatctggacggcatacagcccgttca

SEQ ID NO: 154145 - DNA, 75 bp, synthetic construct
  source 1..75: mol_type = other DNA
tgccgtgatccggaaaaaataccgtcatgcagatggcactgaaatttccatttcccgcgtctgctgggataccgg

SEQ ID NO: 154146 - DNA, 75 bp, synthetic construct
  source 1..75: mol_type = other DNA
ctggtggataaaatcatcattatggggcgtcctgatgaggaagagacgctgttacgtgtggatgcggcgatcaac

SEQ ID NO: 154147 - DNA, 75 bp, synthetic construct
  source 1..75: mol_type = other DNA
aagccaccttgctggcggcagcgttaattcatccgctctcgtctcacaccgtcattactggaaaacgtcgccgtg

SEQ ID NO: 154148 - DNA, 75 bp, synthetic construct
  source 1..75: mol_type = other DNA
tttgtggttttgcgctttcgcgaagcaccgccatatgaccatcaaagggcaaaagctggtgctgccttcgtggaa

SEQ ID NO: 154149 - DNA, 75 bp, synthetic construct
  source 1..75: mol_type = other DNA
aatcgctggaatgtttcagtttgctgcagatcacggttacttagaagcaaatcccttccagggaattaagcctct

SEQ ID NO: 154150 - DNA, 75 bp, synthetic construct
  source 1..75: mol_type = other DNA
ggatctgaaaaagatggaaatcagcgcgaacgcgcacaaacggtacgagtcggtcgtggcagttgttgtaccgct

SEQ ID NO: 154151 - DNA, 75 bp, synthetic construct
  source 1..75: mol_type = other DNA
atgtaactcgaggattgaaaatttgggatttcccatttgatgaaaataagatgcatcttttcactataaaaaaag

SEQ ID NO: 154152 - DNA, 75 bp, synthetic construct
  source 1..75: mol_type = other DNA
cagctatcagacgggggcgacgctttctctttttaatgccgcccatcaaccatggctctttatcccctatctcag

SEQ ID NO: 154153 - DNA, 75 bp, synthetic construct
  source 1..75: mol_type = other DNA
acgatattgccgacagtacccagcgcattggcaccattacttcgctgattaacgatattgcgtttcagaccaata

SEQ ID NO: 154154 - DNA, 75 bp, synthetic construct
  source 1..75: mol_type = other DNA
agggcttatacctttatctggggcatggtcggtgaaaaccaggtctttgatgatatggaccacgttgccattaaa

SEQ ID NO: 154155 - DNA, 75 bp, synthetic construct
  source 1..75: mol_type = other DNA
aatcctgtggaagctgtatcaccgctcccttcaccggtttctgctccgtcaccggctccggaggcgtcagtgacg

SEQ ID NO: 154156 - DNA, 75 bp, synthetic construct
  source 1..75: mol_type = other DNA
agggggtataccagaaccgaagtcgttatccggtgttttatcgtatggggagtggaactcagtacaccggagctg

SEQ ID NO: 154157 - DNA, 75 bp, synthetic construct
  source 1..75: mol_type = other DNA
cacgtttgtttttaatccgcaactggtgaaaaaatgccagcacgtcggccaccactataaagcagattccatcag

SEQ ID NO: 154158 - DNA, 75 bp, synthetic construct
  source 1..75: mol_type = other DNA
aatgcacaggtagctttgttaaatacacagttaaacgagtttgccccaaccatgccccataacgaagcaataaaa

SEQ ID NO: 154159 - DNA, 75 bp, synthetic construct
  source 1..75: mol_type = other DNA
cggatggaagtttatttctatttcaatatggatgatgacgcctgcgttttccacatgatggggcagccgcaagaa

SEQ ID NO: 154160 - DNA, 75 bp, synthetic construct
  source 1..75: mol_type = other DNA
cgcagaaatgcgacctttgtaaccagcgcagttccggcgcgcaagcctgtattgaggtctgcccaacgcaggcat

SEQ ID NO: 154161 - DNA, 75 bp, synthetic construct
  source 1..75: mol_type = other DNA
tgatgaagatggacgcttaacggcggtgggcctgattcgtaccgctatgggtgagccggggccggatggccgccg

SEQ ID NO: 154162 - DNA, 75 bp, synthetic construct
  source 1..75: mol_type = other DNA
cccgatgtcagccatgttgtaccccgcatggaaaaagtggcggtgattggcgcagggccagcagggctgggatgt

SEQ ID NO: 154163 - DNA, 75 bp, synthetic construct
  source 1..75: mol_type = other DNA
cccgatgtcagcatggtggttccccgtatcgaaaaagtggcggtgattggcgctgggcctgcaggattagggtgt

SEQ ID NO: 154164 - DNA, 75 bp, synthetic construct
  source 1..75: mol_type = other DNA
acaactggacgagcaaaaatgtattggttgtaaaagatgcgcaatcgcttgcccctttggcgtcgttgagatggt

SEQ ID NO: 154165 - DNA, 75 bp, synthetic construct
  source 1..75: mol_type = other DNA
agttcatggcgcggatctggttgtcactgcaatggccgcaggaaggcaggcggcgcgcgatatgttaactctgtt

SEQ ID NO: 154166 - DNA, 75 bp, synthetic construct
  source 1..75: mol_type = other DNA
ccctgcgtggcaagtcgggacggctgtatagagccaacagatatggcagcagaaatcagagaggtaaaacagaga

SEQ ID NO: 154167 - DNA, 75 bp, synthetic construct
  source 1..75: mol_type = other DNA
aatgccaattttcagaagctaaatagtgatttaactaaaacaggcatttgcgatctgattactgctgttccgtaa

SEQ ID NO: 154168 - DNA, 75 bp, synthetic construct
  source 1..75: mol_type = other DNA
cttattcacctgcgccagtcgcattgccgatgaccaagttaatgtctggaagaagcacgcggcaaaagagggcaa

SEQ ID NO: 154169 - DNA, 75 bp, synthetic construct
  source 1..75: mol_type = other DNA
ctgcggaatgtataggctgtcatgcctgtgaaattgcctgtgcggtggcacataatcatgaaaactggccacaga

SEQ ID NO: 154170 - DNA, 75 bp, synthetic construct
  source 1..75: mol_type = other DNA
gtaatctggaacgctacatcaccgataccgcgctggcgatgggctggcgtcccgatgtcagcaaagttgttcccc

SEQ ID NO: 154171 - DNA, 75 bp, synthetic construct
  source 1..75: mol_type = other DNA
ttgtgaaggcgcatgtactttgaaagatcactctggcgcagtctctatcggtaatctggaacgctacatcaccga

SEQ ID NO: 154172 - DNA, 75 bp, synthetic construct
  source 1..75: mol_type = other DNA
aatcaccgacgagcgtaaaaaagcgatcgatttctctgacggctactacaaaagcggcctgttagtgatggtgaa

SEQ ID NO: 154173 - DNA, 75 bp, synthetic construct
  source 1..75: mol_type = other DNA
ggtggcggtacgacgaacgcggctggctgacagacatcagccatatcagcgaagggcaccgggtgacggtgcatt

SEQ ID NO: 154174 - DNA, 75 bp, synthetic construct
  source 1..75: mol_type = other DNA
aagccaacctggccatgtatttaatgttgtaaaccaaaatggtacagtaagatttctcgatggacaaactggtgg

SEQ ID NO: 154175 - DNA, 75 bp, synthetic construct
  source 1..75: mol_type = other DNA
gaaacccatggatttcagcggcattattccggcgctgcaaaccaaaaacgttgatctggcgctggctggcatcac

SEQ ID NO: 154176 - DNA, 75 bp, synthetic construct
  source 1..75: mol_type = other DNA
ttcggtactgaaccgaaataataacgctacacctgtaaaacgcactggcagttccctctcccctctggggagagg

SEQ ID NO: 154177 - DNA, 75 bp, synthetic construct
  source 1..75: mol_type = other DNA
tggcagcactgaccctggcttttgcggtttcttcccatgccgcagataaaaaattagttgtcgcgacagataccg

SEQ ID NO: 154178 - DNA, 75 bp, synthetic construct
  source 1..75: mol_type = other DNA
atccttctggtaaaagatcatggcgtctatctgattaccaatgcatctctggatggaacccctgtttcccgtgat

SEQ ID NO: 154179 - DNA, 75 bp, synthetic construct
  source 1..75: mol_type = other DNA
cgcaacgatctggcgtttctggaaaagcaggggatcgctgtgcgtgcctatggtggcgcgttgatctgcgatagc

SEQ ID NO: 154180 - DNA, 75 bp, synthetic construct
  source 1..75: mol_type = other DNA
atgagtaataccgacgcttcaggcgagaagcgagtgacaggcaccagtgagcgacgagagcagatcattcaacgc

SEQ ID NO: 154181 - DNA, 75 bp, synthetic construct
  source 1..75: mol_type = other DNA
tttgttgatgcgtcagctcgcggacttggcgtcgggaaacatctgatctcacatgcgctggctctacatcctgat

SEQ ID NO: 154182 - DNA, 75 bp, synthetic construct
  source 1..75: mol_type = other DNA
ggcactggacatggaatcaattgatagaatgaagcttgaatctatccgagaaaaagtaacaaaactgaagagtat

SEQ ID NO: 154183 - DNA, 75 bp, synthetic construct
  source 1..75: mol_type = other DNA
gtttgccatgcactggggtatcatttatttgatcataaatcatgtgttttaaaaattaaaagaacgagtttggat

SEQ ID NO: 154184 - DNA, 75 bp, synthetic construct
  source 1..75: mol_type = other DNA
gaatacgggggacggaacggttattctggcacagaaggctgatgctgcaggcagggtccgggcattcagtgaagt

SEQ ID NO: 154185 - DNA, 75 bp, synthetic construct
  source 1..75: mol_type = other DNA
acaaaagactacggctctcattcctggtatgccggtgctgaagtgggttaccgctatcatgtcacagaggatgcc

SEQ ID NO: 154186 - DNA, 75 bp, synthetic construct
  source 1..75: mol_type = other DNA
aaaaagtcgtccggcattcccggtgcggggatgctttcccgtcttcttctggcctcaggtgccgttgccggtgtt

SEQ ID NO: 154187 - DNA, 75 bp, synthetic construct
  source 1..75: mol_type = other DNA
gacaaggctccgatgatggatttcagtgttgtggaccagatactgggggtggcaacactgatttctccgcagtat

SEQ ID NO: 154188 - DNA, 75 bp, synthetic construct
  source 1..75: mol_type = other DNA
gtcaggaatgatgtgtatgaacgtctgctggcctggtcagaggagcgtggcgggctgaacggaagcggtgagtat

SEQ ID NO: 154189 - DNA, 75 bp, synthetic construct
  source 1..75: mol_type = other DNA
tacattccgcgggaatgtgaatatgcgtcattcttccctgacggtccgcgaccattttaccggcagtataacggc

SEQ ID NO: 154190 - DNA, 75 bp, synthetic construct
  source 1..75: mol_type = other DNA
tcgaccccctgggtttatctatgtgggaggatgcaaaatcgggggcatgtactaatggtctttgcggcacactat

SEQ ID NO: 154191 - DNA, 75 bp, synthetic construct
  source 1..75: mol_type = other DNA
atgagtgaaaaggtggtgttcagtcaactgagccgtaaatttattgatgagaacgatgccacgcccgccgaggcg

SEQ ID NO: 154192 - DNA, 75 bp, synthetic construct
  source 1..75: mol_type = other DNA
aaagcggcctgttagtgatggtgaaagccaacaataacgacgttaaaagcgtgaaagatctcgacggtaaagtgg

SEQ ID NO: 154193 - DNA, 75 bp, synthetic construct
  source 1..75: mol_type = other DNA
ccatcattctgccgccgctcggcgtgctgctcggtaaagggttcggttgggcgttcattattaatattctgctga

SEQ ID NO: 154194 - DNA, 75 bp, synthetic construct
  source 1..75: mol_type = other DNA
gattttatgacgggggcagctggtctcctgcggggttatgtcagagggagtgcaggtaatgtgaatctgcagaat

SEQ ID NO: 154195 - DNA, 75 bp, synthetic construct
  source 1..75: mol_type = other DNA
ggggatgtgaataacacgataaagcaggacagttcaggcactgtcgtgccggcagttgccggtggtgacattgtg

SEQ ID NO: 154196 - DNA, 75 bp, synthetic construct
  source 1..75: mol_type = other DNA
gtgtttaccgttgcgggtacgaatggcaaaggcaccacctgccgtacgctggagtcgattctgatggcggcaggg

SEQ ID NO: 154197 - DNA, 75 bp, synthetic construct
  source 1..75: mol_type = other DNA
atacgatgcctgttgctgttcagccaggagcttttctgccatccgcgagccagtgtgacagctgatgaagaatgt

SEQ ID NO: 154198 - DNA, 75 bp, synthetic construct
  source 1..75: mol_type = other DNA
atacgatgcctgttgctgttcagccaggagcttttctgccatccgcgagccagtgtgacagatgatgaagcatgt

SEQ ID NO: 154199 - DNA, 75 bp, synthetic construct
  source 1..75: mol_type = other DNA
caattttaccgggacgtttccagattgtgagtgagttgccacgcgtcatttttgatgtcgcccataatccacatg

SEQ ID NO: 154200 - DNA, 75 bp, synthetic construct
  source 1..75: mol_type = other DNA
ccgcttgtcccacaaccaaatgccgcaacggcgctggcagcacttcgcgccagcggcctggaggtcagtgaacag

SEQ ID NO: 154201 - DNA, 75 bp, synthetic construct
  source 1..75: mol_type = other DNA
aagactatcgatctcggccttgagcgcgtaagccaggtggcagcgcgtctcggcgttctgaaaccagcaccgttt

SEQ ID NO: 154202 - DNA, 75 bp, synthetic construct
  source 1..75: mol_type = other DNA
ttcagatacgctgtcagctcgccaacaggccatcccgttgattgcggcatcgatggccaggagtcagatggataa

SEQ ID NO: 154203 - DNA, 75 bp, synthetic construct
  source 1..75: mol_type = other DNA
cctgacggcagcgcagctgcgccagctggcacaggttctgcgtgaacatggcgaaagtgatgcagcaacgcgagc

SEQ ID NO: 154204 - DNA, 75 bp, synthetic construct
  source 1..75: mol_type = other DNA
ttcagatacgctgtcagctcgccagcaggccattccgttgattgccgcatcaatggccagtagtcagatggataa

SEQ ID NO: 154205 - DNA, 75 bp, synthetic construct
  source 1..75: mol_type = other DNA
caacagcgacgattttcgtactctcgacatggtctccgccagcgcggtggatgccggtcagccgctgttgtccgt

SEQ ID NO: 154206 - DNA, 75 bp, synthetic construct
  source 1..75: mol_type = other DNA
ggcgcgccgttcaccgcccatgtaaaagagggtgacaaaatcaaagcgggcgacctgctgctggagtttgaccgc

SEQ ID NO: 154207 - DNA, 75 bp, synthetic construct
  source 1..75: mol_type = other DNA
ataattgagtttacccttccggaaggacgaggacaaccttcccgcaaagtccagcaggagctacgcttagcaagg

SEQ ID NO: 154208 - DNA, 75 bp, synthetic construct
  source 1..75: mol_type = other DNA
gtaatggttagctctggttctacagctaatctgttaatgattgctgcccttttcttcactaataaaccaaaactt

SEQ ID NO: 154209 - DNA, 75 bp, synthetic construct
  source 1..75: mol_type = other DNA
tgctgtgcattcgagctcatggttggacgcgtaatttaccgaaaaaaaataaagttacaggtgtgaagagtgatg

SEQ ID NO: 154210 - DNA, 75 bp, synthetic construct
  source 1..75: mol_type = other DNA
ggcagagatcctggcgaaagactacggcgtaggttctgacgtttatagcgtgacctcattcaccgaactggcgcg

SEQ ID NO: 154211 - DNA, 75 bp, synthetic construct
  source 1..75: mol_type = other DNA
tattgacctagcgctgagagaaataaaacatcaactccttccaataaacaggaagcatattaatcttggaaagat

SEQ ID NO: 154212 - DNA, 75 bp, synthetic construct
  source 1..75: mol_type = other DNA
atattttcgaagagtcgtttaagtttgttttaccaggatacaatgttcgcccacttgaaatgagtggtgctattg

SEQ ID NO: 154213 - DNA, 75 bp, synthetic construct
  source 1..75: mol_type = other DNA
ttaccctctgcaacagtatggcttaaaggtgaagtttgtcgatatcaataaagaaactttaaatattgatatcga

SEQ ID NO: 154214 - DNA, 75 bp, synthetic construct
  source 1..75: mol_type = other DNA
gtacataagcgcctgccgaagtggaactataagggtgcagagctggcgctatggcatcgtgaccagcagatcaat

SEQ ID NO: 154215 - DNA, 75 bp, synthetic construct
  source 1..75: mol_type = other DNA
aatcgccacaccgcaaaaaacattgtattgcggttatcttaaaatccgccgcgatggcgcgtggctgcgcataca

SEQ ID NO: 154216 - DNA, 75 bp, synthetic construct
  source 1..75: mol_type = other DNA
tgctggtgtgtggttcgttccacacggtcgcacatgtcatggaagtgattgacgcgaggagaagcggtggcaagt

SEQ ID NO: 154217 - DNA, 75 bp, synthetic construct
  source 1..75: mol_type = other DNA
gtatccgtaaaggtatctacaaaatcgaaaccattgaaggtagcaaaggtaaagttcagctgctcggctccggtt

SEQ ID NO: 154218 - DNA, 75 bp, synthetic construct
  source 1..75: mol_type = other DNA
cgctgctggaagagcagagcaaagagatctctaccactatcgctttcgttcgtgctctgaacgtgatgctgaaga

SEQ ID NO: 154219 - DNA, 75 bp, synthetic construct
  source 1..75: mol_type = other DNA
ccgcgcttctctccactaaccccgaatgggcacccgatattccgctgaacgctggcggctttgaggcgtaccact

SEQ ID NO: 154220 - DNA, 75 bp, synthetic construct
  source 1..75: mol_type = other DNA
aacatagacgttgtcgctattaatgatctcacatcaccgaaaattctcgcctatctgctgaaacacgattcaaac

SEQ ID NO: 154221 - DNA, 75 bp, synthetic construct
  source 1..75: mol_type = other DNA
cgtggaaagcgaaaggtgcagaaatcattgttgaatgtaccggcttttatacatccgcagagaaatcgcaggcac

SEQ ID NO: 154222 - DNA, 75 bp, synthetic construct
  source 1..75: mol_type = other DNA
ggtgatcccagaactgagcggcaaactgaaaggtcatgcgcaacgcgtacccgtgaaaacaggttcggtgactga

SEQ ID NO: 154223 - DNA, 75 bp, synthetic construct
  source 1..75: mol_type = other DNA
gtagtgccggaagtcagcggtcgtattgtggaactggcagtcacagacaaccaggcagtcaaacagggcgatttg

SEQ ID NO: 154224 - DNA, 75 bp, synthetic construct
  source 1..75: mol_type = other DNA
ccgcgcagcgcgccgcagaagccgatcttaatgccgtattgttacaggcgcagtcagccgccaacgcgtctcggc

SEQ ID NO: 154225 - DNA, 75 bp, synthetic construct
  source 1..75: mol_type = other DNA
tccctcaaaacctccgtcgggcaatttgcttctgccatgcgccctatttttaccctaatcgacactcgtcactag

SEQ ID NO: 154226 - DNA, 75 bp, synthetic construct
  source 1..75: mol_type = other DNA
ggcaaacggattagctacgttgatttgcgttatgactctggagcggcagtaggctgggcgcccttgccgccatag

SEQ ID NO: 154227 - DNA, 75 bp, synthetic construct
  source 1..75: mol_type = other DNA
gaaacgtttggctcgctttgtagaactttatccggttttacagcagcaggcgcaaactgatggcaaacggattag

SEQ ID NO: 154228 - DNA, 75 bp, synthetic construct
  source 1..75: mol_type = other DNA
aatatccctggaggatacaccggaggagatattacttataaaacaattaacgattatggtgccctgactgaacag

SEQ ID NO: 154229 - DNA, 75 bp, synthetic construct
  source 1..75: mol_type = other DNA
ccgagaaatcgcaggcgcatcttgatgctggtgcgaagaaggtgttgatttccgcccctgccggtgaaatgaaaa

SEQ ID NO: 154230 - DNA, 75 bp, synthetic construct
  source 1..75: mol_type = other DNA
ggtgatcccggagcttagcggcaaactgaaaggccacgcgcaacgtgtgccagtgaaaacgggctcagtaaccga

SEQ ID NO: 154231 - DNA, 75 bp, synthetic construct
  source 1..75: mol_type = other DNA
actgatttccgcccctgccggtgagatgaaaactatcgtttataacgtcaatgacgacactctggatggcaacga

SEQ ID NO: 154232 - DNA, 75 bp, synthetic construct
  source 1..75: mol_type = other DNA
attgttataggcggctatgaaagcgcggtggatgccgctgtaaacctgctggaaaatggctcatcggtaaaaatg

SEQ ID NO: 154233 - DNA, 75 bp, synthetic construct
  source 1..75: mol_type = other DNA
atcagggagtatctcatcgcgaattatcaaaaaagtacggtcattctgttcagtggatttataagattattgccg

SEQ ID NO: 154234 - DNA, 75 bp, synthetic construct
  source 1..75: mol_type = other DNA
ttcaatacactcctgaactggatgcgcaacgactcaaactgacctttccgcaggcaatattaaagcatgaagccc

SEQ ID NO: 154235 - DNA, 75 bp, synthetic construct
  source 1..75: mol_type = other DNA
agccacgcaagcaccttaaaatcaccatcatacactaaatcagtaagttggcagcattacccctggagtgaaaca

SEQ ID NO: 154236 - DNA, 75 bp, synthetic construct
  source 1..75: mol_type = other DNA
cgtccggcattgataacaaccatgatgaggatggcaacatggcaaaatattatgaaaactggaaattgttctcgc

SEQ ID NO: 154237 - DNA, 75 bp, synthetic construct
  source 1..75: mol_type = other DNA
atcgctttccccttatacccgtgagcgtttgaacagagtgatgaatcaccgtcttttcgaaatttatgaagatgc

SEQ ID NO: 154238 - DNA, 75 bp, synthetic construct
  source 1..75: mol_type = other DNA
gccctattttcaccctaatcgacactcgtcactggtacgtgatcgccaacttccgcgaaaccgatctgaaaaata

SEQ ID NO: 154239 - DNA, 75 bp, synthetic construct
  source 1..75: mol_type = other DNA
ttcatgccggtacgcctgcgacaattcgcctgatgagcgacagcggcaaaatcttcgaaggtaaagtggattcca

SEQ ID NO: 154240 - DNA, 75 bp, synthetic construct
  source 1..75: mol_type = other DNA
ttcatgctggtacgcctgcaaccattcgcctgatgagcgacagcggcaaaacctttgaaggtaaagtggattcta

SEQ ID NO: 154241 - DNA, 75 bp, synthetic construct
  source 1..75: mol_type = other DNA
aacacggaatggcaaggcacaagcagatgaagcggtgtatgctgcttctactgacacttttgcctgcgtgttcag

SEQ ID NO: 154242 - DNA, 75 bp, synthetic construct
  source 1..75: mol_type = other DNA
taaactatatatgcgttactttgatatatatgctatgacttctttaagtgagggttttggtctagctgcagttga

SEQ ID NO: 154243 - DNA, 75 bp, synthetic construct
  source 1..75: mol_type = other DNA
ctggaactggaacgccgtattcgttcagctatccgctggaacgccatcatgacggtgctgcgtgcgtcgaaaaaa

SEQ ID NO: 154244 - DNA, 75 bp, synthetic construct
  source 1..75: mol_type = other DNA
gaaacgtagcgttgcaaaggcagccgtcgagttaattcaaccgggtcatcgcatcattcttgactcaggaaccac

SEQ ID NO: 154245 - DNA, 75 bp, synthetic construct
  source 1..75: mol_type = other DNA
tagcaatacggacagtcaaaatattgaatttcgttttactggcgtagcagacggtgccaaccagacgcttgccaa

SEQ ID NO: 154246 - DNA, 75 bp, synthetic construct
  source 1..75: mol_type = other DNA
cgctttcacgggcatcgatactgaagcaacgggtgccagtaaccagactaacttcaacattaaactaaccgattg

SEQ ID NO: 154247 - DNA, 75 bp, synthetic construct
  source 1..75: mol_type = other DNA
actacctttcggttgatgatcttactgaaattaatcgccttttaattgagcttcaaacaccagatgaacctgttg

SEQ ID NO: 154248 - DNA, 75 bp, synthetic construct
  source 1..75: mol_type = other DNA
agaagcgagtaacaggcaccagtgagagacgagaacagatcattcagcgcctgcggcagcaaggaagtgtgcaag

SEQ ID NO: 154249 - DNA, 75 bp, synthetic construct
  source 1..75: mol_type = other DNA
cgcgttgatctgcgatagcacgacgccgtcagtcgagccatcagtggaagataaaagcgcgctgaacaccgcgat

SEQ ID NO: 154250 - DNA, 75 bp, synthetic construct
  source 1..75: mol_type = other DNA
tctcagcgaaaaaatcttcaacgctctggtaaagctctaccctaataaagctgttgaagatttccagcttcagcg

SEQ ID NO: 154251 - DNA, 75 bp, synthetic construct
  source 1..75: mol_type = other DNA
actcgtggatataatcgttcttcgtgcgcactcggtatcatcttcgacatactaggttgtttcctgattgttaca

SEQ ID NO: 154252 - DNA, 75 bp, synthetic construct
  source 1..75: mol_type = other DNA
tgcgccgccgcgccgaaaggtaactgggtggtgattgacggcggtagcgcaccggaaaacgacatcgtcgctatc

SEQ ID NO: 154253 - DNA, 75 bp, synthetic construct
  source 1..75: mol_type = other DNA
tcttaacgccgtgttgttgcaggcgcagtcagccgccagcgccgtcagcggcgtcgatgcgctggtggcacaacg

SEQ ID NO: 154254 - DNA, 75 bp, synthetic construct
  source 1..75: mol_type = other DNA
ttgagcttgaaatggtggatgatctggccttgctactggacgattatcctggggatatgcgcccgtttcttcagt

SEQ ID NO: 154255 - DNA, 75 bp, synthetic construct
  source 1..75: mol_type = other DNA
gtcaagcaggttgattttgtaatcaacgaaagtagacatatttttgttgaagtaataggttgcacctacatcaac

SEQ ID NO: 154256 - DNA, 75 bp, synthetic construct
  source 1..75: mol_type = other DNA
ttcttctcaggcccgtcccagcatggttcgatggtataaacagatcaatgacatgtttgtactggcatcggtatt

SEQ ID NO: 154257 - DNA, 75 bp, synthetic construct
  source 1..75: mol_type = other DNA
gatggcgtcgtgacgttaaacgacatgcaaggtcaatcgcctgtgctggcgctgacaggggaaggcatgttgaat

SEQ ID NO: 154258 - DNA, 75 bp, synthetic construct
  source 1..75: mol_type = other DNA
ttagtttgaccgccaatgacagtacgctgagcgggcaagcacaggtcacgttgacagagaaaccggaatggcagc

SEQ ID NO: 154259 - DNA, 75 bp, synthetic construct
  source 1..75: mol_type = other DNA
gattgaaagtctgattcagaatcatccgtttgctaatgcgaacaaacgaacagctatgatggctggttacgtctt

SEQ ID NO: 154260 - DNA, 75 bp, synthetic construct
  source 1..75: mol_type = other DNA
attaccttacggttgatgatcttgttgaaatcaatcgttccctaattgaattacagacgccagatgagcccgttg

SEQ ID NO: 154261 - DNA, 75 bp, synthetic construct
  source 1..75: mol_type = other DNA
atggctgagattgttgaaggagtgcattaccttacggttgatgatcttgttgaaatcaatcgttccctaattgaa

SEQ ID NO: 154262 - DNA, 75 bp, synthetic construct
  source 1..75: mol_type = other DNA
aacacttacaggacgaagcgaaacgtcgcctgaatgactgggccgagcggaataaagattcccgcaatggcaaag

SEQ ID NO: 154263 - DNA, 75 bp, synthetic construct
  source 1..75: mol_type = other DNA
ggtaaaatgtcactggcgggggatttctctggtgctgacatagatgccgaagcatttcgccgtaactggcaaggg

SEQ ID NO: 154264 - DNA, 75 bp, synthetic construct
  source 1..75: mol_type = other DNA
acatgcgtctggacgtggcgcttttaccactactgagtcatcaactgagcgttaagcaggtgatgctaaaagggg

SEQ ID NO: 154265 - DNA, 75 bp, synthetic construct
  source 1..75: mol_type = other DNA
agcttccagccacggctggagaacgttgagattggcaccattctgaaggcatttaactatccgatttcgttaacc

SEQ ID NO: 154266 - DNA, 75 bp, synthetic construct
  source 1..75: mol_type = other DNA
taagattgcagttttcgcaactgaatcttgataatcttataccgcttaatgaagccgttaacagtgaaaacggaa

SEQ ID NO: 154267 - DNA, 75 bp, synthetic construct
  source 1..75: mol_type = other DNA
aacttccagccacggctggaaaacgttgagattggcaccattctgaaggcgtttaactatccgatttcgttgacc

SEQ ID NO: 154268 - DNA, 75 bp, synthetic construct
  source 1..75: mol_type = other DNA
tgagtggtctggcggtagccccgcgaacggggctgccagctctcagacgattactcgcctttcacacgctcaata

SEQ ID NO: 154269 - DNA, 75 bp, synthetic construct
  source 1..75: mol_type = other DNA
gcggaatctcgcagaaatggtttgagttcctcaacgctggcgaacgcattatcgcgcccatggccgaaaggagag

SEQ ID NO: 154270 - DNA, 75 bp, synthetic construct
  source 1..75: mol_type = other DNA
gaggccgtattccgtattacccgggagaaaaataccggcggtgttcagatagacccgatgcagttcgcaaaatat

SEQ ID NO: 154271 - DNA, 75 bp, synthetic construct
  source 1..75: mol_type = other DNA
caaagctggaagaacaacgggcacggatcaacgccgagatacagcgggtcaaggcacgggagcaacagcagaagc

SEQ ID NO: 154272 - DNA, 75 bp, synthetic construct
  source 1..75: mol_type = other DNA
ggataggggcaggaatagtaatcattggagtgattttactagaactaattcccgaacataaaaaaacgcccagga

SEQ ID NO: 154273 - DNA, 75 bp, synthetic construct
  source 1..75: mol_type = other DNA
aaagaatttcttatggaatgttcaggcgcggagcagaataccgccgctgttagcagggttatttcaatgtttgga

SEQ ID NO: 154274 - DNA, 75 bp, synthetic construct
  source 1..75: mol_type = other DNA
ctcctttcatcattcgaaatatcttcgtaacaaatgagcagtatgtaaatgtaggtgatgatataatgtctatag

SEQ ID NO: 154275 - DNA, 75 bp, synthetic construct
  source 1..75: mol_type = other DNA
ttcaagagaaaatttacatgatatagatgagaaaatcagcaatactgaattgactattatgggactggacataga

SEQ ID NO: 154276 - DNA, 75 bp, synthetic construct
  source 1..75: mol_type = other DNA
aagaaagattcagaaccacatatctatgcccgcttatcagagtttataggcgagcactttcctcaagccagtaac

SEQ ID NO: 154277 - DNA, 75 bp, synthetic construct
  source 1..75: mol_type = other DNA
atatttgaagcatgagtggaaaaaaaagaaaaattcagaaccacatatctattcccgcttatcagagtttatagg

SEQ ID NO: 154278 - DNA, 75 bp, synthetic construct
  source 1..75: mol_type = other DNA
gaacttcttgataaattttttattgatgtaaaaattgatcctgtttctttacatggtaacataaaagaaaagaaa

SEQ ID NO: 154279 - DNA, 75 bp, synthetic construct
  source 1..75: mol_type = other DNA
aggggccgcgttttgcaggttccccgctgggtcacgagttcacctcgctggtactggcgctgctgtggaccggtg

SEQ ID NO: 154280 - DNA, 75 bp, synthetic construct
  source 1..75: mol_type = other DNA
aagatctggttaaatacgccgatgttggcgcgacttactatttcaataaaaacatgtccacttatgttgactata

SEQ ID NO: 154281 - DNA, 75 bp, synthetic construct
  source 1..75: mol_type = other DNA
gtcgctttgtattacccgctccccatacagatgtatggatacaccctgaagcaacattcgatatggagctttatg

SEQ ID NO: 154282 - DNA, 75 bp, synthetic construct
  source 1..75: mol_type = other DNA
tgattgtcgacgccacggatatggggctaaacccggcgaaatccgcatcatcgacccggatgatatcgccgagat

SEQ ID NO: 154283 - DNA, 75 bp, synthetic construct
  source 1..75: mol_type = other DNA
gtgactgacgttttactctgtgttggcaatagcatgatgggcgatgatggcgcaggcccgctgctggcggaaaag

SEQ ID NO: 154284 - DNA, 75 bp, synthetic construct
  source 1..75: mol_type = other DNA
ctgatgagcgtactgaacccgcgcattaaacacacggcgattgacggtggtacgttccagaacgaaatcaccgat

SEQ ID NO: 154285 - DNA, 75 bp, synthetic construct
  source 1..75: mol_type = other DNA
gaattgaataacctgtccattatatatcaaataaaagcggtcagtgctctggtaaaaggtaaaacagatgagtct

SEQ ID NO: 154286 - DNA, 75 bp, synthetic construct
  source 1..75: mol_type = other DNA
tttatctattcgctatgaaagaagtctatgaagaggcgggtacctggcctgtgaacggggctgatgttgatgatg

SEQ ID NO: 154287 - DNA, 75 bp, synthetic construct
  source 1..75: mol_type = other DNA
ggcggccatggccgggatgcttgccaataatggtcttcgcggaagcgatgctggcacggccatgcgcgcaagtct

SEQ ID NO: 154288 - DNA, 75 bp, synthetic construct
  source 1..75: mol_type = other DNA
atcttcgtctcctcctataccagaggcggctcctgacacagatccccccatccacagtccagatatccaataccc

SEQ ID NO: 154289 - DNA, 75 bp, synthetic construct
  source 1..75: mol_type = other DNA
atcttcgccaacctctataccagagacgattcctgatacagcttctcccgtccacaaccttaacatccaatacac

SEQ ID NO: 154290 - DNA, 75 bp, synthetic construct
  source 1..75: mol_type = other DNA
gtggccacaacgaatgcaggagacgctccagcaaattttgcctcatcgtggtgcgttattaactaatttttatca

SEQ ID NO: 154291 - DNA, 75 bp, synthetic construct
  source 1..75: mol_type = other DNA
cgaacttggcctcccagtgctggctcgggtggctggttatgccgtttctggcgtcgatcctgcctttatgggcat

SEQ ID NO: 154292 - DNA, 75 bp, synthetic construct
  source 1..75: mol_type = other DNA
atggcgtacacccgctggtctgacagtgttcaggattaccggcgtgatgaagtgaaaccggggtatgtgaaggag

SEQ ID NO: 154293 - DNA, 75 bp, synthetic construct
  source 1..75: mol_type = other DNA
atactgcgcgtcatctgtcgccggcatggagtgcgggtcttcagttcagcccggcagaaacggtgattattgatt

SEQ ID NO: 154294 - DNA, 75 bp, synthetic construct
  source 1..75: mol_type = other DNA
gataatcgccacgatctctgtcacctccggtgtcgataaggggattcgtgtgttatcggaacttaacgttgcgct

SEQ ID NO: 154295 - DNA, 75 bp, synthetic construct
  source 1..75: mol_type = other DNA
tcggcgctgtatccgattttcggtaaacggatcaacgggccgattggtcactcggtggatattgccgcggtgatc

SEQ ID NO: 154296 - DNA, 75 bp, synthetic construct
  source 1..75: mol_type = other DNA
ttgtttatgggcgacacttcgttcctgcttaatgcactggtgctgaatgttggcgactatgtgaatcgctttatg

SEQ ID NO: 154297 - DNA, 75 bp, synthetic construct
  source 1..75: mol_type = other DNA
ggcggcaactggcggcaccaaaacgtccgtcggggccaacaccaattgagttgctgaaacaggaatatgagcgcc

SEQ ID NO: 154298 - DNA, 75 bp, synthetic construct
  source 1..75: mol_type = other DNA
caaagcatgttagtaacggcctgagcgttccgccagtccggcgacaactggcggcccccaaacgcccgtcggggc

SEQ ID NO: 154299 - DNA, 75 bp, synthetic construct
  source 1..75: mol_type = other DNA
gcagaacgactgttggccaaatgggcaaagaatgttggtaacggcatgagtgttccgccagtgcgacgacaactg

SEQ ID NO: 154300 - DNA, 75 bp, synthetic construct
  source 1..75: mol_type = other DNA
cgacatttatacggagccattttattctggaccgcactgctgacaggcatttcccttcctgcacaggctgaaagc

SEQ ID NO: 154301 - DNA, 75 bp, synthetic construct
  source 1..75: mol_type = other DNA
gtgcattttccgtgggatatgctcaggttcacccgggcggcgtaccggcattgtccggtaccggtgcgcgtgcag

SEQ ID NO: 154302 - DNA, 75 bp, synthetic construct
  source 1..75: mol_type = other DNA
ctcagcctgtgctgtatcacatttgcctcgagatgcgttcaaaggggattgagcgtcagatgaccgaaggggagt

SEQ ID NO: 154303 - DNA, 75 bp, synthetic construct
  source 1..75: mol_type = other DNA
aaattgggtgtaatcataatggagattataatttagctaaattgatgatcgatgaggcttatagtgctggtgtaa

SEQ ID NO: 154304 - DNA, 75 bp, synthetic construct
  source 1..75: mol_type = other DNA
ttgaggatgtaaaccttaatgctattaatgatttgaaaaaacacttccctaagaataacataggcttctctgatc

SEQ ID NO: 154305 - DNA, 75 bp, synthetic construct
  source 1..75: mol_type = other DNA
tgtaacactgaatatcctacaccatatgaagatgtaaatttaaactcaattattggtctaaagaatgaatttaaa

SEQ ID NO: 154306 - DNA, 75 bp, synthetic construct
  source 1..75: mol_type = other DNA
atgagtaataccgacgcttcaggtgagaagcgagtgacaggcaccagcgagcgacgagaacagatcattcagcgc

SEQ ID NO: 154307 - DNA, 75 bp, synthetic construct
  source 1..75: mol_type = other DNA
atgcctaacaataacaatctcgacagtaacgtcagtcaaatcgttctgaaaaaattccttccgggttttatgtca

SEQ ID NO: 154308 - DNA, 75 bp, synthetic construct
  source 1..75: mol_type = other DNA
gataacattactacaaaacgacccggaaatggaattagtcctatgtattggtatgaggttttaggtaaaaaagcg

SEQ ID NO: 154309 - DNA, 75 bp, synthetic construct
  source 1..75: mol_type = other DNA
atcaacagcgacgcccccggctggctgcgcgtcttctggtcggtggcgattggcctgctgacgctcggcatgctg

SEQ ID NO: 154310 - DNA, 75 bp, synthetic construct
  source 1..75: mol_type = other DNA
tacgagcggcaccttaactttattcatctccatcgtgaagcgccgggccatagcgtgatgttcccggacgcgtga

SEQ ID NO: 154311 - DNA, 75 bp, synthetic construct
  source 1..75: mol_type = other DNA
ttgaccgcccggtggagtggatgaataactggacgctctttttctgggcatggtgggtggcctggtcgccgtttg

SEQ ID NO: 154312 - DNA, 75 bp, synthetic construct
  source 1..75: mol_type = other DNA
agtcattctcgaaaaaaaaacttctaaaagtatacactgaaaaaatcaaagaatcaggagcgattggcatagatc

SEQ ID NO: 154313 - DNA, 75 bp, synthetic construct
  source 1..75: mol_type = other DNA
ggccaatgcattcgataaagcccgggcagcgcaaacttcgcagcagaaggaatggagtacaatgctgttaagtat

SEQ ID NO: 154314 - DNA, 75 bp, synthetic construct
  source 1..75: mol_type = other DNA
accgctggggcttcaggatcgcctgagctggaaaaaaacgtctctcgcgcctgatgaattatccgggcacgcgtt

SEQ ID NO: 154315 - DNA, 75 bp, synthetic construct
  source 1..75: mol_type = other DNA
cgccaatgcgtcgcgccgcgagttggcggctggcgggctggatgacggcaaagtgctacgggtggttggtatggc

SEQ ID NO: 154316 - DNA, 75 bp, synthetic construct
  source 1..75: mol_type = other DNA
gagaggatattcatctcgaactcagcatttggagtggcagatgaatcacctgcgcaatcacacaacagtaaatac

SEQ ID NO: 154317 - DNA, 75 bp, synthetic construct
  source 1..75: mol_type = other DNA
atgccagatataaactcaatcagattatcttcctcctatctattagtacgagatataccccagcttcagtccgca

SEQ ID NO: 154318 - DNA, 75 bp, synthetic construct
  source 1..75: mol_type = other DNA
taccgggagtacttatccaagaaggtgctgcaattgcagcactttcacttgttaaaaaatcgtgtgaaccttttt

SEQ ID NO: 154319 - DNA, 75 bp, synthetic construct
  source 1..75: mol_type = other DNA
ttgtcgccgctaccgtcggcagacccggaagtacgggccagaattgagcaacaggcggcagagcaaggttgggag

SEQ ID NO: 154320 - DNA, 75 bp, synthetic construct
  source 1..75: mol_type = other DNA
ggagtcattgcatcgtcaacttcaggaggtagatccggttgcggcagcaaggattcatccaaatgatccacaaag

SEQ ID NO: 154321 - DNA, 75 bp, synthetic construct
  source 1..75: mol_type = other DNA
aaaccaagctgcattagtagaagcaacattgattggtctatttggttcaaaatctaattgcgtgaataaagccgt

SEQ ID NO: 154322 - DNA, 75 bp, synthetic construct
  source 1..75: mol_type = other DNA
tattaggggtagttttaccccttttcataataatactgtaaacatcgcccctaatgaaaaaaatatatttcccta

SEQ ID NO: 154323 - DNA, 75 bp, synthetic construct
  source 1..75: mol_type = other DNA
tcgccatttattaactggttattatctcgagctggaaatggtggacgagctgaccttactattgaatgattattc

SEQ ID NO: 154324 - DNA, 75 bp, synthetic construct
  source 1..75: mol_type = other DNA
ggacgtttctggggatttgtcgaaacacgtccatatatgagagcaaaagcagctttggctgaggccttatgggag

SEQ ID NO: 154325 - DNA, 75 bp, synthetic construct
  source 1..75: mol_type = other DNA
ggcgtggggacacgtcttaccgattttactaccggctccaaggcgctcttctcccacccggacgtcgaatttttg

SEQ ID NO: 154326 - DNA, 75 bp, synthetic construct
  source 1..75: mol_type = other DNA
agtatcacgatctcagcatcagcaccaacgactgcttccgcccggtctcccgctactgggaccgcatcaatcgcc

SEQ ID NO: 154327 - DNA, 75 bp, synthetic construct
  source 1..75: mol_type = other DNA
ctggcagtactacggcaacaggaacaaccgcaaacgtctcgatgctggttgctgcagggcgttcaattttagggg

SEQ ID NO: 154328 - DNA, 75 bp, synthetic construct
  source 1..75: mol_type = other DNA
cggagaccacgaccacagaacaaaccgcggccacgactacggtcgcgcaggttgagttcaacgagaaacagattc

SEQ ID NO: 154329 - DNA, 75 bp, synthetic construct
  source 1..75: mol_type = other DNA
tggccacggaagctgcagtatttatcggcgcggacgcgattaaatctggtctcgctgatcaactcgttaattacg

SEQ ID NO: 154330 - DNA, 75 bp, synthetic construct
  source 1..75: mol_type = other DNA
gacgggagtgataaatacccgtggccacagccggtgctgtaccacatttgcctcgagatgcgttcaaaggggatt

SEQ ID NO: 154331 - DNA, 75 bp, synthetic construct
  source 1..75: mol_type = other DNA
gcggaagacattgtgctggcgacgctgatcttgctgctgatctccccggtgctgtgctgtattgcgctggcggtg

SEQ ID NO: 154332 - DNA, 75 bp, synthetic construct
  source 1..75: mol_type = other DNA
atgccggcagcacgacggtaataggaacaaccgcaaacgtctcgatgctcgtcgcggcagggcgttcaattttag

SEQ ID NO: 154333 - DNA, 75 bp, synthetic construct
  source 1..75: mol_type = other DNA
atacagggagagcccaataccgggggaagaagggactttcaacgttaggaaaggcgaagactttttatatcacga

SEQ ID NO: 154334 - DNA, 75 bp, synthetic construct
  source 1..75: mol_type = other DNA
tatttgaatcaagcaaagatttccatagtggaggaaaccttagtatcaatagggttagtgcccaagtaatagaaa

SEQ ID NO: 154335 - DNA, 75 bp, synthetic construct
  source 1..75: mol_type = other DNA
gagaaattagactatgataaatgtgtggaagcaaatacgcagataaaaacccacgatcttccaccaacccaatgg

SEQ ID NO: 154336 - DNA, 75 bp, synthetic construct
  source 1..75: mol_type = other DNA
atgccgtggaaccattttccgtatatcgccgcccgggcgtttaatcaaccgcttttactggaacccgtctacgca

SEQ ID NO: 154337 - DNA, 75 bp, synthetic construct
  source 1..75: mol_type = other DNA
atgcggcgtgaacgccttatccggcctacaacgggcaattttacggcccccgttaatctcaaactataccattag

SEQ ID NO: 154338 - DNA, 75 bp, synthetic construct
  source 1..75: mol_type = other DNA
aaagcactcagcgagtatctaagagaatatcgctatttaagtgtatagaatctatcctgctcccaaatccatttt

SEQ ID NO: 154339 - DNA, 75 bp, synthetic construct
  source 1..75: mol_type = other DNA
cagcgcctttacccgctctcagttaataaacagtattgatatcctccgggcacgcagggcaaccggcctgatgac

SEQ ID NO: 154340 - DNA, 75 bp, synthetic construct
  source 1..75: mol_type = other DNA
gtctacgtttctgaccaacgatgtcgcactgtttatcgttgtcccgctgaccatcacgctaaaaaagctgtgtgc

SEQ ID NO: 154341 - DNA, 75 bp, synthetic construct
  source 1..75: mol_type = other DNA
gtatttatggcgatgtttatcgacgtccatttactaacccaactgccagctttgcagggggtgttaagtaacgtg

SEQ ID NO: 154342 - DNA, 75 bp, synthetic construct
  source 1..75: mol_type = other DNA
tatctggtggcgttttcatctttattcgataccgatgctgttgtgggcggcgctggtgggatacgttttgttagt

SEQ ID NO: 154343 - DNA, 75 bp, synthetic construct
  source 1..75: mol_type = other DNA
ggagttgaaacaagaactgtggggactggcaattgtggcggcgggctttgcactgttggcgcgtcgcgtggtgct

SEQ ID NO: 154344 - DNA, 75 bp, synthetic construct
  source 1..75: mol_type = other DNA
gtgttgtgctggtgttgctttccgggcaagcctttgcaatatcataccggtacgcaaatgccggaatggcaaccg

SEQ ID NO: 154345 - DNA, 75 bp, synthetic construct
  source 1..75: mol_type = other DNA
ttattgcccaaatggcaccgctggctggcgcaatgatgctgacgctcctgctgttgtgctggtgttgtttccctg

SEQ ID NO: 154346 - DNA, 75 bp, synthetic construct
  source 1..75: mol_type = other DNA
ttatgttgaaggtacgtggaatcggatcactaataaaaaaggtgatactaccctttatagccgaaatgataacac

SEQ ID NO: 154347 - DNA, 75 bp, synthetic construct
  source 1..75: mol_type = other DNA
atggccggatatcaggaaagccgttatagctttacagccagaggtggttcctatatatactctgacgagggattc

SEQ ID NO: 154348 - DNA, 75 bp, synthetic construct
  source 1..75: mol_type = other DNA
cgctgttcagcgagtatctgttaccctggtgtggtgcgttccttggtaaagtggaagcccatgcaaccacgccgt

SEQ ID NO: 154349 - DNA, 75 bp, synthetic construct
  source 1..75: mol_type = other DNA
taacctgccgccgacgccggagatgctggcctctacccgcactatgctggggctggatcagccgctgtacgtcca

SEQ ID NO: 154350 - DNA, 75 bp, synthetic construct
  source 1..75: mol_type = other DNA
ttctgaatacagcaaaaatggtgcaggcatagaaaactataatttcatcactactgctggtcttaagtacacctt

SEQ ID NO: 154351 - DNA, 75 bp, synthetic construct
  source 1..75: mol_type = other DNA
tcctgacaacccctattgcgatcagctcttttgcttctactgagactttatcgtttactcctgacaacataaatg

SEQ ID NO: 154352 - DNA, 75 bp, synthetic construct
  source 1..75: mol_type = other DNA
gggagcaggtgacgtatcacaatcagaccgtcaaatacgacatgacagtcgaggtgttccaaaacgacgccacgt

SEQ ID NO: 154353 - DNA, 75 bp, synthetic construct
  source 1..75: mol_type = other DNA
gtttgaaaacttggtgaatatgctggatctccctcgcagcctttcccattcaccgttgttccagatcctctatat

SEQ ID NO: 154354 - DNA, 75 bp, synthetic construct
  source 1..75: mol_type = other DNA
gcagggttaccccaacgcagaggcagttattggtgattttaccgctgtcagcttgctgaatgtttgttacgacag

SEQ ID NO: 154355 - DNA, 75 bp, synthetic construct
  source 1..75: mol_type = other DNA
tgaaggatacgctgaaaacctggggtctgctggagctggtaaactccgtggttggcctgataatcgtgttgatca

SEQ ID NO: 154356 - DNA, 75 bp, synthetic construct
  source 1..75: mol_type = other DNA
cacgctgacccatatcaacgatgcttcgttctggctgttcaaaggctactttgatctgtcggtgaaggatacgct

SEQ ID NO: 154357 - DNA, 75 bp, synthetic construct
  source 1..75: mol_type = other DNA
tgataatgattacatgagcgaacacttatacaacatgaagctacagtgccttgccgaggtgcttggtaaaaaagc

SEQ ID NO: 154358 - DNA, 75 bp, synthetic construct
  source 1..75: mol_type = other DNA
ctatatctacagttctgaggagggattcagagatgatatcggctccttcccgactggagaaagagcaatcggcta

SEQ ID NO: 154359 - DNA, 75 bp, synthetic construct
  source 1..75: mol_type = other DNA
taacgctgcaattattaaaggtgcaattaattgggatttgatgccccagatatctattggggctgcgggctggac

SEQ ID NO: 154360 - DNA, 75 bp, synthetic construct
  source 1..75: mol_type = other DNA
catctggtggcgtttccatctctattcaataccgatgctgttgtgggcggcgctggtgggatatgttttgttggt

SEQ ID NO: 154361 - DNA, 75 bp, synthetic construct
  source 1..75: mol_type = other DNA
ttcgttagttctcgatacggtcacgctggcagcgcaggccccaacttcagcgctagatgcggtaattcagcaggt

SEQ ID NO: 154362 - DNA, 75 bp, synthetic construct
  source 1..75: mol_type = other DNA
ggttttgtcgataatccgttccgggtcgtgattgatgattttgcttttgatgctggcgatcgctttacctatgaa

SEQ ID NO: 154363 - DNA, 75 bp, synthetic construct
  source 1..75: mol_type = other DNA
caaccggcaactgagcaggctcgaccttgcatctccggtactggagcctgaagttatctggctgggccgtcgtcg

SEQ ID NO: 154364 - DNA, 75 bp, synthetic construct
  source 1..75: mol_type = other DNA
ttgtaccgttgtttgatacgcctttaagtggtatcaatatggtgtttaaacgaattgaagatattatcgtctcca

SEQ ID NO: 154365 - DNA, 75 bp, synthetic construct
  source 1..75: mol_type = other DNA
ctacatgacgccgcaggaattctgggaactggttatcgtctgcctgtgtctgcggggtaatttttacgcctacaa

SEQ ID NO: 154366 - DNA, 75 bp, synthetic construct
  source 1..75: mol_type = other DNA
ccagggcggttgttttccgattgaggattttatagatggtttctggcgacctgcacaggagtacggtgattttta

SEQ ID NO: 154367 - DNA, 75 bp, synthetic construct
  source 1..75: mol_type = other DNA
gataaccggaaacagcaaacaaaaagcgacttccgaaaggctgcataaattactgacgatgaagccaaatgatta

SEQ ID NO: 154368 - DNA, 75 bp, synthetic construct
  source 1..75: mol_type = other DNA
gttgcgtggcgacatgaaatcccgttttgaagcgtatgccacggggatcaactgggggatttattcccctaatga

SEQ ID NO: 154369 - DNA, 75 bp, synthetic construct
  source 1..75: mol_type = other DNA
gtgtggaaccgaagctgaacagccagtggcagccggtttatcaggtgacgtttccggatggctccgtggatgtgt

SEQ ID NO: 154370 - DNA, 75 bp, synthetic construct
  source 1..75: mol_type = other DNA
tcacctgagtgaagtggcgcagggcgatgatgttgacgccatcgaacaagcgattaaaaacgtagacaaacaaac

SEQ ID NO: 154371 - DNA, 75 bp, synthetic construct
  source 1..75: mol_type = other DNA
tcccgcgtaataccacgattccggtggcccgcgcccaggatttcaccacctttaaagatggtcagacggcgatgt

SEQ ID NO: 154372 - DNA, 75 bp, synthetic construct
  source 1..75: mol_type = other DNA
tgaaggtagttcagagcgttttaatagtgttatcaacttctccaacttcctgctccatgtgttgcgtgtctgtag

SEQ ID NO: 154373 - DNA, 75 bp, synthetic construct
  source 1..75: mol_type = other DNA
gatttatcaactattcccttgtgccgtatctgacccgtattgaacaacggatcaatacagggctggtcagggaga

SEQ ID NO: 154374 - DNA, 75 bp, synthetic construct
  source 1..75: mol_type = other DNA
cgttgatgaagctgaattgtttcggccagtcgagcaaaagcctgaccatgaagatctggaggatttttattttta

SEQ ID NO: 154375 - DNA, 75 bp, synthetic construct
  source 1..75: mol_type = other DNA
cagataaccttgtaccggcatgtggaggtgcagagaagccgtttaccgttagtggtagacagtggctttactgct

SEQ ID NO: 154376 - DNA, 75 bp, synthetic construct
  source 1..75: mol_type = other DNA
gggcttggcttcattaactattcccttgtgccgtatctgacccgtattgaacagcggatcaatacagggctggtc

SEQ ID NO: 154377 - DNA, 75 bp, synthetic construct
  source 1..75: mol_type = other DNA
ttcccggacggctccacggatgtgctgagccaggaggatatctggcatgtgcgcacgctgacgctggacggactg

SEQ ID NO: 154378 - DNA, 75 bp, synthetic construct
  source 1..75: mol_type = other DNA
tgcgggggaatttttacgcttacaaggtgaaggcgctgggagaagtggtggagcttcttccgatagatccgggtt

SEQ ID NO: 154379 - DNA, 75 bp, synthetic construct
  source 1..75: mol_type = other DNA
ccaaccgcaagatcctttactggtgccgctgtttaccctgattcgtgaggggaaactggctgcgaactggccact

SEQ ID NO: 154380 - DNA, 75 bp, synthetic construct
  source 1..75: mol_type = other DNA
atgaccgttatttatcagaccaccatcacccgtatcggcgcgagtgccactgacgctctcagcgaccagatgctc

SEQ ID NO: 154381 - DNA, 75 bp, synthetic construct
  source 1..75: mol_type = other DNA
cgcgcgaggccatttcactggcagcggcaaccgaggagcatggtgccagattgtttggcaatggcgcggtaacat

SEQ ID NO: 154382 - DNA, 75 bp, synthetic construct
  source 1..75: mol_type = other DNA
cgtatctatggggctggggccgattggtgctatctaccaggctaagttcctgaaatatctggaacaccgtggcct

SEQ ID NO: 154383 - DNA, 75 bp, synthetic construct
  source 1..75: mol_type = other DNA
cgtccttccagtcttccgcgaccatttatgatgtctgctttaaccatttcttccgtgcgcgcaatgaacaggatg

SEQ ID NO: 154384 - DNA, 75 bp, synthetic construct
  source 1..75: mol_type = other DNA
ggcagagatcctggcgaaagattacggtgtaggttctgacgtttatagcgtgacctccttcaccgagctggcgcg

SEQ ID NO: 154385 - DNA, 75 bp, synthetic construct
  source 1..75: mol_type = other DNA
gactggaagtcgatggcgttgaacgcagaggacagccagttcctggaaacccgcaagtttcagcttgaagaaatc

SEQ ID NO: 154386 - DNA, 75 bp, synthetic construct
  source 1..75: mol_type = other DNA
gtagccgcaggcaccggtatcagcaactacatcaacaccatccccgttgaagaacaaccggagtatccgggtaat

SEQ ID NO: 154387 - DNA, 75 bp, synthetic construct
  source 1..75: mol_type = other DNA
aaagttcagctgctgggctccggttccatcctgcgtcacgtccgtgaagcggcagagatcctggcgaaagattac

SEQ ID NO: 154388 - DNA, 75 bp, synthetic construct
  source 1..75: mol_type = other DNA
ggcaatttttaaccgtgactatccggtcattcagtgttttacgctgatgatggtggtggtttttgtggtctgtaa

SEQ ID NO: 154389 - DNA, 75 bp, synthetic construct
  source 1..75: mol_type = other DNA
aggatcgcggggtgattggcgagggtaaacgcgctgacctggtgctggcgcatcgccagggcaatcacattcata

SEQ ID NO: 154390 - DNA, 75 bp, synthetic construct
  source 1..75: mol_type = other DNA
tataaaaaatttggctttgagattgaagggactggcaagaagtacgcgctgcgtaatggtgaatatgtcgatgcg

SEQ ID NO: 154391 - DNA, 75 bp, synthetic construct
  source 1..75: mol_type = other DNA
ctgcatcttgactttggtatctcattcgccagccaacgcccggtgctggacgatatgctgaacttcctgcccgcc

SEQ ID NO: 154392 - DNA, 75 bp, synthetic construct
  source 1..75: mol_type = other DNA
cgtgtcgatgcctaacttctggctggcgtttttactggtgatggcgttttcggtgtatctgcaatggctacccgc

SEQ ID NO: 154393 - DNA, 75 bp, synthetic construct
  source 1..75: mol_type = other DNA
ccgtacgtttcatcgcgtttcttggcgtgtcgatgcctaacttctggctggcgtttttactggtgatggcgtttt

SEQ ID NO: 154394 - DNA, 75 bp, synthetic construct
  source 1..75: mol_type = other DNA
tggcaacgccatgacccgtggaaatccgtgtgtggaagcggtactggaaaaaaacatcccttatatgtcaggtcc

SEQ ID NO: 154395 - DNA, 75 bp, synthetic construct
  source 1..75: mol_type = other DNA
ccgctcagccgggcgatcacattctggtgatgagtaacggcggttttggtgggatccatcagaaactgctggatg

SEQ ID NO: 154396 - DNA, 75 bp, synthetic construct
  source 1..75: mol_type = other DNA
tttaaacttttttggcatttttttgcaaaaatgctgttacatatattcgagcgaaaggtcatatatataactaca

SEQ ID NO: 154397 - DNA, 75 bp, synthetic construct
  source 1..75: mol_type = other DNA
tatgccagcatcaactcatttcactgcctcaaaattattaacacggaaagtcaggagtcctgggaatggcaacat

SEQ ID NO: 154398 - DNA, 75 bp, synthetic construct
  source 1..75: mol_type = other DNA
tcatgttggtgttgctccggcagatgctgctaatgcgctggggtcatttatcaacgctcgtcgtcgtctggaact

SEQ ID NO: 154399 - DNA, 75 bp, synthetic construct
  source 1..75: mol_type = other DNA
ttgtgatcggcggtgtgccggggaactttgaggtttcggcgcgtctgggcgaaagcgacttctttgttatcgaag

SEQ ID NO: 154400 - DNA, 75 bp, synthetic construct
  source 1..75: mol_type = other DNA
gtgattggcttcggtgcgaccgccgatcctgctgcctcgctggtgagcgcctggcaaaaagcctgtgccgcgcgt

SEQ ID NO: 154401 - DNA, 75 bp, synthetic construct
  source 1..75: mol_type = other DNA
aagccaccttgctggcggcagcgttaattcatccgctctcgtctgccacacagcaacacacaccgtcattactgg

SEQ ID NO: 154402 - DNA, 75 bp, synthetic construct
  source 1..75: mol_type = other DNA
ccccggtttgctgctgtatggatgttggcaccattatggacaactccgattgcaccgcgtcttacagccgtgtgt

SEQ ID NO: 154403 - DNA, 75 bp, synthetic construct
  source 1..75: mol_type = other DNA
tttgcctcctcgctggatgaggccgcgcgtctggcttgcctgctttcacgcgttacggcgcgacgtaatgcgata

SEQ ID NO: 154404 - DNA, 75 bp, synthetic construct
  source 1..75: mol_type = other DNA
gtagcgaagcggcggatgcggggatcgcgcaggcgattatgcagcagcttgaagaggcgctaaaacaactggcgc

SEQ ID NO: 154405 - DNA, 75 bp, synthetic construct
  source 1..75: mol_type = other DNA
ggcgctggaaatgctcagtgcagacgagaaaagcgaagtgctggcgtttgtctcaaaaccgccagccgaagccgt

SEQ ID NO: 154406 - DNA, 75 bp, synthetic construct
  source 1..75: mol_type = other DNA
ccagcatcaattcgtaccactgtctgaaaatcattaacacggaaagtcaggagtcctgggaatggcaggagaaaa

SEQ ID NO: 154407 - DNA, 75 bp, synthetic construct
  source 1..75: mol_type = other DNA
cggccatgacggttattgcctatgaacccaaaaccgatcagttaaaagtccctgttcaagtctgccgtaatgaac

SEQ ID NO: 154408 - DNA, 75 bp, synthetic construct
  source 1..75: mol_type = other DNA
gtggcttttgaagaacgttactaccgcgaagagctggattatcttcgccagcttggcaaactgctggcgcaggaa

SEQ ID NO: 154409 - DNA, 75 bp, synthetic construct
  source 1..75: mol_type = other DNA
gttagttgatgttggtttatttatctgccgctcagttatcagattgatctcgggattgctcaggaagtttggtta

SEQ ID NO: 154410 - DNA, 75 bp, synthetic construct
  source 1..75: mol_type = other DNA
ttacgctgcgcctgcactttaaccgcccgttacctgccgacatcaagctgcgccaggattcgctgcgtctgcact

SEQ ID NO: 154411 - DNA, 75 bp, synthetic construct
  source 1..75: mol_type = other DNA
ccaggcgcgtgtctggcccgaatttgaaagtttccagcaccagatggagtacagccgccagcgggaagtcgtcta

SEQ ID NO: 154412 - DNA, 75 bp, synthetic construct
  source 1..75: mol_type = other DNA
acgacatgcgaaaattcttgagactgaaaaagcgtgggaggtcttcgaaaaactggaagattgctacttcgacag

SEQ ID NO: 154413 - DNA, 75 bp, synthetic construct
  source 1..75: mol_type = other DNA
tctgacgaagcagaacatcgttccccagcacatgacactgattcattttgcgatcttactggcttccgtccgacc

SEQ ID NO: 154414 - DNA, 75 bp, synthetic construct
  source 1..75: mol_type = other DNA
aaggtgtgactcacttttacgaaccactggacgccgagcggatgcatcgggctgcgcaatgcctgctgggcgaga

SEQ ID NO: 154415 - DNA, 75 bp, synthetic construct
  source 1..75: mol_type = other DNA
gctctcgtggtcggtcagcgcccagcgcgtctataccccggatagttccggccaccgccgcgacgatcgcgtgtc

SEQ ID NO: 154416 - DNA, 75 bp, synthetic construct
  source 1..75: mol_type = other DNA
cagggcagcaatattatctatcagaccaccgttccgcccggaccgtttaccctgcaggatgtctatccttccggc

SEQ ID NO: 154417 - DNA, 75 bp, synthetic construct
  source 1..75: mol_type = other DNA
agacagcatgaacgtagcacaggcttttgtatggaacgtgggaacctgtcgtcccgatgtcaagggagcggtgtg

SEQ ID NO: 154418 - DNA, 75 bp, synthetic construct
  source 1..75: mol_type = other DNA
atgtccgaccagcaacaaccgccagtttataaaattgcgctgggtattgagtacgacggcagcagatattacggc

SEQ ID NO: 154419 - DNA, 75 bp, synthetic construct
  source 1..75: mol_type = other DNA
ttgttagaatatgctggcgacgttagctatatttctgaccattttttcattatagacaaatataccgcagatgat

SEQ ID NO: 154420 - DNA, 75 bp, synthetic construct
  source 1..75: mol_type = other DNA
ctggtgggcgtcgacccggcgttgctggtgctggcaacagcggctggctccaacacgctgacccatatcaacgat

SEQ ID NO: 154421 - DNA, 75 bp, synthetic construct
  source 1..75: mol_type = other DNA
gcaatgtcagtcccgaacgccgtggcgcaacgttatgcatatcaacgtcacgcgtcacggtccttatgtggtggt

SEQ ID NO: 154422 - DNA, 75 bp, synthetic construct
  source 1..75: mol_type = other DNA
catcatatggtcagaaatattgtcggcagcctgatggaagtcggtgcccacaaccagccggagagctggatagca

SEQ ID NO: 154423 - DNA, 75 bp, synthetic construct
  source 1..75: mol_type = other DNA
gctggacgctgaacggatgcatcgggctgcgcaatgcttgctgggcgagaatgatttcacctcgttccgtgcggt

SEQ ID NO: 154424 - DNA, 75 bp, synthetic construct
  source 1..75: mol_type = other DNA
gtgcaagggttattgtcgcggattgcaatcttagtgaagacgcgctggcctgggttctgaaaaatggcggagaca

SEQ ID NO: 154425 - DNA, 75 bp, synthetic construct
  source 1..75: mol_type = other DNA
gaatcgccttgtgctcagcatgggggggggatggagtttattacagcgaactgtacggagccagcggctggtcgc

SEQ ID NO: 154426 - DNA, 75 bp, synthetic construct
  source 1..75: mol_type = other DNA
tatggcagcattcgccgctatggcgaggcggatgtaacacgagtgcggttcgtgaaatcggcccagcggctgggc

SEQ ID NO: 154427 - DNA, 75 bp, synthetic construct
  source 1..75: mol_type = other DNA
gaaccgtctggtgctgagcatggggggagatggcgtttactacagtgatatcaacggtgaaagcgggtggtcggc

SEQ ID NO: 154428 - DNA, 75 bp, synthetic construct
  source 1..75: mol_type = other DNA
tcgcgataaatgatatgagtattagtgactgtatttctgcagaatttcttgcccagcatcaggagtttattcgcg

SEQ ID NO: 154429 - DNA, 75 bp, synthetic construct
  source 1..75: mol_type = other DNA
actaatcaatccggtgtttatgtcgataaatgcttaattgttccgggtgagaatacatccagctatttatcactg

SEQ ID NO: 154430 - DNA, 75 bp, synthetic construct
  source 1..75: mol_type = other DNA
aaacggcggatgcgctcactgatgagtggtatgcctcgctggggctgaatgatgaatgcgggacgcaggcatcca

SEQ ID NO: 154431 - DNA, 75 bp, synthetic construct
  source 1..75: mol_type = other DNA
tgtggcctgatctggactatcttgttctcgatatgccgccgggcactggtgatattcagttgacgctggcgcaga

SEQ ID NO: 154432 - DNA, 75 bp, synthetic construct
  source 1..75: mol_type = other DNA
tcactgacgacaacgcgatggtgtggcgtggcccgatggcgagcaaggcgttgatgcaaatgttgcaagaaacct

SEQ ID NO: 154433 - DNA, 75 bp, synthetic construct
  source 1..75: mol_type = other DNA
tcaccaactttaataacattctttactcaagggaatgggataggatttattgcccaagcgagtggggggtggcca

SEQ ID NO: 154434 - DNA, 75 bp, synthetic construct
  source 1..75: mol_type = other DNA
tgtttgaaaactgtagtcgtgtgacgaccttcttccggacgttttatggctgcacggaactggtaacggtggggg

SEQ ID NO: 154435 - DNA, 75 bp, synthetic construct
  source 1..75: mol_type = other DNA
ggtatttgaccgttgtgtcagcgcagggtctttccaggatacgtttttcggctgtacggggctgacgatgttacc

SEQ ID NO: 154436 - DNA, 75 bp, synthetic construct
  source 1..75: mol_type = other DNA
agtcagtgaaacggcgagtggtatgccggacccgacgctgccggaggtgtccggaggtagtggcagagcggacga

SEQ ID NO: 154437 - DNA, 75 bp, synthetic construct
  source 1..75: mol_type = other DNA
atggctgagcttcgtacactccagagcagaatcaaaactctgaacacccgacgggtgaatattctgaagggggaa

SEQ ID NO: 154438 - DNA, 75 bp, synthetic construct
  source 1..75: mol_type = other DNA
ccggacccgacgctgccggaggtcatggcagggcagacgatatcatcggactgtgacccgccccggggggggggg

SEQ ID NO: 154439 - DNA, 75 bp, synthetic construct
  source 1..75: mol_type = other DNA
gcgctgaccgaatcggtaaatacctggggccgaaaactgattgccgacggcgcactgcttggctttgagtgctgg

SEQ ID NO: 154440 - DNA, 75 bp, synthetic construct
  source 1..75: mol_type = other DNA
gcgagtggtatgccggacccgacgctgccggaggtgtccggaggtcatggcagggcagacgatatcatcggactg

SEQ ID NO: 154441 - DNA, 75 bp, synthetic construct
  source 1..75: mol_type = other DNA
gcagaatcaaaacactgaatacccgacgggtgaatattctgaagggtgaacagcgtcgtgtcagtggcagtgccc

SEQ ID NO: 154442 - DNA, 75 bp, synthetic construct
  source 1..75: mol_type = other DNA
gtgtgtggcagagggcgagcaagagtcgccgctgacggtgctctccagaacgacgctggctgagatcctgaagtt

SEQ ID NO: 154443 - DNA, 75 bp, synthetic construct
  source 1..75: mol_type = other DNA
ctgccgattgcggcggcgctgggagcgttaggtggaaatgccaaagccgggctggaagtgctgaaagacgcaact

SEQ ID NO: 154444 - DNA, 75 bp, synthetic construct
  source 1..75: mol_type = other DNA
agaaggttccgtggttggcgcagcggaggcgctttatttgacaccacaaaccattaccggacagattcgggcgct

SEQ ID NO: 154445 - DNA, 75 bp, synthetic construct
  source 1..75: mol_type = other DNA
gttaacatgttaactggctgcccgggcattttttcggtttttatctttattattcagtttgttgtgcgaaaaaaa

SEQ ID NO: 154446 - DNA, 75 bp, synthetic construct
  source 1..75: mol_type = other DNA
attcagggcgaaccggatatgccgattgtcagagtcggcgcgcgcttgctgtataactatctggttaaaggcggc

SEQ ID NO: 154447 - DNA, 75 bp, synthetic construct
  source 1..75: mol_type = other DNA
ctggttggctggcttccggcacacacaccacgtctgacgcaggttgatcccccgcacaaccgacaatggaaacgc

SEQ ID NO: 154448 - DNA, 75 bp, synthetic construct
  source 1..75: mol_type = other DNA
ggtgcggtcaatgccgccggtaaccgtaccggcatgaagctgctcagtgacagttttaacctgttcggctatttc

SEQ ID NO: 154449 - DNA, 75 bp, synthetic construct
  source 1..75: mol_type = other DNA
tattattatatacaactaagaggcgcttttttatcggctattcatcaccagatcattgaaaaccaactggataca

SEQ ID NO: 154450 - DNA, 75 bp, synthetic construct
  source 1..75: mol_type = other DNA
gttctaatgttgatacatatacagaaataaatagttacttaggcaaacttagaggccaacaaaaacttcttgatg

SEQ ID NO: 154451 - DNA, 75 bp, synthetic construct
  source 1..75: mol_type = other DNA
atggtagtgtccgctattgccagtacacctcaaggcgtgttgatactggaatttatcggaatgatgctactggcg

SEQ ID NO: 154452 - DNA, 75 bp, synthetic construct
  source 1..75: mol_type = other DNA
ggcaaaacggctggccccgcaactgatgaatcatccaccggaatcttcacgttcagaaagagaaaaagataatga

SEQ ID NO: 154453 - DNA, 75 bp, synthetic construct
  source 1..75: mol_type = other DNA
cggggctggctgaatacggcccctttttaccgcacgggttgcaggtggatctgccggacattccggcatcaacca

SEQ ID NO: 154454 - DNA, 75 bp, synthetic construct
  source 1..75: mol_type = other DNA
ccgccccgatgggggatgtcaatacgctggtacagtgcctgtctgagaaagacgcagcggcatttggcagccagt

SEQ ID NO: 154455 - DNA, 75 bp, synthetic construct
  source 1..75: mol_type = other DNA
ttgtaccattatttgatacacccttaagtggaataaacatggtttttaaacgtctggaagatattattgtttctt

SEQ ID NO: 154456 - DNA, 75 bp, synthetic construct
  source 1..75: mol_type = other DNA
accgtaaataccgcaggcgaccgcacggggatgaaactccttcaggacacctataacctgtacggtttctacgcc

SEQ ID NO: 154457 - DNA, 75 bp, synthetic construct
  source 1..75: mol_type = other DNA
ggctctggcgggacgtggcccggaaggcaccattaactttaataccagctctgaccgtgtccgcctgtgctaccc

SEQ ID NO: 154458 - DNA, 75 bp, synthetic construct
  source 1..75: mol_type = other DNA
ggtaccgttaacgcggcaggcaaccgtaccggcatgaagttgcttaacgacagcttcaacctgtttggctacttc

SEQ ID NO: 154459 - DNA, 75 bp, synthetic construct
  source 1..75: mol_type = other DNA
gttgctgagctacaaatacacgccgccgccaccgctggagcggctgacgtatgagacggagatcacctcggaata

SEQ ID NO: 154460 - DNA, 75 bp, synthetic construct
  source 1..75: mol_type = other DNA
gaacatattgatgctggtatcaccttgactgaggcagtcaactttctggtggataagtacgaactagtgcgtttt

SEQ ID NO: 154461 - DNA, 75 bp, synthetic construct
  source 1..75: mol_type = other DNA
ttttatccatataacccttatggtagtgccaaacgatcacaattactttatagatatataacaaaagattgttat

SEQ ID NO: 154462 - DNA, 75 bp, synthetic construct
  source 1..75: mol_type = other DNA
cggatgtggacctcgaaaccttcctgaatgagcagcgtaacgcacatccgaatcagagcctgaaaaacacactgg

SEQ ID NO: 154463 - DNA, 75 bp, synthetic construct
  source 1..75: mol_type = other DNA
aagttaaagcaaatgtacgcctttctggaacgatttaacaaagaatttgtaagtacatttacctcctgtaaaaaa

SEQ ID NO: 154464 - DNA, 75 bp, synthetic construct
  source 1..75: mol_type = other DNA
cgatgccggtttcgtcacgcctgtcgcccgtgcaggtctggcagcaattgttaacgtatctgctggagcaccatt

SEQ ID NO: 154465 - DNA, 75 bp, synthetic construct
  source 1..75: mol_type = other DNA
agcgggcggcgaagccctgcctagcacccgtggctgtctggcaaatgctactgacccgcctgctgaaacagcact

SEQ ID NO: 154466 - DNA, 75 bp, synthetic construct
  source 1..75: mol_type = other DNA
agtgatggacgtcaccggttggctggggggctataacttccagtgggcgtggtcgagtgcgtgggcttgtgcgca

SEQ ID NO: 154467 - DNA, 75 bp, synthetic construct
  source 1..75: mol_type = other DNA
attgccgaacaatttggcctcaacgtgctgccgacccgcgcgggtctggtgccattcactctgcataaaccgttg

SEQ ID NO: 154468 - DNA, 75 bp, synthetic construct
  source 1..75: mol_type = other DNA
ctgagccacctgttggatcgtcactacggtctgacgcttaacgacacgccgtttggcaacgacggtgtgattcag

SEQ ID NO: 154469 - DNA, 75 bp, synthetic construct
  source 1..75: mol_type = other DNA
acgtcaccggctggctggggggctataacttccagtgggcgtggtcgagtgcgtgggcttgtgcgcaggatttga

SEQ ID NO: 154470 - DNA, 75 bp, synthetic construct
  source 1..75: mol_type = other DNA
agtcatggatgtcaccggctggctggggggctataacttccagtgggcgtggtcgagtgcctgggcttgtgcgca

SEQ ID NO: 154471 - DNA, 75 bp, synthetic construct
  source 1..75: mol_type = other DNA
ccggtggactctcaatgccagggctcggagcgtctccgtttggctataagattgccgaacaatttggcctcaacg

SEQ ID NO: 154472 - DNA, 75 bp, synthetic construct
  source 1..75: mol_type = other DNA
accttaagccaggaaatgctggatatcgtgaactatcgcaaagaatccaatttattgtttgacgttggcgtggct

SEQ ID NO: 154473 - DNA, 75 bp, synthetic construct
  source 1..75: mol_type = other DNA
gtaccatgctatttttgctgagcggatgattcagcacccggcggtacagcgaatctgcaatacggattattcttc

SEQ ID NO: 154474 - DNA, 75 bp, synthetic construct
  source 1..75: mol_type = other DNA
atctcctgctggagataaccacgctggtagataatgcattggatttagctgaaattactgaagaatattcatatt

SEQ ID NO: 154475 - DNA, 75 bp, synthetic construct
  source 1..75: mol_type = other DNA
atggatctcgcgtcattacgcacacaacaacttgaactggcttcttctgtgatccgcgaggatcgacttgataaa

SEQ ID NO: 154476 - DNA, 75 bp, synthetic construct
  source 1..75: mol_type = other DNA
atgacatggaatccgttggcgctggcgctggcgacggcgctgcaaactgtacctgaaaaaaatattgatgtaaca

SEQ ID NO: 154477 - DNA, 75 bp, synthetic construct
  source 1..75: mol_type = other DNA
atgacatggaatccgttggcgctggcgacggcgctgcaaactgtacctgaaaaaaatattgatgtaacaaatagc

SEQ ID NO: 154478 - DNA, 75 bp, synthetic construct
  source 1..75: mol_type = other DNA
aacggtccggtcgatgccgtctaccaggcgataaaccgcatcactgactataacgtcgaactggtgaaatacagc

SEQ ID NO: 154479 - DNA, 75 bp, synthetic construct
  source 1..75: mol_type = other DNA
atgcgctgggtcaggtggatattgtcgccaactacaacggtcgccgcttccacggcgtcggcctggctaccgata

SEQ ID NO: 154480 - DNA, 75 bp, synthetic construct
  source 1..75: mol_type = other DNA
cccttgagcgtatgggtgttgacgtgatggaagtcggtttccccgtctcttcgccgggcgatttcgaatcggtgc

SEQ ID NO: 154481 - DNA, 75 bp, synthetic construct
  source 1..75: mol_type = other DNA
ggtagataacgcattggatctggctgaaattacaggtaatgactccaacttattgatagtgttttatgttcagat

SEQ ID NO: 154482 - DNA, 75 bp, synthetic construct
  source 1..75: mol_type = other DNA
aagatatcctgcttgagatagcctcgctggtagataacgcattggatctggctgaaattacagaagaatattcac

SEQ ID NO: 154483 - DNA, 75 bp, synthetic construct
  source 1..75: mol_type = other DNA
atgtctcatatcaattacaaccacttgtattacttctggcatgtttataaagaaggttctgtggttggcgcagcg

SEQ ID NO: 154484 - DNA, 75 bp, synthetic construct
  source 1..75: mol_type = other DNA
aagcacatcttcacaaacccgctttgccatgaaatccgtattcttcatcgcgcagttaaattccttccaccagca

SEQ ID NO: 154485 - DNA, 75 bp, synthetic construct
  source 1..75: mol_type = other DNA
gtcatgaaatccgtattcttcatcgtgcagttaaataccttccaccagcaggccataacgggcttgttattcgtt

SEQ ID NO: 154486 - DNA, 75 bp, synthetic construct
  source 1..75: mol_type = other DNA
cgcagttaaataccttccaccagcagggcataacgggcttgttgttcgtgcgccgtttcctgctgcactcgttgt

SEQ ID NO: 154487 - DNA, 75 bp, synthetic construct
  source 1..75: mol_type = other DNA
attaatcgaacacatgaaagaaaatctgcgccaacagattctggacagtgcagaacaacaaagacaggagagcgg

SEQ ID NO: 154488 - DNA, 75 bp, synthetic construct
  source 1..75: mol_type = other DNA
catcaacgtcaaccagaactggatcctgtttaactcgctggtcgaactgaccgatgaccagaaaacagaattgtg

SEQ ID NO: 154489 - DNA, 75 bp, synthetic construct
  source 1..75: mol_type = other DNA
ctcaggcactgaagtcaaacggttacaacttctacggatcatacagcctgaacaaaacaatggcgcagtacgcat

SEQ ID NO: 154490 - DNA, 75 bp, synthetic construct
  source 1..75: mol_type = other DNA
actatacaggcaaggaaaacccattaagtacattgcagatgctctcagaatgcctctgagcacgtcatacaggat

SEQ ID NO: 154491 - DNA, 75 bp, synthetic construct
  source 1..75: mol_type = other DNA
attgtggtgacacaatgcttttacttgccgtggttaataggggtggtttacgtggaagacctcatatgcacgatg

SEQ ID NO: 154492 - DNA, 75 bp, synthetic construct
  source 1..75: mol_type = other DNA
ttaagactatcacttatttaagtgatactggttgtctggagattcagggggccagtctagactgcgtctctcgcg

SEQ ID NO: 154493 - DNA, 75 bp, synthetic construct
  source 1..75: mol_type = other DNA
cgcaatttgcaccgtgaatttggtttttcgatggatggtgctgcaactgagcatgatacgttattaccccgcttt

SEQ ID NO: 154494 - DNA, 75 bp, synthetic construct
  source 1..75: mol_type = other DNA
gaaattacacagatgatttgctgtgctgatacattgctaccgttaaccatcattaacagaggaggcttgagagga

SEQ ID NO: 154495 - DNA, 75 bp, synthetic construct
  source 1..75: mol_type = other DNA
cccatcaagagcatcgcagaatcgctaagaatgcctctaagcaccacttacaggattgttcaaaggttgagctga

SEQ ID NO: 154496 - DNA, 75 bp, synthetic construct
  source 1..75: mol_type = other DNA
cctacatgcgagcgagcacccaggaacaggacgcgaaccgcgcccgcgaggagatcgccctcttcgccaaagagc

SEQ ID NO: 154497 - DNA, 75 bp, synthetic construct
  source 1..75: mol_type = other DNA
tttgcacaagagatcggcggtaaggcgacctgcaccattccggcaggaaaaacctcgtgtgaagcgcctgagacg

SEQ ID NO: 154498 - DNA, 75 bp, synthetic construct
  source 1..75: mol_type = other DNA
agcgattaatgatcgatgcgttaagtcccgcaggcaacgtgaataactggctaatgaatggtggtcaatggttct

SEQ ID NO: 154499 - DNA, 75 bp, synthetic construct
  source 1..75: mol_type = other DNA
ttgtggtgtgagggaaaactaaacaaaacggatgatgtgattactcagtttgagtttaccttccgaagctctgtt

SEQ ID NO: 154500 - DNA, 75 bp, synthetic construct
  source 1..75: mol_type = other DNA
ccgcaaaccagacaacagtcaaccgcctgaattgtgagacatttaaaaaaaaggcccgcaaaagcgagccaggga

SEQ ID NO: 154501 - DNA, 75 bp, synthetic construct
  source 1..75: mol_type = other DNA
gccctgacagtgggcgataaaggtacgctgagctataaaggaacgcgctttgtcagctttgtaggcgaacaataa

SEQ ID NO: 154502 - DNA, 75 bp, synthetic construct
  source 1..75: mol_type = other DNA
tggcagatacctgtgatggtgtattttctgcacgtagccgagatcgtatgttggaaatcatgcgtgatagccgtt

SEQ ID NO: 154503 - DNA, 75 bp, synthetic construct
  source 1..75: mol_type = other DNA
gcttggcaatgtgtttattggtaaaatcgatggacgacaaacctgtgtcaccctcggtttagccgttatttttgc

SEQ ID NO: 154504 - DNA, 75 bp, synthetic construct
  source 1..75: mol_type = other DNA
gttatcacccggtggttatgccggaaaattatcagcctttttgataaaagatatctgcttgagctggctgcggat

SEQ ID NO: 154505 - DNA, 75 bp, synthetic construct
  source 1..75: mol_type = other DNA
ctaatgaatggcggacaatggttcttcatgctggacgctgatcaggaaatattagccagggcgctggtggagctg

SEQ ID NO: 154506 - DNA, 75 bp, synthetic construct
  source 1..75: mol_type = other DNA
cgttatagcccatgccgactatcctgataacgaataccagtttggtaaacctgttagcgatctcaatgttacctg

SEQ ID NO: 154507 - DNA, 75 bp, synthetic construct
  source 1..75: mol_type = other DNA
acgatttgctatacattcgtggttggagtatatggttagatttgaaaattattttccttactatcttcaaaggct

SEQ ID NO: 154508 - DNA, 75 bp, synthetic construct
  source 1..75: mol_type = other DNA
aaaatcttgtcagtacacggattatcagtgagctggagagagtacacggtctcaccgaaactatgggtgtaatcg

SEQ ID NO: 154509 - DNA, 75 bp, synthetic construct
  source 1..75: mol_type = other DNA
gacggcgaatgtcgcttctaccgggaaaatgaacgggttctctttttcctaccgcgatatagctttcaaagcttc

SEQ ID NO: 154510 - DNA, 75 bp, synthetic construct
  source 1..75: mol_type = other DNA
gctcctgctcctgctcctgctcctgctcctgcaacagttttgaaaaacactgagagaaaggaaagtatcagtgaa

SEQ ID NO: 154511 - DNA, 75 bp, synthetic construct
  source 1..75: mol_type = other DNA
gagatggatagaagcaatcccctggttagatagcatagttggtatcgtaaaaagcttgcataactctttccttga

SEQ ID NO: 154512 - DNA, 75 bp, synthetic construct
  source 1..75: mol_type = other DNA
tttttcgttggaatagatgtggaagacatattgcttcccttacctgaacgacctaaaccaccattgaaagaaaat

SEQ ID NO: 154513 - DNA, 75 bp, synthetic construct
  source 1..75: mol_type = other DNA
acccaatatcgccacaacgggtaaaatgaatggattttcatttcagtaccagggtatcgcctttaaagcctctca

SEQ ID NO: 154514 - DNA, 75 bp, synthetic construct
  source 1..75: mol_type = other DNA
aatgataactcggttgtggagatagggcgagttgagaacgtcatggaagagtaccatgcgatttttgccgaaagg

SEQ ID NO: 154515 - DNA, 75 bp, synthetic construct
  source 1..75: mol_type = other DNA
cggggcttgccgaatacggcccctttttacctcacgggctgcaggtggagctggccggacattccgaccaccacc

SEQ ID NO: 154516 - DNA, 75 bp, synthetic construct
  source 1..75: mol_type = other DNA
cggggcttgccgaatacggcccctttttacctcacggactgcaggtggagctgccggacattccgacaaccacca

SEQ ID NO: 154517 - DNA, 75 bp, synthetic construct
  source 1..75: mol_type = other DNA
agacaacaccaatcccactaccagatgtggcttccagttcttagcagactcatacacctgctcaggaagatgggt

SEQ ID NO: 154518 - DNA, 75 bp, synthetic construct
  source 1..75: mol_type = other DNA
atccctgttcctgttcctgttcctgttcctatagaatcgacagcaagaacgactgcccagagcgaaagcataggc

SEQ ID NO: 154519 - DNA, 75 bp, synthetic construct
  source 1..75: mol_type = other DNA
ctatcgctatgccgataaaatgttcaccttaagccaggaaatgctggatatcgtgaactatcgcaaagaatccaa

SEQ ID NO: 154520 - DNA, 75 bp, synthetic construct
  source 1..75: mol_type = other DNA
tggtcgtgttagtggttgaaacaacaggcgatgaaaccatcgagcagtacgcaacgcgggtattcgatagctgga

SEQ ID NO: 154521 - DNA, 75 bp, synthetic construct
  source 1..75: mol_type = other DNA
agatgaatggcttcctattcgcccgggcaccgatgccgcgctggttgcgggtattgcctgggtattgattaacga

SEQ ID NO: 154522 - DNA, 75 bp, synthetic construct
  source 1..75: mol_type = other DNA
gctctgttagtctgggcgatagtactgacgtttatttctgccagaggatatgtcaaaacgggtaatgactccaac

SEQ ID NO: 154523 - DNA, 75 bp, synthetic construct
  source 1..75: mol_type = other DNA
tagcgacgatagcaccggccgatcaccctttaccttttagcggttggtgggccttgttagcctgggcgatagtac

SEQ ID NO: 154524 - DNA, 75 bp, synthetic construct
  source 1..75: mol_type = other DNA
cggaaaaaaggtacgtaatttaatgcgtagtgccaaccgaccatcacgctacgaaggaagcagttctatctcctg

SEQ ID NO: 154525 - DNA, 75 bp, synthetic construct
  source 1..75: mol_type = other DNA
acgaaagaagtaactcggcctccaggcgttcttcatcatcgtcgtcatcttcctcttcatcctcttttgacaatg

SEQ ID NO: 154526 - DNA, 75 bp, synthetic construct
  source 1..75: mol_type = other DNA
gcacctgtgccattaacagtgccaatgccagtgccaatgccaatgccaatgccaatgccaatgccaatgccaatg

SEQ ID NO: 154527 - DNA, 75 bp, synthetic construct
  source 1..75: mol_type = other DNA
tcaaaagaatgccgtcaaaaagcaaaagcatctcaggctcagtagctggttcccctttttacaacggttcataga

SEQ ID NO: 154528 - DNA, 75 bp, synthetic construct
  source 1..75: mol_type = other DNA
taccctggttagataacatagtcggtatcgtaaagagcttgaataatcctttctttaaacacaaaaacaaaccag

SEQ ID NO: 154529 - DNA, 75 bp, synthetic construct
  source 1..75: mol_type = other DNA
tcggcatcagcggcggaaatagtggcgcgcgtgaatcgacctataccattaccatagaacgcctgccggtgctgg

SEQ ID NO: 154530 - DNA, 75 bp, synthetic construct
  source 1..75: mol_type = other DNA
ccacgcattctccctggagttagtgctatgggccagggagcctggcacgaggccaatatgtctggcgataaaatc

SEQ ID NO: 154531 - DNA, 75 bp, synthetic construct
  source 1..75: mol_type = other DNA
ggccatattgtggcacttctcaggcgcaggggcatgtctctgttacatgccactgcacatcctttccaccaaatc

SEQ ID NO: 154532 - DNA, 75 bp, synthetic construct
  source 1..75: mol_type = other DNA
aaaagataattttgtgttgcgtgaagtttctgaatatcatgagaaaatttgttccttaccatggcgaaggtttta

SEQ ID NO: 154533 - DNA, 75 bp, synthetic construct
  source 1..75: mol_type = other DNA
atagctgtaggagaagaagcaaaaaagatggtagggaaaacaccaggaagtattaaggctataagaccattgagg

SEQ ID NO: 154534 - DNA, 75 bp, synthetic construct
  source 1..75: mol_type = other DNA
gcgtccatctgttgcttaccttcagtcaaaaggtaaagaccttggtgttcatggtgaccgagacttagtcaagta

SEQ ID NO: 154535 - DNA, 75 bp, synthetic construct
  source 1..75: mol_type = other DNA
ttcaaaaaacgcggttttaaagtgcgtcagaacccggttaaccgggccttaaaaccgggtacggtgaccgccaaa

SEQ ID NO: 154536 - DNA, 75 bp, synthetic construct
  source 1..75: mol_type = other DNA
attcccgattgcagaatctgacggggaggtgagttcctacggggattacagcaacaacggggtggtaagcgcaaa

SEQ ID NO: 154537 - DNA, 75 bp, synthetic construct
  source 1..75: mol_type = other DNA
ctgaccaagaccaacatgtacaacgtcaacgtgtctgatcagctgaagaaaaacttcccgaacctgcgcgttgtt

SEQ ID NO: 154538 - DNA, 75 bp, synthetic construct
  source 1..75: mol_type = other DNA
atgcgtgatatgtatgaagtattggaccgctggggagcatgggctgcagcagataacagtggtgtggattggcaa

SEQ ID NO: 154539 - DNA, 75 bp, synthetic construct
  source 1..75: mol_type = other DNA
ttgctaaaaagaggaagtattctgatggtacaattagaaaagaattacaaatggccattggatttattgaaggct

SEQ ID NO: 154540 - DNA, 75 bp, synthetic construct
  source 1..75: mol_type = other DNA
gttattggtatttcattacgcaccattgcgaagaagcgtaagtgttctgatgggacaattagaaaagatatgcaa

SEQ ID NO: 154541 - DNA, 75 bp, synthetic construct
  source 1..75: mol_type = other DNA
caaacagatgtgttcatgactggtcgcaccacaggtgttgcaacctatcgtaacaacgacttctttggtctggtt

SEQ ID NO: 154542 - DNA, 75 bp, synthetic construct
  source 1..75: mol_type = other DNA
ttatgctttttaacaacagcatcattcttatttgaaatgctggttaggttaattatgttaaagaagactaaggcc

SEQ ID NO: 154543 - DNA, 75 bp, synthetic construct
  source 1..75: mol_type = other DNA
gttattggtatctcattacgcactattgccaaaaagagaaggtgttcagatggcacgattagaaaggaattgcaa

SEQ ID NO: 154544 - DNA, 75 bp, synthetic construct
  source 1..75: mol_type = other DNA
acgggcaaatcctcgtgatgcacgacgcgttcggtattaccggcggccatatccctaaatttgcaaaaaatttcc

SEQ ID NO: 154545 - DNA, 75 bp, synthetic construct
  source 1..75: mol_type = other DNA
cccggaacaggcctttgaaaatgccgccacagtaatgcgtgccggagccaatatggtcaaaattgaaggcggcgc

SEQ ID NO: 154546 - DNA, 75 bp, synthetic construct
  source 1..75: mol_type = other DNA
caaagcgcaatgagcctaaagaaccggccaaaagcagcactccactgcgccagccagtcagaccgcaggggcgtc

SEQ ID NO: 154547 - DNA, 75 bp, synthetic construct
  source 1..75: mol_type = other DNA
gtcatcggggggatctgtaacaactccggcggctcgctggtacagcgtggtccggcgtatactgaaatgtcgttg

SEQ ID NO: 154548 - DNA, 75 bp, synthetic construct
  source 1..75: mol_type = other DNA
cctgccgagcataacgtcggtcatttgtataaagcaccggagacgctgcagaagttttatcgcgagaacgatccg

SEQ ID NO: 154549 - DNA, 75 bp, synthetic construct
  source 1..75: mol_type = other DNA
aactctattacggccattttatgtgttacgtcttccaccaggattacatcgttaagaaaggcgtggatgtacatg

SEQ ID NO: 154550 - DNA, 75 bp, synthetic construct
  source 1..75: mol_type = other DNA
tgggtgaaatcgcagacggccgcgcagaacggcggtgaaggtgtggctaactggcagtggctggagcaacacccc

SEQ ID NO: 154551 - DNA, 75 bp, synthetic construct
  source 1..75: mol_type = other DNA
gttttcaaaaaacgcggttttaaagtgcgtcagaagccggttaaccgggccttaaaaccgggtacggtgaccgcc

SEQ ID NO: 154552 - DNA, 75 bp, synthetic construct
  source 1..75: mol_type = other DNA
ccggttaaccgggccttaaaaccgggtacggtgaccgccaaaattcgcgccatctggaaggtgatgcaccggcag

SEQ ID NO: 154553 - DNA, 75 bp, synthetic construct
  source 1..75: mol_type = other DNA
agtcaccgcaggaaatcgaggacatcgtgaagcttaacgaggcgatcacagctgccgacgttacgatgcgtaccg

SEQ ID NO: 154554 - DNA, 75 bp, synthetic construct
  source 1..75: mol_type = other DNA
agtcaccgcaggaaatcgaggacatcgtgaaacttaacgaggcgatcaccgctgccgatgtcacgatgcgtaccg

SEQ ID NO: 154555 - DNA, 75 bp, synthetic construct
  source 1..75: mol_type = other DNA
atcgacagcattgtttctgccattaacccgcagaagggccaggcgatggtcgaaatcggccccggtctggcggca

SEQ ID NO: 154556 - DNA, 75 bp, synthetic construct
  source 1..75: mol_type = other DNA
tcacttccgacgaaggtgtgcgtgccgggcgcagcattccactgaagaaaaacgtcgatgacgcactaaaaaccc

SEQ ID NO: 154557 - DNA, 75 bp, synthetic construct
  source 1..75: mol_type = other DNA
aagcagtgatctgctgaataatcctgaaacaggattgcttaacctgaaagggaaaaatgctattggaaaaggcca

SEQ ID NO: 154558 - DNA, 75 bp, synthetic construct
  source 1..75: mol_type = other DNA
cctgatgtcgtatcagaggcagggtattgataccgtcagcgagataattaatcgctgggcaccgcctactgataa

SEQ ID NO: 154559 - DNA, 75 bp, synthetic construct
  source 1..75: mol_type = other DNA
atgacctcgggaaaaaagcagcagcggactttatgcaacagcagtcccgtgatggtggtctgttctccggaggtg

SEQ ID NO: 154560 - DNA, 75 bp, synthetic construct
  source 1..75: mol_type = other DNA
ggtggtactgaagcgtactggcggaaaaattgactggcaggaagggcgcgacctgtggtggcacgacctggttga

SEQ ID NO: 154561 - DNA, 75 bp, synthetic construct
  source 1..75: mol_type = other DNA
tactggttccgttaaggtgaaagcaggtgagtttgacgttgagaaagacgcctctttcccgttggtccatgttat

SEQ ID NO: 154562 - DNA, 75 bp, synthetic construct
  source 1..75: mol_type = other DNA
ggtgagtttgacgttgagaaagacgcctctttcccgttgatacatgttattcggtttactacccccagagtaact

SEQ ID NO: 154563 - DNA, 75 bp, synthetic construct
  source 1..75: mol_type = other DNA
cttggctcctcactgaccgattacactctactggtcccagagaagtacgaagctatcctcaatcgtgcagctcag

SEQ ID NO: 154564 - DNA, 75 bp, synthetic construct
  source 1..75: mol_type = other DNA
ggtaatgcagcattcgatgcggcatctcctgaggcgcaggcaagttttatgcgacaggcggatcaactgcgtcgg

SEQ ID NO: 154565 - DNA, 75 bp, synthetic construct
  source 1..75: mol_type = other DNA
atgccagttgtaccaacaacatcgggccgtcaggttcagagcagagggatttcgacgcagggattctcatcgttt

SEQ ID NO: 154566 - DNA, 75 bp, synthetic construct
  source 1..75: mol_type = other DNA
tctcagccaggtattggtgatgcttttgttcgggcaggggcagaggcaattgatgtttttggtcaggcaaaacag

SEQ ID NO: 154567 - DNA, 75 bp, synthetic construct
  source 1..75: mol_type = other DNA
ttctaacacgctggaaaatgagttcaaaggccgtgccagcgaactgcagcgtatggaaaccgatctgcaggctaa

SEQ ID NO: 154568 - DNA, 75 bp, synthetic construct
  source 1..75: mol_type = other DNA
cacccgcaaaagcggtgtggctgaggctgtgattctgacccccgccaccgcccctgcctggtgtacgaaccgtgc

SEQ ID NO: 154569 - DNA, 75 bp, synthetic construct
  source 1..75: mol_type = other DNA
gcagctccgaaaatacgcagcgttttatcgaacgtttaggtctgcccgcggtgcgcatcccgctcaatgagcggg

SEQ ID NO: 154570 - DNA, 75 bp, synthetic construct
  source 1..75: mol_type = other DNA
ttctataaccatccgcagagcgttgacgacatcacgcaacacatagtcgctcgcgtgctggatcaatttggcctc

SEQ ID NO: 154571 - DNA, 75 bp, synthetic construct
  source 1..75: mol_type = other DNA
ccgcgtgctggatcaatttggccttgaacatccctacgccaggcgctggcaaggattgccgcaggcccggaattt

SEQ ID NO: 154572 - DNA, 75 bp, synthetic construct
  source 1..75: mol_type = other DNA
gtatggaaactgatctacaggctaaaatgaaaaagctgcaatccatgaaagcaggcagcgatcgtactaagctgg

SEQ ID NO: 154573 - DNA, 75 bp, synthetic construct
  source 1..75: mol_type = other DNA
aattattgctgatgttaatgggggcagttttcttcttcggaatacagtctgccattgcagtggatattaatataa

SEQ ID NO: 154574 - DNA, 75 bp, synthetic construct
  source 1..75: mol_type = other DNA
cagccaacgaccttgttcaacgtcgccgaaagcaatgcgtcttatgcgccgtatctgctgatgacactgccattc

SEQ ID NO: 154575 - DNA, 75 bp, synthetic construct
  source 1..75: mol_type = other DNA
gcaagccgatgattgcgctgattctggtgtttggcgttggcaacgcactggtgcatattttatcgagctttaatt

SEQ ID NO: 154576 - DNA, 75 bp, synthetic construct
  source 1..75: mol_type = other DNA
cggttaatgctgctctcgatgttgtgcgatatggtcaacaataaaccgcagcaggataaaccctccaataaatag

SEQ ID NO: 154577 - DNA, 75 bp, synthetic construct
  source 1..75: mol_type = other DNA
gctgaacaacatgaagctctcgaggctacggtacataatgaattgaatgattttcgagctaatgtggcacgcgag

SEQ ID NO: 154578 - DNA, 75 bp, synthetic construct
  source 1..75: mol_type = other DNA
ctggcggtcagatagcccgccatgtgattaatcaactggcagataaacaaaccattaaacaaacatcgtactgta

SEQ ID NO: 154579 - DNA, 75 bp, synthetic construct
  source 1..75: mol_type = other DNA
gcaaaaaaaaacatctactctatattgtagtgggcgtttttttttacagtaactctgtagaagcagaaagatatt

SEQ ID NO: 154580 - DNA, 75 bp, synthetic construct
  source 1..75: mol_type = other DNA
agacatgtctgacaatcacacagtatgtgttttcctgagcgcactcgcagatacttcctcaaagaaggcgataaa

SEQ ID NO: 154581 - DNA, 75 bp, synthetic construct
  source 1..75: mol_type = other DNA
attacggcactaacacgccaatcgatgagtgctacgagtgtggttttaccggcgagtttgaatgtaccagcaaag

SEQ ID NO: 154582 - DNA, 75 bp, synthetic construct
  source 1..75: mol_type = other DNA
cagggtaaaaatgaccgcactgacgtaactgaagccaatggtgatggtttcggtggtgatgctgccaacttactg

SEQ ID NO: 154583 - DNA, 75 bp, synthetic construct
  source 1..75: mol_type = other DNA
taagcactacttctcttctaacgatgcagatgatggcgacacaacttatgttcgtctgggcttcaaaggcgaaac

SEQ ID NO: 154584 - DNA, 75 bp, synthetic construct
  source 1..75: mol_type = other DNA
taactacggtgtagcatacgatatcggtgcatggaccgacgttctgccggcgatacctggacccaaacagatgtg

SEQ ID NO: 154585 - DNA, 75 bp, synthetic construct
  source 1..75: mol_type = other DNA
atgacgaaaattattgcagtaaccgcatgtccttcaggtgttgcccatacctatatggcagcagaggcgctggaa

SEQ ID NO: 154586 - DNA, 75 bp, synthetic construct
  source 1..75: mol_type = other DNA
aaggtcatgtaaatcgcctgaagatgctgaaacgccagatgtatggtcgagcaggatttgaactactcaggcaga

SEQ ID NO: 154587 - DNA, 75 bp, synthetic construct
  source 1..75: mol_type = other DNA
cccggggcggttcagttaatattcaatcttgatactcaccgccccctggtcctgcttcccggccgtgatcagcgt

SEQ ID NO: 154588 - DNA, 75 bp, synthetic construct
  source 1..75: mol_type = other DNA
ggattgttgctaaacactatgcgcgtcagcacctgctgccgcgtgatgtggtgcaggcgcatgagcgcggcgata

SEQ ID NO: 154589 - DNA, 75 bp, synthetic construct
  source 1..75: mol_type = other DNA
ccagctgatgtcgggtccatacaaacaactggctcgtgcttacatcgagtaccgtcacgatcgcgacattgaacg

SEQ ID NO: 154590 - DNA, 75 bp, synthetic construct
  source 1..75: mol_type = other DNA
tggcgatgtgcttgaacgaatgatgtacagacatatgcctctgatacgtcttgttgccagtgagttgtcaccaaa

SEQ ID NO: 154591 - DNA, 75 bp, synthetic construct
  source 1..75: mol_type = other DNA
aattactgatgcgtaacgctggtcgggtactgccgcgcaaactgattgaagagaaactgtatacctgggacgaag

SEQ ID NO: 154592 - DNA, 75 bp, synthetic construct
  source 1..75: mol_type = other DNA
ccgccaggctggaagctctgatgcgccgaaccaacggccaggccagcaacgagctgcgccacggtaacgtcatgc

SEQ ID NO: 154593 - DNA, 75 bp, synthetic construct
  source 1..75: mol_type = other DNA
caactattgcggcgcgacagtctgctaccggcactaaaaccgatacgccgattcaaaaagtccacagtctatttc

SEQ ID NO: 154594 - DNA, 75 bp, synthetic construct
  source 1..75: mol_type = other DNA
gcctgaagatgttgaaacgccagatgtatggtcgagccggatttgaactactcaggcagagggtcatgagtccac

SEQ ID NO: 154595 - DNA, 75 bp, synthetic construct
  source 1..75: mol_type = other DNA
gcatgtgcatcatctgcgacgtaagctcggcagcgactttattcgcaccgttcacggtattggctacacattagg

SEQ ID NO: 154596 - DNA, 75 bp, synthetic construct
  source 1..75: mol_type = other DNA
aggtcaccagcaatgccatcgaagtgcatgtgcatcatctgcgacgtaagctcggcagcgactttattcgcaccg

SEQ ID NO: 154597 - DNA, 75 bp, synthetic construct
  source 1..75: mol_type = other DNA
cacgttcttccgctaatttttcgctctttcgcatcgctcttgcggttttccttacctacatgacagtcggactgc

SEQ ID NO: 154598 - DNA, 75 bp, synthetic construct
  source 1..75: mol_type = other DNA
cggcacagtgcgcaaagtaccggccctggcgggagaacgtccatcgctgtggagcgttgtcgggcttatctggaa

SEQ ID NO: 154599 - DNA, 75 bp, synthetic construct
  source 1..75: mol_type = other DNA
ggttttgccgcactggcgctcaccacaatggcattacccttactggcgtggggctgcaatggcacagtacgcaaa

SEQ ID NO: 154600 - DNA, 75 bp, synthetic construct
  source 1..75: mol_type = other DNA
cggggcagaatacttggtacgaaaccggtttgaatggtcgcgcatttgaccgtaggttgtattgggatgtgagtg

SEQ ID NO: 154601 - DNA, 75 bp, synthetic construct
  source 1..75: mol_type = other DNA
acggggatgtacaccttcatgagttcatgccagcgtgatgagtggaacagccagctgatgagcgacacctgtcct

SEQ ID NO: 154602 - DNA, 75 bp, synthetic construct
  source 1..75: mol_type = other DNA
ctggtacgtccgttttatctgctggaggggcgcaacgttcctgacttcaggaacagtatcggggcgcagtatggt

SEQ ID NO: 154603 - DNA, 75 bp, synthetic construct
  source 1..75: mol_type = other DNA
ttggttcactcgagtccacgaaagcggttcagcagaatttcggcgcgtggcggcggggatggaagctgatgctgc

SEQ ID NO: 154604 - DNA, 75 bp, synthetic construct
  source 1..75: mol_type = other DNA
tctgtgcctgcagcatcgctccgtcgtccggaacgcctaaaacaacaaacccgcaaaaaacggcatcagcgttga

SEQ ID NO: 154605 - DNA, 75 bp, synthetic construct
  source 1..75: mol_type = other DNA
tgttaaaaaatattggcgatgcgtttgaacgaatgatgtacagacatatacctctgatacgtcttgttgccagtg

SEQ ID NO: 154606 - DNA, 75 bp, synthetic construct
  source 1..75: mol_type = other DNA
agttgtcgtcggcgccggatacagcatctaccctgctcagggcatacgctatggcttgtattttccgtccgccac

SEQ ID NO: 154607 - DNA, 75 bp, synthetic construct
  source 1..75: mol_type = other DNA
gtgcgttcaggaacattccctgaaatgtcaacccgacctccaaagcgagggcttctggacccatggagggagtag

SEQ ID NO: 154608 - DNA, 75 bp, synthetic construct
  source 1..75: mol_type = other DNA
gtcccctcgtcctgcttcccggccgtgatcagcgtacgctggcgacctggttcagaaaatatccggaaatacaga

SEQ ID NO: 154609 - DNA, 75 bp, synthetic construct
  source 1..75: mol_type = other DNA
atgggcaacgcaatgcactctcttaagacacttctacaattaccttacggatggcgatgcagtcgacaaattatt

SEQ ID NO: 154610 - DNA, 75 bp, synthetic construct
  source 1..75: mol_type = other DNA
tgttttatatcggcaccaaccagccggaagtactgaccgaaatccgccgtcatattctggctaatttcgaaaatc

SEQ ID NO: 154611 - DNA, 75 bp, synthetic construct
  source 1..75: mol_type = other DNA
caagggcgaacaagtgctggcctatccgggcaccacgctttattcgctggaaaaagccctcaaaccgctgggacg

SEQ ID NO: 154612 - DNA, 75 bp, synthetic construct
  source 1..75: mol_type = other DNA
gggtcaggaacattccctgaaatgtcaaccaggcctccaaagcgaggcttctggccccatggagggagtggttaa

SEQ ID NO: 154613 - DNA, 75 bp, synthetic construct
  source 1..75: mol_type = other DNA
agggcagacgctatggcttgtattttccgtccgccataggtacagctgtaacccggcttgttcacgaaaaatttt

SEQ ID NO: 154614 - DNA, 75 bp, synthetic construct
  source 1..75: mol_type = other DNA
gtgcctgcagcatcgctccgtcgtccggaacgccttaaacagcaaacctgcaaaaaacggcatcagcgttggaca

SEQ ID NO: 154615 - DNA, 75 bp, synthetic construct
  source 1..75: mol_type = other DNA
acagcggatcattatttgttgggagaacgagatatttgctgtgcaatggcagataagaggaaaacaactcataac

SEQ ID NO: 154616 - DNA, 75 bp, synthetic construct
  source 1..75: mol_type = other DNA
ggcgctgacactggcattttccgccaaagagagcgcatttaaggcaagtgagatccaaactgatgcaggttttct

SEQ ID NO: 154617 - DNA, 75 bp, synthetic construct
  source 1..75: mol_type = other DNA
gaaaactacgcatacctccctcccctttgccggacatacgctgcattttgttgagttcgatccggcgagttttcg

SEQ ID NO: 154618 - DNA, 75 bp, synthetic construct
  source 1..75: mol_type = other DNA
gcgcatcaggcagttttgcgtttgtcatcattctctaatatggtcgacatgaaaactacgcatacctccctcccc

SEQ ID NO: 154619 - DNA, 75 bp, synthetic construct
  source 1..75: mol_type = other DNA
ggatttactctggctgccgcactacgcacaactgcaacacgctggacgtaaacgtaaaacagagcatttagccgg

SEQ ID NO: 154620 - DNA, 75 bp, synthetic construct
  source 1..75: mol_type = other DNA
ctagaggatgagcagtttgctgtgcactggcagataaaagaaaagatagtcataacgctgtgccaacacgattaa

SEQ ID NO: 154621 - DNA, 75 bp, synthetic construct
  source 1..75: mol_type = other DNA
tcgtcagggatgctgttgccaaatggcgtaaaggctggatcccaccgattactactgccgctagacctccttcag

SEQ ID NO: 154622 - DNA, 75 bp, synthetic construct
  source 1..75: mol_type = other DNA
caaatggcgtaaaggctggaacccaccggttactactgccgtcagacttccttcagtgtcccgggtaaggcgctg

SEQ ID NO: 154623 - DNA, 75 bp, synthetic construct
  source 1..75: mol_type = other DNA
tgtaaatcgcctgaagatgttgaaacgccagatgtatggtcgagccggatttgaactactcaaacagagggtaat

SEQ ID NO: 154624 - DNA, 75 bp, synthetic construct
  source 1..75: mol_type = other DNA
tacggcagtattagtcactgccaggctacggcattagcggtggtatcccatcaaccaacgggtattgatatcgaa

SEQ ID NO: 154625 - DNA, 75 bp, synthetic construct
  source 1..75: mol_type = other DNA
tcgtcagggatgctgttgccaaatggcgtaaaggctggatcccaccggttactactgccgcaagacttccttcag

SEQ ID NO: 154626 - DNA, 75 bp, synthetic construct
  source 1..75: mol_type = other DNA
atggcataaaggctggatcccaccggttactactgccgcaagacttccttcagtgtcccgggtaagccgctggtt

SEQ ID NO: 154627 - DNA, 75 bp, synthetic construct
  source 1..75: mol_type = other DNA
ttgcacgggatattcgtatccagacgcttaaatcattaactcatcttggctttggtcattatggtggcagcatgt

SEQ ID NO: 154628 - DNA, 75 bp, synthetic construct
  source 1..75: mol_type = other DNA
ttgcacgggatattcgcaccgaaacacttaaatcgctgaatcatcttggttttggccattatggcggctgtatgt

SEQ ID NO: 154629 - DNA, 75 bp, synthetic construct
  source 1..75: mol_type = other DNA
attatattgccgacgtgttctatgttcaaaacaaagaattatgtaaaatatataaaaatgcaatttattcaggtc

SEQ ID NO: 154630 - DNA, 75 bp, synthetic construct
  source 1..75: mol_type = other DNA
aagcaccttcagcgaatgtttctctttttcgtatcgccttcgcggttttcctcacttatatgaccgtcggtctgc

SEQ ID NO: 154631 - DNA, 75 bp, synthetic construct
  source 1..75: mol_type = other DNA
ctatccacttagatgctaaagatggaaagaagatcgttgagctaattgatgatgcaaccgcgcacaggcagtcaa

SEQ ID NO: 154632 - DNA, 75 bp, synthetic construct
  source 1..75: mol_type = other DNA
tgcgccccaccatgagatagatcaacagatcgcacagcgttttcaatcgtttatcgacaagttacgcgcacagcc

SEQ ID NO: 154633 - DNA, 75 bp, synthetic construct
  source 1..75: mol_type = other DNA
ggcgcagtctgaagcgcagcgggctggcgatggccgcctttgtggcggtgagtgaatggtcagtctgggcgggag

SEQ ID NO: 154634 - DNA, 75 bp, synthetic construct
  source 1..75: mol_type = other DNA
gtgggtggtttacggcactactgatattgaacaggctgtgacacagatacagcagtaccgggaacaacaggaagg

SEQ ID NO: 154635 - DNA, 75 bp, synthetic construct
  source 1..75: mol_type = other DNA
gaatttgatgttgctatattgatgtatatattaataatgcctgtgaatggtatttttgatgtatttgatatgtta

SEQ ID NO: 154636 - DNA, 75 bp, synthetic construct
  source 1..75: mol_type = other DNA
acttaacccgtcacatgcgggcggcgtgattaccctgcaacgccattaccaggggatagacagccgctggacaca

SEQ ID NO: 154637 - DNA, 75 bp, synthetic construct
  source 1..75: mol_type = other DNA
tcaaacgggcgatattacgaacctgcgcccggacgaaattatggtgtcggcataaatattgcgtggcgatttgag

SEQ ID NO: 154638 - DNA, 75 bp, synthetic construct
  source 1..75: mol_type = other DNA
cgggtcaaacccacacgcgcacatcatgctatccatgagggcaatcacgcctgacggcttcggggagaaagtccg

SEQ ID NO: 154639 - DNA, 75 bp, synthetic construct
  source 1..75: mol_type = other DNA
ctatggtgtaactatggtcagcttcatcgcgactttacctattgttacagcaaaggggtgttcaagcgtgtttct

SEQ ID NO: 154640 - DNA, 75 bp, synthetic construct
  source 1..75: mol_type = other DNA
ttacgctgttttacaaagaaatgggctgggacccgcaactgggttgcccaacgcgggaaacattgcagcgattgg

SEQ ID NO: 154641 - DNA, 75 bp, synthetic construct
  source 1..75: mol_type = other DNA
tgttttggggcgctgcggaaggtgggccgattgaaacgggcgagatcccgccaggtaatcagaatacagtgggtt

SEQ ID NO: 154642 - DNA, 75 bp, synthetic construct
  source 1..75: mol_type = other DNA
gtttatggctgaaccgccacaaggaaaaatccgtattgccggagatgatgggctgcctgcgtgggcagagattcc

SEQ ID NO: 154643 - DNA, 75 bp, synthetic construct
  source 1..75: mol_type = other DNA
aaaatccgtattgccggagatgatgggctgcctgcgtgggcagatattcctctacccacgtatgaagaacttatt

SEQ ID NO: 154644 - DNA, 75 bp, synthetic construct
  source 1..75: mol_type = other DNA
atagcgcaaggcataatgcttttttccctgtggatatgattgataaatataaatcagagggatgggatttatcag

SEQ ID NO: 154645 - DNA, 75 bp, synthetic construct
  source 1..75: mol_type = other DNA
tgccagacgtgccgccccctggctcgctgtaattcttgcctcagtggcatgcagagataatggcccgcaggttat

SEQ ID NO: 154646 - DNA, 75 bp, synthetic construct
  source 1..75: mol_type = other DNA
cagaaaaaacgctcacaaagacacttacccgggcgctgctctgggcgaagacccggcccaatgagctcaagggaa

SEQ ID NO: 154647 - DNA, 75 bp, synthetic construct
  source 1..75: mol_type = other DNA
gtggtgcctttgttttaatgcgcgtgctgtttggctggatgccggatcgttttggtggcgtaaaagtcgcaatag

SEQ ID NO: 154648 - DNA, 75 bp, synthetic construct
  source 1..75: mol_type = other DNA
tatgaacagtaaacaatggcccggtaaagccgctattggtcgtctgaaaggcgaggaactggcgcaatataatct

SEQ ID NO: 154649 - DNA, 75 bp, synthetic construct
  source 1..75: mol_type = other DNA
aaaatccgtattgccggaggtgatgggctgcccgcgtgggcggatattcctgcccctacgcatgaagaacttatt

SEQ ID NO: 154650 - DNA, 75 bp, synthetic construct
  source 1..75: mol_type = other DNA
accgtagggttgctggctatccggatgcagtatgccttcatcgccctgaaaagggcaaggaagcccggcttgtga

SEQ ID NO: 154651 - DNA, 75 bp, synthetic construct
  source 1..75: mol_type = other DNA
ctgctgatcacgtcaaacaccataaacccgcgccagacacatttttgttgtgcgcgcagcgtatgggcgtgcaac

SEQ ID NO: 154652 - DNA, 75 bp, synthetic construct
  source 1..75: mol_type = other DNA
cgccgttattttgacgccgtcgtcgctgctgatcacgtcaaacaccataaacccgcgccagacacatttttgttg

SEQ ID NO: 154653 - DNA, 75 bp, synthetic construct
  source 1..75: mol_type = other DNA
tcttgaagtcttgctgttactgatgtttatggtggcggggatctattttatgaaacagctgttgctgttcatatt

SEQ ID NO: 154654 - DNA, 75 bp, synthetic construct
  source 1..75: mol_type = other DNA
cagctcagtgcgtggtctttgaagatgctgatttcggtattcaggcagctcgcgccgcaggtatggacgctgtgg

SEQ ID NO: 154655 - DNA, 75 bp, synthetic construct
  source 1..75: mol_type = other DNA
tggatagcgtcgagcctctgccacttgttgaagtggtgaaaagttggtacggccgtcggcctatggctgtcggta

SEQ ID NO: 154656 - DNA, 75 bp, synthetic construct
  source 1..75: mol_type = other DNA
agtatcgggccgagctggaagagctggtacgttcgtttctgccggaagcgccattgtgggtcgcggttaatgagc

SEQ ID NO: 154657 - DNA, 75 bp, synthetic construct
  source 1..75: mol_type = other DNA
ctgtttatcgatcctgatgtgcgtggcgctggcgtgggtcgaatgctggtgaaacatgcgctctcaatggcaccg

SEQ ID NO: 154658 - DNA, 75 bp, synthetic construct
  source 1..75: mol_type = other DNA
ctgtttatcgatcctgatgtgcgcggctgcggcgtgggccggatgctggtgaagcatgcgctctcaatggccccg

SEQ ID NO: 154659 - DNA, 75 bp, synthetic construct
  source 1..75: mol_type = other DNA
taagaagatggggtttaaggttacagggcgctctgaggtggacgatttggggaaaccgtatccgttgctgaatct

SEQ ID NO: 154660 - DNA, 75 bp, synthetic construct
  source 1..75: mol_type = other DNA
aaaatgagcaggcggttgggttctataagaagatgggttttaaggttacgggacgctctgaggtggacgatttgg

SEQ ID NO: 154661 - DNA, 75 bp, synthetic construct
  source 1..75: mol_type = other DNA
aggcggttgggttctataagaaggtgggttttaaggttacgggacgctctgaggtggacgatttggggaaaccgt

SEQ ID NO: 154662 - DNA, 75 bp, synthetic construct
  source 1..75: mol_type = other DNA
attcttgaagctcttgaacaaggggcgagtggcgttaagagtggctgttgttttttgcactggcaggattacact

SEQ ID NO: 154663 - DNA, 75 bp, synthetic construct
  source 1..75: mol_type = other DNA
ttgcaacgccttaacgatgcctgttgtgggaccgcccatagcagtgtttattgctcgattcttgaagctcttgaa

SEQ ID NO: 154664 - DNA, 75 bp, synthetic construct
  source 1..75: mol_type = other DNA
cgagttgcagagtatgcagcgttccttgcaacgccttaacgatgcctgttgtgggaccgcccatagcagtgttta

SEQ ID NO: 154665 - DNA, 75 bp, synthetic construct
  source 1..75: mol_type = other DNA
cgaccttctgcgcgatgtactccacccgcctgacccagaccagtgacagcggccttcaggtaaaaggcgttaatc

SEQ ID NO: 154666 - DNA, 75 bp, synthetic construct
  source 1..75: mol_type = other DNA
ctgaagcatgcagtcttgccctgtcagacaggcagatgactgtggatatggggcaacttagcagcaatcgatttc

SEQ ID NO: 154667 - DNA, 75 bp, synthetic construct
  source 1..75: mol_type = other DNA
agcccatagcagcgtttattgctcgattcttgaagctcttgaacaaggtacgagcggccttaaggttgactgttg

SEQ ID NO: 154668 - DNA, 75 bp, synthetic construct
  source 1..75: mol_type = other DNA
ccgtcaggataaaatccgtctgattgtccaggcgattattggcgtctggctggtgactgcgctggcgttgcatct

SEQ ID NO: 154669 - DNA, 75 bp, synthetic construct
  source 1..75: mol_type = other DNA
attattcattttgtcctacaggcatcggaacacgcccagctgtcgttgttctatatttttaacggcttgctgtca

SEQ ID NO: 154670 - DNA, 75 bp, synthetic construct
  source 1..75: mol_type = other DNA
tccatttcggataacgtcttcgtggggacgatttatatcaacgaagcgaaagcggcaatgaaaagtggcgctatc

SEQ ID NO: 154671 - DNA, 75 bp, synthetic construct
  source 1..75: mol_type = other DNA
ggctcatagcagcgtttattgctcgattcttgaagctcttgagcaaggagcgagtggcgttaagagtggctgttg

SEQ ID NO: 154672 - DNA, 75 bp, synthetic construct
  source 1..75: mol_type = other DNA
atacgccgcgactggatcaggcaggtgttaacggcattatgcgacaattctgtatccgtttgctggcacaatcct

SEQ ID NO: 154673 - DNA, 75 bp, synthetic construct
  source 1..75: mol_type = other DNA
cagcacattgaacagtggaccggcaacgcggattctctccgttacggcttatcctgcacattacgaccgtttgcg

SEQ ID NO: 154674 - DNA, 75 bp, synthetic construct
  source 1..75: mol_type = other DNA
gagggttaattttcattgctatcgttattatcgccatctataaaggatgcagcgatgacggaagtagcgcaagta

SEQ ID NO: 154675 - DNA, 75 bp, synthetic construct
  source 1..75: mol_type = other DNA
tgcttcctgacaacgcaacttcgtacacactacgtgacatcatcgaagcgttgccgaaggacagtaatgcggcat

SEQ ID NO: 154676 - DNA, 75 bp, synthetic construct
  source 1..75: mol_type = other DNA
ggaaactcaccagtaacgccatgtcgatgatggcagatatgcaggcgacgcgcagacgctgggaagagctgaaca

SEQ ID NO: 154677 - DNA, 75 bp, synthetic construct
  source 1..75: mol_type = other DNA
atcctgatgctggcgctgattgtttgccgtattattcctctgcaatgggtacgtgccggggcgcgctggttactg

SEQ ID NO: 154678 - DNA, 75 bp, synthetic construct
  source 1..75: mol_type = other DNA
tgtctgtatgggaataagatggtaagatattcctaccttggatttaagggagaccttattttcattgataatgat

SEQ ID NO: 154679 - DNA, 75 bp, synthetic construct
  source 1..75: mol_type = other DNA
atggcaatgaggtcttgcagagagtgtgggcagaaggtttcttcagaagcgaaagtgtgtccagggtgtggtgtt

SEQ ID NO: 154680 - DNA, 75 bp, synthetic construct
  source 1..75: mol_type = other DNA
tatggtgaagcggtaaaccacgatgctgacagtccggcacgtcctgcgccggaacttatgcagtttcatctgaaa

SEQ ID NO: 154681 - DNA, 75 bp, synthetic construct
  source 1..75: mol_type = other DNA
ttttgaaagtcgcagcatctcgtgctgacttggcaaaattgctagatgttaagttggtgtttttaacgaatattc

SEQ ID NO: 154682 - DNA, 75 bp, synthetic construct
  source 1..75: mol_type = other DNA
ggtacatgtgctaaattagaaggccgttttggattcattgactcaatagataaatataataatttaaaactaaag

SEQ ID NO: 154683 - DNA, 75 bp, synthetic construct
  source 1..75: mol_type = other DNA
ttgccggaggacagtaacgcggcatggaaactcaccagtaacgccatgtcgatgatggcagatatgcaggcgacg

SEQ ID NO: 154684 - DNA, 75 bp, synthetic construct
  source 1..75: mol_type = other DNA
gagagctattagatatcgatgacaaaatgcgcttaagcgagcgtcttgtcgatatgaatcaggtgatggaactta

SEQ ID NO: 154685 - DNA, 75 bp, synthetic construct
  source 1..75: mol_type = other DNA
gcgagcgtcttgttgatatgaatcaggtgatggaacttacaaccctgagtcgtcgtacactgctaaaccttgagg

SEQ ID NO: 154686 - DNA, 75 bp, synthetic construct
  source 1..75: mol_type = other DNA
aagtctctgaaaattcacaggtaataagcaaaaacaaggtagtttttcagaggctaaaaacgacaccggaagttg

SEQ ID NO: 154687 - DNA, 75 bp, synthetic construct
  source 1..75: mol_type = other DNA
ttgctggaaccccgcctttcaccgtttgataaaatggcctggatgatgatccggcttcatgcactgcaaaatgaa

SEQ ID NO: 154688 - DNA, 75 bp, synthetic construct
  source 1..75: mol_type = other DNA
ttcgatcgagttcatccagagcaatggcgagttaagcgatacagttactggttcccgccgtgcagtatcagaagg

SEQ ID NO: 154689 - DNA, 75 bp, synthetic construct
  source 1..75: mol_type = other DNA
ctggcaaaccactgtgtaaaattctgcagaaattctatgaatatcagagccatcctcccgagttaacctgtggtg

SEQ ID NO: 154690 - DNA, 75 bp, synthetic construct
  source 1..75: mol_type = other DNA
ggcggtaagcattcatggttcagaatttttactgattgcctcaatatgctatccgacagcacggataatattttt

SEQ ID NO: 154691 - DNA, 75 bp, synthetic construct
  source 1..75: mol_type = other DNA
gctataacacgaagaaatcttttgagttgggtaataccatcatctatcttaacgatgttcttctctgggaaagca

SEQ ID NO: 154692 - DNA, 75 bp, synthetic construct
  source 1..75: mol_type = other DNA
ctcaaaccctgatacgctaaaggctttgtgtgcctccattatccaacatgagaacggcagtcagccgtacagcga

SEQ ID NO: 154693 - DNA, 75 bp, synthetic construct
  source 1..75: mol_type = other DNA
tcgaatacagcaaaaccaatccgtgggtgggccagaccggtgatgatggtcgatttgcaaaattcgaaacgccag

SEQ ID NO: 154694 - DNA, 75 bp, synthetic construct
  source 1..75: mol_type = other DNA
tcgagccggggcgcgttggctattggccgaaatgttgctgttttttgtccctgccgtggtggctgtggtgaacta

SEQ ID NO: 154695 - DNA, 75 bp, synthetic construct
  source 1..75: mol_type = other DNA
gccccatcggcagctgtcgccgggatccttatggataagcctggcggtgttgtggctgagaaaaactggtttaac

SEQ ID NO: 154696 - DNA, 75 bp, synthetic construct
  source 1..75: mol_type = other DNA
tcgagtacagcaaaaccaatccgtgggtaggccagaccggtgatgatggtcgctttgccaaattcgaaacgccag

SEQ ID NO: 154697 - DNA, 75 bp, synthetic construct
  source 1..75: mol_type = other DNA
gacatgagattagccaacttaatgcctatgaagaaggtcagttccaggcgacgctggcgaacaacggaaaattag

SEQ ID NO: 154698 - DNA, 75 bp, synthetic construct
  source 1..75: mol_type = other DNA
tgggttgtcctggatgatgggtggttggtggatctgaggctacgcatgtggcttggcgatcacgacaacattcct

SEQ ID NO: 154699 - DNA, 75 bp, synthetic construct
  source 1..75: mol_type = other DNA
aagcattgactacttttcaattgaacatcaaaacgtagttgaatgttttaatgagttaaaacataagttcccaca

SEQ ID NO: 154700 - DNA, 75 bp, synthetic construct
  source 1..75: mol_type = other DNA
caacgccctggagccgggcgttgtcgaaatcgacggcaaaaatatttatgcgcaaattatcgatttaaccacacg

SEQ ID NO: 154701 - DNA, 75 bp, synthetic construct
  source 1..75: mol_type = other DNA
tgctggctgaataccactgtcacgaacggtgcaatagtgatccacacccaacgcctgaaatcagatccagggggt

SEQ ID NO: 154702 - DNA, 75 bp, synthetic construct
  source 1..75: mol_type = other DNA
tgggttttaatcgtacctgggaggaatggcagcgcgaggaagatgcacgaacacacaccaccgagaggagacatg

SEQ ID NO: 154703 - DNA, 75 bp, synthetic construct
  source 1..75: mol_type = other DNA
aaaatccgtattgccggaggtgatgggcagcccgcgtgggcagatattcctccacccacgcatgaagaacttatt

SEQ ID NO: 154704 - DNA, 75 bp, synthetic construct
  source 1..75: mol_type = other DNA
ggattatctggacgcactggagctggtcgatacttccggtgcgccagatattgaatggcctacgcctccggcagt

SEQ ID NO: 154705 - DNA, 75 bp, synthetic construct
  source 1..75: mol_type = other DNA
gtggctggattatctggacgcactggagctggttgatacctccagtgctccagatattgaatggcctacgcctcc

SEQ ID NO: 154706 - DNA, 75 bp, synthetic construct
  source 1..75: mol_type = other DNA
ccgcaggatgttcaccgaccggcatgtaataaaaatgccccaacggcaatacgtaaaatcgtggttaaagtggcc

SEQ ID NO: 154707 - DNA, 75 bp, synthetic construct
  source 1..75: mol_type = other DNA
caagaatatttatgcgcaaattatcgatttaaccacacgcgaggcggtggaaaaccgtcctgaggttcatcgtcg

SEQ ID NO: 154708 - DNA, 75 bp, synthetic construct
  source 1..75: mol_type = other DNA
atgttgccaatgatcttctgaaaaggagcatagattatttttcagtagaacatgaaaatgttattaactgtttta

SEQ ID NO: 154709 - DNA, 75 bp, synthetic construct
  source 1..75: mol_type = other DNA
tgaaaacccgtgaggcaccgctttttgctgccgtcaacacaccagaaaaacagccggatcatctgttccgctcgc

SEQ ID NO: 154710 - DNA, 75 bp, synthetic construct
  source 1..75: mol_type = other DNA
accgcaagacgggacctcgctcaactggcctttgtgctggaatccgctggccctcaccgctggcgactggctccc

SEQ ID NO: 154711 - DNA, 75 bp, synthetic construct
  source 1..75: mol_type = other DNA
tgcaggatggctgctggtagcagaatttatttttacgctggcgatggccctgaaatgctacccactgctacccgg

SEQ ID NO: 154712 - DNA, 75 bp, synthetic construct
  source 1..75: mol_type = other DNA
gtttacaaaacgctgctaacaggcaagatttggctagtatcttgaatcttaaaactgcttttcttacggatgtta

SEQ ID NO: 154713 - DNA, 75 bp, synthetic construct
  source 1..75: mol_type = other DNA
aacgcccatattctactcgatacattgccgatcacattaacttgtccagccgtggaggggaaagtaaaaaaagag

SEQ ID NO: 154714 - DNA, 75 bp, synthetic construct
  source 1..75: mol_type = other DNA
ccttcgagcgcattcgaaaatttgctttatctgaaggaaaaacccaggcatttctttgggatgcggacgtaactt

SEQ ID NO: 154715 - DNA, 75 bp, synthetic construct
  source 1..75: mol_type = other DNA
atgaagaaggtttatagttacattcgcttttcgtcaacgaaacaagcatttggtgatagtcaccgcagacagagc

SEQ ID NO: 154716 - DNA, 75 bp, synthetic construct
  source 1..75: mol_type = other DNA
atgcggtggctttttccagtctggcgctgtttgaggaacatccggatttccacgccctgctcacggggtgtatcc

SEQ ID NO: 154717 - DNA, 75 bp, synthetic construct
  source 1..75: mol_type = other DNA
tggctctcaaacagacaatgctttgtctggagcacaggaactctgtcatacctgccggcacaatgcttctgattg

SEQ ID NO: 154718 - DNA, 75 bp, synthetic construct
  source 1..75: mol_type = other DNA
acgtctttcttatggccgcatggtgtggatggctctgccctacactctcgtactgaccctcgtcggattactctg

SEQ ID NO: 154719 - DNA, 75 bp, synthetic construct
  source 1..75: mol_type = other DNA
tgaccggtgtcaccgatgaacatgctatcggtaaagccttcaccgaatctctgccattcaccgcactgttgacgg

SEQ ID NO: 154720 - DNA, 75 bp, synthetic construct
  source 1..75: mol_type = other DNA
atttgtggcctgttaacctgcctgctggtagagaagctgcgttggtttggctacggtgaaacgctgccggagaaa

SEQ ID NO: 154721 - DNA, 75 bp, synthetic construct
  source 1..75: mol_type = other DNA
gtggatcactattgcaccgttcgtgacaggtactgccgtaacccggcttgttcacgtaaaatttttgccgagtcg

SEQ ID NO: 154722 - DNA, 75 bp, synthetic construct
  source 1..75: mol_type = other DNA
acaaatgctgagtacctagtacgtaaattcgacgcgcttgaagctaaatgtgcggcactggaaaacaaaataata

SEQ ID NO: 154723 - DNA, 75 bp, synthetic construct
  source 1..75: mol_type = other DNA
atgcgcatgaatgttttcgaaatggaaggatttcttcgcgggaaatgtgtaccgcgagatctgaaagtgaatgaa

SEQ ID NO: 154724 - DNA, 75 bp, synthetic construct
  source 1..75: mol_type = other DNA
tcctgcctgtcaggaaggaaaaacgaactgttgtgaaaatgtctctctctatggcgttcatcaggatggtggctt

SEQ ID NO: 154725 - DNA, 75 bp, synthetic construct
  source 1..75: mol_type = other DNA
atgaccacctttacccaaaaagaactgattaaagaaatcaaagaacgcatcagcagcctcgacgtacgagacgat

SEQ ID NO: 154726 - DNA, 75 bp, synthetic construct
  source 1..75: mol_type = other DNA
atgaccacctttacccaaaaagaactgattaaagaaataaaagaacgcatcagcagcctcgacgtccgagacgat

SEQ ID NO: 154727 - DNA, 75 bp, synthetic construct
  source 1..75: mol_type = other DNA
cagggcgtaccggacggcgtagtaaaaatactcggtgagtctgaaatagaaatattcggacgtgcagacgttact

SEQ ID NO: 154728 - DNA, 75 bp, synthetic construct
  source 1..75: mol_type = other DNA
aggggctgcctgacggctcctttacccgcgaacaggctgaaaccgttgccgcacagtaccggaatgtctttatcg

SEQ ID NO: 154729 - DNA, 75 bp, synthetic construct
  source 1..75: mol_type = other DNA
ttgatctggcgctcctggaattttgaggacggtgccgggtactggatgaaccatgtcatccgtgatttcgggatc

SEQ ID NO: 154730 - DNA, 75 bp, synthetic construct
  source 1..75: mol_type = other DNA
atgaggatgagcgaatatttcagaatacttcagggactgccggacggctcctttacccgcgaacaggcggaagcc

SEQ ID NO: 154731 - DNA, 75 bp, synthetic construct
  source 1..75: mol_type = other DNA
atgaatatggaaactaattcgcacacaacaagcccatacattcagcttattgagcaaattgaagtgttacaacag

SEQ ID NO: 154732 - DNA, 75 bp, synthetic construct
  source 1..75: mol_type = other DNA
caacaagcccgtacattcaacttattgagcaaattgaagtgctacagcaggaagcaaagcgactgcgagagcaag

SEQ ID NO: 154733 - DNA, 75 bp, synthetic construct
  source 1..75: mol_type = other DNA
cgcacctggaattttgaggacggtgccgggtactggatgaaccatgccatccgtgatttcggcattcttaagtaa

SEQ ID NO: 154734 - DNA, 75 bp, synthetic construct
  source 1..75: mol_type = other DNA
accgcgagatctgaaagtaaatgaaacagatgctgaatacctggcgcgtaaattcgatgcgcttgaagctaaatg

SEQ ID NO: 154735 - DNA, 75 bp, synthetic construct
  source 1..75: mol_type = other DNA
gactgggacaaaatcaacctgctgaaaacctttggcccaatgggcggcctgctggtgacatatttactgttgttc

SEQ ID NO: 154736 - DNA, 75 bp, synthetic construct
  source 1..75: mol_type = other DNA
ggcacggcgtcgcttccgcctcggtatgctggtatttttcggtatgctgggctgggcgctgctgacagcaatgaa

SEQ ID NO: 154737 - DNA, 75 bp, synthetic construct
  source 1..75: mol_type = other DNA
aattcaacgcgcttgaagctaaatgtgcggcactggaaaacaaaataataccagtgtcagctgaactgccaccag

SEQ ID NO: 154738 - DNA, 75 bp, synthetic construct
  source 1..75: mol_type = other DNA
aattcgatgcgcttgaagctaaatgtgcagcacaggaaaacaaagtaataccagtgtcaactgaactgccaccag

SEQ ID NO: 154739 - DNA, 75 bp, synthetic construct
  source 1..75: mol_type = other DNA
gggcacatgttgttgttgctgatattgactgtcaacgtcgccagcacgttgtggatcatctggcgattaatgcct

SEQ ID NO: 154740 - DNA, 75 bp, synthetic construct
  source 1..75: mol_type = other DNA
atgaccacctttacccaaaaagaactgattaaagaaatcaaagagcgcatcagcagcctcgacgtgcgagacgat

SEQ ID NO: 154741 - DNA, 75 bp, synthetic construct
  source 1..75: mol_type = other DNA
atgaccacctttacccaaaaagaactgattaaagaaatcaaagaccgcatcagcagcctcgacgtccgagacgat

SEQ ID NO: 154742 - DNA, 75 bp, synthetic construct
  source 1..75: mol_type = other DNA
atgaccacctttacccaaaaagaactgattaaagaaatcaaagatcgcatcagcagcctcgacgttcgagacgat

SEQ ID NO: 154743 - DNA, 75 bp, synthetic construct
  source 1..75: mol_type = other DNA
cctggttgattaaattctgggcccccatccccgcagtcatcgcggcgggtattctctccacttattattttggca

SEQ ID NO: 154744 - DNA, 75 bp, synthetic construct
  source 1..75: mol_type = other DNA
ggaaggccaggtgcactactggtgggtcggtctgggcaacgttatcggctcgacgattctggcttactactggga

SEQ ID NO: 154745 - DNA, 75 bp, synthetic construct
  source 1..75: mol_type = other DNA
atgaccacctttacccaaaaagaactgattaaagaaatgaaagagcgcatcagcagcctcgacgtccgagacgat

SEQ ID NO: 154746 - DNA, 75 bp, synthetic construct
  source 1..75: mol_type = other DNA
gaatggtcttccccgacagatgacgatgagctgccggaagtcaccggacctgcgtggatagtcgacaatgtggcg

SEQ ID NO: 154747 - DNA, 75 bp, synthetic construct
  source 1..75: mol_type = other DNA
tgtccactcgcctggatgttgaagtgaatggctttaacggtggtgttctgaacggtgttccttctgcatatcact

SEQ ID NO: 154748 - DNA, 75 bp, synthetic construct
  source 1..75: mol_type = other DNA
ggtgttctgaacggtgttccttctgcatatcactggtatacggaacagtatggcgtgaagtggccttgtgggtat

SEQ ID NO: 154749 - DNA, 75 bp, synthetic construct
  source 1..75: mol_type = other DNA
tgggttccgcgaaaatggtacttgaaacgggagaacatccgggcgcactgaaagatatggtctgctcaccaggag

SEQ ID NO: 154750 - DNA, 75 bp, synthetic construct
  source 1..75: mol_type = other DNA
cgccgccctgcatgaccagttcggcatcaacgccgcagaatcggcgcaagaagtggcgcaaatcgccgacatcat

SEQ ID NO: 154751 - DNA, 75 bp, synthetic construct
  source 1..75: mol_type = other DNA
gcagggctgcaatttctgggctggcagcgatatgagcgtggagagcttgttgatgtgctgtggggggaactggaa

SEQ ID NO: 154752 - DNA, 75 bp, synthetic construct
  source 1..75: mol_type = other DNA
aaatgcatattatcagagagggcatatagaggatagtatcaatctgtggatgaatattcctctggggcagtggat

SEQ ID NO: 154753 - DNA, 75 bp, synthetic construct
  source 1..75: mol_type = other DNA
gacgccgcgtcgtctggtttaacgtcgctggcgcagtcattctgactctggcttacttcggcagccgaattgttc

SEQ ID NO: 154754 - DNA, 75 bp, synthetic construct
  source 1..75: mol_type = other DNA
gctacccattgtctatgcctttgcgcttatcaacctggcgctggcgaccttcatgcccaatgaatacatcaccca

SEQ ID NO: 154755 - DNA, 75 bp, synthetic construct
  source 1..75: mol_type = other DNA
cggtcagcagaagggacgggatacggagacgggagagacatggcgtctgcgttacaacaagtcatttgaacttac

SEQ ID NO: 154756 - DNA, 75 bp, synthetic construct
  source 1..75: mol_type = other DNA
atgtttgctctggccggaaataaatggaacaccacgttgcccggcggaaatatgcaatttcagggcgtcattatt

SEQ ID NO: 154757 - DNA, 75 bp, synthetic construct
  source 1..75: mol_type = other DNA
atttctgttagcgtcgttgctgccaatgtttgctctggccggaaataaatggaataccacgctgcccggcggaaa

SEQ ID NO: 154758 - DNA, 75 bp, synthetic construct
  source 1..75: mol_type = other DNA
gtttaatgtcgctggtgcgaaaactgaagccacccaggggattgtcgtgatcctgcaaagtggtggtcgtcgtta

SEQ ID NO: 154759 - DNA, 75 bp, synthetic construct
  source 1..75: mol_type = other DNA
ccccaccagtgcttaaactggcagccgaacaagcgccaaccggtcgcgtggagcgggaaaaaacgacgcgcagca

SEQ ID NO: 154760 - DNA, 75 bp, synthetic construct
  source 1..75: mol_type = other DNA
cgcgtggagcgggaaaaaacgacgcgcagcagtgaatccaccagcatccgtgtagcggtagaaaaggttgatcaa

SEQ ID NO: 154761 - DNA, 75 bp, synthetic construct
  source 1..75: mol_type = other DNA
cgcgacgaattatcctttcgcgcctgaaagcgggagaaatcgatctgctggaagaagagctgggacatctgacaa

SEQ ID NO: 154762 - DNA, 75 bp, synthetic construct
  source 1..75: mol_type = other DNA
gaaggccggggaagtcgacctgctggaagaagagctgggacatctgacaaccctaactgacgtggtaaagggggc

SEQ ID NO: 154763 - DNA, 75 bp, synthetic construct
  source 1..75: mol_type = other DNA
gcgaccattcttggcgacggcagcgtggcactgattgttgatgtctccgccttgcaggcgataaaccgcgaacaa

SEQ ID NO: 154764 - DNA, 75 bp, synthetic construct
  source 1..75: mol_type = other DNA
gatcggcgatgtcatcgctacccatgtcattccacgtccgcattctgatgttgaaaaacttctgccagcaggcct

SEQ ID NO: 154765 - DNA, 75 bp, synthetic construct
  source 1..75: mol_type = other DNA
cttctacgcgttcatccgtagcctgcgtgcctacgagaatagcttctccggtaatcaggacgtgatggtcatgag

SEQ ID NO: 154766 - DNA, 75 bp, synthetic construct
  source 1..75: mol_type = other DNA
gcggtttatgagttgcagtcaccggaagatctggggcatgatttgcagacttatctgcaggatatgtcaccggaa

SEQ ID NO: 154767 - DNA, 75 bp, synthetic construct
  source 1..75: mol_type = other DNA
catctgctggttttgcagccggaagcgccagatgccgaacaattgaatgccatctttcgggctgcccactcgatc

SEQ ID NO: 154768 - DNA, 75 bp, synthetic construct
  source 1..75: mol_type = other DNA
gttaattttctggctttacctgtaagagctgcagaaattgagactttgacgcatttaattaaatgtggatgtgtc

SEQ ID NO: 154769 - DNA, 75 bp, synthetic construct
  source 1..75: mol_type = other DNA
tggtgaagtgaaatcctgccatgtcattccacgaccgcacagcgatgttgaggccattttacctaaatctgcata

SEQ ID NO: 154770 - DNA, 75 bp, synthetic construct
  source 1..75: mol_type = other DNA
ggaaggtcgccgcattaaagaaattcgtgaagttcagggctttgaaggtggtgattacatttctcgcctcattgc

SEQ ID NO: 154771 - DNA, 75 bp, synthetic construct
  source 1..75: mol_type = other DNA
gctatgacgacatcaaggaatcgatccgtcgtcgcgggctggacacgccaccgccgatcacccgtcgtcccgatc

SEQ ID NO: 154772 - DNA, 75 bp, synthetic construct
  source 1..75: mol_type = other DNA
gcattccggctgatccgtattgtccgccggatcaaagaatttcagcaggaggcacaacatgctgccgacgattaa

SEQ ID NO: 154773 - DNA, 75 bp, synthetic construct
  source 1..75: mol_type = other DNA
tttgagcgggatctcatcagcgagcgggtcaagtcaggccttgctgttgcgaaggcacgtggtaagaggcttggt

SEQ ID NO: 154774 - DNA, 75 bp, synthetic construct
  source 1..75: mol_type = other DNA
ttaacggatgcaagaacttcaaaatttgtagaaaaagagtttgatttaccggcaaggagtgaagattgggtaatg

SEQ ID NO: 154775 - DNA, 75 bp, synthetic construct
  source 1..75: mol_type = other DNA
tgttcaggatattgctggctttagtcttggatgaggagaccccctcattatttttgtgttcaataaataatttag

SEQ ID NO: 154776 - DNA, 75 bp, synthetic construct
  source 1..75: mol_type = other DNA
tgcgtgcacgtggcgatatggccatcatttacgatcgctcctgtgagttcgtcaaaagctattacgacccgtcac

SEQ ID NO: 154777 - DNA, 75 bp, synthetic construct
  source 1..75: mol_type = other DNA
cctgtcctgctatgtcacgctgcccgggccgtatccggccgtgaaactggccctcaaatacaaaccgcgtccgaa

SEQ ID NO: 154778 - DNA, 75 bp, synthetic construct
  source 1..75: mol_type = other DNA
tctcctccaacgctgacacccatgcttccctgaagccggttatctcgatgtggctgtcaattgctatccgcggcc

SEQ ID NO: 154779 - DNA, 75 bp, synthetic construct
  source 1..75: mol_type = other DNA
acaactgtgggataccacggagtccttacgatcggtcagcgatcgcctggcgtgggatctggctgaacattacgc

SEQ ID NO: 154780 - DNA, 75 bp, synthetic construct
  source 1..75: mol_type = other DNA
ttatcacagttgttttatatatcagtgaaatagtttctatggcaactgttgataattttgatgtcgaagagttat

SEQ ID NO: 154781 - DNA, 75 bp, synthetic construct
  source 1..75: mol_type = other DNA
cgcctatctgcagaatacgccagcggcaaacctggtggaagagaagattgagaaaaccgccatcagtatccgtgc

SEQ ID NO: 154782 - DNA, 75 bp, synthetic construct
  source 1..75: mol_type = other DNA
acttttcctttcattaatggagtataagcatccattatacgggataagttacttaaaatatgtttatggcgtatt

SEQ ID NO: 154783 - DNA, 75 bp, synthetic construct
  source 1..75: mol_type = other DNA
gaaaaagccagcgcacacgcttcccgtacgctgaaagcggtgtacgaagcgattggttttgtggcgaagccgtaa

SEQ ID NO: 154784 - DNA, 75 bp, synthetic construct
  source 1..75: mol_type = other DNA
caggatgcgcagaagctgcgtaaagcgacgctggatacgctggcgttgtacctggcttgcggtatcgatcctgag

SEQ ID NO: 154785 - DNA, 75 bp, synthetic construct
  source 1..75: mol_type = other DNA
atgagtttgttgaacttgataaaaagatttcggtgacatctatggattttgaaactattagtgaacatttgattt

SEQ ID NO: 154786 - DNA, 75 bp, synthetic construct
  source 1..75: mol_type = other DNA
gttgttagtattttaatacgtggctctcttcttcgtatgactggcaatccttctcgttggggaagggttgataat

SEQ ID NO: 154787 - DNA, 75 bp, synthetic construct
  source 1..75: mol_type = other DNA
cagaatgcctatgatagtcgcttttctgacagtaatcctgggtatggccatacttatggggtatctgacccaatt

SEQ ID NO: 154788 - DNA, 75 bp, synthetic construct
  source 1..75: mol_type = other DNA
tcgcaaatgtgttataacgcctgttactgaggtccatcatgatgatacatttggggtagtctctgcaatacttct

SEQ ID NO: 154789 - DNA, 75 bp, synthetic construct
  source 1..75: mol_type = other DNA
ccgatattattgaaaccacagggattcgcaaatgtgttataacgcctgttactgaggtccatcatgatgatacat

SEQ ID NO: 154790 - DNA, 75 bp, synthetic construct
  source 1..75: mol_type = other DNA
tgcgatgagggccgagggacgcagctatcgctggatcgcacgcgagctcggtatcagcaagaataccgtcgctga

SEQ ID NO: 154791 - DNA, 75 bp, synthetic construct
  source 1..75: mol_type = other DNA
gatgccttacaacagtttaaggatgttctgccttatcttttgttaagtgtattaataggttcatttatttatggt

SEQ ID NO: 154792 - DNA, 75 bp, synthetic construct
  source 1..75: mol_type = other DNA
aaaatagtaaattatttatatagtatttcatcatcattagacaatagaaatgatttggcatggcaatattcaacc

SEQ ID NO: 154793 - DNA, 75 bp, synthetic construct
  source 1..75: mol_type = other DNA
cagtcattatagttatcctttcaggcttaatgttgtttataacactaagggctgtatcaatagttggtcaaggat

SEQ ID NO: 154794 - DNA, 75 bp, synthetic construct
  source 1..75: mol_type = other DNA
tccgcaaaactagctggggcacttgcaggagcaagtgctacagccactatgcaaggtgcggcggctctcggcatt

SEQ ID NO: 154795 - DNA, 75 bp, synthetic construct
  source 1..75: mol_type = other DNA
tgcctgatgtatggctttttacggccaatgtttaataactggcttcaaaatatatttgctgcaatactaacaatt

SEQ ID NO: 154796 - DNA, 75 bp, synthetic construct
  source 1..75: mol_type = other DNA
agggaatgaccgctcaattttatgtatggcttgggatattcatcttaatgattattaccgcatttgtttctatga

SEQ ID NO: 154797 - DNA, 75 bp, synthetic construct
  source 1..75: mol_type = other DNA
acacgtgtggatggtgggtgaaaagccagtaatgacgctgcatgtgcaggtgatcccgccacacgatcatgacgc

SEQ ID NO: 154798 - DNA, 75 bp, synthetic construct
  source 1..75: mol_type = other DNA
caaatatactttctttctggttacttcatcacggtagtgaagagaaaaaccttaacgtgcgcgcagcggcactgc

SEQ ID NO: 154799 - DNA, 75 bp, synthetic construct
  source 1..75: mol_type = other DNA
attttcacgtcgtcctcccaccattcgccacactttcggttggctaagattgaccacgctcgcggcgtttgtgaa

SEQ ID NO: 154800 - DNA, 75 bp, synthetic construct
  source 1..75: mol_type = other DNA
agtctttcctggggacagcagcgtctggcgctgatcgtccgcgcgctggtgaaacatccgacgttgcttattctc

SEQ ID NO: 154801 - DNA, 75 bp, synthetic construct
  source 1..75: mol_type = other DNA
gcttatccgccgttttgttgatgtgctgattagcgaaggtgaaacgcaattgttgtttgtttcgcaccacgctga

SEQ ID NO: 154802 - DNA, 75 bp, synthetic construct
  source 1..75: mol_type = other DNA
cgctaaagaggaactactccagcaggcactcgttgcgcaactagcgcacagtgaacggcttgatggcgtgcaaca

SEQ ID NO: 154803 - DNA, 75 bp, synthetic construct
  source 1..75: mol_type = other DNA
catgaggatggcgatcatcatgtcctttgtagctaatttaggtggctacctcgatggcgttattgatgccataaa

SEQ ID NO: 154804 - DNA, 75 bp, synthetic construct
  source 1..75: mol_type = other DNA
ctgggtattgaagttgtcgatgtgcgtatcaagcagatcaacctgccgaccgaagtgtctgaagcgatctacaac

SEQ ID NO: 154805 - DNA, 75 bp, synthetic construct
  source 1..75: mol_type = other DNA
ggtgagcgcggtattacgctgcgttttggtaaggtactgcgtgacgatgacaacaaacctctggtttatgagccg

SEQ ID NO: 154806 - DNA, 75 bp, synthetic construct
  source 1..75: mol_type = other DNA
ccacaaactcaggcgagaaatatgttgattgaagccgggggaataatgatgccgggtaatccgataaaaatcagc

SEQ ID NO: 154807 - DNA, 75 bp, synthetic construct
  source 1..75: mol_type = other DNA
gatatagcgatgtttgatgccactctgagttttctggagcacggactgatggcatatatcgcgacagggaagtca

SEQ ID NO: 154808 - DNA, 75 bp, synthetic construct
  source 1..75: mol_type = other DNA
gcttcatcgtcaggtttcggacataccggcccgctaaaagatgctcctgcctacgataccatcattcaggcaatg

SEQ ID NO: 154809 - DNA, 75 bp, synthetic construct
  source 1..75: mol_type = other DNA
tgctgccggtgaaattggcgagaaggaaatcctcaaagccagcgagcagtactcttacggtgctgacccggtgcg

SEQ ID NO: 154810 - DNA, 75 bp, synthetic construct
  source 1..75: mol_type = other DNA
atgaataataatcaaaatttaaaggcgcatgctttacgaacagcagtcttacgctactacattgctgatgcattc

SEQ ID NO: 154811 - DNA, 75 bp, synthetic construct
  source 1..75: mol_type = other DNA
tatttaaaaacctgtccgatgaaacccgtttgggtatcgtgttgttgctcagggagatgggagagttgtgcgtgt

SEQ ID NO: 154812 - DNA, 75 bp, synthetic construct
  source 1..75: mol_type = other DNA
aattggtaatacgatggcgatgtggcgagttaatccagcatggggacgtagagcagcatcaattcagaacatgca

SEQ ID NO: 154813 - DNA, 75 bp, synthetic construct
  source 1..75: mol_type = other DNA
tatcaaactttaggaggaaagttacagcaacctattgaagaagttgtttgggataccgcacgcatgttgttaata

SEQ ID NO: 154814 - DNA, 75 bp, synthetic construct
  source 1..75: mol_type = other DNA
attttgattgtctgggaggcgatagaacgcttccgcacgccgcgtccggtcgagggcggcatgatgatggcaatt

SEQ ID NO: 154815 - DNA, 75 bp, synthetic construct
  source 1..75: mol_type = other DNA
ttattcaggagataaacacgccatgcagaacgactgatattacctcgcgttttgaaatgagtgcttatcaggccc

SEQ ID NO: 154816 - DNA, 75 bp, synthetic construct
  source 1..75: mol_type = other DNA
gccattaccttatgtgtcttgaaaaagagggaaaaataagacgtacacctcttcgtcgtggtgcccgtactttat

SEQ ID NO: 154817 - DNA, 75 bp, synthetic construct
  source 1..75: mol_type = other DNA
ctgcgccgcaatactggtgtatatctccgctaaagtagccgcagcactggccggggcaagtgctaccgtatccat

SEQ ID NO: 154818 - DNA, 75 bp, synthetic construct
  source 1..75: mol_type = other DNA
cctcttccgtgcgcattggtggtgaccgtttcgacgaagctatcatcaactatgtgcgtcgtaattacggttctc

SEQ ID NO: 154819 - DNA, 75 bp, synthetic construct
  source 1..75: mol_type = other DNA
tatgtgcgtcgtaattacggttctctgatcggtgaagccactgcagaacgtatcaagcacgaaatcggttcggct

SEQ ID NO: 154820 - DNA, 75 bp, synthetic construct
  source 1..75: mol_type = other DNA
tcgaacgggcgatattacgaacctgcgcccgggcgaaattatggtatcggcgtgaatgttgcgtggcgatttgag

SEQ ID NO: 154821 - DNA, 75 bp, synthetic construct
  source 1..75: mol_type = other DNA
tgtctttagctatatcaagagcaagggcaacttgtcgttaaacaatggttatgaggagagcaataccggtgataa

SEQ ID NO: 154822 - DNA, 75 bp, synthetic construct
  source 1..75: mol_type = other DNA
tatctatgacgtaaaatggaacgatacattccgcagtaacttttctctctacggacgtaatttcggcgatcttga

SEQ ID NO: 154823 - DNA, 75 bp, synthetic construct
  source 1..75: mol_type = other DNA
cgctgcaagagccgctgaccggcatcgttagcgcggtgatggttgcgctggagcagtgcccgccggaactcgctt

SEQ ID NO: 154824 - DNA, 75 bp, synthetic construct
  source 1..75: mol_type = other DNA
atgaagattttttccgtccgacagaccgttttgcccgcactgattctcctttctccttcaacttttgccgctaat

SEQ ID NO: 154825 - DNA, 75 bp, synthetic construct
  source 1..75: mol_type = other DNA
ttgaagccagtagttactacggcagttttggcagctggcgctatgggctgaaagcaacgggcgcaacgggcgacg

SEQ ID NO: 154826 - DNA, 75 bp, synthetic construct
  source 1..75: mol_type = other DNA
aaatacggccaaagcgccgtcttatactctcgtcggcttattcaccgggtataaatacaattaccacaatttaac

SEQ ID NO: 154827 - DNA, 75 bp, synthetic construct
  source 1..75: mol_type = other DNA
agcgtggtggatggcgaggagatgcgcctggcaacaccgcgcattaacttgtccgaatcactgaccggcgtgcct

SEQ ID NO: 154828 - DNA, 75 bp, synthetic construct
  source 1..75: mol_type = other DNA
cgacccagtatcaatcgattccgatggccccccaacttaccccatctcatgcgggcggcgtaattactctgcaac

SEQ ID NO: 154829 - DNA, 75 bp, synthetic construct
  source 1..75: mol_type = other DNA
cgctggacacaccgtggtgaactgggcgttccggtcacgttcactaccggcctgaactacgaaaacatgagtgaa

SEQ ID NO: 154830 - DNA, 75 bp, synthetic construct
  source 1..75: mol_type = other DNA
agtcaataaggttgaatctaaaactcttcctgatgaattaaaaaataaattatcgcaattatctctgcatgaact

SEQ ID NO: 154831 - DNA, 75 bp, synthetic construct
  source 1..75: mol_type = other DNA
tcaggcgatatccctaagaaattataaattcatattgaagggaggtattggtgggctgagtgttcagcttggcgg

SEQ ID NO: 154832 - DNA, 75 bp, synthetic construct
  source 1..75: mol_type = other DNA
tccctttcgtggataattcactttcagtagtggatgttcagaaaaacatcaaccctttaaaaagagaacaagaaa

SEQ ID NO: 154833 - DNA, 75 bp, synthetic construct
  source 1..75: mol_type = other DNA
ggtagtttacgcctgacatttcggaattttttcacagaggagctgaatacaactaataaggaaatcaagaagaat

SEQ ID NO: 154834 - DNA, 75 bp, synthetic construct
  source 1..75: mol_type = other DNA
tttttggaaaatgtaattaaattacaagacgacttttttaactattgtattatgaccggagttactaaaattaat

SEQ ID NO: 154835 - DNA, 75 bp, synthetic construct
  source 1..75: mol_type = other DNA
ccgttacagcaatacaggattctacatttgtagttccttataattttaaaggtgttggttttaatgagaatatta

SEQ ID NO: 154836 - DNA, 75 bp, synthetic construct
  source 1..75: mol_type = other DNA
gatacaacgaatactggcgtggcgacctacgccagtggccgtactttctggcttgatgtcagcatgaaattttaa

SEQ ID NO: 154837 - DNA, 75 bp, synthetic construct
  source 1..75: mol_type = other DNA
cttgaaaatattaaacgtttaccaacgggtaatggtaatatcagtgatctgctgaaaaataatcctgctgtacgc

SEQ ID NO: 154838 - DNA, 75 bp, synthetic construct
  source 1..75: mol_type = other DNA
aactatctgtcaaaccacaatatctccccgcgctttatgacggaatgggatatttttgctgatcaaacctcaatg

SEQ ID NO: 154839 - DNA, 75 bp, synthetic construct
  source 1..75: mol_type = other DNA
cgaatgcgcaatacatcagcgaatattcagattacaagcagtatgttgacgagaaactggataacagcctgacct

SEQ ID NO: 154840 - DNA, 75 bp, synthetic construct
  source 1..75: mol_type = other DNA
atgacaaaaacatgtacatgcattttttttgaagagatgacggtctatgctcctgtccctgtacccgtaaacggc

SEQ ID NO: 154841 - DNA, 75 bp, synthetic construct
  source 1..75: mol_type = other DNA
cccggagaaaatatccattcacggtgcatcgccctaccagaatgcctatttgattgatggtattagcgccaccaa

SEQ ID NO: 154842 - DNA, 75 bp, synthetic construct
  source 1..75: mol_type = other DNA
ctcgccgcaaacagtgagaaaaatgatgcgggaaaactggcaacagatataggtgttggcatgctaacaggtggt

SEQ ID NO: 154843 - DNA, 75 bp, synthetic construct
  source 1..75: mol_type = other DNA
gtattcagggagatgccatggtttttcctaatagcgcgaaagccgcaactgatgccgtggagagggcaatgggtt

SEQ ID NO: 154844 - DNA, 75 bp, synthetic construct
  source 1..75: mol_type = other DNA
taagcttaaatctcagtcaggcggtgaaatttacaacactattttttctggaaagcacatgaaagagcttgatgc

SEQ ID NO: 154845 - DNA, 75 bp, synthetic construct
  source 1..75: mol_type = other DNA
atgaaaccgaccaccatctccttactgcagaagtacaaacaggaaaaaaaacgtttcgcgaccatcaccgcttat

SEQ ID NO: 154846 - DNA, 75 bp, synthetic construct
  source 1..75: mol_type = other DNA
atgaaaccaaccaccattgcttcacttcagaaatgtaagcaggataaaaagcgtttcgcgaccatcaccgcttac

SEQ ID NO: 154847 - DNA, 75 bp, synthetic construct
  source 1..75: mol_type = other DNA
atgaattcactacgtccggaattattagaactgacaccacaggcactgacggcgttaagcaatgccggttttgtt

SEQ ID NO: 154848 - DNA, 75 bp, synthetic construct
  source 1..75: mol_type = other DNA
gaacagcatcggggcgcagtatggtgaatttctcgggaacggcgacaatgtcggtaagttgttagaaggggaata

SEQ ID NO: 154849 - DNA, 75 bp, synthetic construct
  source 1..75: mol_type = other DNA
ctgccgtctgggtaagaaaatcattattgaaaacctgctgtaccgctggagtaacgggcgtgtgacgctggactg

SEQ ID NO: 154850 - DNA, 75 bp, synthetic construct
  source 1..75: mol_type = other DNA
caggttgtctcgcgtgatcgcagtggagtctatgcgacagcagcacgtgaaggtgcacctcaggccagacaggtg

SEQ ID NO: 154851 - DNA, 75 bp, synthetic construct
  source 1..75: mol_type = other DNA
tctgattaatgcaatcagtcaggggcttggtggccccaaggttttggatgatgtctatcgtccagtcgatcgacc

SEQ ID NO: 154852 - DNA, 75 bp, synthetic construct
  source 1..75: mol_type = other DNA
aagacatgctaagggcggcatatatcagcaaaatagctgacaaggtaggtgacagccctcagaaaatgatgaccg

SEQ ID NO: 154853 - DNA, 75 bp, synthetic construct
  source 1..75: mol_type = other DNA
cgccagcctatgaaagagcgctaaataatgctgcgaatgccatcagaccgctgtttgctactgaggcaacacagc

SEQ ID NO: 154854 - DNA, 75 bp, synthetic construct
  source 1..75: mol_type = other DNA
ggactgagcgcgatgttgccacccgcaacctttccacgctttcccgccagtatcgtgatgaggtcgggaccttat

SEQ ID NO: 154855 - DNA, 75 bp, synthetic construct
  source 1..75: mol_type = other DNA
agcggagcaatatgcaacgcgtagtaagctggtaagcaattattttgaccgttttggtgagtacaaccctgatga

SEQ ID NO: 154856 - DNA, 75 bp, synthetic construct
  source 1..75: mol_type = other DNA
tcaagctggagaaacaattggcgggtatttagttccaggagttggaacggcaggaagcatggctattggatcact

SEQ ID NO: 154857 - DNA, 75 bp, synthetic construct
  source 1..75: mol_type = other DNA
tgcagacggtaccgttcactggaattttttgttttactgccagccttatgatgctgaggctgttctgaacatatt

SEQ ID NO: 154858 - DNA, 75 bp, synthetic construct
  source 1..75: mol_type = other DNA
tctgccgtctggtttaccagctcggtgtgaaaaatgcgctgatggcgcttgagtccgcgcaccgttttgctttct

SEQ ID NO: 154859 - DNA, 75 bp, synthetic construct
  source 1..75: mol_type = other DNA
atggtgaaccctgtgcgccggtgatttcaggttttatgtttggtcccgttccggtgattaccgttttatggggtg

SEQ ID NO: 154860 - DNA, 75 bp, synthetic construct
  source 1..75: mol_type = other DNA
aaagtccaggggcgcggcgatgaggctggcgatcaactgcttagcgatgcattagccttagaagcggcaggcgcg

SEQ ID NO: 154861 - DNA, 75 bp, synthetic construct
  source 1..75: mol_type = other DNA
acctgccgtttatggcgtatgccacgccggaacaggcctttgaaaatgccgccacagtaatgcgtgccggagcca

SEQ ID NO: 154862 - DNA, 75 bp, synthetic construct
  source 1..75: mol_type = other DNA
tgcagaaatgcaagcaggacaaaaaacgtttcgcaaccatcaccgcttacgactatagcttcgcaaaactgtttg

SEQ ID NO: 154863 - DNA, 75 bp, synthetic construct
  source 1..75: mol_type = other DNA
gcctatgaaagagcgttgagtaacgctgcaaatgccatcaggccgctgcttgctactgaggcaacacagcagtaa

SEQ ID NO: 154864 - DNA, 75 bp, synthetic construct
  source 1..75: mol_type = other DNA
atccgttgcccttggtcgtccctgcctgacgctgcccgaacgcgagcattttcggactgagcgcgatgttgccac

SEQ ID NO: 154865 - DNA, 75 bp, synthetic construct
  source 1..75: mol_type = other DNA
ctgacgaagggctgaacgtgatgctggtgggtgattcgctgggcatgaccgttcagggccacgactccactctgc

SEQ ID NO: 154866 - DNA, 75 bp, synthetic construct
  source 1..75: mol_type = other DNA
cgcctgaagatgttgaaacgccagatgtatggtcgagccggatttgaactactcaggcagagggtcatgagtcca

SEQ ID NO: 154867 - DNA, 75 bp, synthetic construct
  source 1..75: mol_type = other DNA
aaggtgcgtggaaagccgaaggtgaacctactgttccggtaaatatctcagatctaagtatcccaccctattcac

SEQ ID NO: 154868 - DNA, 75 bp, synthetic construct
  source 1..75: mol_type = other DNA
tcgtccttaattaatatattgaaagaacattataatgaagatgaaattagtgcgaaattaccactagcatatgat

SEQ ID NO: 154869 - DNA, 75 bp, synthetic construct
  source 1..75: mol_type = other DNA
ccagacgctgcaccgtaccttgatcacatccggtactaccttgatggttatcctgatgctgtacctcttcggtgg

SEQ ID NO: 154870 - DNA, 75 bp, synthetic construct
  source 1..75: mol_type = other DNA
gactggtgggtggtaatttagcgggtgctctggccggagcttctgcaccggaactggcgcatctgctgaaatcaa

SEQ ID NO: 154871 - DNA, 75 bp, synthetic construct
  source 1..75: mol_type = other DNA
acagtggggcttatcagtgacataggcagtcaggtggcggatattgcgcgtacacagggagaactgaatgcgttg

SEQ ID NO: 154872 - DNA, 75 bp, synthetic construct
  source 1..75: mol_type = other DNA
tcactcgagtccacgaaagcggatcagcagaatttcggggcgtggcagcggggatggaagctgatgctgctgcta

SEQ ID NO: 154873 - DNA, 75 bp, synthetic construct
  source 1..75: mol_type = other DNA
tcactcgagtccacgaaagcggatcagcagaatttcggtgcgtggcggcggggatggaagctgatgctgcagcta

SEQ ID NO: 154874 - DNA, 75 bp, synthetic construct
  source 1..75: mol_type = other DNA
tcactcgagtccacgaaagcggatcagcagaatttcggtgcgtggctgcggggatggaagctgatgctgctgcta

SEQ ID NO: 154875 - DNA, 75 bp, synthetic construct
  source 1..75: mol_type = other DNA
tgcaatcttctcaggaagcaaatgagtttcttgaaatatctacttttatttatgagaatgatttcttgagagaaa

SEQ ID NO: 154876 - DNA, 75 bp, synthetic construct
  source 1..75: mol_type = other DNA
agatgctaaaacgccagatgtatggtagagccggatttgaactactcaggcagagggtcatgagtccactggcat

SEQ ID NO: 154877 - DNA, 75 bp, synthetic construct
  source 1..75: mol_type = other DNA
tcactcgagtccacgaaagcggatcagcagaatttcggggcgtggctgcggggatggaagctgatgctgcagcta

SEQ ID NO: 154878 - DNA, 75 bp, synthetic construct
  source 1..75: mol_type = other DNA
ttacgatgtaggcggcgcagccattgataaccacgggcagccgctgccgcctgcgacggttgaaggttgtgagca

SEQ ID NO: 154879 - DNA, 75 bp, synthetic construct
  source 1..75: mol_type = other DNA
gaagaagaccgcaacgggcgcaatgtcgcgggggatgtgtgggcctgggcaaatgaccagaaccacacgacgtaa

SEQ ID NO: 154880 - DNA, 75 bp, synthetic construct
  source 1..75: mol_type = other DNA
gaaacgcaggaagaagactgcaacgggcgcaatgtagcgggggatgtgtgggcctgggcaaatgaccagaaccac

SEQ ID NO: 154881 - DNA, 75 bp, synthetic construct
  source 1..75: mol_type = other DNA
gctgattgttcccggtctgctgcaaaaaaacggcggctggcggcgcatggctattatttctgcggtcatcgcgct

SEQ ID NO: 154882 - DNA, 75 bp, synthetic construct
  source 1..75: mol_type = other DNA
atggtgaattatgcctttgattatttaagctcaccgggcagtcttccattcaccacggcagccacggagctttcc

SEQ ID NO: 154883 - DNA, 75 bp, synthetic construct
  source 1..75: mol_type = other DNA
cacttcaaattattcagcaatctgcgtccggcaaaactgtatcaggggctggaagcattctgtccactgcgtgct

SEQ ID NO: 154884 - DNA, 75 bp, synthetic construct
  source 1..75: mol_type = other DNA
aatggctccagacggaaaaagccagagagcatggcgctgatgttctctcctgtagtgaaaatccttccggtgaag

SEQ ID NO: 154885 - DNA, 75 bp, synthetic construct
  source 1..75: mol_type = other DNA
atcggcgctggccctgaaattgggtatgaagcgtgagcatatgctgcaacagaaagtggagaaagaaggggcgga

SEQ ID NO: 154886 - DNA, 75 bp, synthetic construct
  source 1..75: mol_type = other DNA
gcgactggcggcaggggttgttattgcactggcgcacgacgttatcattacgctgggtattttgtcgttattcca

SEQ ID NO: 154887 - DNA, 75 bp, synthetic construct
  source 1..75: mol_type = other DNA
gaaacaggacatcatgaaactgatggccatccaggagcaggcgcgcggcgaacaatgcttccgtgattccgagtg

SEQ ID NO: 154888 - DNA, 75 bp, synthetic construct
  source 1..75: mol_type = other DNA
tggcggctatcgttgaaaaaatgtggacccaacgtagccataacccgtactggaaaaaactacacgaacacattg

SEQ ID NO: 154889 - DNA, 75 bp, synthetic construct
  source 1..75: mol_type = other DNA
atggaaatctctgaaccacgccgtttgtaccaacaacttgctgctgacctgaaagagcgcattgagcagggcgtc

SEQ ID NO: 154890 - DNA, 75 bp, synthetic construct
  source 1..75: mol_type = other DNA
gtctgcaaaggcaagcaacacgggttaaacagcaactcgccggtgtacttgatactctgcaacagcacttccaga

SEQ ID NO: 154891 - DNA, 75 bp, synthetic construct
  source 1..75: mol_type = other DNA
aaaaaagacaaaaacagcgtgatattaacgattgctacgattcagtattcccttcaactgacaatatccgggatc

SEQ ID NO: 154892 - DNA, 75 bp, synthetic construct
  source 1..75: mol_type = other DNA
aggattccacatttgtactcccttataatttcaaaggtattggttttaacgataacattatatcctctgcacctg

SEQ ID NO: 154893 - DNA, 75 bp, synthetic construct
  source 1..75: mol_type = other DNA
cgtggcgctgttggtgttgacaccaaacgcagcgctagatcctgtcggcgtcgcagcgggcctggcgggggcggt

SEQ ID NO: 154894 - DNA, 75 bp, synthetic construct
  source 1..75: mol_type = other DNA
tcgagtattttataaatgttactgagcatcctagtggttctgatctgatttattacccagaaggtaataatgatg

SEQ ID NO: 154895 - DNA, 75 bp, synthetic construct
  source 1..75: mol_type = other DNA
acagggaagatagtcctgaagggattgttaaagaaattaaagaatggcgagctgctaacggtaagccaggattta

SEQ ID NO: 154896 - DNA, 75 bp, synthetic construct
  source 1..75: mol_type = other DNA
tatgatagcgtacatgtgggaagaaaatcagaaagtttgtattacctaaactcacaaggtgatctgcaggtagta

SEQ ID NO: 154897 - DNA, 75 bp, synthetic construct
  source 1..75: mol_type = other DNA
agtttttccgtggtagaggtgtattaggtgaagactttattaatggaaaaaaactaggtgataaagcttatattg

SEQ ID NO: 154898 - DNA, 75 bp, synthetic construct
  source 1..75: mol_type = other DNA
gagcatattgaattagcagatattgacagtggtcgtttcaatcttcaggttcgaggagaagatgaattacataca

SEQ ID NO: 154899 - DNA, 75 bp, synthetic construct
  source 1..75: mol_type = other DNA
gtattggcttcccctgaaagagggatactagatttttccgaaaacaaagtgcttggaaaaatgatactggatctt

SEQ ID NO: 154900 - DNA, 75 bp, synthetic construct
  source 1..75: mol_type = other DNA
ggtttacgctcagttgcaacgcgtactggaggcacaatagggaaaactctttctgccagcgcccgcgttcttgaa

SEQ ID NO: 154901 - DNA, 75 bp, synthetic construct
  source 1..75: mol_type = other DNA
tcagttggcgttaatgatgtcacgcctgcggatgaaagtacttggtgcataggcagaagtagatgtgtcgatgac

SEQ ID NO: 154902 - DNA, 75 bp, synthetic construct
  source 1..75: mol_type = other DNA
gagtaatggtgttgtcgaaggtcatgtaaatcgcctgaaggtgctgatacgccagatgtatggtcgagccggatt

SEQ ID NO: 154903 - DNA, 75 bp, synthetic construct
  source 1..75: mol_type = other DNA
tcgagttctaccgtattctgaaaacccaaaataaatcacagctaagcagctggttcactcgagtccacgaaagcg

SEQ ID NO: 154904 - DNA, 75 bp, synthetic construct
  source 1..75: mol_type = other DNA
taaacttgttaaacagttaaaagaaatatcaggcaatactgacagcagcattgattattattactaccttgaagc

SEQ ID NO: 154905 - DNA, 75 bp, synthetic construct
  source 1..75: mol_type = other DNA
tcactcgagtccacgaaagcggatcagcagaatttcggtgcgtggcagcggggatggaagctgatgctgcggcta

SEQ ID NO: 154906 - DNA, 75 bp, synthetic construct
  source 1..75: mol_type = other DNA
tcactcgagtccacgaaagcggatcagcagaatttcggagcgtggcggcggggatggaagctgatgctgctgcta

SEQ ID NO: 154907 - DNA, 75 bp, synthetic construct
  source 1..75: mol_type = other DNA
tcactcgagtccacgaaagcggatcagcagaatttcggagcgtggctgcggggatggaagctgatgctgcggcta

SEQ ID NO: 154908 - DNA, 75 bp, synthetic construct
  source 1..75: mol_type = other DNA
tccttaatgacaagaacttatagtctgattgaaatgctacagtatcagggaaacaaatatattaccaacgaatcg

SEQ ID NO: 154909 - DNA, 75 bp, synthetic construct
  source 1..75: mol_type = other DNA
tgttccggtaaatatctcagagctaaatatccccccccattcacggctgtatctggtttttgagggaaaaaataa

SEQ ID NO: 154910 - DNA, 75 bp, synthetic construct
  source 1..75: mol_type = other DNA
atatgattcgcggggtacatgatgatatggtttcgtcacaggtttgcctgcaacaacaagcaatgcaggttaaac

SEQ ID NO: 154911 - DNA, 75 bp, synthetic construct
  source 1..75: mol_type = other DNA
tggtgtgttaaggcatgttaataagcaaagcctagatgatgtcaactatgatggaatcaatgatgcagataaaaa

SEQ ID NO: 154912 - DNA, 75 bp, synthetic construct
  source 1..75: mol_type = other DNA
gctgaaaacaacggacggtgaggtgccggtaatgaccatcacccagaagggaataaacaccctggtcggtacaac

SEQ ID NO: 154913 - DNA, 75 bp, synthetic construct
  source 1..75: mol_type = other DNA
ggcacgaagacagtaccctagccaagataaatctagctatggatatcaagcaactttccgaagcaactctcggca

SEQ ID NO: 154914 - DNA, 75 bp, synthetic construct
  source 1..75: mol_type = other DNA
gccagcacgcgctcgatcagctcattatgcacagccagccaacccacgcggtcgccgtttttgatgatgaaaacc

SEQ ID NO: 154915 - DNA, 75 bp, synthetic construct
  source 1..75: mol_type = other DNA
atgctgacgaaatatgcccttgtggcagtcatagtgctgtgtttaacggtactgggatttacgcttctggtcggg

SEQ ID NO: 154916 - DNA, 75 bp, synthetic construct
  source 1..75: mol_type = other DNA
atgctgacaaaatatgcccttgtggcaatcatcgtactgtgttgtacagtactgggattcacgctgatggtaggc

SEQ ID NO: 154917 - DNA, 75 bp, synthetic construct
  source 1..75: mol_type = other DNA
ttctcaggaagtttagtctccaggattcccggggcggttcagtttctcaaactcacctctcgttcaggtttcaaa

SEQ ID NO: 154918 - DNA, 75 bp, synthetic construct
  source 1..75: mol_type = other DNA
atgctgacgaaatatgcccttgtggcagtcatagtgctgtgtttcacggtgctgggatttacgcttctggtcggc

SEQ ID NO: 154919 - DNA, 75 bp, synthetic construct
  source 1..75: mol_type = other DNA
atgctgacgaaatatgcccttgtggcagtcatagtgctgtgtttcacggtcctgggatttacgcttctggtcggg

SEQ ID NO: 154920 - DNA, 75 bp, synthetic construct
  source 1..75: mol_type = other DNA
atgctgacgaaatatgcccttgtggcagtcatagtgctgtgtttaacggttctgggatttacgcttctggtcggt

SEQ ID NO: 154921 - DNA, 75 bp, synthetic construct
  source 1..75: mol_type = other DNA
atgcctaattggtgggaaataaaaaatagcacgggtgaagatgactctccggctgaacttttaatctacggatat

SEQ ID NO: 154922 - DNA, 75 bp, synthetic construct
  source 1..75: mol_type = other DNA
attgctgagatgatggataagatacgaaatagtattttatctgcatataaggagaagacaggactttctgaagat

SEQ ID NO: 154923 - DNA, 75 bp, synthetic construct
  source 1..75: mol_type = other DNA
ggatatttcatcaaatactatcaacgtaaaaattaatagttatggtggttctgtttttactgctcaagctattct

SEQ ID NO: 154924 - DNA, 75 bp, synthetic construct
  source 1..75: mol_type = other DNA
gaggatgatgtggccgaatgacgtgtcctgtacaatgagccccaaactggatcggatggctgcttcagtatccta

SEQ ID NO: 154925 - DNA, 75 bp, synthetic construct
  source 1..75: mol_type = other DNA
attgctgagatgatggataagatacgagatagtattttatctgcatataaggagaaaacagggctttctgaggat

SEQ ID NO: 154926 - DNA, 75 bp, synthetic construct
  source 1..75: mol_type = other DNA
ctcttgatgaattaaaaaataaacatccagaattatacaatcaggtttttaatgctggtaaagacgagggcgtta

SEQ ID NO: 154927 - DNA, 75 bp, synthetic construct
  source 1..75: mol_type = other DNA
ttgcagcacttccgtttttgccggattattcgacgcgccgggacgttcacaattgtccccgcggatcaagccttt

SEQ ID NO: 154928 - DNA, 75 bp, synthetic construct
  source 1..75: mol_type = other DNA
acctttaccgtaaacagatccgcatcacgcctgaacacgcgaaaattgccgacgtgcagttaccgccaggcgtct

SEQ ID NO: 154929 - DNA, 75 bp, synthetic construct
  source 1..75: mol_type = other DNA
gcatctttacgctgatcctgctactttgcagcacttccgtttttgccggattattcgacgcgccgggacgttcac

SEQ ID NO: 154930 - DNA, 75 bp, synthetic construct
  source 1..75: mol_type = other DNA
tcgcgcttcccgcaaacggaaaacgcggtgcaggcgtcggaaaacctcggcggcgtgctggatagcgcgaatcat

SEQ ID NO: 154931 - DNA, 75 bp, synthetic construct
  source 1..75: mol_type = other DNA
tacctaccagggctgtgctgacgccggtttttgttacccgccagaaaccaaaaccgttccgttaagcgaagtggt

SEQ ID NO: 154932 - DNA, 75 bp, synthetic construct
  source 1..75: mol_type = other DNA
ccgccgcgcaattgcccttttctgcgctctgggcattgttgataggcatcggcatcgccttcaccccctgcgtac

SEQ ID NO: 154933 - DNA, 75 bp, synthetic construct
  source 1..75: mol_type = other DNA
attagtgtacgtccgctacaggactgggcatttggcgccaccaatacagtgcaatctcagtcacatctcaacttt

SEQ ID NO: 154934 - DNA, 75 bp, synthetic construct
  source 1..75: mol_type = other DNA
gtatctgttccgcagcaagagcaaaccgccgcgcaactccccttttctgcgctctgggcgttgttgatcggtatc

SEQ ID NO: 154935 - DNA, 75 bp, synthetic construct
  source 1..75: mol_type = other DNA
atgctgacgaaatatgcccttgtggcagtcatagtgctgtgtttgacggtgctgggatttacgcttctggtcggg

SEQ ID NO: 154936 - DNA, 75 bp, synthetic construct
  source 1..75: mol_type = other DNA
gcagacacggtattacttcaggccaacgtcactgccaacgacgcacaagatgtggcgctgttaaagcatcttaat

SEQ ID NO: 154937 - DNA, 75 bp, synthetic construct
  source 1..75: mol_type = other DNA
tgttcaccatgcaccaccgcaccacttagcgcgattctgctgtatatcgcccaaagcgggaacatgtggctgggc

SEQ ID NO: 154938 - DNA, 75 bp, synthetic construct
  source 1..75: mol_type = other DNA
aggcaagccggtgatgttagatctttatgccgactggtgcgttgcctgtaaagagttcgagaagtacaccttcag

SEQ ID NO: 154939 - DNA, 75 bp, synthetic construct
  source 1..75: mol_type = other DNA
ccagacacaccagacgcctgtcattatgttgacggcgcgcggcagtgaacttgatcgcgttcttggccttgagct

SEQ ID NO: 154940 - DNA, 75 bp, synthetic construct
  source 1..75: mol_type = other DNA
cggtgggcagcagcacattgccaaacaagatctggcaacgggaggcgtacaagttctgtcgtccacgttcctgga

SEQ ID NO: 154941 - DNA, 75 bp, synthetic construct
  source 1..75: mol_type = other DNA
ttaaaggtgcgttccgtacccgtattgcctacgttgttcagaccaacggcggtcagttcccgtatgaactgcgcg

SEQ ID NO: 154942 - DNA, 75 bp, synthetic construct
  source 1..75: mol_type = other DNA
cgcctgccgccgtgagcatgtgttttgtgcctgtgtcatgcacgggcacgggaagcatattttaaaacagcaaac

SEQ ID NO: 154943 - DNA, 75 bp, synthetic construct
  source 1..75: mol_type = other DNA
aagcaggacacgattgtccaccgaccgcagcgtaagaaaattagcgaagtgccggtgaaacgcttgattcaggag

SEQ ID NO: 154944 - DNA, 75 bp, synthetic construct
  source 1..75: mol_type = other DNA
atgaccgagagctgacttccctgttaaaggagctgctcgagatggaaggcttcaacgtgattgttgcccacgatg

SEQ ID NO: 154945 - DNA, 75 bp, synthetic construct
  source 1..75: mol_type = other DNA
aacggggaaatgacctgttaccttctgcttcacaaccggaacggagaatacacgctctgggggaacgagctggag

SEQ ID NO: 154946 - DNA, 75 bp, synthetic construct
  source 1..75: mol_type = other DNA
cagttgcgtaaacgtgaagaggaattgcgccggaaggagcaggaggaaacagaacgtcgtcgggcggagcagctc

SEQ ID NO: 154947 - DNA, 75 bp, synthetic construct
  source 1..75: mol_type = other DNA
tattaatgcaaaaaggcagagttgtcgcaaatggcaaaccgcaagatgtgttgacgcagcaggcgctaactacgc

SEQ ID NO: 154948 - DNA, 75 bp, synthetic construct
  source 1..75: mol_type = other DNA
tccaatggtggacagcagcacattgccaaacaagatctggtaacgggaggcgtacaagttctgtcgtcaacgttc

SEQ ID NO: 154949 - DNA, 75 bp, synthetic construct
  source 1..75: mol_type = other DNA
gggcagcagcacattgccaaacaagatctggcaacgggaggcgtacaagttctgtcgtccacgttcctggatgaa

SEQ ID NO: 154950 - DNA, 75 bp, synthetic construct
  source 1..75: mol_type = other DNA
actgccgcaggatgccgcacgggaaaccgttctcgcctttgtcagagaaaactttgtcagtcagggcatgattgc

SEQ ID NO: 154951 - DNA, 75 bp, synthetic construct
  source 1..75: mol_type = other DNA
aattaaaaaaaatgatgaatgatttagactatccatttgaagcaccgctcaaggaatcatttattgaaagtataa

SEQ ID NO: 154952 - DNA, 75 bp, synthetic construct
  source 1..75: mol_type = other DNA
ttgaaattagagataatattggcacagaaaatatattcagttcgtttagtgatttctcttcattcttaaacgaaa

SEQ ID NO: 154953 - DNA, 75 bp, synthetic construct
  source 1..75: mol_type = other DNA
gatcaacgaacggctggacgggctgttaagccgctggctactgctgaaaaataccggacaggatatggcaacgga

SEQ ID NO: 154954 - DNA, 75 bp, synthetic construct
  source 1..75: mol_type = other DNA
gatgcagtggtggtcggattatctggatgtaagtcgcgaggggtacgttgcgccgtatatttatgcgcggcggca

SEQ ID NO: 154955 - DNA, 75 bp, synthetic construct
  source 1..75: mol_type = other DNA
atggcttttggtgtttaccctgaaacttcactggctgatgcccgtcaaaaaagagaagaggctaggaggctcgtt

SEQ ID NO: 154956 - DNA, 75 bp, synthetic construct
  source 1..75: mol_type = other DNA
cgcacaaggcctgttaaacaaaccccgccgtcgagcgtcgttggaggatattccggcaacgatctcccgcatgtc

SEQ ID NO: 154957 - DNA, 75 bp, synthetic construct
  source 1..75: mol_type = other DNA
cgcctgtcgccgcgaacatgtgttttgtgcctgcgtgatgcatggtcatgggaagcatattttgaagcagcaaac

SEQ ID NO: 154958 - DNA, 75 bp, synthetic construct
  source 1..75: mol_type = other DNA
ttcgccggaattgtttttggatttacacggtctgacgcagctacaggccaagcaggaactgggcgcgttgattgc

SEQ ID NO: 154959 - DNA, 75 bp, synthetic construct
  source 1..75: mol_type = other DNA
gttgatggcggggactcgcaagattaagcaggacacgattgtccaccgaccgcagcgtaaaaaaatcagcgaagt

SEQ ID NO: 154960 - DNA, 75 bp, synthetic construct
  source 1..75: mol_type = other DNA
taccgaaggtccggtcaaatatgttcgcccggatgtcagccattttgaggcgaagaagttacgccgtggcgatta

SEQ ID NO: 154961 - DNA, 75 bp, synthetic construct
  source 1..75: mol_type = other DNA
cgaaagagtacggtggtgatgcggcattgctggtgctgattgaagtggaagagtggttgccgccggaattaccct

SEQ ID NO: 154962 - DNA, 75 bp, synthetic construct
  source 1..75: mol_type = other DNA
cgaaagagtacggcggtgatgcggcgttgctggtgttgattgaagtggatgagtggctgccgccggagttgccct

SEQ ID NO: 154963 - DNA, 75 bp, synthetic construct
  source 1..75: mol_type = other DNA
atttactacggaactgaaaattggcgaccggcagttagcaggcagtgccccggaactggccgcgtatgagatcgc

SEQ ID NO: 154964 - DNA, 75 bp, synthetic construct
  source 1..75: mol_type = other DNA
ctggtggctggctggagccggattatcaaattactgttccacgcgaatttaaaccggaaggagtcgaagatggat

SEQ ID NO: 154965 - DNA, 75 bp, synthetic construct
  source 1..75: mol_type = other DNA
ttgggtcgacgctgggccaacgactacaaatgcaaaagatggtgaggtttgggggcaccttgatatgactcaaac

SEQ ID NO: 154966 - DNA, 75 bp, synthetic construct
  source 1..75: mol_type = other DNA
gctatgacggctcgcatatcatcttctattatctcgagacacagaccttccccatcacctatatggacagtcagg

SEQ ID NO: 154967 - DNA, 75 bp, synthetic construct
  source 1..75: mol_type = other DNA
tgcaaaacacgctacccggtcaggtgctgctccagtcatggcttacccgcaacggcgtagatcgtaagctttctt

SEQ ID NO: 154968 - DNA, 75 bp, synthetic construct
  source 1..75: mol_type = other DNA
ggtacgggaaagcggcaaatcatacctggtggctggctggagccggattatcaaattactgttccccgcacattt

SEQ ID NO: 154969 - DNA, 75 bp, synthetic construct
  source 1..75: mol_type = other DNA
gcaacaaccgcttatgttcgtgccgctatttctgcattggtcggctcatcaccagaagctcttgatactcttaat

SEQ ID NO: 154970 - DNA, 75 bp, synthetic construct
  source 1..75: mol_type = other DNA
tgaaacagctgggcaatctgaatccgcagcagtttatgtccggagacaagaacccgctgggcggggatgccggca

SEQ ID NO: 154971 - DNA, 75 bp, synthetic construct
  source 1..75: mol_type = other DNA
cagtcacagagtacagcggaagagggtaacccggaaagcccggtgccgaatcctccctcggcagaaagccacctg

SEQ ID NO: 154972 - DNA, 75 bp, synthetic construct
  source 1..75: mol_type = other DNA
ccatcaataacgacccaaaattcagcgaaactatcaataacgcactggctcttaaagctcctttggcaagccctg

SEQ ID NO: 154973 - DNA, 75 bp, synthetic construct
  source 1..75: mol_type = other DNA
atgatccccagtttagccagacgattaatgatgctttagctcttaaagcgccgttattaagcccggcatttacgg

SEQ ID NO: 154974 - DNA, 75 bp, synthetic construct
  source 1..75: mol_type = other DNA
ccctgaagatcttggcttaacggatattgcttctcaagctggtaacgcagttcagcgttctggcgacacaatggg

SEQ ID NO: 154975 - DNA, 75 bp, synthetic construct
  source 1..75: mol_type = other DNA
atctcagtggcgctggtgcaccatcaccaacagatctattgcaccatgcaaggtatgacaaattaatggatgcat

SEQ ID NO: 154976 - DNA, 75 bp, synthetic construct
  source 1..75: mol_type = other DNA
cttgttggtgcacgactgaattggttattggcacacggtaaaaaaggatgggcggcagatacacagtttattcaa

SEQ ID NO: 154977 - DNA, 75 bp, synthetic construct
  source 1..75: mol_type = other DNA
ctcgcacctatgagtttgacatcgatattgagcaataccgtccaaagctcagctggatggatacgtatgaggggc

SEQ ID NO: 154978 - DNA, 75 bp, synthetic construct
  source 1..75: mol_type = other DNA
ggatttacaggctatttctgcaggtggtgggctttctgttccttatcagcagggagaggagtcggttgatactga

SEQ ID NO: 154979 - DNA, 75 bp, synthetic construct
  source 1..75: mol_type = other DNA
caggagggggggaatgtcgaaacccgtgctttgccggaagtgaaggcgggggattatctggtactgcatgatact

SEQ ID NO: 154980 - DNA, 75 bp, synthetic construct
  source 1..75: mol_type = other DNA
cagtctggggtgttaattacccgggtgcggagtgtcaaacaaatggggcgtcgccactttgtgctggttgacgct

SEQ ID NO: 154981 - DNA, 75 bp, synthetic construct
  source 1..75: mol_type = other DNA
aattatcaggtgttattgcaggcggtgaacggccaggcgcgaatatccagccagacggtgaggagtttattgggg

SEQ ID NO: 154982 - DNA, 75 bp, synthetic construct
  source 1..75: mol_type = other DNA
gtcccttgcctttctgcagtccaaagggaaaaaactgggaagcatcaatggccgcaattatgacaaccaggatat

SEQ ID NO: 154983 - DNA, 75 bp, synthetic construct
  source 1..75: mol_type = other DNA
cggtcacatcaatgctgaccccgggtatcggacgcatgttcatgtccacgggctttatcaccgtcacagataatc

SEQ ID NO: 154984 - DNA, 75 bp, synthetic construct
  source 1..75: mol_type = other DNA
gacaaccagtttacacgtgatgccggcatcaataccgatgatattgttgcggtaggtctggtctatcagttctga

SEQ ID NO: 154985 - DNA, 75 bp, synthetic construct
  source 1..75: mol_type = other DNA
gcaaccgtgcggaaacctacaccggtgggctgaagtatgatgccaataacgtctatctggcagcacagtataccc

SEQ ID NO: 154986 - DNA, 75 bp, synthetic construct
  source 1..75: mol_type = other DNA
ggtcaccataaccaggccacctttccggtggctgaacaggcgggggctgcctggcagaagattacacagggtgag

SEQ ID NO: 154987 - DNA, 75 bp, synthetic construct
  source 1..75: mol_type = other DNA
aagtcaatagttcgcgataaagttggtagctttatgtcaagaacagaatgtcaagcatatttgcaggactggatt

SEQ ID NO: 154988 - DNA, 75 bp, synthetic construct
  source 1..75: mol_type = other DNA
tggcattgagtttattaattattttaatgccggggttatgtttattaataccagcgaatggaaaaaaataatata

SEQ ID NO: 154989 - DNA, 75 bp, synthetic construct
  source 1..75: mol_type = other DNA
attacttgggggtattttatatgattggtggcctttaaatatattattcacactactgactatatgcttgacttg

SEQ ID NO: 154990 - DNA, 75 bp, synthetic construct
  source 1..75: mol_type = other DNA
caactcaggaaaagactatttgtgggtaaatacagcttttgaacttgcctgccggatagtggatgcttttgagga

SEQ ID NO: 154991 - DNA, 75 bp, synthetic construct
  source 1..75: mol_type = other DNA
atcccatacaggtgagcgacttttacaatgtccgacggaggttgctatctcagaccgtcgggaaaaagaattgtc

SEQ ID NO: 154992 - DNA, 75 bp, synthetic construct
  source 1..75: mol_type = other DNA
cgggtacttacagagctatagcttggttaaaaccacacttccaattggaagggttgagtatgtcattgaggttgg

SEQ ID NO: 154993 - DNA, 75 bp, synthetic construct
  source 1..75: mol_type = other DNA
tatcggtttgttactggcaatgcttggacattttgatatttcgttacggtgcaccattgaaaatgccacagatgc

SEQ ID NO: 154994 - DNA, 75 bp, synthetic construct
  source 1..75: mol_type = other DNA
ttaccattgaggccagcagcgaacaggaagcacgccagcaatccccggctggctgcgtgatggtattcgccgccc

SEQ ID NO: 154995 - DNA, 75 bp, synthetic construct
  source 1..75: mol_type = other DNA
agtcgtgctggttgcaggctactatggcgttgatttaaccgggttgatgaccggacagccggtttctcaacagca

SEQ ID NO: 154996 - DNA, 75 bp, synthetic construct
  source 1..75: mol_type = other DNA
atgatgaacggttacatccagtatgaccttgccgaaggcatcacctggatgaacggtctggaaattaccgacggc

SEQ ID NO: 154997 - DNA, 75 bp, synthetic construct
  source 1..75: mol_type = other DNA
cctgcttacccctaactttgccgctcgcgcctggcaccataccggacgcgccgacgggctggacgtaccgggaag

SEQ ID NO: 154998 - DNA, 75 bp, synthetic construct
  source 1..75: mol_type = other DNA
tcagaaaatgaggactatgacgaaaaggctatgcgcattgatatgggtaatatcggtttgttactggcaatgctt

SEQ ID NO: 154999 - DNA, 75 bp, synthetic construct
  source 1..75: mol_type = other DNA
aaaggtgcaccgctgagttataccccagaacacatggtgaatgcgaaactgaactggcagatcaccgaagaggtg

SEQ ID NO: 155000 - DNA, 75 bp, synthetic construct
  source 1..75: mol_type = other DNA
cgcatcagtgaactgtacgccatcgaggatgaaatacggggcttaccggagtctgaacgtcttgcagccaggcag

SEQ ID NO: 155001 - DNA, 75 bp, synthetic construct
  source 1..75: mol_type = other DNA
atggttctcggttttaccgctgcgggctccctttgtttctataccttcaccacttatatgcagaagtatctggta

SEQ ID NO: 155002 - DNA, 75 bp, synthetic construct
  source 1..75: mol_type = other DNA
gtgactactacatcaaacgtgccgaacagtatcacccggtgataccgattggtgcgggcaacgaagtgacagtgg

SEQ ID NO: 155003 - DNA, 75 bp, synthetic construct
  source 1..75: mol_type = other DNA
aaagcgactttggtactgacataaatgaaccattcactagtagccatatagacatgctgttacctcagtacgtgc

SEQ ID NO: 155004 - DNA, 75 bp, synthetic construct
  source 1..75: mol_type = other DNA
tattttcccagtccgtggtcaggcctgatggaagcaaaggtcgatgcgtgtaacgtgggtattatgggaacatcc

SEQ ID NO: 155005 - DNA, 75 bp, synthetic construct
  source 1..75: mol_type = other DNA
ttgaggaatatgggtggtgtgcagcaattcgtggtgtggaaggtggtggtttggttaaatcattgccggcctata

SEQ ID NO: 155006 - DNA, 75 bp, synthetic construct
  source 1..75: mol_type = other DNA
caaaccacgcctctttaatactgatcaggctaatgctaatgcaaaattgtcctgccaacttcaatatatattagc

SEQ ID NO: 155007 - DNA, 75 bp, synthetic construct
  source 1..75: mol_type = other DNA
caactcaggcaaagactatctgtgggtaaataccgcgtttgaactggcctgccggatagttgatgcttttgagga

SEQ ID NO: 155008 - DNA, 75 bp, synthetic construct
  source 1..75: mol_type = other DNA
gtatgtgaccttaatggccgtggtggcgtttctggtttctttgatgctacatcgcaaagggaaggggatgcgtct

SEQ ID NO: 155009 - DNA, 75 bp, synthetic construct
  source 1..75: mol_type = other DNA
tctgcatttattggtgcaattggtgtaagctttaattccggcgctgaatttatagcctttggcaatcattactct

SEQ ID NO: 155010 - DNA, 75 bp, synthetic construct
  source 1..75: mol_type = other DNA
ctgccagcggtctctctcggcctgaaatcagactcggagatatttaccgcgacaccagacgtgggggacgagtgg

SEQ ID NO: 155011 - DNA, 75 bp, synthetic construct
  source 1..75: mol_type = other DNA
cattgattctggcagtactgctgggcggtatggtgggtgcagggattatgctggggcgtaacgctctgcgtaatt

SEQ ID NO: 155012 - DNA, 75 bp, synthetic construct
  source 1..75: mol_type = other DNA
cgcgatagcccgaaaaaggcaattacattgattctggcagtactgctgggcggtatggtgggtgcagggattatg

SEQ ID NO: 155013 - DNA, 75 bp, synthetic construct
  source 1..75: mol_type = other DNA
catttatttacgaagacaagcgcatacagaaaattataaaggagaatgattttatcgcttttgaaatatcagaaa

SEQ ID NO: 155014 - DNA, 75 bp, synthetic construct
  source 1..75: mol_type = other DNA
gaaaaagaagcaattaaacagcaactcacagagcaatatagacaaaaaaaaggagtgttattgaaattagaagca

SEQ ID NO: 155015 - DNA, 75 bp, synthetic construct
  source 1..75: mol_type = other DNA
gactcttaatctctcaaaaaaaattaatatactttatggtcacaacggttgtggaaaatcaaccatatctaatta

SEQ ID NO: 155016 - DNA, 75 bp, synthetic construct
  source 1..75: mol_type = other DNA
agaagcaattgaatctatctttgatgatagctactccaagaaagttgaccaaatacgcattatcagatcgtctta

SEQ ID NO: 155017 - DNA, 75 bp, synthetic construct
  source 1..75: mol_type = other DNA
attatcggtgccaacatcaccaattgtaagttcagcgacttacagggcgacgccattgaatggaacgtggcgatt

SEQ ID NO: 155018 - DNA, 75 bp, synthetic construct
  source 1..75: mol_type = other DNA
caacattgaaatgaagtgtgcgtcgctggaactgcacaacaaaccgcaacatctttttatgcgaaatatcaaagt

SEQ ID NO: 155019 - DNA, 75 bp, synthetic construct
  source 1..75: mol_type = other DNA
tactaacggcaaaatcaactggggcattggcataggtcttgcgggaagtacttatgataacaactacccggaaga

SEQ ID NO: 155020 - DNA, 75 bp, synthetic construct
  source 1..75: mol_type = other DNA
taaaaaaagaagacatttttctctctcgttctgttaataacagctatagcgccctttataatttgagctggacgt

SEQ ID NO: 155021 - DNA, 75 bp, synthetic construct
  source 1..75: mol_type = other DNA
gccctttataatttgagctggacgtttatttgtttttttatttttgcagtaatctatttttttattcaggtgttt

SEQ ID NO: 155022 - DNA, 75 bp, synthetic construct
  source 1..75: mol_type = other DNA
tgttcatgcggtgaatgaaagagggcaaagctccgtcgatatcgacaggattaatcaccatattgttaatgtgga

SEQ ID NO: 155023 - DNA, 75 bp, synthetic construct
  source 1..75: mol_type = other DNA
gtcgaagtaatacccgcacgttacctccagatgcgctgctggaatgtgcgggacggacgcggtgggcattcggaa

SEQ ID NO: 155024 - DNA, 75 bp, synthetic construct
  source 1..75: mol_type = other DNA
aggctgacgtgcgaattgtaaaccagaatgccaggaaaaaacaaaacccgccgaagcgggttaagtgcgggtgcg

SEQ ID NO: 155025 - DNA, 75 bp, synthetic construct
  source 1..75: mol_type = other DNA
atggtggtgatattaaatggattcctacagtgatggctcctataactaaaattgcaatagaaagaatattatcta

SEQ ID NO: 155026 - DNA, 75 bp, synthetic construct
  source 1..75: mol_type = other DNA
gcaggcgattactggcgtaaatgccgaccgtctgccggaagaaaaaaagcgcggcatgaccatcgatctcggcta

SEQ ID NO: 155027 - DNA, 75 bp, synthetic construct
  source 1..75: mol_type = other DNA
tcgacacgccgctgtggctggcggataacgatcgcttagtgctgcgcgatatctcggcccgcaacacgctggcgg

SEQ ID NO: 155028 - DNA, 75 bp, synthetic construct
  source 1..75: mol_type = other DNA
tgaacacgccagtcagcacagtttccgcctcgctatcgaccgtgcttttaccgtaaaaggtgccgggctggtggt

SEQ ID NO: 155029 - DNA, 75 bp, synthetic construct
  source 1..75: mol_type = other DNA
tcagctttttagaataacaaaaaacctacatagttctttttctaacatcagcagagatagtttgcaaaatgaata

SEQ ID NO: 155030 - DNA, 75 bp, synthetic construct
  source 1..75: mol_type = other DNA
aaaaggtaaggaagattatttagttgacgacacttgccctttttgtcaaaaagaaaccattgatgataaattcaa

SEQ ID NO: 155031 - DNA, 75 bp, synthetic construct
  source 1..75: mol_type = other DNA
agctatttatcagaaaccattaataaacttcataatcttgactgggtaaaaaaaggtaaagaacattatttagac

SEQ ID NO: 155032 - DNA, 75 bp, synthetic construct
  source 1..75: mol_type = other DNA
cagtattgaggggtgtagtttatgaaaatttaaatgtattaatctgtaggatgaaagataaattaacaaagaata

SEQ ID NO: 155033 - DNA, 75 bp, synthetic construct
  source 1..75: mol_type = other DNA
ttctatattttttagaatgttgcaagggtaaaacaaatgaaaatgatactgatatgcgtgataaactcatagtta

SEQ ID NO: 155034 - DNA, 75 bp, synthetic construct
  source 1..75: mol_type = other DNA
tcgatgattcactatgacattttcacttctgctaataaagtgataatcctcactcataatctatatttttttcat

SEQ ID NO: 155035 - DNA, 75 bp, synthetic construct
  source 1..75: mol_type = other DNA
aatggaaggcgctgaacatccacacaaggagaacactggcagcgatcagtatcacgccagcgataataaaactgg

SEQ ID NO: 155036 - DNA, 75 bp, synthetic construct
  source 1..75: mol_type = other DNA
agaaccagcacgaatcggaacagaacgaccagaaagcagaacaaaacagccaaaatgcgttacaagacgagccag

SEQ ID NO: 155037 - DNA, 75 bp, synthetic construct
  source 1..75: mol_type = other DNA
tgagcgccataatgcacttgatgacgcccgttaccaggcaaaatacgtttcagttatctggcaaaaactgatccc

SEQ ID NO: 155038 - DNA, 75 bp, synthetic construct
  source 1..75: mol_type = other DNA
tctcaatggattttttctccctgaaaggtaaaacagcaattgttaccggcgggaatagcggtttaggccaggcat

SEQ ID NO: 155039 - DNA, 75 bp, synthetic construct
  source 1..75: mol_type = other DNA
ccgaggtcttcccactgtcacgaacggtgcaatagtgatccacacccaacgcctgaaatcagatccagggggtaa

SEQ ID NO: 155040 - DNA, 75 bp, synthetic construct
  source 1..75: mol_type = other DNA
gaaggcttactggagccgctggcggtgacggaacggctggccattatctcggtggtaggtgatggtatgcgcacc

SEQ ID NO: 155041 - DNA, 75 bp, synthetic construct
  source 1..75: mol_type = other DNA
gaagatggcgtctgccgcgtgaagattgctgaagtggatggcaacgatccgctgttcaaagtgaaaaacggcgaa

SEQ ID NO: 155042 - DNA, 75 bp, synthetic construct
  source 1..75: mol_type = other DNA
tctgcgggttgccgatattctggaaagcaatgccaggcaggggcaggggcaggtggccaccgtcctctctgcccc

SEQ ID NO: 155043 - DNA, 75 bp, synthetic construct
  source 1..75: mol_type = other DNA
cggggcaagtctcgattggctttgcgccaggaaccgctgcgtcatccatcaccatgcccttattacaggcggttc

SEQ ID NO: 155044 - DNA, 75 bp, synthetic construct
  source 1..75: mol_type = other DNA
tcttcattcgacaatgacaattttagcggtggtggcggttcatctggtggcggtggcgcttccgggcgctggtaa

SEQ ID NO: 155045 - DNA, 75 bp, synthetic construct
  source 1..75: mol_type = other DNA
tgcgttacaaaacgagccagaaacgaaacaacctgaaccagtagtgcaacaggaagaggaaaaagtttgtaccgc

SEQ ID NO: 155046 - DNA, 75 bp, synthetic construct
  source 1..75: mol_type = other DNA
gcggcagtatgcataacatcaccctggatgtgcgcggctctgactgcaccatcaaagggctggcgatgagcggct

SEQ ID NO: 155047 - DNA, 75 bp, synthetic construct
  source 1..75: mol_type = other DNA
gctttttggttctgaagatgcctacgatgaaaccaaaaactacacgccaatcaatgacgcaaaaattaaatatgc

SEQ ID NO: 155048 - DNA, 75 bp, synthetic construct
  source 1..75: mol_type = other DNA
tattagctataaacctccttgttggatgtcaggctaactatatacgtgatgttcagggagggactgtggctccat

SEQ ID NO: 155049 - DNA, 75 bp, synthetic construct
  source 1..75: mol_type = other DNA
aagcctgcgcggcaacggcagagggcgatttgtcttacaggacggcagccaggtgacaggggaggagggcggcag

SEQ ID NO: 155050 - DNA, 75 bp, synthetic construct
  source 1..75: mol_type = other DNA
cttgcaaatgttcatgcggtgggtaatgactccaacttattgatagtgttttatgttcagataatgcccgatgac

SEQ ID NO: 155051 - DNA, 75 bp, synthetic construct
  source 1..75: mol_type = other DNA
atccatgttgaaaatggcaaacattttgttattcgtaatatcaaagcccgcaatatcacgccggatttcagtaag

SEQ ID NO: 155052 - DNA, 75 bp, synthetic construct
  source 1..75: mol_type = other DNA
taaagaaacgtataccggtgtggcgaagttcctcgacttcctcgcgaagccagaaaacgctgccgagtggcatca

SEQ ID NO: 155053 - DNA, 75 bp, synthetic construct
  source 1..75: mol_type = other DNA
ggttactactccgacagcaaaacgggccacttactctcccagccgttcaacagctcgactcccgttctctattac

SEQ ID NO: 155054 - DNA, 75 bp, synthetic construct
  source 1..75: mol_type = other DNA
atgaaaccgttacattatacagcttcagcactggcgctcggactggcgttaatggggaatgcacaggcagtgacg

SEQ ID NO: 155055 - DNA, 75 bp, synthetic construct
  source 1..75: mol_type = other DNA
aagttcctcgacttcctcgcgaagccagaaaacgctgctgagtggcatcagaaaaccggttatctgccaattacc

SEQ ID NO: 155056 - DNA, 75 bp, synthetic construct
  source 1..75: mol_type = other DNA
gacgcggacgcgaaagatgcgccgcaaaacgccattatcggcggagccagtctgtgggtgatgcagggaaaagat

SEQ ID NO: 155057 - DNA, 75 bp, synthetic construct
  source 1..75: mol_type = other DNA
cgacgccgatgcgaaagatgcgccacaaaacgccattatcggcggagccagcctgtgggtgatgcagggtaaaga

SEQ ID NO: 155058 - DNA, 75 bp, synthetic construct
  source 1..75: mol_type = other DNA
gataatgatgagatctctatacatgaaggagatattaccgatataatatttttagatgattttatgtgtgttgat

SEQ ID NO: 155059 - DNA, 75 bp, synthetic construct
  source 1..75: mol_type = other DNA
gtacttctcagcaacgctacagctggtttaaacgtggtttcgacagcggcgatccggcacaatgcaatacttttg

SEQ ID NO: 155060 - DNA, 75 bp, synthetic construct
  source 1..75: mol_type = other DNA
cgctatagctggtttaaacgtggtttcgacagcggcgatccggcacaatgcaatactttcggtaaaagcatttaa

SEQ ID NO: 155061 - DNA, 75 bp, synthetic construct
  source 1..75: mol_type = other DNA
ttatatacagccagtaatgcagcaagatttaaacgagtatgggagggtgatgtgttagatataaagaagatataa

SEQ ID NO: 155062 - DNA, 75 bp, synthetic construct
  source 1..75: mol_type = other DNA
agtaagaaaaactcttccccaacaactatagtgcaaaccatcctttttaaagggaatatacagcaagtttttgaa

SEQ ID NO: 155063 - DNA, 75 bp, synthetic construct
  source 1..75: mol_type = other DNA
aggctcctgagaatgatgaaatttaattacagtccggaagaagttattatcgaagtcgctgagtctcaggcgtca

SEQ ID NO: 155064 - DNA, 75 bp, synthetic construct
  source 1..75: mol_type = other DNA
aacaggtcgatccgcgcaaagccgccgtcgaagccgctattgcccgagccaaagcgcgcaaacgggaacagcaac

SEQ ID NO: 155065 - DNA, 75 bp, synthetic construct
  source 1..75: mol_type = other DNA
tgcccgtgccaaagcacgcaagctggaacagcaacaggctaatgcagagccagaagaacagattgatccgcgcaa

SEQ ID NO: 155066 - DNA, 75 bp, synthetic construct
  source 1..75: mol_type = other DNA
acggaactggatcatgtcagcatcacaacgtcaggaaaagagagggcaaacgggttaaccgtggggggcgtgtta

SEQ ID NO: 155067 - DNA, 75 bp, synthetic construct
  source 1..75: mol_type = other DNA
ctggatcctgatttacaaacttaccgataaacttttacgatttgagagaactggaactcacgcggcgctatttgg

SEQ ID NO: 155068 - DNA, 75 bp, synthetic construct
  source 1..75: mol_type = other DNA
tgggtaagctgggaataggtgaagatgtcgaagagatgctgcagtccgacctgcgtttagagttggaaggggcaa

SEQ ID NO: 155069 - DNA, 75 bp, synthetic construct
  source 1..75: mol_type = other DNA
aaactggggattggtgaagatgtcgaagagatgctgcaatccgacctgcgattagagctggaaggcgcgaaggat

SEQ ID NO: 155070 - DNA, 75 bp, synthetic construct
  source 1..75: mol_type = other DNA
aagagttgttaatgtcagtgattagttccccagtgatggaaaaaaggcagtggcaattgggtgatgctgccaact

SEQ ID NO: 155071 - DNA, 75 bp, synthetic construct
  source 1..75: mol_type = other DNA
aggctttactgaaagaagatcttttcctggtaggaactcaagattgtccggggcaaagcgttgatgttaatgcta

SEQ ID NO: 155072 - DNA, 75 bp, synthetic construct
  source 1..75: mol_type = other DNA
acctggaaatacagatttcccgcaccgaactcaggaacagcgggctgacagagcctgcccgccgtgtggctgacc

SEQ ID NO: 155073 - DNA, 75 bp, synthetic construct
  source 1..75: mol_type = other DNA
ctttattacaggcggtacgcactgaatttccggaggtcgttatctatctccatgaaaatagcggtgctgtgctta

SEQ ID NO: 155074 - DNA, 75 bp, synthetic construct
  source 1..75: mol_type = other DNA
gttaaatcaacaacttttgattcgcacaaaacggggcgttacgccaacagacgccggaaaaattctctataccca

SEQ ID NO: 155075 - DNA, 75 bp, synthetic construct
  source 1..75: mol_type = other DNA
cgcgcgttcgttatgtggcgcagtaaatgggtggatgtcacgcattaccactccttccatgagtctctctttgtc

SEQ ID NO: 155076 - DNA, 75 bp, synthetic construct
  source 1..75: mol_type = other DNA
agaaagattaggacaatttgccgggcaacctagtgcatgtttccgtgtagccactgaagacgatgcgcatgttaa

SEQ ID NO: 155077 - DNA, 75 bp, synthetic construct
  source 1..75: mol_type = other DNA
ttttccgtggatcttttccagaaaataaagactttggacaattcgcaggtgagcgtggcgcatgtttccgtgtgg

SEQ ID NO: 155078 - DNA, 75 bp, synthetic construct
  source 1..75: mol_type = other DNA
tttttcgtggcactttaccgagcaaggaaacattagggcaattcgccggacaacctggcgcatgtttccgtgtag

SEQ ID NO: 155079 - DNA, 75 bp, synthetic construct
  source 1..75: mol_type = other DNA
acgggtaaagacatgaacgccaaataccgtgaaacctctcgcggcggtctggcaattaaagtccagtgtgactaa

SEQ ID NO: 155080 - DNA, 75 bp, synthetic construct
  source 1..75: mol_type = other DNA
cctgatgttgatgtggaattgattggatctgaactggtggctgaatacaaaatgactgaaggtgtgacaggggga

SEQ ID NO: 155081 - DNA, 75 bp, synthetic construct
  source 1..75: mol_type = other DNA
tttgacgtgaaagatcttgataatgcagatcacgttaaattttttatcttagtatcattgaaacttaatccattc

SEQ ID NO: 155082 - DNA, 75 bp, synthetic construct
  source 1..75: mol_type = other DNA
ataaatcattcaacagatgacagtgaaatagccgttaactttaatcacatggaggaagtcgccgcagctcaccgg

SEQ ID NO: 155083 - DNA, 75 bp, synthetic construct
  source 1..75: mol_type = other DNA
atgctgaccgtctgccggaagaaaaaaaagcgcggcatgaccatcgatctcggctatgcctactggccgcagccg

SEQ ID NO: 155084 - DNA, 75 bp, synthetic construct
  source 1..75: mol_type = other DNA
acgccagccaacatagtttccgcctcgcgatcgaccgcgcatttaccgtaaaaggtgccgggctggtcgtcaccg

SEQ ID NO: 155085 - DNA, 75 bp, synthetic construct
  source 1..75: mol_type = other DNA
aggggttgcagaaaacaaagagccgcgtgtactgaaatgctggatattcagttacaaggaggtcgccgaaaaatg

SEQ ID NO: 155086 - DNA, 75 bp, synthetic construct
  source 1..75: mol_type = other DNA
ataaacgcgactggaatgatttacacaccgccggaaagctgcgtagccatgatgtaaaaagataccgttattacg

SEQ ID NO: 155087 - DNA, 75 bp, synthetic construct
  source 1..75: mol_type = other DNA
ttgtgcgccgtcttgttcgggactttgaatttaaagagcgggataagtatttgcagcagggcgtttgccctgcct

SEQ ID NO: 155088 - DNA, 75 bp, synthetic construct
  source 1..75: mol_type = other DNA
cgcactgacggttcatctggaacgcggagcggtgaatcttgccgatttcgcctgggcgagacagctcaacggcga

SEQ ID NO: 155089 - DNA, 75 bp, synthetic construct
  source 1..75: mol_type = other DNA
acgctacgccaggcggcgcagcaggggataattacggcgatcgtcaaagatcgttattaccgtaatgatcggatt

SEQ ID NO: 155090 - DNA, 75 bp, synthetic construct
  source 1..75: mol_type = other DNA
ttcaaattctggaatattttgaccgcattggctttacgcgtcgtcgtggaaatgatcatttattgcgcgacgcat

SEQ ID NO: 155091 - DNA, 75 bp, synthetic construct
  source 1..75: mol_type = other DNA
cctgggcgcgccaacttaacggcgaaggaatgcgcgaattgctgcaacagccgggttatattcaggctggttata

SEQ ID NO: 155092 - DNA, 75 bp, synthetic construct
  source 1..75: mol_type = other DNA
ttcagattctggaatattttgaccgcattggctttacgcggcgtcgtggaaatgatcatttattgcgcgatgcat

SEQ ID NO: 155093 - DNA, 75 bp, synthetic construct
  source 1..75: mol_type = other DNA
tgttgctgattgaaaagatgcgcgaaagcggcgacatccacagtcatcacggctggctgcatctgccggatcata

SEQ ID NO: 155094 - DNA, 75 bp, synthetic construct
  source 1..75: mol_type = other DNA
gatgaaacacattcaagattgtttctggaagactggaggaaactatatatagatgacaaacttaactggaaagca

SEQ ID NO: 155095 - DNA, 75 bp, synthetic construct
  source 1..75: mol_type = other DNA
atgaacagcgaaaggagcttgaacaacatgatttttatagtttgatttcttcagattgtatagcgttgaaagaca

SEQ ID NO: 155096 - DNA, 75 bp, synthetic construct
  source 1..75: mol_type = other DNA
atgcaaagacaatctgcaaccacactgcttgcactccttgtaggctgtgcggttatccctgccacccacgcctat

SEQ ID NO: 155097 - DNA, 75 bp, synthetic construct
  source 1..75: mol_type = other DNA
aaaattgcccgccgttatggcaatcgtggtctggcgttgctggaccttatcgaagagggcaacctggggctgatc

SEQ ID NO: 155098 - DNA, 75 bp, synthetic construct
  source 1..75: mol_type = other DNA
cgatatgatgatagaaattttgcgtgatgaagaaggccatatcgactggctggaaacggaacttgatctgattca

SEQ ID NO: 155099 - DNA, 75 bp, synthetic construct
  source 1..75: mol_type = other DNA
attgctttcctactattattcacgccgcgctgagtcggcgatcggcaaaggtgcgcgttttgttatctctaaggc

SEQ ID NO: 155100 - DNA, 75 bp, synthetic construct
  source 1..75: mol_type = other DNA
tcctttcgtgagcggaaggaatttcattttacttttgataaccgtgttttctggttcaaactggacattgagcgc

SEQ ID NO: 155101 - DNA, 75 bp, synthetic construct
  source 1..75: mol_type = other DNA
cggcaattattgagcgcctgatacgcatatacaccgataaaaaacgccattcacctgatacccgcctggcggcga

SEQ ID NO: 155102 - DNA, 75 bp, synthetic construct
  source 1..75: mol_type = other DNA
cttgacgcattaataaaaaatgaccttcccgcaataaaagaggttattggtcaggattttatcggatacaacaag

SEQ ID NO: 155103 - DNA, 75 bp, synthetic construct
  source 1..75: mol_type = other DNA
atctgcattctgtagatggcgctcctatatttgatgttaaaaaaggtgatacatcttataccctgattagctgcc

SEQ ID NO: 155104 - DNA, 75 bp, synthetic construct
  source 1..75: mol_type = other DNA
gcaagcgaattgttgccgttaaatcggataaaatttctactcgttattcgacgctaggatcgtgggaaagcaacg

SEQ ID NO: 155105 - DNA, 75 bp, synthetic construct
  source 1..75: mol_type = other DNA
acgctctaaggactaagaaagcgttacgccaatggactgataaagcaaccgatacattcgaaagggcgatagggg

SEQ ID NO: 155106 - DNA, 75 bp, synthetic construct
  source 1..75: mol_type = other DNA
tgtgtatccgactcgtaggcctgataagacgcgcaatgaactgaaccccaaaacctggacagtttcagttaaccg

SEQ ID NO: 155107 - DNA, 75 bp, synthetic construct
  source 1..75: mol_type = other DNA
tgcagaggccgatgtaggtcaacatatcagtcgtttacaacctgttattcgtttagtgaatgctttaggggtacg

SEQ ID NO: 155108 - DNA, 75 bp, synthetic construct
  source 1..75: mol_type = other DNA
agaagcgactaatcaacttccccttgccttatccaaggcgctcggagatctgaatctcacagttaaaccagtcat

SEQ ID NO: 155109 - DNA, 75 bp, synthetic construct
  source 1..75: mol_type = other DNA
ccgctgttgctgggatcgctttttgggttgggctaatcaatcccaaatgggtttttatgccaaatcgaaagcgct

SEQ ID NO: 155110 - DNA, 75 bp, synthetic construct
  source 1..75: mol_type = other DNA
ggttgctgataacgagactatttcaaaacttcagtcctatcgtgatgagcttgttcgcaatgctggtcctgatgg

SEQ ID NO: 155111 - DNA, 75 bp, synthetic construct
  source 1..75: mol_type = other DNA
accattttgctggaatgtctgtgaattgtgtcgatagcacgggggcgggagatgcgttcgttgccgggttactca

SEQ ID NO: 155112 - DNA, 75 bp, synthetic construct
  source 1..75: mol_type = other DNA
ttggcgcgttatcaccgtagcgatttcgccgtgctgttgccacatcggacattaaaagaggcggagagcattgcc

SEQ ID NO: 155113 - DNA, 75 bp, synthetic construct
  source 1..75: mol_type = other DNA
cagtaccgcgccattcggcggcattggcgcttccggcaatcatcgccccagcgcctggtatgccgcagattattg

SEQ ID NO: 155114 - DNA, 75 bp, synthetic construct
  source 1..75: mol_type = other DNA
caccagggatcattgaaatgacgggcgttggcggtgtgccggatgaagaggtgttcgggccgcttttgcgcgtct

SEQ ID NO: 155115 - DNA, 75 bp, synthetic construct
  source 1..75: mol_type = other DNA
cccagcgcctggtatgccgcagattattgtgcctggccgatggctagcctggagtcagacacgttaacgttgcct

SEQ ID NO: 155116 - DNA, 75 bp, synthetic construct
  source 1..75: mol_type = other DNA
ccgacagcattaacgtgcaggcactgaacatgggacgcattgtcgttgacgtcgatggtgttaaaatccgaccaa

SEQ ID NO: 155117 - DNA, 75 bp, synthetic construct
  source 1..75: mol_type = other DNA
accgggttcatgtggtggctgcactgatggccatcgggcgtgaactgagtgagctgagggatgaggtccgtaaac

SEQ ID NO: 155118 - DNA, 75 bp, synthetic construct
  source 1..75: mol_type = other DNA
tgagatgggtggtaataacccgctaataatcgatgaggtgacggatatcgatgccgctgtccatctgactattca

SEQ ID NO: 155119 - DNA, 75 bp, synthetic construct
  source 1..75: mol_type = other DNA
gatgttgacgctgagaatcatgaagcatatcagggacatttgaatgagattacacgtattctgaatttcgctatt

SEQ ID NO: 155120 - DNA, 75 bp, synthetic construct
  source 1..75: mol_type = other DNA
aagcaagcgccgatgaacagcttgagcgcgagcgtgaactgctacgacagaaagaaattgagtaccaggaagata

SEQ ID NO: 155121 - DNA, 75 bp, synthetic construct
  source 1..75: mol_type = other DNA
acgatgtagcggcagcagcccaaaagctcaaggacgccggtaaacgccccactgtcatcgcaatcagggaccttc

SEQ ID NO: 155122 - DNA, 75 bp, synthetic construct
  source 1..75: mol_type = other DNA
agcgtggctatcgtgaaggctggcgcgaccgtgatgatcatcgcgggaaaggccgtggacacggacatcgtcatt

SEQ ID NO: 155123 - DNA, 75 bp, synthetic construct
  source 1..75: mol_type = other DNA
gcgtcatgataatggctaccaccgtggctgggataagcgtaaagcgtatgagcgtggctatcgtgaaggctggcg

SEQ ID NO: 155124 - DNA, 75 bp, synthetic construct
  source 1..75: mol_type = other DNA
atgaacgatgtacaaaatcgacgaatactggcgttgtttaatatgctgtactatgcgttaggaaatcgaacaacc

SEQ ID NO: 155125 - DNA, 75 bp, synthetic construct
  source 1..75: mol_type = other DNA
tgcttatgagtagtttgattttgtcaggatgcgggccggaatctgagaataaggaaagtcagcaacaacagccca

SEQ ID NO: 155126 - DNA, 75 bp, synthetic construct
  source 1..75: mol_type = other DNA
tgattaaagaaatcaaagagcgcataggcagcctggacgttcgagacaatattgagcgtcgtgcttatgaaattg

SEQ ID NO: 155127 - DNA, 75 bp, synthetic construct
  source 1..75: mol_type = other DNA
tgtcctggcggcgcgccagctaacgttgcggtgggaatcgccagattaggcggaataagtgggtttataggccgg

SEQ ID NO: 155128 - DNA, 75 bp, synthetic construct
  source 1..75: mol_type = other DNA
gaaaagctccgggcagctcaggaacaaagtacatccctgaaagaacagctcgaaaatgcacaggccaaactggcc

SEQ ID NO: 155129 - DNA, 75 bp, synthetic construct
  source 1..75: mol_type = other DNA
acgatgtagcggctgcggcccaaaagctcaaggacgccggtaaacgcccaacggtcatcgctatcagagacatca

SEQ ID NO: 155130 - DNA, 75 bp, synthetic construct
  source 1..75: mol_type = other DNA
aatattaagagtaagcgtaaattgatttttgttagggattttcagtggcgatataaaaaaataattaaacgattg

SEQ ID NO: 155131 - DNA, 75 bp, synthetic construct
  source 1..75: mol_type = other DNA
cagcatgagtagcctgggtaaaaatgactggcctctggtgttcattcgcccccggcatgccgaaatgggcagatg

SEQ ID NO: 155132 - DNA, 75 bp, synthetic construct
  source 1..75: mol_type = other DNA
atccccgtcgccctcaaaaatctggagcacctgctgcacgagctcagtaacagcatgagtagcctgggtaaaaat

SEQ ID NO: 155133 - DNA, 75 bp, synthetic construct
  source 1..75: mol_type = other DNA
catttctctttgtttttactcaattagtcggcgttggagcagcttctgcagatacacctcagtggttgtcgacat

SEQ ID NO: 155134 - DNA, 75 bp, synthetic construct
  source 1..75: mol_type = other DNA
tctagtcagattctcaccatcatctccaaagaagaccgccacattgaagtgggcgttacaacatttgatgccagg

SEQ ID NO: 155135 - DNA, 75 bp, synthetic construct
  source 1..75: mol_type = other DNA
tcagatagaggtcattcaaaacgcgctgatggtcactcagggtgagcattctgacgctctgcggatcctgaactc

SEQ ID NO: 155136 - DNA, 75 bp, synthetic construct
  source 1..75: mol_type = other DNA
aaagggatgctaaaccagcaactgaaaacacagactcagttacagcaacagcatttagaaaaccagattaatagc

SEQ ID NO: 155137 - DNA, 75 bp, synthetic construct
  source 1..75: mol_type = other DNA
atggacgagaacaagctcaacattgaggcggtcgatgggcacaacgagctggtagtcagcattctgtccagaatg

SEQ ID NO: 155138 - DNA, 75 bp, synthetic construct
  source 1..75: mol_type = other DNA
aagtctgggcacctggcaggatacgctggtgatgtctggttcccacagccagcccccgcgtctcacccctggaga

SEQ ID NO: 155139 - DNA, 75 bp, synthetic construct
  source 1..75: mol_type = other DNA
cgttaaagtttacttctgcgatcctcagagtccttggcagcggggaacaaatgagaacacaaatgggctaattcg

SEQ ID NO: 155140 - DNA, 75 bp, synthetic construct
  source 1..75: mol_type = other DNA
cacttctctttgtttttactcaattagtcggcattgaagacgcttctgctgacacacctcaatggctgtcgacat

SEQ ID NO: 155141 - DNA, 75 bp, synthetic construct
  source 1..75: mol_type = other DNA
cagttaaataaagttccttccgccatcagctacaccattaagaaagcggaagagagtctgggcgttgaactgttc

SEQ ID NO: 155142 - DNA, 75 bp, synthetic construct
  source 1..75: mol_type = other DNA
atgggcaaagcctgtcagtggtgcatagaatatttaagaaacccacaattaatgacacgatttgtatttaattga

SEQ ID NO: 155143 - DNA, 75 bp, synthetic construct
  source 1..75: mol_type = other DNA
cgtcattctctgtagcagtaaaacttcagcggaaatgctgtacttgcaaaaaaaaaaatgttggggctacaaggc

SEQ ID NO: 155144 - DNA, 75 bp, synthetic construct
  source 1..75: mol_type = other DNA
tcagcggaaatgctgtacttgcaaaaaaaaaatgttggggctacaaggcttaccgctgattgcagagaatggcgc

SEQ ID NO: 155145 - DNA, 75 bp, synthetic construct
  source 1..75: mol_type = other DNA
tgatgctaaaaggctggtcgctgattggcgatgtgaaccgccccgggtttcctggagagtgttttatctgtgaac

SEQ ID NO: 155146 - DNA, 75 bp, synthetic construct
  source 1..75: mol_type = other DNA
ggctgatttctgaacaggccgcacagcaggtggttactgcctggcagcaactggaagcgatgggcggacgaaccc

SEQ ID NO: 155147 - DNA, 75 bp, synthetic construct
  source 1..75: mol_type = other DNA
gaggtgttatggcaaggcaatgatgccgatgccgctcaggtcgagcaggcttgtcgggcagcccgtgcggcgttt

SEQ ID NO: 155148 - DNA, 75 bp, synthetic construct
  source 1..75: mol_type = other DNA
gctcaggtcgaacaggcttgtcgggcagcccgtgcggcgtttccgcgctgggcgcggctctcattggctgaacgt

SEQ ID NO: 155149 - DNA, 75 bp, synthetic construct
  source 1..75: mol_type = other DNA
agcgagttgaccgagcgactagacaagatgggggataaaacaaaaatgtcatctagagataattattttgtgtac

SEQ ID NO: 155150 - DNA, 75 bp, synthetic construct
  source 1..75: mol_type = other DNA
gtgggtgtcgtttaaatcgctgcatgacgctacagagcgcttctgtacctacgtagctgatggtgtgcctgctaa

SEQ ID NO: 155151 - DNA, 75 bp, synthetic construct
  source 1..75: mol_type = other DNA
agtgagctgacagagcgactggaaacgatgggcgataagaaaaaccttgccgcacgggagagttatttcgtgtac

SEQ ID NO: 155152 - DNA, 75 bp, synthetic construct
  source 1..75: mol_type = other DNA
ttcatttgcttcagccagctcctgatgcagaagccaaaaaactgctgaacgtggttatttctgaacgaaagaata

SEQ ID NO: 155153 - DNA, 75 bp, synthetic construct
  source 1..75: mol_type = other DNA
ttgactggcaggcaaaaaatacgtatttgctgggcgatttggatgaccttcctttaatcaataaagaagaacaac

SEQ ID NO: 155154 - DNA, 75 bp, synthetic construct
  source 1..75: mol_type = other DNA
ctatccaaaaatccagactgggagaatggttcagctgtgtactgaatcagtggggcgcactctgttattacagtg

SEQ ID NO: 155155 - DNA, 75 bp, synthetic construct
  source 1..75: mol_type = other DNA
cgggaagatatccctctgctggctggccattttctgcagcgctttgccgagcgtaatcgcaaggcggtaaaaggt

SEQ ID NO: 155156 - DNA, 75 bp, synthetic construct
  source 1..75: mol_type = other DNA
atctctactatcggctgaacgtggtggcgattgaagtaccatcgctgcggcaacggcgggaagatattcctctgc

SEQ ID NO: 155157 - DNA, 75 bp, synthetic construct
  source 1..75: mol_type = other DNA
gagaacatcgtcttcatgagcttaatcttaattatggcgatgtcgttttttttattggtcagaatggtagtggta

SEQ ID NO: 155158 - DNA, 75 bp, synthetic construct
  source 1..75: mol_type = other DNA
ggtgcttatgatgcttatgggacgggaataccggcacggggatacacaccttatccggcggtagatccggctcag

SEQ ID NO: 155159 - DNA, 75 bp, synthetic construct
  source 1..75: mol_type = other DNA
gccacggtaatttaagtgaatggcctgacggattttttgaccaatccgataaagatttaggtaagttaattggat

SEQ ID NO: 155160 - DNA, 75 bp, synthetic construct
  source 1..75: mol_type = other DNA
tgattttaaagttgcatgggatttcaaatatccaaaaaaaaagaattatccggttctggtattatctgaaatatc

SEQ ID NO: 155161 - DNA, 75 bp, synthetic construct
  source 1..75: mol_type = other DNA
aacgtggaacgggtgggcatggattgcaggcgctgccctctacttgctctgcctgccggcgctgcgtcgcgggct

SEQ ID NO: 155162 - DNA, 75 bp, synthetic construct
  source 1..75: mol_type = other DNA
cctggaccctgtacgccagatgaagccgggatttcccttgaggttattcgtcactatgccggacggttgccgatt

SEQ ID NO: 155163 - DNA, 75 bp, synthetic construct
  source 1..75: mol_type = other DNA
cgctaccattcgctggtggtggaacctgactcattaccggagtgctttgaagtgacggcctggagcgaaacccgc

SEQ ID NO: 155164 - DNA, 75 bp, synthetic construct
  source 1..75: mol_type = other DNA
aattgcgccggaaggagcaggaggatacagaacgtagtcgcgcggagcgacgagcggaacagctcaggaaaaatg

SEQ ID NO: 155165 - DNA, 75 bp, synthetic construct
  source 1..75: mol_type = other DNA
tggatagtgtcgagccgcttcctcttgttgaagtggtgaaaagctggcatggtcgtcgcccaatggctgtaggaa

SEQ ID NO: 155166 - DNA, 75 bp, synthetic construct
  source 1..75: mol_type = other DNA
ttaacggcgtatcggagctgcactctaatctgatggtgcaatcgctgtttgctgactttgcgaagatcttccctg

SEQ ID NO: 155167 - DNA, 75 bp, synthetic construct
  source 1..75: mol_type = other DNA
gtcaggaatatttcctggtatcttcgaccattcaggacattttaagtcgccattatcagttgcataaaacctacg

SEQ ID NO: 155168 - DNA, 75 bp, synthetic construct
  source 1..75: mol_type = other DNA
aaaaaaacgcgctggattgaaaccgaagagattctgggagtcgcttacgatcagataatcccaggttacgacacc

SEQ ID NO: 155169 - DNA, 75 bp, synthetic construct
  source 1..75: mol_type = other DNA
tggtcgagtttcagagtctggaagggatatatgagaatctggatgcggttgccgaaaagtggcgcaaaaaattag

SEQ ID NO: 155170 - DNA, 75 bp, synthetic construct
  source 1..75: mol_type = other DNA
ttaacggtgtatcagaattacactctaacctgatggtgcagtcgctatttgctgattttgcgaaaatcttccctg

SEQ ID NO: 155171 - DNA, 75 bp, synthetic construct
  source 1..75: mol_type = other DNA
tcgaagagttgattgatgaagaaaatgacccaggtctcggtaatggtggcctggggcgtctggcggcctgcttcc

SEQ ID NO: 155172 - DNA, 75 bp, synthetic construct
  source 1..75: mol_type = other DNA
atttcctgaaaaccttgcaggaacagtatccgaacgataccgatctgctgggacgggcgtcgatcattgatgaat

SEQ ID NO: 155173 - DNA, 75 bp, synthetic construct
  source 1..75: mol_type = other DNA
gtaatatgaagtttgcacttaacggcgcgctgactatcggtacgctggacggtgcgaacgtcgagatgctggatc

SEQ ID NO: 155174 - DNA, 75 bp, synthetic construct
  source 1..75: mol_type = other DNA
gggctgacgctttccctgaaatcttatgccgatcaggaaaacgccgctaccgggctgaaagtcgccatgatggat

SEQ ID NO: 155175 - DNA, 75 bp, synthetic construct
  source 1..75: mol_type = other DNA
aggtatttatgacgatgtccagggtgcgctggagtcgatgggattaaatctcgaagagttgattgatgaagaaaa

SEQ ID NO: 155176 - DNA, 75 bp, synthetic construct
  source 1..75: mol_type = other DNA
ctggcgcaccgaccttagcctgcttaatgagctgcaacaacactgtgatttcccaatggttaatcacgcggtgca

SEQ ID NO: 155177 - DNA, 75 bp, synthetic construct
  source 1..75: mol_type = other DNA
aaaaaaacgcgctggattgaaaccgaagagattctgggagtggcttacgatcagattatcccgggttacgacact

SEQ ID NO: 155178 - DNA, 75 bp, synthetic construct
  source 1..75: mol_type = other DNA
tcgatcaacattggcggagcgattattccgctgattagcgcctttgccgcccactggtggggctggcaggccgcg

SEQ ID NO: 155179 - DNA, 75 bp, synthetic construct
  source 1..75: mol_type = other DNA
cgccaccgggctattgaacgtggtgtttgcctttggcgaatcacttacgcttctgcttgtggtctggacactgaa

SEQ ID NO: 155180 - DNA, 75 bp, synthetic construct
  source 1..75: mol_type = other DNA
actggaatatattcgcaatcatgcctatcacacttcacgttttcttcgcaaaaacgtggtcattgatgaggaccg

SEQ ID NO: 155181 - DNA, 75 bp, synthetic construct
  source 1..75: mol_type = other DNA
gcatatgctgcaagagaggagaaacggcgacatgctgaatccacccagcacatcgcagcctgaccttccgttgaa

SEQ ID NO: 155182 - DNA, 75 bp, synthetic construct
  source 1..75: mol_type = other DNA
atgaaacgacttctgcttttgacggcactcctgccgtttgtcggctttgcacagcccattaatactctgaacaac

SEQ ID NO: 155183 - DNA, 75 bp, synthetic construct
  source 1..75: mol_type = other DNA
ccgcactgacgggcgcatggggggggctgattgttgaggatgtgacctttaaggatttgacggatgaacacgacg

SEQ ID NO: 155184 - DNA, 75 bp, synthetic construct
  source 1..75: mol_type = other DNA
cggcggtcagtacaccccgttatgcgcaacagaaaagtgcgcagttgtataccctgctgaaacctgaaagtctct

SEQ ID NO: 155185 - DNA, 75 bp, synthetic construct
  source 1..75: mol_type = other DNA
gcttgaaaaacaggggaagcaggagcaggcggacaccatccgtagccggatcctgcagacatctgagatgccatg

SEQ ID NO: 155186 - DNA, 75 bp, synthetic construct
  source 1..75: mol_type = other DNA
aacgaggctaccgcgaaggctggcgcgaccgtgatgatcatcgcggaaaaggtcgtggacatgggcaccgtcatt

SEQ ID NO: 155187 - DNA, 75 bp, synthetic construct
  source 1..75: mol_type = other DNA
acgggcaactgattaaactggatcatcagcagatggcaatgttcctggtgatcctgatgcaggcgttgttttata

SEQ ID NO: 155188 - DNA, 75 bp, synthetic construct
  source 1..75: mol_type = other DNA
atccgctgtgggatctgcttgcacttacccaccaggatgcgcaactggagctgcaggaggcggtttccagccgtg

SEQ ID NO: 155189 - DNA, 75 bp, synthetic construct
  source 1..75: mol_type = other DNA
tgcgcagaatattgactttctgtcactgacggaattcctggaaaccctgcgtattccggaaggcagggaggtgac

SEQ ID NO: 155190 - DNA, 75 bp, synthetic construct
  source 1..75: mol_type = other DNA
gtccaacctgtgggaggcaatgacggggaccgcaactaacggccttgcggctattggcggcgcattttctggtga

SEQ ID NO: 155191 - DNA, 75 bp, synthetic construct
  source 1..75: mol_type = other DNA
agttaaagtatcgctggcaatcactctctatttttggttgttttttatgcaaaatgacattattcaggtatcaaa

SEQ ID NO: 155192 - DNA, 75 bp, synthetic construct
  source 1..75: mol_type = other DNA
aaataatttatgacaccggagtgcatcagatgcgttcatttttttacaccatatgcagtagcgaacagcaagaaa

SEQ ID NO: 155193 - DNA, 75 bp, synthetic construct
  source 1..75: mol_type = other DNA
ataacggtgagggcgtatttaaggggctggcaaatccactcaccgtgacacgctaccattcgctggtggtggagc

SEQ ID NO: 155194 - DNA, 75 bp, synthetic construct
  source 1..75: mol_type = other DNA
tcgcccagattgaacagcagcttaatcttgcggtggatcgcgtgatgaccgaaggcggcattgccgaccgcgaac

SEQ ID NO: 155195 - DNA, 75 bp, synthetic construct
  source 1..75: mol_type = other DNA
gacgacatcacccgcacgccgccggtttatccctgttcgcgttcttcccgtctacaacaattaatgcgcggtgac

SEQ ID NO: 155196 - DNA, 75 bp, synthetic construct
  source 1..75: mol_type = other DNA
catagccggtctgatacacctcggtattcgatatgcagatgttgaggtcatgaaaattgctggagatgcccagct

SEQ ID NO: 155197 - DNA, 75 bp, synthetic construct
  source 1..75: mol_type = other DNA
acgaacattatgaaaaatcacgcgtaacagtagttgatgatagtgatcccgatgtgattgcactgctggacgaaa

SEQ ID NO: 155198 - DNA, 75 bp, synthetic construct
  source 1..75: mol_type = other DNA
catgttctccgtgaacgttacttagctgatatccgagtcatggagcgtcagaagtctggacgtattcattatcat

SEQ ID NO: 155199 - DNA, 75 bp, synthetic construct
  source 1..75: mol_type = other DNA
attaggacgaaaggagggaagcaaataccgacgtgatatcacaatactaaagaaaggtggatttactcaggctga

SEQ ID NO: 155200 - DNA, 75 bp, synthetic construct
  source 1..75: mol_type = other DNA
tgattactggcgtagataagctatctcctgcgctttcacggatgcagaaaaatatccgtggtttcaagcgccagg

SEQ ID NO: 155201 - DNA, 75 bp, synthetic construct
  source 1..75: mol_type = other DNA
attaaacagcgcgaccaggagaacgaggagattgcgctaacggtaggaaagctgcgtgttgagcttgaagcagaa

SEQ ID NO: 155202 - DNA, 75 bp, synthetic construct
  source 1..75: mol_type = other DNA
gctggctgactgcgccacgccctgatgacacacccattgcgtggctggacgaaagtacctggacgctgggcgatt

SEQ ID NO: 155203 - DNA, 75 bp, synthetic construct
  source 1..75: mol_type = other DNA
atgctgcctgaaacaaatgaattcccaataatacaaattgagattgcaaaaataaaattccttaacccaagaact

SEQ ID NO: 155204 - DNA, 75 bp, synthetic construct
  source 1..75: mol_type = other DNA
atgaatttagtaattcaccgagccttgaagattgtcggtagtcaaaagcggcttgccgacaagtgtggtgtaacg

SEQ ID NO: 155205 - DNA, 75 bp, synthetic construct
  source 1..75: mol_type = other DNA
tgtggcgaagattgaagcgcctttactgctccactacgcggaactggatacccgaatcaacgagggctggcccgc

SEQ ID NO: 155206 - DNA, 75 bp, synthetic construct
  source 1..75: mol_type = other DNA
ggtgcgtgcgtcagcgtggcaggtccggtggcgtttatcggcctgctggtgccacatctggcgcgcttctgggca

SEQ ID NO: 155207 - DNA, 75 bp, synthetic construct
  source 1..75: mol_type = other DNA
gccacatctggcgcgcttctgggcaggcttcgatcagcgcaacgtactgccagtgagcatgctgctgggggccac

SEQ ID NO: 155208 - DNA, 75 bp, synthetic construct
  source 1..75: mol_type = other DNA
gcggttctctcgtttggttccacgactcatgagccgggaaaacccgtattactcacccgtaatcaggatattaac

SEQ ID NO: 155209 - DNA, 75 bp, synthetic construct
  source 1..75: mol_type = other DNA
ccaggacgggatcgaccgtctacagcaggtcgcacaggcggtgttcaatacgggcgtatcttacggcctggtcaa

SEQ ID NO: 155210 - DNA, 75 bp, synthetic construct
  source 1..75: mol_type = other DNA
atatttctcatcagacaaatacccggccaggtcctgtgttgaagtcgccagattaccgaaagacgtgctgataga

SEQ ID NO: 155211 - DNA, 75 bp, synthetic construct
  source 1..75: mol_type = other DNA
atgcggtttaaacattacagagaatggaaaattccagaatcagcaacaaaggccgcacctggtaatttttctggc

SEQ ID NO: 155212 - DNA, 75 bp, synthetic construct
  source 1..75: mol_type = other DNA
gaaaaataattagtaaaagcatttcattgttaaattattttatccccaagaaaaaaaatagaatttttttcaaaa

SEQ ID NO: 155213 - DNA, 75 bp, synthetic construct
  source 1..75: mol_type = other DNA
tggggcagttttccattgttggcagtgaaaatctggtgacggcagtaaacacgttttttgcccagggaaattcag

SEQ ID NO: 155214 - DNA, 75 bp, synthetic construct
  source 1..75: mol_type = other DNA
atggcagcttcaaccttttttattccttccgtgaatgttatcggcgctgattcattgaatgatgcaatgaatatg

SEQ ID NO: 155215 - DNA, 75 bp, synthetic construct
  source 1..75: mol_type = other DNA
aacctgccgttagccgttgaagatggcagcaatgctaaagcgcgtgaagcaatggcttatgcccagttcctcgcc

SEQ ID NO: 155216 - DNA, 75 bp, synthetic construct
  source 1..75: mol_type = other DNA
cgccgatcactgacgcttgtgcactgaaagcggtgaccatgattgccgaaaacctgccgttagccgttgaagatg

SEQ ID NO: 155217 - DNA, 75 bp, synthetic construct
  source 1..75: mol_type = other DNA
tttgccgagaaatattacggtccggcaagccaggtggtgccagagtttgttgaaaagttgctgaagggcttataa

SEQ ID NO: 155218 - DNA, 75 bp, synthetic construct
  source 1..75: mol_type = other DNA
tcaactgcagatgagcgatggtcgcccgttacatgtgatttctggcgatcagggattcctgcctgctcctgtatc

SEQ ID NO: 155219 - DNA, 75 bp, synthetic construct
  source 1..75: mol_type = other DNA
tgggttatgttcatgcgatggcgcaccagctgggcggtttctacaacctgccgcacggtgtatgtaacgccgttc

SEQ ID NO: 155220 - DNA, 75 bp, synthetic construct
  source 1..75: mol_type = other DNA
tgacgcaatgattgatgctttggctcgtgatggcattgcctacgtgccgttctttccgctcgggggctttacgcc

SEQ ID NO: 155221 - DNA, 75 bp, synthetic construct
  source 1..75: mol_type = other DNA
acaggtgtgcgaccgttactggtgggttcgccactatgacaaacgttgccgccgtagcgacaatcgccgtcatag

SEQ ID NO: 155222 - DNA, 75 bp, synthetic construct
  source 1..75: mol_type = other DNA
attgagtttatgcaacgctatccgcaagcgacaggcaaagtgggtattaccggattttgctatggcggtggcgta

SEQ ID NO: 155223 - DNA, 75 bp, synthetic construct
  source 1..75: mol_type = other DNA
tctaaatttcaacaccaaaacccggttaacggttcagttaatcgtgaactattgtatgaggattatactgattaa

SEQ ID NO: 155224 - DNA, 75 bp, synthetic construct
  source 1..75: mol_type = other DNA
tctaaatttcaacaccaaaaccccgttaacggttctgtaaatcctgacctattgtatgaggattatactgattaa

SEQ ID NO: 155225 - DNA, 75 bp, synthetic construct
  source 1..75: mol_type = other DNA
caacaacaaggcctggtaaaacatattggtctgagcaacgttacaccgacgcaggttgcagaggcgcgtaagatt

SEQ ID NO: 155226 - DNA, 75 bp, synthetic construct
  source 1..75: mol_type = other DNA
gaagcgcgaggagttccgctggattcagtatcgggcacagtacgcgaggggagaggggaaagcacaaatcacttt

SEQ ID NO: 155227 - DNA, 75 bp, synthetic construct
  source 1..75: mol_type = other DNA
aagaagttacagtataaggatatacgaactcctccagcagttccgcagtactggcgaacgtattatcgctctcga

SEQ ID NO: 155228 - DNA, 75 bp, synthetic construct
  source 1..75: mol_type = other DNA
attaacctgcatcaggctatgcaggaagcgaaagcatttctcggtatcaaggatgacgatcaccatttcgatgcc

SEQ ID NO: 155229 - DNA, 75 bp, synthetic construct
  source 1..75: mol_type = other DNA
cgcagatggcggtgcagcaggaaaaagcccgccagttgatcgacggcatgtcccgcttcccgcaaacggaaaacg

SEQ ID NO: 155230 - DNA, 75 bp, synthetic construct
  source 1..75: mol_type = other DNA
attcctcaggcgtgggtaaacagatctgaggcattagaattgcttaatgaattatctacaacatatacatataaa

SEQ ID NO: 155231 - DNA, 75 bp, synthetic construct
  source 1..75: mol_type = other DNA
atgcttgatggtaaatataaagatttcaaaacgttaaacagggatctaataaaaccctgtgttgacgaactgaac

SEQ ID NO: 155232 - DNA, 75 bp, synthetic construct
  source 1..75: mol_type = other DNA
gctcgatgaggaggactacggcggacagaaagaatttatcgacaccctgtgtgacttcaaaaacgaacataactg

SEQ ID NO: 155233 - DNA, 75 bp, synthetic construct
  source 1..75: mol_type = other DNA
atggacctcgctgaattacaatttcaaatttcgcgccggagaactgacgctggtaaatggcgtgaatggtcacgg

SEQ ID NO: 155234 - DNA, 75 bp, synthetic construct
  source 1..75: mol_type = other DNA
attttatcctggcgtttttcctgtcactaaccgcctccgttgcctatgcaggtggactcgacaccgcaacaaata

SEQ ID NO: 155235 - DNA, 75 bp, synthetic construct
  source 1..75: mol_type = other DNA
ccaaacggcaaaaaactgattatggctgaagctgattgcgaaccatgtctgtttggctggcaggctctggataaa

SEQ ID NO: 155236 - DNA, 75 bp, synthetic construct
  source 1..75: mol_type = other DNA
atcgctttaaggtaacagatgcggtggtctggtatcacgacgaaagccgcgaggtaccagcagtggcattcccgt

SEQ ID NO: 155237 - DNA, 75 bp, synthetic construct
  source 1..75: mol_type = other DNA
agatgacgaccaccacttcgaagcgaagaaaaaactgttctctcgtccgacgaaaaagggcgttaaatcggccag

SEQ ID NO: 155238 - DNA, 75 bp, synthetic construct
  source 1..75: mol_type = other DNA
ggtagaccacggcgtgatgctgccagaaaacacgattgagtcggcgtcgatgaacgtcagtaccaacctgttaca

SEQ ID NO: 155239 - DNA, 75 bp, synthetic construct
  source 1..75: mol_type = other DNA
aggtgatgaccccattgctgcaagatctgttggcaggttctgtcgacgtggtcgttgggcgaattggcggtcgcg

SEQ ID NO: 155240 - DNA, 75 bp, synthetic construct
  source 1..75: mol_type = other DNA
cgcacagaacagcccacagttacgcggctggttacagacccgtcaggacttacatgactttgcagatctcgtgat

SEQ ID NO: 155241 - DNA, 75 bp, synthetic construct
  source 1..75: mol_type = other DNA
gcacgcgcactggccttccccggagatctgcccgcaggcgcagtgctggcgctgattggcagcccttgctttgtc

SEQ ID NO: 155242 - DNA, 75 bp, synthetic construct
  source 1..75: mol_type = other DNA
ggcctcacactctttgagcggcacagcaaagggttacgccctaccgaaggcggtagattgttattgcaacatgcc

SEQ ID NO: 155243 - DNA, 75 bp, synthetic construct
  source 1..75: mol_type = other DNA
ctgaaaattggctgttctcccgtcgccactgactgcgtatcccaggcgattttgcatttgcttacgaagatgcca

SEQ ID NO: 155244 - DNA, 75 bp, synthetic construct
  source 1..75: mol_type = other DNA
tgccgacagtcgctggccggaaagcctgcaacagcaacaggcctcgacacaatggaatgaggcactcaaaacccg

SEQ ID NO: 155245 - DNA, 75 bp, synthetic construct
  source 1..75: mol_type = other DNA
caaagcagggcagtgcggtgaaaggttttatcgcgggtgttctctgctccggggctgttgccgccgctctctggt

SEQ ID NO: 155246 - DNA, 75 bp, synthetic construct
  source 1..75: mol_type = other DNA
tggactggttcaacacccgcaccgggaatatcctgcgccagcagatatcctttgtggaggctgacctgcctctgt

SEQ ID NO: 155247 - DNA, 75 bp, synthetic construct
  source 1..75: mol_type = other DNA
gatttatgccccggaaacaacggcattctccacgccagaagcggtagttcctcccgtgcccaacctgtctgagat

SEQ ID NO: 155248 - DNA, 75 bp, synthetic construct
  source 1..75: mol_type = other DNA
agcgactcgaaggcgtgttaagccgctggctgctgctgaagaataacgtcatgccagaggcggcaaccggtacca

SEQ ID NO: 155249 - DNA, 75 bp, synthetic construct
  source 1..75: mol_type = other DNA
gaacacgcgtaaacggcttgaaccccagccgaagagtaacgcagagaacgccgcacagaccacagtcagaacgct

SEQ ID NO: 155250 - DNA, 75 bp, synthetic construct
  source 1..75: mol_type = other DNA
ttgatctctctcgccgtgaattatcgatcaatgaggaagtgattaaactaacggcgtttgaatataccattatgg

SEQ ID NO: 155251 - DNA, 75 bp, synthetic construct
  source 1..75: mol_type = other DNA
atgctttgttacgtcatcaccttaaagtccagattcaggacgcgggtcatcaggtcgatgacgcggaagatgcca

SEQ ID NO: 155252 - DNA, 75 bp, synthetic construct
  source 1..75: mol_type = other DNA
caggtcgatgacgcagaagatgccaaagaagccgattattatctcaatgaacatttacctgatattgcgattgtc

SEQ ID NO: 155253 - DNA, 75 bp, synthetic construct
  source 1..75: mol_type = other DNA
gatcctcagagtccttggcagcggggaacaaatgagaatacaaatgggctaattcggcagtactttcctaaaaag

SEQ ID NO: 155254 - DNA, 75 bp, synthetic construct
  source 1..75: mol_type = other DNA
atccattagaaaacagtgaattgcgtcattatcctgcggtttgtatccgggatacctccgttaacttccccccaa

SEQ ID NO: 155255 - DNA, 75 bp, synthetic construct
  source 1..75: mol_type = other DNA
gattaatgacgaagtgatcaaactgaccgcgtttgaatacaccattatggaaacgttgattcgtaataatggcaa

SEQ ID NO: 155256 - DNA, 75 bp, synthetic construct
  source 1..75: mol_type = other DNA
atggcagcttcaaccttttttattccttctgtgaatgtcatcggcgctgattcattggctgatgcaatgaatatg

SEQ ID NO: 155257 - DNA, 75 bp, synthetic construct
  source 1..75: mol_type = other DNA
ggtatggcgttcaacaatgcgtctttgggttatgttcatgcgatggcgcaccagttaggcggtttctacaatctg

SEQ ID NO: 155258 - DNA, 75 bp, synthetic construct
  source 1..75: mol_type = other DNA
tgggttatgttcatgcgatggcgcatcaactgggtggtttctacaatctgccgcacggtgtatgtaatgccgttc

SEQ ID NO: 155259 - DNA, 75 bp, synthetic construct
  source 1..75: mol_type = other DNA
atggcagcttcaaccttttttattccttccgtgaatgttattggtgctgattcattgaatgatgcaatgaatatg

SEQ ID NO: 155260 - DNA, 75 bp, synthetic construct
  source 1..75: mol_type = other DNA
ggaaggtgcagaagcctgcattaatgccatccgtgagctggcgaagaaagtgaatattccggcaggtctgcgcga

SEQ ID NO: 155261 - DNA, 75 bp, synthetic construct
  source 1..75: mol_type = other DNA
gatttccttaggtggtggttctccacacgactgcgcaaaaggtattgcgctggtggccgccaacggtggtgatat

SEQ ID NO: 155262 - DNA, 75 bp, synthetic construct
  source 1..75: mol_type = other DNA
cgcgaggcgctggcattgggcgtcaatcacattgataccagcgacttttatggtccgcacgtcaccaatcagatt

SEQ ID NO: 155263 - DNA, 75 bp, synthetic construct
  source 1..75: mol_type = other DNA
tctgacgacctgacaattgtcactaaaattggtgcgcggcgtggagaggacgcatcctggttgcccgcattttct

SEQ ID NO: 155264 - DNA, 75 bp, synthetic construct
  source 1..75: mol_type = other DNA
ccagacatctagaatttactgtcagcaccggcgttaaagtttacttctgcgatcctcagagtccttggcagcggg

SEQ ID NO: 155265 - DNA, 75 bp, synthetic construct
  source 1..75: mol_type = other DNA
tctgacgacctgaccattgttactaaaattggggcgcggcgtggagaggacgcctcctggttgcccgcattttct

SEQ ID NO: 155266 - DNA, 75 bp, synthetic construct
  source 1..75: mol_type = other DNA
gcccagcggaaggatcgattgaagccagcctgaccgtgctggcagagatgcaacaacaaggcctggtaaaacata

SEQ ID NO: 155267 - DNA, 75 bp, synthetic construct
  source 1..75: mol_type = other DNA
cgcatttacgggagaatatggctgctgaaaaattgcatctttctgaggaagtgttgtctacgttggatggtattt

SEQ ID NO: 155268 - DNA, 75 bp, synthetic construct
  source 1..75: mol_type = other DNA
gtaacggcgaccgtgctgaaacctacactggtggtctgaaatacgacgctaacaacatctacctggctgctcagt

SEQ ID NO: 155269 - DNA, 75 bp, synthetic construct
  source 1..75: mol_type = other DNA
gtctggttgacggtctgaacttcgctgttcagtatcagggcaaaaacggtagcccggaaggtgaaggcatgacca

SEQ ID NO: 155270 - DNA, 75 bp, synthetic construct
  source 1..75: mol_type = other DNA
cgcagcaaatgcggctgaaatttacaacaaagacggcaacaaattagatctgtacggcaaagtagatggtctgca

SEQ ID NO: 155271 - DNA, 75 bp, synthetic construct
  source 1..75: mol_type = other DNA
tccttctgtagcttacctgcagtccaaaggtaaaaacctgaatgccaacatcgctggtcgtacttacgacgacga

SEQ ID NO: 155272 - DNA, 75 bp, synthetic construct
  source 1..75: mol_type = other DNA
agtgctcatggcgaaggtatgaccactaatggccgtgatgatgtatttgagcagaacggtgacggtgttggtggt

SEQ ID NO: 155273 - DNA, 75 bp, synthetic construct
  source 1..75: mol_type = other DNA
tcggtctggttgacggcctgaactttgctgttcagtaccagggcaaaaacggtagcgtaagcggcgagggcatga

SEQ ID NO: 155274 - DNA, 75 bp, synthetic construct
  source 1..75: mol_type = other DNA
gcgctggcgcttcgtcgcaatcagactctgctcactttgcacagcctgaatatgctgcattctcgcggtttcctc

SEQ ID NO: 155275 - DNA, 75 bp, synthetic construct
  source 1..75: mol_type = other DNA
caggtggtacgctggtgtgcaataaaactgaaaatccgccgctgttccgcgcgctggcgcttcgtcgcaatcaga

SEQ ID NO: 155276 - DNA, 75 bp, synthetic construct
  source 1..75: mol_type = other DNA
atggcgacctttggcgcgaaagtgctgcatccagcgacgttgctgcccgcagtgcgcagcgatattccggtgttt

SEQ ID NO: 155277 - DNA, 75 bp, synthetic construct
  source 1..75: mol_type = other DNA
gatgagaggattctctcacattttcaacggggagttgaaaaatatgcacatgagtatggattagatgaagaagct

SEQ ID NO: 155278 - DNA, 75 bp, synthetic construct
  source 1..75: mol_type = other DNA
agcgattatacggcagccttgctggcggaggctttacacgcttctcgtgttgatatctggaccgatgtcccaggc

SEQ ID NO: 155279 - DNA, 75 bp, synthetic construct
  source 1..75: mol_type = other DNA
gtttagttgtcctctcggcttctgctggtatcactaatctgctggtcgctttagcggaaggactggaacctggcg

SEQ ID NO: 155280 - DNA, 75 bp, synthetic construct
  source 1..75: mol_type = other DNA
atgaaacgcaaaaacgcttcgttactcggtaacgtgctcatggggttgggtctggtggtaatggtggtcggcgtg

SEQ ID NO: 155281 - DNA, 75 bp, synthetic construct
  source 1..75: mol_type = other DNA
atatagataaaggcttcgactttttagggcagaacgtcaggaagtacaacggtaaaatgctgattaagccgtcga

SEQ ID NO: 155282 - DNA, 75 bp, synthetic construct
  source 1..75: mol_type = other DNA
gcccgcacgtggtgtggtttggcgaaatgccgctcggcatggatgaaatttatatggcactggcgatggcggata

SEQ ID NO: 155283 - DNA, 75 bp, synthetic construct
  source 1..75: mol_type = other DNA
tacgacgtcagaagtaagcgtggcgttaactctcgacactaccggatcaacatctaccggcgatacgttgctgac

SEQ ID NO: 155284 - DNA, 75 bp, synthetic construct
  source 1..75: mol_type = other DNA
atgtctgaaattgttgtctccaaatttggcggtaccagcgtagctgattttgacgccatgaaccgcagcgctgat

SEQ ID NO: 155285 - DNA, 75 bp, synthetic construct
  source 1..75: mol_type = other DNA
actgatgggacgtctgcgcaaaaaaattcaggcacaatatccgcaagaagtgattactaccgttcgcggccaggg

SEQ ID NO: 155286 - DNA, 75 bp, synthetic construct
  source 1..75: mol_type = other DNA
gattttcggcgctgcccgccattgggcgctggaccctaatctgggcgggctgaccagtacgcatgtgctgaatac

SEQ ID NO: 155287 - DNA, 75 bp, synthetic construct
  source 1..75: mol_type = other DNA
gtcaggaccgctattgctgtgttatgccgtcaggaaatggttgtgcttaaacagagaatgccgggcagcagataa

SEQ ID NO: 155288 - DNA, 75 bp, synthetic construct
  source 1..75: mol_type = other DNA
tgtctggtgattcatcaagcccttatctttatgatcctaatggaagctataatccttataaaaaattagaaaatg

SEQ ID NO: 155289 - DNA, 75 bp, synthetic construct
  source 1..75: mol_type = other DNA
tcgccatcaacaccactgcgggtacggcctctgaaatgacccgtttctgcatcatcactgacgaagcgcgtcata

SEQ ID NO: 155290 - DNA, 75 bp, synthetic construct
  source 1..75: mol_type = other DNA
attaaaaaattcaaactgccgactgacagagtgcatgttcatgttgaagaaggttcgccaaaagaccgcattctg

SEQ ID NO: 155291 - DNA, 75 bp, synthetic construct
  source 1..75: mol_type = other DNA
cgttacgcttaccgactggagtggcaaagccttgtccgagcgcagcaccttacccgtcacttctgtttctcttgt

SEQ ID NO: 155292 - DNA, 75 bp, synthetic construct
  source 1..75: mol_type = other DNA
aacgctggacggtacgcgcggacgagccgcaagcgttccatattgaaggcgtaatgttccagatccgtaacgtga

SEQ ID NO: 155293 - DNA, 75 bp, synthetic construct
  source 1..75: mol_type = other DNA
agcgcagccgggcaacagcaaccgctacccgttccgccgctacttgaatctcgccgtgggcaaccgctgtttatg

SEQ ID NO: 155294 - DNA, 75 bp, synthetic construct
  source 1..75: mol_type = other DNA
gataatagagttatgtcgcattttcagcgtgggatcgaaaagtatgttcatgagtatggactggatgaagaggct

SEQ ID NO: 155295 - DNA, 75 bp, synthetic construct
  source 1..75: mol_type = other DNA
tcgaggagataacactcagaaaaaaacaaaatatacatcagaaataattttaattacatccacaattagagtata

SEQ ID NO: 155296 - DNA, 75 bp, synthetic construct
  source 1..75: mol_type = other DNA
gcatttcccgttttactttggtagccagacactggaaatggcggatcgcggctctattgggcagttgctggtcaa

SEQ ID NO: 155297 - DNA, 75 bp, synthetic construct
  source 1..75: mol_type = other DNA
gcacttcccgttctacttcaacagtcagacgctggaaatggcggatcgtggctcaatagggcaactgttggtcaa

SEQ ID NO: 155298 - DNA, 75 bp, synthetic construct
  source 1..75: mol_type = other DNA
atggatcgcatcgaatatttgaaatggcttatggatgaatcaccttctacgactcagcaacttatggcatggctc

SEQ ID NO: 155299 - DNA, 75 bp, synthetic construct
  source 1..75: mol_type = other DNA
aggcgatgattgacaagttagatcatctacaacgtctcggcataaatacggtctttttccaggtaaagcccgatg

SEQ ID NO: 155300 - DNA, 75 bp, synthetic construct
  source 1..75: mol_type = other DNA
cggatgtcgttaaaccgaccaggacccgcctgtatatcggtatcgccttctataaagtgggtgaaccttcaaaga

SEQ ID NO: 155301 - DNA, 75 bp, synthetic construct
  source 1..75: mol_type = other DNA
gatgtgtaggctgcgggaaagaattcactaatgatgatttaatccaagaaaacggggtgagtattgacgcccatg

SEQ ID NO: 155302 - DNA, 75 bp, synthetic construct
  source 1..75: mol_type = other DNA
cagttaaaggaagaaaactgtaattcgctcttctacccgacaaaatctattgaagaattgttcgaagtaaaagat

SEQ ID NO: 155303 - DNA, 75 bp, synthetic construct
  source 1..75: mol_type = other DNA
caatcgtcgcaacccatgcgcggcatctggctggcgacggtgtcccgtctcgactggcctccggtttcttctgtt

SEQ ID NO: 155304 - DNA, 75 bp, synthetic construct
  source 1..75: mol_type = other DNA
gctgtacccgaaattagcggcacgattctgttccgcgaagattaccttaataagccacagacccaacaagccgtt

SEQ ID NO: 155305 - DNA, 75 bp, synthetic construct
  source 1..75: mol_type = other DNA
cgaagctgaaatcaacctataccgacaaactaccgttgatgattaacccgaaaaccgggcgcgtacatacttctt

SEQ ID NO: 155306 - DNA, 75 bp, synthetic construct
  source 1..75: mol_type = other DNA
aaaaccgctgctggaagatgaaaaggcgctgaaggtcgggcaaaacctgaaatacgatcgcggtattctggcgaa

SEQ ID NO: 155307 - DNA, 75 bp, synthetic construct
  source 1..75: mol_type = other DNA
cgcgcgaagccgaaaaagccgggcgtccggtgctgatcagcactggcgataaagatatggcgcagctggtgacgc

SEQ ID NO: 155308 - DNA, 75 bp, synthetic construct
  source 1..75: mol_type = other DNA
ttgatcgggataacaggtcgttattcattccttatactaagaatggtcgcagcagaactgtgtatctcagtgatg

SEQ ID NO: 155309 - DNA, 75 bp, synthetic construct
  source 1..75: mol_type = other DNA
atccctttactgaaagagaataatcagcggacgcgcttttttgatgctgatgagatcaggcgcattcttgacgct

SEQ ID NO: 155310 - DNA, 75 bp, synthetic construct
  source 1..75: mol_type = other DNA
acagccttgcggaccgttggctgaagcacaaaaccattacttttgaagagattgccggtaaaggtaaaaatcaac

SEQ ID NO: 155311 - DNA, 75 bp, synthetic construct
  source 1..75: mol_type = other DNA
atgagcgtatccggctttatgggatatctgaaagggaaaagcagtccgatgctttacgagcagtctggggatttg

SEQ ID NO: 155312 - DNA, 75 bp, synthetic construct
  source 1..75: mol_type = other DNA
gttctggtgcagagggtactacgtcgatacggtgggtaagaacacggcgaagatacaggattacataaagcacca

SEQ ID NO: 155313 - DNA, 75 bp, synthetic construct
  source 1..75: mol_type = other DNA
aaacgttactatctgggtaatgctgacgaaatcgcggcgaaagctgcggcagtagccaaccagggtaaagcgaag

SEQ ID NO: 155314 - DNA, 75 bp, synthetic construct
  source 1..75: mol_type = other DNA
atggggaacgaaaagagcttagcgcatacccgatggaactgtaaatatcacatagtttttgcgccaaaataccga

SEQ ID NO: 155315 - DNA, 75 bp, synthetic construct
  source 1..75: mol_type = other DNA
gatcttttttgctgtaggcggcatcggctggttgctggcaatgctgaaaaagctgtcaccggcattgcgtacgct

SEQ ID NO: 155316 - DNA, 75 bp, synthetic construct
  source 1..75: mol_type = other DNA
ttgtgggtactgatgggcattggctttattgcctcaatgcttcaccttggttcaccgatgcgcgcctttaactca

SEQ ID NO: 155317 - DNA, 75 bp, synthetic construct
  source 1..75: mol_type = other DNA
cacattaatgaaggcataaaaaaagccggcatcatgccggccaaaaaaaatataaacaagacgataaaaggctaa

SEQ ID NO: 155318 - DNA, 75 bp, synthetic construct
  source 1..75: mol_type = other DNA
gtgatcaggcgcacattaatgaaggcataaaaaaaaggccccgccacacccccccgccaaaaaaaaaaaaaaaaa

SEQ ID NO: 155319 - DNA, 75 bp, synthetic construct
  source 1..75: mol_type = other DNA
tttgggtaggctggctttggacaagtcccttcaaggtcaaggatttggctcaatgcttgtaacacatgcaatgcg

SEQ ID NO: 155320 - DNA, 75 bp, synthetic construct
  source 1..75: mol_type = other DNA
tatatccacatacttgtggagatcccgtcgaaaatgagcgtatcgaggtttatggctatctgaagggtaaacgca

SEQ ID NO: 155321 - DNA, 75 bp, synthetic construct
  source 1..75: mol_type = other DNA
ctacctcgacagtgagacactgcataccagcgcgtatgtactgcgcaaactgaaatccgtcattaccagtaagta

SEQ ID NO: 155322 - DNA, 75 bp, synthetic construct
  source 1..75: mol_type = other DNA
tgcaggcatttatcggggagctggacggcggcgtatttgaaacaaaaatcggcgcagttctaagtgaagtcgctt

SEQ ID NO: 155323 - DNA, 75 bp, synthetic construct
  source 1..75: mol_type = other DNA
caagctatgatcttgtccgggcagcggagatgctgactgataagggggcaaattgtaccggtaatgatttattgg

SEQ ID NO: 155324 - DNA, 75 bp, synthetic construct
  source 1..75: mol_type = other DNA
taagtctgttcagcgtgaaatcatcgatgaggccatcatgacccgcgaagaagctcttaagcgtttgtctaaaat

SEQ ID NO: 155325 - DNA, 75 bp, synthetic construct
  source 1..75: mol_type = other DNA
taataatgttaaactagcagttgatagtattcttaatcagaccgttaataaccatttatatatttatgttgatgg

SEQ ID NO: 155326 - DNA, 75 bp, synthetic construct
  source 1..75: mol_type = other DNA
gaactcgcgcatggaagtactagcttctctaaaaaggggcaaattgaccccttagaagaagttaagtctagagca

SEQ ID NO: 155327 - DNA, 75 bp, synthetic construct
  source 1..75: mol_type = other DNA
gcatgtggtgaaggacttcaacctggaaattgccgataaagagttcatcgtgtttgtcggccgtcgggctgcggt

SEQ ID NO: 155328 - DNA, 75 bp, synthetic construct
  source 1..75: mol_type = other DNA
gaaattgccgataaagagttcattgtatttgtcggtccgtcaggctgcggtaaatcgactacgctgcgcatgatt

SEQ ID NO: 155329 - DNA, 75 bp, synthetic construct
  source 1..75: mol_type = other DNA
agctaatcaacttccagaaaagcaggtttaccacggtatcaggccagcgtgttcctgttctggctagtttccttg

SEQ ID NO: 155330 - DNA, 75 bp, synthetic construct
  source 1..75: mol_type = other DNA
ggaacaacgcgcaaccactttcggggatgacgcaaggatcataattgcttccactccaaccgctcgtgatggggc

SEQ ID NO: 155331 - DNA, 75 bp, synthetic construct
  source 1..75: mol_type = other DNA
cttcgatgatcttaacgaagaccgcacagccgacgaactggaaacgctgaaaactgatattagcttagacaatat

SEQ ID NO: 155332 - DNA, 75 bp, synthetic construct
  source 1..75: mol_type = other DNA
tagagttgtttgacgagcttgtttcatgtgatctgttaactaaacgaaacgcttttggcaagttagaaataaatc

SEQ ID NO: 155333 - DNA, 75 bp, synthetic construct
  source 1..75: mol_type = other DNA
ggaaactgattatctcttcactctagaagagtacagtgcggagttaggtggtctggttattgactgggcccctga

SEQ ID NO: 155334 - DNA, 75 bp, synthetic construct
  source 1..75: mol_type = other DNA
aagctaatatggtgctggtagatggtcctcaagctggggataaagttaaattgctgtcattccagaaaggcatga

SEQ ID NO: 155335 - DNA, 75 bp, synthetic construct
  source 1..75: mol_type = other DNA
gttataagcagaggataagccgggtacttaaccgcctggggtacgccggtccggccacaggcaccttcagtatga

SEQ ID NO: 155336 - DNA, 75 bp, synthetic construct
  source 1..75: mol_type = other DNA
catcagacccggattacattcgccacgcaccgtcaaggcttgagattttaagtaaagcattcaccactattatta

SEQ ID NO: 155337 - DNA, 75 bp, synthetic construct
  source 1..75: mol_type = other DNA
ttgcgtaacccggagcaggtttccgtcgctctacgcggcaagattgccgccgctcttgatgaactgggctatatt

SEQ ID NO: 155338 - DNA, 75 bp, synthetic construct
  source 1..75: mol_type = other DNA
gagccaggcgtagcggcatatattccggttgctcatgattatcttgatgcgcccgatcaaatctctcgcgagcgt

SEQ ID NO: 155339 - DNA, 75 bp, synthetic construct
  source 1..75: mol_type = other DNA
gcagcaaccggcggcggaagagttgttagggctgttcaaaaagtatgagttcaaacgctggactgctgatgtcga

SEQ ID NO: 155340 - DNA, 75 bp, synthetic construct
  source 1..75: mol_type = other DNA
tatgctcggtcaatcaccacagatggaacaggtgcggcagactattttgctgtatgcccgctccagtgcggcggt

SEQ ID NO: 155341 - DNA, 75 bp, synthetic construct
  source 1..75: mol_type = other DNA
ccgtcggatttaataactttgaagcggcacggcagatgaccgccgctatcattgcccgtgggcatcgtcatgtgg

SEQ ID NO: 155342 - DNA, 75 bp, synthetic construct
  source 1..75: mol_type = other DNA
tgctgcaacgtgcccggattccctccgggaagcctcagctactctatcgcgtatactggctgcatcagggactat

SEQ ID NO: 155343 - DNA, 75 bp, synthetic construct
  source 1..75: mol_type = other DNA
ctgcgtgaacttcctcaagcagaacgccgccgactcgcctgacgcatcgtttaatcgcgtatttgaggatgatga

SEQ ID NO: 155344 - DNA, 75 bp, synthetic construct
  source 1..75: mol_type = other DNA
tacggttataaaccggaaatggagcaagaacgcctcgaatccatgctctcatggaatatcgacggactgatcctc

SEQ ID NO: 155345 - DNA, 75 bp, synthetic construct
  source 1..75: mol_type = other DNA
acgtaccatcatcaaacagaagggatacgaacaggcgatgctggatgccggcctggtgccgtatagcgtgatggt

SEQ ID NO: 155346 - DNA, 75 bp, synthetic construct
  source 1..75: mol_type = other DNA
aagaacgcctcgaatcaatgctctcatggaatatcgacggcctgatcctcactgaacgtacccacactccacgca

SEQ ID NO: 155347 - DNA, 75 bp, synthetic construct
  source 1..75: mol_type = other DNA
gagtcactgatttatctgttgttttctgtgcttgttacatggtgttgcggatatacagtgaaaaacaccctgggg

SEQ ID NO: 155348 - DNA, 75 bp, synthetic construct
  source 1..75: mol_type = other DNA
attggcattatgcgaattatcgaagcgctgaaaaatatcgaatctttatttactggcgaagagtgccgtaaataa

SEQ ID NO: 155349 - DNA, 75 bp, synthetic construct
  source 1..75: mol_type = other DNA
gtggtctgcgccattgggattatgcgaattattcattcagtaaaaaagattgaacgctttttcactggcgaataa

SEQ ID NO: 155350 - DNA, 75 bp, synthetic construct
  source 1..75: mol_type = other DNA
agctccagtgccggagtcactactgattcggacacgcttccaccgccaccgcccgaaatccagcttgttctgtaa

SEQ ID NO: 155351 - DNA, 75 bp, synthetic construct
  source 1..75: mol_type = other DNA
tcatcgatacttccggctcaatgagaggagaatcgatacattcagtgaatgtaggtgtgcaggctatgctgagtg

SEQ ID NO: 155352 - DNA, 75 bp, synthetic construct
  source 1..75: mol_type = other DNA
tctactgggcggcggaagaccgcattggtcgccactattcgtggcagccctttgaccgtggcctgcatctgctgg

SEQ ID NO: 155353 - DNA, 75 bp, synthetic construct
  source 1..75: mol_type = other DNA
gtgaatgttaactttttcgtcacctgcattggtgatgcttttaaatcccggatggctcaaaacagcgtgctgtta

SEQ ID NO: 155354 - DNA, 75 bp, synthetic construct
  source 1..75: mol_type = other DNA
aactacgaagagatcctgccaccgctgatggcgggcctgaaacaggccgggctgaaagtcggtacgccattcttt

SEQ ID NO: 155355 - DNA, 75 bp, synthetic construct
  source 1..75: mol_type = other DNA
gtccgcgtccgcgtacccaggcgctgttgcgtttcctggccgaccactcgcgctctaaagatacggtgctgaaag

SEQ ID NO: 155356 - DNA, 75 bp, synthetic construct
  source 1..75: mol_type = other DNA
aagttgcgattgacggaccaaacatctatctgttgtcactgaatccgctttacaaacccatcgaactgaatggtg

SEQ ID NO: 155357 - DNA, 75 bp, synthetic construct
  source 1..75: mol_type = other DNA
gtggcaatggtcagacgctgaatttacgtgttatcggcggacgttatcattacacggcggcagggcaactggctc

SEQ ID NO: 155358 - DNA, 75 bp, synthetic construct
  source 1..75: mol_type = other DNA
gcgtggtgtggtgattgaaccgcaggcgcaggtgatttatcagggcgtgcagcaggatgattttaccgccgctaa

SEQ ID NO: 155359 - DNA, 75 bp, synthetic construct
  source 1..75: mol_type = other DNA
gcgaaaaaacatctgcgtccggtagcgcgccagccgctggaagtggttcgtgacaaactgactgcgattactgac

SEQ ID NO: 155360 - DNA, 75 bp, synthetic construct
  source 1..75: mol_type = other DNA
gacatgcttcagtacgtcagggaggctgttgattcaccctctccaaaagttatttttgttcatatgatggggtca

SEQ ID NO: 155361 - DNA, 75 bp, synthetic construct
  source 1..75: mol_type = other DNA
caaaacgctggctaagcttgccaatcatgcggcaaaaaaatggcagcggcagacgggggggtggtggatttatca

SEQ ID NO: 155362 - DNA, 75 bp, synthetic construct
  source 1..75: mol_type = other DNA
ttctgattatttcggtggcctgcgccattgggattatgcgaattattcattcagtgaaaaagattgaacgttatt

SEQ ID NO: 155363 - DNA, 75 bp, synthetic construct
  source 1..75: mol_type = other DNA
ccgcattcccggaggcgttgtctggacgctggcatttgcccctttgattggatacatacttgagatgtggactgc

SEQ ID NO: 155364 - DNA, 75 bp, synthetic construct
  source 1..75: mol_type = other DNA
tattagcgtatctgggttacgaccgctccagccagcaagctattaaaaacgcttacgaagcggatgtgcagcagt

SEQ ID NO: 155365 - DNA, 75 bp, synthetic construct
  source 1..75: mol_type = other DNA
cagtgaactgcatattgccccgtcaacgtattaccactgtcagcaacaggacatcatcctgataaacgcagtgcc

SEQ ID NO: 155366 - DNA, 75 bp, synthetic construct
  source 1..75: mol_type = other DNA
gatgaggcattctgcgatctgacaggtgtgcgtaattgtcgcgatctgactgattttggcagagaaattcgcgca

SEQ ID NO: 155367 - DNA, 75 bp, synthetic construct
  source 1..75: mol_type = other DNA
acatcatccggataaacgcagtgcccgtgcgcagcgcgatactggctgaagaaagagatacagcgcgtatacgat

SEQ ID NO: 155368 - DNA, 75 bp, synthetic construct
  source 1..75: mol_type = other DNA
gccagaagctggaagaactggtcacgcagattcgcgcacgctacccgtctgtactactgatggcggatatagcaa

SEQ ID NO: 155369 - DNA, 75 bp, synthetic construct
  source 1..75: mol_type = other DNA
tatcaaacgcgattaccctggcagtgaggtgtttatcacggccactctccgggaagtggatgagctgatgaccgt

SEQ ID NO: 155370 - DNA, 75 bp, synthetic construct
  source 1..75: mol_type = other DNA
taagagaaaactgtatggaaatacacacaaagtatgtcaatatgccaatgttagaattgcctattggtgttaact

SEQ ID NO: 155371 - DNA, 75 bp, synthetic construct
  source 1..75: mol_type = other DNA
ctggtgcagagggtattacgtcgatacggtgggtaagaacacggcgaagatacaggattacataaagcaccagct

SEQ ID NO: 155372 - DNA, 75 bp, synthetic construct
  source 1..75: mol_type = other DNA
agggaaaagcagtctgatgctttacgagcagtttgatgatttgaaattcaaatacaggaacaggaagttctggtg

SEQ ID NO: 155373 - DNA, 75 bp, synthetic construct
  source 1..75: mol_type = other DNA
cggtagcgcaggtagctgcatgttggtgctgcaaacggtgctgcccgcgctgtggtttgccgacgggtcttcgcg

SEQ ID NO: 155374 - DNA, 75 bp, synthetic construct
  source 1..75: mol_type = other DNA
ccccctttttcctgccggtccccggacagagctcaaaggaagtcgccaccggctccgctttacccggccatgcgg

SEQ ID NO: 155375 - DNA, 75 bp, synthetic construct
  source 1..75: mol_type = other DNA
ccatatgcttgtggaaatcccacccaaaatgagcgtatccggctttatgggatatctgaaagggaaaagcagtct

SEQ ID NO: 155376 - DNA, 75 bp, synthetic construct
  source 1..75: mol_type = other DNA
gagtggaaaagcgtacggattctggaagcagagtgctgcgcagatcatatccatatgcttgtggaaatcccaccc

SEQ ID NO: 155377 - DNA, 75 bp, synthetic construct
  source 1..75: mol_type = other DNA
tgctgaccaatatcgcggtggtggagcgtttcttgccagtgcggtttactctggctgaaacagatggcgtaacgc

SEQ ID NO: 155378 - DNA, 75 bp, synthetic construct
  source 1..75: mol_type = other DNA
gctggcgcggatggggattcagcagcaaacaacgctgttgcgccacggtttttaccctgctggtggcggtgtggt

SEQ ID NO: 155379 - DNA, 75 bp, synthetic construct
  source 1..75: mol_type = other DNA
agcccggcggcggtgggggaatatctcgccgaccagctggtactgccgatggcgctggcgggcgcgggagaattt

SEQ ID NO: 155380 - DNA, 75 bp, synthetic construct
  source 1..75: mol_type = other DNA
cctgcatgagcagaatattcataacctgccgcgtgaccagggaccgggtaataccgtttcgcttgaagtcgaaag

SEQ ID NO: 155381 - DNA, 75 bp, synthetic construct
  source 1..75: mol_type = other DNA
tgctgaccaatatcgcggtggtggaacggttcttacctgtgcggtttactctgactgaaacagacgatgtaacgc

SEQ ID NO: 155382 - DNA, 75 bp, synthetic construct
  source 1..75: mol_type = other DNA
catctgaccgcggtaaaagcggctgcggaaatttgtagggcaacggtggaaggcgcggagctgggatcgcagcgt

SEQ ID NO: 155383 - DNA, 75 bp, synthetic construct
  source 1..75: mol_type = other DNA
tgctgcctgaattaaccacgcgtcagccagtgatggtcgtcggcgcggcggtcattgatgtgatcgccgacgctt

SEQ ID NO: 155384 - DNA, 75 bp, synthetic construct
  source 1..75: mol_type = other DNA
gccgaaggcgataacggctggtgtctggcgctggttgagcctgatggtgaacgcacgtttatgtcgttcagtggt

SEQ ID NO: 155385 - DNA, 75 bp, synthetic construct
  source 1..75: mol_type = other DNA
ttgccgtggcgttaaatcgcctcggtatcgaagcgggtaatgccctgccgctcggccagggtgtgtgggcggaaa

SEQ ID NO: 155386 - DNA, 75 bp, synthetic construct
  source 1..75: mol_type = other DNA
cgggctgaaagtcggtacgccattctttgttcgttatggtcgcgtgaagattgaagatcagatcggtgagatcct

SEQ ID NO: 155387 - DNA, 75 bp, synthetic construct
  source 1..75: mol_type = other DNA
aaaacccacatcgtgcggacgtattaacagaactgcgtcgcagcaccgtggcccgcgtttgtaccggtcgtgccg

SEQ ID NO: 155388 - DNA, 75 bp, synthetic construct
  source 1..75: mol_type = other DNA
ggtgcagttctcagtgaagtcgcttccggtgtgatgaacacgaaaaccaaaggtaaggtctcactcaacctggaa

SEQ ID NO: 155389 - DNA, 75 bp, synthetic construct
  source 1..75: mol_type = other DNA
gatcacggcgaagatacaggcttacataaagcaccagcttgaagaggataaaatgggagagcagttatcgattcc

SEQ ID NO: 155390 - DNA, 75 bp, synthetic construct
  source 1..75: mol_type = other DNA
ggtactatgtcgatacggtgggtaagaacacggcgaagatacaggattacataaagcaccagcttgaagaggata

SEQ ID NO: 155391 - DNA, 75 bp, synthetic construct
  source 1..75: mol_type = other DNA
aaaatattggcgatgcgcctgaacgaatgatgtacagacatatgcctctgatacgtcttgttgccagtgagttgt

SEQ ID NO: 155392 - DNA, 75 bp, synthetic construct
  source 1..75: mol_type = other DNA
cactggcggatgccgtattactgggcaatgcagtggcgtcgtgggttgtcgggcatcggggcggtgattgtgcgc

SEQ ID NO: 155393 - DNA, 75 bp, synthetic construct
  source 1..75: mol_type = other DNA
agatatcacgacgctcggcaagcaatggcaggagaaatttgtcgcaccgctgatagtccgtctcgataaagaagg

SEQ ID NO: 155394 - DNA, 75 bp, synthetic construct
  source 1..75: mol_type = other DNA
ggcgctgttctcagtgaagtcgcttccggtgtgatgaacacgaaaaccaaaggtaaggtctcgctcaacctggaa

SEQ ID NO: 155395 - DNA, 75 bp, synthetic construct
  source 1..75: mol_type = other DNA
tccaatggtggcaacccgacacgtgttggcggcgtgctgccggaaatgtctgcggcgatttccggacaggccagc

SEQ ID NO: 155396 - DNA, 75 bp, synthetic construct
  source 1..75: mol_type = other DNA
cgggaagaccttacccccgccgactggagcaatctggagctgtattgtgttaactactccatataccgcaaagcc

SEQ ID NO: 155397 - DNA, 75 bp, synthetic construct
  source 1..75: mol_type = other DNA
gaaggaaagcgcccaggctctctatacgttcatagagtcattaccgccaaatcctataccgatatcccttactcg

SEQ ID NO: 155398 - DNA, 75 bp, synthetic construct
  source 1..75: mol_type = other DNA
tctggcgaagcatattttaccattgtttccggcccatacctgctatgtggagccgttctgcggggcagctgcgct

SEQ ID NO: 155399 - DNA, 75 bp, synthetic construct
  source 1..75: mol_type = other DNA
tttccggcgcatgaatgttatgtggagccgttctgtggggcagcagcgctctattttcttaagtcacccggcagg

SEQ ID NO: 155400 - DNA, 75 bp, synthetic construct
  source 1..75: mol_type = other DNA
cgatgcgctggaaaatcctggcggcaaatatcagcataacggtaaagagcaaacgtatccgaatatcaaaatgat

SEQ ID NO: 155401 - DNA, 75 bp, synthetic construct
  source 1..75: mol_type = other DNA
agggcgcggttttgcggtggtcgcgggtgaagtgcgtaatctggctcagcgcagcgctcaggcggctcgtgaaat

SEQ ID NO: 155402 - DNA, 75 bp, synthetic construct
  source 1..75: mol_type = other DNA
catcgacggcattgctttccagactaatattctggccttgaatgcggcggtcgaagcagcacgcgcgggtgaaca

SEQ ID NO: 155403 - DNA, 75 bp, synthetic construct
  source 1..75: mol_type = other DNA
gctggtagcgccaatgaatcgcctgattgacagcattcgtcatattgcaggcggcgatctggtgaaaccgattga

SEQ ID NO: 155404 - DNA, 75 bp, synthetic construct
  source 1..75: mol_type = other DNA
gtagcgctcaggcggcgcgtgaaattaagactctgattgaagactcggttggcaaagtggatgttggctctacgc

SEQ ID NO: 155405 - DNA, 75 bp, synthetic construct
  source 1..75: mol_type = other DNA
gagcacagcggctgctacggagatcaaacgtaattacgatatctatcacaatgcactggcggagctgatccagtt

SEQ ID NO: 155406 - DNA, 75 bp, synthetic construct
  source 1..75: mol_type = other DNA
gaagcgttggcggtaaaaacggtggcaccaatggtgtcgcgtaaagcggtagtggctgatagcggggataactgg

SEQ ID NO: 155407 - DNA, 75 bp, synthetic construct
  source 1..75: mol_type = other DNA
cgctggcgggaaattaaaaagcaatttacccatgcttgtggattgaaaaatatctggcaaccacgtttttgggag

SEQ ID NO: 155408 - DNA, 75 bp, synthetic construct
  source 1..75: mol_type = other DNA
tgctccgtcacgccattattaaagttaagcgagacaggccttttgaaatcaacgcctgggtcgttttgccagagc

SEQ ID NO: 155409 - DNA, 75 bp, synthetic construct
  source 1..75: mol_type = other DNA
gcattaaatgccgttatcaaccaatcggtgccagagtcttttattaatcatccagcctttaaaaagaactgcgat

SEQ ID NO: 155410 - DNA, 75 bp, synthetic construct
  source 1..75: mol_type = other DNA
atggtgtgtgttttctgtatatagacctgtatcagtggtatgcagacatgcaacttgattccatcagacgccgtt

SEQ ID NO: 155411 - DNA, 75 bp, synthetic construct
  source 1..75: mol_type = other DNA
tgggtaaggttaatcgcggcctcctgtcagagatggcagcagcgcacatgaatccattactgatacaaccggagt

SEQ ID NO: 155412 - DNA, 75 bp, synthetic construct
  source 1..75: mol_type = other DNA
gaccagcagtgtgaatctgtccggcagcgtttttatgttggatactttaaccatcatgtctgggaaagcctgcgc

SEQ ID NO: 155413 - DNA, 75 bp, synthetic construct
  source 1..75: mol_type = other DNA
cacgcttcaacctgctacggattgaagaagaactgtcagcggcacacctgcggctttccagaacggtgatagaac

SEQ ID NO: 155414 - DNA, 75 bp, synthetic construct
  source 1..75: mol_type = other DNA
cgttagcccggcaggcgtgtggcgtaaccgatcacacgatccgctcggttccgatacccgaggcgcggcagccta

SEQ ID NO: 155415 - DNA, 75 bp, synthetic construct
  source 1..75: mol_type = other DNA
tggcggcaaggtggcagagcacagcttcggtacctccaccacatccccgccacgcttcaacctgctacgtattga

SEQ ID NO: 155416 - DNA, 75 bp, synthetic construct
  source 1..75: mol_type = other DNA
tagctttaagaaaaactgcgacttgatttgtattcatcgtcttgatgttctggccaagttcaaggatcacgaaga

SEQ ID NO: 155417 - DNA, 75 bp, synthetic construct
  source 1..75: mol_type = other DNA
cacttgttgcccatggctttgttagtaaacgcgacttggacaacacaagcttttatattcgcgagtctggatctg

SEQ ID NO: 155418 - DNA, 75 bp, synthetic construct
  source 1..75: mol_type = other DNA
atatgaattagttcataaatttaccgataaaaatgctgatgatatgatcaaggaaataattaccaatgaactggc

SEQ ID NO: 155419 - DNA, 75 bp, synthetic construct
  source 1..75: mol_type = other DNA
atgagcaagattgactatcaggcactgcgtgccaaggcagaaaaagcaacgtgtggtgtgtggtcgctcgaatat

SEQ ID NO: 155420 - DNA, 75 bp, synthetic construct
  source 1..75: mol_type = other DNA
tgcgtgaggcggcggaacgtgcaattccagcaatggaacgcctgttaatgttgccagctgatgatttgttaagtg

SEQ ID NO: 155421 - DNA, 75 bp, synthetic construct
  source 1..75: mol_type = other DNA
tcattacaggggcagggatggggagcaacactggttgctcatgccatgaaagtcgtctggtcagcctctttagcg

SEQ ID NO: 155422 - DNA, 75 bp, synthetic construct
  source 1..75: mol_type = other DNA
cctttcgatcagcgaattaatgcgcttaacgattttatgaagcacttttcgccagaaaccgtgctggcactactg

SEQ ID NO: 155423 - DNA, 75 bp, synthetic construct
  source 1..75: mol_type = other DNA
gcagccaatccggctactgtgctggcactgctggatgaacgggaaagaaaccagcaatacatcaaaagccgtgat

SEQ ID NO: 155424 - DNA, 75 bp, synthetic construct
  source 1..75: mol_type = other DNA
ataccgtaacgcaaccttatcaggcacagacttcaaccgaatgtgggaacaatggaaatctatccgcgccgctgg

SEQ ID NO: 155425 - DNA, 75 bp, synthetic construct
  source 1..75: mol_type = other DNA
ggagcgatcaattgaagagcttcagtttattccctatgccagccgtgaccattccgaagtgctgagcttcgagga

SEQ ID NO: 155426 - DNA, 75 bp, synthetic construct
  source 1..75: mol_type = other DNA
cactttaataacagtgaaccatcttgaagctttacttactgttatgtcgactactcttgtcgcttatgttccata

SEQ ID NO: 155427 - DNA, 75 bp, synthetic construct
  source 1..75: mol_type = other DNA
gaaaggcaacacgctggcggcagaggtaccaggcgtaaaaatgggcggactgaacagcctgtgcgcccagtatat

SEQ ID NO: 155428 - DNA, 75 bp, synthetic construct
  source 1..75: mol_type = other DNA
caacactggttgctcatgccatgaaagtcgtctggtcagcctctttagcggtaggtattcacggtcttttgtcga

SEQ ID NO: 155429 - DNA, 75 bp, synthetic construct
  source 1..75: mol_type = other DNA
acgacgctggctgatagaggaatatcataaggcgtggaaaagtggtggtacatgtgtggaatcactgagaatgca

SEQ ID NO: 155430 - DNA, 75 bp, synthetic construct
  source 1..75: mol_type = other DNA
ctactgtcagccggaatgaagtgttctgggactggctcagccgggaggctgatttaagtgactgccgctggctga

SEQ ID NO: 155431 - DNA, 75 bp, synthetic construct
  source 1..75: mol_type = other DNA
cccgctcactggatgcgatcactatccaggggcaacgtctgccggatgccgtgcaggtttattccgatgttgaag

SEQ ID NO: 155432 - DNA, 75 bp, synthetic construct
  source 1..75: mol_type = other DNA
ccgggcatttgatgaaggggtaacgttcttcgacgcagctgaagcctacggcccgtttgaagtcgaaaaaattct

SEQ ID NO: 155433 - DNA, 75 bp, synthetic construct
  source 1..75: mol_type = other DNA
gattcgaacggcagtagaacgcggtgtgaccttcttcgatactgccgaagtttacggcccatatctgaatgaaga

SEQ ID NO: 155434 - DNA, 75 bp, synthetic construct
  source 1..75: mol_type = other DNA
atggatcagaataatattggtagcggttcaaccgttgctgagctgatgcagagtgccagtatttcgctgaaacag

SEQ ID NO: 155435 - DNA, 75 bp, synthetic construct
  source 1..75: mol_type = other DNA
gcggtgccagcgaaatcgctaccggcaataacgatctctcttcgcgcaccgagcaacaggccgcttcgctggaag

SEQ ID NO: 155436 - DNA, 75 bp, synthetic construct
  source 1..75: mol_type = other DNA
gctgatgcgtaccgtcggtgatgtgcgcaacggggccaatgccatctatagcggtgccagcgaaatcgctaccgg

SEQ ID NO: 155437 - DNA, 75 bp, synthetic construct
  source 1..75: mol_type = other DNA
ctcactatccgttggagcaggccggtcgtgctttcagtgactgggcaaatgatcccggtgcgtataccaaaatcc

SEQ ID NO: 155438 - DNA, 75 bp, synthetic construct
  source 1..75: mol_type = other DNA
cagattttcacgatgattaccaaacggtaatggcatacaaagtttctgaagtcatcgctgcaatccgcgccgcag

SEQ ID NO: 155439 - DNA, 75 bp, synthetic construct
  source 1..75: mol_type = other DNA
gttgaggtcatgagaattgctggagatgcccagctttctaccccatgcactgacagcatcataaacagcattgca

SEQ ID NO: 155440 - DNA, 75 bp, synthetic construct
  source 1..75: mol_type = other DNA
cgatgagcaatggtctaacgcagaacgcggtaagttttatcggccattgaaaacccaggcttcggtgcgtattga

SEQ ID NO: 155441 - DNA, 75 bp, synthetic construct
  source 1..75: mol_type = other DNA
atcagtttcagaaaaatatggtgcaaaagatgagcagttagccagagagatggccgggcaggctaaagggaagaa

SEQ ID NO: 155442 - DNA, 75 bp, synthetic construct
  source 1..75: mol_type = other DNA
atccaagcttagcgcgcacgggagaggtgaagggcttgtatgtcccagaattacgttcagacagagatgccatct

SEQ ID NO: 155443 - DNA, 75 bp, synthetic construct
  source 1..75: mol_type = other DNA
ccctgctgctgatctgcatggcagtgatgttttatctggcagctgacaatacaccacagattaaccgcagcgacc

SEQ ID NO: 155444 - DNA, 75 bp, synthetic construct
  source 1..75: mol_type = other DNA
tcgtaatgttattgtaatatttactgagggattttcatctgaaattatgggcaacgccaaaccaggagcattttc

SEQ ID NO: 155445 - DNA, 75 bp, synthetic construct
  source 1..75: mol_type = other DNA
aatcttttttaaaaacaagtgtttttattaaccctataggaaataactacagtttcaaaggccgtaatgttattg

SEQ ID NO: 155446 - DNA, 75 bp, synthetic construct
  source 1..75: mol_type = other DNA
ttctggtgcagagggtattacgtcgatacggtgggtaagaacacggcgaagatacaggattacataaagcactag

SEQ ID NO: 155447 - DNA, 75 bp, synthetic construct
  source 1..75: mol_type = other DNA
atgtcacgcatctttgcttactgtcgtgtatcagttgatgactccaccaatgagaaccagattgaagccatcaag

SEQ ID NO: 155448 - DNA, 75 bp, synthetic construct
  source 1..75: mol_type = other DNA
ttgtcatcgaacactatggtaggagaataccagtctggaggaggaataaccgttgaaacttggtcaatcactaca

SEQ ID NO: 155449 - DNA, 75 bp, synthetic construct
  source 1..75: mol_type = other DNA
gcgatcgttacgagtttacaaaagacagcacggaagattccgttttccacgtaacaataaatggcgataaatcat

SEQ ID NO: 155450 - DNA, 75 bp, synthetic construct
  source 1..75: mol_type = other DNA
gcgatcgttacgactttacaaaagacagcacggaagattccgttttccacataacaattaatggtgataaatcat

SEQ ID NO: 155451 - DNA, 75 bp, synthetic construct
  source 1..75: mol_type = other DNA
ttctgaatgctggattgtcacaaacctgcacgggtacggggcaatgaatggcgatcgttacgagtttacaaaaga

SEQ ID NO: 155452 - DNA, 75 bp, synthetic construct
  source 1..75: mol_type = other DNA
cagcacggaagattccgttttccacataacaattaatgctgataaatcatcggtttatgaatcaatcactggcgt

SEQ ID NO: 155453 - DNA, 75 bp, synthetic construct
  source 1..75: mol_type = other DNA
aacagggtctacaacgtgttaaagcacaaggtaaggtgttaggccgccctgtagctaaaaacactacacaggcgg

SEQ ID NO: 155454 - DNA, 75 bp, synthetic construct
  source 1..75: mol_type = other DNA
aggacagcaagcattacgtattattatggcatcagatcatcttcctacagataaagaatctgtctactggcttaa

SEQ ID NO: 155455 - DNA, 75 bp, synthetic construct
  source 1..75: mol_type = other DNA
actgttctaccgaccgaaggcactgcttgaaggccgcaagggggctgaagaaggcatcagcctgcagagccgccc

SEQ ID NO: 155456 - DNA, 75 bp, synthetic construct
  source 1..75: mol_type = other DNA
gaaaccgaatggtcagcagacgctgcgtattatcatggcctcagaccatctgccgaaggacaaggaatcggtgta

SEQ ID NO: 155457 - DNA, 75 bp, synthetic construct
  source 1..75: mol_type = other DNA
gtgagtaagcgtaacgcagtaacgacgtttttcgctaaccggatagcaaaaatgctggggatgaccctggcgctg

SEQ ID NO: 155458 - DNA, 75 bp, synthetic construct
  source 1..75: mol_type = other DNA
gtgagtaagcgtaacgcagtaacgacgtttttcactaaccgggtgacaaaagcactgggaatgactctggcgctg

SEQ ID NO: 155459 - DNA, 75 bp, synthetic construct
  source 1..75: mol_type = other DNA
tgtcaaaaggaatggttggtaagctatgtgccacattagttctgttaatgggatctcatgctgcactggctactc

SEQ ID NO: 155460 - DNA, 75 bp, synthetic construct
  source 1..75: mol_type = other DNA
ggcgaaacgcagcggtgtggcggtatcggcgctgcatttctatgaaagtaaagggttgattaccagtatccgtaa

SEQ ID NO: 155461 - DNA, 75 bp, synthetic construct
  source 1..75: mol_type = other DNA
catagtatttgcgccaaaataccgaagacaggtgttctacagagagaagcgtagagcaacaggcagtattttgag

SEQ ID NO: 155462 - DNA, 75 bp, synthetic construct
  source 1..75: mol_type = other DNA
catagtatttgcgccaaaataccgaagacaggtgttctacagagagaagcgtagagcaaaaggccgtattttgag

SEQ ID NO: 155463 - DNA, 75 bp, synthetic construct
  source 1..75: mol_type = other DNA
agtttttcactaacagagtgacaaaagtgctggggatgactctggcactgatgatggccagtcagagtgcgatgg

SEQ ID NO: 155464 - DNA, 75 bp, synthetic construct
  source 1..75: mol_type = other DNA
gtgagtaagcgtaacgcagtaacgacgtttttcactaaccgggtgacaaaagccctggggatgtccctggcgctg

SEQ ID NO: 155465 - DNA, 75 bp, synthetic construct
  source 1..75: mol_type = other DNA
cacagccgttcagggaattattcggacataaagtatcctgttatttatcaacattgcttaagctggatcggtttc

SEQ ID NO: 155466 - DNA, 75 bp, synthetic construct
  source 1..75: mol_type = other DNA
gatacacagcagataacccaggcactggaaacaattaaaatcgtcggtgaacgttactcgcctgagcaccaggca

SEQ ID NO: 155467 - DNA, 75 bp, synthetic construct
  source 1..75: mol_type = other DNA
cgcgtggtgattgcgactaaatttggttttaccttcggcgatgataataagcagcagattctaaacagccgcccg

SEQ ID NO: 155468 - DNA, 75 bp, synthetic construct
  source 1..75: mol_type = other DNA
aagccaatgaaaaactggtcaccttgttaggtgaactggctgcggagaaaggggtaacgtctgcacaaatcgcac

SEQ ID NO: 155469 - DNA, 75 bp, synthetic construct
  source 1..75: mol_type = other DNA
caatcgggcgaatttataacacggtttatcaacgttgccgtcagcaacgccagttaatcatcgacaacttcccca

SEQ ID NO: 155470 - DNA, 75 bp, synthetic construct
  source 1..75: mol_type = other DNA
tctccgcggcgttaaaaataatcgccacggggatcgccttaccaccgaataaaatcacttctcaacaactggatg

SEQ ID NO: 155471 - DNA, 75 bp, synthetic construct
  source 1..75: mol_type = other DNA
atgcaaaaacgttatctgggtaaatcccgactcgaagtatccgcgcttgggctcggttgcatgggcttaagccac

SEQ ID NO: 155472 - DNA, 75 bp, synthetic construct
  source 1..75: mol_type = other DNA
atgaacctgtttaatcccgacaggttgattacttttcctgccgatgatccgcgactggtgaaacgactgcaaaac

SEQ ID NO: 155473 - DNA, 75 bp, synthetic construct
  source 1..75: mol_type = other DNA
atgtcggaatatcgtcgttattacatcaaagggggaacatggtttttcacggtaaatttacgcaatcgtcgaagc

SEQ ID NO: 155474 - DNA, 75 bp, synthetic construct
  source 1..75: mol_type = other DNA
aagctgtaggcggtcaaaccgctgctgctcgcctgtgtggcctatcgaacgttgctattcacaagtgggtgaaga

SEQ ID NO: 155475 - DNA, 75 bp, synthetic construct
  source 1..75: mol_type = other DNA
accggtgggttgcttttcctatggggctagatccggactgctggcgggtgcgccacgttcgctttcatcacggtt

SEQ ID NO: 155476 - DNA, 75 bp, synthetic construct
  source 1..75: mol_type = other DNA
atcatctgtttcctcactggcatcatcgccattatccggcgctaagccgcattattgcacaaattgccagccagc

SEQ ID NO: 155477 - DNA, 75 bp, synthetic construct
  source 1..75: mol_type = other DNA
tttgtgatgttgattatcggaacgcactgggcgaaggggcatacgcagttaccgccggaagagggcaaaatggta

SEQ ID NO: 155478 - DNA, 75 bp, synthetic construct
  source 1..75: mol_type = other DNA
gctttcggtagagacggtggactcaaaagtgctgaatctggcgcgggaagatattgtctggcattccgtcagcga

SEQ ID NO: 155479 - DNA, 75 bp, synthetic construct
  source 1..75: mol_type = other DNA
tgccaatggtaggcgtcgacccggcgctggtactttgttatcgcgatgaatataaactggctctgggcgaggaac

SEQ ID NO: 155480 - DNA, 75 bp, synthetic construct
  source 1..75: mol_type = other DNA
gtcccctcgctacaacaacaaatggtggggcatcgctcggcaaacatgacgctggaacagcttgaagctctcaat

SEQ ID NO: 155481 - DNA, 75 bp, synthetic construct
  source 1..75: mol_type = other DNA
ccaaatggtaaagcccagcacatcaaaggattcctcaatcgttttgcgaagacggcgaaaaagacggcggatttc

SEQ ID NO: 155482 - DNA, 75 bp, synthetic construct
  source 1..75: mol_type = other DNA
gaagatattgtctggcattccgtcagtgaactgattaccgatgttcctgataaagagatgctcgggctgaacatt

SEQ ID NO: 155483 - DNA, 75 bp, synthetic construct
  source 1..75: mol_type = other DNA
gcattctgacgggttcagaagggacgctggcctttattaccgaagcgcggctggatattactcgcttgccgaaag

SEQ ID NO: 155484 - DNA, 75 bp, synthetic construct
  source 1..75: mol_type = other DNA
cgggcaacgctcggcgggatgatcaataccgatgcatccggtcagggatcgctggtctatggcaaaacgtcagat

SEQ ID NO: 155485 - DNA, 75 bp, synthetic construct
  source 1..75: mol_type = other DNA
tattcatcgctgatctttaccccccgcggcggcggcaccggcactaacggtcaggcgctcaaccaggggattatt

SEQ ID NO: 155486 - DNA, 75 bp, synthetic construct
  source 1..75: mol_type = other DNA
ctatgcaatgcgcaaaaaagccgttggtctgcttggcaatgccaaaggtgccgctaagccaattccgtttgctga

SEQ ID NO: 155487 - DNA, 75 bp, synthetic construct
  source 1..75: mol_type = other DNA
cgtttttcggtgaggaactttttgcagaactgcgcaaagtgaaagcggcatttgacccgcataaccgactcaacc

SEQ ID NO: 155488 - DNA, 75 bp, synthetic construct
  source 1..75: mol_type = other DNA
ttgcgaagacggcgaaaaagacggcggatttcctcaaccgtatggcgaagctgggtatgccaatggtgggcgtcg

SEQ ID NO: 155489 - DNA, 75 bp, synthetic construct
  source 1..75: mol_type = other DNA
atgcgcaaaaaagctgtcggcctgctcggtaatgccaaaggagcagccaagccaattccgtttgctgaggatacc

SEQ ID NO: 155490 - DNA, 75 bp, synthetic construct
  source 1..75: mol_type = other DNA
atgagtatatttatctcatggcttgttctgattatttcggtggtctgcgccattgggattatccaaattattcat

SEQ ID NO: 155491 - DNA, 75 bp, synthetic construct
  source 1..75: mol_type = other DNA
tattggtgatgtggtgtttgatgtggttaaaccttgtagccgctgtattttcaccaccgtcagcccagaaaaagg

SEQ ID NO: 155492 - DNA, 75 bp, synthetic construct
  source 1..75: mol_type = other DNA
tatcgactggcaagggcaggcatttcgcggtaataaccaacaggtattactggaacaattagaaaatcaagggat

SEQ ID NO: 155493 - DNA, 75 bp, synthetic construct
  source 1..75: mol_type = other DNA
cttcacctgtgcatgatggcttgcatctcaccgcaccagatggcagtagcgcatatgttcgttttgctgatttcg

SEQ ID NO: 155494 - DNA, 75 bp, synthetic construct
  source 1..75: mol_type = other DNA
tcagcaatgggcgatgatggcaccattctttgctgtagctgtgtaccgaagactgcccttaagctgacgcgttag

SEQ ID NO: 155495 - DNA, 75 bp, synthetic construct
  source 1..75: mol_type = other DNA
gtggcgacattaacccggctttttattcatcctgttaaatcgatgcgcggcattggtctgacacatgccctggcg

SEQ ID NO: 155496 - DNA, 75 bp, synthetic construct
  source 1..75: mol_type = other DNA
cggtacatttattaccgcccgtcaggttccgcagatggtgcgttttaccccttccccggtacatgacggcctgca

SEQ ID NO: 155497 - DNA, 75 bp, synthetic construct
  source 1..75: mol_type = other DNA
cggtcgcccggcctcgcgtcgctggtggcgccgggaaacttttgctgaccgactggcgcgcatcgcccccgatct

SEQ ID NO: 155498 - DNA, 75 bp, synthetic construct
  source 1..75: mol_type = other DNA
gcgtcgggaagacctgggcgatgctggcggaagcccagcgactgcgggcgcaagggctggatattgtggttggcg

SEQ ID NO: 155499 - DNA, 75 bp, synthetic construct
  source 1..75: mol_type = other DNA
ccatcaatctttctctaccagagccgctgaccttaatccacgttgacgggccactctttgaacgggtgttgatta

SEQ ID NO: 155500 - DNA, 75 bp, synthetic construct
  source 1..75: mol_type = other DNA
tggatgcaggggattccactctgacttataaagatgaggatggtgctaaatataaatcctctgttgatgtcagaa

SEQ ID NO: 155501 - DNA, 75 bp, synthetic construct
  source 1..75: mol_type = other DNA
cgcttgtaattgcgagcatgttatcgacccaggctctggctgatgggagcaaaacaggcttttatgtaagcggta

SEQ ID NO: 155502 - DNA, 75 bp, synthetic construct
  source 1..75: mol_type = other DNA
gattggtgcgggcaacgaagtgaccgtggtgttccaggacggcttccagctgaaaaccgtggaggaaatggcgct

SEQ ID NO: 155503 - DNA, 75 bp, synthetic construct
  source 1..75: mol_type = other DNA
gtcctgaaaatggggatcggtggcggcgcatcgaaagccgcacagacgctcagtgactactacatcaaacgtgcc

SEQ ID NO: 155504 - DNA, 75 bp, synthetic construct
  source 1..75: mol_type = other DNA
atgctgaagcagctgggcaacctgaatccgcagacgtttatgtccggcagtcagggagggggcaccaatggcaaa

SEQ ID NO: 155505 - DNA, 75 bp, synthetic construct
  source 1..75: mol_type = other DNA
gactttcccgcagctgtagccgtgagcttctctcgggggatatacttcactcatttcgttttgctctatcaggtg

SEQ ID NO: 155506 - DNA, 75 bp, synthetic construct
  source 1..75: mol_type = other DNA
atgtccttaaaatgggtatcggtggcggtgcatcgaaagccgcacagacgctcagtgactactacatcaaacgtg

SEQ ID NO: 155507 - DNA, 75 bp, synthetic construct
  source 1..75: mol_type = other DNA
ctcccagccggctgtcgggctgggtgccacagccgcttacggggctggtgatgtcctgaaaatgggtatggggtc

SEQ ID NO: 155508 - DNA, 75 bp, synthetic construct
  source 1..75: mol_type = other DNA
tcttaacggctttaatactgaccagctgctgaagcagctgggcaacctgaatccgcagcagtttatgtccggcag

SEQ ID NO: 155509 - DNA, 75 bp, synthetic construct
  source 1..75: mol_type = other DNA
ctcccaaccggctgtcgggctgggtgccacagccgcttacggggctggtgatgtcctgaaaatgggtatcggtgg

SEQ ID NO: 155510 - DNA, 75 bp, synthetic construct
  source 1..75: mol_type = other DNA
tctcaccgcaccagatggcagtagcgcatacgtccgttttgctgatttcgctatgcaggatgcgccaaccgaagt

SEQ ID NO: 155511 - DNA, 75 bp, synthetic construct
  source 1..75: mol_type = other DNA
tgggacaggacaatgccgccctggcagagcaggtaaaagccctgggtgctaatcccgtcacggcgaccggtgagc

SEQ ID NO: 155512 - DNA, 75 bp, synthetic construct
  source 1..75: mol_type = other DNA
agctgaaaaccgtggaagagatggcgctggagcaggcacaggggcaggcggaagagagtaacccgggaagtcccg

SEQ ID NO: 155513 - DNA, 75 bp, synthetic construct
  source 1..75: mol_type = other DNA
gcttaacatgcgtaaaaaacagtacaactactatcgcgaccagttgctaagttttaaagagggtgaggttgagtg

SEQ ID NO: 155514 - DNA, 75 bp, synthetic construct
  source 1..75: mol_type = other DNA
tgagtaccggtttgatattaacagaacggcacagatcattgtgtctctggctagtcaggctaaggggaaatgtaa

SEQ ID NO: 155515 - DNA, 75 bp, synthetic construct
  source 1..75: mol_type = other DNA
aaatccaatgaattaatatcttctcgggattataaaggcgttcaattcgaagttactcataaaggatggactctt

SEQ ID NO: 155516 - DNA, 75 bp, synthetic construct
  source 1..75: mol_type = other DNA
ctgcgtgagcatatcaaattacacaacatggaagatttgtttggtgaagtcatggtaccaaccgaagaagtggtt

SEQ ID NO: 155517 - DNA, 75 bp, synthetic construct
  source 1..75: mol_type = other DNA
gccttcagaaaacgaatcttttggtatggtgctggcagaagcatcggcattttctgtgcctgtagtggccactca

SEQ ID NO: 155518 - DNA, 75 bp, synthetic construct
  source 1..75: mol_type = other DNA
tcactggctgatagtcggtggcgggcgtccggaagaggagcgcctgttacgccgtaaaattcatgcactggggat

SEQ ID NO: 155519 - DNA, 75 bp, synthetic construct
  source 1..75: mol_type = other DNA
catcatgagcggaccggtattctgctcccgccggataaccggcaggcctggctggaagccctgcgtgcgtacctg

SEQ ID NO: 155520 - DNA, 75 bp, synthetic construct
  source 1..75: mol_type = other DNA
cggcgaaacatcaccgctcttttcgcaaaaccaggcaaaactggcgcgccagtttcaccagaaaattgctggcta

SEQ ID NO: 155521 - DNA, 75 bp, synthetic construct
  source 1..75: mol_type = other DNA
gtaatggcgcggcaacttttcaataaggtggtccgtcaacaccgccattgcggcaatgccgcctgcgcacgtatc

SEQ ID NO: 155522 - DNA, 75 bp, synthetic construct
  source 1..75: mol_type = other DNA
tacatgatccgcactaaatctcttctatcagcgaaagaactcgcagcaattcttgaaaaggaatacccgcatctg

SEQ ID NO: 155523 - DNA, 75 bp, synthetic construct
  source 1..75: mol_type = other DNA
atgttacttaactggcagggacgccacttcatggaaataaatcactcacgaataacatcgtacgagattgcggat

SEQ ID NO: 155524 - DNA, 75 bp, synthetic construct
  source 1..75: mol_type = other DNA
atatcatcttgatatcgaaacactgtcattcgagcatctgaaaaatgccatcggcgaaaaaatgacatttgctac

SEQ ID NO: 155525 - DNA, 75 bp, synthetic construct
  source 1..75: mol_type = other DNA
tcatttgagcatctgaaaaatgccattggcgaaaagatgaccttcgccaccaccaccgacggcaaccacgggcgc

SEQ ID NO: 155526 - DNA, 75 bp, synthetic construct
  source 1..75: mol_type = other DNA
gcagtactcctcttacagagcagagtctgtcgagaaatgacggtgaagaccagaccagaagaaacgctgaaaata

SEQ ID NO: 155527 - DNA, 75 bp, synthetic construct
  source 1..75: mol_type = other DNA
atctaaagataatgtttgaatgtcaaaagcgacttgaaacacttcatgctttatcatctggaaggattgatggca

SEQ ID NO: 155528 - DNA, 75 bp, synthetic construct
  source 1..75: mol_type = other DNA
gcgctcccgcagctgccgaaccggaggaaaccgcaccggtggccagcgcccccgcagctgccgaaccggaggaaa

SEQ ID NO: 155529 - DNA, 75 bp, synthetic construct
  source 1..75: mol_type = other DNA
gaatcttaccgctggcgtgcgttatcaggcgcgggtagctcgttaccgcgagcaacgcacgcggcatctgtatga

SEQ ID NO: 155530 - DNA, 75 bp, synthetic construct
  source 1..75: mol_type = other DNA
gggtgaagaagattagtagtgcacgtaatgaaaccttagactgtttaaactatgcattaatatgtttccagtggt

SEQ ID NO: 155531 - DNA, 75 bp, synthetic construct
  source 1..75: mol_type = other DNA
caactgtacttcagaatagtatgtactacttcctggcaaatgatccaagtaacatgatctttgcgggtgcaactg

SEQ ID NO: 155532 - DNA, 75 bp, synthetic construct
  source 1..75: mol_type = other DNA
atgaaacataacggattcaacaaagtctggcatatcgagggcggaattattgaatacgcccgtaaggcgcgcgag

SEQ ID NO: 155533 - DNA, 75 bp, synthetic construct
  source 1..75: mol_type = other DNA
gacacagaatatgaagatgttctccctgaatcacatgtgtgatgttgtggtagtgccttctgaggagatgcggtc

SEQ ID NO: 155534 - DNA, 75 bp, synthetic construct
  source 1..75: mol_type = other DNA
ctgttcggtggtacgtcacgttttgtcattatccggcagaaaacatatatgacccggaatatgaatatgttctcc

SEQ ID NO: 155535 - DNA, 75 bp, synthetic construct
  source 1..75: mol_type = other DNA
gaataccctgaaaatgggcattatggatgaagaacgccgaacctcgctgaatttacgcagttgcatcgctcaggc

SEQ ID NO: 155536 - DNA, 75 bp, synthetic construct
  source 1..75: mol_type = other DNA
acgttttgtcgatgaagaagtgttaccgggcgtggaactggatgctgcggcattctggcgcaattttgatgagat

SEQ ID NO: 155537 - DNA, 75 bp, synthetic construct
  source 1..75: mol_type = other DNA
cctgatgcaggggactctgcaagagaaaatggagaaaaacggtcggcaaatcgtgcgtaaactgaatgacgatcg

SEQ ID NO: 155538 - DNA, 75 bp, synthetic construct
  source 1..75: mol_type = other DNA
tctgtttgccagtcgacaaacgctattgctgttgttaccagaaaacggaccgaatgcggcgatcaatgaacaact

SEQ ID NO: 155539 - DNA, 75 bp, synthetic construct
  source 1..75: mol_type = other DNA
gccaggacgctgttcgtcaggtcgctgcggcacaaggattcgaagaacaccacactttttccattgatcccaaca

SEQ ID NO: 155540 - DNA, 75 bp, synthetic construct
  source 1..75: mol_type = other DNA
gcgcgcggcgtatcttttacttggtaacgatcccctgttgttgcaggaaagccaggacgctgttcgtcaggtggc

SEQ ID NO: 155541 - DNA, 75 bp, synthetic construct
  source 1..75: mol_type = other DNA
gacaaatccacgccgtgacctggtgaaagctggcgcacttattctggctgaaattgaacgcatagaccgccagga

SEQ ID NO: 155542 - DNA, 75 bp, synthetic construct
  source 1..75: mol_type = other DNA
cttcccacgagatttaaaggttaacgaaacaaacgctgaatatcttgtccgtaagttcggtgaacttgaatcaaa

SEQ ID NO: 155543 - DNA, 75 bp, synthetic construct
  source 1..75: mol_type = other DNA
cgcagataacctcgacaacggagcagacgacgcagaacgaggtggttttgattatgccgttaagtttctacgcag

SEQ ID NO: 155544 - DNA, 75 bp, synthetic construct
  source 1..75: mol_type = other DNA
ggcaaaaaatcatcaaagtatcgtcaatgcacttaagggggattctttattttctgatggtgaataccggcatgc

SEQ ID NO: 155545 - DNA, 75 bp, synthetic construct
  source 1..75: mol_type = other DNA
tcgtgacattgctcaagaaaatggtgatggtttcggtatgtctacttcctatgacttcgacttcggtttaagtct

SEQ ID NO: 155546 - DNA, 75 bp, synthetic construct
  source 1..75: mol_type = other DNA
agcttgcgcccttgataacgtaaaccagttcaattacgcaaacatgctcgatgatttagcgcagaagattcgcaa

SEQ ID NO: 155547 - DNA, 75 bp, synthetic construct
  source 1..75: mol_type = other DNA
cgttcttccggaatcacgattgataaccttgaagccaagtgcgaggcgctggcggcggagaatgcgaggctgaaa

SEQ ID NO: 155548 - DNA, 75 bp, synthetic construct
  source 1..75: mol_type = other DNA
gttaaccgggatatctccggcatggctttgcttctgtatttttgcctttaacattatcggtcatgtgcctggtgc

SEQ ID NO: 155549 - DNA, 75 bp, synthetic construct
  source 1..75: mol_type = other DNA
acaggacttttcacttaacaccccagccaccgatgctttcctggctgaagtacgtgcgcagggcgtggagatgtt

SEQ ID NO: 155550 - DNA, 75 bp, synthetic construct
  source 1..75: mol_type = other DNA
cggagagcgagtgcttatagttgctctatctaccgcagcagtattagtttctctttatgtaggcgggaagctata

SEQ ID NO: 155551 - DNA, 75 bp, synthetic construct
  source 1..75: mol_type = other DNA
tggcagctgaccggagattccgacatcaacagtctgacgacccgtaacagccgggtacagtctgaagaaaacggt

SEQ ID NO: 155552 - DNA, 75 bp, synthetic construct
  source 1..75: mol_type = other DNA
agatagcggcaacggatgttggtacagtaatcaccaatacatcagataaaaaagcgactctttccttacaaaacg

SEQ ID NO: 155553 - DNA, 75 bp, synthetic construct
  source 1..75: mol_type = other DNA
cactgaacgttaatgtggcccaggggaataacctgaaaatgggtgacggtactgttgttcttaatgcagcaaagg

SEQ ID NO: 155554 - DNA, 75 bp, synthetic construct
  source 1..75: mol_type = other DNA
aagcactacggaacccactcctggtatgccggagcggaaacgggttaccgttatcacctgacggaagacacattt

SEQ ID NO: 155555 - DNA, 75 bp, synthetic construct
  source 1..75: mol_type = other DNA
atgtttcagttaaactggaacaatatgttagccacgaataatacaggcggattttataatgaggtgacaggagga

SEQ ID NO: 155556 - DNA, 75 bp, synthetic construct
  source 1..75: mol_type = other DNA
atgatgtagttccgtcccaagaagataatgcattccctgggctcaaaaggggcattatcagaaaagatggaaccg

SEQ ID NO: 155557 - DNA, 75 bp, synthetic construct
  source 1..75: mol_type = other DNA
tctcgttgataggcgtcgatattgttctggcggttatttcatcgattattattgcgatgataatgacttccaccg

SEQ ID NO: 155558 - DNA, 75 bp, synthetic construct
  source 1..75: mol_type = other DNA
gggtggatgctgctatagaagctgcaaaaaatctggtggccaaagaatatgagtgtaaggatttcaaagcggcgc

SEQ ID NO: 155559 - DNA, 75 bp, synthetic construct
  source 1..75: mol_type = other DNA
cggtcgcggaacagtcaaactggggcaggttgatgcgctggataaaaacagtgattacagaggcatttattttac

SEQ ID NO: 155560 - DNA, 75 bp, synthetic construct
  source 1..75: mol_type = other DNA
aaactcagacatggggacagtcagattatcattatgttgatcgtgtgaccaaaggtgactttgcggtccagcgtc

SEQ ID NO: 155561 - DNA, 75 bp, synthetic construct
  source 1..75: mol_type = other DNA
acaatcagtacacggcgagttttgcgtctcttggtacaaaagactacagctctcattcctggtatgccggtgcag

SEQ ID NO: 155562 - DNA, 75 bp, synthetic construct
  source 1..75: mol_type = other DNA
cgctgaccaattcactggttatggtcagtgggaatacaacctgcaagcaaatggcacagaaggcgatggagataa

SEQ ID NO: 155563 - DNA, 75 bp, synthetic construct
  source 1..75: mol_type = other DNA
atttgctggtggtgatacagctgaagcatggacatttggtgcaaaatacgacgccaacaatgtttatcttgcaat

SEQ ID NO: 155564 - DNA, 75 bp, synthetic construct
  source 1..75: mol_type = other DNA
ctgcttgataagagtgattatgttctcgctcatggactgaacaccgacgaccaactcgcatttggtatcgtctac

SEQ ID NO: 155565 - DNA, 75 bp, synthetic construct
  source 1..75: mol_type = other DNA
ttacctgcaatctaaaggtaaggatttaggcggttgggctcatgacggtaatggcgatccgcgttacaccaacaa

SEQ ID NO: 155566 - DNA, 75 bp, synthetic construct
  source 1..75: mol_type = other DNA
gcgatacctacgcaggtgccgacaacttcatgaatggtcgtgctaatggtgttgcaacctatcgtaataatggct

SEQ ID NO: 155567 - DNA, 75 bp, synthetic construct
  source 1..75: mol_type = other DNA
tctgaccgttccaataaccaagctgctcgtgggtatggagatggcaatcatttctatggtaatagctatgcaggt

SEQ ID NO: 155568 - DNA, 75 bp, synthetic construct
  source 1..75: mol_type = other DNA
ctgcaacggcgctcgtacatggtatggcagtagtcaccaggaatgtggctgattttgagccaactggggttcaga

SEQ ID NO: 155569 - DNA, 75 bp, synthetic construct
  source 1..75: mol_type = other DNA
atgattgtgatttcccgacatgttgctattcccgatggtgagtttgagatcactgctattcgtgcacagggcgcg

SEQ ID NO: 155570 - DNA, 75 bp, synthetic construct
  source 1..75: mol_type = other DNA
gcttctctcggggggatatacttcactcatttcgttttgctctatcaggtgacgagacattatggcagctagaag

SEQ ID NO: 155571 - DNA, 75 bp, synthetic construct
  source 1..75: mol_type = other DNA
cgttattagttgctggcgcagcaaatgcggctgaaatttataataaagatggcaataaagttgatttctacggca

SEQ ID NO: 155572 - DNA, 75 bp, synthetic construct
  source 1..75: mol_type = other DNA
tgtctaccgcatcaccttccgcgacacgaagcagattggcatcgactggacggcggtgtacagcgccgccagggg

SEQ ID NO: 155573 - DNA, 75 bp, synthetic construct
  source 1..75: mol_type = other DNA
accatccagttgcagatgagcttcagcctgagcgacgacccgaccattaccaccgtcagcgcgaaagacggcagc

SEQ ID NO: 155574 - DNA, 75 bp, synthetic construct
  source 1..75: mol_type = other DNA
gccagatcttgatttatctgctggcggcatttgtaaaaatggtgcggttaacgtgctaactaaagaccttcccag

SEQ ID NO: 155575 - DNA, 75 bp, synthetic construct
  source 1..75: mol_type = other DNA
tgtcaccattcacccagaagatgcgcgggcgcggggtatacaagatggcgatacagttcgggtgtggaactcgcg

SEQ ID NO: 155576 - DNA, 75 bp, synthetic construct
  source 1..75: mol_type = other DNA
ggcacacccggcggcggctttggcctttcttaccattttgccaatggcggcaatccgacccgccgcgctgcggtg

SEQ ID NO: 155577 - DNA, 75 bp, synthetic construct
  source 1..75: mol_type = other DNA
tcgcgcctggcaaaaaccggagctggtggtgatatccgaatgtttctggacggcggcggcgaaacacgccgatat

SEQ ID NO: 155578 - DNA, 75 bp, synthetic construct
  source 1..75: mol_type = other DNA
ctttcatccatgcagagctgtttaccgggcggtacggatgcggtggataaaattcctgtcgcccgcatcgttgaa

SEQ ID NO: 155579 - DNA, 75 bp, synthetic construct
  source 1..75: mol_type = other DNA
agcaaaaacactggatgattgtcacgctggcggccatgctcgggcaaatcggcacgcctggtggcggttttggtc

SEQ ID NO: 155580 - DNA, 75 bp, synthetic construct
  source 1..75: mol_type = other DNA
gcagcagactagctggcctctggtgctggaaaatagcgacgtggtggtgctgtggagtgctaacccattaaacac

SEQ ID NO: 155581 - DNA, 75 bp, synthetic construct
  source 1..75: mol_type = other DNA
tggcgctggcaggcggttataccggccatttgggcgattattcaaccggcgcggcacaggcgatcatgccgtatg

SEQ ID NO: 155582 - DNA, 75 bp, synthetic construct
  source 1..75: mol_type = other DNA
cagccagctgaattacagttctctgcgcgaattgtacgcggtagcaaaccgtgagcctgtcaccattcatcctga

SEQ ID NO: 155583 - DNA, 75 bp, synthetic construct
  source 1..75: mol_type = other DNA
aatccctgtcgcccgcattgttgaagcactggaaaaccccggtggcgcatatcaacataacggtatggaccgaca

SEQ ID NO: 155584 - DNA, 75 bp, synthetic construct
  source 1..75: mol_type = other DNA
ctcttccatgcagggcagcttgccgggtggctgcgatgcggtagataaaatccctgtcgcccgcattgttgaagc

SEQ ID NO: 155585 - DNA, 75 bp, synthetic construct
  source 1..75: mol_type = other DNA
agctggcggctcttttccaccaaaacacgaccatgctgatggctggctggggaatgcagcgccaacagtttggtg

SEQ ID NO: 155586 - DNA, 75 bp, synthetic construct
  source 1..75: mol_type = other DNA
ttccttcactgctgactcaacgactgaacttcggcgaaggttcacttgcagggcgtatcaaaacggcgaccaatc

SEQ ID NO: 155587 - DNA, 75 bp, synthetic construct
  source 1..75: mol_type = other DNA
ttatcaagtccgtcaatggtcagccctaccgcatcaacaccaccgggctgaataacgttcgcgctcagctcgata

SEQ ID NO: 155588 - DNA, 75 bp, synthetic construct
  source 1..75: mol_type = other DNA
gcactgaccattgatgtgctgatcccggcaggcacccgcgtcagcgcttccgacagcgttatttttgccaccgat

SEQ ID NO: 155589 - DNA, 75 bp, synthetic construct
  source 1..75: mol_type = other DNA
ccgcgctggtggtgattgatttacaagaaggcatcttgccttttgccggaggtccacatactgccgatgaggtgg

SEQ ID NO: 155590 - DNA, 75 bp, synthetic construct
  source 1..75: mol_type = other DNA
ccagcgccgagcagcacaataacagcatcaaccatatctacccacgcatcgcccgtgtgcgtagcgtggaagaga

SEQ ID NO: 155591 - DNA, 75 bp, synthetic construct
  source 1..75: mol_type = other DNA
tgtatttctgtacggctgtgtgtgcactgtatctggtgagtggtggttataaaatcatccgcaactacatccgta

SEQ ID NO: 155592 - DNA, 75 bp, synthetic construct
  source 1..75: mol_type = other DNA
tagaactgtatccgctgctcagtaccggcctgccggaggacagcatccttacgctggtagagagtttctgctcgg

SEQ ID NO: 155593 - DNA, 75 bp, synthetic construct
  source 1..75: mol_type = other DNA
ccgctcaggctgagcgcctgttgattgacctgtgggcataccgcgaaatgctggtcagggtagcggcgcaggaag

SEQ ID NO: 155594 - DNA, 75 bp, synthetic construct
  source 1..75: mol_type = other DNA
ttgcggcatcagaaagcgatgaacagcgaagccgttgtgcgtctggcggaagcctcacaggatcgctatggcttt

SEQ ID NO: 155595 - DNA, 75 bp, synthetic construct
  source 1..75: mol_type = other DNA
tctgcttcagttttccgtggataccgcactgaacagggatgtcctgatacccgcaggcacccgcgtcagtgcgtc

SEQ ID NO: 155596 - DNA, 75 bp, synthetic construct
  source 1..75: mol_type = other DNA
aataaagccgttcagaactgggtggcttcccgccggtcagttctggggcgcgatattgttccgagtcagattatc

SEQ ID NO: 155597 - DNA, 75 bp, synthetic construct
  source 1..75: mol_type = other DNA
ccatcccaacattgtcgatgttgccgtgctttccccggtccccggtaccgtagagctgtatccgctgctcagtac

SEQ ID NO: 155598 - DNA, 75 bp, synthetic construct
  source 1..75: mol_type = other DNA
atctcaagttaatgtttgagtgtagaaaaagaattgaaacgctacatgatttagcatccggacatacaggaggac

SEQ ID NO: 155599 - DNA, 75 bp, synthetic construct
  source 1..75: mol_type = other DNA
tgcggtacgcattctggcggtgcgcgatcacagtgagcaagaactgcgacgtaaactcgcggcaccgattatggg

SEQ ID NO: 155600 - DNA, 75 bp, synthetic construct
  source 1..75: mol_type = other DNA
gaatcgggttggaaggatattccaccgataacccgttttgtcacggaacttaaccgcatcaaacctctgtgtgcc

SEQ ID NO: 155601 - DNA, 75 bp, synthetic construct
  source 1..75: mol_type = other DNA
cttcctcatctggcgcaaaacgagcatacagaaagggtaaacctttgagtgaagcagaacgacagagagtagctt

SEQ ID NO: 155602 - DNA, 75 bp, synthetic construct
  source 1..75: mol_type = other DNA
gactctgagaaacagatggccgctgttgcaagaaaacgtcttacacacaaagagataaaagtttttgtcaaaaac

SEQ ID NO: 155603 - DNA, 75 bp, synthetic construct
  source 1..75: mol_type = other DNA
tgtgtgcagaggaaggggtaactcaggcagagttgatagaaaggcttatcgagaaagaggcctgtcatcggaaca

SEQ ID NO: 155604 - DNA, 75 bp, synthetic construct
  source 1..75: mol_type = other DNA
aacctgtcgaaagatatctcattagtgacggattatctggtcaccagttatatcaaagcagcgaacgccaatata

SEQ ID NO: 155605 - DNA, 75 bp, synthetic construct
  source 1..75: mol_type = other DNA
gcgtcgagtccactgcccgcaacgcctgggagttaggttttaatctggtgatagccgaagatgcctgtagtgccg

SEQ ID NO: 155606 - DNA, 75 bp, synthetic construct
  source 1..75: mol_type = other DNA
gtacggatctggagttacaattacgccgtcgtggcattgacaccatcgtcttatgtgggatctcaaccaatattg

SEQ ID NO: 155607 - DNA, 75 bp, synthetic construct
  source 1..75: mol_type = other DNA
tagctaccagaatcagaagatgtctgaaaccacaaacgcccagcaatatgcaagtgcgtctgtatgggcaagtca

SEQ ID NO: 155608 - DNA, 75 bp, synthetic construct
  source 1..75: mol_type = other DNA
atgggatggctggtcatggccgtcggcctgaccattctgattatcactggtagctaccagaatcagaagatgtct

SEQ ID NO: 155609 - DNA, 75 bp, synthetic construct
  source 1..75: mol_type = other DNA
cgcaggcagattgacaaaagggccgctgagaaaatcagcgccggtcagtcagccggaagcaaacccgaagagccg

SEQ ID NO: 155610 - DNA, 75 bp, synthetic construct
  source 1..75: mol_type = other DNA
ggacgatcttattatccgccgtaccgatggttccccaacctataacttctgtgtggttgtcgatgactgggatat

SEQ ID NO: 155611 - DNA, 75 bp, synthetic construct
  source 1..75: mol_type = other DNA
gacaagctgctgtggctgaaccatcactacattaacgcgctgccgccggagtatgttgctactcacttacagtgg

SEQ ID NO: 155612 - DNA, 75 bp, synthetic construct
  source 1..75: mol_type = other DNA
agagttgccgctatttctatgaagattttgctgagtttgacgctgatgcggcgaaaaaacacctgcgcccggtag

SEQ ID NO: 155613 - DNA, 75 bp, synthetic construct
  source 1..75: mol_type = other DNA
gaatggtgcggtttaaagcaggcgcgacggcggatctcggcgttagcgtgcgtccgcgctggccgctggcagagt

SEQ ID NO: 155614 - DNA, 75 bp, synthetic construct
  source 1..75: mol_type = other DNA
cggcgtgagtgctaaccgcacgttacgggcgaagctggctgaaatgatgaaaaaacgccgtggcgaagtgttcta

SEQ ID NO: 155615 - DNA, 75 bp, synthetic construct
  source 1..75: mol_type = other DNA
cagcgtgactggcattggtcagtacgagctgctcggcgagtctatcgatgatgccgccggtgaagcgtttgataa

SEQ ID NO: 155616 - DNA, 75 bp, synthetic construct
  source 1..75: mol_type = other DNA
attccttaagcgcgatctcaggttctgtagccaatgcctcggagacagagaaaaaaaaggaccgtcgcagtgatg

SEQ ID NO: 155617 - DNA, 75 bp, synthetic construct
  source 1..75: mol_type = other DNA
ccggaagctatcgaagccattatggatggcatgaactggctgagcctggagtgggatgaaggtccgtacttccag

SEQ ID NO: 155618 - DNA, 75 bp, synthetic construct
  source 1..75: mol_type = other DNA
gctgcgtgtcgccgtaaccggtgcggggcagtctccagcactggatgttaccgttcacgcaattggtaagacccg

SEQ ID NO: 155619 - DNA, 75 bp, synthetic construct
  source 1..75: mol_type = other DNA
atcacccatcttgtagcctggcccgtaagctgggggtgaaggacgagccacttacgctgctgaaaaatgtgcgtg

SEQ ID NO: 155620 - DNA, 75 bp, synthetic construct
  source 1..75: mol_type = other DNA
ttaaaagctacccgacgtatctggccgatgaaccggaatgggcgctgcgtgctgagaaagtttccgcgcgtatgc

SEQ ID NO: 155621 - DNA, 75 bp, synthetic construct
  source 1..75: mol_type = other DNA
gtgaatgtcaatttctttgtcacctgtattggtgacgccctgaaatcaagaatggcacgagactccgtgctgcta

SEQ ID NO: 155622 - DNA, 75 bp, synthetic construct
  source 1..75: mol_type = other DNA
gaagtggcaacagggttgtttggtcatttggtgggggcgatagcgggtggtgcggtctaccgtaaatcgaccttc

SEQ ID NO: 155623 - DNA, 75 bp, synthetic construct
  source 1..75: mol_type = other DNA
tatcatcaaagatggcatcctgactcagtggctgctgacttcctactctgcgcgcaagctggggctgaaaagtac

SEQ ID NO: 155624 - DNA, 75 bp, synthetic construct
  source 1..75: mol_type = other DNA
gcttcgaacaaatgctcaaagagatgggcaccgggctggtggtgacggagctgatgggtcagggcgtgagcgcga

SEQ ID NO: 155625 - DNA, 75 bp, synthetic construct
  source 1..75: mol_type = other DNA
gaaaaatcaacaaaaaccaacagcggctggttggctagtgcattatttggtccaaagcgttcattagcagaacac

SEQ ID NO: 155626 - DNA, 75 bp, synthetic construct
  source 1..75: mol_type = other DNA
ctataagcgccagcgtatcaattccggcagaacaatctcaattcatctccacaattcctggagggagaaaaatag

SEQ ID NO: 155627 - DNA, 75 bp, synthetic construct
  source 1..75: mol_type = other DNA
aacacctgaacagacggtaagaagaagcgactacagagtctcccttggcagaactcaacccacagatattgacta

SEQ ID NO: 155628 - DNA, 75 bp, synthetic construct
  source 1..75: mol_type = other DNA
gcgtgagtgccattaccggtgattattcccgtggtgcagcgggcttctgggtagagaatggcgaaattcagtatc

SEQ ID NO: 155629 - DNA, 75 bp, synthetic construct
  source 1..75: mol_type = other DNA
gaaaatacaacaaaatttatctgtctgggcatggttctgctggtctacctcttcttaagtgcggagatgaatttt

SEQ ID NO: 155630 - DNA, 75 bp, synthetic construct
  source 1..75: mol_type = other DNA
gacaaaccaatctcaatccatcccaacaactctagcagggagaacaatcgaaaaagctcaagagaaagaaggatt

SEQ ID NO: 155631 - DNA, 75 bp, synthetic construct
  source 1..75: mol_type = other DNA
gaagtggcgaccggtctgtttggtcacctggtcggcgcgattgccggcggttcggtgtaccgcaaatccaccttc

SEQ ID NO: 155632 - DNA, 75 bp, synthetic construct
  source 1..75: mol_type = other DNA
tatcgtcaaagatggcattctgacccagtggctgctgaccagctattccgcacgtaaactggggctgaaaagcac

SEQ ID NO: 155633 - DNA, 75 bp, synthetic construct
  source 1..75: mol_type = other DNA
ggtaacgatattgaaacacgcagtaatatacagtgtggttctgtgctgttgccggagatgaaaatcgccggacag

SEQ ID NO: 155634 - DNA, 75 bp, synthetic construct
  source 1..75: mol_type = other DNA
agcatggagacagcaaaatggcgtaggcctaatcctagcggcaactggggtatcgtgtcagcggttcggtgggac

SEQ ID NO: 155635 - DNA, 75 bp, synthetic construct
  source 1..75: mol_type = other DNA
aacgactcggaactgttggttccatacgcagccgatggttcctgttttcaccccggtttggcgagcacccgtgat

SEQ ID NO: 155636 - DNA, 75 bp, synthetic construct
  source 1..75: mol_type = other DNA
tgatcaacaggatcgatgataccaattaccaacaggatgcgaaatacaccctcaactgcggtaataaagtcagcg

SEQ ID NO: 155637 - DNA, 75 bp, synthetic construct
  source 1..75: mol_type = other DNA
ttggggggctgctgatctgcactacggtaggggaattgacttacgcaggcagtaagccagtaaatatggttttac

SEQ ID NO: 155638 - DNA, 75 bp, synthetic construct
  source 1..75: mol_type = other DNA
caaatgacgcggcgcgtgaaacgccacaacactgtacccctgtcatttgctgatggctatccttaccttcttgct

SEQ ID NO: 155639 - DNA, 75 bp, synthetic construct
  source 1..75: mol_type = other DNA
tctaaagatgacgaccaggaactgttggttccatacgcggccgatggctcgtgctttaatcctggactggcgagc

SEQ ID NO: 155640 - DNA, 75 bp, synthetic construct
  source 1..75: mol_type = other DNA
cacgtagctatatgagccgcattgagcgcggtggctctaatgcgtctttggatgcgattgaggtgttggctggtg

SEQ ID NO: 155641 - DNA, 75 bp, synthetic construct
  source 1..75: mol_type = other DNA
aacatgaagacagcaaaatggcgcagacccaattctagcggcaactggggtatcgtatcagcggttcgttgggac

SEQ ID NO: 155642 - DNA, 75 bp, synthetic construct
  source 1..75: mol_type = other DNA
tggctcatgttttcatccaggtctggcaagcacccgcgatggttcgtttggcgttggcgataaagccgctcagaa

SEQ ID NO: 155643 - DNA, 75 bp, synthetic construct
  source 1..75: mol_type = other DNA
atggagcgtggccttacagtggtcaaaattgcacattcagtgcatgaaaaaatccctgagaatacagtttggcga

SEQ ID NO: 155644 - DNA, 75 bp, synthetic construct
  source 1..75: mol_type = other DNA
agcatggagacggcaaagtggcgtaggccgaattctgcgggcaattggggaattgtgtctgctgttaaatgggat

SEQ ID NO: 155645 - DNA, 75 bp, synthetic construct
  source 1..75: mol_type = other DNA
agcatggagactgcaaagtggcgtaggcctaatgccagtggcaactggggcattgtctcggcggtgcgatgggac

SEQ ID NO: 155646 - DNA, 75 bp, synthetic construct
  source 1..75: mol_type = other DNA
cggggttgctggtgctggccggatggggtgtcagcgttattgccgttgccagtgacattaagcaggtggatctga

SEQ ID NO: 155647 - DNA, 75 bp, synthetic construct
  source 1..75: mol_type = other DNA
caagccgttgccgttcagcgaagttactggatcgaaaggtaaatcagataaagagaaggtaggcgattacgtttt

SEQ ID NO: 155648 - DNA, 75 bp, synthetic construct
  source 1..75: mol_type = other DNA
taacgttaccggcacggcaagttttgcttcggaacagctggatttgactattgatccggagagtaaaggaattcg

SEQ ID NO: 155649 - DNA, 75 bp, synthetic construct
  source 1..75: mol_type = other DNA
tgcgcgtgctggtggatgggccaccgccctgctcgatacagggaagcgcggtggagttcggcagtgtggtcatta

SEQ ID NO: 155650 - DNA, 75 bp, synthetic construct
  source 1..75: mol_type = other DNA
acgggtattgccggttttggaattcggattcaaaaagccagcgatcactccattctggatttaacgcctggcaca

SEQ ID NO: 155651 - DNA, 75 bp, synthetic construct
  source 1..75: mol_type = other DNA
tcgatggggtaagttacaaacgccccattgactactcgcttgtgtgcaacaatctggcaatggacgacctgcgct

SEQ ID NO: 155652 - DNA, 75 bp, synthetic construct
  source 1..75: mol_type = other DNA
tacattgtcggtgcgatatttggtgatgatgaggtgcgggtgaactgcgcggcagcgaatctggatattgccaac

SEQ ID NO: 155653 - DNA, 75 bp, synthetic construct
  source 1..75: mol_type = other DNA
tggcgctgctgaccaaaacggtctggctaccgtggatcaaactggaaaagcccgacgcacgcctgattcgcctct

SEQ ID NO: 155654 - DNA, 75 bp, synthetic construct
  source 1..75: mol_type = other DNA
atgagcaaggcaggcaaaataaccgctgcgatttcaggggctttcttgttgttgattgtcgtggcgatcattttg

SEQ ID NO: 155655 - DNA, 75 bp, synthetic construct
  source 1..75: mol_type = other DNA
gcggcactggcaacgctggttacgccagcggcagcgttgctggcactgatctcaccttccgaaggggaggctaat

SEQ ID NO: 155656 - DNA, 75 bp, synthetic construct
  source 1..75: mol_type = other DNA
gattatcacgctgcgttcgccgctgtatgtccgcggaacgttcaaaaatccgcaggcaggggtgaaagcagggcc

SEQ ID NO: 155657 - DNA, 75 bp, synthetic construct
  source 1..75: mol_type = other DNA
ggtcgtttcggctggataatattcttttcgatcaagggcggatcgccattgatgacaaagtaagcaaagcggatc

SEQ ID NO: 155658 - DNA, 75 bp, synthetic construct
  source 1..75: mol_type = other DNA
cactgtttaacaaagagaatccctctccctttgtcgaaatactgaaaaatctggatgtgccggtggcgagaaaac

SEQ ID NO: 155659 - DNA, 75 bp, synthetic construct
  source 1..75: mol_type = other DNA
ctggtggcccgtgcaggctggttactggcgcgtggtgaagcgtcccctgagcaaattttattgctggcgtttggt

SEQ ID NO: 155660 - DNA, 75 bp, synthetic construct
  source 1..75: mol_type = other DNA
tgattgccacgcgcaccggagaaaataaatggctgacgcgtgagcaaacctctggtgtgcagcaacaaatccgcc

SEQ ID NO: 155661 - DNA, 75 bp, synthetic construct
  source 1..75: mol_type = other DNA
aatggcagcatgaaaggaagtgtggagtttataggtttttggcaaaatgagaggtattttttagagcataaagaa

SEQ ID NO: 155662 - DNA, 75 bp, synthetic construct
  source 1..75: mol_type = other DNA
tcagtatgcgaaaggttatgctgagtcagttgagcgaaatagctatcttaaattagatttgagggggtataaaaa

SEQ ID NO: 155663 - DNA, 75 bp, synthetic construct
  source 1..75: mol_type = other DNA
atggaactgaaagcgacaactcttggcaaacgtctggcacagcacccttacgatcgggcggtgatcctcaatgcc

SEQ ID NO: 155664 - DNA, 75 bp, synthetic construct
  source 1..75: mol_type = other DNA
agtcagcaaactggaaaatgataccgctgcccgtcatgaactctttattgctgagtggcgcaagcaatgcagcga

SEQ ID NO: 155665 - DNA, 75 bp, synthetic construct
  source 1..75: mol_type = other DNA
atgggcggcaattgtaacgtttttttgggctggagcacgttttctctggcggttacactgataagaaatgacatc

SEQ ID NO: 155666 - DNA, 75 bp, synthetic construct
  source 1..75: mol_type = other DNA
taaatggctgacgcgtgagcaaacctctggcgtgcagcaacaaatccgccaggctttgtcggcgttgccgttgcc

SEQ ID NO: 155667 - DNA, 75 bp, synthetic construct
  source 1..75: mol_type = other DNA
agcgtattcgcgaacggctccatactgaagacattaccgcacgcacgtttcattcactggcgctgcatattattc

SEQ ID NO: 155668 - DNA, 75 bp, synthetic construct
  source 1..75: mol_type = other DNA
agtggtcagtgccagaaggtaacttctgggatgatgaaaaattacagcgtcgtcttgcctctcgcctcgatcgct

SEQ ID NO: 155669 - DNA, 75 bp, synthetic construct
  source 1..75: mol_type = other DNA
ttcaggtctgattcatcaggcgattgttctccttgagaaaggtcgctttatcagtccgtggaaacatattctggt

SEQ ID NO: 155670 - DNA, 75 bp, synthetic construct
  source 1..75: mol_type = other DNA
gatggcgtatatcaaagaggtgaaggctctgaatttaagtcatgtgagtgataaggagtcttttgattttattca

SEQ ID NO: 155671 - DNA, 75 bp, synthetic construct
  source 1..75: mol_type = other DNA
attaccctgaagagatgccttatggagaaggtattcagtatttccgcagtgaagacgggcgggatttttatgagt

SEQ ID NO: 155672 - DNA, 75 bp, synthetic construct
  source 1..75: mol_type = other DNA
ggccggatgtgaagtatccgatttaatacactatgcagcaattggggttttagaaatatgcacaaagattccacc

SEQ ID NO: 155673 - DNA, 75 bp, synthetic construct
  source 1..75: mol_type = other DNA
gcactggatttaagcaccgttactgacgaagccactttttattccatcaactggccggagcgtcccgatgccgca

SEQ ID NO: 155674 - DNA, 75 bp, synthetic construct
  source 1..75: mol_type = other DNA
actaccctgaagacatgccttatggtgaaggcattcagtatttccgtagtgaagacgggcaggatttttatgaat

SEQ ID NO: 155675 - DNA, 75 bp, synthetic construct
  source 1..75: mol_type = other DNA
gatggaatatatcaaagcggtaaaggcgctggatttaagtcaggtcattgatgaatcttccttttatttaattca

SEQ ID NO: 155676 - DNA, 75 bp, synthetic construct
  source 1..75: mol_type = other DNA
cttgttgtatcgttttttatatccagcattaaccctttccctgtggctaatgattttcataatgcttactttaca

SEQ ID NO: 155677 - DNA, 75 bp, synthetic construct
  source 1..75: mol_type = other DNA
ctacttgccgatgccagtttcggtggggctatgggggttgtaatcttctttcttgtttcaggatatatcataacc

SEQ ID NO: 155678 - DNA, 75 bp, synthetic construct
  source 1..75: mol_type = other DNA
tttttttagattacatgcgtatctttgcattctctcttgtggtgttaggccacaagttcaacaaagatttagctt

SEQ ID NO: 155679 - DNA, 75 bp, synthetic construct
  source 1..75: mol_type = other DNA
tacttaaagttgaaacagatagctttttcgatatagatgagaaagtggcaaatgagaactaccttcttggactga

SEQ ID NO: 155680 - DNA, 75 bp, synthetic construct
  source 1..75: mol_type = other DNA
tctttagctaattctttagtaggtgtccaaagcaatggaaattcggtagagttcgcagagaattcattctcattg

SEQ ID NO: 155681 - DNA, 75 bp, synthetic construct
  source 1..75: mol_type = other DNA
ctctttcattggctggtgttgaatggacgttaagaatagaaatgctgttctatgtgtttatgggtttggttaaaa

SEQ ID NO: 155682 - DNA, 75 bp, synthetic construct
  source 1..75: mol_type = other DNA
gccgggttactggctgaggcttcagtggttatccgccgcatgaaggggcttaaacgtgcaacggtgaaaaaagta

SEQ ID NO: 155683 - DNA, 75 bp, synthetic construct
  source 1..75: mol_type = other DNA
acctcaccatttcaaaacagagagctctgcaagagcttgcaaaacatggcgtcgtagccagcgacatagacgtat

SEQ ID NO: 155684 - DNA, 75 bp, synthetic construct
  source 1..75: mol_type = other DNA
aattgggccgctgaactgggatgaaaaaggcgatcttaagggattcgattttggtgtcttccagtggcatgccga

SEQ ID NO: 155685 - DNA, 75 bp, synthetic construct
  source 1..75: mol_type = other DNA
atggggccggaaggtgtgggtaatgcgtcgttgtcgaatattgctggcgatgctgccgaaggcatgttggtcact

SEQ ID NO: 155686 - DNA, 75 bp, synthetic construct
  source 1..75: mol_type = other DNA
cttccgaactttctggtggtcaacagcagcgtgtggcgattgcccgcgcgctggcggtgaagccgaaaatgatgc

SEQ ID NO: 155687 - DNA, 75 bp, synthetic construct
  source 1..75: mol_type = other DNA
ttctatacctgttaattctccctgcgacgttctcgtttaaatgccggaatgctgctcgcaaaataaaaacgcccc

SEQ ID NO: 155688 - DNA, 75 bp, synthetic construct
  source 1..75: mol_type = other DNA
accgccggaaaccggatctgcgcggcagaaaagacgcaaatgatatgataataaacaatacacataaaatcatat

SEQ ID NO: 155689 - DNA, 75 bp, synthetic construct
  source 1..75: mol_type = other DNA
gttgaaacccggcaatggggcgggctgacgctaactttaattattgcatcagttgggattgcgggggcgctaccg

SEQ ID NO: 155690 - DNA, 75 bp, synthetic construct
  source 1..75: mol_type = other DNA
cttgtgtctatcgcaccaatgttctggaaaatacttccgcatcgcggtcgctatattgcggtctgggcggtgatt

SEQ ID NO: 155691 - DNA, 75 bp, synthetic construct
  source 1..75: mol_type = other DNA
atggcgcgggaactggaacagtacccagacctcaatatcccaaagactattttatatccagtgcctaacatcctt

SEQ ID NO: 155692 - DNA, 75 bp, synthetic construct
  source 1..75: mol_type = other DNA
agattggggaaatggcctgtgtggcagttcacccggattaccgcagctcatcacggggcgaggttctgctggaac

SEQ ID NO: 155693 - DNA, 75 bp, synthetic construct
  source 1..75: mol_type = other DNA
cagagatttactggtcgaacaggatgccctgcgctttaaggctctggcgtaccgcagcaggatccagaactacat

SEQ ID NO: 155694 - DNA, 75 bp, synthetic construct
  source 1..75: mol_type = other DNA
gaaacggacagcattcaggctgaaattgataaatggactttaatggcgcgggaactggaacagtacccagacctc

SEQ ID NO: 155695 - DNA, 75 bp, synthetic construct
  source 1..75: mol_type = other DNA
aatcagaaagttgttcgcgtgtcttatacatggaagttggcggatgttccttcatgggtggacaaaaaagcgttc

SEQ ID NO: 155696 - DNA, 75 bp, synthetic construct
  source 1..75: mol_type = other DNA
attcgaacgtattagggataacagaggaaggcaaaaaagccaaagtctggagcacaacagatggtgcctgtgttg

SEQ ID NO: 155697 - DNA, 75 bp, synthetic construct
  source 1..75: mol_type = other DNA
tgattataaagcgtatgcacgggatttgtttctggacagcctgacctttattgatggccatgtgttctgccggtg

SEQ ID NO: 155698 - DNA, 75 bp, synthetic construct
  source 1..75: mol_type = other DNA
atggcgtcggtgggaagacactcgcatcgtgagccatagcgagtatctgcgcaaaatcgacacgttccgtgagcg

SEQ ID NO: 155699 - DNA, 75 bp, synthetic construct
  source 1..75: mol_type = other DNA
ggaaggcaaaaaagccaaagtctggagcacaacagatggtgcctgtgttggtcgtcgtgctgttgacgggattaa

SEQ ID NO: 155700 - DNA, 75 bp, synthetic construct
  source 1..75: mol_type = other DNA
gttaaagggatgaatgaacctgctgatggtgcaatgaatctcgttaaaaccagtaatggctggagagccaattaa

SEQ ID NO: 155701 - DNA, 75 bp, synthetic construct
  source 1..75: mol_type = other DNA
gaaatacaaccgccggccccacctgaagatgcacagcctgttgccattccgcttcccgtttctctgggagatgcc

SEQ ID NO: 155702 - DNA, 75 bp, synthetic construct
  source 1..75: mol_type = other DNA
atggtgtgggtgcgaaaaaatctgttctccagctggagcaatagcctgctgactattggctgcatatggttgatg

SEQ ID NO: 155703 - DNA, 75 bp, synthetic construct
  source 1..75: mol_type = other DNA
aggctaactgggttggctcaacgcgtgccgactgcacaaaagccggtgcctgttgggtcttcatccacgaacgat

SEQ ID NO: 155704 - DNA, 75 bp, synthetic construct
  source 1..75: mol_type = other DNA
acggatcgtagtagatggcatcgaacttaatgaagatatccgcaatattgagcgcgtcaggcaggaagtgggaat

SEQ ID NO: 155705 - DNA, 75 bp, synthetic construct
  source 1..75: mol_type = other DNA
ccgtgcaaccgggcgaacagatcgttctatgtggcccttcaggttccggtaaatcgacaaccattcgttgtatta

SEQ ID NO: 155706 - DNA, 75 bp, synthetic construct
  source 1..75: mol_type = other DNA
gaaatacaaccgccggccccacctgaagatgcgcagcctgtagccattccacttcctgtttctctgggagatgcc

SEQ ID NO: 155707 - DNA, 75 bp, synthetic construct
  source 1..75: mol_type = other DNA
gtttgttaggggctatcgccattggtattcccatcgcctgggcattattactgtgtggcatttcattgatgttct

SEQ ID NO: 155708 - DNA, 75 bp, synthetic construct
  source 1..75: mol_type = other DNA
cattattcttcaatgtcatgcacaatgaacttgatgctcgtaaatccagaaaggtcgcagcctactttttatcaa

SEQ ID NO: 155709 - DNA, 75 bp, synthetic construct
  source 1..75: mol_type = other DNA
gccttaagattaacgcgggaggattcgcttcctgccattcgtcaacgtctggaaaagctaccagaacaagtttgg

SEQ ID NO: 155710 - DNA, 75 bp, synthetic construct
  source 1..75: mol_type = other DNA
cgctgatgattacctggtggtggcaggcaaaacggctgaatctgccttgccagccaaaagcctcactgcgggaag

SEQ ID NO: 155711 - DNA, 75 bp, synthetic construct
  source 1..75: mol_type = other DNA
atgcgccaggccaactatccggtaaaccgcgccgccgggcttatcggttccggcgggattattgcggccattatc

SEQ ID NO: 155712 - DNA, 75 bp, synthetic construct
  source 1..75: mol_type = other DNA
gcgatgatcatggcaagcctgtccggttctgcggttgctgataccgcagctgtcgcggcgctgctggtgccgatg

SEQ ID NO: 155713 - DNA, 75 bp, synthetic construct
  source 1..75: mol_type = other DNA
cgcgtcgaaattgcccatttttattgcgaattggctctgcagcacatggccagcgacgattttgatcgtgcaatg

SEQ ID NO: 155714 - DNA, 75 bp, synthetic construct
  source 1..75: mol_type = other DNA
accctctactggcattgtccgtcttgtcgggcctggtcaaccattaaaccgattcgcggtcttgatggcctgtaa

SEQ ID NO: 155715 - DNA, 75 bp, synthetic construct
  source 1..75: mol_type = other DNA
caccgttgaagcccatcttacgctcggaaatctgttccgttcgcgtggcgaagtcgatcgcgcgattcgtattca

SEQ ID NO: 155716 - DNA, 75 bp, synthetic construct
  source 1..75: mol_type = other DNA
caaccgaacgagaagcgcgtaactgttgcccgtccggttgtgttgccgtattcgctgcccgtattcgtcaggggg

SEQ ID NO: 155717 - DNA, 75 bp, synthetic construct
  source 1..75: mol_type = other DNA
ggaagcacgtcagaaatcaccggctggctgcgtgatggtattcgccgcccgtattcgtcaggaggtgggccatgt

SEQ ID NO: 155718 - DNA, 75 bp, synthetic construct
  source 1..75: mol_type = other DNA
atgggcagagtttctccagcgtgcggtggaggagaatacgggggcagatgctgaactgatgcttgccgacatcat

SEQ ID NO: 155719 - DNA, 75 bp, synthetic construct
  source 1..75: mol_type = other DNA
actggaaccgaaagcggtcgcaggtgttgccggaattacagttaaatcaggtcttgaagatttttccattattcc

SEQ ID NO: 155720 - DNA, 75 bp, synthetic construct
  source 1..75: mol_type = other DNA
cctgctcaaaactaaggaggttggtgtgaagcaatttcttgctgctatgttcttattcatatcttttggggctac

SEQ ID NO: 155721 - DNA, 75 bp, synthetic construct
  source 1..75: mol_type = other DNA
ggaacagttttaatgtcaaaaaccatttctggttatgggaatatggattcaaccaaagcttttgttggaaaagta

SEQ ID NO: 155722 - DNA, 75 bp, synthetic construct
  source 1..75: mol_type = other DNA
gtgacgaggtattaattatttgccgactttctccaacgcggtatttggctgaaaaaaaatccctggccaaatata

SEQ ID NO: 155723 - DNA, 75 bp, synthetic construct
  source 1..75: mol_type = other DNA
atcggctaaaaatgctgaaaggccagatgtatggtcgagccggatttgaactactcaggcagagggtcatgagtc

SEQ ID NO: 155724 - DNA, 75 bp, synthetic construct
  source 1..75: mol_type = other DNA
attacggagaaatacgcctcacagattgcaccccttaaaaccagtattgaaaccctttcaaaaggcgttcaggga

SEQ ID NO: 155725 - DNA, 75 bp, synthetic construct
  source 1..75: mol_type = other DNA
ccgcgaaacgttttcagttaattcgtctgacacatattgataagtactggaccagcgcgaaaatgcagcgtgaac

SEQ ID NO: 155726 - DNA, 75 bp, synthetic construct
  source 1..75: mol_type = other DNA
gctctatcgaaaactttgatgcgatgggcatccataccggtgactccatcactgtcgcgccagcccaaacgctga

SEQ ID NO: 155727 - DNA, 75 bp, synthetic construct
  source 1..75: mol_type = other DNA
accttctaaggctggctgctcatctgcgtggtgatctggagaacaagaaagccatcctactctatgcctacaacg

SEQ ID NO: 155728 - DNA, 75 bp, synthetic construct
  source 1..75: mol_type = other DNA
atctttcaacaagcggatgcgctggatgtcatgatcacctctctgcaggaaacggcccaggcactggctaaggct

SEQ ID NO: 155729 - DNA, 75 bp, synthetic construct
  source 1..75: mol_type = other DNA
ggagtttcgtcaacgctgtattaatatctttcaacaagcggatgcgctggatgtcatgatcacctctctgcagga

SEQ ID NO: 155730 - DNA, 75 bp, synthetic construct
  source 1..75: mol_type = other DNA
tttgttgaagacaaacgacttgctgccgcgaaacgttttcagttaatccgcctgacacatatcgataagcactgg

SEQ ID NO: 155731 - DNA, 75 bp, synthetic construct
  source 1..75: mol_type = other DNA
gcagcggtgttcgtcgctgtcatttaatcagttatcaggaagatggcgcgctgttgcaagagctgttctcacgtg

SEQ ID NO: 155732 - DNA, 75 bp, synthetic construct
  source 1..75: mol_type = other DNA
catcaacaagtcaaggaggatatcgacgcagagcagttggctaccgacagcttatcggagcgattgcaggacttg

SEQ ID NO: 155733 - DNA, 75 bp, synthetic construct
  source 1..75: mol_type = other DNA
atgttccggggagcaacgttagtcaatctcgacagtaaagggcgcttatcggtgcccacccgttatcgggaagag

SEQ ID NO: 155734 - DNA, 75 bp, synthetic construct
  source 1..75: mol_type = other DNA
tttgcggctgcgagttatcaatattcaggtgaaaattatcacacattagcggatgttttgaatacttataataat

SEQ ID NO: 155735 - DNA, 75 bp, synthetic construct
  source 1..75: mol_type = other DNA
aagcgattcatcgccaactggacagcggtgcaattgtgctgatggggccggtggcggtttcggtcactggcgaga

SEQ ID NO: 155736 - DNA, 75 bp, synthetic construct
  source 1..75: mol_type = other DNA
aaaatatacgtgtaaccgacggcaaaacactggaactggtgaagcaggctgcggggacattacaactggacatca

SEQ ID NO: 155737 - DNA, 75 bp, synthetic construct
  source 1..75: mol_type = other DNA
aggacgcggttttgcggtggtcgcgggagaagtgcgtaatctggcccagcgtagcgctcaggctgctcgcgggag

SEQ ID NO: 155738 - DNA, 75 bp, synthetic construct
  source 1..75: mol_type = other DNA
cgtaaaaatgcgctggggcagaaggaatatccggacatgaccctgctgggcgggaccttccaggggctgccggtg

SEQ ID NO: 155739 - DNA, 75 bp, synthetic construct
  source 1..75: mol_type = other DNA
tatcgggcgatttggtcatggcgggatcccggcacttcgtcaggtgccgttcaatattcgcgtgcatgcccaggt

SEQ ID NO: 155740 - DNA, 75 bp, synthetic construct
  source 1..75: mol_type = other DNA
tcaaactggtctggctttgctggtttgatttaatgaccggaaactgccttgacgactggacggagaacctgaaac

SEQ ID NO: 155741 - DNA, 75 bp, synthetic construct
  source 1..75: mol_type = other DNA
tggtgagtttatgtacctgtgagcatttgcttgtgcatcatccgatgctggaaggtgttttgttatctgaatgtg

SEQ ID NO: 155742 - DNA, 75 bp, synthetic construct
  source 1..75: mol_type = other DNA
tcgccaccggcaataacgatctctcttcgcgcaccgagcaacaggccgcttcgctggaagagacggcagccagca

SEQ ID NO: 155743 - DNA, 75 bp, synthetic construct
  source 1..75: mol_type = other DNA
atgggtcatcgaacgacagactgaaaatgaacccctgacgtatctgatggatcagtatgtgcttctggcataccg

SEQ ID NO: 155744 - DNA, 75 bp, synthetic construct
  source 1..75: mol_type = other DNA
gagtgaaccactgacaaatctgatggatcagtacgtgcttatggcataccgtacatcggttgatgccgctcacag

SEQ ID NO: 155745 - DNA, 75 bp, synthetic construct
  source 1..75: mol_type = other DNA
atcagtacgtgctcctggcataccgcacaacggttgacgatagccgcaactggtaccggttgcttccggaaggtg

SEQ ID NO: 155746 - DNA, 75 bp, synthetic construct
  source 1..75: mol_type = other DNA
gcgacggctggtaccaggtacgcattgccgggcgtgatgcaggtgaaaccgaattgtctgcccgtcttaatgagc

SEQ ID NO: 155747 - DNA, 75 bp, synthetic construct
  source 1..75: mol_type = other DNA
atggctgaccggcttcacccggcacgccgtatcctggggcgtgtgtcatccgaatatctactacttccataatct

SEQ ID NO: 155748 - DNA, 75 bp, synthetic construct
  source 1..75: mol_type = other DNA
atccgaatatctactacttccataatctgacgcccgggtgggtgtcattcaatggagaaaaaccggagattgcca

SEQ ID NO: 155749 - DNA, 75 bp, synthetic construct
  source 1..75: mol_type = other DNA
ctgtccggtggactggttgcccaccgtcatggtgtgacgctgggtcagaagaccggtgagacagtggcactggtt

SEQ ID NO: 155750 - DNA, 75 bp, synthetic construct
  source 1..75: mol_type = other DNA
gtcatcgaacgacagactgaaaatgcccccctgacgtatctgatggaccagtatgtacttctggcataccgcaca

SEQ ID NO: 155751 - DNA, 75 bp, synthetic construct
  source 1..75: mol_type = other DNA
aacgtctgaggcagcgttcgctggcaaataaactgatcagtctcttccgtcagtttggtggcacggaactgcgcc

SEQ ID NO: 155752 - DNA, 75 bp, synthetic construct
  source 1..75: mol_type = other DNA
agcacatcaccccatgctggaagggattttgctgtctgagtgcgtgcgattaaaacagcgtcctctggcaaataa

SEQ ID NO: 155753 - DNA, 75 bp, synthetic construct
  source 1..75: mol_type = other DNA
caataaccggcaggaagaaaacccagcgctgacccgtctgatggacgagtacgtctgctttgcgtggcgaacgac

SEQ ID NO: 155754 - DNA, 75 bp, synthetic construct
  source 1..75: mol_type = other DNA
acaccatcccgtcctgccagtgagcaaccaccggcacagccacgactgcgaattgctgaacaagatccaaactgg

SEQ ID NO: 155755 - DNA, 75 bp, synthetic construct
  source 1..75: mol_type = other DNA
ccgcgcgtgcgggtgaacagggccgtggttttgccgtggtggcgggtgaagtgcgtaatcttgccagtcgcagcg

SEQ ID NO: 155756 - DNA, 75 bp, synthetic construct
  source 1..75: mol_type = other DNA
ttgatctctttcttccctgaaattgctaatgaaattgcctttgtggctgaaaacggcggctgggtagtgagcgaa

SEQ ID NO: 155757 - DNA, 75 bp, synthetic construct
  source 1..75: mol_type = other DNA
ctgtggcaaatgctactgacgaaccgcatattgaacaactggtgggggaatgtagagtgatgcggcaattaaaac

SEQ ID NO: 155758 - DNA, 75 bp, synthetic construct
  source 1..75: mol_type = other DNA
cggttatgttaaaggcgcatttactggcgcttctgccaacggtaaaacagggttgattcaggcggcgaatacggg

SEQ ID NO: 155759 - DNA, 75 bp, synthetic construct
  source 1..75: mol_type = other DNA
agaaaatcgccgatattatcagcgtaattgacggcattgctttccagaccaatattctggctttgaacgcggcgg

SEQ ID NO: 155760 - DNA, 75 bp, synthetic construct
  source 1..75: mol_type = other DNA
gatcttcctccagtacggtcagatcgacgtactggacggcgctttcgtgctgatcgacaaaaccgggatccgcac

SEQ ID NO: 155761 - DNA, 75 bp, synthetic construct
  source 1..75: mol_type = other DNA
cgcaggtgaaattgaaccgccacaacctgcgccggatatgttaccgccagccatccccgaacctgaaacgttggg

SEQ ID NO: 155762 - DNA, 75 bp, synthetic construct
  source 1..75: mol_type = other DNA
cttgttagtcattaccgcattatgtgtttgcgaaagaatggggctgcgttaattaattttgtggatgctcgggtc

SEQ ID NO: 155763 - DNA, 75 bp, synthetic construct
  source 1..75: mol_type = other DNA
tgtcgaaggatgcgtttactactgtcgtggaacatttgctgacgcgcccggaagtggaaattattgcctgcggaa

SEQ ID NO: 155764 - DNA, 75 bp, synthetic construct
  source 1..75: mol_type = other DNA
ggctccaataaccgtgaaggcgtactggatgtgatcgataaagttcttaagcacgaagcgccatttaatcaataa

SEQ ID NO: 155765 - DNA, 75 bp, synthetic construct
  source 1..75: mol_type = other DNA
tcttgcgtgaaggtgagtttgtcacttcattacagacattgaaagaggccggaataaaagcaggtttttctgctt

SEQ ID NO: 155766 - DNA, 75 bp, synthetic construct
  source 1..75: mol_type = other DNA
gctgcaccggatgagttttttgcgcatcctaaatcagagcgtacgagggcatttttatcgcaggtaatccattaa

SEQ ID NO: 155767 - DNA, 75 bp, synthetic construct
  source 1..75: mol_type = other DNA
gtaaaaatgcgctgggtcagaaggaatatccggacatgaccctgctgggcgggatcctttcaggggcttccggtg

SEQ ID NO: 155768 - DNA, 75 bp, synthetic construct
  source 1..75: mol_type = other DNA
tactggtgaatgcaccggatatttatctggctgatgacggcggtgtggcggtggatatgtcccgtgaagcgtcac

SEQ ID NO: 155769 - DNA, 75 bp, synthetic construct
  source 1..75: mol_type = other DNA
attgtctcccagtacgtgggtgaccagctggtgctggtgaatgccccggatatttatctggcggatgacggcggt

SEQ ID NO: 155770 - DNA, 75 bp, synthetic construct
  source 1..75: mol_type = other DNA
ggtcagcagcaacgcgttgccattgcgcgttcgctgtgtatgaagccgaaaattatgttgtttgatgagccaacg

SEQ ID NO: 155771 - DNA, 75 bp, synthetic construct
  source 1..75: mol_type = other DNA
ggtcagcagcaacgcgttgccatttgtcacgaacggtgcaatagtgatccacacccaacgcctgaaatcagatcc

SEQ ID NO: 155772 - DNA, 75 bp, synthetic construct
  source 1..75: mol_type = other DNA
aggaatacgcacaggactttattgattacctgcgtccgcagaccattatcgggcgatttggtcagggcgggatcc

SEQ ID NO: 155773 - DNA, 75 bp, synthetic construct
  source 1..75: mol_type = other DNA
aatgaatattggcgaacagattaaaagttttgaaaacaagcgtgcggcactggcggcctcccttgaggagattat

SEQ ID NO: 155774 - DNA, 75 bp, synthetic construct
  source 1..75: mol_type = other DNA
gaagcggtggtggcgcgtctggacacagactttgtggacccgaaaaaagcggcggtggccgatgtttcccctgcg

SEQ ID NO: 155775 - DNA, 75 bp, synthetic construct
  source 1..75: mol_type = other DNA
acaggctggtaacgggaatttggccgcggtggcttcagcgccggtgatccgtgtggagcagaaactggataaggg

SEQ ID NO: 155776 - DNA, 75 bp, synthetic construct
  source 1..75: mol_type = other DNA
gaagtatggttatgcatagcgaaggtctaactttcggtcagagaactggagacacgataggcttgattgttgctc

SEQ ID NO: 155777 - DNA, 75 bp, synthetic construct
  source 1..75: mol_type = other DNA
caccaatgccctggcgctgtccatgcgtaaaaatgcgctgggtcagaaggaatatccggacatgaccctgctggg

SEQ ID NO: 155778 - DNA, 75 bp, synthetic construct
  source 1..75: mol_type = other DNA
tctggatggtcatatcgagatggtcattaacagccatgagaaaggctgggccgcaatcgttccctgcaaaattac

SEQ ID NO: 155779 - DNA, 75 bp, synthetic construct
  source 1..75: mol_type = other DNA
gggtactccgttagatttggagtctctgtttaaaggtgaaatggcctctgcgatgttcgcaaccatgtttcccgg

SEQ ID NO: 155780 - DNA, 75 bp, synthetic construct
  source 1..75: mol_type = other DNA
tttgatcggttcatggatgcaatggatacagcaaaagaggctcttgctgccgggactccgttagatctggagtca

SEQ ID NO: 155781 - DNA, 75 bp, synthetic construct
  source 1..75: mol_type = other DNA
tttggtttttcacttttttgtattctgttagtcgttcttattggtggtgttgctttatggttgcatcgtagtaaa

SEQ ID NO: 155782 - DNA, 75 bp, synthetic construct
  source 1..75: mol_type = other DNA
tgcaggaaaatttagcgcgccgcacttacacaatgtcattgatggcaatggtatttttacccagcacttttttaa

SEQ ID NO: 155783 - DNA, 75 bp, synthetic construct
  source 1..75: mol_type = other DNA
ctgtttaaaggtgaaatggcctctgcgatgttcgcaaccatgtttgccggtgagtttgttcgtagcggggccaga

SEQ ID NO: 155784 - DNA, 75 bp, synthetic construct
  source 1..75: mol_type = other DNA
ctggcgcgccaactggtgacgctgctcggcagttgtgcgtttgactggtcgattctgccggaaagcccgcgcaaa

SEQ ID NO: 155785 - DNA, 75 bp, synthetic construct
  source 1..75: mol_type = other DNA
gtcggaattgtgctctcccgcgccagtaaaatgccgggcagagacggagatattcttgcccgcttgacgacgctg

SEQ ID NO: 155786 - DNA, 75 bp, synthetic construct
  source 1..75: mol_type = other DNA
tgctactcgctggcggcaccgctgaacaagttgagcgcgctacacccgtgctgatggcgatgggcagcgagttga

SEQ ID NO: 155787 - DNA, 75 bp, synthetic construct
  source 1..75: mol_type = other DNA
gatgcgatagtaaaccaggtgattttgagcacccttacgctacccggtttaacaccagagctttcactgtatgcc

SEQ ID NO: 155788 - DNA, 75 bp, synthetic construct
  source 1..75: mol_type = other DNA
aaatgccgcagaactctccgcgcgcgatgcgatagtaaaccaggccattttgagcacccttacgctccccgattt

SEQ ID NO: 155789 - DNA, 75 bp, synthetic construct
  source 1..75: mol_type = other DNA
agctcacctaccgtcctgtggaagaaaatgccgcagagctttccgcgcgcgatgcgatagtaaaccaggtgattt

SEQ ID NO: 155790 - DNA, 75 bp, synthetic construct
  source 1..75: mol_type = other DNA
actggacgttaagtttgctggcgagcgttgtaatcagttctctttttctcaacacagcttatgcctggcaacaag

SEQ ID NO: 155791 - DNA, 75 bp, synthetic construct
  source 1..75: mol_type = other DNA
tttcgcattccagtctctgatacccaggcctatcgccagttcggcaattcggtcatcgtcgacgtatttgcggcc

SEQ ID NO: 155792 - DNA, 75 bp, synthetic construct
  source 1..75: mol_type = other DNA
aaaacctgaagatcttgctcactatgatctgaatgttgccacccaaaaaacattacgtttgaaaggcctgatgta

SEQ ID NO: 155793 - DNA, 75 bp, synthetic construct
  source 1..75: mol_type = other DNA
ggagatgttattaacatccctcctttttctttatgctatatagaaaagaatcttgtcgttgatgcaacattaaaa

SEQ ID NO: 155794 - DNA, 75 bp, synthetic construct
  source 1..75: mol_type = other DNA
acaattagttattaaagcaaaagatggagatgttattaacatccctcctttttctttatgctatatagaaaagaa

SEQ ID NO: 155795 - DNA, 75 bp, synthetic construct
  source 1..75: mol_type = other DNA
agacagacctgaatgatgtggataaaacaccatctctgatccacaaaactttgttaacagcttcgaccatttatg

SEQ ID NO: 155796 - DNA, 75 bp, synthetic construct
  source 1..75: mol_type = other DNA
ccgatcgccttgggcgcggccttgacgaaatcgacgcctgtatagcacggactggcgtgatggcggatgaaatcg

SEQ ID NO: 155797 - DNA, 75 bp, synthetic construct
  source 1..75: mol_type = other DNA
gtggaagtgattaagggagcggacgtaaatgtcccggatgcagtatttgcctggattctggatggcaaaggtggc

SEQ ID NO: 155798 - DNA, 75 bp, synthetic construct
  source 1..75: mol_type = other DNA
atggctggcgacaacaccgctgttcccaataacgtacgtgatgcgctggcaggcgagagcactcggccccgagtc

SEQ ID NO: 155799 - DNA, 75 bp, synthetic construct
  source 1..75: mol_type = other DNA
cgacgcaaattggcttcgggcaattaagccgcgcacaacaggtgctgggaattggctatttgtatgttgaggcgc

SEQ ID NO: 155800 - DNA, 75 bp, synthetic construct
  source 1..75: mol_type = other DNA
agaaccgtggatcaccagctgggttgaccgcagtgccaatgccattggtttgagtctgtataacttcctcaacat

SEQ ID NO: 155801 - DNA, 75 bp, synthetic construct
  source 1..75: mol_type = other DNA
gcccgggtggtggttctccactggttccaccatgggctgatgatcagccacagcaacccttaaccccgccacaag

SEQ ID NO: 155802 - DNA, 75 bp, synthetic construct
  source 1..75: mol_type = other DNA
gcgccactcattgaggctttttatcaacatcatagcgtgacgcgcctgaagtttatcaatggcgtactcggtggt

SEQ ID NO: 155803 - DNA, 75 bp, synthetic construct
  source 1..75: mol_type = other DNA
atgcactgcaagggggcgtgtatgaaaccactgctggatgtgatgatcctcgatgccttagaaaaagaaggcagt

SEQ ID NO: 155804 - DNA, 75 bp, synthetic construct
  source 1..75: mol_type = other DNA
gatcgcagcggtcaccgcgctaaattcacccgcaccggaaaaatgttattagagaaagggcgggaaattcttcac

SEQ ID NO: 155805 - DNA, 75 bp, synthetic construct
  source 1..75: mol_type = other DNA
tcagtatattgccaaccagtacccaggcataatccgcggtcacggttgtctcgacttcgacgacagtaccgacga

SEQ ID NO: 155806 - DNA, 75 bp, synthetic construct
  source 1..75: mol_type = other DNA
tcaaacagatgctgcactacctgtggcaacatcgtcacctctccacacagcaggccatggagctttttggctatg

SEQ ID NO: 155807 - DNA, 75 bp, synthetic construct
  source 1..75: mol_type = other DNA
tcgcagagtttgtggcaatgaaagccagtgcattcatgaaagacagaggcatggcttccggggttattaacggta

SEQ ID NO: 155808 - DNA, 75 bp, synthetic construct
  source 1..75: mol_type = other DNA
gcaagtcaagacggcaaagggcggcaggactggagcgccctgctaaatcaggttcgccagcaggctggtctttaa

SEQ ID NO: 155809 - DNA, 75 bp, synthetic construct
  source 1..75: mol_type = other DNA
agacatttttgacagtgtgccgttccgtggggtgatgctgggggcagatgagagcatggtgccttataaccagcg

SEQ ID NO: 155810 - DNA, 75 bp, synthetic construct
  source 1..75: mol_type = other DNA
taaaaattactccgtgcatattcggatggagaaagaccgattttctgttgtagggagtgtggatagtcgttcctg

SEQ ID NO: 155811 - DNA, 75 bp, synthetic construct
  source 1..75: mol_type = other DNA
cctcctgtttttggtttgttgttttatgaacaggaaagattaacaggaggtgtttttcgttatgtgttgataaga

SEQ ID NO: 155812 - DNA, 75 bp, synthetic construct
  source 1..75: mol_type = other DNA
tgttttttgttgagattgtctcgtgctgttttcttgttgagctttttcatgatgttgattcgttttttataaatc

SEQ ID NO: 155813 - DNA, 75 bp, synthetic construct
  source 1..75: mol_type = other DNA
gtgaatgcgattgatggcacattgctgattttagcgggtggcactgatgagcagattgcgcgtgcacgcccgatt

SEQ ID NO: 155814 - DNA, 75 bp, synthetic construct
  source 1..75: mol_type = other DNA
tgaaaatcttaagcaaattaatttcaggcaacctgttcccgagtatttcccatggccctcggcaggggaacatgt

SEQ ID NO: 155815 - DNA, 75 bp, synthetic construct
  source 1..75: mol_type = other DNA
gtgctcacgctggtgtcgcgtggcgacattacaggaatgagctttggctttcgcgcattatgcgaagaatggaat

SEQ ID NO: 155816 - DNA, 75 bp, synthetic construct
  source 1..75: mol_type = other DNA
gtggctagattatctggacgcactggaactggttgatacctccagtgctccagatattgaatggcctacgcctcc

SEQ ID NO: 155817 - DNA, 75 bp, synthetic construct
  source 1..75: mol_type = other DNA
tggaaatccggtcatcggaaatcaccaccagcggcagcaacacgcttacaggctacgttgttcgctgggataagc

SEQ ID NO: 155818 - DNA, 75 bp, synthetic construct
  source 1..75: mol_type = other DNA
ctgtatgagcagcaccccgaaaaaatgccgcgtgcggataatcgccgctggtgggcggatttagcgggggtgtga

SEQ ID NO: 155819 - DNA, 75 bp, synthetic construct
  source 1..75: mol_type = other DNA
tgtatgagcatgaccacagcatgttactggggcgcacccgttccggtacgctgagactggaagaggatgacacag

SEQ ID NO: 155820 - DNA, 75 bp, synthetic construct
  source 1..75: mol_type = other DNA
tctcgccgtcgagctttcgttgctgtttatagtgattagtgccggtgtcagcctgataagacaaaaggtgccaga

SEQ ID NO: 155821 - DNA, 75 bp, synthetic construct
  source 1..75: mol_type = other DNA
acataagacagctgtttttaatgcagacaacagtgtcgctctggggtatggctctcaggtgaatggagaaagcaa

SEQ ID NO: 155822 - DNA, 75 bp, synthetic construct
  source 1..75: mol_type = other DNA
aagaggacgatctgattgagtcctaccgccaggcgctgcagatcaaaatggtcaacagtgcgcaggagatgcgca

SEQ ID NO: 155823 - DNA, 75 bp, synthetic construct
  source 1..75: mol_type = other DNA
acgtccagaaaaaatgccatatccgaagtgcggccacctgtaggtagttatgttgctgttgctgagttcactttg

SEQ ID NO: 155824 - DNA, 75 bp, synthetic construct
  source 1..75: mol_type = other DNA
atgaaagattttctgaaaagtttatatgaagattacaatggaaagtattcagaactgatagatcagatgaataga

SEQ ID NO: 155825 - DNA, 75 bp, synthetic construct
  source 1..75: mol_type = other DNA
caaaggagcaccggaaacccgccggattataaatgtttcagatggtgttaaggatagtgatgcggccacaaaagg

SEQ ID NO: 155826 - DNA, 75 bp, synthetic construct
  source 1..75: mol_type = other DNA
ggggaatgctgatgggggtcgctatcaacgaacgccccgagctgttccacggcgttatcgcccaggtgccgtttg

SEQ ID NO: 155827 - DNA, 75 bp, synthetic construct
  source 1..75: mol_type = other DNA
ggtcatggcggtaaatctggtcgctttaaatcgtacgaaggcgtagcgatggaatatgcttttctggtcgcttta

SEQ ID NO: 155828 - DNA, 75 bp, synthetic construct
  source 1..75: mol_type = other DNA
ggctacggttcttacggcgcaagtattgatgccgatttcagttttagccgcttgagtttgttggatcgtggcttt

SEQ ID NO: 155829 - DNA, 75 bp, synthetic construct
  source 1..75: mol_type = other DNA
ccgtcgtgcgccaggcgaagcttctcggcttcagccgtggcagcgtctactatctgcctcgtccggtgtctgacg

SEQ ID NO: 155830 - DNA, 75 bp, synthetic construct
  source 1..75: mol_type = other DNA
tgagtcgattccgctcactacgggcgagtttgaagagtgggggaatccgcaggatctacaatattacgagtacat

SEQ ID NO: 155831 - DNA, 75 bp, synthetic construct
  source 1..75: mol_type = other DNA
cccatgccatgacgcttcatggtgatacgcgtatcgacaattactactggttgcgggacgacacgcgctcgcagc

SEQ ID NO: 155832 - DNA, 75 bp, synthetic construct
  source 1..75: mol_type = other DNA
gatgattctgccgattgccctgttaaccgcaggtctgctgggcacactgtttgtagtgattaaaaagaaatactg

SEQ ID NO: 155833 - DNA, 75 bp, synthetic construct
  source 1..75: mol_type = other DNA
gatgatcctgccgattgccttgttaactgcaggcttgttaggcacgctgtttgtggtgattaaaaagaaatactg

SEQ ID NO: 155834 - DNA, 75 bp, synthetic construct
  source 1..75: mol_type = other DNA
agtaaccagtttcggctatgccttaagcatgattccgttcgttaaacggcatgaagatcaggtaatgacattcct

SEQ ID NO: 155835 - DNA, 75 bp, synthetic construct
  source 1..75: mol_type = other DNA
gcgccctacatcaaaaatggctaccgctaccggcatatttatgaaccaggctgtgaatatgctatctaccagcgt

SEQ ID NO: 155836 - DNA, 75 bp, synthetic construct
  source 1..75: mol_type = other DNA
ttgatgcctgcgatgcattgttaaaactgggctatggatcaccttcgctctgttatgcgatgggcgggagtgcgg

SEQ ID NO: 155837 - DNA, 75 bp, synthetic construct
  source 1..75: mol_type = other DNA
gctatcggcatatttatgaaccaggctgtgaatatgctatctaccagcgtcaatcggcattcagtgaagagtggg

SEQ ID NO: 155838 - DNA, 75 bp, synthetic construct
  source 1..75: mol_type = other DNA
caaacctggtatttttactgttcacagcgggattgctggggctggcatggtgggttcgtggacgtgaacaaaaag

SEQ ID NO: 155839 - DNA, 75 bp, synthetic construct
  source 1..75: mol_type = other DNA
tctcgtgggcggtaactttgccatcggcattgtggtgtttgtcatcctcgtgatcatcaactttatggtcattac

SEQ ID NO: 155840 - DNA, 75 bp, synthetic construct
  source 1..75: mol_type = other DNA
catactcgacctgctgtttaccttcaatattgccttgtcgatcatggtgttgctggtggcgatgtttacccagcg

SEQ ID NO: 155841 - DNA, 75 bp, synthetic construct
  source 1..75: mol_type = other DNA
gcttgtcgcgtgattacgtagcgggggttaacttcctgcttagtaatcaacaggataaagcggtagacctgtttc

SEQ ID NO: 155842 - DNA, 75 bp, synthetic construct
  source 1..75: mol_type = other DNA
gcaagcccgccagcaatccccggctggctgcgtgatggtgttcaccgcccgtatccgcaaggaggtgcgccatgc

SEQ ID NO: 155843 - DNA, 75 bp, synthetic construct
  source 1..75: mol_type = other DNA
ttggttttcctcattatgccgcatggaaaatcgccgatcagatggcaaaaacgccagaagcagcgctcaacttta

SEQ ID NO: 155844 - DNA, 75 bp, synthetic construct
  source 1..75: mol_type = other DNA
cgcctgctggcatctgctgacgtcagaaaaagtggcgagtgccgccgatgcgcgacgtatcgtcagccattacga

SEQ ID NO: 155845 - DNA, 75 bp, synthetic construct
  source 1..75: mol_type = other DNA
tacggtgttaagcaccagcgaaaagaacgtccctatgaagaaaaagaaagttaccgctggcagcaggcttcggag

SEQ ID NO: 155846 - DNA, 75 bp, synthetic construct
  source 1..75: mol_type = other DNA
ctgcatcgggctggtgtacgtcgctatctttattctgaccttcggctgtgagttcccggcgctgggcaaacatgc

SEQ ID NO: 155847 - DNA, 75 bp, synthetic construct
  source 1..75: mol_type = other DNA
acctgcccgctatcgcattttgatgaaaggcgtggagataggcagtggtgatgcttatccggggcgttggttggc

SEQ ID NO: 155848 - DNA, 75 bp, synthetic construct
  source 1..75: mol_type = other DNA
aggcattatcccgtcaggagatgctgggcgcgccgccagtgctgttggtgaaccatgcgctgcggccattattat

SEQ ID NO: 155849 - DNA, 75 bp, synthetic construct
  source 1..75: mol_type = other DNA
cacagtacggcatctgatgaccaggggaataccaccactaacccgaagacgcgcgggctgctggctcactctgtc

SEQ ID NO: 155850 - DNA, 75 bp, synthetic construct
  source 1..75: mol_type = other DNA
acattaccgccctgcgcccctatttgagtgacaaactggcaaccctacttagcgatgccagccgcgataatagtc

SEQ ID NO: 155851 - DNA, 75 bp, synthetic construct
  source 1..75: mol_type = other DNA
tatagatatattagttaaacatcagctcggccgatttgcatggattggcgaagctaaattatggaaaggtcctgc

SEQ ID NO: 155852 - DNA, 75 bp, synthetic construct
  source 1..75: mol_type = other DNA
cgtcacgtgacgatcatggaggaattctaatttatataaagtctgacaaatcagcagtaaaattcaatgaatgga

SEQ ID NO: 155853 - DNA, 75 bp, synthetic construct
  source 1..75: mol_type = other DNA
tcgaaccaccttgccagacagcgcccacgttgccagtgcatcgactatccctaatcgtgatgcccgtaacattcc

SEQ ID NO: 155854 - DNA, 75 bp, synthetic construct
  source 1..75: mol_type = other DNA
ttgcaccgcagcaacgacatcaccgccttgcgcccttatctgagcgacaaactggcgacactgcttagcgatgcc

SEQ ID NO: 155855 - DNA, 75 bp, synthetic construct
  source 1..75: mol_type = other DNA
caatattccgctgcgcgtagatctgaaacaaggcggtcagagctggcaggatgaaatattgatgattcaggaggg

SEQ ID NO: 155856 - DNA, 75 bp, synthetic construct
  source 1..75: mol_type = other DNA
aaattgcctatgccgaactttactttacagatgttctctggcctgatttcgatgaacaagactttgaaggggcgt

SEQ ID NO: 155857 - DNA, 75 bp, synthetic construct
  source 1..75: mol_type = other DNA
cctggaaaccaccgttaacactgctcacggcatcgttaaaaagggtgtgccaatcaagaaaatttgcatggtgtt

SEQ ID NO: 155858 - DNA, 75 bp, synthetic construct
  source 1..75: mol_type = other DNA
ttaataataacttaccgaaacacagacaagtttataaaatagcctatttactttccagaatccatgaaattgaac

SEQ ID NO: 155859 - DNA, 75 bp, synthetic construct
  source 1..75: mol_type = other DNA
cgttgatttattagttaaacatcaattcggaaaattcgaatggatcggtgaagcaaaattatggagaggcccaaa

SEQ ID NO: 155860 - DNA, 75 bp, synthetic construct
  source 1..75: mol_type = other DNA
ggcaatggtcgctgggcaaaaaagcaagggaagattcgtgcctttgggcataaagccggggcaaaatccgtccgc

SEQ ID NO: 155861 - DNA, 75 bp, synthetic construct
  source 1..75: mol_type = other DNA
gaaggggcgttaaatgcctttgctaatcgagagcgtcgcttcggcggcaccgagcccggtgatgaaacagcctga

SEQ ID NO: 155862 - DNA, 75 bp, synthetic construct
  source 1..75: mol_type = other DNA
aaaaatcatcgctctgtacgagcaggccgccgaatgtgacggcgaagtggtacgtcctaaagaaccgaactggac

SEQ ID NO: 155863 - DNA, 75 bp, synthetic construct
  source 1..75: mol_type = other DNA
cccgttaacagttgacccgtcaaatattgacccctcaacggttgacccgtcaaattttgatggatcaaccgttga

SEQ ID NO: 155864 - DNA, 75 bp, synthetic construct
  source 1..75: mol_type = other DNA
tgacgggtacagtgtcagtgaatagtgcaaacctaccgacagcttcattcccttcgcagggatttaccggggcgt

SEQ ID NO: 155865 - DNA, 75 bp, synthetic construct
  source 1..75: mol_type = other DNA
ggtacgaaccgacaccaaagttatacctacaaaaggggctgtcgtcaaagctaattttgaaaccagggttggggc

SEQ ID NO: 155866 - DNA, 75 bp, synthetic construct
  source 1..75: mol_type = other DNA
gcgcattattactgtgcttttcgtcaccactgatttctcaggctgcgacactggacgtacgtggtggatatcgta

SEQ ID NO: 155867 - DNA, 75 bp, synthetic construct
  source 1..75: mol_type = other DNA
aatatgactaccttgaccgtcagggtgtttacaacggtagagataatttatcggaaaacagttatcgcattggtg

SEQ ID NO: 155868 - DNA, 75 bp, synthetic construct
  source 1..75: mol_type = other DNA
gtcattaacagcggtgaccgatcaaaacggaatcgcgacaacaagcgtgaaaggagcgatgacaggtagcgtcac

SEQ ID NO: 155869 - DNA, 75 bp, synthetic construct
  source 1..75: mol_type = other DNA
gatttaagtaccttaaaggcaacggttgaggatggcagtggtaacctgatcgaaggtctcactgtgtacttcgcc

SEQ ID NO: 155870 - DNA, 75 bp, synthetic construct
  source 1..75: mol_type = other DNA
ttatctcaatctatatagtttttttaatcggtatggtcttcgacaagatcaacagatatctgagaatatgtatta

SEQ ID NO: 155871 - DNA, 75 bp, synthetic construct
  source 1..75: mol_type = other DNA
tgggtcgatgttgatgctaccggtaaagtgacatttaaaaatgtcggcagcaattgggaaaggattacggcgacg

SEQ ID NO: 155872 - DNA, 75 bp, synthetic construct
  source 1..75: mol_type = other DNA
agtagccgaggtcaccataacgcctgaaagaaacggctcgtatactgtaaaagcatccctagcgaatggagcttc

SEQ ID NO: 155873 - DNA, 75 bp, synthetic construct
  source 1..75: mol_type = other DNA
aaagtttctgaagggatggaatttgtgcaatcaggtactaacgtgccctatataaaaattagcgcaattgattac

SEQ ID NO: 155874 - DNA, 75 bp, synthetic construct
  source 1..75: mol_type = other DNA
ttcggtatcgacaccgtgcaggcgatggcaggcaaagtgaactggacggtgtacatcctgcaaaccggtttctcc

SEQ ID NO: 155875 - DNA, 75 bp, synthetic construct
  source 1..75: mol_type = other DNA
gttacagaaagaactggttaacactgatgtggagggcgaaatcattatccgggcgttgactgacgggaaagttga

SEQ ID NO: 155876 - DNA, 75 bp, synthetic construct
  source 1..75: mol_type = other DNA
actcgaattgcagaaagaactggttaacactgatgtggaaggcgaaatcattatccgggcgttgtctgacgggaa

SEQ ID NO: 155877 - DNA, 75 bp, synthetic construct
  source 1..75: mol_type = other DNA
ttcgtgaccgttccgggcgcaccattgccggtgacgttaacgatgactggctgcaacctgccagtaatgagatgt

SEQ ID NO: 155878 - DNA, 75 bp, synthetic construct
  source 1..75: mol_type = other DNA
agtacgccgtacctgagctacatcaacgactacggcggacgtccggttctgccgttcagctgcagcggagaccgc

SEQ ID NO: 155879 - DNA, 75 bp, synthetic construct
  source 1..75: mol_type = other DNA
tgagcttctatggctggaaccgcattgaccgctttatggcagcctggaaacgcgccggattcagcgtggttggcc

SEQ ID NO: 155880 - DNA, 75 bp, synthetic construct
  source 1..75: mol_type = other DNA
gcatcgatgttatggccacgattcctgataacgccattgatttcatcttaactgacccaccgtatctcgtcggtt

SEQ ID NO: 155881 - DNA, 75 bp, synthetic construct
  source 1..75: mol_type = other DNA
agagctctccgggcaggaagcggaacacggcacgttttccaaaacggtccgggaaggggatctgtaccaaatccg

SEQ ID NO: 155882 - DNA, 75 bp, synthetic construct
  source 1..75: mol_type = other DNA
tctgcgcaacaacacagtttgacgcaacgaaagtgcattcttcaggttttgtggcaccgtatacgctgtcgcaag

SEQ ID NO: 155883 - DNA, 75 bp, synthetic construct
  source 1..75: mol_type = other DNA
ttacggacccgccatatctcgtcggtttgcgtgaccgttccgggcgcaccatcgccggcgataaaaccgatgaat

SEQ ID NO: 155884 - DNA, 75 bp, synthetic construct
  source 1..75: mol_type = other DNA
gaaacacaaaaaagcggcgtcagaaatcagctttaagttcgcgttccagtttatcgcgacagaaatgatagtgct

SEQ ID NO: 155885 - DNA, 75 bp, synthetic construct
  source 1..75: mol_type = other DNA
tctggatggtggtggccatgacctttttccgcaatgagccaattaccgatgtggttcgccgtctgaacctgagcg

SEQ ID NO: 155886 - DNA, 75 bp, synthetic construct
  source 1..75: mol_type = other DNA
tgggctggaaatattcaggcaaccgccatcacccgacggaaaagcccgttaccagcctgcaaccactgattgaga

SEQ ID NO: 155887 - DNA, 75 bp, synthetic construct
  source 1..75: mol_type = other DNA
agggcacctcgtgttcaccaaaaactacacatccaaatctgcatatgtcgcgtaccgccacgaatgcgcttacat

SEQ ID NO: 155888 - DNA, 75 bp, synthetic construct
  source 1..75: mol_type = other DNA
ctgcaacctgccagcaatgaaatgtaccgcgtactcaaaaaagacgcgctgatggtgagtttctatggctggaac

SEQ ID NO: 155889 - DNA, 75 bp, synthetic construct
  source 1..75: mol_type = other DNA
cctggcaaaaggccgtccacgtctgccacaaaacccgctgccggacgtgctgggctggaaatattcgggcaatcg

SEQ ID NO: 155890 - DNA, 75 bp, synthetic construct
  source 1..75: mol_type = other DNA
cgactggctgccgttcaacgggccatgcagcagggggccgcgaatgatgactggtttatgccggaggctgcgtaa

SEQ ID NO: 155891 - DNA, 75 bp, synthetic construct
  source 1..75: mol_type = other DNA
ggacagcaacgactggctgccgttcaacgggccatgcagcagggggccgcgaatgatgactggtttatgccggag

SEQ ID NO: 155892 - DNA, 75 bp, synthetic construct
  source 1..75: mol_type = other DNA
aagacgcgctgatggtcagcttctacggctggcaccgtattgaccgctttatggcggcctggaaacgcgccggat

SEQ ID NO: 155893 - DNA, 75 bp, synthetic construct
  source 1..75: mol_type = other DNA
cttcaccaaaaactacacattgaaggcagcatatgtgagctatcgccacgaatgcgcctacatcctggcaaaagg

SEQ ID NO: 155894 - DNA, 75 bp, synthetic construct
  source 1..75: mol_type = other DNA
tgtaatgaaatgtaccacgtactcaaaaaagacgcgttgatggtgagcttctatggctggaaccgcgtcgatcgc

SEQ ID NO: 155895 - DNA, 75 bp, synthetic construct
  source 1..75: mol_type = other DNA
gcgggggaagcagccaaaactatcagataaacaacaaaaagaactttgccgtatgcatgaaaccgggcagtactc

SEQ ID NO: 155896 - DNA, 75 bp, synthetic construct
  source 1..75: mol_type = other DNA
ctggcaaaaggacgtccggcgctgcctcagaagccattgcccgacgtgctgggctggaaatattcaggcaatcgt

SEQ ID NO: 155897 - DNA, 75 bp, synthetic construct
  source 1..75: mol_type = other DNA
gataacgccattgatttcatcctcaccgacccgccgtacctcgtcggttttcgtgaccgtcaggggcgtaccatt

SEQ ID NO: 155898 - DNA, 75 bp, synthetic construct
  source 1..75: mol_type = other DNA
aatgcgcttacatcctggcaaaagggcgtccggcgctgcctcagaagccattgcccgacgtgctgggctggaaat

SEQ ID NO: 155899 - DNA, 75 bp, synthetic construct
  source 1..75: mol_type = other DNA
atgagggctggtatcaggtgcgcattgccgggcgtgatgcaggcgaaaatgaattatctgcccgtcttaatgagc

SEQ ID NO: 155900 - DNA, 75 bp, synthetic construct
  source 1..75: mol_type = other DNA
ctgcctttacggggatttgcaacgatttggccgccgcatcgagcttcgtgtgaaaacgggggcagaagcgatccg

SEQ ID NO: 155901 - DNA, 75 bp, synthetic construct
  source 1..75: mol_type = other DNA
ctgcctttacggggatttccaacgatttggccgccgcatcgaacttcgtgtgaaaacgggggcagaagcaatccg

SEQ ID NO: 155902 - DNA, 75 bp, synthetic construct
  source 1..75: mol_type = other DNA
tgatacaggtgaaaacgaattatcagcccgtctgaatgagccgctgaaaaatggtgccgtgatccacatcgtacc

SEQ ID NO: 155903 - DNA, 75 bp, synthetic construct
  source 1..75: mol_type = other DNA
gcaggggccagtatgatcctgggcggtgtggctcagatgctggcaccgaaagccagaactccccgcacacagaca

SEQ ID NO: 155904 - DNA, 75 bp, synthetic construct
  source 1..75: mol_type = other DNA
tgtacggtgaaatgcgcgtggggtcgcgggtggtatctcaggagatcagcacggcagatgaaggtgatggtggtc

SEQ ID NO: 155905 - DNA, 75 bp, synthetic construct
  source 1..75: mol_type = other DNA
cacgatgctgttttcacttggagccagcatgattctgggtggtgtggcccagatgctggccccgaaggctaaaac

SEQ ID NO: 155906 - DNA, 75 bp, synthetic construct
  source 1..75: mol_type = other DNA
gtggcaccgtatacgctgtcgcaaggtctggatcgaactctgcagtatgaattcgtccatgccaaaaaagatgac

SEQ ID NO: 155907 - DNA, 75 bp, synthetic construct
  source 1..75: mol_type = other DNA
taacggacccgccatatctcgtcggttttcgtgaccgttccgggcgcaccatcgccggcgataaaaccgatgaat

SEQ ID NO: 155908 - DNA, 75 bp, synthetic construct
  source 1..75: mol_type = other DNA
taactgacccgccatatctcgtcggtttgcgtgaccgttccgggcgcaccatcgccggcgataaaaccgatgaat

SEQ ID NO: 155909 - DNA, 75 bp, synthetic construct
  source 1..75: mol_type = other DNA
gaaatgctggttggctcccgccgtatatcccaggacatcagtacccgtgatgaaggcgggggcggaaaggtcgtg

SEQ ID NO: 155910 - DNA, 75 bp, synthetic construct
  source 1..75: mol_type = other DNA
gcccgtcttcatgaaccgctgagcgggagggccgtgattcatattgtaccgaggctggcaggggccgggggaaat

SEQ ID NO: 155911 - DNA, 75 bp, synthetic construct
  source 1..75: mol_type = other DNA
ttgtctgcccgtcttaatgagccgctggaaaatggtgccgtgatccatatcgtgccgcgtctggcaggagccaaa

SEQ ID NO: 155912 - DNA, 75 bp, synthetic construct
  source 1..75: mol_type = other DNA
ggtgaaatgcgcgtggggtcacgtgtggcatctcaggagatcagtacagctgatgaaggtgatggtggtgaaatt

SEQ ID NO: 155913 - DNA, 75 bp, synthetic construct
  source 1..75: mol_type = other DNA
tacaccggcttcgcctatgcagcgcgttctggtgcatctgttggcatcgatgacatggtcatcccggagaagaaa

SEQ ID NO: 155914 - DNA, 75 bp, synthetic construct
  source 1..75: mol_type = other DNA
cggcacagattcgtcagcttgctggtatgcgtggtctgatggcaaagccggatggctccatcatcgaaacgccaa

SEQ ID NO: 155915 - DNA, 75 bp, synthetic construct
  source 1..75: mol_type = other DNA
ctgccgggtaaagcgattgttcaactggaagatggcgtacagataagctccggtgacaccctggcgcgtattccg

SEQ ID NO: 155916 - DNA, 75 bp, synthetic construct
  source 1..75: mol_type = other DNA
gtggctcaggaagtagcggaggtgcagggttaagtggggatgatattatagttgataattacagaagtatatacg

SEQ ID NO: 155917 - DNA, 75 bp, synthetic construct
  source 1..75: mol_type = other DNA
gccgactccggtgcgcgtggttctgctgcacagattcgtcagcttgcgggtatgcgtggtctgatggcgaagccg

SEQ ID NO: 155918 - DNA, 75 bp, synthetic construct
  source 1..75: mol_type = other DNA
tgatcgacgaatttggtcgtaccaaagaaagctacaaagtgccttacggtgcggtactggcgaaaggtgatggcg

SEQ ID NO: 155919 - DNA, 75 bp, synthetic construct
  source 1..75: mol_type = other DNA
gatggccgtaaatatacctacgacccggtcagcgaagatgcgatcagcacgactcatattgagtatcagtactct

SEQ ID NO: 155920 - DNA, 75 bp, synthetic construct
  source 1..75: mol_type = other DNA
atgctccccgtaaaaatggcaacaccactttcggtaattgtcggcaccgcaaccgccttgtacgccacctggctg

SEQ ID NO: 155921 - DNA, 75 bp, synthetic construct
  source 1..75: mol_type = other DNA
gtttctgggaatacccgtcggtttatatgcgctgtcgtatttacccgaccattttatgaaagtgggcttaggtgg

SEQ ID NO: 155922 - DNA, 75 bp, synthetic construct
  source 1..75: mol_type = other DNA
tctttggccgacatgatcaaaggtaaacagggtcgtttccgtcagaacctactcggtaagcgtgttgactactcc

SEQ ID NO: 155923 - DNA, 75 bp, synthetic construct
  source 1..75: mol_type = other DNA
cgctgcgcgatcgcgtactgggtcgtgtaactgctgaagacgttctgaagccgggtactgctgatatcctcgttc

SEQ ID NO: 155924 - DNA, 75 bp, synthetic construct
  source 1..75: mol_type = other DNA
gaccaagcgtatcaaactgctggaagcgttcgttcagtctggtaacaaaccagagtggatgatcctgaccgttct

SEQ ID NO: 155925 - DNA, 75 bp, synthetic construct
  source 1..75: mol_type = other DNA
aaagcggatgaacaccgtgaaagcaacggtacccgtgttgagagcaccggtgacggtaacgtccgtacccgtctg

SEQ ID NO: 155926 - DNA, 75 bp, synthetic construct
  source 1..75: mol_type = other DNA
cgaaaaataccagcatgtggatgcgccacgaaggggggcataaccgctggcgtgatggtacaggccagctgaaaa

SEQ ID NO: 155927 - DNA, 75 bp, synthetic construct
  source 1..75: mol_type = other DNA
ttggtggagcaggtgtctacggtgtaaacttcacactaaataataatggtagtatttggggaggagatggatata

SEQ ID NO: 155928 - DNA, 75 bp, synthetic construct
  source 1..75: mol_type = other DNA
aaaaccatgataataatttgcgtcctgaggcaggtagctatgttgccagtattgctgctgcaaataatctgtttg

SEQ ID NO: 155929 - DNA, 75 bp, synthetic construct
  source 1..75: mol_type = other DNA
gaccgcaggtaagcttaacggtgcagctgattccgtactgaacatcaatggcggtaacctgacactgacagccgg

SEQ ID NO: 155930 - DNA, 75 bp, synthetic construct
  source 1..75: mol_type = other DNA
acaaagtgacatcatcggaaatggcgtgattgaagctctaaacggagtgaccgcattaacgggtaataatgctgg

SEQ ID NO: 155931 - DNA, 75 bp, synthetic construct
  source 1..75: mol_type = other DNA
gcatctatgaacctgtctgtaggaaatgctaatgttcacgcaaatactattacattaaaaagtgattcatggctt

SEQ ID NO: 155932 - DNA, 75 bp, synthetic construct
  source 1..75: mol_type = other DNA
attatggagcataagtccggggtgtcccgttctgtatggacggcccgtcttaatggttgccagattatctggaga

SEQ ID NO: 155933 - DNA, 75 bp, synthetic construct
  source 1..75: mol_type = other DNA
cgtgaaagtaacggaaccagtattgaaaataccggtaacggaaatattctcactcgcctgggagcgagaacatgg

SEQ ID NO: 155934 - DNA, 75 bp, synthetic construct
  source 1..75: mol_type = other DNA
tttccgataatctttcacctttattatatgatggctgggacggcaaaagtctgacaaaatcaggtaatggtactc

SEQ ID NO: 155935 - DNA, 75 bp, synthetic construct
  source 1..75: mol_type = other DNA
tactggtgcagagacacttaatgggattgaagtgattcacgtcagtggcaatgctgataatgctgaattcattca

SEQ ID NO: 155936 - DNA, 75 bp, synthetic construct
  source 1..75: mol_type = other DNA
gacggcaaaagtctgacaaaatcaggtaatggtactcttatactttctgcaacaaacaattatacaggaaataca

SEQ ID NO: 155937 - DNA, 75 bp, synthetic construct
  source 1..75: mol_type = other DNA
ctgatcgacgaggcgaaaaccctgttcctgaaccacaacaacaggggtaactatctcatcattcgcgaaaccttt

SEQ ID NO: 155938 - DNA, 75 bp, synthetic construct
  source 1..75: mol_type = other DNA
tggtattgccatgtataacccgtcgggtgagatgatttaccatggcgaaatgatgctgcttgacgcgaagttaat

SEQ ID NO: 155939 - DNA, 75 bp, synthetic construct
  source 1..75: mol_type = other DNA
atgcaaaacagaattaagttgttttaccggccagcgggtattgctccggtaaataaagcgacctttaaaaagtta

SEQ ID NO: 155940 - DNA, 75 bp, synthetic construct
  source 1..75: mol_type = other DNA
cataggtagtacgctttgcgtgtactgcgatcccccttacctgccattcagtggccgggacaatttcaccgccta

SEQ ID NO: 155941 - DNA, 75 bp, synthetic construct
  source 1..75: mol_type = other DNA
agacaaggcaaacagcacccgaacgctgcttatccacgcagattttaaggatacgctgaactctgccagtcacct

SEQ ID NO: 155942 - DNA, 75 bp, synthetic construct
  source 1..75: mol_type = other DNA
ccgtgaactgcgactggccgccatgtttttgtacctgaaccgacacagctttaacggtttgttccgcgtgaacgg

SEQ ID NO: 155943 - DNA, 75 bp, synthetic construct
  source 1..75: mol_type = other DNA
tcatcacccgacggaaaagcccgttaccagcctgcaaccactgattgagagcttcacacatccgaacgcgattgt

SEQ ID NO: 155944 - DNA, 75 bp, synthetic construct
  source 1..75: mol_type = other DNA
atgaagttaaaacaacaaactgtgcgactttcacgtcgcaccttaaccgacccaccatatctcgtcggttttcgt

SEQ ID NO: 155945 - DNA, 75 bp, synthetic construct
  source 1..75: mol_type = other DNA
agggcaccttgtgttcaccaaaagctacacatccaaatctgcgtatgtcgcgtaccgtcacgaatgcgcctatat

SEQ ID NO: 155946 - DNA, 75 bp, synthetic construct
  source 1..75: mol_type = other DNA
aagtcagagtattaatgtcaaaagtaataatgcgaataactggtatctgaccattatcgatgacaatggcaacta

SEQ ID NO: 155947 - DNA, 75 bp, synthetic construct
  source 1..75: mol_type = other DNA
gcaacgccttgccgccgtgcaacgggccatgcagcagggggccgcgaatgatgactggtttatgccggaggctgc

SEQ ID NO: 155948 - DNA, 75 bp, synthetic construct
  source 1..75: mol_type = other DNA
taaccctgccatccagccttgcgccccatccgccctggcactggcagacatgcttcctcctcgcggattccacat

SEQ ID NO: 155949 - DNA, 75 bp, synthetic construct
  source 1..75: mol_type = other DNA
acagaagaaatggaaaacaatcaggtggactggttcattgttgggttcagagtactgcatcatcagaggaaaaaa

SEQ ID NO: 155950 - DNA, 75 bp, synthetic construct
  source 1..75: mol_type = other DNA
tagggcaaatagcttattcaatcgataatgacccggcaagaaagattacctggtctcatataaatgcatacaaaa

SEQ ID NO: 155951 - DNA, 75 bp, synthetic construct
  source 1..75: mol_type = other DNA
gagagttttagttttggggttctttctcctgcgccgggtgggcgcatgtcaaaactacaggcttttttttggtac

SEQ ID NO: 155952 - DNA, 75 bp, synthetic construct
  source 1..75: mol_type = other DNA
cggatggggtcatggtggaaaccaacgtggtatgcattgttatcgcgttaatgtttctttatacctttgtcggca

SEQ ID NO: 155953 - DNA, 75 bp, synthetic construct
  source 1..75: mol_type = other DNA
cgctctcggtgattgtcggcaccgcgaccgccttgtacgccacctggctgtcacgtaaagaaacggattggcgat

SEQ ID NO: 155954 - DNA, 75 bp, synthetic construct
  source 1..75: mol_type = other DNA
atacgacggcctggtgtatgcggatgtcccagaaagagatgctgccccgggggcttccgtcggaagagcagagcc

SEQ ID NO: 155955 - DNA, 75 bp, synthetic construct
  source 1..75: mol_type = other DNA
cctgcgcagtggtgaacgcgcccgtgttccggccttgaagctgaaatactggcagcagttcatgacggttgtcta

SEQ ID NO: 155956 - DNA, 75 bp, synthetic construct
  source 1..75: mol_type = other DNA
gccgagaaaacagtgaacgattggaatgaccagaagacccgcgacgcgctggcccgcattcagggctatgtaaaa

SEQ ID NO: 155957 - DNA, 75 bp, synthetic construct
  source 1..75: mol_type = other DNA
agccgctacatccttggagattccaatggtgcgctgattaatttctggcgggcagcacgggacaacaccgacagt

SEQ ID NO: 155958 - DNA, 75 bp, synthetic construct
  source 1..75: mol_type = other DNA
aagggaaaattatctttggacccagagctttacaaaaagaaggataccactcagagcgaaaggaagagtgattca

SEQ ID NO: 155959 - DNA, 75 bp, synthetic construct
  source 1..75: mol_type = other DNA
taattcctgtaagcataaaagaaacacaacaactaaaagtatgttttttaaaagcttctaagctcaagaaaaatc

SEQ ID NO: 155960 - DNA, 75 bp, synthetic construct
  source 1..75: mol_type = other DNA
caacggttctcttggccgccctttattttatggctttttctttttacaaagggtacagctcattttatggattcc

SEQ ID NO: 155961 - DNA, 75 bp, synthetic construct
  source 1..75: mol_type = other DNA
gctggcaccgaaagccaggacgcccacggcagccagtacagataacggcaaacagaacacgtatttctcgtcact

SEQ ID NO: 155962 - DNA, 75 bp, synthetic construct
  source 1..75: mol_type = other DNA
agtggcgcagatgctggcaccgaaagccaggacgcccacggcagccagtacagataacggcaaacagaacacgta

SEQ ID NO: 155963 - DNA, 75 bp, synthetic construct
  source 1..75: mol_type = other DNA
caggccttatctgaagacttgtctgacccaagagatgctggcgcgttacggggtgaagacagaggaatatccggc

SEQ ID NO: 155964 - DNA, 75 bp, synthetic construct
  source 1..75: mol_type = other DNA
ctatttctcctcactggataacatggttggatggattaaaaagcgtgctgctgaacagtacgccagtgctggaca

SEQ ID NO: 155965 - DNA, 75 bp, synthetic construct
  source 1..75: mol_type = other DNA
ggtgaaagacgggacacccggagttattgccggtgcggtgacaaacctgctttcgctcggtgtcaatctggtaac

SEQ ID NO: 155966 - DNA, 75 bp, synthetic construct
  source 1..75: mol_type = other DNA
ccgggcgcggtaatacatattgtccctcgcctggagggggcaaaaaacggaggggtttttcaggtcgtggccggt

SEQ ID NO: 155967 - DNA, 75 bp, synthetic construct
  source 1..75: mol_type = other DNA
accaacaaacggcggaaatctttgcagtactatgggaaaattttcccgtaccacaggtgattaactacgacaaat

SEQ ID NO: 155968 - DNA, 75 bp, synthetic construct
  source 1..75: mol_type = other DNA
ctcccggcgtttcgtcagaaactgagcgatggctggtatcaggtacggattgccgggcgggatgcaggagaaacc

SEQ ID NO: 155969 - DNA, 75 bp, synthetic construct
  source 1..75: mol_type = other DNA
tttggccgccgcatcgaccttcgtgtaaaaacgggggctgaagccatccgggcgttgtccacacagctcccggcg

SEQ ID NO: 155970 - DNA, 75 bp, synthetic construct
  source 1..75: mol_type = other DNA
gcaggggccagtatgatcctgggtggtgtggcccagatgctggcaccgaaagccaggacgcccacggcagccagt

SEQ ID NO: 155971 - DNA, 75 bp, synthetic construct
  source 1..75: mol_type = other DNA
ggtgaaatgcgcgtgggatcccgggtggtatctcaggagatcagcactgcagatgaaggcgatggtggtcaggtt

SEQ ID NO: 155972 - DNA, 75 bp, synthetic construct
  source 1..75: mol_type = other DNA
ggggaacccgatgccggtgccttacggtgaaatgctggttggttcacgacggatatcccaggacatcagcacccg

SEQ ID NO: 155973 - DNA, 75 bp, synthetic construct
  source 1..75: mol_type = other DNA
ctgtacggtgaaatgcgcgtggggtcacgcgtggtatctcaggagatctgcacggcagacgaaggggacggtggt

SEQ ID NO: 155974 - DNA, 75 bp, synthetic construct
  source 1..75: mol_type = other DNA
tggatttaacgccgacggtattaattcttaccccggtattaatgcctttagttaaagaggcaggaatcgatccga

SEQ ID NO: 155975 - DNA, 75 bp, synthetic construct
  source 1..75: mol_type = other DNA
cgctggaaaatggtgccgtgatccacatcgtaccgcgtctggctggtgccaaaagtggcggcgtgtttcaggcgg

SEQ ID NO: 155976 - DNA, 75 bp, synthetic construct
  source 1..75: mol_type = other DNA
gtgctgcggctgtatcgggcatgtatgcggcaggggccagtatgattctgggtggtgtggcccagatgctggcac

SEQ ID NO: 155977 - DNA, 75 bp, synthetic construct
  source 1..75: mol_type = other DNA
gtgatacaggtgaaacagaattatcagcccgtcttaatgaaccgctggcgaatggggccgtgatccacatcgtgc

SEQ ID NO: 155978 - DNA, 75 bp, synthetic construct
  source 1..75: mol_type = other DNA
tcgcaggaagtcagtacccgtgatgaagggaacgatgggaatatagtggttatagggcgacaggtatacaacagc

SEQ ID NO: 155979 - DNA, 75 bp, synthetic construct
  source 1..75: mol_type = other DNA
cacttcggcggctggcgtgcggcgctgaagatttgtctggtgatggggatgatcgaaatctttggttgcgtctgg

SEQ ID NO: 155980 - DNA, 75 bp, synthetic construct
  source 1..75: mol_type = other DNA
gtttatggcatcaatggtgcgatttccgatacttacgcttccatgatggctaccatcgaacgtatgggcgatgcc

SEQ ID NO: 155981 - DNA, 75 bp, synthetic construct
  source 1..75: mol_type = other DNA
ttaccggtattcgtaccatcatgctgactggtcacatcatgttccagcaggcggggctgattgccgttacgctgt

SEQ ID NO: 155982 - DNA, 75 bp, synthetic construct
  source 1..75: mol_type = other DNA
atggcgtgtgcggaatctgaccacctggaacaaatcatcgggtcagcccggggaatgggaaagttcatacacccg

SEQ ID NO: 155983 - DNA, 75 bp, synthetic construct
  source 1..75: mol_type = other DNA
ccgggcgtgatacaggtgaaaacgaattatcagcccgtctgaatgagccgctggaaaatggtgccgtgatccaca

SEQ ID NO: 155984 - DNA, 75 bp, synthetic construct
  source 1..75: mol_type = other DNA
atcctgattattcctggctttatcccgatgttcttctccaacgccaccatcggcgtgttcgctaaccacttcggc

SEQ ID NO: 155985 - DNA, 75 bp, synthetic construct
  source 1..75: mol_type = other DNA
ctgaatattttccacgacaacatcgtctccacggcgattgtcatgaccatcttctttggcgccattctgctctcc

SEQ ID NO: 155986 - DNA, 75 bp, synthetic construct
  source 1..75: mol_type = other DNA
ttcgcggtggcgatcttcatcatcactcagggcgtgcgcatgtttgtggcggaactctctgaagcatttaacggt

SEQ ID NO: 155987 - DNA, 75 bp, synthetic construct
  source 1..75: mol_type = other DNA
gccacatcatgttccaacaggcgggtctgatagctgtcacgctgtttattttcggctactccatgtggactacca

SEQ ID NO: 155988 - DNA, 75 bp, synthetic construct
  source 1..75: mol_type = other DNA
tcctcggcaaaaaagaggagagcgttgaagacctcaaactgcctggctggctgaacattttccacgacaacatcg

SEQ ID NO: 155989 - DNA, 75 bp, synthetic construct
  source 1..75: mol_type = other DNA
caaaggtacgataaaaaccattattggtttcatgttgttgcaggcagggtccggcatcctgaccagtaccttcaa

SEQ ID NO: 155990 - DNA, 75 bp, synthetic construct
  source 1..75: mol_type = other DNA
cgtcactggacaacatgattgctcaggggaatccgatgccggtgccttacggtgaaatgctggttggttcacgac

SEQ ID NO: 155991 - DNA, 75 bp, synthetic construct
  source 1..75: mol_type = other DNA
aaccgcatgtccctgtcagtcaactggtcgcgcaaccatagcactaggggatattacggtagcaagtcacgtacg

SEQ ID NO: 155992 - DNA, 75 bp, synthetic construct
  source 1..75: mol_type = other DNA
tatcactctttgtctgacgttttagatacttactatgatagtaatagcttcatatacaataaagaagataatagg

SEQ ID NO: 155993 - DNA, 75 bp, synthetic construct
  source 1..75: mol_type = other DNA
cggccgtcattgcggttgctatatgccggaacccttgcagctggggggcagccattgcggcgtgtataccggtat

SEQ ID NO: 155994 - DNA, 75 bp, synthetic construct
  source 1..75: mol_type = other DNA
tgtacggtgaaatgcgcgtggggtcacgggtaatttcgcaggagatcagcacagcggatgagggggatggcgtcc

SEQ ID NO: 155995 - DNA, 75 bp, synthetic construct
  source 1..75: mol_type = other DNA
tatgtgctgacctgtcggcgataccgcaagccacggagaactatcagtttgctgcacagcaactggtgctgggta

SEQ ID NO: 155996 - DNA, 75 bp, synthetic construct
  source 1..75: mol_type = other DNA
aatatacaaaaaccagagtggcacttgctgtcatacttgcctgcgcttttatttacagcagtacaggagaagccc

SEQ ID NO: 155997 - DNA, 75 bp, synthetic construct
  source 1..75: mol_type = other DNA
agcctgcttcagtggtggtggatctcgactgtctgaaaacgcttcccccgcgtgagttagcgtcggggctggcag

SEQ ID NO: 155998 - DNA, 75 bp, synthetic construct
  source 1..75: mol_type = other DNA
ctgttaaccctgacccgtaaggacggaacgcctctgccatttggtgcggttgtgactgttgacggaaaacaggga

SEQ ID NO: 155999 - DNA, 75 bp, synthetic construct
  source 1..75: mol_type = other DNA
cgcgctgatctactggatcttctgtttcagcatgtcacgttatagccaacatctggaaaaacgttttaacaccgg

SEQ ID NO: 156000 - DNA, 75 bp, synthetic construct
  source 1..75: mol_type = other DNA
tgcagctgtatcgggcatatatgcggcaggggctagtatgatcctcggcggtgtggcgcagatgctggcaccgaa

SEQ ID NO: 156001 - DNA, 75 bp, synthetic construct
  source 1..75: mol_type = other DNA
ctgtacggtgaaatgcgcgtggggtcgcgggtggcttctcaggagatcagcacggcagatgaaggggacggtggt

SEQ ID NO: 156002 - DNA, 75 bp, synthetic construct
  source 1..75: mol_type = other DNA
caggggccagtatgatcctgggtggtgtggcccagatgctggcaccgaaagcccggacgtgtagtggtcaagtaa

SEQ ID NO: 156003 - DNA, 75 bp, synthetic construct
  source 1..75: mol_type = other DNA
atgagccgctggcaaatggtgcagtgatccacatcgtgccgcgcctggcgggtgccaaaagtggcggtgtgtttc

SEQ ID NO: 156004 - DNA, 75 bp, synthetic construct
  source 1..75: mol_type = other DNA
acgccatgcacctgacaatgagtggcgttcctccgcgcgtcctgcaatccctgctgggacaccgttatgcaagaa

SEQ ID NO: 156005 - DNA, 75 bp, synthetic construct
  source 1..75: mol_type = other DNA
cgcgtctggcgggtgccaaaagtggcggtgtgtttcaggtggtgctgggggcggcgctgattgcggtggcatggt

SEQ ID NO: 156006 - DNA, 75 bp, synthetic construct
  source 1..75: mol_type = other DNA
tcacgacggatatcccaggacatcagcacccgtgatgaaggcggtgacgggaaggtggtggttatcgggcggcag

SEQ ID NO: 156007 - DNA, 75 bp, synthetic construct
  source 1..75: mol_type = other DNA
gtcagctctgtgcgcgtgaaaaaattttgcgcaacaacacagtttgacgcaacgaaagtgcattcttcaggtttt

SEQ ID NO: 156008 - DNA, 75 bp, synthetic construct
  source 1..75: mol_type = other DNA
tttcgtcagaaactgagcgacggctggtatcaggtacggattgccgggcgtgatgcaggcgaaaccgaattatca

SEQ ID NO: 156009 - DNA, 75 bp, synthetic construct
  source 1..75: mol_type = other DNA
gattacccgtctgttccatgctttccgtcgcgactcacatccaatggcagtcatgtgtggtattaccggcgcgct

SEQ ID NO: 156010 - DNA, 75 bp, synthetic construct
  source 1..75: mol_type = other DNA
ccgtactttatcgagaagaaactgtacccgaacgtcgatttctactctggtatcatcctgaaagcgatgggtatt

SEQ ID NO: 156011 - DNA, 75 bp, synthetic construct
  source 1..75: mol_type = other DNA
cgtcgcgactctcatccgatggcggtcatgtgcggtatcaccggcgcgctggcagcgttttatcacgattcactt

SEQ ID NO: 156012 - DNA, 75 bp, synthetic construct
  source 1..75: mol_type = other DNA
gggatgcaggagaaaccgaattatcatcccgtcttaatgagccgctggcaaatggtgccgtgatccacatcgtgc

SEQ ID NO: 156013 - DNA, 75 bp, synthetic construct
  source 1..75: mol_type = other DNA
tggctcttctggcgcgaacccgtttgcctgtatcgccgcaggtattgcttcgctgtgggggcccgctcatggcgg

SEQ ID NO: 156014 - DNA, 75 bp, synthetic construct
  source 1..75: mol_type = other DNA
ccaagaactccccgcacacaaacaacggataacggtaagcagaacacgtatttctcgtcactggataacatggtt

SEQ ID NO: 156015 - DNA, 75 bp, synthetic construct
  source 1..75: mol_type = other DNA
ggtgaaatgcgcgtggggtcccgtgtggtatctcaggagatcagcactgcagacgaaggcgatggtggtcaggtt

SEQ ID NO: 156016 - DNA, 75 bp, synthetic construct
  source 1..75: mol_type = other DNA
ggtgaaatgcgcgtgggctcccgtgtggtatctcaggagatcagcactgcagaggaaggcgatggtggtcaggtt

SEQ ID NO: 156017 - DNA, 75 bp, synthetic construct
  source 1..75: mol_type = other DNA
ggtgaaatgcgcgtgggttcccgggtggtatctcaggagatcagcactgcagaagaaggcgatggtggtcaggtt

SEQ ID NO: 156018 - DNA, 75 bp, synthetic construct
  source 1..75: mol_type = other DNA
aacattctttgctggaatgcgtgcgtaccgtgctggtggcgcaggcaggcggcaaaccgacgctgctggcggtgg

SEQ ID NO: 156019 - DNA, 75 bp, synthetic construct
  source 1..75: mol_type = other DNA
tgctggatcaacatattgagcaaccggaagagagcaccattttccagaaatacccgctggtgttaacccagaagc

SEQ ID NO: 156020 - DNA, 75 bp, synthetic construct
  source 1..75: mol_type = other DNA
tgctcagggcaatgttttgcctgttctgtacggtgaaatgcgtgtggggtcgcgggtggtatctcaggagatcag

SEQ ID NO: 156021 - DNA, 75 bp, synthetic construct
  source 1..75: mol_type = other DNA
caggggccagtatggtgctcggtggtgtggcgcagatgctggcaccgaaagccagaatgcccggagtatcagcca

SEQ ID NO: 156022 - DNA, 75 bp, synthetic construct
  source 1..75: mol_type = other DNA
gcggcgctgatggcggtggcatggtggaaccctgtgggctggctgggtgccgcggctgtatcgggcatgtatgcg

SEQ ID NO: 156023 - DNA, 75 bp, synthetic construct
  source 1..75: mol_type = other DNA
agcccggacgcccacagcgaccagcacggataacggtaagcagaacgcctatttctcgtcactggataacatggt

SEQ ID NO: 156024 - DNA, 75 bp, synthetic construct
  source 1..75: mol_type = other DNA
tgctggccccgaaggcaaaaacaccggagtacaaaagcacggataacggcagacagaacacgtacttttcctcgc

SEQ ID NO: 156025 - DNA, 75 bp, synthetic construct
  source 1..75: mol_type = other DNA
gactggccggagccggaaagggcggactgcagattgtgctgggggcggcggccatcgtggggtcgttcttcactg

SEQ ID NO: 156026 - DNA, 75 bp, synthetic construct
  source 1..75: mol_type = other DNA
accattaaatctttcgaccgaccgttttctgccgcgtccggcaaccggaaaccggtggtgaaaacagcatcttct

SEQ ID NO: 156027 - DNA, 75 bp, synthetic construct
  source 1..75: mol_type = other DNA
atggtggaaccctgttggctggctgggggccgcggctgtatcgggtctgtatgcagcaggggccagtatgatcct

SEQ ID NO: 156028 - DNA, 75 bp, synthetic construct
  source 1..75: mol_type = other DNA
cggcgctgattgcggtggcgtggtggaaccccgctggttggctaggagcggcagcaattacaggaatgtatagtg

SEQ ID NO: 156029 - DNA, 75 bp, synthetic construct
  source 1..75: mol_type = other DNA
cgctgactgcgaaattataccggaagtacagtttacaggtgtgattgatttatttttcgctgatgagatgcggaa

SEQ ID NO: 156030 - DNA, 75 bp, synthetic construct
  source 1..75: mol_type = other DNA
tgtgaaaggtaagtcgagcggacgtatcgacggcatggtagcgctggcgatgtctattggcgcgcagactagtga

SEQ ID NO: 156031 - DNA, 75 bp, synthetic construct
  source 1..75: mol_type = other DNA
agtaaggggattttctatccaatgctgttacatgcgggaataaacggctttgttatattgttaaatatattatag

SEQ ID NO: 156032 - DNA, 75 bp, synthetic construct
  source 1..75: mol_type = other DNA
atgaatgataacatatataaatacaataaagataatgcgatagcgtttcttctgcttgttgctatatcaacagtt

SEQ ID NO: 156033 - DNA, 75 bp, synthetic construct
  source 1..75: mol_type = other DNA
tgatagccaggccccggaagtcggtaatattattcttgcagcctattacggtacatcagacagcgatatgaccag

SEQ ID NO: 156034 - DNA, 75 bp, synthetic construct
  source 1..75: mol_type = other DNA
cgaatgcggcagcgtcacaacaatcagcagccacttctgcatccaccgcgaccacgaaagcgtcagaagcagcca

SEQ ID NO: 156035 - DNA, 75 bp, synthetic construct
  source 1..75: mol_type = other DNA
tttaaacgctcgaaggaaagagcaaccagaccatcggtgacggctaaagctcgtactgccgggaaatcaccatgg

SEQ ID NO: 156036 - DNA, 75 bp, synthetic construct
  source 1..75: mol_type = other DNA
gtgcagcttcctcggcaacggcggcagtaaattccgcaacggcggcaaaaacgtccgagacgaaggccaggtcat

SEQ ID NO: 156037 - DNA, 75 bp, synthetic construct
  source 1..75: mol_type = other DNA
gccacgaacgcttcagaggcggctacctcagcccgagatgcggaggcctcaaaagacgcggcaaaatcatcagaa

SEQ ID NO: 156038 - DNA, 75 bp, synthetic construct
  source 1..75: mol_type = other DNA
gtgcagcttcctcggcaacggcggcagcaaattccgctacggcggcaaaaacgtccgagacgaacgccaggtcat

SEQ ID NO: 156039 - DNA, 75 bp, synthetic construct
  source 1..75: mol_type = other DNA
gccacgaacgcttcagaggcggcaacctcagcccgtgatgcggaggcctcaaaagacgcggcaaaatcatcagaa

SEQ ID NO: 156040 - DNA, 75 bp, synthetic construct
  source 1..75: mol_type = other DNA
gccacgaaagcttcagaggcggccacctcagcccgtgatgcggaggcctcaaaagacgcggcaaaatcatcagaa

SEQ ID NO: 156041 - DNA, 75 bp, synthetic construct
  source 1..75: mol_type = other DNA
gccacgaaagcttcagaggcggctacctcagcccgcgatgcggaggcctcaaaagacgcggcaaaatcatcagaa

SEQ ID NO: 156042 - DNA, 75 bp, synthetic construct
  source 1..75: mol_type = other DNA
aagaaggttattatattaatataaattatatagtatcaatatattatgacaaggctgatgttgctaccgttactc

SEQ ID NO: 156043 - DNA, 75 bp, synthetic construct
  source 1..75: mol_type = other DNA
ttcttatgcgtatacaacattagattgagttattcacttttttcgaaagatttatccatattaattaaagaaaga

SEQ ID NO: 156044 - DNA, 75 bp, synthetic construct
  source 1..75: mol_type = other DNA
atgtatgatttttataagcatcgagaccatctggtaagatttgacggtaaagtctggaaagacgtaacacaaacc

SEQ ID NO: 156045 - DNA, 75 bp, synthetic construct
  source 1..75: mol_type = other DNA
ttgacgctcgcgatttttgccgttttatcgctgctggtggcgggggaattgcaggcaggagtggtggttggcgga

SEQ ID NO: 156046 - DNA, 75 bp, synthetic construct
  source 1..75: mol_type = other DNA
gcctggctcatcaacacgaaaattaatcaacctgctcgttggcctggcgtgaaggctcattctgccgcagttccg

SEQ ID NO: 156047 - DNA, 75 bp, synthetic construct
  source 1..75: mol_type = other DNA
tgagcgtaaatggtaaagcgttaagtaatgcgggagttgtgccgcctaaaagccagcgtcagacaagctggtgtc

SEQ ID NO: 156048 - DNA, 75 bp, synthetic construct
  source 1..75: mol_type = other DNA
agtaacttttgcacatgagacaaataactctgctagctttgccaccaccatttcaacagataatgccaacattac

SEQ ID NO: 156049 - DNA, 75 bp, synthetic construct
  source 1..75: mol_type = other DNA
caatggttcttacaggcaggtaaaactacatcacaggcttctgatgatgaaagttcagcttatcaactgggggta

SEQ ID NO: 156050 - DNA, 75 bp, synthetic construct
  source 1..75: mol_type = other DNA
gtgagctggcgatcagctggatgcatattccacaactgaatggtcaggatcagcaactgacactcacggttgggg

SEQ ID NO: 156051 - DNA, 75 bp, synthetic construct
  source 1..75: mol_type = other DNA
caattgctggggcgtatggtacgtactccactagcaagacgtattccgggtaatgagcgcttaaactcagtagaa

SEQ ID NO: 156052 - DNA, 75 bp, synthetic construct
  source 1..75: mol_type = other DNA
tagtacgcggattcgatgataaaggcgggcttttcgaggcaacccctgatgcacaggcttatacactgtgggata

SEQ ID NO: 156053 - DNA, 75 bp, synthetic construct
  source 1..75: mol_type = other DNA
ttgatggggcagtcaggaaagcccatgctgctttgcacgctgctctggacaagttccagacagaaaatgctgaaa

SEQ ID NO: 156054 - DNA, 75 bp, synthetic construct
  source 1..75: mol_type = other DNA
cgggcggagcattcactttgagccgctgctgccgggggagcggtgtacagccgcagcgagtcaatgtggctggtg

SEQ ID NO: 156055 - DNA, 75 bp, synthetic construct
  source 1..75: mol_type = other DNA
tcattgataatcagaggcctacattcttaaatgccagctctggaaacgtcacatttcaaaatggccccgcccttc

SEQ ID NO: 156056 - DNA, 75 bp, synthetic construct
  source 1..75: mol_type = other DNA
gcaggaagctctatttatcaccaatcatggacctgtataatggagaaatagtctcatataaccttactgagcgcc

SEQ ID NO: 156057 - DNA, 75 bp, synthetic construct
  source 1..75: mol_type = other DNA
atatgatgcgtatggtgcacagcagttctattttcctaatgtgctgaagtatgaccctgatcagtttaagcagca

SEQ ID NO: 156058 - DNA, 75 bp, synthetic construct
  source 1..75: mol_type = other DNA
gcttgtttccattaccacgcagcgtttaatacaataaatattgaaaatgtctatattttttacgatggaggacgc

SEQ ID NO: 156059 - DNA, 75 bp, synthetic construct
  source 1..75: mol_type = other DNA
tcactgtgcaaggtcactcgatggctgtgtatgacgcatttaatgcacgacagttctaccacccaaatgtactca

SEQ ID NO: 156060 - DNA, 75 bp, synthetic construct
  source 1..75: mol_type = other DNA
atcgcgtttttggtcacgcattacggctgaaaaataacgtgcgatcgaaatccaccggatcgtttatctcgcaga

SEQ ID NO: 156061 - DNA, 75 bp, synthetic construct
  source 1..75: mol_type = other DNA
atgaaaaaaaatgcccagtccgtggaagcctggctggaggcgatgatcgccgtggcgcgctattaccgcctcgat

SEQ ID NO: 156062 - DNA, 75 bp, synthetic construct
  source 1..75: mol_type = other DNA
tcaaaaatccttattgcttttcctcaagacattagctagcgaaaaatctgcagaaagtgcgtttgccgcctatga

SEQ ID NO: 156063 - DNA, 75 bp, synthetic construct
  source 1..75: mol_type = other DNA
atcgcggtatttgataatcagcagattggcgtgatcacccgccgcgacaatcacgacaatatcagcgttcagttc

SEQ ID NO: 156064 - DNA, 75 bp, synthetic construct
  source 1..75: mol_type = other DNA
ttcagcaacgcggtgttttattacgacgaagaagagaagattgccgatgtggcgattggcaaactcaacattcag

SEQ ID NO: 156065 - DNA, 75 bp, synthetic construct
  source 1..75: mol_type = other DNA
tccgcgaactggaatcggtgcgggagctgatcacctccaccaccattggcgcggtggcggatctgccgttcttcc

SEQ ID NO: 156066 - DNA, 75 bp, synthetic construct
  source 1..75: mol_type = other DNA
ccgatcatcggtgtactgatttttgacggtaaatggggtccgcaattacacatcatcactattctggtgatttgt

SEQ ID NO: 156067 - DNA, 75 bp, synthetic construct
  source 1..75: mol_type = other DNA
gaagaatgtgatgcttaccactgccgttgtgtttagcgccggtagtctggcggccgcgtttgccgccacattacc

SEQ ID NO: 156068 - DNA, 75 bp, synthetic construct
  source 1..75: mol_type = other DNA
ggcggattatctttgtctcgtctgaatccggcgtggcaatccctggcgacatgatcaactacggcgtcaccaaag

SEQ ID NO: 156069 - DNA, 75 bp, synthetic construct
  source 1..75: mol_type = other DNA
gcgttgagcaattcaatgaagcggttaagctgccacccgcacacaatccagcatcacgaatttggcagcgcccgt

SEQ ID NO: 156070 - DNA, 75 bp, synthetic construct
  source 1..75: mol_type = other DNA
gactgccataaacatccctcctcactgacgcagtttctcgcacaaaaaaagccgcctttctggatgaccccctgg

SEQ ID NO: 156071 - DNA, 75 bp, synthetic construct
  source 1..75: mol_type = other DNA
ttttattgttttttgatgtttttcgacatagaaaaattataaaaggtacattggttatttttttagccatgtctt

SEQ ID NO: 156072 - DNA, 75 bp, synthetic construct
  source 1..75: mol_type = other DNA
gcgctgtgtattgccgataacatcaaactggaataccaggaggtgacggacccgtataccaaagaaagatacttt

SEQ ID NO: 156073 - DNA, 75 bp, synthetic construct
  source 1..75: mol_type = other DNA
aaaaaccgtccagccgctgatgaatgcgctttgtattgccgacaatatcaaactggaataccacgaggttacgga

SEQ ID NO: 156074 - DNA, 75 bp, synthetic construct
  source 1..75: mol_type = other DNA
ttggagaagaacaaaaggcccttttgactgcggtactgtgtcagcctgaatttgttgctgctatatgttcctctt

SEQ ID NO: 156075 - DNA, 75 bp, synthetic construct
  source 1..75: mol_type = other DNA
cccgagcggtgaaacgtccggttaaagtgatgctcccccgcccctctattcccaataacacggaaaatcaccgct

SEQ ID NO: 156076 - DNA, 75 bp, synthetic construct
  source 1..75: mol_type = other DNA
gtcagtaaactggcttcttatgtcccttgccttcaactagctcaattgatgttcactctttctgcgtctgcaaat

SEQ ID NO: 156077 - DNA, 75 bp, synthetic construct
  source 1..75: mol_type = other DNA
ggtcttacgtacccgtcagtcgcccgatggctgcgagggtggctgttactactacctcgtggatatggaggagaa

SEQ ID NO: 156078 - DNA, 75 bp, synthetic construct
  source 1..75: mol_type = other DNA
gatagtaagtttcccacccgctgccactttgggcgtaacagctgcgcatggctcctatctgacattctttggtgg

SEQ ID NO: 156079 - DNA, 75 bp, synthetic construct
  source 1..75: mol_type = other DNA
cctcaaaacgccgtgtattctccactgggatttcagtcacttcgtcgttctggtcagcgtaaagcgtaaccgtta

SEQ ID NO: 156080 - DNA, 75 bp, synthetic construct
  source 1..75: mol_type = other DNA
gggtgatgcagtgcaacgaatgacgggttcattgtcgcaaatggtgtattcaattgctcaacaagcatccgatat

SEQ ID NO: 156081 - DNA, 75 bp, synthetic construct
  source 1..75: mol_type = other DNA
tccttggtctggcaaatgttttataatggcttacgggaaacagaataccctaacactttcacagagatgtataaa

SEQ ID NO: 156082 - DNA, 75 bp, synthetic construct
  source 1..75: mol_type = other DNA
aagaaaactacagcgtttacggtgtgcgtaaggtctggcgacagctaaaacgtgaaggtgtcggcgttgcccgct

SEQ ID NO: 156083 - DNA, 75 bp, synthetic construct
  source 1..75: mol_type = other DNA
ttttagcggcgaagctgattcccttgcaccgacattactcaaattaaccgacacaggcggaagcggtggaatggc

SEQ ID NO: 156084 - DNA, 75 bp, synthetic construct
  source 1..75: mol_type = other DNA
aagtcagagaaatcataacgctagataatgaaaataattttgaattgggcgaggcgattatctctgtgatagaga

SEQ ID NO: 156085 - DNA, 75 bp, synthetic construct
  source 1..75: mol_type = other DNA
cccatcacttcaaagaatgacattaatgtaatatgcaaaaaaattgaaaacaaaagcattgtaattacatcagca

SEQ ID NO: 156086 - DNA, 75 bp, synthetic construct
  source 1..75: mol_type = other DNA
cgcacgctcgcgctggcaggtgatggtgacgtcgtttactgcgatccgccttatgagccgctgcccggcaccgct

SEQ ID NO: 156087 - DNA, 75 bp, synthetic construct
  source 1..75: mol_type = other DNA
agtaacgattaccttaaggttgaagagcaattgtacgatgcccttcattcattgcataatcagtataatggtttt

SEQ ID NO: 156088 - DNA, 75 bp, synthetic construct
  source 1..75: mol_type = other DNA
gcagtccatcgtttggcgaatattattcccatccgcgtctgttctggctaagtcagacgccattcgagcagcgcc

SEQ ID NO: 156089 - DNA, 75 bp, synthetic construct
  source 1..75: mol_type = other DNA
cggcgtatggcccacatgccgccaatgtcgttggactgaccgaccagaccgatctcttctacaccatgaaagccg

SEQ ID NO: 156090 - DNA, 75 bp, synthetic construct
  source 1..75: mol_type = other DNA
acatgggtcgaatgcacaagagctgcatacgtaagagcaaaagacaagggtgaattaaccagagttgttgcccat

SEQ ID NO: 156091 - DNA, 75 bp, synthetic construct
  source 1..75: mol_type = other DNA
ttgaattaccaattgcgttacaaatcaaccaaggcgggtgcgacaggcggtaatgcgtccgcggtactctatttt

SEQ ID NO: 156092 - DNA, 75 bp, synthetic construct
  source 1..75: mol_type = other DNA
tgccgcgcgtggactggaaatgacaggtgttgacctcgaaacaatggaagaagtctggcaacaggtaaaacggca

SEQ ID NO: 156093 - DNA, 75 bp, synthetic construct
  source 1..75: mol_type = other DNA
caaatggaaatataaaagttgccactcagacaaattattgtctcagtatcaatagagataatgacgatagcaaag

SEQ ID NO: 156094 - DNA, 75 bp, synthetic construct
  source 1..75: mol_type = other DNA
tttgatggcgcatccatttaaacatgaaggtttggtgatgagtgtatttgatagccaattctctaatggttctgc

SEQ ID NO: 156095 - DNA, 75 bp, synthetic construct
  source 1..75: mol_type = other DNA
gttgcgggatattgcggttcagtaccacggaacgcagcaattgcgggagaaaattgccagagcagtgaacaactc

SEQ ID NO: 156096 - DNA, 75 bp, synthetic construct
  source 1..75: mol_type = other DNA
gatggtgttaaatttataccagaggtatggttttacagtacgatatcaaaaaaatacaaattttactatgtaaat

SEQ ID NO: 156097 - DNA, 75 bp, synthetic construct
  source 1..75: mol_type = other DNA
ctcaaaggctactctcattcaaacgcgtcagcgagtccctgaaagcccgttgcgggaagagcaaattgtggtgta

SEQ ID NO: 156098 - DNA, 75 bp, synthetic construct
  source 1..75: mol_type = other DNA
tcctgacagcctctaacctgttgatcatgactcaacacgttgcgattaccgggctgctggcaatcggaatgacgc

SEQ ID NO: 156099 - DNA, 75 bp, synthetic construct
  source 1..75: mol_type = other DNA
ggtctattcagtcaaattcagctttattcgctctggaatcggtattagacgtaagttcttacctggaaaataact

SEQ ID NO: 156100 - DNA, 75 bp, synthetic construct
  source 1..75: mol_type = other DNA
atgtggaatattatggtgctgatgaatatttatatcccggattggcagagaaaaagcttttttcatgcactattt

SEQ ID NO: 156101 - DNA, 75 bp, synthetic construct
  source 1..75: mol_type = other DNA
ctttctaaaaaatcctattggtttatttaaaacaattacgagatatctccaggcatgtatatgcaaattttttta

SEQ ID NO: 156102 - DNA, 75 bp, synthetic construct
  source 1..75: mol_type = other DNA
tatacgactttattctttcatggggtaatttttctgatatcagaaaagctggggatgttatcaaaagaaaagatc

SEQ ID NO: 156103 - DNA, 75 bp, synthetic construct
  source 1..75: mol_type = other DNA
aataatttacgagaaggatttttaaaaactttagctcattatgctcaatataacagcccatcaactgcgatgtta

SEQ ID NO: 156104 - DNA, 75 bp, synthetic construct
  source 1..75: mol_type = other DNA
aatgtaatggtgaggataaccaaaagtttacgataagtcaaaataccatcagaccttatgataagccagatgaat

SEQ ID NO: 156105 - DNA, 75 bp, synthetic construct
  source 1..75: mol_type = other DNA
atatccacaagtcgggaactttgcatgaagcgccaagccctatcattccgctaaattggtcgaaagcttcaatga

SEQ ID NO: 156106 - DNA, 75 bp, synthetic construct
  source 1..75: mol_type = other DNA
taaaaatagtaaaggtgaggtctcatatttattaaaaataccaagaataaaacaaaagaatgattttagagagct

SEQ ID NO: 156107 - DNA, 75 bp, synthetic construct
  source 1..75: mol_type = other DNA
caaacttgtagaggaaaggagtaaagtccgcgaaattactaaagatttaagagttgcagagtctcttgatagaac

SEQ ID NO: 156108 - DNA, 75 bp, synthetic construct
  source 1..75: mol_type = other DNA
ctgcgctttgcaataaagaaaccccaatcactgatgctgtaaatgctatattgcaaccatcgccagatgttatcg

SEQ ID NO: 156109 - DNA, 75 bp, synthetic construct
  source 1..75: mol_type = other DNA
gcgagatgggtactattgctcaacgtacaccagcggatgaggttcgccacaagtacttacgagagttgtcgaagc

SEQ ID NO: 156110 - DNA, 75 bp, synthetic construct
  source 1..75: mol_type = other DNA
ggtgcagaagtccgacatctcaccctgatgacagatgatgataaaaatggattaatgactgttattaatggttta

SEQ ID NO: 156111 - DNA, 75 bp, synthetic construct
  source 1..75: mol_type = other DNA
ggcccaccggttaatcgtcccttcatcggatattgacctaggggagaccgagcttccggtgctcggcgagatcac

SEQ ID NO: 156112 - DNA, 75 bp, synthetic construct
  source 1..75: mol_type = other DNA
gcagcataaccgcgtcgacgccatttttctggatatcaatattccgtcgctggatggcgtgttgctggcgcaaaa

SEQ ID NO: 156113 - DNA, 75 bp, synthetic construct
  source 1..75: mol_type = other DNA
aatcgttatccagtacgctccattacattggggccacacaacgcaaagtagatgatttcagtaataaatattcaa

SEQ ID NO: 156114 - DNA, 75 bp, synthetic construct
  source 1..75: mol_type = other DNA
ccctatatagcagaggcgtttaaacgtgacctcgagtttttaactggttatccgaaatacctgttggatgagttc

SEQ ID NO: 156115 - DNA, 75 bp, synthetic construct
  source 1..75: mol_type = other DNA
cgagattaaaggccgatgttgatatgtatctgcgccagatttgcgacgagtatcttgtggcactcacagctgaac

SEQ ID NO: 156116 - DNA, 75 bp, synthetic construct
  source 1..75: mol_type = other DNA
tcatcctcacgagcactctgtttttctgcttttcagttctgtttggctctaatggcggcatgttatgcagatgtc

SEQ ID NO: 156117 - DNA, 75 bp, synthetic construct
  source 1..75: mol_type = other DNA
tggggtgatgttggaatggctcttgcttattgtgctctcgcaggtggtgcagtagtcggtggtacgtgggcgctg

SEQ ID NO: 156118 - DNA, 75 bp, synthetic construct
  source 1..75: mol_type = other DNA
atgtttttggagattattcgaatgaataagtttgctaacgtaaatcgttttgtttttgcattatttttcatggtg

SEQ ID NO: 156119 - DNA, 75 bp, synthetic construct
  source 1..75: mol_type = other DNA
cagatctgcaaatccatcactgcgtcagcagactgtgaggagatcattaagctcatctatcttcgtcgctacttt

SEQ ID NO: 156120 - DNA, 75 bp, synthetic construct
  source 1..75: mol_type = other DNA
gagtgtgctgcgtgaatcacaacgggagcaggaagcggtccgggaggttgcccgggaaaacctgctgcaggagcg

SEQ ID NO: 156121 - DNA, 75 bp, synthetic construct
  source 1..75: mol_type = other DNA
ggagggccattccggcagtacgttcagaatatggcgcagatacgcttccggatcgataccgctcagacgcaggta

SEQ ID NO: 156122 - DNA, 75 bp, synthetic construct
  source 1..75: mol_type = other DNA
gcgtgcggctcgcgcgggataatccgcagagcggcgtggtggtgcggctcgcaggtgaggcgaggccgtggaacc

SEQ ID NO: 156123 - DNA, 75 bp, synthetic construct
  source 1..75: mol_type = other DNA
cagtggcacgatttcgcacgccggtgaaaagctgaccgccggacgcgatgcaacgcttaccgcgaaaaacatcag

SEQ ID NO: 156124 - DNA, 75 bp, synthetic construct
  source 1..75: mol_type = other DNA
ggctttaccggcacggcgggcagtctggtgttaacggcggccgggtcgattatcaacaccgcgctgctgtatgcg

SEQ ID NO: 156125 - DNA, 75 bp, synthetic construct
  source 1..75: mol_type = other DNA
gtcgtgaatattgccacgccgaacggggccgggatttcgcacaaccagtttaaggattacaacgtcggcaaagag

SEQ ID NO: 156126 - DNA, 75 bp, synthetic construct
  source 1..75: mol_type = other DNA
gattgatgctgctatggcctccatcagtctgattcagctgaaattgcaggccgggcggaagctgacgcaagcaga

SEQ ID NO: 156127 - DNA, 75 bp, synthetic construct
  source 1..75: mol_type = other DNA
gaaaatacaaccactatcgccccgttaacgccatacgataaatgggatggtgagaaatgggtgacggatactgag

SEQ ID NO: 156128 - DNA, 75 bp, synthetic construct
  source 1..75: mol_type = other DNA
actggaaaggctggacaatgattcagagagattatttaacggaaaagaatccgaaacgtaatccaggaaaactcc

SEQ ID NO: 156129 - DNA, 75 bp, synthetic construct
  source 1..75: mol_type = other DNA
cagccagagggctcgatggcgaaatttatctcgccggggtgtaaatacccgcagccgcacgtggcgctcccggcc

SEQ ID NO: 156130 - DNA, 75 bp, synthetic construct
  source 1..75: mol_type = other DNA
ccgacctacacacagcactgaactcgtaggcctgataagacacaacagcgtcgcatcaggcgctgcggtgtatac

SEQ ID NO: 156131 - DNA, 75 bp, synthetic construct
  source 1..75: mol_type = other DNA
cttgattatattgatgcgctgaatgccattaaaccctcagattttccaactgcgatactacctgagccgccctca

SEQ ID NO: 156132 - DNA, 75 bp, synthetic construct
  source 1..75: mol_type = other DNA
aacttccgggaggcctttgccctcagcccctgacggcgcaggcttgccgccacggtttttacgttaaagtggtaa

SEQ ID NO: 156133 - DNA, 75 bp, synthetic construct
  source 1..75: mol_type = other DNA
ggtttcattattatcggcgcaatttatctgaccggtattttcatgacctggcgtagagcgcgtggttttattaaa

SEQ ID NO: 156134 - DNA, 75 bp, synthetic construct
  source 1..75: mol_type = other DNA
ctggtggcgacaatcctccttcatgagattacgctgcgccgacgtcgcaatttaaatatgggataccaaacttgt

SEQ ID NO: 156135 - DNA, 75 bp, synthetic construct
  source 1..75: mol_type = other DNA
gttgtatggaactatcagtcgtgatacaccggttgattattctaaaccgatggctgatgtttatattcgtggaga

SEQ ID NO: 156136 - DNA, 75 bp, synthetic construct
  source 1..75: mol_type = other DNA
acagtatataagtgtagtagagtcgacccattaagtatttccagtggcgctaaggctcaggtttatttttatatc

SEQ ID NO: 156137 - DNA, 75 bp, synthetic construct
  source 1..75: mol_type = other DNA
gatttgttaatgcaccattcgagtatcatgctaacaatccctctggaacaacagtatataagtgtagtagagtcg

SEQ ID NO: 156138 - DNA, 75 bp, synthetic construct
  source 1..75: mol_type = other DNA
ttttcacccttgatgcgtttttcgccggatgcatcacgcagtacggtttcaccgttagccagcaggtcaaactga

SEQ ID NO: 156139 - DNA, 75 bp, synthetic construct
  source 1..75: mol_type = other DNA
aagttggcgttcaccgcgttatccacgttgtacttaccagatgccgatttttcaaactccagaccgaagcggatg

SEQ ID NO: 156140 - DNA, 75 bp, synthetic construct
  source 1..75: mol_type = other DNA
gccgatggagcagtcagtgcaaccagtaccgatgctgtaaatggtaaacagttatatgaaacgaatcaaaaagtt

SEQ ID NO: 156141 - DNA, 75 bp, synthetic construct
  source 1..75: mol_type = other DNA
catggtgcagctcggtgtggataaagcgacggctgaaagctacgtcgaaacctatgacgggatgaagactgtagc

SEQ ID NO: 156142 - DNA, 75 bp, synthetic construct
  source 1..75: mol_type = other DNA
ccttcctgtatttcccttcctctatcacagtgcactttacttaatagggtgggatgtgttcattacatttattgt

SEQ ID NO: 156143 - DNA, 75 bp, synthetic construct
  source 1..75: mol_type = other DNA
attcaaaagatggatatcatgaagaaacacacaattatgatgaaactcattttaataataaaataatcgttccat

SEQ ID NO: 156144 - DNA, 75 bp, synthetic construct
  source 1..75: mol_type = other DNA
aacccagtgatgttgaatattactttgaaccagtgacgatacaggagtcaggaaccagcatattaaaaaatgagt

SEQ ID NO: 156145 - DNA, 75 bp, synthetic construct
  source 1..75: mol_type = other DNA
ttaatcagcaacaacaaaataatgatacctcgcttggtacgaatttaagctggagaactcccatcgccataatag

SEQ ID NO: 156146 - DNA, 75 bp, synthetic construct
  source 1..75: mol_type = other DNA
ggttcagttctggtactggcgttgatctaccgggtgctggtgattgagtcgtttgatgtcactttcctgaaagtt

SEQ ID NO: 156147 - DNA, 75 bp, synthetic construct
  source 1..75: mol_type = other DNA
ttcttttgttgacggaagcactcctgttactgagattcacagttttgcgacgattagcgataacagttttgctgt

SEQ ID NO: 156148 - DNA, 75 bp, synthetic construct
  source 1..75: mol_type = other DNA
acaacgaatacaccggtaacggcgttacgacatcgtttccgtatacttttcgagttttcagaaaatcagacctgg

SEQ ID NO: 156149 - DNA, 75 bp, synthetic construct
  source 1..75: mol_type = other DNA
taccaactgatatgggagcaacaagcgttattggtgagaaagctggcaatgtaactttttctgctgcccctgcga

SEQ ID NO: 156150 - DNA, 75 bp, synthetic construct
  source 1..75: mol_type = other DNA
tgatgctttaagttatgctggggttcattctaatgtaaattactataatcttaatccacatctggatgtgggtat

SEQ ID NO: 156151 - DNA, 75 bp, synthetic construct
  source 1..75: mol_type = other DNA
atcactacctctttttacgctactgaatccagtagcgataattcaatggttgtaacatcaaacccaaatgtaggg

SEQ ID NO: 156152 - DNA, 75 bp, synthetic construct
  source 1..75: mol_type = other DNA
gaaatcaaagtcaatggtggcgaattgccgactgatatggggacaacaaccgtttatggcgagaaagtcggtagt

SEQ ID NO: 156153 - DNA, 75 bp, synthetic construct
  source 1..75: mol_type = other DNA
aatttatgataaaaataataaggaaatcaacgttaacggtggtgaactgccgacagatatgggtaaatcaaacgt

SEQ ID NO: 156154 - DNA, 75 bp, synthetic construct
  source 1..75: mol_type = other DNA
gtttggtaagtaaccgttatggtacgacgaaagtgtttgaaagccagaatttgacggataaacagatccacaatt

SEQ ID NO: 156155 - DNA, 75 bp, synthetic construct
  source 1..75: mol_type = other DNA
ggcaatggcggtttatgctggcgggattctggtggcatgggtttgcgggtttattttcaccacgctctttggctg

SEQ ID NO: 156156 - DNA, 75 bp, synthetic construct
  source 1..75: mol_type = other DNA
tagttttctggtcactggaaagaaattacatagttgcgatgtaatttcctcagaattatttgaaataaaccagtc

SEQ ID NO: 156157 - DNA, 75 bp, synthetic construct
  source 1..75: mol_type = other DNA
aaacgtataaagaaaaaatattcgatattaatgaagagctcattcaagttaaacttattttacggtctatagatg

SEQ ID NO: 156158 - DNA, 75 bp, synthetic construct
  source 1..75: mol_type = other DNA
ccgggttaatgggctcattcaactggatcaggcttccgtatatcgcaccgcgttgtcgaacaacgatatcgctat

SEQ ID NO: 156159 - DNA, 75 bp, synthetic construct
  source 1..75: mol_type = other DNA
tcgatagcgtcgccaagatttatcacacgccgccacccgccttaaaacaggacaaacttgcctttatggctgcga

SEQ ID NO: 156160 - DNA, 75 bp, synthetic construct
  source 1..75: mol_type = other DNA
tactggcgggcgcaaccgcacagtgcattacgcagtcaggtacgcggggcgattattcccggtctgctgggcgtt

SEQ ID NO: 156161 - DNA, 75 bp, synthetic construct
  source 1..75: mol_type = other DNA
aaattagagattggtcgtaatagtatttcacttaaagatgctcactcagtggttcaatctgtagttaatgattat

SEQ ID NO: 156162 - DNA, 75 bp, synthetic construct
  source 1..75: mol_type = other DNA
tgcgatgggttgccagaaagatattgcagagaagatacaaaaacagggaggtgattatttattcgctgtaaaagg

SEQ ID NO: 156163 - DNA, 75 bp, synthetic construct
  source 1..75: mol_type = other DNA
ggtgtaaaagatgataatcttcacaaactaggaagcggtaagctgattattaatggtaatggtataaatacaggg

SEQ ID NO: 156164 - DNA, 75 bp, synthetic construct
  source 1..75: mol_type = other DNA
tctactactataactaatccatatgctttgattgaagttaaagatgataatggtgatgaatggatagtattagaa

SEQ ID NO: 156165 - DNA, 75 bp, synthetic construct
  source 1..75: mol_type = other DNA
ataggaactggacgtggacgtagagaggaattccaagaacggattggtaaaaaataccaatggattgcttattat

SEQ ID NO: 156166 - DNA, 75 bp, synthetic construct
  source 1..75: mol_type = other DNA
ggttcaatctgtagttaatgattatgttgctgataaaaccttcctcagcgccttgattgacgaaggattattgac

SEQ ID NO: 156167 - DNA, 75 bp, synthetic construct
  source 1..75: mol_type = other DNA
caggatgtctggctgacgctgctggagcgtgtggggcacaccatcgtctatggcaccacccgtgtggggaaaaca

SEQ ID NO: 156168 - DNA, 75 bp, synthetic construct
  source 1..75: mol_type = other DNA
cgggctctggtggcactgggggaacgtccggattacacgctgattatgcgctatgtgaataatattgccgatctg

SEQ ID NO: 156169 - DNA, 75 bp, synthetic construct
  source 1..75: mol_type = other DNA
tatcactccggtgaaggatggtggaatgctccaccttcagtacaggcgatagcgacggaggagggaggtgaccat

SEQ ID NO: 156170 - DNA, 75 bp, synthetic construct
  source 1..75: mol_type = other DNA
actgctgcaatcgcgcatgattctcggtaaaaccattgctgaactgaatctgcgcgacatggttgagcagaagta

SEQ ID NO: 156171 - DNA, 75 bp, synthetic construct
  source 1..75: mol_type = other DNA
atgctgctggccctgcgacgcggctggcagggatggcaaatcgtacgctaccaccgcaacctcctgcacctgccg

SEQ ID NO: 156172 - DNA, 75 bp, synthetic construct
  source 1..75: mol_type = other DNA
attgtcgcctcgctgctgccgctgctggaaaagctgaccaccggcacgctcgccgccctgctcgccccggactat

SEQ ID NO: 156173 - DNA, 75 bp, synthetic construct
  source 1..75: mol_type = other DNA
tgtcagtcatatttataattctttcaatattaatcatttttattgctggtggcgtggattcttccatcctaaggt

SEQ ID NO: 156174 - DNA, 75 bp, synthetic construct
  source 1..75: mol_type = other DNA
aattcgcctcaataaaaatcgaaatattaactgttttgtaaaagctcatccaagttcgtacatgtggaatgaaaa

SEQ ID NO: 156175 - DNA, 75 bp, synthetic construct
  source 1..75: mol_type = other DNA
aagcggttatttctattcctgttgtcccacaggtgactggtgtggtgattgaagtgacgggtgatgctgccaact

SEQ ID NO: 156176 - DNA, 75 bp, synthetic construct
  source 1..75: mol_type = other DNA
tatacaaacacggtatgcatgccggtctgccggctggcggggcgggtaaaaatgtggtgaacctgcactgtgatg

SEQ ID NO: 156177 - DNA, 75 bp, synthetic construct
  source 1..75: mol_type = other DNA
ctctgctgcgtccggctgtggaactgaataccgccgtggtggcagcaacggcggccggtgtctgtgtgacagctc

SEQ ID NO: 156178 - DNA, 75 bp, synthetic construct
  source 1..75: mol_type = other DNA
tggtagtgacttttttaacagtataatagctaaggaaataggtgcttatgcttattacgatgctatagtttatta

SEQ ID NO: 156179 - DNA, 75 bp, synthetic construct
  source 1..75: mol_type = other DNA
gaggttaaagcaacaggtgatttcaaaatattcgtgacggacaccggtgccagcccggcagcaggagataacctt

SEQ ID NO: 156180 - DNA, 75 bp, synthetic construct
  source 1..75: mol_type = other DNA
atagattacaacagttagaagatgcgtgtcgtgatattattaaaattaacatgtggtatgaactccccgattatg

SEQ ID NO: 156181 - DNA, 75 bp, synthetic construct
  source 1..75: mol_type = other DNA
gtggctggattatctggacgcactggagctggtcgatacttccagtgcgccagatattgaatggcctactcctcc

SEQ ID NO: 156182 - DNA, 75 bp, synthetic construct
  source 1..75: mol_type = other DNA
cgccatctaccagaaacagacggtgccgcaaatcgtcgaaaaaatcctgcgcgagcgtcatcaaatgcgcggtca

SEQ ID NO: 156183 - DNA, 75 bp, synthetic construct
  source 1..75: mol_type = other DNA
gcgagaacgactaccacggtggcgatggtccggtgagcgtcactacctccaaacccggcgtcaatccgctgtttg

SEQ ID NO: 156184 - DNA, 75 bp, synthetic construct
  source 1..75: mol_type = other DNA
tcatgccaggcgcaggaggaacgcaacgtttaatccgtagtgtcggtaaatcgttagccagcaaaatggtgctga

SEQ ID NO: 156185 - DNA, 75 bp, synthetic construct
  source 1..75: mol_type = other DNA
tggcgcaaaatgggcttaccatcgacagcctgagtaaccttaacgccgggcttatcaaagcaggcggtgggctgg

SEQ ID NO: 156186 - DNA, 75 bp, synthetic construct
  source 1..75: mol_type = other DNA
aaacatgacggtgaacgcccgcgaaaaactcacacacagtggcaaaagcagtgcggcatcgctcagcctcagcgc

SEQ ID NO: 156187 - DNA, 75 bp, synthetic construct
  source 1..75: mol_type = other DNA
tagccagacgcgaactgacgttaccagcaatggaggcgcatcaagaattgcctccggcaaaaatctcactattaa

SEQ ID NO: 156188 - DNA, 75 bp, synthetic construct
  source 1..75: mol_type = other DNA
cgccatctaccagaatcagacggtgccgcaaatcgtcgaaaaaatcctgcgcgagcgacatcacatgcgcggtca
